United States Patent Application Publication US 2007/0061916 A1 - sequence listing, part 11

SEQ ID NO: 50752 - DNA, 587 bp, Gossypium hirsutum
  Clone ID: LIB3829-032-Q6-K6-G11
ttttaatatattttaatatttacaacatggtattagagtagtgtgaaattttcgtaaagaaattttatcatttaagtgtttaattcggtaaaaagaactaaatcatataaagcataaaaattgtgttctataagataaaggtatttaatagctatagaacattagagtatgagtccttaagttgtaaatagaccattaatttataatggacaagtttggacatcattaatgtgactaagtaaggttatataagtaatttaataattaaataattaaaataggtaaaacaaaacaaaattcatttgttcatcttcttttagccgaaattctaaggaagaaacttcgccatttttaagcttcaacattcggccaactcttggtattgcatatcaagaaagaaagaaatcgaagttagatcgaggaaagttgaaagttttagagtaatcgatccgatttgccaactccgaatacgaggtaagttcgtaagtaataaaatgtttttgaaattaaatataatgtttttaccttgctgaaaatttaattgtacatggttataaattgtcgatcttgaattgtttatgaatata

SEQ ID NO: 50753 - DNA, 583 bp, Gossypium hirsutum
  unsure (1)..(583): unsure at all n locations
  Clone ID: LIB3829-032-Q6-K6-G7
canaatgagttgaaaaaacgagattttcaaaagaagaaaaaaaaacaactccgcgaaaagaacaccgacgatctttagatctcgccaatcgccgatcaaatgattctccggcgaagaaaacttcaaagaagattgctcagaagagtttaatcgaagcattcatttcgccgaacgaagatgatttacctaatatttctgaagagtccattgatttctcttcaatttctgccgtttcagatactaatttcaactttgaaactactgagagcattgccatcacatcgaatccattactttcaagttcatcagaaactttcatatcatctgaaatcggtccttattcaaagataagcgctgcaaatagggatgaaccaattgacttttcaaagactggtttagcggaagtagagatttttctggatcttctaaaacaagctcgattccaagtattgaattcagctcacgtggagaacaaatccagnaaggttctagatgcattaatcgagttcactattaaggagttttatgctatgcctcaagagatagataagctacaggaacttgtttctagaaatgcttatgt

SEQ ID NO: 50754 - DNA, 569 bp, Gossypium hirsutum
  Clone ID: LIB3829-032-Q6-K6-H11
gctgtgtaaagaacctccctagaaaaagaagacttgcatctaaagccacccaaaaccccagttatccaatcagaaaatatgttgatagagaaccaaaatctttcccacccagtccctgaccatcctgatcccataacttcaaatatgtccaaaatcaatgctaattggaacccacatcctgcaaatattctaacacaagctgggactgggagcagtaatgaaaaattaaagttggaatcaaagcattcagccgagcaactgacttcgacatcggaatgcaatgaggaaaaattggtggcaagtactgtaaacacaactatgtcgaaccaactttctttccctacccagccccagatcccactccatgtgcaaaataatccctggtcgattcagtcacaattggattcatcagtcctccaagctcatcaaatgcttgtatcccaagctgatattagtactttaaacagctttcttcctttctcagacaccgatgagtggacgtcaaatctttcttcttgccaacctctttctggggcgtacaaatcacctggtccgataccaatggttgg

SEQ ID NO: 50755 - DNA, 480 bp, Gossypium hirsutum
  Clone ID: LIB3829-032-Q6-N6-B10
accaattgaaaggtcgaatcatatactcagaaaatagttaaaagatcatttgcagttaacagatgttggattacacaatacatttacgttaaaaatctgattaagtttccaacgtgaactagaatattatctaaaagtttttcttccaacataattgagccttgactgtctacttctcaccggtgtgcaccagttctctccaatagccatcttggctctcattttcttgtactccctggatcttaaaactccctcaagaatgtttttatcttcacaaatttcatgtctagaaagagatgcgaggcccggaagtatgtccttttgaaaatcctttagtcttcttcctcttctcaacttgataccaaaatcttttgtctgtccatcacttacttcaaatggcttcgatgttacagaatattcatcagcaccagtttctgcctgttccaaagtcattaactcaaaagaaacaatggaacgctg

SEQ ID NO: 50756 - DNA, 430 bp, Gossypium hirsutum
  Clone ID: LIB3829-032-Q6-N6-B11
cctaccccaaatgtaatgtatatatatatggacaatgaaaagatttatcttccatagggaaacagggtttctttatttatactaaaagccattccaaagaggccgaactgatataaaagcatcatcaaacatatttacattcactagtgcatcaaaacgtaacgataacttcatcatgttatgcttggataccaggagttgcatccgtgtttgagtcatttagtgttggccgagttgcaatcggtggaagattattgggacgcctgtatgccgatggggttgttggggtacccggtgttcttggagttaggtaaggggaaggggtgttcggggttcttggggacaagttgacaaactctagcgcttgttgtctcagttctaggggggaatcagcgacacacacaatccttggcccagcaccggttgaaca

SEQ ID NO: 50757 - DNA, 467 bp, Gossypium hirsutum
  Clone ID: LIB3829-032-Q6-N6-B8
aaaagcaagttggcaggttatatatatggtaatatgtcgtgtatatgtatgtgtacatatattatatagatatagatatagatatagatatcgatatatacatcaaaagagcacacttgcgttatacagtaggctccaccgacaaatagacttgtatttttcgcacaccaacaatttatggaatgtggaaactagaagggagagcagggttacaagactaattacttgtatcatctacatttctgccggaaccaccagatttagaactcccttttcccctgccccctcttgtcttgctagtcccacccgtatttttcgagctcgttgtcttactgcaggcagctgcagcctgggaatcgacatctgccaggccattctcaagtgctctaaccaaattctcaaagtaattttttgtcacactagttagcccagctaactttgcacgaaagtcatcaaactcctttgat

SEQ ID NO: 50758 - DNA, 451 bp, Gossypium hirsutum
  unsure (1)..(451): unsure at all n locations
  Clone ID: LIB3829-032-Q6-N6-D11
ggctaaaccgtagtttaaatcaatttacttgaattatctttcactcacaaccgatgtggtcaaatgtcaacgatttaacgcactcaacggttacgattgactctgccaaaatcagcaagcttcctggaccgattcgcgtgaaatcctgcggcgctcgccagatgcggcttcttcgtcgacggtcgagcttctccgctgaacgacatgtccggtggcaatccgcccttctggttccagtgcgtgttcgggctcggcctcatgagtgggcttaagcaaaacgctaatcccgaaatgttgttcctcgtcccgcccctcggtctcctcgctgccgtcggtgtcattttccatcgcggcgatgcctccggcgaggctccagatggcggntgatcacactcgtctcctgaatccacttcaatcgctggcgacattccccgatctatgattctacatg

SEQ ID NO: 50759 - DNA, 349 bp, Gossypium hirsutum
  Clone ID: LIB3829-032-Q6-N6-D9
cgatctttttcggtggatgggtggctctgtagaccctatttatatacttcttcttgccggagacaggaattaccaatcgagaaagtggaacaattgtggaaagaacactggttttggaaaagattgtgggagatgaagctgatgacagtatttacaagctagacaaatgataattagggtttgattcgcaacatattttactcttcttctttattgtcttttgcccacaaaagggttatttaaattacctaggcatcgtttctttgtgagacaggatcaagtgagtagatgagaatatgtttatcaagggaaggttagtgaacatgggttatacataaaacccttaaaa

SEQ ID NO: 50760 - DNA, 241 bp, Gossypium hirsutum
  Clone ID: LIB3829-032-Q6-N6-F12
aagaactaacacaacctattgggaatggatcttattagttcacttggaaaattcagaacaataaagatggccggccaaatagattgcaaatagtcataatagggagccaaacctataagggaatatcttggataccaaagtaccacaattttattccattttatggcacctcataaatatggatttagaccttttacatgtatatcggggcagatctcaccgtttttcgacgagggctttt

SEQ ID NO: 50761 - DNA, 508 bp, Gossypium hirsutum
  Clone ID: LIB3829-033-Q1-N6-B10
cgttagctatgtcagttttcaatagtaaaaaagagatttttacagaaatgatcgatttgttctttaatctaacatacaggggactaatttgtttatttttttagtaaaaagagcaaaatctaatctaactcgtaataaaaaggcctccaccgtacttttaccctttttttacagcagttgaaaacaaaattgtgtgtgcatcatgaaaggcattggtcatttcccaacggctaaagatggaggataatgtgaatataagtcgacagataaaatttcaggtttacctcaaatgaactgaaggccatgtacatttttgtacaaatgtgattagccactcttgttatcaagaagacttatccgtatgccaagatttgtccatcagctgcccacttccctagcttttatcatccattgagattgattcaatatcctctggcactggaccttgcacaataaggtcatcccagaaactagaactatccagtaaggcatctatgtcgggatcagg

SEQ ID NO: 50762 - DNA, 482 bp, Gossypium hirsutum
  Clone ID: LIB3829-033-Q1-N6-B12
aaaaaaaactcgggaaaattgattaattaatagcatgttgtccagaaagcgtttagcatgtgaaaactgaaaagggggaatttagaactttagcatcatttccgggaaaataaaccaatcagaggggaaagggaatattcattcatcatttaaccgaaagcctaacctcattcagtctactcttaaatcttctaaaggggcacctatattttcattccttgaatctcttcgtgcgagtatcattcgaagggaactcagatacatgagggtcacgtctggaagcttccgatctgtatcgtactgctgcaggttcctgcatcttgctgctcttctcttgattttgacttcttgagtttcggaaaaacccatccttggcccatgtaacctcataatcagcactcaatcgagatccttgcttttgcaacgagcgaccacataaaaccttgagggcattataaaaatcccgggatttctcaaattga

SEQ ID NO: 50763 - DNA, 418 bp, Gossypium hirsutum
  Clone ID: LIB3829-033-Q1-N6-B7
aaaaaaaaaattaagggtccccaaaaaaaaacaaaggggattggtttttaaaaaaggggttaacaaaaaaagggcaaagcttaaaaaggaaaaaaggggtggaaaaaaaaaaaaacggcaaagtttggaaacctaaaaaaaaaaagggggtaaaaaaaaaagtttgggggctttgaaccaattttaaaaggggaaagccgaattttccaaaaaaagggcctgtatggggaatttggggaaaagggggggcctgtaaaaccaaaccaggggggaaaaaaccccggttttgttcaaggggaaaaaccatggttttgttaacaacgggggaaaaggaagggaaaccccaccgttttttttcttttttaacgggacccgggcggaaaaaaaacttttggggaggggtagccacttggggggg

SEQ ID NO: 50764 - DNA, 545 bp, Gossypium hirsutum
  Clone ID: LIB3829-033-Q1-N6-B8
gtccttaaaaggatggttccaaagtacagtgaaactttttagcaaacagggaagcatatggggtttagtaatgtcagtgacttgcctccaagtgacactgttgttttatcccaggataatctaaaggcaaaacctgttatcgtgatgtatgttaagctccagaatggccggagcttgactatatttattgaagacaatcagacaggttaggaaattacaaaggatcagcaacacgcttggtatgggatcaacggcaggaaactacggacatgataggggtgaaagaagatagaggatcattaacctctggaaggtagcttgaaaggtaaaaagcaaggacctggatgaactctagcggattgggatactataagctacgttatccattcctttaaattaggatcgtgcaattactgtgatgcagaaatctgaaaaagatatatttatgtgacagcatcagcttttgacatcacattgagagagtcgttgttgttgatgactataaggttcttacgattgtgatatatctggatggaacgtcgaaa

SEQ ID NO: 50765 - DNA, 505 bp, Gossypium hirsutum
  Clone ID: LIB3829-033-Q1-N6-C10
aaaaagttcatccatacagaaatgatgttaatcatatactcagttaaatagttaaaatagttggggcggggggggggtgttaataatcagatttacaactattaattactttttcaacataataagttaactgacattaattaaaggtgggtataatgaagtagcaaatcatacactaaaccaacaatgcaactggttttcaataaataacttaccatccagaactctttttaaggatttgttctaaaattgtggcgctcatttgggtgagaatatgtcttagaggggatattgtatccatggagaagatcccggattttggcatatgtcagaatctgcgaagggtcgccaccgttgctgctctgtgaagtgtgtgaactctcttgcagctttatcttttcaaacaaatacttcttctcagcctcggcttcactcaaacggagtttgagataactgctagtatactcttcctctgatttgtcggatttggcatgagcaattcttt

SEQ ID NO: 50766 - DNA, 482 bp, Gossypium hirsutum
  Clone ID: LIB3829-033-Q1-N6-C9
aaaacaacctaaaattaaaatatattattattatttggttgaaacagagggggcgacagaggaagagaagcggggcagggcgccccaggggtacaaattctccaaagcttacaccattatgaaacttaaagcccaaggtcaaaaaaattatttaaacgaaaaaaatactcaagccgggggggaaaaacaggcttccaacttaaagggggcttaaacctgggcggggacggaagcaactggtaacaggagatgaaagaagaaacaaatccaaaggctcccgtaactcaaggggggaccttcttcggggccaatagaaaaagcccaaccgctacaaaaaaatccattcccgctaaaaaaagggccaaagccctcacaatggaaaattggagctgggcacaaaactccgcattcttggacaagccactatccttaaatcttttttccaactttttcatgggagcacaaagccttccaaactcccc

SEQ ID NO: 50767 - DNA, 534 bp, Gossypium hirsutum
  Clone ID: LIB3829-033-Q1-N6-D12
caaaaaagtaagtagcagctgctaaatttacccaagaaaaggggaaggaaaaaaaatttacttcggggagaaacatctgaggctactgctgcatttctactcatccacttctggatgtttctatggaggctttgtgagaaatacaaaagagacacaaaacctgaccgtaattgtctctatataaatccgaaatgttaacatgctagccgtagttaaccagaagattcagaagttcggggtgtctatcccgatttcatcaccggtgtcacttcttcctgcttgcttacgggtatggtgcggagaaagtataaggtcatggtccaaattctttaagagtacactgtttgattgctctcttctcatcgtactagcatcaagagaacagctttcctttagatcagattctcgtgtatcaaagggaagtgaaactgtggttgttgcagctagaccaaattctggggtgtttgtcttcagttgatgatgatgcagaatgtcttccctgcaaatatcctgagatgatgagaggagctgaat

SEQ ID NO: 50768 - DNA, 526 bp, Gossypium hirsutum
  Clone ID: LIB3829-033-Q1-N6-D8
gcaagaaagaaaatttcgccaatggtttcactgtagtacatttaacaggtctgagttctaaaacaaaatcttgctactgctaacttacatgtaggaacaagctgaacaatgacaaccaaaaggtaaatttactgtacattgaatgccttctacaggaattgttgaagaattgaaggacaaccaagagaagaagctcaaacgaaatggaaatactggaagcaaatacgtactggattcaaacatttatttttacatgacctgtctgcccctttgttgaactacaattttattgacgatctcccctgctgaggtaacaaagtaggtcaccatctccagtgagccgagtctatggagaagaaacccatcagtcatttctgttctaattcggtatcttccattgccagaacccaaacgggagttctctttaatcaaacctgggtttcctatataagcaacattatcttgaagggcatagctaaagcaaccttgctggcttaggtaaacattcactccaaacttcacgaat

SEQ ID NO: 50769 - DNA, 524 bp, Gossypium hirsutum
  Clone ID: LIB3829-033-Q1-N6-F8
ccataaatgaaattgacaccttcaacttcccttaagataacttccccgaatcgtggtataggagctacctcgtactctatagtgccatcgaattcacgactttgttttcaaaatgggtgttcagttgataaccatcgacgatgacccatataacagaacttctgaccatactgtagccatcgagattcagttttttcaacacaaattgggcaagcaacccgaccttttgtactccaccctgaaagattggcgtaagctgggaaatcattgattgtccaaagaagacaagccaagtgaaagattcgaaaactgatgaatcaaaagcatcaattcctatccacaattgcttcaactctttaattaaaggttgcatgtagacatcaatgtcgttgccaggtcctttttcaccagggataaccattgacagtatcattgatgattgtttcatgcatgcccaaggttctaaattataaggaataagaagtacgggccatgtactgtgacttgtactcattgttcggaat

SEQ ID NO: 50770 - DNA, 355 bp, Gossypium hirsutum
  Clone ID: LIB3829-033-Q1-N6-G8
gcaaactgggtgcatatggggttttataatgtcagtgacttgcctttcaagtgacactgttgttttatcccaggattttctaaagggaaaacgggtaatcgtgatttatgtcaagccacagaaagggcggggctaagactataaggagggaagacaataataaatgttcggagactacaaaggttcagcaacaccgttggcatggatcaacggcaggaaactacggacatgataggggtgaatgaatatagacgagcaaaaatcctggaacgagctcaaacgataaagcaaggacccggcagaactctagaaagattgtgatactatgagctacagtatgccattctctttaaag

SEQ ID NO: 50771 - DNA, 512 bp, Gossypium hirsutum
  Clone ID: LIB3829-033-Q1-N6-G9
gttgctattattatgtaaaagggttcctacaatgaaagcatctaacatacaagaacccccaactcacatgtacaccaacacaggggagggatgaaaaagagggaagaaaatctctgtatgccaagatttttacgggtcggaaccacgccggttatcttcttcgacccaaaaatcgataaccatgcaccatattaacatcacagtaccctttatttgctgcataatttccgattttcagtcctttaagctcagtcactattaagttcatgttctgcaactggttttttgtcatcgtctccgtttgttgccgctgatgatttgctctttcgggagctttggacaggattgtccgggtcgtatttctgggaagctaagtaattcagagccataacgacgtcagttattgccggccgcatgttgggttgctcttgaacgcacattgcagcaatggcaagtgcttggtagagacctcggaccggatattgaccttgtagtaaagggtcgaccattcg

SEQ ID NO: 50772 - DNA, 479 bp, Gossypium hirsutum
  Clone ID: LIB3829-034-Q1-N6-A11
gaaacaaagggggccagattaacttattagaaatttacatgggattaccagccccaaatcgtgggggtacaatgacggtcacccaacaaagccggttaaaaaaacttcagggaaatctaaacaccccaaaacattaacttatacccttgtttgcataaaaatgcaaccccaatcattggtgggtgccaacttaggcaaccgggggggggaggacatggtcctgtgaagtatccactggtgcaggcgggatgaactgccacattgcaactccaggataaccaatgggaggtcccaacttgttcccaggagcttgacctggagccccaacaaatgcaacagggattgctgatggggcgggtggcataaaactaggttgtgcattcattgctttgaggtgctgctcctgcctttttttttttgccttaagcctttgcttttcggcacaaagctcatttttttcagccttcaactttttaatc

SEQ ID NO: 50773 - DNA, 463 bp, Gossypium hirsutum
  Clone ID: LIB3829-034-Q1-N6-A8
gggggaaacatctaatttctaattctcaaaaggaaggggttttcccccttttataataaaagggttagaataaaatatctccaaattttgaaataatgattcagttttggcaaaccctcgtagggccaacccttccatctttggggatctatgcaaaagttccatcccggccctgggagggaatattggtttgggcggggtctatttccatatcccaaacaacattaggctgcccaaaagctttaccatcatcttccagttcagggggaaaaacttttgtttctttaagggggatggccatatcaaaaaccccaacagtttcagtcttgggggactgaaaaacctcggcgggatcttcggattggagcttgttttgggtaacccccgggttgttagattcattaaaaatgacttgggatgagggagggcctgtgggattccattccctattgcaggtctcaac

SEQ ID NO: 50774 - DNA, 531 bp, Gossypium hirsutum
  Clone ID: LIB3829-034-Q1-N6-C7
cttttctaaatcgtgctaaaacttcctgcatttcataataggtccaacttatgttctcaactcgtcagaaactcactatatatacctatgggaactaaaaaaacgcagcactggtgaactgctcatttctatattcgtaaaacataagcgctttctatttcttctcaaaactgattcaaagagaagtagacatgtacatctgtgctccatggggcgacctactcattagttgctggtatactcgagtcttgttggatggatccaaacctgtgtcagacactatatccatctctgctctcttctttaggcaacctagaaacccatttcgttaccctgacggtcattaggcatgtatggatgaagaggcacatccggcctttccaggtgtccaccgcctcatccatcctttgccaaatcatctaggcctggatgattcattccaaaggaaaagcccggtcaaggccccctttgttgccttacaggacgggaaaatggaccgactgatgtccgtctaaccatgctggtgtgaac

SEQ ID NO: 50775 - DNA, 544 bp, Gossypium hirsutum
  Clone ID: LIB3829-034-Q1-N6-D12
gggggggggtggtgtaataagacctttattttacccaatgagaaaaaaaagaacatggagaatcatgggacatgtgatataccagtacataatgattcctcctagatgttactagataacttctgctcacgtgtgggcactaaaggagacctgggggctgggatcctacacaagccctacacaactatgaagttctatccaagccagcaaattctgagtgtgactgatcaactcataaagcctcctccaggcatgttagatggggcctgcgatgaaacttgcccttgagaaactaattgtgatcggcctgggaccttggacataagctgaatttattcctgatccgaccatttgttgttgctgttgaggcatctgagcaagctgtggctgctgctgcaactggggcatctgctgttgttgcatctgggagagttgctgctgctgctgctgctgttgttgcagctgagggagttgttgctgttgcaaatgtgggagcggctgttgctgctgaggctgttgctgctgctgttgttgcagctgtgga

SEQ ID NO: 50776 - DNA, 307 bp, Gossypium hirsutum
  Clone ID: LIB3829-034-Q1-N6-E11
gttcatcttcttccttttgaggataatcaagtagaaaaaatcaacttcctgatcatcagttgggatcagctgagaagtgtactataatagttgtttaaagggggtggcctttttggtactaaagtgggattataaaaatcttttttgtggatattaaaaaaaaaaaaaaaaaaaaaaaaaaaaaaaaaaaaaaaaaaaaaaaaaaagaggaaacaaaaaaaaaacccaaaaaaaaccgaaacgcaaaaccacacccgggacaaacccgccccgagcccaggacgaacaaacctttacgggggggggg

SEQ ID NO: 50777 - DNA, 541 bp, Gossypium hirsutum
  Clone ID: LIB3829-034-Q1-N6-G12
caaatatactaattgggtggcatagacaaaatgatcatatgatttccatacatgggaagtttttatacaaaaagaaaagctaaatgctgcaaaccatttgcatcatattccgttactagtctatacaaaatcggcatatgagtatgaccgcaaatacggatgaaaatagacgaacaattcgagcttaaaccgaaccatatacgatgccaaaccgggcattactgactagagattgtgaaaagcaagccataatgatcacttggcaaaacaggaagttccaataacttcttctctttcctcacattcttctccttgggatatgataaacccggtattggctctactccgatcatctggaccgcacagactttaaaaccattcagcttgcatagaaatcgatctagtcgttttcgtaatgtacgatttgccgataacatctggtttgatttgggatcatacgtccatccatcttcagcaggccttaactcggtccaagcatcaatccatccatcagttaaagggaaacgaccatctaatttgg

SEQ ID NO: 50778 - DNA, 416 bp, Gossypium hirsutum
  Clone ID: LIB3829-034-Q1-N6-G8
gggcactatcccaacgaccggatcatcaaataacaaacaatatcaatcctaggggggcccccaaaaaaaaaaatcccagggtagaaaccaaatacatagggaatttgaaaaaaaaattccccaaatcggggggggggaatatatatatacccaaaacaaacatgcaaaaaggtaatccaggataaagggggacctaaacccaagcacttgccaccccgggggcaaatcccccaccaaaatgggtagaaggaaccccatatccactaccactattccctcctccaccggggaaaaccaaattcttaccaaaggaactttcccttctgaaaaacccccaccaaaacccccccccccaaaacggggacctttggtacccccataaggagcccggggagcaaaacgggggagccaaacag

SEQ ID NO: 50779 - DNA, 461 bp, Gossypium hirsutum
  Clone ID: LIB3829-035-Q1-N6-A11
caaagttctgatataatattgagaaatgagagaaactacaagggacggggaagacactgcccctttctacgttttccctttttaacaaacaaatactgtcaagggaaatgaaacaaacagaaatttgggacacagtaagttaacaagctcttaccatgtcgcttctcacttgtacaagaattttatgataaactgccctttcactgcaagctacaaaattcacagattcgacgacatacctatgtgcagttgttaattcctcaaatagatcagctaaaacttatttttatactatctgtcttcatccataagttacttaaaaaccaaatccaagcccagtttcttgcttctatcagtgaagttaaaaattgcgacccatgtgagatatcattatcaactttaaccctttttatggtattagcataatagttccatcttcttggggattggagaggtcagta

SEQ ID NO: 50780 - DNA, 517 bp, Gossypium hirsutum
  Clone ID: LIB3829-035-Q1-N6-A8
gactcgtaaattggcagcaaactttattcaaaaaaatgaaattcaaaattatcgttcaagattttgatgtttgtatataatactgtcaatgtacacttcttaatttgaacatctatggaactgtcaggatctgcctgctgaactttttgtgtatgaagaagggttggaacttggaagttgcgagtcgctacaaagacagaaggagccaaagattgaagagaattaaaacaaaggacagaagccgcaacatgaaagtcatagctgcagacaactgatatctactgcatatctttgacgggcaatatgtagagctgacattgaccaaaagacttgtcacactagcagttgagcaagccgcggctagtgagagaaatgacaaggcctacgacaccagaaacagctacttcaacttccccgcatcctccaggacctttcatgcaaagtctgtcttttttgccagaggaatgacccattgatagaagacttccaaatccagaactcccaacatcatatgcat

SEQ ID NO: 50781 - DNA, 119 bp, Gossypium hirsutum
  unsure (1)..(119): unsure at all n locations
  Clone ID: LIB3829-035-Q1-N6-C7
gtgtattttattatactcgttacgctgtgtggttttnacntcttggtgtaatttcctggtatctggtcaccttgacaggtcgtcaccagtctttatcgtaatagatgagaacggattat

SEQ ID NO: 50782 - DNA, 517 bp, Gossypium hirsutum
  Clone ID: LIB3829-035-Q1-N6-C8
acatataaagccgatacatctacagattgctagggctgcagatgttattgaatgatatgtaatttttctgcacataaatgtacacctatgaacaaaggataactctagttcataatataatatggagatgtatggttttcctagtcaaggagaagctatgtagaagtaatgcaggttgccaactttttacaaagttgttgaatgtcaaatgatggatcattcaaagctatatcagaaagtacagattgttagggctgcaaatgttattgaatgatatgtaatttttctgctcataaatttacacctatgaaccaaggataactctagttcataatataatatggagatgtatgcttttcctagtcaaggagaagctatgtagaagtaatgcatgttgccaactttttacaaagttgttgaatgtcaaatgatggatcattcaaagctatatcagaaagtacagacctcgcttctactaatccatgagaatatactctccaaaattggatcttcactt

SEQ ID NO: 50783 - DNA, 473 bp, Gossypium hirsutum
  Clone ID: LIB3829-035-Q1-N6-C9
aaaacaaaccggccattaaataattgataacaagctatcaaaagaaacttttaaaagttttgggaaacattaaacattaaaacaaaatcccaaaacattttaaactaccattaccagaccatcctaccaaaccaacagaccaaaaggggtaaaacgacgggggaaaccaatcatcctcatagcaataacaaaaaacgggggaaataaataaccaccaaaacgggaaaccctccctttctcccgctttttccaaaaaaaatcttaaaaaccacactccgacaggagcaattaatttctacggggggttgcattccgggggcctttaaccttggtgcccatcccctactggtttaccactctttttaagagccgactttttttggggcttacttccttgggaaacatcctaaacctaaaggggagaatcctaaaccttttcctaataatccttttcctaaaaaaaaaaatgggaa

SEQ ID NO: 50784 - DNA, 500 bp, Gossypium hirsutum
  Clone ID: LIB3829-035-Q1-N6-D9
gttcaaggtcagcgcactgaatcaacacgttaactctatacatgttgaaatgcatgcatttgcaaagcttaatatttttaagtttatatacataattatgctgtttaagactttaagttcattctctaccattggaaccctaaaaacaaatgttaatatgttcaagcatgacataacaatctgaaaaaactaaacctttggttagacaggctacaaatgaattttttcctaccagttcacctacctgctgaaactggttctaactacaaatttcgctatggatttttttattcctatcggcaaccagcatgaatgtcatgcacctagattttccttgagtctcctctcaacagctatagcagcagccatggaaggaggcaggtatctcaaactttaactttcggtcttatacttcatcggtttttggcgctctggatggcgctgtggcgaaaagggattcaacatctttaagtgtcaaaacaggctggtcttgattcttg

SEQ ID NO: 50785 - DNA, 524 bp, Gossypium hirsutum
  Clone ID: LIB3829-035-Q1-N6-E11
gaaataatgtaatgattcatttatattaaattataaataagtgtgaaacaagactgaaataaatggtttcaacaattgaggatgtaccaatccaccactaaaaatagagagccaattcacctgctgctcttcctttaatctaatcctttgagctgcacagaaacctaaatcataaccagaaatgacaatcagtttcattcattcaaatccttcgccttgttctttgaatgaactcgatgcttctcctttttcccccccttgcctgatacacttttcttggaaaccttgcgctcggagggcagttgaacttgttttaacttcatcttcactgatctcaccatcgaagacaagttatgcttctcctttgaaggtaaaatatcagagttctcatgctcagctttgtacattccaggatcatcaattgagagctgaccatcagtgggtatttttgtgtcctctgcagccaattcttgccgttcacctttctgcagcttttttgctatttgtcgagcataagttgcact

SEQ ID NO: 50786 - DNA, 521 bp, Gossypium hirsutum
  Clone ID: LIB3829-035-Q1-N6-F10
aaaaaaaaacaattattctattaaaaaatttaataaattattagtactgcatataaaaatcaaaactcaaatcgtatgaattgaacccatgaatcacatgagccacaaactagttatacatatataggccgaatggaactcttactagataagtcaaactgtttactccctcaagatctgttctttcaatcttccctttctccagttctcttctctgtccacacgaaagtacagtatcttgctgatgatgtacatgcttgcccgctgagaaactagaatagtaacaagtcagaactgcattagatgataaaaaaaactaatcatgctactctgagcaagatttcattcgatattgacggcctgatctctgggagatgtttctgttgtcaatgcttgtttgtggttcatcttcatccattgcacaaactccatcatcagtatccccagctgcaattccaatctgcaagcctctcctatgcataggcttcttgtcagcaccttctccggtttgttttgactcg

SEQ ID NO: 50787 - DNA, 501 bp, Gossypium hirsutum
  Clone ID: LIB3829-035-Q1-N6-F11
gggcttaatctggggaaacaggattttagaactcatgcacttttttacgggagtaaacaaacacaaatttcacatataaaccaaatgcccctaacaaaccgaaaaagtaaaaggcacaaaggtgttttgcattatcaaaaaaggggagcaaatgttgacaaaacaaccgcaaaaaatagcccttcacatcacttgctttaacggaacctgcaaagggaacaaatgaaaagggtggtcttaaacacccctgggacaatgccacaatgtaaaggttttcaacctaaacatcccatattgcatagccttaaattggttgtatcccacagcatttgcgcacactaagacagggcgagcctaaaaaggacgcatttgggaactaaacagggccgctaacctgtctccagaagatcaaatcgggagagtttatccccaattgcacaccaaaaaaggaacctcttgcattaatggaaaggaaccgcaaaataaacagggaccctccct

SEQ ID NO: 50788 - DNA, 454 bp, Gossypium hirsutum
  Clone ID: LIB3829-035-Q1-N6-F12
aaaaaggaaaaggggcaaaccaaataaaccggcccccctttttctcccaccaaaccccacagggggggggccccgagtttaaaccttgggatcccccccctcatgagtcccacctcacaaccccctagtactagaggtctgaccaacattaaagatcccgcttcttactttgggcaaaaccaaaaaccccgggggtttttaattaaaccccccgatttccccccccttaaacggggaggggttcccaacaaaccctttaaaaataaaaacctaaagggggcgggagccaccgtatcagggggtcccccccccagaggaggggcatcattgcccatcgggagaaaccccgctgatatgctggggccaaacccttaccataacccccgtatgcaggatagttcatgggagccccaggggataaaccaccaaggggggggggggccccttctgggga

SEQ ID NO: 50789 - DNA, 529 bp, Gossypium hirsutum
  Clone ID: LIB3829-035-Q1-N6-H7
acaatcaaagagaaaatcatgttaacaaagcgcacaaccaacataaaggccatgtctcgctcttaatacaaacggttatatgtacagcaaagaactaaaataaaagttaaatcctaacttctcatatggaaacagaaaagcactaaagtaccaagcaactttgtagcagaacatgccaaatccatacctgcaaaccaactactttgcatctcgcactacctgagtttcaaaaccaagagctttaaccacttacaatccacaagtagatgcagaattaagataaatctgctgattgaaagtgcttattggcaagtcaattgtactgctgaccaagttatacggcagattctttttcttttttggtaaaattacacagattccataagtacagtatcatatctaatatctagattcttaaagcacataacctagaattctaggccaaaaatggcgtaaacaaacaaattaacgaacagattacagcaaagtaaaaatttgctataatgaaagatggcaaaccttgcttgat

SEQ ID NO: 50790 - DNA, 484 bp, Gossypium hirsutum
  Clone ID: LIB3829-036-Q1-N6-A11
caggggcatctattttcagaatagtaaattaacatgaaacaatcaagaaaccgggtccggggtccatgtgaagaccgaccagataaaaatgtgcagggcaaggggtcatcccttccatcggcggggcaaaaatgcaaactgggtatcggatgctcctagctaaactgggctcagggggtacttcatcaaataagttttcctaatcactatgggcccaaatgcttaataggggcatcgaatgaccaaaaatgctcaaactcaaaaattatttatttcaagaggaacaaagccccccccccaaagcacaggaatggagatggatggcaccagtaaacttcactgaccaacctcaagaggagtttcatgcctttgccagatcctcaaggctcatgacaacaggttgagctacatcatgggaagccttggagacagcggaatcaggggctgataccactatcgggatgcctttgtcacagcctttcct

SEQ ID NO: 50791 - DNA, 469 bp, Gossypium hirsutum
  Clone ID: LIB3829-036-Q1-N6-C12
aaacaagaaagaaaaggggtttcactatatcccaggccgcaggggaaatggcatttgattacaaaacatccctttaaatttttttttaaaaaaaatgggaactgggtcatatcaactgggccaaggggaatctataaatggcggaccaaccccttatttgaacttacaattctgggaaagcataaaagggggtcccctgggcctgcctttaaaggggcaaaaaaaaaaatcctggttacagggaccggccaagccccaaatctagcttttggggggcacttgattctgaattttgacggccccaccccaaagaggggcggagaggtttcttgccccttgggggggaacccccaacaggggggttaaaaagttgggggcatgtttgggtgggcaaaatggggggggtctaaaaacccactgcttggggcggaatcacccaatctgagggttcccctttgggcggattccc

SEQ ID NO: 50792 - DNA, 498 bp, Gossypium hirsutum
  Clone ID: LIB3829-036-Q1-N6-C7
agacctaaactttctcccttcaattgattagggtactttaactgccccaccttgcaaaagcaaaggcaataggaacagctgtggcaacccagcctctgaaccaagagcaatggtataaccggacagacaatttggatcgcgcttaggttggcccttgcccctattaacaacgcaaacgtggacgggtttttatatcattagtaagacaaaccttcgggttaaatggggggggttccaaatggaatgctcctactaagcccatattgtacaaaagggaaaaaatgccccggatatttaagaaacacccgacagttaagaattgtaacaacgttcggaaaaagaaaacgaaattctgaggcgtattaacccacagttcactatcaagcaaagcttactggcccagaaaaaagtttttattttgaccaaggaaaccatccttcggccaccttaaccttgagctgttgaacaacttaaacgggcttatgttggccaccataa

SEQ ID NO: 50793 - DNA, 426 bp, Gossypium hirsutum
  Clone ID: LIB3829-036-Q1-N6-D7
aaaaaaagaaaggggtaaaaataaaaagttaaagggaaaaaaaggggggggcataaaaatttttcccaaaaacccccccttaaaaaaaaaaatttttaaaacgggaaaaaaaaccacccccaaatccttttaggggggggggggttttggaaattttttcaacttgaaatttggacccttatgggggaaacgggggttccccatataagggaaaaaaagggggtttaaaaagggggggaaatttagggcctttttttaaaaacccaacgtgggcccctgggaaagggtttggaaaggggggggggatcccaaaagcacccctcgaagggggggggggaccccaaatcttaaaaagggggggaccatggggcccaattaaccggggggggggtgggggaacccaaaaaggtccccaacaaaaggggg

SEQ ID NO: 50794 - DNA, 317 bp, Gossypium hirsutum
  Clone ID: LIB3829-036-Q1-N6-E9
aaaaagagaaaaaaaaactttttttgggggcaggggggccaaaaagaaaagaggcaaaccccccccattttaaaaggctaagggccaaaaagaaaactttaaaaaaatacattaaaacccaacattgaaaaaaaacaacccttttggaaccatttcccgaaaaaaccaaaaatttgatttttgggttattaaaaaaggggccttttttttttcacccaaaccccaaaattttaagctttaaggggggccccaaaaaaggttaaaaaaaaaatcctttgggggagaaaagaccatttaattttcggccccggggggcc

SEQ ID NO: 50795 - DNA, 364 bp, Gossypium hirsutum
  Clone ID: LIB3829-036-Q1-N6-G8
gaaaaaaaaggaaattatttttttcaaaaagaacttttcctcctaaatatataaaactaatctttgaactttgctccctctaagggaaaacccatctagggatataccccatgaaatcccggagatgacccataaaaacccctttggctgcaataacaataaatttgatcccaccgaaaaatatgctttaaaccccgggattttcccatcaacgatgatcggctagttctctcaagaaggggcccaacttcatcaaatgattgaaggcgggaccccgagtttgatcttttccttgcaacggaccaagaaaaggagtcgtgggcctgaaaaacaacccctgaaaaaaccttctttgaaccgatat

SEQ ID NO: 50796 - DNA, 508 bp, Gossypium hirsutum
  Clone ID: LIB3829-036-Q1-N6-G9
accacatgctacctatgtttatttatttaactgtccgataatacgtaaggtgacaagactacattttttttagctaaaaacgaccctgctgttatcaacaggcatttgcacatgcatccaaaacagcattgaaaggcaccctcacataactagaacaaaggggcgttggcctgattctgggataaagcgcgggggtatggaactactgagatccaaccctgagcttcaacgacgcacccaggagactgctcgtttctattttaaaccgccaattgagcggtccgtgaaacccaatagcagggatcatgcagcccaaaattagaaagaatgccttgtatcattcaaaaagcaggcttcataagtgaaagaacatttcgaagcccacaatcatcacagacacccaaagctttacaaaaatggcagcggaacaggccacatataaaccccttccagaacctgggacttatttaccttccaaaaagacatcacccacgtgctcacacgcaga

SEQ ID NO: 50797 - DNA, 517 bp, Gossypium hirsutum
  Clone ID: LIB3829-036-Q1-N6-H9
tttttttttttttttttttttttttttttttttttttttttttttttttttttttttttttttttttttttttttttttttttaaaaacccaaaaaagggcccttttatagggcaaatttaggggtttctcacaggctcatttaatcccctttttaaaaacattcacaggtaaacttttagcatatatgtttcttctaaaggaaaatggggattttttttttaaaaacccggaaaaagaaaccctcaagggggggggcccttttgggtcttcctctcctgggccctttttttaaggggtccccatggcctttggtaaagggcttttttttcactctggtaaaacaagggaaaaatatggtgggtttatttggctggggggggggatttaggcagttgcaacaatgcctggtcggaaaggggaactttcaacttttgggggaaagggaaatttttttggggctttttttttaaaagctttaaggggggaaaaaagggtatgggtcttttccttagctt

SEQ ID NO: 50798 - DNA, 553 bp, Gossypium hirsutum
  Clone ID: LIB3825-023-Q6-N6-A11
cccatcaaacgatgccatagaagtgcactgttcagcaccattaaaacataaaaaaggtctttatacacaaagttagtcaaatttcagtgtcagtgtctgatatgttcgaaagcaaagaaagccccaaagtaaaatgtccttttcatacaaattgcacgcttatatatgaaataaactccacagttctgtcactcttcccccttcaagttcaccactcggatttgagtgtcaatgtcagatacccttatgcttctcttcaattttttaaaaagtttttccatatatttggtcggtcctgtaataatcggggtttggaacatatgttgtggcattgagaagaccatagttgccaccaattagtgtttgccgacaatatactttagtatggtacttggaagccattccaagctgatctaaataccaaaagctgttgacgaatgtgtcagacacgtgaggaccgccgctgttataagccccaccggattctccgacccatgcggaagaccaaggaccatgcgtctggacggtgcgtgcaagattgatgaaagtattt

SEQ ID NO: 50799 - DNA, 552 bp, Gossypium hirsutum
  Clone ID: LIB3825-023-Q6-N6-A4
caacaaaaacttctaaaaaaaataataataattaaagatttcacatagatgttacaaatatgcaataaccctagtcaaaatccccacaattaaaaacacttcaaaatcgaacttttttatttcaaaaacattacatgcttccattgacatttaatcccttaggaacatcaaagatcaacaggttgttgctgctgcaataactatccctttcaatatcttcagtactgctaccattgttcaaaggagtcgagcttgaagatggtgtggataaaagcgatccaaaaggcaccaaatttggtattttctcagaaaagtacatacctgttgcaggttttgatcacctaaattaaacccatggttgtagccattaatgttttgcatggtggtcggcaaaaagccctttgaatcactaacattattgtctatttgccacaaatttggcagaccaggatttgcagaaaactggttcaaatcagcttgtgaaacctgggttataacaggaacctggtttccctggtaaggttcataagggttctgtatttgttggatatc

SEQ ID NO: 50800 - DNA, 476 bp, Gossypium hirsutum
  Clone ID: LIB3825-023-Q6-N6-A7
ttttttttttttttttttttttttttttttgttttttttttttttattttttttattttttttatttttctcattctctttttttttcttccaaccagaaaaaaaaaaaaaaaaaaaaaaaaaaccccccaaaaaaaaaaaaaaaaaaaaaaaaaaaacaaaaaaaaccaaaacaccaaaaaaacccccaaacaatttcacccccccccccccacaaaaaccaaccaaaaaagggcccccccccccacccaaagtccggcccccccaccaaaaaaaaaaaaacggggccccgccaaccccccaaattggaaaaaaaccccgaaacgggaaaccgcccgttaacccccgcccccaacccggaggcaaaccacccccccctatagccccccaaaaaacagcccggcacaaccaagggcacaaccctctcctaaaagaaattgcttttcggtaaccagtccacaaaacaaaccaacctt

SEQ ID NO: 50801 - DNA, 553 bp, Gossypium hirsutum
  Clone ID: LIB3825-023-Q6-N6-B2
gttccaatgtaatctgtgattcagtgggctcgatatactggtagctcaacttataaaacgtttgttacaatgagcaacagagaacaggcgtttagcaatggccatgggcaaaacattatcgtctagcctctttcggctaaaggttagagaaatgtagcaaaaattgtgagggaaagttaaagaaagattcagtggtgtggtggagtggagagaccaccaagcgcatgtcctacagcttctctgcctgtagaatcctgagttgccacattaaaggctccattttcagcagtgtctaaagcaacatctgcatcacttggtgccccagcattgcctgttcggactgggcggagtagaccttgcaatctcaataaatagctctggctgagaggctgagttctcacgtattgggttgttgtgactatgctggcagatgaccgttccgaatcagcacttcggagattggataaggcacttaagtcaagatttgggaacacagaacatcggcatcgaggacacttcacattcagtctaagccactggtcaatgcactcta

SEQ ID NO: 50802 - DNA, 354 bp, Gossypium hirsutum
  Clone ID: LIB3825-023-Q6-N6-C1
cccgaaattcggataaaattccattttttttgaaaagggggttaaatttaagatcaattttttatttaaaagattaaacccttaaaaatttttaaaatttaatttttaccgctttttggcttttggaaagttaacaaattggctgataataaaatttaatatttggttttaaaggtaaattttaatgggggggttgggggttaaaaatttggaaaaataaatccttggccttgaaaatccctagggatatagcttggggttaatgacctttttcccaccttggggaaaatgttggataatacctcccccccgcttgggggaaaaaaagggaaaaagagaaacccaccctttcca

SEQ ID NO: 50803 - DNA, 504 bp, Gossypium hirsutum
  Clone ID: LIB3825-023-Q6-N6-C6
aagctaaaaattaaaagcggggactttttatttagttttcacaaagcagcaaacagctcacaagcttgcaactcaatttgaagggaaaaattgcccaaagttcgatacaaaacataaaacttttacatttcctaccaaaacaacaaacatttgatcttttcacagaccatacaaatcaaaatttctaccggatttaaaaaactagatttgtttttggggaaaactacttttaagcctcacaccaaaccaactggtgaacaagtccgtaatatcaacaggctcaaggggtaatttaaaaaaacgatttttttacaatctatagtctactaaactattgaggggatcgtaaagtcacttactatagcagttagcaaattctcgaaagcaatttcatattttaaccatgctaaacaaacaagttccacccacctaccaaaacccaaaaggaccttgcatttataaatttgagttgctggcctgggcttttcatttatttctggcctg

SEQ ID NO: 50804 - DNA, 458 bp, Gossypium hirsutum
  Clone ID: LIB3825-023-Q6-N6-D3
aaaaaaaaaaaaaaagttttttttttccttggccccaaaaagacccaaggggctatttaaaaaaaaaccccccgttaaaattaaaaacaacccccaacttgggatttttccgggatttaaaaaaccccttaaaaacaaaatacgggggggtttacatttttttcaggctaaaaaaagggggctttaacccctttaaaaaaaggggaaattttgttgggccaaatgccccccagtgaacaaaatgaattttcaaattttggcctcctttgcccaaccccaaacctttggaaacccttttaataaaaaaaaatttttcccttttcccaaaaacaatttgtaccccccttggattttccctttaaaaaaaaaattttccgttaacccttttaaaactaaaaacgggggttttttttttgaaacccgttttggggggcccccccattttttttattttttaa

SEQ ID NO: 50805 - DNA, 154 bp, Gossypium hirsutum
  Clone ID: LIB3825-023-Q6-N6-E8
cgatctatcggtcgcgaaaacacgaccaactatttccggtccgtaacccgtaggcgtaccagctatacctaaatgtgacgaactaaagcctgacgtgatcagggacctagctgaaaactgagagcaatagcctttcgatcacacctgcaacgca

SEQ ID NO: 50806 - DNA, 301 bp, Gossypium hirsutum
  Clone ID: LIB3825-023-Q6-N6-G12
acctactacacttgcccttggtggacagagcccgtatgacattggcagaggcaacatgtgaaacaagagttcaactatagctggcagcatgctaaaaagcgatgaaatacaagtcattgcatcatgaatttaacacaaaggatggggggaggggggaggtacctacatagaacctaagggccctgtaagataggctgtatcacaaaccgctagacctccatatccatggtaacagtaagcttgatcccaaacatcctagcactcacataaaagggactaaagggggtgcaccaaagcggca

SEQ ID NO: 50807 - DNA, 488 bp, Gossypium hirsutum
  Clone ID: LIB3825-023-Q6-N6-G2
gaaaaaaaagaagtatttaattgacttctatctttttcctggccaaaaagaagggtttaaaagcaaccccttactggccattttaggagcaaaaaatctggtcaaaaacttgctgctgattcgccactttcaaaaccacctttactggtaacactaaccctaattgggccattaatcctgccatttatccaataagtcgaacactcgggactggcttctgaagtattgatgtcccctggaagatcatcatttgggagccccttctatattcgtttagctcttcctgggttatcttgctgaatctgaatttctttgcccaaatggattctgcttcatcggccgctgggagcacaagggttttcacttttaaaaaccccagcagcttctcaatgcaactgaaaaggcattgaaaataaccctgcccttgactttctgtacttggtgcaactaagggaatttcagccatttcttgcccaaaaacccgaaaa

SEQ ID NO: 50808 - DNA, 539 bp, Gossypium hirsutum
  Clone ID: LIB3825-023-Q6-N6-H10
accatgccaatgttcatgctattaaaatattattagcacataaggaacgtgatttgatttattactacaaatattgtgagcaaaaaaagttgaaaatgtagccttttctttcttatctcaaaatctatggatcttttacaacaaacttaagccaaaatttaggaggaaacagacaaagctgggaagtaaaaaggcaaaaacaagaggctaactggcacaaaagcttatcagatcctcagtccagataagcatcttccccatgtaaagaacatggctaatgtcaagtgccatgtcatttaatcagaaaatggaagttgtattgcaccttccactttgctaaagcactaatttttttaactttcttccatatcttcctcggtatccgatttatcatcttcatcgctatcctccattaggccatcattgttaccgtcttccttttcattacccttattgcctggctgtttcttattgccaccattgccatattgactgaacataacttcaccagaacatacttcacccttaattatggtgag

SEQ ID NO: 50809 - DNA, 541 bp, Gossypium hirsutum
  unsure (1)..(541): unsure at all n locations
  Clone ID: LIB3825-023-Q6-N6-H5
caagtaaaacatgctactttaaagttacaaaacacaaaaatttacattggaaattgtgttatctttcggtgaatacacngattctttcacaaaaaaaaaaaaaaagaaagacagtccaaaaaattggacttacagattctacagaaacgcgcaaaaagacaagacgaggagagcccccatcgatggcttcatcactggtgagttcagttactcgatagggtttcgcaattttggggttagtgcacgcgtttctgacagataataaagtcatttcgttttgttgaggagtgttgaggtcctgaacacggcatcgtccctgacaaagctccagcaaatgtatgcgagggggatattggctgcatgccagagagcatgagcatcgataaagcctttataaggtggaaaatcgtatatttccaatagcaatgcgatggttccccctacattgaacaaccagaccttccaccgtgaaggatggctcgttataccggcccaaactccccaanatgaggaggttggctacacccatggccatacaaac

SEQ ID NO: 50810 - DNA, 520 bp, Gossypium hirsutum
  Clone ID: LIB3825-023-Q6-N6-H9
aacaaacaaatgttggctagcttttagactaaatatgaaagaagaacaacttgaatacaaataattatattattcatgaccatttaaactaaccaaactgggttcttttacacccccagataaagaactcaatggtgaaataatcaaatgccatcagctatgaacgctattcattcccataacttctgctgctacaatgcatcatatttgaaatactttgctgcttttgaagttggaacatggcagcaacaaagccagtaaagttatcaggatgactaaaatggcagtcctcggggagaatacagatagcaaacattttgggggttcctccgacttccatttcttgggcgagatcccaccgatgccatgttggatgatatctgctttagttcttggcaatctgattctccggtttgctccgccctggaaaagggatacaccctgggtagggggggctatcataggcaaaacctcaggtgttgaggctgacaatgaagcttcatcaagcctgattatatca

SEQ ID NO: 50811 - DNA, 486 bp, Gossypium hirsutum
  Clone ID: LIB3825-024-Q6-N6-B8
aaccaacaagattcttcagtttatataccatgtaaactttctgcactaatagtacacctgtacatttgttcgagccacctaaattcaccaaaaagtatacgactttggtacaattatctgtgttccatttttgtacagagggaagcagataccagaacacctttgtgtctactgcagcatatgcaacaatcatagtctccgaattctacttctttccttcagttcttgagaatccatgtaaaagaatggcatgccaacaatcttgtatttaaatacaagattaaagacccaaatgcagcaacatgagttgcaacagcaaaagtcacttctggtatgatggtatagtgcataacttcataatcagctcagcttgtacaagtctagcgcacggcaagaaaagaaatctgttgccactcaagacttctttacaaatttcttagcttccctcgagaaacttttcaccataattctgtcagagaacgtaag

SEQ ID NO: 50812 - DNA, 556 bp, Gossypium hirsutum
  Clone ID: LIB3825-024-Q6-N6-C2
caaatgaaacgtcacctaattgagttccatgatgtaccgacgtggctccacgtactcaacttcttccaacccttaaaaaaaaaaagcgaatacagtaaacaaaagattaaatgtcaagaaacagatagatgttattctggctgggtatcagacatgtctaacatgtattgaaatttttcgacaaaaaaaacactactcaaaattcctagttttctatttttactgaatcgaccatagaccaattccctttttatttgggagtattgaatcaatactcccataattttgagcttcatgttaatcttcccaagagacatgtcagatccagggcatcccaattcgattgaatgggatgacagtttctcattcctaatcagcaactttatcagcctcttcctcactcatgcgggcttcaaacagatgattagccttataccaatagatgcttttacatgaatcccatttaagcacatctagcagcaaagctttatgataatcctggtttttgtcatctaacaagcttacttcataccaccttttcccagatgcatcaaac

SEQ ID NO: 50813 - DNA, 587 bp, Gossypium hirsutum
  Clone ID: LIB3825-024-Q6-N6-D11
tcgcgatctaactcgacgaagcaagagaggatcaacagcggatttgcaaggtcaggtctcgttttcccttttttttttttttttaagaaacaaaaaagccaaaatagtccattaaatgtccaattacataacaaaacccaaaaaaataactagcctaattacaaatccctaacccaaaaccctgatggcccaataggcccaatgcctaaaccaaatctcagccaaggcaaaccctagcctaatgcttgcgccgcaaccagacaacacctccgtacgctccagcatttcagccacgcctgcgcctccgtacgccagcacaccccgtactctcgccacgcacacctgtacctgcaaaaaggatgaacgcacagcaaaacaaagaacaaatattgtattttttatctactttttttctttctttcttttcggctataaagccaagatttttaatctttgtaaggggttacgaaatatagacacactacgcatacgaaacgatcaaatagaaaaaagcaaagaaaggtgatttctgttttgagtctctggatctattgcgttctttctttatttccttccttcattttttc

SEQ ID NO: 50814 - DNA, 570 bp, Gossypium hirsutum
  Clone ID: LIB3825-024-Q6-N6-D9
actcaattaatctatatggttattcttgtttccatacaataagaaggaaccatgtaagtaagatgatcaaatcctaatgacgctattaaatacatacaaactgtatataggtgctgtctaagggcctttacaacaaaactatagtcagcaaatagaaacatatataacagttaaaatctccagggatttccattttgtaatggtgggaaggtccctcacatccatagagatctacaaactacttctcaatcagaaaggctagttttctatttgttcgcaatagcgagaaactttatggaattaatcataaaggaactaatatctacaaaccaataagcaaaatgctcccgaaaataccttgccaaaaactgacagctgcatgcctcctaactttttaagaactaagaagcattgttgaatgtttcttaaacacaaaagtcttggggggggggggggcacatacttcttctgctactaagtctatcagtaatgtttttgctcatgaactattgcaacccaagaaaatttttggtgccacccctcatcaaggttgccattaaagttaaatgc

SEQ ID NO: 50815 - DNA, 552 bp, Gossypium hirsutum
  Clone ID: LIB3825-024-Q6-N6-E1
atagtaaaaactatgcaatacatttatttatatagtagaaaactacagtatcatagtaacagtaaaaatgtaaaattactacatgaccaaagaggtgcgggctacattttaagccgcttcagctcccttttacgacttttttaccgctcgctgcaatttttactattaccacccaactcaatgacaaaacaaaaactaaaaagaaacattgccttacccccaaggcctaagcttaggaaaaaaacaaaaattaccacacataaattcactttaatcacttttgtatctatcactgtaaaatcctaacaaaaaggtaaaaacccacagtttttacctcaaccttaacttttaccgccgcttcagattttcccgggaaaatgaaggacaattgaagggcagggaacaaaagattaaaaagaaaaaaagggagaaaaggatagggtagcagtctgtgacgggtctgttatttaataacggaaattctttccagtgaaggtttgaccaaactgccagttagtcggtgccacgttccaagaggtggaagttcgtttg

SEQ ID NO: 50816 - DNA, 555 bp, Gossypium hirsutum
  Clone ID: LIB3825-024-Q6-N6-F3
gcatataacttattttaaatacgaaagaacaaccaaaatatttttacagctttctataaaaaagttatggcaacttaatctaccagcaaagataaagatcacaaattggcgagttttccagaacttaatttctacttttaacaatttacattacagaaaaatagttggttcaataacttgtcccagatgctccaatggagttgaaaaacttagaacatattttcccagattactccaatgcaaaggaaatatagcatgagtgtaacacccatactcggcctggacgccaagctgaatatcgagatgccacaccaccgtctcactacttgttcatctaaaacgacatgttatttctcatgcaattttttcgatcaataataacgtagcatttcatgaattataaaccatacattcactttttgttgataaatcataccaagaattcataaaatagcataacataggtattaatcgtgtgttaggaccacttatcaaaatttcccaaaaatgttacgtcggtatcgataccgtctctatgatatcgatattttcttt

SEQ ID NO: 50817 - DNA, 550 bp, Gossypium hirsutum
  Clone ID: LIB3825-024-Q6-N6-G12
aatacaaatgaaattttattagtgataaggttacattatttttgtaatggcaaaatataaccttatcaatacttaaaagatatatcttttgaatcaaataattaaagtaggctttgattttaagctctaggtgtgcataaaagttggataattttgtcaagattcatgtaagacgagccatcagccttgacagtcgccgcctttgcttttctctcccactctacagctttcttcttcatatctttactcttttctcctttgattagctctctaacacggctctctactttatccctcttaacattattgtcgatttccatgccgattccccatttagtacatgaataccaacagtttgtttgttgctccgcgaaaaacggccaacatgtcatgggcacgccgccggatatgctttcaatcgtggaattccatccgctatgtgttaagaatcctccaatcgaagggtggttcaggacttgttcttctgggcaccatgttgccaacatgcctctatctttggtctccgctacgaactctattggcacaactg

SEQ ID NO: 50818 - DNA, 430 bp, Gossypium hirsutum
  Clone ID: LIB3825-024-Q6-N6-G3
aagcacaaccagaaaaaaattccagaccccggcaaaccgaactcaatacagacaacaaaaaccatggaaggcacaacacaacagcgagcatgtacgccaggcgtagctcactatttgatctaaagaacacgaccaagtcccacacactgtaaaactatagccacggtagagaaaattattgcactataaatagcacgtctggcataaaaggcacaataaacgactataccaagagcttgagaatcactcctcttctggctcagactcggcattctggagccattcgatgaagggcttggagtacttccatatctgagaactcttattaccaccggctacacccttctgataccattccatgatgaactcttcttccaagatgtaattgccatatagcgctttaagaaccaaagccacctacttagctgcc

SEQ ID NO: 50819 - DNA, 538 bp, Gossypium hirsutum
  Clone ID: LIB3825-024-Q6-N6-H10
acttgtacaaaaatttaaatccctaaacattaagttaaaatcccccttttacaataaaggtctatatatgaagtttttgcattcacttttttttcttgggggaagtcaattcccgaacctctaactcttgaacaaatgatgaacttgcttaggtcagtttcttggctcccaaacagaagtccaacatgtcaaagaggctcatgcaaggtgcgttcttgacttctcccctccttttctataattccaagatcgaattcctcaaccccatcgttcttaatgttaatttaccttccctttcttactgcttaagttaatctctagctaagatagctacgatttaaagctgtggtaagttcatgcattatcgcatgacagagatgcctttatcctttcaacggtgcatgcaatcaaattgtttactgttgcaacggatccgagagaaagttttgccgtcggcacagaatcgaccaaaatctgaaatgcaacagttagaagagatccactagacccgccggaatcagccattcctacgtcagtc

SEQ ID NO: 50820 - DNA, 485 bp, Gossypium hirsutum
  Clone ID: LIB3825-024-Q6-N6-H11
aaatagaaggattttttgccactagtattcacaagataattaaacaggcaaaaagttgattgataggcaatttgaatgcatgatatctaaaaactggaatgtaatgaataggccatgtacgccactcttacattcgcattagcacgtacagcaatcttttcgattgttttcagcctatcaacattttggtgaatgctagcggccaaggtggcactttggcactgcaccgtagatgctctatttcttcttcccattcttgaaaaacagatggtcgggatgctccttatcccaaactccgtggcgatgttggggcttatatcagtgaccagcttggaacaagcaatcattactgcatatactaacgccaaatttgcgcacactggctcaatcttgcggaacggttctcaccatggtgcccaaaactccaccaagactggggtatcactacccaacacatgctctgcccagattgcttctgtcaccgc

SEQ ID NO: 50821 - DNA, 566 bp, Gossypium hirsutum
  Clone ID: LIB3825-025-Q6-N6-A1
atagtaaacatatagaattctcactttatatgtacaaaagaagcttaaatccagaaattcatggataatccaacaatgcaaacttcacatgcaaactaatcttaccaccttcattcactagcttggctgctgttaccagccaatggcccggagcatcgtgtggaccccggatgacctccgatacatctacatattttagcaactttttggcacgaattggtgctggtggaccttccggaaacacgcctgaattaagtgtggttggaggtggtttttgttgtccggtgactgcccgttgagtgaatgagaaagtcgtgctgagatttgtgaggaaaccagccttacgagaagtttcaggtggagcagcccactcagtcttccggattgtgcagttcggtatatgtgtgtaaagcagacggagatgcaaaactgtctttggccacttccctttactaatgagctgtgcaccggttacgataaaaacacatttgagacttcttgtaaccagttagggtcatgttcaacaacagacctgcacacatttgagtatcttttccaccgaaccg

SEQ ID NO: 50822 - DNA, 488 bp, Gossypium hirsutum
  Clone ID: LIB3825-025-Q6-N6-A12
ggaaaaaaaactggggggataatttccccattccttcaaaaaccatagctttgggggggaaaatttaatcaaaaggaagaagggaggcccggggtgggggggaaaggataccctcccccccccaaaagaggtcaaataagggggctaacaaggccccgggggcgggggcttccttccaagccggggctaaaacagggggggtttttgaaactcgacccccgaccccccttaggagcaggttatcgttggaaaaccgccgggacattggggatcccccaatttgggaaccccctccggggggagaaaagccgctaaccgcccctgggaaaacaattggcggggaatttatgggcatcatacctatgggcccctcaggggctattttctgggcgggggggtgctactgcatcaagggggcccgggcttgcttttcgtttattgggcgcaactttgggggggcttttccaaacggaacgagttcggggggc

SEQ ID NO: 50823 - DNA, 516 bp, Gossypium hirsutum
  Clone ID: LIB3825-025-Q6-N6-A3
gggagcactttaacatttcaattaacaacatttatacaactcaattacagggataaaacatttcaatttccagcaactaaacacttcaatttgcaacacggaaacacttcaattgacagcatttaaacacttcaatttacagatccaccaccttttagcatcatttgcaaaactatcataagtttatatgctcatagccgcaaacatataatagaacctataaagctaaaatattagagactggccttcttttccttttccaaaatttctcttatgggacaagggagggctgcctctttgcttggcgttgaacagttttactagcagatttctactccatctggggaaacctaatctttttcgtaacatcagtcttcccctcaaaacttgctccttggcatcagagagttgcaactgaatagacttgattaaagagtccttttttgcagcatcttgcttcaatttaccaagttcagcacgaacatcattgatctggttttttgaaagctctgctga

SEQ ID NO: 50824 - DNA, 525 bp, Gossypium hirsutum
  Clone ID: LIB3825-025-Q6-N6-A5
gagtcgaatccaaatttatctttttaaaattaaatcggacttcgacaaaagaataaatttattttttgaaccaatccaaacccgcagctcagtccatcgagtgctctttaacaaagatgctgaatagtcgtagtcatagagcagaattaagttaaacgatagactttcataccctaatctgaaaagtgcatcaaaagctagaatagtcttaaaatggcggtctttaatcgtaaaacaaaggagatgaagaactaaacattgccatgaaggaagctgcaaaagagacaagaaaatggaaaacccattaagaaaatcacccaaaatcttcttgtcagttaacgctgttagaaattagaacaaagaggctcccccatccatggacaactttacaaccatccttctatgccttttagaatagaagacatgcgaaatagtcaggcattgctatacatttgttatcatcaactaaaaagctgaaggaatcatggtaatgtgtcttagtggatgtgaaacatcagtaccccc

SEQ ID NO: 50825 - DNA, 543 bp, Gossypium hirsutum
  Clone ID: LIB3825-025-Q6-N6-B1
catcacataaaaatttttattatacaattttaattgactcaaaatttggtatacattattgaacataaaatataagggtgaagttattaaaatactaattataaacaaaattatatacaagttgcgtttaagggcgcgcagaaaacagaagcgtgatgaggatttgaggatttgagtcagccagccagccatccatacacaccctggcctcttggtccattatcaagaatcaaaggctttaacgtcgccaatatcagacccgatcacagttttcaaatggaagattagacgcatgtgggatccgtgatggctacaccattctctttttttaataatgaacccactgctccttgtccaaaatagacttcccaaattcatgctttctccattagcatcctctgtagtatggtttgtttgatgtaaataaaagggaaatcaatcatatacattaggaggataaaaaaaaaaaatgggcacatggtagggataaccttaaaaccactttatctttatcccccgaaagatgataacataggatcatca

SEQ ID NO: 50826 - DNA, 501 bp, Gossypium hirsutum
  Clone ID: LIB3825-025-Q6-N6-B2
gggaaaaaaaaaaaaaaaacttcgtaatttttttcataacatatgcaaaacatcaatagagagaaggcgtcatgggacaaatctaatttaacctggggggggggggcggctccaacgatgagaaatggaaaaaagccctctccataactacaaagctcaacctttatccccgcccatacctatatatatataaacaaaacaggaaggggattttaacaaaaggcagaaacgggtaaatacaaaggagcagcccccaaaggggaaggccaagggggacccccagggaaaaagcccggaacgaagcccccactaggaaaaaaccctaacaaccttcttctccttcttcttcagcatcccaaaaaaatcgggcatatgaggctagcacaaaacagacggcaggggcggggttaaaagcttgaccgaagaaagggggagctctccgatcatattggggaggggggcatattaaccgggggtacatagacaaaacattcccaacat

SEQ ID NO: 50827 - DNA, 534 bp, Gossypium hirsutum
  Clone ID: LIB3825-025-Q6-N6-B3
gaaagttcaagcttttgagtttcattaatacaccaaaaatttacagaaatgggaacatgtcaagcctgattaagtacaacaggctttctcgcctgtgttacaatctgcatctccgattagtctcgacatcagaaatccgaaaagcagaaccacaaagaaaaatggaaggcatctagtgtttttgattacttttaaacccgacagttctccggtaaaggcaacacaccgtcgaagaaatcaccaaagtacccgtgaggttcgtgcactaacctcgatatgatgtctctaagtgttattactccttccaaattcccgtcatcgtccactacgtacatacgatggatcttttctgagtcgagcgtctggatcaattccttgacggttttatctctcttgcaagtaaccgtgccgcttaacatcggcgatctcttgtcgtgtttctccaagtagtttttaactgctatcaagaagttcttcgccgtgatagatctgtaatcgcggtagatctctggtgcagttagaaggaactgtaca

SEQ ID NO: 50828 - DNA, 498 bp, Gossypium hirsutum
  Clone ID: LIB3825-025-Q6-N6-B5
ccatcacagctccaggggtgaatttctttaaaatcaggggtcaagtttaggaccttgctgaccaaaaatttccccacccaatcatctctaccggggcaggggggaaaggaggtaacccctggaaaaagttatttgaagggggcagtatatcttttgccgatgatagagattgaatcaactcatctaatggccgggcaaacatgcaaactacatcggctacattccgggttatccaatcttcatgtcccctcggctgaaatgcaggagtttccccccaatcagaaaagaccaccttgataatagggagtaaatctaacttcaaaataaattcacctgcactagttgggcccaaacaatacccaaaacagccccaagagtttggatttaccaaaacaatttgcaacaatggaaacttggttttaaaatctctaatcaaagttcgaaaggataattcatctttggcattccccactagctgattagggaacattctttcca

SEQ ID NO: 50829 - DNA, 527 bp, Gossypium hirsutum
  Clone ID: LIB3825-025-Q6-N6-B8
cgggaatctttaaacttaatttatctgcaatgttccagaaagtatccatgacaaagaactaaaggttgggaaaataggaagactataaagaaaacaaacatcattcgatgttttgaagtttaaaattgctactgctctaactgtatgatctaaagtgctaatagaactttacagagtaagatgtcatttaggcctcaccaggtaggatgcccatatgtcatcagctggaggaggtggctggacccagtggcttggaatgcggcttcctcctggtctgatataagcatcccatgtccttctaatctcaataagtgtgcccatgtcagaattgcttccatggtaatagtgatagaactcaatcggtaaattagtcaaaggatcatatgtccaagtgtaaccatgtccttccaatttatttttaccagattccatatcagtgactgtaccagagccctttttgtcctcatttggtgttatttggccttttctctccttgttttcaagttgatcagtcataggatcatttg

SEQ ID NO: 50830 - DNA, 543 bp, Gossypium hirsutum
  Clone ID: LIB3825-025-Q6-N6-C1
gggggggggtgtggttttttttttttttttggtggtttttttttttttttttttttgtggttttttttttttttttttttttttttgggcttaaaaaaaggtttccttttaatgggaaacccttttggggggtggtttaaccctttttggggggggggggggggaaaaaggggggggggacccttttttttttccctggggggggggggggggtttcaaaagcagggccgggggggccttgggtgaaatttaggttcggggttccctttttttttggttttttgaaaataaaaagggaaaacccccttccctttgggggccccaactttttccaaaatggggtcaaacgcttggggctttttttggggttctggtttgggggggaaacttggtgcttatgggtttgcaaaccattttttaacttggggagggtaggttttttcccacggggcaagaaattttacttgggccctctttcatgggtccttgcaaaaaccttttgggtgccccgggaacaatttttttggccctagaggctggggg

SEQ ID NO: 50831 - DNA, 325 bp, Gossypium hirsutum
  Clone ID: LIB3825-025-Q6-N6-C10
acgggaaggtaaccaaccaaaattgtttaccgaagtttcaaaaccaaacatatttaaacaaccaccgtaacaaagcataaaaaaacccaccccccttaaaattggaaaaacataaacacccctaagcagtggaggaactcacagttgctcaacacggtaaagacctcgcccttggaccccacgggaaaaaaagttatctttaaggtcttgggaattctgggtagccgactcggagcccaaagccatgggaaccttggcagaggccaagggccccccaggtttggttttggccgcaacccacccccggggagctttccctttaacc

SEQ ID NO: 50832 - DNA, 522 bp, Gossypium hirsutum
  Clone ID: LIB3825-025-Q6-N6-D3
tcgtgatctagaaccggtcgcgggggtcgactctgccagttatatatcgggtccagaaagtgtataagtgctgaataatacagagagctgagtagcaaaaaggaagtacagcatggaacacagtctaggttcctggtgtggaaagtgcaagcggctcactattactgagaagagtacgaaccgcgatgcataaagagtataggctggggtgactaatgagagaactatctaacattaatagcgttgcgttcactagcccgatgaacagctatgtaaacctgtcctgtcaaacgaataaatgagatcctacacaaattctgtatgaaagcaagcgtgaattggttgctacaatggattttttttcatgcatctacaatgccatcacttgaaggatcttcacatccactgatttgctaatgtataactagctttctactaggtgtatatttaaactggattatcaaatgtgatacgggtctgattaacataagaacttgtaggagaggtatcataatgctctaa

SEQ ID NO: 50833 - DNA, 522 bp, Gossypium hirsutum
  Clone ID: LIB3825-025-Q6-N6-D9
ggggcatatcaaatctcaacccacatctctcaagaatataagaattacccaacaattgatgagaaagaaagataacaaagaaccaaaaagaaaattttgggctaagggggtaactttttctggggggggtaggagatatattttgattggttaagggttagtacactggtgcaaaggggatcccgcagtcaaactattatacataggcaaggcaactctttgtttgaagaacaaagatggtacacgtcaatggcaatatcaaagacagctttggggttttagttcagtctgacaaataacgcggcttggccggggcatgtgaaatattcctacttcacccccactagagctcgtttcagtccttctctttgctctgggggcaactttgtagggaacttcacctcaaatttgatcctaagatcacccctattacctgtctcctttgcaattggcattccttccctagcaatgacgagctcataacctgggctgataatatcggtcacaggcaacgacaagtta

SEQ ID NO: 50834 - DNA, 475 bp, Gossypium hirsutum
  Clone ID: LIB3825-025-Q6-N6-E5
gggccccaaaagggggggggggggtaatggcaaaaacggggaaaagggggttccattttcatatcgaaaaaaccaacccaaaaaaaaaggggggggaactgggatctttttaaaaaacaaaataaccttttatcaggaaaatcccaattgggggccccaactaaacaaagggccctttcataacaaatttaagaccaaacaatcccccaaaagcccaagttcatgaaagtatcgggggaaaaaaagacccagtaattagcggcccgacttttaaaacttcaaaaaaaccaagttctaattttcaaaaacaaaagagctagaacttatccttttaaaatttatcctgaaacctttgacccaaggccagctttagcatctctggggattcctggggaagacctttataaccccacaacttatttaaaaggttttaaacattccccccattgccataaaccggaacgggattttcggg

SEQ ID NO: 50835 - DNA, 537 bp, Gossypium hirsutum
  Clone ID: LIB3825-025-Q6-N6-E8
gcctctgttgcatacatacattggaacattgggattgagaatatctagttttatgtacaaagaagccagttttgactctacacgtaaccgcaccactttactatatgcacaaaagttggacagacaaaaactgaacttccatcaccagagtgacactaagggggggtcactaaccacctatcaccaccataagcaagtaccattctttttaatcaagattttcgagttgaggaggtcgagttgctctgcgaaaccatgtattgaaagctgtgattaagtgggggcaatcttcaacatttcgggttgagaagctgagacattgttgcaacaatacttgtgcatctgacatcggcagcgttgagatgattctcaagaacgtttcctccaattccaggtgcagtggtttatggctgggtagcataggtgacacattgtctttgcacacaagcagaacaggaagccaatctttcacaagcttcattctaacctgtctagcagccaatattgttccagcagcaacagcattggcaagcttac

SEQ ID NO: 50836 - DNA, 406 bp, Gossypium hirsutum
  Clone ID: LIB3825-025-Q6-N6-F1
aaaaaattgaaaattgggtgggggggccaaaaaattagggcaccaatggtttttaaggggggggggggcccaaacatttttggggaaaaaaaaaaaaaaaaccgggttattggttccacccttttaaaagggaaaaaaaagcccccttaaaaaaaccccccctttttttttgcatttaacccccttaccccttaattttttttggggcccacccccaaaaaatttttttaatttaacccctgggggtttttaaaatgggggaaattttggcccccaggggatcttgggattttgggcccccaaaaaggggccaatttgaaaccattcctcttttttgggggggggggggctcccatttttctttaaaaaattggggaaaacgccccctttgttttaaaattagggg

SEQ ID NO: 50837 - DNA, 565 bp, Gossypium hirsutum
  unsure (1)..(565): unsure at all n locations
  Clone ID: LIB3825-025-Q6-N6-F2
gacaaaattgcagatacattgatctacattttgcattgtctaacctacaaaaagaaaaagacttacangagggaacaatactattgncctgcatttatttatttacttattcactatttaacttctttccgagtccaaaagtttagcatcactgcttgaacaagctccttccgagtcactagatccgacctgctttgaatcgggatgttttgtaaagctatctgacatggaggtggatgacagtgtagcgaaactcacggtggcaatgccactggcaagggcacttatgtccctagttccgctgtatagacctctgcttccggtaacaaggatactttttttgtcaactgccggtaatacatcaattaatggagggttgctgtgtgtcgaaccactaatgagtagccggagagtttctcttgcacctttttccactacggaatcagttgtatccggtaataatgggtttacgaggtttggatgtaatggagggattgaggatgaaatagtaggacctgcactaaccaaataaccttgtcctgaagagcaaacatcaatgactgga

SEQ ID NO: 50838 - DNA, 526 bp, Gossypium hirsutum
  Clone ID: LIB3825-025-Q6-N6-F5
aaaaactggtatagtaacccagataccaccatataagagctgggccacttacaaacttcttatgggttttaaatgaacaatttgctaatgacaagcatttaagagtgtatgcaacagagataacatgatgatagcacaattcttaatgatacagtactcttacctgatctttagtaattgatataattttttttggactctatattttctgcttgggctgggtttagatgggcgaaccaccggtttaccaactaaatttgcatttaggcaaaagtctcaacgccattgagttttccacagggttactctaagttctgctcttcccccctccaattactgattgggaaagcaattcctttcttgaagatcaggaataagttctaccatgcaaatgctggaaggacgtatgttggatatgcatcatatttggccgcaagggcctttacagaggatatatctgcaacttgtccaaaactatccagtccaagttcagttgcatggatccctccagtggtaaatgctgact

SEQ ID NO: 50839 - DNA, 434 bp, Gossypium hirsutum
  Clone ID: LIB3825-025-Q6-N6-F7
gggcaaaaaaaccagaatattctaggctaaaaacccccccttacaaattacaaagcttaaaacatatgaccggggaaggcctgtaaagggaaaccccccccaaacaaagcataaaacattttaaaccacccaaacacacccgcccttatttttaaaaccctaaattcaaaaggctggcccttgagtcaccttttgggctttatgcggcacaaacgggccatattccttagccttctttggaaaaaccctagccgaacttgccagcttggtttttgggtaaacgagctgaccagctccggggggggggttcccttgcccggaattggatatcccccacaaccctgttaaccccgccaccccaaacccggccgaaaacaaaaaccccattgtcaccaaaaatatggttatcccggccgggactaaaaccgggctga

SEQ ID NO: 50840 - DNA, 528 bp, Gossypium hirsutum
  Clone ID: LIB3825-025-Q6-N6-H10
aacgtaacttaagaaatatcatatcattactacataccatatccatgggagctttaagcagcacataacaaggacgagtacaaactacaaccattgacaatgtaaattaggaaataatgaccaagactactttaaaaaaaatcaatcaattttgttttccaccattgaagcctttgtgttaccagaggagtttgactgactaactgaatttacatccagttcttcatttctcttaggagatgatagtctagaactagaccattcttctaaagctttgtagtggagagagttcattttaatacaaggccgcctttctcgtatgtatttttcagcggctttccagttttccacaacgcctaaagccaccagtaatgcacacatcacagcaacacttcgaccatggccaattgaaccaggatccagtagcctcttcagtttggatacataagcacgatggacgtaaacaggctgatttcgagctctctttcgacatgcccacttcacagctgattctatctggcctggctg

SEQ ID NO: 50841 - DNA, 472 bp, Gossypium hirsutum
  Clone ID: LIB3825-025-Q6-N6-H2
aaaacaagaaaacattttggttaaaaaaaaaatcggcccagacgtcaacctttttaaaaaaccccaacaaagaccggggatttgatgggggaaaaaaaccggtggccctaagagaagcataattaaacaaggacctgtttgggatatgtggggggacaaactatttggggcggggtaaactatcacaggcaaaagcggggtgggccccccagtttgatttatgcaggggggaaaactaacggccggggtatacaaaagccagccagttgggccaggtgaaagcctacgtaaaattatcctacatccccctgggtaaattaactaaccataaaccccaactttttggccatcacttatccccacgggggaaaaggaaaagccgcccaatcccccaccaaacccataattttccccatttccaccggaatttcactacccaaaacctccaccatttaaaaactaccggggcccc

SEQ ID NO: 50842 - DNA, 447 bp, Gossypium hirsutum
  Clone ID: LIB3825-025-Q6-N6-H8
gggcccaaacccccccgggggtttgttccctttcccccaaaaagttgaccccggaatttaaccccaccccacgggcaaagggacaacaaaactggcccctccaaaaacgggggtggcaaaaggcaaaaatcccccccccccacccccggggttttttgaaacccgttcccgggtctttcttctaggcaggtttcaaaaaaaacccttcccaaggttaaccaacgaaaaccttgtaacaacttctccttccttaaaaaaaaaaggttaaaggaacttctcccaacatcgggggcaaaaaaccccccacatcgccggaatccaaacacttaaccggaccattaaattggtaaaaacaacggccggtgtttacaaagggcagggacctattcaacccaagctgataacccccccttacaaaaaattcctcgttaaaaaccaacaattgca

SEQ ID NO: 50843 - DNA, 540 bp, Gossypium hirsutum
  Clone ID: LIB3825-026-Q6-N6-A8
gaacagaatataagctgccatgcctgcattccattgattccttttagatattatgttatccagattcggatatgtaagagtacaagtacatatttgacatttgagtacacaatttctcaggttccatgtcggaaaaattatttgtaaacaccatgtattgtttgtttgtggcgaaatatgtacaatgctgttaagacaacatttttgaacgcagcttgttttatctgcaataatcttatatttcacagaataattatgtgtacaactcaagtactgttacacttgccactacctataccttttttccatggaaataatagtcaatgtacaacataacattggagaccaacctggatatagacataatgtcaaggatggcggagacaagcttcaaagtgatcacaaggaaatagatcttcagctttaccactttatctacgtttcttctggtaagtgccatgagaataaaaacaatgaaaaaacttggtagtgttgaaaaaacaaaaaagctaaaattcaccttgttggaatatacaaaaa

SEQ ID NO: 50844 - DNA, 539 bp, Gossypium hirsutum
  Clone ID: LIB3825-026-Q6-N6-D2
gatctataacctttctcttgttttttcctttttttagaaaaccggttccttaatgcggcccatttttgcctatttctacaaattaattggcgtgattgtatgttaaataaaatgcatgactaaaaggaaaaagcatcggttgtcattgcggggggcattcttgaagccttctttcaacataaaaaatttccctcctatgcgtggagctcctgactttacaacctttgaagcaaaatctactttttacatgctcgaaaccttttgtgctaaatgattctaatattatccctacgactaccattagacccaacctgaataacagagcgggggatccctttaattcatggcagggatagggccacaatatgcttgaaagttcatcccttacccctgataccgttaaacaatgtgacacaaggttgcctgcccaagatcttttttataatgtgagttgaacaataacggttgaatataaaatgaggtcacttgcgtctctatttttcttacttgctggttattcaaatcaacaaaagctccga

SEQ ID NO: 50845 - DNA, 334 bp, Gossypium hirsutum
  Clone ID: LIB3825-026-Q6-N6-D6
cccacaacaggacaacagaacaatggttttacattttggcaaaaaacagcccaggcgaggggtttacagccgggaaaggggggctaaaaccaaaccggaaaacgacttgggactaaaagtttcgacagaaaaactagttggaaaagtgggggaattatggacagctctgggggggcggaggctgggttaagggaaccaagttgttaacaaaaatggttggggaggccccacaggggggcaaataacccaaagggttgggctccctttaatccatttaagaacaatcttaatgggcctttggctggaaagccctttaaacccaacctccggaact

SEQ ID NO: 50846 - DNA, 538 bp, Gossypium hirsutum
  Clone ID: LIB3825-026-Q6-N6-E10
aaaagtaaatggaatttatacatctcagagaaacaaacatacagattagacattaaggactaacatcattaaaacctgcgtgcatattgaattccctatcctctatatctatccattgtgcctatttgtataaacaggtcggcgatagtcaaccacttcggattgaacaacagatgttggttagcatgcaagtttaggtatacctaaattgtaaatttgtaatgcagatccataaaaaaaaaagttttacttaaatctatgttagatcttacgagtgcacagagtcacaatgtcgtgcccaccaagtggtatagccattagaaagacaatcaccggaaatcaactcctgctgctgtgttctctcccagaattcttcttcaaacaggcagcaaataaaaactgaatttgtctccatcggttcaatgtagcaatttaactctcccttagaaagtaatgtgtgtcagacttcgggcaggtcaagcgctctgggtgatctgacagtaatttcttgttccctctttttgccgatatattgctg

SEQ ID NO: 50847 - DNA, 485 bp, Gossypium hirsutum
  Clone ID: LIB3825-026-Q6-N6-E3
aagaaaaaaacaagggagcctgataatgatttttctcaagcctgtaaagcaaagttttaattaaacaaaattgaagagcttttgtcctcatgaaaattctcaagcctgtaaagcaaaagcagggaagggggaaaaccctaaaataacatagaaacaagctttaattaatttatcttctaccagcaatccttaataaaggggagattataccctggatttcctggaaggaaggcgggatccttaggtcttcctcgaacgaccggttaagggttttaatatgacccttcaatgggtccgaatttcggatattttaaaccctcgtttaaatcacctttttgggcaaccccatcaacaaactaaaataccttggcattggggcatttttactcaaaaacgttaacaataaaccaagctcgtttgaatccaaattcgatacgcatttaagaaactttttccttgccaccaattcctccatcaggggaacc

SEQ ID NO: 50848 - DNA, 541 bp, Gossypium hirsutum
  Clone ID: LIB3825-026-Q6-N6-G11
ggcacaaacattttatttctgtatattcaacactcggagtcttgtcaagttgcaatatctcttctatttccaaagaaccaattggggacaatccgaaacataataaaatgatgtcaaaacttaacccatattgcgataaagattccaactctttctaacccaagatgtcaaaatttattgagtttgcgaatctcaacaatgccttctctgctgaaataacaaatttattgagttactcggccttacctttgctagtttacctgttattagtaatttaacacaaaggcaatgttagaacatccaagaaaagaaaatcactatttaaggtaattaaaacgaatactattgctagcagcgacaggttaacatccttcattacatcactttaatctgacagaacaaaatatagctacatttggcgaatatgatcgttaatttgttaaatagccagccccagccaatatatctaaatatgctactccccctcccctccctacttttttctcagattaaaaccggttgccattgattcagattaaaa

SEQ ID NO: 50849 - DNA, 254 bp, Gossypium hirsutum
  Clone ID: LIB3825-026-Q6-N6-G12
aaacaaaacgggaagccttttattcaaagaatcaacttcattacaataaatttaacgaaaaaagaagggggtcataaatccctccccccctccctttttttaaaaaaaagcccccccggggggggagcccaacaagcccttcaatttaatgcttgaaaaaagccagaagggaaaccatcaaagagaagcccacgggggggggagaaacccccactggaaaaccagctccagcgtctggcaacggggacggcccc

SEQ ID NO: 50850 - DNA, 463 bp, Gossypium hirsutum
  Clone ID: LIB3825-026-Q6-N6-G3
gggccccaaaccccagaatttttcaacacaaaaaaggggctaacataggggggggggccaaacaaacttccaaacatttaaaaaacatccccgggacgggaaagcacatgtaacaaaaaaggcattctttggcatccaaccaaaaaaaaaaatggccaaaaaaaaaaggatttccgggttccaccgggcagggttaaaaaccggggatttggagggtttcctttttaactatgccaccctaaaaaaggaagggggaaaaatttttacccggggcaccttgaaggtaaaaaacccggccaaaataaggggcctggaccacgggcccattgaaaaaaaactcctttttaagggtttaaaatattttggtaaaactaaatttttttttaaacccctggaaaagtgtaaggcttttgcaaccattcctttggtgaatacaaatatgcccatacttctttgcaccccc

SEQ ID NO: 50851 - DNA, 546 bp, Gossypium hirsutum
  Clone ID: LIB3825-026-Q6-N6-H5
gttaaaatgattgaaaatcattgaactaattatgaaaaattcctcagtatattagaaattgatagtacgttctatatttatagacttttactaactaactaactaacttatacataactgattctaaccactttgccaaccactttacttctcaatttctcaacactccccctcaagttgagggttgatatatatctttaacccccaacttggacactaaatactcatgctgtttaacacctagagcctttgtcattaaatcaacaagttgttcagttgttcccacatgctgcatttgaatcaatccatctttgattttatctcgtacaaaatcacaatcgacctttatatgcttagttcgtcaatgaaaaactggattggctgcaatctgtaaagctaccttgctatctgaaaataccacagacttagctggttgattaagacttatttcttttaacaatccattcagccaaacaacttctgccactactaccaccatacttctatattcagcttctactgatgatcgagagactgtggtttgtt

SEQ ID NO: 50852 - DNA, 402 bp, Gossypium hirsutum
  Clone ID: LIB3825-031-Q6-N6-A11
ggggggaaactgggaaatacttttttttattaaacaccaacaaatcctgcttttcctttgcaaaaaaaagttcaaacccgggaagggtatcggcctaaactcggccattcaaaacgaaaaacgaaaatgttttttcccagcccacaatttaaaacaagtttgacacatttttcaaggttttggaaaaaaaaaaacctaacccggcttaaaaacgggtcacacaaccattgttaaaaagaaaggaaaacctcacctggcaactttggggggggcaaattcttttttttttttttgcgggtcaaaatgggtgggcaaaaaagcttacaaaacttttacttttggaacggtcggggcaaccccccggagccattaaaaaaagggtgacataaaatacttgtcccc

SEQ ID NO: 50853 - DNA, 439 bp, Gossypium hirsutum
  Clone ID: LIB3825-031-Q6-N6-A12
cccaacccaaatttaaaaaccccgggaaaaaacctttggtttttttttacccaaacccaaaaaaaggccccaaaggggggaaaacttggccccccgaacggggcccataaagggggaaaaaaaaggtttttccctttggggggggccctaaagggcccccccccccaagttttatgggggaaaccttgtttccccaaaggggaagaagggtttttgggaaaaaaccccccccttaaggtttcccagcccaaaaaaaaggccgggaaacctttcaaaccccgggggggaaggggagaaccccttttgggggatttgacaaaagattttttttaaaggggggggggtttttccccgcggggtttttggaaaaagccccccaatggaaaactttaaaaaaggggggcccaaaaattggggggaaaaaaaaacggggccccct

SEQ ID NO: 50854 - DNA, 467 bp, Gossypium hirsutum
  Clone ID: LIB3825-031-Q6-N6-A2
tttttttttttttttttttttttttttttttttttttttttttttttttttttttttaagcagaaattgaagtccttgaacgggataaaaaatcatacatccaaaggttggctccctaagacaacaagaagacaaccgaataattcaaggtgccactccctaataaacaacttgaagcaaaattttttttttacatccttaggactctttccaaagcaaaagatcccctgatctgagggtgtaagttttttcattaaaaacttcagcaccaggagcttcggcttacattttttttttaggaatcccaggacatttacttattttggactgaacaagctagcaaactttggacgaacaaaaacactttgggaaaaagacttcgatcacttttttaggagggtccttgaaaaaattttttgcaaaaccggctggtcaaaaagaacgtgtgtgggccaacccccttttct

SEQ ID NO: 50855 - DNA, 419 bp, Gossypium hirsutum
  Clone ID: LIB3825-031-Q6-N6-A9
gggggccaacattaaaaaatgggaattaaaattgaaattataaaaagtttaaggttggtgttgggtcattttttacaaccccaaaaaaattaaaccaacccccccaacatttaacataaaaaaggccccaaaggaaaaccaacaactggggtgaaaaacaaaaaaaacccttgggtttggctaaagctttggaacaacaaaaccaggggattttttttaaggtaaaattggcttctctctttttttaaggggaaacccagggatcaacccaattgggtgcactgcccactcggggaaggctattaactttaggggaaacatcaaccttgaaattagccccacaaaaaactccttcactggctacccttggcattgccctgattttgttcattggaggctaaaaggtaattaacccccct

SEQ ID NO: 50856 - DNA, 494 bp, Gossypium hirsutum
  Clone ID: LIB3825-031-Q6-N6-B10
gcttaaatattttttaaaaaccttttcccccgcaaagggttttggccccaggcaaggattacaaaaaaaagggatttttcttacatttctagcaaaacaaaaaaaataaaacggggggggaaggcaaaacccccaggggttatcatacaatttaaaaaccaaaaataaaaataaaaaaatcccgattaacccaagtagataaaagggggcagggggacaaaacttcttcttcaacttcagggggggccacttcccccgaggaccctaaaaacatgggctgaagccaaagagttcacccaccatctcttactattaaaaagaccccccccacccccattccttctaacggaaaacccacctcggccaccacctttgccgccaaaaaacctgctaccaccaccatttttatcaccaaaaccaccccgcccaccaccaaaacttcctctggacaaggccctctggggcaaggggggcaacccattcttcaacacccc

SEQ ID NO: 50857 - DNA, 441 bp, Gossypium hirsutum
  Clone ID: LIB3825-031-Q6-N6-B11
cgcagccgcgtcgtaacttggaccctagacgccgcccttttttttttttttttttttttttttttggttttttttcttttttttccaaagacacagcagaacggtaaagaccggggacggcccgcctagccccccctgctgaaaccccgaacaaccctaaagggggggggagacccgcagccaaaaaaaacccccagagcaaagccgaaaaaaaacccaacgggaaattgaactggcagccggacggccccgccgaagaaacgggccccgagccggggcaagaacgggccccaaccggggggggggggtggcgaaaagggcaaccgaacttcagaaaaccaaaaaagggccacaaagggggcccaaaaaccgaccccaacccgggaaatccagaaagagccccacgggggggtgccccccgggggaaaccgccgggaaaaa

SEQ ID NO: 50858 - DNA, 562 bp, Gossypium hirsutum
  Clone ID: LIB3825-031-Q6-N6-B6
aatgtaaacttccactttatatttcttacaacaggattgatctttttcccgtgttacagtcaatcagaaaaaataataataacaaataaataatgcatgtgatacattcagaaaatcaaggtcaaagaaataacatatcaacacatcagaaatggcgaaagcacagagtcctgtggcttgcaagggactgacctcgtgaaagctaaaatcaaggcggtcaacccatcggcatattctggtcggtatgtatcatcagccaccacactcttacatcaaagattacttggagtggcgcacttagaagataactctattttgttatcgagcataatctggattcagagctaaggcttcccggtaaatcatgtccttcatctgctcttctcccaatggttgctgttcaaaatcgaaattaaatggctcagggcaaactggttcatcagctatgtcgtgtaacctttcaagataaggatgggccaatgcttcttcaacagtaattcttctggttggatcaaatgtcaacattctatcaatcagatcaagagccatccgattaacatgt

SEQ ID NO: 50859 - DNA, 526 bp, Gossypium hirsutum
  Clone ID: LIB3825-031-Q6-N6-B7
aggggcagcaaacatttctatattatatattttcataaaaatgtagcatacccaacaaatgatgttgctctcacaatgatgatggtaaaactatgactacatttaactgccgttaagaaatgaaatacattaaaaaagaagaagaaaaaaacaaccctccccccctacgtgacgactctttgctcatacatatcataaatgaaagaatgaattgtgttttgcctgcccaatcaaaaacaatttcgccaccctacttggaccaagcaactgtatcaatttctgcttgagcactccggtataattccagcctctttgcgagagcactgcgtcgctccatgactgctggatcctcgttcaacaatgccgacaatcgtttttgctccagtttacccaactcagtgtagaataagtcaagcaggcttcttttagcttcacggacttgacagtaaacaatggacttcggaatcgagtggcgcaaagtggcgcaaaccatattaacataggacaaaacagttgttcctattct

SEQ ID NO: 50860 - DNA, 523 bp, Gossypium hirsutum
  Clone ID: LIB3825-031-Q6-N6-C5
atctataatgataaattaaataaaaaataaaattcgattcaatttgatcaattatccgttatttgtgatggaacgcaaacaaacataacttagtgaagcataaaacgggcattgggaacaaggataagatcaccgtgattatgagtgccaaaactgatcatatatataaagcaaaggaagaatgtttcaatattgatttcatttccttactgcggataccctccctcttcaatggaaaattgttgcattccacacaatgaatgcaagaatcgagattacaagaaaaacctccttcggctagtgtccatttcaggcttgtgaacccactcaaattctccgccttttgtatcgaatgttccatgctgtagacttaccaactttagtgtaaaccgaggaccacactcctgaagacgagctattactttttctttactaatgctctcacccttggtatcctttgcctttttaccttttgactcactctgtttgatctccttggtttcaaatatatacctatgatgtc

SEQ ID NO: 50861 - DNA, 436 bp, Gossypium hirsutum
  Clone ID: LIB3825-031-Q6-N6-C6
gggtacaaacacttcgattaggtccaatcattctaagggaaataattcatacaaatttacgaaccacaacgaaaaaaacaaaaaaaaaggggccaaaccaaacgattctcacgggcccgacccaatcccttaggcacaacccaatccctggggcaattttacgactccctcggaaaaaacacgacattacggggccgaaaaaacccgggaactaacagattctaaacagaccaaacccaatcctacacttgaatggtttttaggaaggaatagaaaaacgtttttaattaatatttaggggtcagatgaaaatctggattttggttacgaaaccaaactttcataaggcatcgaaatttcaataaagggggaaaaaccttggattcatctcggctggtggttaaagtctccggggctggggctggggctggcactg

SEQ ID NO: 50862 - DNA, 410 bp, Gossypium hirsutum
  Clone ID: LIB3825-031-Q6-N6-C9
cacaaaagggggacccaagaaatgtccccagtaaaaaagaagaggtcggtctaaggccacgaaggcggcagggggggggaaagaggccggggggggggccaaaaaggcccgtcacagaccaggcagcctgcaccaacggggaggagggggaaaaacggcaggggaaagggctatgatgaagtcgggccccaaaacattgatgggggggcgaccgccgggaagaatgagagaacacagcaaggaaactacaaaagccaaaaagatgctataagcgtgaggaggaggcaaaaaaccgaaccccactgagaggagaccccgcatgccactggggagagcactaagcagcataccaagacccctcgaaacaaccaatacgggcaaactgaccagaagcccctggcctaccccca

SEQ ID NO: 50863 - DNA, 157 bp, Gossypium hirsutum
  Clone ID: LIB3825-031-Q6-N6-F2
tcgcgatctagcaggcccctgggctgacgcctgggaatgacccaccgattcctgcacgcgtcctacatgcgtatcaactgagcctatttagagctggattaaagcatggcgatagcatggtcctgggtgaaatctgtgtgcaaatcgcaattccata

SEQ ID NO: 50864 - DNA, 430 bp, Gossypium hirsutum
  Clone ID: LIB3825-031-Q6-N6-G7
gggggcaaccacccaaagggaccaaaaaggaccggggacagggttttcggccgcaaacccggttttaacaaggccaaacagcccccaagggaagggaaaacaaggccccaattataaaaaatcgggaaaaaaaccaaaattggccccaaaaccccaaaaaaaaaaaaccctcttcctattttaaaaaaaaaggccaaaaaccggaaacctattccaggctaaaagggaccaaggggaattcgggcaaaaaaataaaaaaggggggccccgcaaaaaaaaaaccccccaaaaaaaaaaaagttgccccctgttttggaccttatggggggggcccccctgttctagctaacaaaaaagaccagggcccccccccgggcaactaaaagccacccatgactttggagccgggatttttggcccattcccgggg

SEQ ID NO: 50865 - DNA, 541 bp, Gossypium hirsutum
  Clone ID: LIB3825-031-Q6-N6-H3
cttcctcttcgtattcgatgtgggatgaatttacatgctttatataattagagtgaaaattgaactatacggttatacttataagctaccttgtcggacaaaattatctccttggtcaaggcatgagggcaagggcagcctcttgaacgaaaggctcggtgacattaacaaaatgttcagcttccctctccacttgctccaaacaccgacggctgtcttttccttcgttcatcttcttcacgaaagctacaaaccgtctccagttgtccggctgaaagagtgatgggttcatcctcaagtacgtaaacgcacacatctccctgtcatttgaggatccatcaatattcaatgatgatgcttttaagatctgctcatgcgccgattcgtcgtatcggggcaatgcattctccccggcaagtggaacttgtgcttctttggtagctaaacccacttgtcgaactaggttctccggtgcacatagggcatcttgtggctgctcatgatctcgcatttctatacaagtaaaattgaaaacagcacc

SEQ ID NO: 50866 - DNA, 568 bp, Gossypium hirsutum
  Clone ID: LIB3825-031-Q6-N6-H7
aaaatctaatctagtaacgggttaaaggagaaacaaaagaggaatcatgccatgccagccaaaatgaatgctaaaacaaccaaaaagaaaagacctactagtaaagattgacctgacctacggcctaaggttcaaagctgatcaacattattatcaggaactggactagtgttatcgggctctgctttcgctgtttcatctcccctcctaccattattatcatcaacacccaacacatcatccatcatatcatcttccccaacattgatatcttccacatcttcctcatcttcattgttgtttccacctggtatctttctcttctttggaccatgctccagtctatggctatccaattctttgtccattgtttcttgtaggttcatgtcattgtttgctttcctagctttccgagcattttgccacctctccaactccttttccacgttccctacatattcttctcctatctgtttccgatattcagacagttcctccctccttgctgtcttccattccaaatactcttgttctttctgctgctcatatatggctgcatcttcatgca

SEQ ID NO: 50867 - DNA, 549 bp, Gossypium hirsutum
  unsure (1)..(549): unsure at all n locations
  Clone ID: LIB3825-032-Q6-N6-A11
ggaccaatatactgatcaattgttgatccaacccgcccattcatccaaccgaccaatccaatcccaanaacaatcatcaactcttatggaatccaaatacaaaacctaaatgaatctaattgccaaattcagataccaaaatgaataacaaaaatacaagtgaatctagttctcatgttcatgagccaaaatttaaattataccttaagaaaacgatgagtttgaagtaattgtcaagactcttttcattcacaagaacagatgtagatgtttgtagtaagatgaaagttaaagcggggcacaaactggaaagcaaaatgtaaaggttcactcaaaaggcataaaagaaactgattagctcttgaaatgacattacctaccacaaagatctttaaacaactactaattctaatcaaatttgaacaataaattgcagtgaacttcttcgatacttgaactggaagggttttatgatcatcccgacccaaataggattagactcaaactgcaaaacaatcgaagacaactatgattataccaaaaacaaaa

SEQ ID NO: 50868 - DNA, 550 bp, Gossypium hirsutum
  Clone ID: LIB3825-032-Q6-N6-A3
gatataatattctatcatattacatgactgactttgtcaaagtttacaattgacagaagctaaaacttgtagggcttaaaaactagctctcttcaaggatgtgacggtaacggcagcccccaaagccgacttacccacttcgatatcaaacgagtcgtaacgtctaaacaattccaccaccaaaagcctcgacatcaacaccacgaaatccttccctgcacactgtttgttccccaacgtcggttgctgagtctcgggtccatttgaccatagcacgtgcttcaacaacttctccccctcctctcccatgaacctctcccccacaaactcctccgctctctcgaatattttcgggtctttcgttgcaaatggttggaacccgaacagcatctccccttgtttcacttggaacaccgcgtcgtggctctctatcacgatatctttctttgctctcccgtactgtaacgggaccggtggttcgatccgtaacgcttcgtagacgaccgatttcattaatggcatctgttccatggcggccattgtgagtttc

SEQ ID NO: 50869 - DNA, 547 bp, Gossypium hirsutum
  Clone ID: LIB3825-032-Q6-N6-B11
acccaattcaatcaatccttaccggttctccagtcaattgattcaaagccttggtacactggctgattcctgattcaactggctagtctagtccggtcagttcaaataacattgtctaaaagtgaaaatgggtaaaaccccaacttaactccctcacaagacctacacacaggcaacatcatcagaaatcgtaaacgtcgcatgagataaaaaaataacaaaggcctatatcaaacatccaactcagaaagtttaaaccaattaacattaaacctaaaaatttgtagcaagaagtttaaaccaggcctgagctgcaaaaagacctcgtgcatcacaatggagtgagcacggattcaagcctattttcactctataatctttcccagtttatcattttggctattgcttattcgtctgtaacacatcccatggaagccgattgcacattcttgatgtacttatgcaaagttcctctgttagccttgtaaggaggtggagtccatgtctttcttcgctcatttagttcatcatccatcaactgaacatt

SEQ ID NO: 50870 - DNA, 535 bp, Gossypium hirsutum
  Clone ID: LIB3825-032-Q6-N6-C1
gaagggtgcaattgggtttaaattaaaggtccaatttgcaatgagcaattaaaatccaatttcagcacttgggttttaacgatgcctttaatcatgtcgcttttgcttgagtcctgttaaaggaaaataaccttaatctctcaaatattagcaaattttaaagactttcagcttctttcaataaattttttagacaaatggcatagctaattccttttaggttgcaagttttgttattgaacaaaagggcttataatttggtttttgtttttgttctgaaaggggcttacaaattgttcaaagtccagaagggcatatcgacaacacattagttgtaataacgcatctctgctcaaccccaagggcttcaggtatggaccacaacctggagttgcagcaacatttacctttccttcatttaatattggttaaattatgtagcacttagaattactttgcataacatttttttctcctcattttctaagataatatggacattaagcataactcgattaaaccaaaactcaatgca

SEQ ID NO: 50871 - DNA, 433 bp, Gossypium hirsutum
  unsure (1)..(433): unsure at all n locations
  Clone ID: LIB3825-032-Q6-N6-C4
ggggaccgcaagaaaaaatatgaatatattatggagaacccaggtttgggttttttatcattccaaaactaaaaaactttaaaccaaaactagacaaaattttagccatttacaccaaaaatgggggcaactttaaacttacaaacactataaaccttgactaggtttggcaaaaaacaattttcccaaaaacataaaaataaaaaccccaaaaaacttgagcttttttaaggttcttctaaaaattctgagcgggttaaaaaatccccttccgctccttgaggttttaaaaacccccctttttttgggggttgcccaactaaagggccttaaaaagccccctttttttacaaaacatcaagaggcttgagggggccccggaactttggttttttaaaaaaagaaaaaaatggtttttaaaaccggnggcccc

SEQ ID NO: 50872 - DNA, 514 bp, Gossypium hirsutum
  Clone ID: LIB3825-032-Q6-N6-C6
gtgatcaattgcttttttgcactatttgtgtgccattttcgcgcagtaccacactctccttgaatcttatcaaaaagttgttcctaagcgcgcagtataaaggcaacagtaaaccgcagcagtaaggcctctaaaaacagggctgaagcaggggctacagtcggctccctaggtggacccccttgttacgagggcaatcggtgggagtggacgagacattctttatggacacactcaacacgcgggagcgggcgagggaactaagtgctgactgggcacaagtaccagccgtcccggaaatgttccctgcagtcgcacctatcttaatatgaagggctgctctacccaactccgagcagcgccctagaaacatctggggctttaaccatggctgcttaaggggaagactcccccctataaactttgaccctcaaacctcccgatatgcgaaccatggtttgccttctggagactctgccacgcgaaaaaaagaatcattaaacgctcctacctt

SEQ ID NO: 50873 - DNA, 437 bp, Gossypium hirsutum
  Clone ID: LIB3825-032-Q6-N6-D10
ctattaactatctgacgcaaagaacaaccctatcacttccttccggagaccagattgggtgctatcctgctctctactgtgtctatacacaaaactgacccccaactgttctttaaagcaaactgagaggaaaaagaatgccccaacatgtaacgaacacaattctaccactgggcttttattgtttagcacggtgtcacctaaagaccgagctgctctgacgaggtggtgtcggttcactgggcgacgcctgcctgcaaacacgactgggtcgaaccttttaaggatttcggctacgcgcggatagaggacacactctacaggtggcactttgtatctggtctggtcatacacagaggaatatgccatgtgcttccttctaaagctatgcatcttgcatatttgagaaagggggacacgcgcagaaagctccaaac

SEQ ID NO: 50874 - DNA, 544 bp, Gossypium hirsutum
  Clone ID: LIB3825-032-Q6-N6-E5
aaaacaaaattacagaccaaatataagaatcactggaaaaatatcattagtttatatatacaaatccaagaaaaagccacaaagacgtggaaaactacgaaacctgaacatggaccataaaagggacaaaaaaagtatattcacatttggaatggccattaatgttactactacctaagttttatctggtagactctgttataccaaatggaatgaagtgtcatgtggaagagatcgtacctctcaggtttcgcgtgccataggaaatgcctttgaacctttcgaacaccaagttgcaacgcgagatacctctcttgcggtattgacgtaagtatgtctttcaagttagggatgtctttctctgcaagtattatcgagaaagctccccaatcgagaacttcgaaaaacggtggcacaaaattgtcagagatgataacggggacgcattcataaaagatggattcaactactcgtggactgttaacctcgtaacctttgggacatatacagtacttagtgctcttcatgtgttggatataattca

SEQ ID NO: 50875 - DNA, 194 bp, Gossypium hirsutum
  Clone ID: LIB3825-032-Q6-N6-F1
tcgcgaactacgaaacgcgcgcgtggacccaccaattaatgaccggaccctgcctgcatgccaactatctctatatatagtgagattaataatagctggaagcatggatatagatagctgctgtgtgagagaaatagccattcacaaacacacacacaatacaaaccagccgcatacatagaaaagccagcctg

SEQ ID NO: 50876 - DNA, 462 bp, Gossypium hirsutum
  Clone ID: LIB3825-032-Q6-N6-F7
tctcgatctataaccggtcgcgtggggaattctgatccggaaggaggagctctgatgtaaattataacaaatgttctcttgtaataatatattgcctgcggccttcaagtctaaatgtgtggctagtggtgcatctggctcagcacgaatacagcaagaggcaaattccagtttcatgcagcggctactttaactttcatcacaacggatggttcaacagccttccactgcttctggtcttccttcaactgggtcagccactatcatgcaaactgtaacaccagctgcagtcaatacacaaaccatgggtgcatctttggggccttcctgcgcttctggactcccttgcaataactcaagcactacaactagacctccctgcataagttgcggctctcgcgttacaggtaaactttcaaatgggcagcgaaattcacgctccaacccctcatttacatgcat

SEQ ID NO: 50877 - DNA, 470 bp, Gossypium hirsutum
  Clone ID: LIB3825-032-Q6-N6-F9
ccaaaaaactttataaatccacccaacggggggccaaccccttaaaatcggccaaaaaggctccaaaattttttggggaaaaaaggccacaggatacccggcaaacccgttaacgaggccgaaaaccgccgggtccccgtaaaaaggataataaaaaaaaaaattttaaggggaggtttccaaggggggaaaagggccacaagatacccccattggggggatggcagggtctcccacatttgggggaaacacacgctgaaaaccggaattttggctaaaactaaaagaaattccctaaaaacaaagcttcctttttttcggaggaaaaaaaaaacaggtttggcctgattaacccttaaacttttttttatatggcccaacagaccgggatttctttattcccttctgggggggggggcccctaatcttaatgggggcggaaacagtctttccatttgccgccgttgttt

SEQ ID NO: 50878 - DNA, 548 bp, Gossypium hirsutum
  Clone ID: LIB3825-032-Q6-N6-G8
acaatcgtgaacgagcctatcctaccagtggatgtacaaatggaccgacgccggggggaaactgaatactgtcctaccacatacagctgccactaagccactgtcctgcatataaacatgttctaattgcctagcccattattcccccataacaggtatccccaggtgcatctaaggtatatatgtggccttatcaacacgatgactgtggtcaccgtttacgatatctaaccagatccaaacccttcatcgcctctgactgaatatgcgcgtggcaagctccatgctatatgtacctctagatgggtactctgtcctagccaatcgagcgaaacaggaatgacctgaatgcaagtgaccagagctgccatatgctccgtgtctctgaaactcccgagaacctgccattacctgaagggcactaaatccttctaatggcaccttatgagtgcctcgcaaaaactgtagagaccgagctttatcctccttgctgaacccctgtacatcctcccataacctctgtataacaggatgagtgctgcactata

SEQ ID NO: 50879 - DNA, 516 bp, Gossypium hirsutum
  Clone ID: LIB3825-032-Q6-N6-H11
ggaggagaaaacctcgtatattgatgaaggcaactatgatatctgtacatacaaagacagttctttttaaaaaatttaccatccaagacctagtcgacacaatggtcatattggcaaaaatgatcagttctcggcaattagagccgagccatcaccatttgagaaagaaactacattgctttgtgtagtagggatagcagttccagaatttgagtcatttgtttcacattctccctatatcatgaaataaaaggcaaagcaaagccacgtttatgttttacaaagtgcaagggataataatttagatcaagaaacctaacaagtttaggtgctaaggaacacacctgttgaacaggaactagggagagatcctgagttttcttgggaatatccctcaaagttcccttgtttgcccaaaaaagtccacatgcgttgcataaagaccttggaccaaatggaccacgtcgcatcattggagtggactttgagctaatgccacagggtgtacatatgcca

SEQ ID NO: 50880 - DNA, 569 bp, Gossypium hirsutum
  Clone ID: LIB3825-032-Q6-N6-H9
aatgaatccattatcttttcattaaacaatattgtaatacaaacaaattaaaaattaagggtagctaccaaatacatgaaacacccatttaaatatggatgcctttgtgaaaaatgccctgacaaacaatgaggagtgacacagatatactaattatcttttttttttccagcaaaccacggtccatagcacagcaaacccaaggaactggggagaccatctctctgaatcgagaccataacaattttcacattatgagaacatgaacataagttattcctgggaggctcatccaccttatttaatgtttaaacttttgttacagacggctgaacgacaacatgcatggagatgactgtttcaggaagatcaccaaaatgtactctacactggccaacaattttgccgctctccaaaattttcccagcatttatcagtttgatgaaatttgctcccttaggcgcaatttttttatctttaggccattcagcaacaattttttccttgagcataacaatggttgaagcaggcaagtctcgaaatggacccatatctgatccatcgtacaa

SEQ ID NO: 50881 - DNA, 446 bp, Gossypium hirsutum
  Clone ID: LIB3825-033-Q6-N6-A4
aaaccctatttaaactaattaacaaaaaaaagggggggggaaaaagggccaggccaaacaaaaagcaaaagggaattaagcggggggaacaagccttaaacaggcaatcccaaaaccaaagaacagggcctaacaaaaccccacccttaaagggttttttttcccaaggcaagggggggcaaaagccacaagggataacctttcagggaaccagcacaatggacccagggggccgggaaatcccgggggcggaagggccccgcaaggcttcggacaaaggggcctggggattcaccccaacccgcaaaaggcccgaggcaacataagaaaacacttccccgggagtttccagaagctaatcccggggggacgggtatggcatcagggaaggcctagccaaaaacaaagattggggggcaagggcaaacaacggaaccggatcgggg

SEQ ID NO: 50882 - DNA, 489 bp, Gossypium hirsutum
  Clone ID: LIB3825-033-Q6-N6-B3
ccccccccaaagaaaattatccccccccaaaaattatggggggggaacaagaaccaaaacagggcggcaaaacagcggttttcctcccctatcctagaaagggaaacaaaaccccccttcataaaaggcagggggcaaaggggggaaattttttccattccaaatcccttcccctaaaaaaaaagaaaaaaccccgggaaaccgggggggaaaggaaggacaaaaaggaacccccccgctttggggcagccacattaagccaaaccaggcgggaaagggctatttggccaacaaggcggaaggggggggcccatccccccccccagggaaaaagctataacccagccccagccaaaaaggggctcggaccggaaaaagctaactgggaaatacccacccaaaggcccaccccttttcccaaatctaaaaggggaattagcaggccctggcaacacaaagggggggggggccattttaaggggcggaaac

SEQ ID NO: 50883 - DNA, 287 bp, Gossypium hirsutum
  Clone ID: LIB3825-033-Q6-N6-B9
catatagaatagaaggggcctgctcatagttacatacatacatactatgaagagagattcagtatacgtaaaagaagaaaacaaaagacgaatacaacataaaattcaaagaccataactgatgaagaaattaagtagaacccaggaagtgaataacatcttgatggccagaccacctccatggataaatcaactggagtcaaaccacaacaccgcggatttaatgaccacccacactactatatattgatagctacactagaatcttgcaggtaagtgtgaaattc

SEQ ID NO: 50884 - DNA, 502 bp, Gossypium hirsutum
  Clone ID: LIB3825-033-Q6-N6-C11
gataccaaaaaaactcccatttctatataacaatgatgcaaatgagctgtagccaaaattttccttaaaacttcatcttctaaaaaagggaaagttgtagctgcagagcggacatgaatcctcaagttttaacataaaatcctggcattagggatcatggtatcattttacaacgaaaaaccaaactctgctgatgcctatcatcctttaccgccaagagaatttattcctttccacggtacttgaaccttttttcccaacctaccttcttcttctgttatactctacaatttaaccactcgattatgtcgtccgttacaacttctcgttccagttcaaacaggagatcatgtaacagcccttggaataatctgatcgttttgtcggttgaggcagcttctttatacagtttttcagaagcttgaggatctgttacggtatcatcggtaccatgaagaacgaagaaaggaaccgtgaattccctcaggttttgctgcaagta

SEQ ID NO: 50885 - DNA, 555 bp, Gossypium hirsutum
  Clone ID: LIB3825-033-Q6-N6-C4
caataatctgaattcatactatttgatccatgcatcactcttaacttcaacaggtttctatgcataataaattctgcgtggatatctgcttgtttgaattggaacagaacggattgcaataatcccaagcttcatccattggaaatcatttatcccaccaccatcgatatctcaaacacttcctaatttgattctgtgcccggaaggcacaaaactgccgtataagacaaaagaagcctttgaaaggaaatgactgtatcttgattagccacatagatatttgaagattcagtaccagatcttcacccaaatatggctatcgagcttgataacattttgccattttgctgctttggaccttacagatacatgtgacctctgttcaaggctgagcaagtttctgtgacggttttctccttccactagatgttcaagttgaggggttatagccttgcgtttatatcataatggcatccggaaaaattgccattcatcaagtatgacttgtatttagatcttctaacttctggggtactcaaaaacgaggccttctgc

SEQ ID NO: 50886 - DNA, 510 bp, Gossypium hirsutum
  Clone ID: LIB3825-033-Q6-N6-C8
aagttaaaaacctgtgtttttttgttgcaggaacttgggtgactgcaagtgcacatataataacagcagtcataggctcaggggtcttatctctttcatgggccattgctcagttagggtggattgctggtcccattgcccttggaatcttctctatcatcacttggtttacatccacgctactggctgattgttgcagggaccctgtttcaggaaaaagatgtagctgttacatggatgctgtaaaatctaacttaggtgactaaaatccactctactaccttgaacctaccttactccatttggggtgtgactgtcagatgttagattttttttatgtatttagaggatttttgaaaatcatatctccatatccaagtgtccgacatgaatgactactggttctttcaaggacatggaaccccaatgctaatgatttctaggtttttttctttctaacaggaggaatcaataacaagttttggggattagcacaatatatgaatcttg

SEQ ID NO: 50887 - DNA, 397 bp, Gossypium hirsutum
  Clone ID: LIB3825-033-Q6-N6-F2
accttgtaaatttaaacggtaccgtagtgtacagttttcttataggagcgggggagaacccggaaaaaccaaaccaaaccggaaccgggcaaaaggctaacggaaacaattccaaaaacaacgaaccggaagcaaaaaggtaaaggggggaaaccgaagagtgaacaaacccaaaaaaaaaacaaggcggaaacaaaaagttaaaaagccgggaaacctaaagagcaagctaaataaaaaaaaaggcaaaggcccaacgacaggctgtcaaagtaaaaaaacaaaaggggcagtttcattaaaaaaaagaaccaggcaacaggaaagggggcttgaccttcgggccccgagagaggtttatttttcaccacaaaaaggggaaacacaaaaagggaaa

SEQ ID NO: 50888 - DNA, 430 bp, Gossypium hirsutum
  Clone ID: LIB3825-033-Q6-N6-F4
ggaagggtaacccctcattggggggttcatcttaaaaaaaagctaacagaagtctatttctcattagctttattttgggggaagagaggtggcctttggatttatttcccccccgggttttgatataaatcattcccatcatacaaatataactggttcacccaaaagggagcatccatttttggttgattttgaaaagcatctggaaatgctctttattctctcaaaaataaaccgctttcatgcattaagggctgcttgaatttgttccaagggtttcccttttgtttcagggcccaatgggaccccaaacaatatagcccctgcattaattgccgcataaaaaaagaagggcccctaggcgccccacctcataaggaaattgaaagtgtaaaaaactgcccatgcaccaaaccagttaaccaccgtt

SEQ ID NO: 50889 - DNA, 452 bp, Gossypium hirsutum
  Clone ID: LIB3825-033-Q6-N6-F5
tcgcgatctagaatcttgtactagtttataagcactttggactgagtattcaccaatggttctcctttccacacttggatgtcgttttgacctacttccgctagaagaatctgtaaaattttctaagctatatccgcttgaaaggtattgtttattggatccaccttcgaagtaaaaaaaaaaaaaaaaaaaaaaaaaaaaaaaaaaaaaaaaaaaaaaaaaaaaaaaaaaaaaaaaaaaaaaaaaaaaaaaaaaaaaaaaaaaaaaaaaaaaaaaaaaaaaaaaaaaaaaaaaaaaaaaaaaaaaaaaaaaaaaaaaaaaaaaaaaaaaaaaaaagggggggggcccccccttttttttttttttttaaaaaaaagattttttttaaactccacattttaaaatgggggttgaaaaaaaaattttttttttttttttttgggccccccccc

SEQ ID NO: 50890 - DNA, 427 bp, Gossypium hirsutum
  Clone ID: LIB3825-033-Q6-N6-H1
gggggggaagccttgaatttcatttcacgggaatcattagcattttaaggggtaggtaataagaaaaaaaagccgggcgggttgaaaaatcttcaaattctggttcatacccaatcattttacactgaatttcaaatcaacttcaccaaaatgggccccctaccaagcgggaaacaaaaacaaattcaaatctaaacatacttttctctccaaggggaaacccaaaagaataccccagaaaaagcccacaatttgtcaccaacccgttgggggggcccatcccaaaccaaaacctttactttttttttgaaccaaaaatttcacaccgccaccgaaccatgcaaaaacgggccccctttgggaaaaaaagattggaaccctttgttttttacaaatgggaccctgaaaaggaagaacccccccggga

SEQ ID NO: 50891 - DNA, 460 bp, Gossypium hirsutum
  Clone ID: LIB3825-033-Q6-N6-H11
aaaaggggaaaaaaacattttaaaaaagggggaaaaacagggccaaagggaggcaaaaacaaaaccccgccccaaaacttagggaatcggaatttcaagctaaagggggaataaaaaccaaccctcctaaaaaaaagaaaaactgggaaaaacccccaaccccccccccctttaaaaaaccctaggaacgggagttggaaaaacgtacatgctaggacccggccttggggggggtgccccggaaccgaaaccaaaaccaccaaagcctggggggggaaaaaaacccccattccacggggttcaaaaaaaaaccccccggtggtgggttccaaaacttcccccccaaaaaaagtggacgggcggcttgccaaagggggccccccccaaactttggattgcttcctaaagggccttcctggttggaaaaaggcaaaaccccccttcttttccaggggggttt

SEQ ID NO: 50892 - DNA, 247 bp, Gossypium hirsutum
  Clone ID: LIB3825-034-Q6-N6-A3
tcgcgaactagcaggcccctgggttgaaccggggaatttccgacacgggacctggaaggcgaccaagttttccttatagggggtggattaaaagttgggggaattaagggcattagtggttcctgggggaaaatggtattccgttaaaatttcaaaaaacaatacaacccgaaggcttaaagggaaaagccgggggggctaaaggggggacttaattaaaataaatggggtggggttaatggccggt

SEQ ID NO: 50893 - DNA, 514 bp, Gossypium hirsutum
  unsure (1)..(514): unsure at all n locations
  Clone ID: LIB3825-034-Q6-N6-A6
gaaaaaacaaggtcagtatatttaaatatgtacacacgggttgcctgtccatacaattttaacacccactaatacctcccttatanacagtaaggaatgcacatttatctatatctaccatcattattcaagacctatagccatttttcccatccttagtgaaaccactcgctcatgaagggacaaatgccattgaagttttcaaattatccgctgccgttggagggaactcatgaaccccaccgacgttccatggctggaagttcattggaggaaacatagcgccagggtcagcaaggctgccttggacatccaccccgattgaaagtaccaaagacaaagaaatggatgctaaccaccacatgagttgcttcactgacatatactaggtacatgagggggcatttgggtcctctaatttacatacacgagaatcgctggaccttgaccctggaaaagagctatgtgaccaaacatataatctttcctagaaaacgtgatgccgcacaaacat

SEQ ID NO: 50894 - DNA, 543 bp, Gossypium hirsutum
  Clone ID: LIB3825-034-Q6-N6-B10
gtaaaagcatctgtaaatgctacataatatcgaaacccattcgatgttaccggtgctgaaccctagacatctgctgctacaagttgtaaaggtgcaacatattgagtctctgaggagggtaagggctgtttatgctctttacctaagtgacacgcaacacatgcaaacatatctttattgtcataaaaaaccatattacaacactgtaatgctttgatcagtacatttctgcaaggatgacttagcctagcatgccacagacttagagggactgaagcatgagtttgaaaacaactagttgcctgactaggctgatcattcttaagagtgttgttgaaacgaagcttatacaggccatgctgcactgaaccttgaagaagcacctcattggtctttaagtctcgaacttgacattgtgaaggaaagattttaaacatcacttgattgtttctggtgaactggtccatgacgagacgtgttatcaccaagagattcaactgagtgagtgagatgatgcgttaccccagaatcgggataccatgc

SEQ ID NO: 50895 - DNA, 538 bp, Gossypium hirsutum
  Clone ID: LIB3825-034-Q6-N6-C11
caagaaaaaaatcgtttgattagaagaaaaaatgatactaaaaaagggtacaaatacaataatggagacttggaagattgtttgggttatttcttttctacccactaagcacaaaatatttacctaatgctagagtttatgcttaatatatctaaacatgggtcataaaaaggagaagtagatagtgaataaggtgaagcaggaggagaacgagagtaattagaagatgaagaagacgaagaaatggaggaaatattattgttatgtgaaggattccttatcacccaaggcaccacatcttcgagcagcccttgttggctaaaccctgcttccaaactcatttctggagggcaaccctcaatggagcttggcagtggctcgatgttggtataatttgctatagtttccggaacttgtgattcagcttcggaaatgccttgcttggccttcttggttggtgaaatggtatcatctggagaaggctggtggtggttatcgagtgggagatatggataggcaaagtgcaggtgaaatcctt

SEQ ID NO: 50896 - DNA, 287 bp, Gossypium hirsutum
  Clone ID: LIB3825-034-Q6-N6-D10
gcgcgccacttttggctatccagagttgcattaaaggtgggggtttacagggtgatagatgcatgctgagagaagattgcctgtgggtaacagttatacacatacataactacccacaagattcaagcgggaagcctgaggtgcctagagagggaggtcacttaagtgaattgacttacattaactgcccggtgctcactggccaaacctgaggcgccaaatgtgttaatgaatctgccaaaacgaatcgagaggcgcgctgcgagaggcgcgccacggagggtgcg

SEQ ID NO: 50897 - DNA, 490 bp, Gossypium hirsutum
  Clone ID: LIB3825-034-Q6-N6-D12
agcaaaattaaaattttactttaaatttatatctatcaaacccaactcttttagtcatatcaaggaattacaaagacttctatttaaaatatgccaaattgggtttggttgggataatctcaaacctgaaataacaattatggggggtgacaaagggtacatactttaaggggctcattcctctaggattgcacgtccaagattcgggccaaggagctagtctaacagagttcaaggcctgggggggtaactcagattcaataaagtccggccgaagccttgccatggacaattcttggagtttatttaatagaagatttgtctgagacacattcaacaaaggacgttccttccaattaagcagcttcaacgaatcataaagaagtggcagccaaaagcgttgaggcgtaaaagggtttttcataagtgatatgagagattccacagcttgccgagcaggatctgtagcctttccgtcatgaatctgccg

SEQ ID NO: 50898 - DNA, 464 bp, Gossypium hirsutum
  Clone ID: LIB3825-034-Q6-N6-D7
ggggaaagaaaccctatcatatgggtatttggattttatatatatatgaagaacatagaacaacccataattgtcaggacagaaggggtagaaaccatgtaaggatttacagaaaattggcgggggggggggggttatgctatttgaaagggtcaacaggggccgatttttcaagaataactggagcctcaaagcattgggctggttcacatagggaagacggggaattttcatttttgggaaggggacccagagtataccatgctgacggattcattttatcaactcggagagcattcatcagcaagcttttcaccactgcatcaaattggccgccaagttgtctcaacacaaccgctgcagatatcaagctcagggcatgattcgggtccatgcccaaagcattccagtaagccttcagagctttttttaataagccttttccctcgaaaagaacaccaggg

SEQ ID NO: 50899 - DNA, 390 bp, Gossypium hirsutum
  Clone ID: LIB3825-034-Q6-N6-E10
gtcacaaatcaatatatatatatataacacagcagttccacgtgacgagaattatacatatagcacaaaactacaacagtagtaaaaattgatctaaggaagaaataaagaaagaatcttaagcctgtcaaacaattaacataatcgaattctgcgttacttactagcatcgtatcggttcaatatggttgaaacgagtcaaagaagattcattcccggaattaatatcatcgtgtccatgatacgctatcaatctcatccctcgccgccttatataattcaagccttttagcacactgttgtctcctctccatcaatgctggatcctcgtctaacatttgagaaagctgcttcccctctttctttcctagctgcgtgtaaaagcgggct

SEQ ID NO: 50900 - DNA, 552 bp, Gossypium hirsutum
  Clone ID: LIB3825-034-Q6-N6-E11
actataaacaagaaatttctattaacaaatcttttaattttgttttttcaaaacaagaaaagagaaatgccaaattcagcaaccacgcatttacaatcacttcagtccataaaattagcacaattgtcccttcatcccattagaaagcagcttttcacgtttcaatatacacttatttagctgttgagatagctatccccagctgatagcagctatttacaattacagcatatgttgcagttgtccccaagcatttattctggtcgaaagctaaccaggttggggagggcagtcgactgaagcttcttaatttcagccgcagttaccttgcaggactccaaagacagtgaccgtaaattcttcagaggctttagatacggcaaaccatcattagttatgttggaatttgaaacattcaacgacaccaatgcattcagtcctgaaatcaactccaaggatttgtttgtcaggttgcagttttgtgaaaggttcagtagcgttaaggaggggagatctttgatatttttcacaccagcatcagtcaaaccccct

SEQ ID NO: 50901 - DNA, 526 bp, Gossypium hirsutum
  Clone ID: LIB3825-034-Q6-N6-E7
ttttttttttttttttttttttttttttttttttttttattttttttttttaaaatttttttttttattttaactgttgtttctccaaatctgcccgggcccgggagaatttaaaggccaggtaaaaaaaacaacccaaaggcctaaacccacccaatagacccatttacaccctcgacccagaagcccacaaaacccaatacaaaaaaaaaggcggcccaaacaaatcagacccaaaaaaccatggggcccgaggggccaaaacggctttaaaaaaggggaaccccaggggtttccgcaccttttagcgccgcaaaagaaagggtccagaattcacacaggaaccatcccaaacgacgcgccttttaaaaacgcgccattccaggagcccccaacagcgccaagactctaggtctgaaacgcccccaaaatggcgcacgtatcaaaggcagaggactcgccatcattctcaccaacacctgcaaaaggagaaagaaaagccccgaaaccaaacaaacatagcaag

SEQ ID NO: 50902 - DNA, 515 bp, Gossypium hirsutum
  Clone ID: LIB3825-034-Q6-N6-F1
gctatattcaaccttcaaccaccatacgcattggccaaaacagggccaaaaaaaaatattgaacatgttatcaaaacaataaataaataggggaaaacattactcaccaacaaaaccctcaccactttctacttttcttttaccttctattatataaaatccataattgatttttttttttttaattggagaaggctaagaatacaggaatcagaagctttcctcatcaatgacaccataactaggatgatagaattgattgcaaagcaagctgctgctgtggctgcaaggatgaccaggttgatgccagtgtaaatgcaggtaatgattgctggaagtgccttatcagatttatcattctactagcagtttgctctgttgccaaatctttaccagcacataaaacctttgcaaaaacaaaaactattttaggaagatattgattgttgggccctaaaagttcctgatctgacctttcaaccatagaacatagctgttcgtgaacaatcttggcc

SEQ ID NO: 50903 - DNA, 533 bp, Gossypium hirsutum
  Clone ID: LIB3825-034-Q6-N6-F9
ggccttcgaaaaaaaaaatatacatctcgagaaaaattacatctgtccttggcacctgccactttatcaaataatgcaagtccttgccgatacacaacaacgatcatcagttgcctgcataacttacaatacattgtgccaggcctggccctgggcggctgatgcatggagcaggccttgcccagatggattcaagctattgggctgagatgctgcttctaatacagctggctgatataggacatcctccatttccttaaggattgccttaaccactttaaaacttactgccccagcccaaaagagtctcccgtttattttttcaaaactattgggtgctttcgggaagacaatggcaatgttatacaacatggcaaccgcttaggaggcttcctgccccaatggctgttgcattaaaaactttctttgtaaacaagtattacagaaagttccacactggctcgacacactgtgggctgttgtccaaggcaagggaaattgcttatttcacaacctcagggagatgacatgga

SEQ ID NO: 50904 - DNA, 531 bp, Gossypium hirsutum
  Clone ID: LIB3825-034-Q6-N6-G9
ataagctaatatgatcataactactttaatgtgttaaatttaaaaatgtaagaatgctcaaactcaaaaattgttcaagcttgggcgcacttatcggaaccatggtaccgtacaatgggcgaacggaagccatgtgtcttttgaagtttaacaagagccaagtagccattgcgaaggttcaattaaagcacctatgccttaagtcacataccccgaccctgaactgttaaaacggatatgagaggcacagaagaaaaccccaaggctctgctaaactgatacacaaaccctgaggccatatgcagagaatcagcaatgacggaaaactgggaccgaaattgggaacattctaagctgccagaaagatacattgaactctctttcacaagcaagcaatatttcaagggagctaaggaacccttggctcattgaagcaatgggaaaacttgtaatacctatgaacattcgacaggcattaaaaatactgaaaaaatgcaaaacccctaagctgggatgttttgttcaaatata

SEQ ID NO: 50905 - DNA, 383 bp, Gossypium hirsutum
  Clone ID: LIB3825-034-Q6-N6-H1
ggggcaggaggaaggaatccgggggccttaacatgtggggggaccccaaacgtcagggggtacaggtgcaaacggggaaaaatccccttttcgcggggggctgaagggccgctttagagctctgcctatattgaacggctgccaaacagggggcacactatttttatgggacgggggttctcaagctcgtaaaggggctttacggccactcgggcagggggggccaaatttttattcccgccactcccggagggataaacgtggcgccccacccaaattccctaagccgggcgattaggatgaacccccttgccgggaagatgggccaaaaaaattggaccggtttaaaccgttttgtaaaccccccaccagggggggttgcc

SEQ ID NO: 50906 - DNA, 440 bp, Gossypium hirsutum
  Clone ID: LIB3825-034-Q6-N6-H4
gggaaattaacagagagccttaaaaagggtgaattaaaacataaataatattatcatacatggaattcaggcctggtcttcatctgaaaaggaaaaacacaaatttgatataattcaaaataaaacataaacctttcccttgggggggacctgaaaatcaaaagaaaaaaaaaagggaccttaatcttctggcattctataaagggaggagggtctaaccctccctatgaaaaaagaaaaaaatgccctgccttaacatcatcaccgggaaattggcatgctagggcccagttctgctgctttccccatttctaaacgggtaaaaataaggatgagcccttgcttcttttgcaagtagcctttccaaatgatcatatcgaaacaacttatcgaggaaatcaaaggcctcagggaatgccaaatgttgattctcaacatta

SEQ ID NO: 50907 - DNA, 332 bp, Gossypium hirsutum
  Clone ID: LIB3825-034-Q6-N6-H5
aggaagggggaacattttatcttatttcacattggtcacaactcaaaaaactccccaggagaaaccggttctcctttaaggtcttgacaacattactaacacccattagcgggtaaaaccagggatttaaataaaactatctccgggcttttcactctcaaaaaagcaccactggcttcacggatgggagatcagtttggtttccgccgggcaagccaatagcttttgggaggagacagggacttggacttgggtggctaaaaaaaagggtaccaaactttatccaaaggggccctctgattatgcccagggggggggaacattttccctgg

SEQ ID NO: 50908 - DNA, 332 bp, Gossypium hirsutum
  Clone ID: LIB3825-034-Q6-N6-H8
gaaataaattacattttaaaaattattagttgaaaaaattttctttttacagggaatttgcttccttttttaacaccattttttcactagaaagagaggtaaggacaacaccacactgataaagcctgattggagagcccggggaaaaacagatcattacaacagggccactctgttcctttaggggaaaaaagattcccggcttcagaaagacaaaggtaaaaatggctaaacgccaccctctgactttggggaaccctagaacgaaaaaagagaccggacccgggggggggccctgcaattacccccgggtacctgaaggggtgccaggt

SEQ ID NO: 50909 - DNA, 518 bp, Gossypium hirsutum
  Clone ID: LIB3828-023-Q6-N6-B11
gagttgattcaatattacatctcgtcataatgattcttttggctcattactcgttcgttacacaatttttgaagaaaagaatcacaaagttgcggctcccactaattattttatttaagtgggattaatcacataaaaaaaggaggggggccacttgaattggactccagtaaagcctctgccagatggaggtggtcaatgtctaagatttcacatcaaagaggaggtccttgcacttacacctttgagttcagcagggactctgcatttcttgctgaaccagagaatagaacagatcatgtcgtcactttggcccctctactatagggaaaatttctagttgattttatatcttccatcatttttatttttggtctcttcactcttgctcaatgaatgccatattttgatttgttgctttttatgaaatattgctatgctgaccgatttatgaaagaactgatttttgatatacaaaaatggataaatgggaatcgactaaaaactatttaatgcca

SEQ ID NO: 50910 - DNA, 536 bp, Gossypium hirsutum
  Clone ID: LIB3828-023-Q6-N6-C9
ttttttttttttttttttttttttttttttttttttttttttttttttttttttttttttttttttttttttttttaaaagggaaaaaaaagcaaaccaccagtttcattctaaaaaaaaaaacccaagtcccttataggcgaaattgggagaaaaaaaaagttttaaaaaaaaatttcatttatggaaaggctggggtaccccaccccgagataggcaaaagaaaccaaacgggattctagcagggggaaaaatataaaaccccacacaatttacccattttcgcaatctaaactctggaaaaaacacgttggacatcttctatcttaaaggacccccaaaaacagggggcttggcccttcatctttgggcaacaaccagctgagggagggggctttttgtccccattcaagcatgagctataccccaaggggttaaaaaatttcggggctggcgctgcctttgcccccgaaaaaacaccccccctagagtccccccccacaaaacaaaaaggggaaaaccccttcatggttttt

SEQ ID NO: 50911 - DNA, 455 bp, Gossypium hirsutum
  Clone ID: LIB3828-023-Q6-N6-D8
gggccaaccccgggggccaaaaaaaggggggggaaaaaataccccccccaaaccagataatgaacccaggcccaaaaaacatggccccccaaccaggccgggggggaaaccggaaacaaatcccttggaaaaaacaaaagtttaaaaaaggaaccacaatattttaaaggggaaaccatttttcaacaaaaaaacctttcaaaacctggggggattttagcccccaaaaaaggccaacaaggccccaattctaaaggggggggagccccccaccccaggggaaggggcatcaccgcaatcaaaaaagggacaatttccaaccattggcctcttttttttttaaggggaaaaccggaagggtccacctgcgaaaaaaaaaaacgcagggccgggaagccccccaagcccccaaaaacaaaaaaaacccggaccccaacaaaaaaggcccccaaagc

SEQ ID NO: 50912 - DNA, 469 bp, Gossypium hirsutum
  Clone ID: LIB3828-023-Q6-N6-E11
gcactataagttatgaaaagaacatttttataaataccccaacatatcttaaactgatacttgggaaccgttataacatgaaatcggggggcaaaacaaaggccccttatttctgaacgggttctatatacaaaatctctttattgggactaaaaaagggggcgacttcaattctggacctggatcgaatataaacaaatgaactgaacttggcaaccatagggggaaaaaagctatccaatcaaatcagggtctcatggccaggggagagaaccgattataggaccagctcagtcttttctgttttgcaacacctttaaatgcacaatgatgtatatattttacatggctttagctggtgccgatgaaccacacggggaagcactcatttatttgctattgaaatggatcggcccaacatttatcggtcttggacagctttttcccatcgttttctgaaaatatccaa

SEQ ID NO: 50913 - DNA, 179 bp, Gossypium hirsutum
  Clone ID: LIB3828-023-Q6-N6-E12
accacaacaaacaatgaaattattcatatttcatacccatttaaatccgaaacaaaaactggaagttccaaatgatacaggaagtacaggccccatgcaaagtaataaaaaccccatgaacttttataaacaaaagcttttcttaacaatctccatctacatgggatttcaccaaaaag

SEQ ID NO: 50914 - DNA, 521 bp, Gossypium hirsutum
  unsure (1)..(521): unsure at all n locations
  Clone ID: LIB3828-023-Q6-N6-F1
caaagaaggagagagagnaagctagctcccttgtgcacattaatattgatttttttttcatttacatggctaaacttaataataaaaacaaactaaaagattaaaaaagaaaaagcaaaagaaagccctaagatatcctctaacttaagtaggttgatgaaacccagtatatataataatatattttttgcatggaaagctttcatcgtggaaattacagggttttgattgctttaacatcatatgagtagctgcctgctgggaatccccccccccctccccaacccttttttcttttcttcttaaatcaaaagtttgagaaatgattctgtgagggttggaccatttgcagctctgttgttgtttggcatgagtgatcttcactcatcatgctctctcgaggacgagaggcccaaagagaactgagtgctcgtaaacgtccataatactctccgatcatcagaaaacaccgtgctgcttgtctcaccgttaatatccgagacaattgatgaagggtttgc

SEQ ID NO: 50915 - DNA, 504 bp, Gossypium hirsutum
  Clone ID: LIB3828-023-Q6-N6-F12
atccatgattcttttaccatcattctgtcaagttcctttcctttggatccatattcaaaccacaacattttgtaaatatatattggtgggagactatttctttttgaaattgaaggagggggaaaaaaaaaaaaaaaaaaaaaaaaaaaggaaaaaaaaaaaaaaaaaaaaaaaaaaaaaaaaaaaaaaaaaaaaaacgaaaaaaaaaaagaaaacaaaataaaaaaaaaaaaaaaaagggggccccctctcggcggaacccgggggcaacccgggaatattgggccaaggtcttggggggtcacaattttccctttatgggggcccttaaaaaacgggggaaaaaccgggggaaccttttttctggggaaaaatgtattaagggcaaaaggcccccaaaacaaattgcccggagggaaaaaatggaaagcccggggggtccaaaaggggggccaccccccaataaagggggggggcctattggcccctttgggggggggaaaa

SEQ ID NO: 50916 - DNA, 410 bp, Gossypium hirsutum
  unsure (1)..(410): unsure at all n locations
  Clone ID: LIB3828-023-Q6-N6-F2
agaaaacaaacaatatgtgaacccaaaaanaattaaatcattcaccattgtcgttcctcacaagtacatagtaacccaaaaggcacaaacaacaggcacgacgttcccttccgtcaacaaagtcttaaaaacggggggggggggctctttagtaatcttcttcccttcagccaccaacgtccgttttggtttcccaaagaaagcaagcaaaacgaccaccggtatccacgtcaccatagtagccggcaccgccacagccaccgtcgcagtcatagaaatcaacccaaaaaccccaccgagaaggacggaagcatacagggcaggccaaccgggtgattgataccgggcttggttttggtggtaccaagaaagtatggatttgaggaaattccatgaagaatctaaaagga

SEQ ID NO: 50917 - DNA, 448 bp, Gossypium hirsutum
  Clone ID: LIB3828-023-Q6-N6-G3
accggaagttccaaggccttttggccatttgaaaaaagcatttttaaccacatgggggggggggggccatggcattcacattacaacctttattttcatcaggagcctaagcccacccccccctaatataaaacaaattaccctttaacatttgaaaaacaaccttttgggaacatggggggaggggaggctttgaaactaaaaaagaaacttttggggaggggggccccatgggggaagggttttttttttagcttaattttcccccggaaaagctccaaaaaccctaagctaaaatgggggaaattggggaggggaaagggtttaggggggagtttccataaagatttttttaaaattttaaaagggggaggggaaaattttgagaaaaaatggggtaaagggggcaaaaaaatggaaaaaagggggggaacttttaatttttttt

SEQ ID NO: 50918 - DNA, 536 bp, Gossypium hirsutum
  Clone ID: LIB3828-023-Q6-N6-G9
aaacgttaaacacaccatctctttctaatgtacacacctcagtggcacgagacggctaaatgcaaataaattttaactcaaatccatcacttccgacaatctcatctaacttgtatccaaatgaaagttttccccaattcccggaactatacaactcttaacaaattggcccgagacaaaagaatgaatgttgaagttgatcatagaggagaggaggagaggaatttacatgttgatacgaggcaccttttcaccttccagtaaattaacagaacgaaaccacaatacttttaaatggactgcagaaccaatcatctctcgagctttgcaaatagatttgagagagcttgataaagagtggaagcagcaggaggcataggcagtgaaccgagaagaatatctgaagcagtgatagatggattaccataaaatctagaattttcttggtttctggttgtcactacacttccttcaagtgagcaccccaaaaatgcacctttactacagctgtatgtataacaagcagcataacctcc

SEQ ID NO: 50919 - DNA, 525 bp, Gossypium hirsutum
  Clone ID: LIB3828-023-Q6-N6-H7
gttgaatataagggaaattctaatatccaaaagttaaaaaccaagtttcagctacaaagggaaaaccacctaaaagcccaaaaatcagccacaattggaactgatgatcaccgaccactctgttttaaagacttttttcctttttatattatgtttcacgcctccttcgtcgtgcagcagcagcagcttcatttttctctgccttttcaaccttttctccatcgcttccttgatcatctgatgtttcagcgaccacgggtactggtttcgtttctattcttgggcattgctgattcttgccaccaaaaatgagcttcaagaaaatcgtgaggataatggcgacagtagagactaggactcccatggtgaggtttggttgtttctcagccttcttaatgtgatcgagaatttgaggcttgtagttgcttaagaaaggaatatcagcaatctggtatagggcattaaacaccttcctcttgatgcttgcaaggaagtctaaaccagaagcttcttcctcagcctgct

SEQ ID NO: 50920 - DNA, 483 bp, Gossypium hirsutum
  Clone ID: LIB3828-024-Q6-N6-A11
attggaaatatctccttaatcataccacaaagcgcttactaacattcttaaataaccaaaaacaaaaaaatcaaccaaaagggggaaattaaaagagcatggaaaaaactaaaggaaaatacaaaaggaaaaaatagggggaaaaataaaaaaaaatggggtttgaatcaaaatcgttcaagaactgctaaagggcataaaaaaggaatttgaaatctaccataatctcttgggggtcatttttttcggctatgatcatcaagaaaatcttagaaatagaaggaaatgaaaaagaaaaaattttaagagaaaacagcaatgggttaagaacttaggagcctgaaatcgtttagccaaaaaaaaaaaaaccaagacattaattacttttaggcctttttgcattctgaagcattaaaagcatttcctgggcacgatagatgggccaaattcatcatactctgccttcgcaatccacatctgctg

SEQ ID NO: 50921 - DNA, 517 bp, Gossypium hirsutum
  Clone ID: LIB3828-024-Q6-N6-B1
gtgtgtggttttttttttataataaatattttttttttttgttttttatgtttttttgcttttattgtttgatgatgtttagggtatgaaactatgaaaatacagtcccaccatttgggctaaaaaacgagacaggggaacacaaactgaggggggggcggaaaatttggttttgaagagcaagaaaacaagggcagactagtggctggttgtgccaatgaaaaatgggggtttagggggagtgtagactatgccgtttgaatgcaagggacgattttatccacagaaagaaactagagggaaactgtgcttgaatattgaaaaacacctgaaatcagctctaagagtttgaacactgaaaagactgcagttttttgaagtgatataaggaggtttgctggaccattaaatacaaaaggtatggacccatttttattaaggggacaaaagagtgacctagggacacgaaagtgaaacacatagtctaagccaaagcccaaaggaaaaacttgggccc

SEQ ID NO: 50922 - DNA, 531 bp, Gossypium hirsutum
  Clone ID: LIB3828-024-Q6-N6-C9
atgacagatttcactttactaaggattttcatggactaaatagcattttaaacatacataacttcaaatatgacttagattggccattccaatggctaatcatttacaaacccttttcttaccaaaccatagccatatcataagatcatttacacaaagtgagtattttgccatacatgccacattcaaaacacacaagccattttaccaatttaggccttcggatagtgtgaacgagtcttcgacctatcccaattctcaagccagcttgttaaaactacaatgaatgaaaaggagggagtaagcataaatgcttagtaagttcatatgcaaataacaagtaacataaccatacaaatataccaaacaaccttagcatggtatcaccaaaacatatatcacatttctaaacatcattcatcatcttaccaccttatcgttgttgtatctattttcaacccgagggctaagtacatacctgtccaaagtgtccatttcacaacacttaccaaaacgtcacttgcatcttaa

SEQ ID NO: 50923 - DNA, 551 bp, Gossypium hirsutum
  Clone ID: LIB3828-024-Q6-N6-E9
caccatgctcacaaaaactgaaaccttttataaccataattaatgtaagaaaaaaaaacaccagtggtatgaatacagacatgaaatagacattaaactaaggattgttactgttctgacaagtcattaagcttgtctttgatagtttgcaatgctccatcaatggcagtatcaaatgcatcttttttagtcctcaatccaagtgaactaccgtgccttctatatataactctagggattaattcaataacagattctctcatcttccttacttcactccttggaatccccattaacacatctaaaatcttcaaccctttgaaaaccacttcttctttaggtataaacacagagaattctgggtatttctcctccggtaaatgccaccggtactgtgatctcgccgacatttcctcgaagaaaaccgggatacacccggtagtgatagcatcaaaagtcgacctcctagttggtgtatcccctggtggttgtaaacaaaaggttgcttgtaacataggtctcatatacctaataggatcatgttcacatat

SEQ ID NO: 50924 - DNA, 373 bp, Gossypium hirsutum
  unsure (1)..(373): unsure at all n locations
  Clone ID: LIB3828-024-Q6-N6-G11
gggggggggtttttttttaaataaataaattttagtggttatggtcgtggaattgtacatttttgagtggagttttttttatgagggatgaaatactggttgggtaagaaacttatatatgggtcgcgatccttatttaaatttaatgggggtttgtantgggggatttgtgatgctnccttctggtngtgantttaagtttgtcggacctttttataatggttatagattggttctgttttgatagagnttttagatgcgattgtgggtgaattgggtggggggattgttggtggcattgttgttgcacttatttggaggggggtattgattttggtgggtggggtgtgtattctgtggggtttattggatt

SEQ ID NO: 50925 - DNA, 332 bp, Gossypium hirsutum
  Clone ID: LIB3828-025-Q6-N6-C3
cctggttcccccgggccctcccggggggggggggggggggcccccgggggggggcccttggggggcgcgggggtgcctggtaaagggtttttccggggggggcctgttacccgtcaaaatttaccccgaggagacaagcgggaggcctaaagggaaaaaccgggggagcatagggggggaataaaccaaagggaagaggggggccacccatgggcgtaattccaaaggaaaaaatgggggacccggcggctttagagaagggagaaacggggggggaggggggggtaggggaaaggccccaaagggggtaggagttggccccctggccccgg

SEQ ID NO: 50926 - DNA, 504 bp, Gossypium hirsutum
  Clone ID: LIB3828-025-Q6-N6-D12
gggctgtaatgtatttgataaaatttatgcttaaaaaacgtaagagaaaagaaacacgaagatgggactggtaaccaatttcttacccatttacgttacagcatactgggagatatttgaagccgtaacaaggggaacagatttcatctactaattcctctggtcaattaactggtaatgggggagggacatgagtttacagagataatcaagcaacatcacccccaaataaagtcaactttctgctgatgaaggggtagatccatcttccatggatccattttctgccagggaacttttccattgccacaaaacttgcatcaacccaccattcgcaacatgcaaaaggaacacccttgttcctattccaaaccatgcgcacaccaacttgataacaacaaacaacccacccatccataacacctgccatttcatttccaagtccttccccttggagcttcaaaatgcttcttgggatgtctgttttaggaaatcagacatcaa

SEQ ID NO: 50927 - DNA, 514 bp, Gossypium hirsutum
  Clone ID: LIB3828-025-Q6-N6-D2
caaataacccaggaagacttgagatcattgccaagaatccaagatgttggccttgtgtgagcgacccttaaaaaggcagtgaactaaaaagaatgggcaaaatacttgacacaactgagttgggggggggacaaatgcagaagaccttagacagagcaatccaagcttcttattatattatataccaaatgaaatcgatttcctggcgaagtggtagcgagttagaatgcgaacctcgaaggaagtgcgcaaaccagtggaggttaatgctcattctcattctgctctgtctcgtccttcggttttcaatcttccttgttggttttagcaacctcttgagaatcatcagctccagaagggttcgcttcactcaagtcttccttattggttttggcaacccctacagaatcatcagcttcagaagggttcacttcacttgagtctgcatcagtaggtggggaggttactgcaggagtgccgctagtggatattgaaggtgatacatcaggcgatt

SEQ ID NO: 50928 - DNA, 529 bp, Gossypium hirsutum
  Clone ID: LIB3828-025-Q6-N6-D3
ggggtgttttttttttttttttttttttttttggttttttttttttttttttttttggtgttttttttttttttttttttttaaggcccaaaaaagaaggcattttttccccaacctttaaaaacaaagggttttaacaaaaacaaaaggggggggggggggcccattacacacagtccccccccagattcattttgggagcaaaaaaaaaacccccaacccccattaactaaaaaaaaattttttttaaaaaaaaataaacccccaaaggatttaaatttaaaaaaaaaatttttccaataaagaaaaaaacaaaatccacccccatgggtcatttcaaagcttcaatcaaaaaaagggtggggcttggcccggaaaaggggtttcttcttcttgggggggagagtatcaagggggaaaacaacctttccaggctcaccggtcttgaagctatcggagaaaacgggttcatgggccgaagaaactttccttggtttgggtgcgatcaggggttacccattttgggggg

SEQ ID NO: 50929 - DNA, 517 bp, Gossypium hirsutum
  Clone ID: LIB3828-025-Q6-N6-D8
aataccacgtttaactcctccaagaagaccaacaggaagagatttctcatattattttcatcaaccacagcaagattttcattgcccctagtttttgcaactcctccagacatacttgaaataggggggtgtaaatttaagttttcttcactcagttttgctgatgtggtaacagaaaaagcacccctttcctgtgagcccaccaactgtctatcagaaaaagagctgtactggaacttattgcagaactctgtaacatttttcgattagagcctccaagcagagactccaatttagaagtaatacctgttaaggtttcagtaccgtcccctccttgcatatgatgcaaatgtgtatcatgttgaactgtttccagaagaggattgaatggaggtgtatccatgcacctagacttcagcagttggtgttcagtttgaagacatttttgacgtaagtttaggctgcataaagtctttttcaactttgtccgttgcatactgccaaaatctccaccctg

SEQ ID NO: 50930 - DNA, 537 bp, Gossypium hirsutum
  Clone ID: LIB3828-025-Q6-N6-E12
aaaaaacaaatgagataataccatcttattattccaagtaatcctatctttgaaaagttcaatcatgaatgatgaaacacacagaaaaagaaaaaattatataagttaatgggtgagctatccgagctcgccgggggacttgaccaataaaatcaaatttgagttcaaagatacaaaatcaatcttttgaaccactttgctacaaatatgaacaagattatcatcggatgctttttgcagccgagacaaaatcatttgtaaggtagaatccaaagccaatatttaggttccacctcatgcacatgcatacacgaacgaatatgattttcttctcctaatgctaacaactaattcagactctccctactgtcctataccaaacatgtatgatgaatcggtgactcgaatagataatgaactgtaaacagttagtggagcgagctttacatctaaaatgcccgttccatgaatgaacaacaatcccctactaaaattctttcagttccatgtcttgttatgctaggtggtcgggcatga

SEQ ID NO: 50931 - DNA, 510 bp, Gossypium hirsutum
  Clone ID: LIB3828-025-Q6-N6-E2
cattctcaatgtgggtgcgagcatcgatattcatatttatgtccgacacataggtgtaaatatcggatccatctgaaagttagaacaacaaagttttcaagcatgcatgtgactgccatacattgcctgcttaggggggggggcggaaaacaaagtcccagattttgaaaggaaacttgaaattcatacaagatccatgaaatggcagaacttcatttttttgcacacccaacctgacacgtccccattcaatatctctcattgcttggccattagatctttgatcaaccccagtatttgttggctgatttgaccaaccaccgacggagtcacctgctcctttagagcagaaaaccacaaatcagggccatgtttgttttcactggtttcataccatgagcatatggtttttgaagtagttgtaacgtgtaaggcacaaatgaagccattaacttgctgaggtgtgtggatgcattcttgatactttgttattactggggtgaactttgg

SEQ ID NO: 50932 - DNA, 394 bp, Gossypium hirsutum
  unsure (1)..(394): unsure at all n locations
  Clone ID: LIB3828-025-Q6-N6-F1
ccttgtaaaaagtggtgcaaacatgttatntaaagaatagggnaaacaatanatggtacaggtttactggacatgaactgtgaatactttgtaaaattaaattggtaaagataaaatgcattacactgggggggggggtttttatntgaaggaagattgaatttnttncagacttgtccatttggttttagggaccaaaagtgggataaaaacaaccgtgaatgcagttacaagtggataaatagtgaatgttaatgaaatagttaaggttagaaggaagtttgttgaaatggtaatgatttatgatgttagtaaatttggtaatgttggtaaatttgtagttaggtccttaatatttaatggaagtatgttgtacattataaccaatggaatt

SEQ ID NO: 50933 - DNA, 539 bp, Gossypium hirsutum
  Clone ID: LIB3828-025-Q6-N6-F2
gtggttttttttttttgaaaataatagatgggaagggttcacattaattattatttctttaagcagtagtacaaatatcatgtgcacaaattatgaaatgccccctatggcactgcagaatcctaaccaaagtaattaaacatcactggggggggggggtttccttcccctcattttagcctttagcgaaataccctgtcgaatcggaatcaatttcctaaaactcaacaatatatacacttccgcgtcccccattcttgcagtggaaaccccccagccatgaatatatcggattcatcgataacgataaacattactgtaagccaggtgccactacacaatgagattggggatcttcgacaaaaatgcatttgttcgtgatgtatctcatctatcatctcatactggcagtagatgcatttacattcccagataccctcttgcacaagcagtcgggtaacggatttacataaaatgcttcttctgaacgaaacctgtccatgcccttagttcctgatacaggacctcttctcctcctc

SEQ ID NO: 50934 - DNA, 442 bp, Gossypium hirsutum
  unsure (1)..(442): unsure at all n locations
  Clone ID: LIB3828-025-Q6-N6-H1
gccttcaataagagttgagtatattattattattattattattattattacaaaaatagaaaggttgttcggattaattaataatngacaacattatttcaaataataatgataataaaagaagataatgggggggggtttggaagtttaaacttcaggggtnatgttaggatcaaagggaatggcaatttgtgccagacattcgtgggaatttaaaaagacacgaggagtccattttatgggttaatgcatattgatttttttgatagtttttcatgtgagtatgatataggtgttggaattggatactttattttggaactgggaaaagtaaccagtgttcaggtttacggtgccttttatgggggagtaactttttggtgtaatgatgtaattaatttgaaattgtattatgaaagttgtgggaaaatgtttataggga

SEQ ID NO: 50935 - DNA, 482 bp, Gossypium hirsutum
  Clone ID: LIB3828-025-Q6-N6-H7
agtattaattctgggaagtgcacactaaaattagtattaaaatttacatacatataattgattgaaccttaatttagttgacaccgttgcgagtgcaacaattaggaatctttaatttaaggatttaaaaaattataaatagcagtaagaattgaataaaaaataatttacatacataaatataggtgcagtccttaatcttccaactatgatttgctgtggaagaatgtcaaaatacatcaatggcatggcggattccgaaattaagatgctttcatatccttcaattcgaatcgtgtcaagtcttcggaatacagtatgccgttcggagaaagaagacgttgaagggaaaggaaaaaccgagcccattggaaccccataagtgcaaaccagcagctcgccaagccacatccagtagaagtcagaagcggtggtataagcgcaccaaaggcaaggcattctgtcattgacaagctaataaa

SEQ ID NO: 50936 - DNA, 515 bp, Gossypium hirsutum
  Clone ID: LIB3828-026-Q6-N6-A9
ttttttttttttttttttttttttttttttttttttttttttttttttttttttttgaaaatgaattacagtttgaaccctaaatttatcttggtttagggccaaagaaaaaattttaaaaaaaaaacccccttttaaaggggggggggggtgaaaaaaaaaaaggggcccccatggggcaaaacgggaaagcaaagccacaaagaaaagggggggaacaggaaaaaatgaaatacccacaggaaacaccaaactttaagggggggggggaacccaaaaaaaccggggaaaacccccaacctttaaaaggctacaaaaagggggcccgggggcaaaaaaagggaaaagggcccgcaaacattgaataaaaacccagaggaacccccgacaccgggggccaccccgaaattccgggcagggaccgaaagggggaccaccttaccccaaaggggggggaataaaaaagggggaaaaaaaggggaaaaacgggccccgggggaaaacggggacacgcc

SEQ ID NO: 50937 - DNA, 548 bp, Gossypium hirsutum
  Clone ID: LIB3828-026-Q6-N6-B2
ggggggggtgggggggttttaaaaaaaatttttttttttttttttttttttttttttttttttttttttttttttttttggtttttttttttttttttttttttaaaagcaaacccccctttttttttttaaaaaaaaaaacccaattccgtgggggggggggggttttaataaaaaaaatttttaaaaaaaaatttaattaaaggaaaccccaggttttcccaccccgagattggcaaatgaaaccaaacggggttttagcagggggaaaaatatgaaactccccacaatttaaccctttttgaaaattaaactttgggaaaaacacctttgacatttttttttttaatggacccccaaaaacagggggctgggtccttcaactttggggaacaaccacctgatgggggggggtttttgggcccatttaaacatgggcttttctccaagggggtataaaaattagggggtggggctttctttggcccccaaaatacccccccccttggaggaccccccccaaaacaaaaaggggaaaacctcccccc

SEQ ID NO: 50938 - DNA, 535 bp, Gossypium hirsutum
  Clone ID: LIB3828-026-Q6-N6-B9
agttcttaacaaatcttatttaacttttgagccatcataactgtgcttattggtgatcaaatgtataaacaaataaaagggattaattatattccatcaaaactttctgctgttgtaaacttctggaatgtccaatgaagttctccagttattgtttccaagatgtctcgtcaacccaatgtgcaataaggttaacattgagaagatcatagggccaaaacagatgtaaagcctgcctttatgccaaggactacagaactgtcaatgagattgctgcagaccgaagcttcactccatcatcatcccacttcgattgtggagcagttgtaccagcaatgatggcctttccaccactaacggcggccattatcgcgatgtgctgctcatctcttccaaattcatagaaatagtaagtcttgaaaccttcatcttcctttatctttatggttctggcattataaagtgttgctccacctggtacaaagattttagctgcgtcctttatggaacctaaatctgtaatatcttgggcctc

SEQ ID NO: 50939 - DNA, 502 bp, Gossypium hirsutum
  Clone ID: LIB3828-026-Q6-N6-C1
aaattaaacaaaaactgtatgttattatgtccatgcatcactttcatatagctgcaatacaggaagaaagggcaatatatgttattggtgattcatatgtgggaataagctatattaatgtcaataatgactttttgttagcgaacagggattgtatagaacgcccttcagcatcagcataactgctttattttgtatgatcaatacgaagacagctacttttacctaaggataatgttttactatgggataacttacgttcttttggagaacggggttatatgtacatatcctatgctatccctaagctctttactgatagaaactgaaaactttctgatgccctacctgggatgaccacattcattacaagtacgacctgagcccttactgcatcactatccaatttatcaggcgttattgtccactattaaccggaaaggacgcgtgtgttttacccaaccaaatcctgaccgctgctttatgatgttccaaatacact

SEQ ID NO: 50940 - DNA, 427 bp, Gossypium hirsutum
  Clone ID: LIB3828-026-Q6-N6-D9
aaaaaaaaaaagaagctaggggttttgggttccaagccttaggggggggtcccccgggaattgggggaaaaccccccttttttggggaaaaccaaattctaatgggtttttttccccttataataataaaccgggaacccccctttgggggggaatttgggggccttacccccttgtttttgggggtgcaaatgacggacccggggcccccaagggggggcccttaatagcttttttttccaaaaactttggggggttaaaaaagctcccggccatttcccaccattttttaagacttctatatccaggggttcgggccaaccatttttgcccaaaatactttccccccccgatagggggggaagctcatcccaaaaacagaggccccatcaagggttgatgctttacccacaacccctttaataag

SEQ ID NO: 50941 - DNA, 477 bp, Gossypium hirsutum
  Clone ID: LIB3828-026-Q6-N6-E2
aaaaagtagaaagcacgtattatttacaatttacagaaacagggcagtggatagtctggaaatgcttgactttaaaggaaaacaataggtggagggcatagattaaggtttttttattctaacctgggggggtggagccaattgctgtaacaaattcatctaaaaatcaagcgctagataacgaagccatacctatgtattgatagtaaagattgttctacatgaaatgttttttataaagagatctgccggatgaaccttgcagccagctgattttgtcaacagcgaggtaagttttatacccagctcattaaatatgtgtgctttatatgtaattgctatagcgtggactctacaaatgaaggacaagggatctgaataaaattaaatagctgtatgtaacaatatacaagctggatccacaaagtctggtgcattggggatgaaaaacaacaatgactgtttcatgggagaaag

SEQ ID NO: 50942 - DNA, 544 bp, Gossypium hirsutum
  Clone ID: LIB3828-026-Q6-N6-F12
gagctaacctgacatgatcgctttatcttgtgattatttggaagaaaggaatagtagttcatactctgtttgctacaaacgcttattgcagataatatttgatgataataaaaagacaagctaggcattaaatacaatcaggcctactgttgaggtaaagcagattggttgataagccttgctgctgagaaatgtaactttgcacaattgactataatttactcagatctattaacagaaaagcatatcatggttggtgaaaaccacatctgcatagataatgaagaatggctctagcattttacatcaatttgtgcgacgaacctcaccaccctgtcttgtgcttctgctactgcttagtggaaccgaactctgacttgaaagctgcaaatcagaaaggggaacagaacctgtctgcgaaaaaatcaaaccaactgaactactagatgtgctagcagaagaagggattcggctcaaataggaatccttcttagacgaaatcagctcaggccgtaaatcagaagaagaggaagaaggcgccaat

SEQ ID NO: 50943 - DNA, 466 bp, Gossypium hirsutum
  Clone ID: LIB3828-026-Q6-N6-G1
agtaaaaaacatattattgacataaataataacaacagtagcacacatagctaaataagtggaaaaaaacccgcatcatacaagtagaggatgggattctttatcacaaagcacacaaaataccaggttctcaaaaagaggtgaaaaaagactatgattaaactgcaagaaaagtggtgacacaaccaacaacttaaaagagcaagcccgatttaactaaaatcagaaaaaatctggagcgcaatcagagaaaaaagagcggaccaggacaaacccaaagagcacttaacactccaaacctatatcagtgaaacgaagcccaactgaccgggaccctttatctaatctcagccaaaataaaaggtagaaatacgaaagagatggtaccaaaatgtgaaaagaaattaccgtgtggctaataacttaaaaagccattgcagacaattaggattctacctaagctaat

SEQ ID NO: 50944 - DNA, 475 bp, Gossypium hirsutum
  unsure (1)..(475): unsure at all n locations
  Clone ID: LIB3828-026-Q6-N6-G2
gaataatacccagcatgtggctgatatgtagaacagggaaatgcggcatcattatgagtagttaaaagccagaggactaacaaggctaggttgggcggccctgcatttttcatgaccacctaaccatnaacgggggggtgggggccggttcattcacccatatattgtcccccaccaaattgatggcggacttcgggttttatgtatgggcgaaaatggaaccattgaacatctaaaaacaactctgatctccaatgccaggatttccactgtggtttaccggaatattctatcatggaaacctgtttatttgggaagatattgggggctctatatgaagtgtcattgatgtgaatagaaaggcgaatgctgtgtataataatggtcttgtataaattggctgtataattcaatcacatacatggctcgagaacctaatacatccctaggaatgcttatgtgaaaaatttgaacc

SEQ ID NO: 50945 - DNA, 362 bp, Gossypium hirsutum
  Clone ID: LIB3828-026-Q6-N6-G9
aaagagagaaaccttggttagtatattataaaaaaaattcgaaacaggggtattaatatcaactagatcaatcaaataaataattaagcgggggggggggggggccaattgatttgatcgggataaactcataattgccagagggggcaataaataaaccatatatacaatctactcactaaattaactaaattggggggggaaaaagggtccctaaagaggggcagggggttcatcttcatcagcatttggggggggaattgaagcagataccataaatgggtaaatttggagctaaaaggttatgggggtttaccaaaacttgattcatttgaggaagcggggttaacaaacctggagtt

SEQ ID NO: 50946 - DNA, 432 bp, Gossypium hirsutum
  Clone ID: LIB3828-026-Q6-N6-H1
aaggggcaaagctcataaaaaatttcatttttgttcttaaaaaaatacccaacagctttgggggggcaagtatttcaactaggttttctatataatattttaattaaggatttttaaaagccccaacccaacttaaaacaaatttttgaacccctaaaaaaagtaaaatccccacgggtagctaaaggaaaagttttgatcaaggcaaagtttccaacccccatatttttatgggtccataaacacttggtgaaaaaagtagccgtttttccccagggcaccattgtcctgaattaacatccatgtaaggggccttttcctttttaaatagcaattgatatgaaaatccatttattgaaccatttttattttttaaaaacaaccttacaggattattaggagttccactggcaaaaatttccttttttgacc

SEQ ID NO: 50947 - DNA, 521 bp, Gossypium hirsutum
  Clone ID: LIB3828-026-Q6-N6-H12
acgcaaaatcgcaacaattatacattttaacaaaatgacataaaggactaatccctcaaagccctctcattacataatatgctcaaagcaaagtactgctccccagacatccactttacaaaaataccaaactaattaagcctactaatgtcactttctaaatccatatgaaaatgacaaattctgcctgaaatgcgacaaacccaacttattacttgccattgggcatcgattctaccttaccatcgtttcctgcaagcaacatgggtgtatctttcctagtcaaaccagggcattcaaaccccaggacatcacccaacaccttctgcacgtgattcgattcctggatcggcgattgccctccgggcttcactgtcatctcttccggcaatctatcaaggtaacgtgacctacaatgttggccttggattcatgaagaacaaataagggtcccaaaatttgacccctctaacggagcgtcctctcaaaacatgcttctgcttagcaattgtacggaaacg

SEQ ID NO: 50948 - DNA, 527 bp, Gossypium hirsutum
  Clone ID: LIB3828-026-Q6-N6-H3
gccgagagttataagtatcatacattcaaaccagtaaaggaagaaatatacttacgcattttcagcatttaaaacaaaaaccaccccacatgcattgagtggtctaattgtgagtgataagatgctatataaaggggggggggccaacatgatttgtaatgtcaaatgtatgattaatgtcccaatccaagccccccatttgagctctgagagccgaaccaacatgatcaaaccacttcttggagttgaagtaacaagtggttcttcttgtaattgaaacggcaatcaataccttggataccaaaacatacccttaatgccctcaggatcgggttcaaaacccaagttccgatagaactccacaacttgactgtccgcaaaaagtgttatattaccaatatctctctgtagaagggtccttatcatcttttcaaccatggccttaccaaggccttggccctgatagctaggatcaacaagaacatcccagattgtagcattgaatgcatggtcagatgtagcacgag

SEQ ID NO: 50949 - DNA, 539 bp, Gossypium hirsutum
  Clone ID: LIB3828-026-Q6-N6-H7
aaccctagaattaacgttagtaaatctatcaagtcaagttggtattttacctacacctgcccaaagcaccttaccctattgggtcgggacaaagcaagaactcggcaagtccggggtcttttttaccctaaggtcctaacaagtctaccagctttcacattcaatgtattggaaaacggtgtgagcattatcccgagggtccacccatgtgttgaggctgacactgaagatctaattctttaacaggaatgctatatatgatgagaccacaggctttaagcaacagctcatatacattacataggtattatgccccactaacacacttgaacattagctaagcttatacgactgactaagaaatccattcccttggaaaatcatgtttacaccgcattcaacagtctctttgctagagtacaaagctcataagcccgtcagcatgccttgagtcacgagtggatagcggcttctatttcatgactcaacatgttctactgataaaaggaatatatataatccaaaacctgcacacatgt

SEQ ID NO: 50950 - DNA, 486 bp, Gossypium hirsutum
  Clone ID: LIB3828-026-Q6-N6-H9
ggccaaaagcaaaatgaatgtttcgggggatttaacttcaaatacatttccagatttggggccaaaaatcaaatctgaaaatttctacatttataaattatctacaacaggattggacatttaggggatcccataaatccaatcaaaaccagggttgccatgttggatccatcatacataaatttctgggtagcagggcagcctcaactaactcggtaacacccctctgtactgactggggggggtccattgcattttcctcctcttcaaaaaaacactggggagctattccgttgatccggccaataacattctccacgttggggggaaccttatttttgaagtcagcagggttcaaactaccaattccagcggcaggggcaagtggcatcccgaggggtcttctccaaaaccaaaaaagcagctcatcacggaaaaacatggccagttgataccacaaatgctgcgattgcttgggtgaaacta

SEQ ID NO: 50951 - DNA, 330 bp, Gossypium hirsutum
  unsure (1)..(330): unsure at all n locations
  Clone ID: LIB3828-027-Q6-N6-A4
aaagagaaaaaaagcggaggggggtttcatatctcagcagctaaataagcaaaacctgaggcagcgtacatcaagcattaagcttttccagnttaccaacgcagcttattcactttaaacaaaaaccaaaatttatggtggggggggggcttgcacattgctccagcacaattgttctnngtctttgaagcaggggtcaaattcccactcttccgcccaccctttcaaccattttttctttcccccttgttttcccccggggctttctgatattttctttgtttccctccatttttccccacacccatttcatttgatctttgtcatcat

SEQ ID NO: 50952 - DNA, 560 bp, Gossypium hirsutum
  unsure (1)..(560): unsure at all n locations
  Clone ID: LIB3828-027-Q6-N6-A6
agaacaaactttgatctaatatagngaaaaatgaggaatgaactgatacaaaaattattgtacatgtatatatgaactgaagattttcagtgtataaaagaatgaaatacaattgagattgaggtacaatgaaaaaaaattcaacaacatattctgtatgcctatatcctaataagatgcttttctaaacagtcaggcctagagaaactgcatcatcttgcagtcacactactgccaagctctttctcctcacttaccatccttccaatctcggtttttgcaacacaaaccaagaatatactagcaaagaatatagcaaaaattagcataagaaatacactattccaacccctagtggatacatacccagccaaaaggggcccaagagctgctcccactgagccagtgccatctatgattgctgtcactgtagctaatgcacgtgagtttcctttaatcaagtcctgggtaccaagatcagcagcaacagctgttgtaattagtgaataaggcccattcactagcaacccagagataaacatcaatcctatattggtaac

SEQ ID NO: 50953 - DNA, 576 bp, Gossypium hirsutum
  Clone ID: LIB3828-027-Q6-N6-B6
aaacaatattattactacattgatccctccaaacaaaataagattttattttatctctttcattttcaaaaaactttatttgaatcatcatcttcattattattcttatgaagctttagagttttgctaatttatgaatgttaaacggattagcttcgagagaagattcggagctataagccctttcggcaaccttctcgttccaagcctcggtaggatggaaaccgtcccaaaataggaatcgccctcgattactgcatggcttcgaatttttgagacaaagctcaccgccgccaccgccaattgtgcaacacgtaccattcgtcacgaatgtcgtcgaatttggagaaggagtaagataagtaaatttagcatagggtagatcattgttaagttgatgtatcaatggcataagcatctcgttgaaaagtgcagcagcgttgtttaatttatcgacacaaaatgatccattggttccgtactccgaaattgcgaatggggcgcaaccaataagtgacagtccatacaccgcaaacttccttgcgccattgttgtacaaagtcttaagttggttcg

SEQ ID NO: 50954 - DNA, 557 bp, Gossypium hirsutum
  Clone ID: LIB3828-027-Q6-N6-C10
agcaatcgttcaaactatcatgtatatatgaaagtaatgaaaagcatctgttttcaagacattattttagtacatcatgggcaccctcctttttttacctcaaccagatttacatccttcttttcttttcatttcctcatcttgctagaaacttttgaaggtcctgtgaccctcagctggccttgactttgccctaaaaacaaggtaaaaaggatactcctgtttttgtgatgctcttgtttcacaagaatcttacccaacagtctgctgcaacaaaaaataaaatcaaataagaaatcaacaaatcatttcaaaacccaaacctatgtactgcatattggtatagacattacaattgctggaggacactaatgttgttcttgcgactattctccctctagctcatatctatcactaccaccagggcagaaatgttccagttccaccgggtatttaaagggatggccttttctattgttacaagtaattatatattcaataaagttcacaagaagcatgatcttgttctagataagaaacataacaaaaatgccaaa

SEQ ID NO: 50955 - DNA, 515 bp, Gossypium hirsutum
  Clone ID: LIB3828-027-Q6-N6-C11
caataaaaaaagggtaatatttttactctaaatggaaaaagtgtaaatgttctaaaaaggttcttcaatatattcaaaatttcaagcataaaccctagttaagccttcttcacatgaatagacatatcaaaaggtgaaagaatcaaggagttcgtatcgattggtacaaactttgaactgctacaaaaggaaaaactcaaagcagtcaaagaacaaatcttaatagcaaagatagaataaagtaaaactatgtccctttgggtagttgcttttactttctgcacaagtggggaataaacagaatgaaccaccttttttttgggtatgtgtgtactcgtatctgggtaatgaatatgcttcggtttgagccatttacaggatgagtctttcgcaccagttgctgacttgtgaagttgtgatgagtaaagcacagtttaccattcccattctgaaccatcggaaaagagtttcaatgcatcgcggttgccatcaacgtaaaattccacgacagcttt

SEQ ID NO: 50956 - DNA, 468 bp, Gossypium hirsutum
  Clone ID: LIB3828-027-Q6-N6-F1
gggaaaggggggtcccccgggaaattttcaggtgggggcccctataaactattacaggggggggctttggaccccaagggggtttttttacatcccgaaactttaaacttttacggggaactttgggcattacaaattccctcgaaaataaaaaggactttttggggggtttcagggaactatttcccattttttttcaatctaaaaaaaaagggggttttggggaaaactaaatggcccaaatgggagtttgaaaaaaaaagcaccccccatattttgcaacaatgccctgcaacaaatgggggctgggataaatttaaactttcgggggtcccgaactacaataatgggggtttttggggaggggtcactggaatttttgggcaaagaaaccaggagcaattgccaatattttgggggggactatgggatattttccaaactttccaacccgtgggcggacccctg

SEQ ID NO: 50957 - DNA, 453 bp, Gossypium hirsutum
  Clone ID: LIB3828-027-Q6-N6-F10
accaaaatcttagggatccttggattattcaaaacattattccaataccatgcgttggcctactaccaaaaaaaaaaagaaaacattggattgatgctggtttaagaaaaaattcagcctaatttctaccccaatctcttccggccttcatgggattaataataattagcttacaacaacccctgttccacatattctttggttctcaaacagggaattgttgttgaagggtataaatgtcaagtcctttgagcttcactacggattcaacgtgtcctttgggtgggagaaggtccctcaaccttgcaacttccgcacgcttcctggcttgctcacaaatctcccacagttttatatagctgctcttttccggaattccaggaggggtcaacccatgaagggggcgttgaaccaatgcccattgagcttccctctttccttttgcgtaaaact

SEQ ID NO: 50958 - DNA, 335 bp, Gossypium hirsutum
  Clone ID: LIB3828-027-Q6-N6-G11
aaaaacaaaaaaaaaatttccggtaaaacgttttcattcccccaaaaaaacatccgaacaagaggggggtataattcccccttttttaacctctcccaggggagaaaaaatcccgggtttttttcatctcacctacctaggctctaatccttctaacccttgggtttgcttgggtgggttcagcaatcaaaagggcattcccggttttttaaagttcatcaggagaatcatcatctttttaaggggacccccccccgggggccccaccaaatttttgcccacgcgtccgcccacgcgtccgcccacgcgtccgcccacccgtccggggaacccgg

SEQ ID NO: 50959 - DNA, 498 bp, Gossypium hirsutum
  Clone ID: LIB3828-027-Q6-N6-H10
ccgacccaacacagtttttaataattaagggaaagccacagcaccaaccatagagtcccagcggggtatataaaaataaaaaaaaatatgcggggggggaaaaacaccccgcataaaaaaggattttttggagacatcgagacacattaaaggggaggggctggggcttcccgacccaacacagcatggaaaaataaaggaaagccacagcaacaaccatagagtcccagcgggggataaaaaaaaaaaaaaaaatatccttcgggcaaaaaacaccccgcataaaaaaggattttttggaaacatcgaaacacattaaaggggaggggcgggggctcttgcactctgaacggaacccaaacttttctaccaaaatgcacccgaaccgcttgcttaaaacacttcttaaaaaagcccaaacatccaacgatctaacattcctggaaaagcaaaaggcccccccaaaacagcacaaagcgagggaaaaaaaggaaaaag

SEQ ID NO: 50960 - DNA, 389 bp, Gossypium hirsutum
  Clone ID: LIB3828-027-Q6-N6-H8
gggggaagaaaaccctttgcaaaaaagggggggggggggcccccccccccaaaggggggggggcccaaaaggccctttattggaaaaaccgggggaaaggcgcttaaaaaaaaattgaggggctccaaaaccgccgcccggggaaaattttccaaccgggaaaagggggggggcaaacataccttttgggggaggcaggggataaaaggttagggggaaaggacccggggccccttttccgcccaagaaaggggggaagccggccctattttggggggcgagaagggggtaaaaaagaaggggtaaaaaaaaaggcccaaattttttttgggggggcaaaaaaaaaaagccgaaaaatgggggctccggccccagagaaaaaaaagaaa

SEQ ID NO: 50961 - DNA, 469 bp, Gossypium hirsutum
  Clone ID: LIB3828-028-Q6-N6-A10
aaaatagcaatacttattttaacggaacacaacaaaaaaatcaaactcaggtataacgcccctggaaggggctgatacctttgctgaaagagccaatagaaatagaggttctaaaaaaattaacaaaatgtttgatgacaatttgcaaaattaagcccggaatggtggctttaaaccaaacttttccatggggacctgcgggattgctaacgtttattcacccctttcccacggggcgtcttccgtttcccaaggggcttgttttatttgggattaaggcacttcagatgtaagcccccttggggggcggctttactagcccaaaaaatagggaaaatagggatcaccctattatttttaggttaactatcccaaaaagctggggaaatagggaacccccctttatttttaggttgactagccgaaaagacatgggggagataggtcaaaccccgatgttttaaggttt

SEQ ID NO: 50962 - DNA, 543 bp, Gossypium hirsutum
  unsure (1)..(543): unsure at all n locations
  Clone ID: LIB3828-028-Q6-N6-A8
aaaattataaaaatataaaatttaatttcgattccaaaatttgtttctccacttcgctcctggtttggatgaaaagaaaatgcaaatgtaatagtaagagaatacagtctcttgatcgatgattttagtatgatatattgctcacattatctatggccaccgccagaaaagaagtgttcaaatgtgaatagagttaaaagcatcgcatttccgcctgacttctccttgattcccagtcttaaccccattaaggctaagcttctcaattgctcgagcgaaatcattgaaaaaagcagtctggtttttagcatacaattgcacgaaaggcctggttttggggttctggaacagcgcattgtcagattccaacagccccattcccttctccaagttctggtaataaagattgtcaaacttggatggagtcattacatcattgaaagctgacattgcaggattcttctcatagttgtgacagagtttctttagagcctcggcatacttgggattataagcagnatcggtggnggacagttttgctat

SEQ ID NO: 50963 - DNA, 516 bp, Gossypium hirsutum
  Clone ID: LIB3828-028-Q6-N6-B12
aatgtggtatgatgcttatattataataaagacatgctattaaactttgtcttaaaaaaaaaaaaaaaaaaaaaaaaaaaaaaaaaaaaaaaaaaaaaaaaaaaaaaaaaaaaaaaaaaaaaaaaaaaaaaaaaaaaaaaaaaaaaaaaaaaaaaaaaaaaaaaaaaaaaaaaaaaaaaaaaaaaaaaaaaaaaaaaaaaaaaaaaaaaaaaaaaaaaaaaaaaaaaaaaaaaaccaggcgggttgtgggcctattaacatggtgcttttaggacaaagcgcaaaaaaaaacgacttgtttttttaaaaaacttgatcttccagggccccaggagaaaaagataaaaaagaaaaagggtttcggattagcaaaccttcgttgtaaatggtttcagctttaacaaaaactaaacacccctctttttttttttttccctctttttcggtgaatttttgaacaaaaaaataaaaaatgggggcgaatactggaaacaaatccccctcaaaagggtaagg

SEQ ID NO: 50964 - DNA, 483 bp, Gossypium hirsutum
  Clone ID: LIB3828-028-Q6-N6-D2
aaattaggggaaaaacattggcctcaaaaaaaaaaaaaaaagggggccccccctttttttttttttttaaaaaaacaaaaaaaggggcgaagcccccaaaccctggtaaaaaaaaatgcccaaaaccaaaattaaaaaatcccccccgctgaaaaaaccccccccgaggggaaaaatttgattaaaggcaacaaaaacatattcctaaaaaaaccccgggatatccccggggggttaaaaaaaaacccgaaaaggaaccaaaggggtcaaaccggatcccgaaaaaaaaggggtaaacccccctttgcaaaaacggggaaattccttaaaaagctaaaaccggtttttcccccccaaaaaaaattttgtataaaaaaaaacccccatgtaacccgaaaaaaaaaacgggacccccggggaaaaggtttttgtttctaaaaaccaaccacgggccccaacccaaaaaaccttatattcataaaa

SEQ ID NO: 50965 - DNA, 434 bp, Gossypium hirsutum
  Clone ID: LIB3828-028-Q6-N6-D7
gggggggggaaaaaaaccaacttttttttaaaaaaaattgaaagaatggggccccccacaaaaaaaaattttttttttttgggggctttatgggtttaccccccaaggaaaaaaaaatttggggaaagaaaaaagcttatgggaaaaaccatttaaaagcttttcctggggacaattggggggcccgattaaatggcctttgcctgggaaaaccaaatttttgggaaggggctaagggaaaccaaaaacggccccccaatccaaaaactttatttttttttagggggggaaaaaaccttaatttttatgcgggtgggagcaaaaacccaaaaccccttgggaattttataaagaaaaccggggaaaaaaattgtcccccccctgggaaaaatgttcccgcacaaattttttctaatatcggcggcccattttat

SEQ ID NO: 50966 - DNA, 395 bp, Gossypium hirsutum
  Clone ID: LIB3828-028-Q6-N6-D8
gggtaaaaatttttttgggtttttaccaactttttttaacgggccaaaaaaaaagggaattaacattccccccaaactatttgggttcaaaatctggggcggggaaaaacaggggggaatcatcaaactttttgggaaaaccattttccccaacccggggtccaaagggcgggaaaaccttgaacaggggcccttttttttttgggggagcaaccccccaggggcctccaattttgggggcccgcccaatttggtaataaggccccttcccaaaaaaaattttggaaaggggatttttgattttccccggggttgaaaaaggggttacccaatcccccaaaccccctttgaaacctttttaacccggattaaattttagggggtttcggaccccg

SEQ ID NO: 50967 - DNA, 496 bp, Gossypium hirsutum
  Clone ID: LIB3828-028-Q6-N6-E10
gggacaaaacaccaatataagttcataatcattgggcttttacaaaattttaggcttaaattatgaacctatactaggccaaatacacattctaacgccaaagtcatataacccgtttctctaaacctagccgaagtacagaacccgaaaggggcaatgctctagagccgtgcagcactagcaagtcttctggtaacgtgccagtaatcgtaccaaggggtggcgggtcccatgaacgatttccccgcacggactttttgacgcacaccttgcctgactcctacgtacggctgttcagtgcaaacagggcatggatttattgtcctttgttctctgaaacagaagttgaggaaggattttgggctgagatttctcacggctccgagagcaccatacggagaagtataataggggattaagaagggggaatcttacggcgccatccataaattgtgatgttcaaagcgtcggatggaagggagcaaatccttagggt

SEQ ID NO: 50968 - DNA, 443 bp, Gossypium hirsutum
  Clone ID: LIB3828-028-Q6-N6-E3
ggtaaaaaaggtggggaattggggggggggggggggaaagaaaggagggggggaaggggggggggcgggggggggaggggggggaggggggggggggggggggggcggggggggaggggggggggggggggggaaagggggcaccccggggggggggggggggggggcgggcaaaactgctttatctttaagagggaagggggggaaaaggggaacccggaagttgcaaagagggagggaaggaaaaaaaaaagaagggttgctaaaaaaaaaaaaaaaatcgggggggggaaagggcgcttcttggagcaaaattaacccggaattaaggggaaaataaagggttccattggggggggaggggaacaaagaaaacttgaggttttttgtaaggccggtcggaaccccctacaaaaagatgggatggggccatccaggggcaa

SEQ ID NO: 50969 - DNA, 562 bp, Gossypium hirsutum
  unsure (1)..(562): unsure at all n locations
  Clone ID: LIB3828-028-Q6-N6-F12
caaaagttgtaactcattgcatctttttaaaatttatatgcttaaaatacattcaatatagtccatgaatttggacgaaagagtgcatngaaaagtcattcatgtttgccccaaaaactcatcagctgaaccttatggcaaaagcataaaattttactttcaccattgaatcaatgaaagtctgacagtaaatgttaccatatatatcaagtcgaaaactagtttgaactaggcacctaagctttcaatgcaaagaaattttgttggattgtatgagcaccacaacattgcttctcagccttgagtgatctccttctcctttgccttgcacaattcatcggcggacttgacgaactttttagtcaactcatcaatttctttctcgaatctcttagcctcatccttgggaaaactagaacccgctttctttattgtatccaatgccttttgtcgagcccttcttatgctttgtttaacatcttcggaagacttggcaacaactttgcacatagcctgcatatgctcttttgttaatggtggaataggtgcgatcaaccgttgt

SEQ ID NO: 50970 - DNA, 337 bp, Gossypium hirsutum
  Clone ID: LIB3828-028-Q6-N6-G11
agagggaacagataatattattaaaaagaaaaattaacgcatggaagacacttggccaccacaaaggtaatagcaagcaagaaggggctatttcttgggggggggggggataaaaagaaaaaaaagacggggatcctatcatattacattaccacacattacattacccgcaaaaaaacccactatttttggcaggggaaaaaaaaccttttataaggctacccttaactcgcccctcaacccattttccccaattggagaaataaagaacaaagaattggaacccacagctcttttttacaacccaggctattttatcgggaccctttggtttctc

SEQ ID NO: 50971 - DNA, 449 bp, Gossypium hirsutum
  Clone ID: LIB3828-028-Q6-N6-G2
ggcgaaaaaaccggcttcataatttcttttggttgggaggtcactggtcaactttacccatgcccctggtttcaacaatcatgcctgccgctttgggtttaaacaccatccttatttcaacccaatggaaataaaattcgggtttccaattacccctttcagacttttaacttaataagggtcccttttcacccggaaataagcctctccatttaatcagggcgcccggaacaattccctggttttatacccttgccaccggcttccccttaaaacccagaccttaattttaagtttgggaatctaaatttggttggaacttcaaggggacccaggcccaattgagggcattaaccacctttatgggcattgggggtgaaaatttttacccggagaaagggtagaagccaaatcaccttcccagttcccaaaaacatggtattgggatt

SEQ ID NO: 50972 - DNA, 223 bp, Gossypium hirsutum
  Clone ID: LIB3828-028-Q6-N6-G3
gcatcgccaaggaacattattacacatcagttaataaaaagatgaaaaacagctctcatagttacatagagagactaatgatgtgaaaacagatctactaaagttgtaaagttgtaaatcgttccagttaactgaaagccttagtttggtgcctggctttttccttctccttcacttcactcccctgattcttgtcataagctggatgattttcatgaatctc

SEQ ID NO: 50973 - DNA, 513 bp, Gossypium hirsutum
  Clone ID: LIB3828-028-Q6-N6-H9
ggacacaagagattcatttatctgatttcttcagaaaaacactacatatattatacagcgttttcttttggtaaaatcataaacttctagaattgaactattaaactaatgccattttgaaggatactaacatattttttatcatttgggaggtcgagaaaattaagtaaaattcaaaattattcatgttgcagtaaattgtattgactaacttgtatatgttggaatacagagttcaaggaagaacttggtattatagctcctacatgatatgatatgatattaccttctaaaacgtatcattccgtcacaagccaatgtcccttcaagatctccgatgattcgagctatacgaacctcgagacctctttgaacttcctgaaacaaagatcttacattatcggagaaccgtttcatgtcaatggtatgtaccttatctagctccaccccgaggaacccagagactattttgggttgaatttccattaacttttgggcctgttgcaaccatgt

SEQ ID NO: 50974 - DNA, 515 bp, Gossypium hirsutum
  unsure (1)..(515): unsure at all n locations
  Clone ID: LIB3828-029-Q6-N6-A2
cagaattaattaaactaaatttacttaaaatcaatatccaatatatangaaatcaatgccaatactacacactttatataaccactttattttctaagataggaaatagcacattttttgcaaactatagataaatatatgctaggcagcaaattagaaaattatgtccagccagccagggccttggttcggcggctatagtccagcagagcgatcagcgtattcttgaaccaatgctgcgaacaatgttggcctctcaagcaagcgtgatggtggctcaaattcttttgcccttcctgcatccatcaccagaaccctgtcacagtccatgactgtgggtattctatgagcaatgctgataatggtgcaggctgcaaactcttcccttatgatcttttggattacagcatccgtttgcgagtcaaccgatgcggttgcctcgtccatgaacaaaagcttgctgtgctttagtataaccctccctaagcacaaaagctgcctttgccccacactcc

SEQ ID NO: 50975 - DNA, 556 bp, Gossypium hirsutum
  unsure (1)..(556): unsure at all n locations
  Clone ID: LIB3828-029-Q6-N6-A6
gaaacggtagaaaggtggaatgaaatgattaaggggngaaaataagagcatttgagtcttttcattctctcaaaatccaatcctagaaaccactaattcaattagataataatattaaaaaaatttcaaaaagaatctaccatgcgacaaatccttccattatcatctcttctattcctttttctcccttccataaaatcttcctgcagaacacaaagttagatagacattggttttgttaagcatccttgcataaaaaaaattggtgataattgaaaagcgagcgcctttaataaacatcattgtcaacccaagcctaatagatgtgtgggggtaacaccacataagactccctctcacatttagctcaacaaagcctacactgagcatcatgatgaaggtcattaacatcacantggggtagaaaagagtaacacaacataacctgagctttgataccctgttaagcattcaaaataaaatgataggttgaagaaaacaacttcatattaagacagtaataaagcaagaaagaagaatctagctcaaactatag

SEQ ID NO: 50976 - DNA, 571 bp, Gossypium hirsutum
  Clone ID: LIB3828-029-Q6-N6-A7
agtaaaccttattttgatagtcttattaagcaagcaaaacatcattattaagtaacagacactaggaatcggcctctcaaagcaatgcactgcagtgtcccttctaatatgaagcttagcaataaaatcaactactctatttgcatctctcgaaatcttcgcgaatttaacttctcacctgcattgatgaagttcttgaatattgcgaacaagagtaatcgagtgaggatccattgagctatccgatataagctgcaccaccatctcagagtcactctgacaatgatgatcttcttgtatcctcgctgccaagctagttttaaaccatatcataccgccagcaactcagtttgcaaaacagaacctgaacaaacattctactatatccaagtagccaatttccatggtgcgtctcttagcaaccccaccagctgctgcccaagaatggttcaaggcaaccgctccgtctgtgttgagttcgacccatcctgggggaggtaaactccatctcttggaagaacattaccattctgctgtggagaaatcagatgatagacctcagtctgcattc

SEQ ID NO: 50977 - DNA, 195 bp, Gossypium hirsutum
  Clone ID: LIB3828-029-Q6-N6-B4
aaaaaaaaaatgggctgggggggttttattaatggcgggggacaaaaacgggggggggaacattgatgcttgtttattaaaaaaaggcgggtttaaaaagggggaataaaaaataaaaccggcctaaaccacgggcctacaagggttaggaccatcatttttaggaaaataaaatccccatttccggggccccgg

SEQ ID NO: 50978 - DNA, 343 bp, Gossypium hirsutum
  Clone ID: LIB3828-029-Q6-N6-C11
ccaaagccccatttaaattttttcattattcaacacagggttctttcaaaaaataaaaaattagggggaagtataattttcggccacaggggggtttttcaaaccgggggccgggaaaaaaacaaaaaaacaaggggggccccaaccaatgatccaagggccggcaagggtggggcagccaccctggaatctgggcctgatgctggggcggaaccgggagaggggctaggaataaaaccacccgcggaaggggagggagcaggggcattggcagccatgaccaccctaattggggggggagcaacaatgatggggggggaacggacccctgggtccacccggg

SEQ ID NO: 50979 - DNA, 482 bp, Gossypium hirsutum
  Clone ID: LIB3828-029-Q6-N6-C12
aatcaaattatactatacattatatttcaagtttgtgataaatgaagttacattgtagtaaaggcctatatggttttcatctttggccatcatagttatacatttttactttatatcaggccctcttgatcttcaagcgatcgtttccgggctttcaggttgagctcgagactttgaggtaacggaggtgttcttcccctgcggaagagaaccacgagtgccctcaccgttcggcaaagatcgaataccgatgaagcgtcgatctcagcaacaccttcacatccttgccctcctccctgcattaagtcacaatattttgcagcttcattctcatcttcgaatacaagtactccttccctaacatcctccaccagcatctcaaacttagtaccagatctaggctgttcggttttgtttccgaacccagaactccgctttcctcctttagaaaacaataacccgagttccgtttcgacttcact

SEQ ID NO: 50980 - DNA, 546 bp, Gossypium hirsutum
  unsure (1)..(546): unsure at all n locations
  Clone ID: LIB3828-029-Q6-N6-C5
cacaaaatactatctcttgtgcttgagaatatatgcaaaaaattccccatcactaatggactagtttccattacaaaagctattgagtggccagtgtcaccaaggtccattggccacttctcgaaacagagcctcgaggtcatcagcattctcttgcttgaataaccttatctctctatcaagtttagtcagtgtatgggttacttccgctagctttgcttcgagtttcagcttttcctcatttgagttggcttgttcgagtttagcttctttgtacctcctcgacttcgtcaagaggttcattaacttgtccaatcgagcacgtaagaagcccactttcatgcctaacccctcaaacgatctcaaagttttgtcccaagtgaggaaactgtcgtggggagttgtaagcttggcagctctaatggcatccgcaatattgatcgtctcggcaatgactccggcaaccagtttacagttaagtccctcgagaagattttcgtgaaggaatgagttttgattacaacanagctcgtagtacttcatctg

SEQ ID NO: 50981 - DNA, 551 bp, Gossypium hirsutum
  Clone ID: LIB3828-029-Q6-N6-D1
aaagcaaaaaaaaataataataataataacaaaaaataacaaaaatatccataatttgaacaagtaattcatattagagaatattaaattaaaacaaaaataaaaattcaagtgatcgatttcatcatctggtttttggttgtactgcaaatgatcgtttagcattgtaaaagggctaaactggttgatccaatcctcttgtaagaacagttataagaagccaatttagacaaagagtactagaaaattttaaacattgaactgcccccaccccccaattctgactcccagattttctttatcaatgtttctcggcttttgcctcagatttggccacagatttagtatcatcaccttttacggtgtcttcacctccatcttcaggcaaatcagaggtccagagggtgaggttgtctctcagaagctgcataattagggtgctatctttgtatgattcctcactcaaagtgtccaactccgaaatggcttcatcaaatgcttgcttagccaaatgacatgccctctcaggtgaattcattatctcataataa

SEQ ID NO: 50982 - DNA, 251 bp, Gossypium hirsutum
  Clone ID: LIB3828-029-Q6-N6-D3
ataaaggtcaaggaattcaaatatcaaacccaaattttatattggtcaacaaaacacaacaacccactagggggcattcaaactaaaagggggggagaactaatacaaaactccgaagggccgggaaaaagaaaaaaggagcggagaggggattccgacctgggagggtaaaagccaaaaaaacaaaatttttggggaggtcccttcaacatcatcacttaggtccaaaagcaaagttgctattctttgac

SEQ ID NO: 50983 - DNA, 547 bp, Gossypium hirsutum
  Clone ID: LIB3828-029-Q6-N6-E2
ggacaaattctagcactagatagaaaaaaaaagaaaaacctattgcttcaatgtctttctactgggagtcactgggaaaaaaacttacacaactattaccttacctatcaaaagttatataggttttcggggatatcacaacgaaaacattgaagtctttattttgtgttcgaccaggaatggatgacttcactccccaaatcctgtggccgtgcatgaaacaagccaacatccccaatgcaagcaacgagctttctctgttctaatcgacatcatcggatgctaaaaccaatccaccactttgctcttggcaaacaattatttcaaaagtagaggtagggctccctatgccatatcgaggactctcaaagtttaggcttaatgttaatgcagaatacaaagaatctctctcttttatcccatcgaagtttatctatcaactcggagaatgttgttgcatattctactgctggttgttgactctctttgaggatcaagtgtccattgaccgtcaacaacaaattttatctcgtataccccgggataa

SEQ ID NO: 50984 - DNA, 525 bp, Gossypium hirsutum
  Clone ID: LIB3828-029-Q6-N6-E3
gccactacttttttccctctatcttacatttattgtaaatataagagttctatgttacaaatcaaaattgcagggagaattgcaaagaaccgcagctagtttctctcacaatctcaattagaaaggaccatctcagctttaagcaattcaaataagaatatgcccaagctttatacattaccttttcttaaggcacccttcagtcattcggttgctttcatcggttcgtgggctttgaaatgaattagtagcttggcaccaggacgcaaatatgcaccctacacttccagcagtggaatgaccagatggaccaatgtgatggttgccgtggcagatcaatatggcagtcagttgttcgaaaacattcactgcaacactggctcaaatacttcaagtccggatggggcggtctgataaacacttcatcaatttgactagcttgtgcacttgatgataattgctttggcggggagacagataacagctgagcttcaatgatgccattcaccttgcgttctttattat

SEQ ID NO: 50985 - DNA, 548 bp, Gossypium hirsutum
  Clone ID: LIB3828-029-Q6-N6-F1
ggaacgaaaaggcacttttttttaacgaacaagaaaagacaagaaaccaaagcaggggaaaacactgatgattctgatgaatcaaatctcctaccacaaaaaaacatattaacagctactgaaatatgctgctttcaggacattaacaaaagacatgaactaggaacagaagactaaggccttttcttttgctttttacttcttctttgctttttactacattacagggctcttgagaagtccatgccacgacgaattgaagccattccaggttcctctttcagaaccaaagacggcaatggaaagcccttgcttcattgatgcaactgtacttgcgttactcatttcttcattatgagatggccccataagttccccgttaaaccccatattttcaaccttccccatgtactcatttccaaacccatagtaaaaattctgcaagctgatctgggttccaaggaaactgcttcttagtgcatcaacaatggcaggattgcgtggtgaagtactactggtacaaacgttaaggctagggtttccaaaat

SEQ ID NO: 50986 - DNA, 525 bp, Gossypium hirsutum
  Clone ID: LIB3828-029-Q6-N6-F11
aaaaacttagtatttattgtaccaataaaagagtagatatttatcgtctcatacaccgtttttataactagcaaggtccaaattatttcttgttagtctaaacaaatggacatagtaaacaaataccaaaaatctggtgtttatgccagacaaggaaggtagttaagttctattcaaatacaaacttatacaaagccatagctatataaatacttaatacataacatttcaaaccatttcttgttgtgaagaaataggagtagagttttctagtatcagacttgattgtttaggagagactgacatatagtatttgagaataggcttaaccttttcagcactgataataattccccagaacatgaaacgatatataaccaccatgctaaccaagattgcaagatcaacccatttagagtatcccatgtcaacttgccaatagtttctcaagacttcatcaccactaatggtaggaggtcccccagctcgatcgttgttgaaactcaatccttcatattcattttt

SEQ ID NO: 50987 - DNA, 395 bp, Gossypium hirsutum
  Clone ID: LIB3828-029-Q6-N6-F12
gagggggaacctttttcaaaggggaaaaatctagttgcccctaacccaagtaaaatgaaaaaagaagggaaaagaggagggccttcccctaatcaaagggggccccaatcctcccattgaagaaagaccctcttaacccccctttttttttatcacccaaatttcacccaaaacccacttgacaaaacacccccaaaccaacaaatgttaaaaaaaagcccgaaacccttggggaagtacccggaaaaagggggaaaagccggggcccaaaatccctagggggtgcccaaggggagggggcccaaaaaaaacccttcccaactataactttctcttccccaaaagaaacccccaaaaaaagggaaaactttgtgaaagggccttcatttaaaggg

SEQ ID NO: 50988 - DNA, 493 bp, Gossypium hirsutum
  Clone ID: LIB3828-029-Q6-N6-F9
ataaaaaaaggtaactttgatttcactaattaacccgtgttatctgtacaaatgagttgggttttttttcaatgacacgatatctaccgcaccaaatgtagctggcattaggtaaatatatgctcattttgactgaataaaagaatgttgcagcaatgcaatatatgcaatggtatgaactgttgatgttcttcctcaatccaagcaagtaaaccatcagattgagaattaatcatacttttaccggaatcgatttcgcagcatccagatggttcaagcggcacgttccgagaaggtactccggcagctcatcttccgtatttgcctgtatcaaaaatgccatttcgataaccagattgttgaggtaaccaagcacaagattgaccacccctcttgccactgtcgatgacccaatgtcaatcccaagctccaagtagtttttgccatggaaataattcatttccagagcatggccaattagacaagctttctt

SEQ ID NO: 50989 - DNA, 556 bp, Gossypium hirsutum
  Clone ID: LIB3828-029-Q6-N6-G12
gcttgttgttgttttttttagaaaaaccaaccagtaaatagctttgtagtgtaattcacggttgccttttgcctggcatcaaacccatgaatcaagtatagttttcaaatagaaattacattttgcaaaattgattatggtggcacaaccatgaagtggggggggggatgcaaccatggcaagttttagagatgaggaagtaatataagattaatgccgaccttggtctatgattccgcgggagcatcctcgagcttttcgatcttttgtcgtttggcatcaagctcgctatcttgatggctgagacacccatttactttctgttgacccaaaagagagatgtgcttgctggtgatttggcgacctgccctaagctttggcccccagtgcctttcaggatttggaaggaatctagcaaccttcttagcttgtgccttgctcagggatgcaacagctcgagcaaagtttgcctaccaaaaagaataagattgcgggtgtaaaaaagaattttcctaccttaaatctttttcaccaatgtttttgtccaataaagcgg

SEQ ID NO: 50990 - DNA, 444 bp, Gossypium hirsutum
  Clone ID: LIB3828-029-Q6-N6-G9
aaaaacccaacgggcccctataaaaaaatttaataaaaaggcggcaaccctttcagagagagagaaaggaaaaaaattggggggaatttggaaaaaaaaaaaatctgggggccaaacgggacagggggccccacccccccatttttaaaaaaaaataattaaggggggggggcaaaaaaaattagggggctagggggaaaaggtaaagggggattatgttaaccccttaacccagggggggggggttttaaaacaggggaagccccctaataaaaacggggcccttgaggaccgggggggatcccacgaaataaaaaaaaaattgggggggggggggaatggttccttcatccacggaaaaaaaaaggggaattttggggatggaactgggggggtttataattagggcaaaggggggaccaaaaaaaccgggcccggggggcc

SEQ ID NO: 50991 - DNA, 553 bp, Gossypium hirsutum
  unsure (1)..(553): unsure at all n locations
  Clone ID: LIB3828-030-Q6-N6-A1
gagattaaaaaacatttgaagacaatttctaaacaaaacaaaactaataacattggtgngaaactcctgagtttctcttccccaacctactttacagccctgcgggtttatcatgtttctgcaaaacacagtagaaaactatagcaccatttatattatttattgccattcaaagcttcaatcatacttcatatatatatactgctttgcatcaattattggtttttcagcacaagtaaacttccaaaagctaaaggtggcctactagatgatagcaatgttaacttaatagaagcttctccgactcgaactcactttccgagccctccccatcggagcaatcttcttctttttctttagcccataagacgatgtagagaccgctgaacatgagtaacattccagcaaggcttcccattgaaatggtctcccctaaagtaataaaagagaggaggactgtgatcactgttccaatggggctaaacattgagactagaaccggtcccctcttcttcattgcccatccattgaagcttagacatgctccacccac

SEQ ID NO: 50992 - DNA, 573 bp, Gossypium hirsutum
  unsure (1)..(573): unsure at all n locations
  Clone ID: LIB3828-030-Q6-N6-A7
ataataaataattaagaattattaaaactatataaatatgtatatatatanaaaaaatttatcttccaaagcaagggcataggaaaatgatggcaaaattgtaagcttataagatcctagttttttagttctcaagaattcaagatatcccaactcttttgcatgtatgaaggcaatggagcaactatttccaggcttttgagctttgaaagatcatcatccgtaaacgatttcggatttcgcaatacctgagaaacattcggtaagatcatttcccgacaatgaagatgaagacgaaggtgtttttccgaaatgcttccgctatccatattgagtccgaaagggagcatgttttcctttgctaccttctcgtttgagttctttcttaggtctgactcagccagattttgcaaccttctatgagcttgccacccatatttgtagtctccaacaatcggtgttcccagtacctcggcacagtgtactcgaagttggtgctttctaccagtgagaggagacagttctaaccatgtgaacccatgtgttgatgttttaatgacacgatactctgta

SEQ ID NO: 50993 - DNA, 533 bp, Gossypium hirsutum
  Clone ID: LIB3828-030-Q6-N6-B8
gaggagaaaaacaaatctgaaattaaagaaacttggtttgcaccttaaatgtaacactggcaaatagtagcaaacaacacaaacattggaaaacacgaaacacatgatatgtccaaggaaaccatagttgagctctaagagctcaatcaaatataaattaaagcaacaaacaatcaactgatagaagcttaacaaactgggaatcgaataacctgaaacagattccttcttccccaaggtataagccattgattcaatgtgaccgaaatcttccctcaaaactgatcttgaatccatcattaacacctcgttatcgactgatagagggggttaagtttggcttttttttctccactcttagtggatcaatggtgagaatcagaggaagcagaggacagcttattggcaatgttgtcatgctcctcctcttggccctgaattcgtgacggaacgcgaaaaccggagtatacaccagatgtggtgaaatcccatgctagataaagcagcttgttgatggatgttttgtgggattt

SEQ ID NO: 50994 - DNA, 553 bp, Gossypium hirsutum
  Clone ID: LIB3828-030-Q6-N6-C2
acaaaaaagccatcttttatttcacagttatcaatctaattcaacatcttacatatagttcaatatctgaaaacaaataaagctacagtttggacactcttagaaaaagtgaatacacatacacacatacatacataagtatacacattctatgatagttttggtgtggatgaagcatgaaaaaagaaaggcatcaaatttaaagatttgatcaccttggtagaggaattatgtcagaatcacaattcaatgatgcgatggccatcatgtctctcgattcatcttcatcgactccccttgttcggtttatctcggctaccaaacactcgcttaattcggtcacgacgtggttcatagttggcctttttgtggaagccggagataaacaagccattgccacttcgattgctctccatacagaatttatctcgaaatctcctttcaacctcgaatccacgatgttctcaatgtctccattcgacaacatcgaactgacccaacgacttatgtgagtaggctcatctatggttcttgctattaccggcctgttcgt

SEQ ID NO: 50995 - DNA, 258 bp, Gossypium hirsutum
  Clone ID: LIB3828-030-Q6-N6-C4
agagtgagaaagaggcagagcaaccttgcatattcaagaagctaaataagcaactacctgaggacagcgtacatcaaacattaagctttttcagcttcaccaacgacagattattcagttgtaagaagaggaaaaaatgacgacttggatgaggcttgaacattgctccaaacaaaagttgccatcataagaagcgggggtttaattcccacgcgttcgaccacgcgttcgaccacacgtgcgtagtacgctgggttg

SEQ ID NO: 50996 - DNA, 443 bp, Gossypium hirsutum
  Clone ID: LIB3828-030-Q6-N6-C8
caaatgtaatttagaaccaaagtccatcctggtaccaaggggcaacaaccggacagggcaaaccacgcgggcgcgggggcccaccccccaaacccggaccgggcgcggcaggcgccccccctaacccgaggggggggcccccgggggcggggcgggggccgggccaaagggggggccggggggaaatgggaacccgggcccaaccccacacaaaaagcgaaccggaagcggaaagggaaaggcccgggaagccaaaagaggggccaaacgcaaaaggacgggggggcccccagggaccccgtcccaaaaggaaaaccggcggggccaccaacggaaaggaaaaggccaacccggggggggaggccggtgggggaatgggggccagggggggttcgcgccgcaccagggggaccggcaacagggggccgccctacaccccccgg

SEQ ID NO: 50997 - DNA, 450 bp, Gossypium hirsutum
  Clone ID: LIB3828-030-Q6-N6-D1
cttgcaaatcccttacaacctggtttctgcttggatgacacaataagaagagtttacatccttcaaaccatacaacatacttattttaaaacgtaaaacacaaaaaatgccaacggccattgatatgcaacttgcaaaaaccccttacagtggcaaaaatatcccaacactcaacttggttgcatccaccgattcccttcggtttaagattggataaatggacccggtcccttttgtgatgaacggcagcagtttcttccttccccgccttttcaaatgaatctacagtgtttccttcaccattggacggtttaccaacctaagggtttttgtttactatcgacggttgcttcccaccaaaaatgagctacaaaaaaatgctgagactttcaccacatttgaaaccaagacaccattgcggagggtagaatgggtcttagcatgctaaat

SEQ ID NO: 50998 - DNA, 550 bp, Gossypium hirsutum
  Clone ID: LIB3828-030-Q6-N6-F2
tttttttttttttttttttttttttttttttttttttttttttttttttttttttttttttttttttttttttttttttttttttttgggggggaacccccaaaaaaaaggggcttataaaaaggggggggaaaacaaccgggccaaaaaaaaaaaaaaactttaaaaaaccggccaagcaaaaaggggcacgggaacaggggccaaaaaaaaatggggaaagggggaaaatttaaaaaaaacagaatccaggggaaaatccaaaaaggaaaaaattggtttaaacccccaaggggaccaaaaagggaaaccctcggggggttttttcccaagagggttccccaaaatgggaaaaaaaaggcaaaaaaggggcccccattaaaaaaaaaagcggttttttcaaggggcccggaaaaaaaaaaaaaggggggccaaaaaactttaagctttaaagggggtaaccgcccaaaaaaatccaaggggggggggaaatggctttgggagggcccccccacctttgggaggggacccacccaaaaagccatctctt

SEQ ID NO: 50999 - DNA, 561 bp, Gossypium hirsutum
  Clone ID: LIB3828-030-Q6-N6-G7
aatccaaattcaatatatatatataaaattgacatttatttacaatatcatataaatttaggtacgaatatacaaatactaacttccaaaaaattaaaaaataaaaaaagttatgtgcgacaccgacaccaacccggacttggaaacaacactattgcctacataacataaagggagaagaggagtgaaatgtaagcattatttgttttgttgatataattcagctattgcgaataagaggggtcttttggtgggatgattccaagccacaaacttcattttccaacatgttcttttcattggcttgtccccatatcactgtgtagaatcccactaaaatgattgttgatccaatcacactgccaagaaaaagagactcgccaagaaatatgacagtgagggcgactgcaacagcaatccctaagggcttgaacagggaaacatacacaggtcccttcttttctaagcaccatgtatgaattgaaattctgtacaaacttccaaatactgccgagcataaaatggcagctacttcttcattagacttcaatctccatgcag

SEQ ID NO: 51000 - DNA, 503 bp, Gossypium hirsutum
  Clone ID: LIB3828-030-Q6-N6-H2
aaaatgaaaacaatattgtttaattccaaaatctggttttgcagtaagaaataaaacactatttccttttcaagctatatatatatgtgtatatatatagtttcagagtggtttggcttgcctttctataacttcattcaaccttcttactatattcgtcagtgctgccttcttgagatttaacttcagtatttgattcatcaaattccaataactgcatatcatgttagatcatatcaacagcatcataatccgaatatagaagacaaatcacttcaattattgtatttttctagtgtttgtttcatgaaaaataattcagtcaacggaaaatgaactcatggtcgaaggaaaattcgttctatttttgttttcggaaaatatcttccgcttgtgaaaaaggaagacagtttctgaaaggttaagtaaagcagaaaggatcaaaatcccattattatagggatcaatccctatgaagaaaggagaaaaaggatcaataccct

SEQ ID NO: 51001 - DNA, 463 bp, Gossypium hirsutum
  Clone ID: LIB3828-030-Q6-N6-H9
ggaaaaaaacacttttaattaaatttttcccccccaccccgggggggggggggggcaaagctttaccatttcccaaaaggaagggggaaaacccgggtcatagaaaagggggccccccggggcccattaggggaaaaaaaaggggggggccccaaatggggccgaaattttgggaatccccgtccgtaacgcaagattttaggaaaaaattccccaaaaaactttaacccttggccttttgggcccctttttcctttttaaaattttgggggcctcccgtataaaaaaagggctaaaaaatttttttccgggggccccaaatggggccgaaattttgggaaaaccagtccgtaacgcaagattttaggaaaaaattccccaaaaaactttaaccccttgccttttgggcccctttttcctttttaaaattttgggggccttacggatcaaaaaaggctaaaaa

SEQ ID NO: 51002 - DNA, 541 bp, Gossypium hirsutum
  unsure (1)..(541): unsure at all n locations
  Clone ID: LIB3828-031-Q6-K6-A10
tcgttatgttctttgaggaagacctggggtggttgatgggcaacaaccttaacatcaaatgatcttgaggagattcaaacattccttaattctgctgtttcttcaagttgtgagggtttaattatcaaaacattggattgagatgctacatatgagccatcgaagcggtcactcggcggggtgggattgangaaagactacatgganagtgttggcgactcattagatctagtacctattgctgctttccttggccgtgggaaacgaactggcttctatggtgcttttctcttggcgtgttctgatgacgctcttgtagaattccagagtgtctgtggggtgggtgctggattttctgaagcggagcttgcggaccgttctgccggtctccgctctgaagtgattcctgacccacagtcgttctgtcgttgttctgcgctgatgcagcccgatgtttggtttgagacttccctggtttgggaggtgtacgctgctgacttgaccattagccctgttcctcgtgctgctcttgcgattgtgg

SEQ ID NO: 51003 - DNA, 507 bp, Gossypium hirsutum
  Clone ID: LIB3828-031-Q6-K6-A11
cttcaagacatcctttatctaactgctcacctttaactcctccttccactccttcctttttggttcaatcgggctctctcactcttcacatccgttgactttgggggggggggaccctcccggcctggtaaactccttcatttcttttcaatgtttcctttgcaaggatatgcgtaagactattcgctgatcttgggacatattcgaaactgcactctttaaattttaaccttagctgatgaatatcatatatatacgcacttacccaagatttatctaggttcttttccttgcattttcttattattgataatgagtctccttctataataatactttcccatttaatgccaattcctgtttggagagctttctgacatgctactgcctccgccgcaaaaactgaagttattcgatgatggatctctaaacatgaaagggagactgaaccctctctatctctggctactattcccactaccgatctattttgtctaccatcatatg

SEQ ID NO: 51004 - DNA, 567 bp, Gossypium hirsutum
  Clone ID: LIB3828-031-Q6-K6-B11
gctttagcacgctcgtaatttttgtgatgtgccagtacgaaatatgggttcttggaatgcaatgatttccggatactgtcaaaacagcaatgctgcggaggcattagatgttttgaatgagatgagatcggaaggggtactgatggatccggttactatagttagcattcttgctatttgtgcacagtcaaacgatattttaaatggaatgtcgattcaagtatattctataaaacgtgggctggagtatgatttgttcgtatctaatgctttgattaacatgtacgcgaaatttggtaagtttgcaaatgcgcagaaggtttttgataacatggtagtcagggatatggtctcttggaactcgataattgctgcttatgagcagaatgatgatccaaacagggcgctagctttattctacgacatgcaactaactggaattagtcctgattacctgacactggtgagtctatcatctatcgttgctcaattaggtgattctcggagtggtaagtccgtccatggatttgtaacgaggagaggttggattctgaaagatgtcatctc

SEQ ID NO: 51005 - DNA, 348 bp, Gossypium hirsutum
  Clone ID: LIB3828-031-Q6-K6-H11
gctttgcattgtcatgatcccaagggtgtgtgtctttgctcgatcctagatctagaaactttgattcaattatgatgtgtaaatatactataattaatataatgaatatataatataataaaataaaaaaaaaaaaaaaaaaaaaaaaaaaaaaaaaaaaaaaaaaaaaaaaaaaaaggggggggggggaaaaaaaaaaaaagaggagccaaccttaaaaaaaaatccaaacgcgaggtcccacgttcatgcaaaagccactacctttaataaaagggcctgctcaggttaaatcccacgtggccggcccagttaaaacccctgggcctgaccaaacccctgtccccc

SEQ ID NO: 51006 - DNA, 547 bp, Gossypium hirsutum
  Clone ID: LIB3828-031-Q6-N6-A10
actccatctagcaagaggaagcttcttgattgcaacagaaaaaggagtgtttgtatttacattgcaaagtctagaaattggataactatcagtcccatttgcacgcaagataaaatgttattcacctactcagggaggaaaaatgttgcgacgcttatcagaattcctcaatcatcctcaccatcgtcttcgttattggtttgattgtgtttttgagcattatacatctcagcaacctgctcagatgatgaagcttgctctggtgtcttatcttctcgaacacgaactaaacgtggaaatcggagagatatgcccttatcaggatccacaatcccaatagcagcacgatgaacagggctaatggtcaagtctgcagcttttacctcccaaacctctgtagtctcaaaccatacatctggcttcatcatctcagaacaacgatagtacgactttggttcaggaatcactttagagcggagactggcagaacgttcctcaagctctgcttcagaaaatccagtacctattttacagatactctggaatt

SEQ ID NO: 51007 - DNA, 540 bp, Gossypium hirsutum
  Clone ID: LIB3828-031-Q6-N6-A11
gaatgacaatagagttacggaatttattgatcatagtagcagaacatgggaagaaggagttaatagaagctgcctttccggagaatgttgccgagaagattctgagtattctgttgtcggaggtacctcatgaagatttccaagtctggcgcgctgaggcgtcggacgggtttacagtgcgcagtgcctataaactattacaaggtactaaagataatcctagagcttttgcttttcaagacgactataaggacttctacaataaattatggccactggatataccttccaagattaaaattacaatgtgaaagatctcgtggaatttcctagctacacgagttaatctggtatttaaaaagctaacaaatacaacagcgtgcccccggtgtggcttaagaccagagaatatggatcaccttttccggaagtgtcctgggttttttcacagagctcgacttcccaatgtagaatattttgttgtgcactatgggctatttggagagatagaaatgctagggttcataagaaatggggcaa

SEQ ID NO: 51008 - DNA, 549 bp, Gossypium hirsutum
  Clone ID: LIB3828-031-Q6-N6-B11
aacagatgaaatcattatcttcttgttcttcgaaaaaatcactgttacattcgcatgcagtcataaatagatgatagatatgcttcctgaataattaattataaatatataaaatcaaatcaatccaatggtcacagtgcaactcgtgccggaagtatggtttaatgataatcaatccaagtttcggctcaactgctttagctttatagagtgtactccgttcttcttgtttctcggattcatgtttaccaatagtcaccgcaagagcaaaccccatctttgaaatgatgaaaccggttggaatcccgtacgatgatctctctctcggtgatgctagatatgtacttggttgcgttgtggcaatcaccgcaaacgctcaggttcttgaatattcgaataggagttttaggaggggtgctgataatcccgaatgcaatcgccaatctctcgctgtgactcataaggatatgctccttctcgtcttcttcgacatccaacaaaacgaaactgtagtctggaacatagcctagaactttcattttagcattc

SEQ ID NO: 51009 - DNA, 547 bp, Gossypium hirsutum
  Clone ID: LIB3828-031-Q6-N6-C3
aacattcaaacaatgaaggctttcaaattcaatattctgaaaaaaaaaacaatatccattggaaataccaatataaacaatccacggttcacgaattcaaacagtatatatatatatatatatgacagactgaatgaaagaatcaatcagatttttccaccaagtaaggggaccaagaaattcctgtaatctccagaagtatccccagtaactgcatcatcgagactggacttataaatgttcaaatattctgattttactttcatcatgtcgatttctgctctgcttattattgctcttgtcagggaaatcttcatcggttcccagtccaatgattgaagttcctacaacctctgcaaagtgcttctctggggaatcaatgcacaaaataaccattctcacaagtgattccaaatcacccttcccagatttctcgatgtccttatcaataggatttccatgttttttcttgtagcatgcaaatgtagtcctgagttgatagaagtttcttgtggaaagtataaaaactacatcatcatgggccaaa

SEQ ID NO: 51010 - DNA, 497 bp, Gossypium hirsutum
  Clone ID: LIB3828-031-Q6-N6-D5
gaagaataaaccttcaaattcatgaaaaaacttacaaattttgaacatactgatgtcagacgacactatgttcaaattcaagtaacatagccttgtatatctattgttgaagtttaccaaggttatatgcatgcatgcatgctaaataagattaactataagactagatataggcatttgcggttaatttagttttgattcaaagatacgactcaaacagaatgcaaatcagattgcatgatccgaaatgtcacgcaccgtacagctaagcattagccagcaatggctgttcaagaaaagcttccattagaacataaatgacgatagtaataaaataaggaagcattccaaaggagagatgcacgtatcttcttgccaacatgctatatcattcacaggcagatttggaagaaagcggctctggtagatcgcaaaggcttgaaagccgggagagttaatccatggcaacaccgattcactgatcattcgcaagctgg

SEQ ID NO: 51011 - DNA, 427 bp, Gossypium hirsutum
  Clone ID: LIB3828-031-Q6-N6-D8
gcataatctttccctataagtactatggggtaatatgctactgaatatacagaaaataaaattttaaaaaaattctttcactcaattcttcagatgtattaatcattgttcgtacctaaacctctcatccttgaaaagcaactctatgagagcatctctcaaatatggatttggatctgtgagaagccttttagcaaagtatgggtatgaagcagccagcactttaaaattcggatcggcataaagggccaacccttctagcacagtaagggaccgcaatatcagtgcataatagggagggacgttaaatgggtattggtataaaacagaacccaaaccatcaactagggtcttgaagtttaattcactaacaggggagctaagagcatcatcaaagaagtcccgaagtgccggcacaattggggaa

SEQ ID NO: 51012 - DNA, 490 bp, Gossypium hirsutum
  Clone ID: LIB3828-031-Q6-N6-E1
cccccccccccccccccccccccccccccttttttctcgtttaaccccctttttttttttttggtttaaaccccttttccccggttccctcttaattttctcacttgtgaaaaggctcgtgacacgggggagacatgccccgggggtgcccatgtaccacaacaaaccgtagctctaaaactcaaaggagagctctaccccacctaccccaaggggggacacacaccaaaaacttgtgctaaaaattaacatcaggcgaaaactcccccaaaaagacccccggtcccgcgtgagaatttgaggtgaacatccccactaggacccccaccccgctgagaccccgccccctttatgtcaaaccgtgtccgggcacaaaacctgaaacccggcaaaaagctagatccacagccccccctgagcccccaggtccccagtgaaaacattgccccacgcgctagacagggcacccctcccaatctctagcgctaga

SEQ ID NO: 51013 - DNA, 345 bp, Gossypium hirsutum
  Clone ID: LIB3828-031-Q6-N6-E4
attcttaaattatcttccacctaaaaaagcactggacaaatatgaaatatcattgttatctcgatatacaatgtcactaatgaattccatacgtattattatgcgacatatcctacaacattcgcccccttttaagatttcttcttatcattccaaaccctttaccttaattttcttacctatatccccttacataataatcctcacatgtgtcctaacttaatcacgcttcacatcattactaatgtccatcccatttcccaattgaattgcatctatacaaacaatctacgagcctgctcattaaaaaatggccatcaaatcaccaccttggctccactgata

SEQ ID NO: 51014 - DNA, 512 bp, Gossypium hirsutum
  Clone ID: LIB3828-031-Q6-N6-F10
gaagaatagagattaaatttaaaattataccctaaatataatatttattcttagtgggacgtgtacccgaatttcatcacatattttacaggctagaaagtagaataaaaatgaacatagtttgttcctgaaatatacatggtagaaatttatttcttagcttcaagtccgactattcattttctttcttttcttatgaagtattcgtgtttaatgcataaatcctccatattcgtagaccaacatcaaaaagaaaagaaaaatcgaacatatccatgtcggacacaagtcaaattataatggtgatgggatgtttgtcgtctcctacaaccaagaaatgccttccttcttccattaccattaaaccatattcattagccctacttaaatgctcacaagggttaacttcaaactgaatttcacccatttcccctccacttaatatcacacttcgaaatccaatcaattgtttctttggcctcccatttccatgggttccatgccttacatac

SEQ ID NO: 51015 - DNA, 544 bp, Gossypium hirsutum
  Clone ID: LIB3828-031-Q6-N6-F5
actaaattggatattgttatttaattttaattgaacttggagaagaaatcgaacaataattgattgatttgatcaggtatttcctcattgatccaatgagaaactccattgatgacaagagcttcttcaagaagggcacattccttttaaacccaccgttgtgaatataatctttgacacctggcattgtatatacgagatcatggtcccccattgcaaactttacagggacctggatctggcttttccaccatggtgctaatagttcccagtcgctataacagaaccaaccaaaaataaatgaatttagttaattataaaaaaaatgacactgtaatgaatatgaatttaatcgaaaatttttaacagtattaataattaaacttgtatttttaaatctgaaataaaggattgaattttaaatttacaaaaagtaaagggacttagagcgtattttaactaacatgaaaaacccataattaataattgggtaatctacattagtagtcacccaactattttttttcctttttgatcatccaac

SEQ ID NO: 51016 - DNA, 574 bp, Gossypium hirsutum
  unsure (1)..(574): unsure at all n locations
  Clone ID: LIB3828-031-Q6-N6-G12
cagcagtatggcttacattttcccaacttgtacaaacttacaataccatattccatcaacactatcatgcggtagaacaacttttcaccattcatcacacgaattgtgccgattagctcttaaaaaaatggtactttgattcaacatagctctctgcatcccataaaaatgaaccaaatgccactgcttccaacactagcattgtcaacccagagaaagtgagtgaaactacttcatcatttgaagtatcgagtgaaccgtcatcgagaattcgaatgtcaggcctcccgaatagtgcttgtgtttgcttttcaattaacgaaatagcttctttggatcttatagttgcgtatctctgaagtgtctcggaatccaaatacataacgtaagatctcagtctatattgttttccttcggcatctccgtatcctcctccatcatcgtcatcgtggggtgggattctaatcaaagaatctggatcccaaagctgcttccctggattaggatcttcaaatcttgcttggcttttaatgaaatcctcggnaagggttttcattgttctctcgagttgaaa

SEQ ID NO: 51017 - DNA, 542 bp, Gossypium hirsutum
  unsure (1)..(542): unsure at all n locations
  Clone ID: LIB3828-031-Q6-N6-G8
attcgtaaattatctttcaatttaaaaagcaaaggacaaatatgaaataacattgtatctcgttatagaatgtcattaatgaatttgttaagattattatgcgaagatcctccaacattagtagcctcttcagctttcttcttccattccaaagcctttagcttcatttccttccctatatccccttccatcatcatcttcacaagtgttgtaacttcatcacgcttcacatcattactaatctccatcccaattccccattgattgcataaatacaaacaattcgtgggctgctcatcaaaaaaggccaacaaatcaccggcttggctccactgatactttccagtgttgaattccaaccacaatgtgtaagaaatgccccaactgaagggtgagaaagtacctggtcttgcgggcaccaattcaccatcaaccccctaccttcgatatctttataatactctccgggcaagattccagggttccccatcaccatatcaggccttacaacccacagaaanagggtggttgctgtttgcaag

SEQ ID NO: 51018 - DNA, 453 bp, Gossypium hirsutum
  Clone ID: LIB3828-031-Q6-N6-H1
ggccaccccgaaatttttatttttggggggggggaaaaattttccaggggtaaaaagggaaaaattaaaaaaaagggccccccccgccccccaaagggaaataacaaaaacccttttttcaccccaaccaagggttttgtaaaaaaaaaaataaacggggaaaaattgggaaaaattcacattcacttttaaaaaaaactttaagccaaaatttccgggaaactccgggaaaaacccgggttttcaaaaaaaaacttttaaagaaaactggggaaaaaaatttttggtaaccgaaaaaaaaaaccccccccgggcttgggttaaaaaaccccccgggaaacccgggttttttaaaccccttgaagggaacccgaaaggtccgactcaaaaccaacccccttttggggacaaaaaattaaaagggcccaatcccagggggaaataaaataaaaa

SEQ ID NO: 51019 - DNA, 478 bp, Gossypium hirsutum
  Clone ID: LIB3828-031-Q6-N6-H2
acgacccaatccattagaatcggattttttttttttgaaaaatcgagttcaagttgaatcaagattgaatttgagtaaatctaccgtgcccagccaagggcccttgacggatcttaagtcacaaacatatatatttaaagtttaaaaaaaaaaaaagcttatatcacaacaaaattcattccaacaaaaatgtcacctaaatcaggtccgagtgttcgctatgcttgcaattggagtctgattcttaccttcctgcaacttctccataatcgggttgcatcttcaacatttatcggaacaacaaactcgtgcaaaatcgtttaagttacaaatacagtacttaaagtgtcaaaaattttgcattctttcaacgagattcaagatccatttatcaaagcatgcaattgttgtcggaatgaggaaatgtcttctggtttgacagccataacaatccctgttagctgggaattttttagct

SEQ ID NO: 51020 - DNA, 565 bp, Gossypium hirsutum
  Clone ID: LIB3828-032-Q6-K6-A10
agctgccaatcatcttgggggtggggggggggggattagacacatgtgcagagacctctgctgtcatttggtcccaagacttccatgaagcttcggacatgcccaattattgtttgtaaggaactacgatctggttaccacttaatcagtgaattttgttgtgagggctgtgctgtgactgcagatggtgcttttagtactgcatggcttaagaacttgcaaaagcccatgggttcattagtgctgtcccaagataatggttctaggaacaattataatccttttctattctttacacaaccaagttcaattcctggatctgttatgcagttagtaggttcttcgtatctacatcgtgctactgcatgggagatatatggaagtgctccacttgctcgggcaaatgctttggtttatgcaacttgctttgctgatgcttcaagttcatctgatgcagcattagtgcatgtgaaacttattcaacatctggcagtatttaaaggctacaaagaggcttttgctgctcttaaaactgcggaagagaagtttttatgtgtatctaaat

SEQ ID NO: 51021 - DNA, 244 bp, Gossypium hirsutum
  unsure (1)..(244): unsure at all n locations
  Clone ID: LIB3828-032-Q6-K6-B12
ccgggtcgnaccagcgtccgcggncgcgtgggctttacaacacggggatggggggtaaaaaaagcattttatctttgttgctctgcttttgttcttgttgtccttctttgtcgtgtttgcaggtctacggggggtcaatggagggaaaaccttgctatttcggtggcagggaagcaaccatcgggncagnaggggcgctggacggnaggcacgtgggggtgcgggggcgaccggagggctgcgg

SEQ ID NO: 51022 - DNA, 484 bp, Gossypium hirsutum
  unsure (1)..(484): unsure at all n locations
  Clone ID: LIB3828-032-Q6-K6-F11
tcggntccaggggttgacgatcgtggggggggagggggtggcgataaagccgtggtcgcgatagcagtcgtgatcgtgaccaccatcgtgatagcagtcgtgagcaccatcgcgatcgggaccgtgatagtgatcgtgaaagcgaccgtgatagcgatggtggtagtgatgacgggaggggggaaaaagaagaagaaaggaaaaaagaagaaagacgatggtagcggtagtgatgatgatcattagatcatcattatccataaacaacatgcattatcatcatctccataactccaccacgcctctcttgtttgcaagtggagagcgtgaatgaaatatatattgatatgaaaataaggtatttcttttttcttttcttaattaattagtatttgttatccgaatactacttaatttattttttaaaatatgtaagtgtaaattttaaagataaataaaacattgcattagcattattcatgtg

SEQ ID NO: 51023 - DNA, 303 bp, Gossypium hirsutum
  unsure (1)..(303): unsure at all n locations
  Clone ID: LIB3828-032-Q6-K6-H12
aacagctggcntcgatcttgtccaagtcagtcagtgcagatcaacctgaagggctcgagccatgaagcttcggcaggccgcactagatgccatacaaatgcatgggaagttcgtacacggctttgaatagcttagttgaaactttatcttgcattagaaagtaaatgagcgtgaaatatgcaacgaattttatttaatagtaataaattaagataaaagaagatcatcaatcatgcatgttttttctttataaatattataattaaataaaatcatcatcaataatgtatgtttttcggttgt

SEQ ID NO: 51024 - DNA, 546 bp, Gossypium hirsutum
  unsure (1)..(546): unsure at all n locations
  Clone ID: LIB3828-032-Q6-N6-A8
gaacccggaaaacacgaaataaatttcgatcgtctctagggcagtaccaagctttaccaattacaactaacaagcgtcttcaataaaaccctttgggaactatacccgctcaagcaaagctaataatctaatggccaggaacatgcttctttcaagcaaacatcataaaccaacagcaaatgacatgttaaagctgccattgattgaaactggcatcatcaactctcaatgttacagcttgtgcctaacctaccggtacaacaacctaactatagataaagcagtgtttgatttaattgcttggaaatttcactgctgcgaaccggttacaatgcatcaggcgaatcaagaatcgcttggctgctgttcaaattgctgctgctgtggctgaccctgaggccatggcatgaaagccatgggcggtcgaggctgctggccaggatacaatgcagcttgatcaattggctttcccattatcatccctgggggatcccancagggtgctgtgggacatagtaataaggaatatcagcaggtgaaccaact

SEQ ID NO: 51025 - DNA, 486 bp, Gossypium hirsutum
  Clone ID: LIB3828-032-Q6-N6-B2
atccattccacctttctataataaatgggtcaaaagaggagcagtatattgtacaaattacatacgtatctttatagttcaaattaactacgacaagaaaaaaaaaaaaaaaaaaaaggaaggggggggaaaaaaattaatagaacttaaaatttatctgaataaaacccctggaagaaaaaactagcagtggggcgccttatgtaattgcagtacaaaatttggtatatataaatggggaacacgatacagacgagggaaaaagggggctgatcaagtgctgctttgtttttacgagcagatattagctttggcaataataggctgctgaaagagtaaaatgattgacgatatttcaaaagagtttgatagcaagaaaataaaaagtcattgcgttttagctgctattagttcctagttcccttgttagcaaaaattcacaagtcttatacacgattcactacttacgtaactatatgccacttt

SEQ ID NO: 51026 - DNA, 449 bp, Gossypium hirsutum
  Clone ID: LIB3828-032-Q6-N6-B3
ggaaggggaaaaagcacccaaatctggggggggatttgcactcccaaggggagggcccaaaccctagggggggagggggccccgaacccggggggccacccccgggcaactgacagggccccggacccggggccccccccgggaaacccggaccggtccccgcagggggaccacatggccctaaagggagcccgaaaaaaactgggggcaaccaaggacaaagctgaaccccgggggaaaagggaaaaccggtaacaatcccacacaacaaacgagccggaaaactaaagggaaaagccgggggggcccaaggggggagccaacccacaaaaatggcggggcgcccactgccccgtatccagccagaaaaccgggggggccagctgcataaaaaaaaccaccaacccccggggaaaggccgttggcacatgggaccccaggggggcttt

SEQ ID NO: 51027 - DNA, 570 bp, Gossypium hirsutum
  Clone ID: LIB3828-032-Q6-N6-B8
gaatgaatcatttgaatcgatcaatggcttacaattgttcgtttatacatatcaaaaggctaacactgaattggtgtgcaatatgttaccctaaaatggagtttaggccttaaagaaatgaacctcttaatgaatatatatatatacaacaatgaatatggaaagttggaatttgatttgcattccattcatctgaaggtaagtaccaatccagaaactaaagcttctttgattaatggaagcccgggggccttaaatttacggtgggagattcgggagaagtggtatagataccgtcaaaatgaagatttatgtcccctccagcttcaagatcatccatgtaagacatatgggataacctccgagaatcccgccaatcaaggtattgatcttgcccttgtatgcttctctcggataagttattgtactgacagtctgcaggatagcggttgaaatcgggaggctctagaaaacttgcttggggctgtgaaccgtgcaagccacttcggtcccaccaatggctccatgtatggtgtgccaagtcatttgcatcatgatgctgaagtacac

SEQ ID NO: 51028 - DNA, 561 bp, Gossypium hirsutum
  Clone ID: LIB3828-032-Q6-N6-C12
aataataatattggtactctttaccatatcaaatgtaagatcacaaatgaattagtttctctttaaggagaagatggagccattcaggaggtggggttttgatacttccatctgaaaggcaccgaaaaatcaccatctctcctgctaataattttctcataaatattcttctatgttgctgttggctaattaatacatatgtaaggcatgcctaaaaattttaaaggttgattttcccctcaaatgaccctaaatctaatagatcaagacaattttctcttcatctacgaactgatacaacaatgggtcttatgtgtacaaagaataagcaaaagtaaagaaaacaaaaatctatcacatactagtttagttctagttcatcaatagtgatgtcagtatttgtcccatcgttttctcagatgcgtcaccttcattctctatagcaatacccgactctagcactgcagcatccagagtcaacttcctttttgcaatctcataaacattctcatcaacagtacctttagtaaccagcctgtatatagtaactggcctaatttg

SEQ ID NO: 51029 - DNA, 472 bp, Gossypium hirsutum
  Clone ID: LIB3828-032-Q6-N6-C3
aaaaaaaaagcagttgtacggtgtgatagtctttcatttcgtttttaaaaatagaatgtacaggccaattttggggcctaaattcagacctactaacctaataccattacaaaaggcccgtttacaaccttaacccatcaagcccaatacccattacaaacaaactaacccactaacccaatactatcagcccaatacctaaaattatccaaacccctagcccaattaaacctatcagacccactaaccaaaccctagccacccatacccttaacctgcagcgccgaacctaccctctgacagcactgcagcaccgccccaccggtcatgtcctccaccgacccctctgcagcatcggccatgctctctacacggcggccggcgccggcaccggcgagcctcggtggcagtccggtgaccgacccctggccgggtttctcccttccccttccccttctcttctctccttccc

SEQ ID NO: 51030 - DNA, 502 bp, Gossypium hirsutum
  Clone ID: LIB3828-032-Q6-N6-C5
cttatacgtgtctttatatcgttctttatgttaaaagtgcatggttctttgtcgtcttttgcatagaggctattcatgaactgatttcctttaactattctatgataaaaattaaatacttgaattgttatcttgttgcgagtctttctttttggaatcaagtttagattagatagttttgtttatctttgtagctgattagcgttgtttaaggtttggctctgtttctgtgcttgtgtctagttattttgttgtcagcctttgttttgaagcgttgtcctcttgggaggaagagtttgctgggttttttgtcgtgtcttttttgaatcttgtctggtggtttcgtcttcctgagtaggcatatgcttctttctttgtcttggggttttcccttagtttccagtatggaagaggatcttaacagtttattagagaaattaaaattctcaaaggaagaaacaacaaaaattgttagcacgaatttggattacaataataccca

SEQ ID NO: 51031 - DNA, 455 bp, Gossypium hirsutum
  Clone ID: LIB3828-032-Q6-N6-D6
aagtaaaggggggaaagggaattcccaatgggagggggccccttaatacttcccccaaaacccattggttatatgacccgggagccaaccccggcaagacccgggtcatcataccaaggggggtttgaaacttgggtcaacatattccgggggaagaactttttcgattttatatatatagcccaagaaatatagcaaagggcataacttactaggaaaaatcggattaaaaaggccctccactttaccaaattgagctgatctcttcaacagttcattcttttcggctttgaatttaacaaaccgagaacctttcccctctttggggggggtatcttctaaaatcggctggggaaaaataaagggaggccccggctttggagataatggaggcatcaatgcccatactgaccaaaggggttcctttggtttgtcaaaattttgcaaaggaaaaa

SEQ ID NO: 51032 - DNA, 436 bp, Gossypium hirsutum
  Clone ID: LIB3828-032-Q6-N6-D9
ctcatctctaactcaaataaacaaaagttccaaagcactgatttcagtctcaaaacaaaaaaaaaaaaacatatgctaaaaaaaaaaaaaaaaaaaaaaaaaaaaaaaaaaaaaaaaaaaaaaaaaaaaaaaaaaaaaaaaaaaaaaaaaaaaaaaaaaaaaaaaaaaaaaaaaaaacccctccaaaaaacccccgggtgggacccgcccagtggtttgaccggggggatgccggggggcccaccctttgcgtataaaaagggtgtcttaaaaaggaggggggaataaaggggggggatagttacctgggtgaaaatagtttttccggtcaaaattatcttcccccaaaaaatccggcagcaaaaaaagggaagactgggggggggtaaagaggggggggacctaacaaaaataagaagtgggctaacatggcggg

SEQ ID NO: 51033 - DNA, 441 bp, Gossypium hirsutum
  Clone ID: LIB3828-032-Q6-N6-E12
gaaatacaaaatatttttttctttttattttattgcttgaacttacaaacaaagcctaagtgcagcctttcaaaggcattattaacgccttcaatagggttatagctaagcagcaggaccaaaaacaagaagatgaacatatacttcagccaggccaccaaaggccttcaaaaagcaatcaatacaaaacttgacttcgtgcgaacaactgcacaatgtagatgttaacgctttgaactaataaaaaataaaataataaaagaggaaggaataacacatcttcccatagatgataataataaaaataaatgaattggcaaattacagatgctcttcacactgtacatacttgttttggttattcttctctctttaagctccttttccttcatcttcgttcaaaatgcgttgccggaaatcacccaccataagaggcaaccc

SEQ ID NO: 51034 - DNA, 431 bp, Gossypium hirsutum
  Clone ID: LIB3828-032-Q6-N6-E2
ccacacgggacacccccacccatgaaacacggggcgcgacccacggcccttggaaccgggggaaggagccgggacaaaaaaagcgcaaaggggaacgaaaagggctggggctactcgcagacaaaacgacaaccgggggaacaccggaaagcgcggaaaagacgacaaaaaaacccaacagtcagagggagagaggaactgccgggggccccaggggaaaaacaacacgaaggaaccccacagggccaacagcaacaattaaacgccagaaagctgtcgcggcgagctcaaaaaaaaaaggggcaacaccctctgtcagggaaagggcaaaaccggcacaaagagggcatcaccttcagcatgcaaaaaggggaaccagacctcatccattacactatgctcggccactagagcagaaacgagactcacca

SEQ ID NO: 51035 - DNA, 533 bp, Gossypium hirsutum
  Clone ID: LIB3828-032-Q6-N6-E9
atcatgaaaattaattaattaactctatattacaaaaataccttcctcaatattccattacaaataccaagcttcacttgactataaatacaatcactttatttttgtaatttgcacataatattcacaacaatcacacatccaaacacaaaagctacaatggaaatccacctcacgcttaagctaatagacaattatgctattgataacttaatcctttcgttcggacaatcaccggagcagacgaaagggtaactctcgatccacaaatgctccgaccgaccgaccttgattgatcagtgctaccaatatcttccatttcccctaacagtcatccggttaaaagaaccattgcgggtcatagttgaaagtaccgcaagtaaaacaaccactgctgctgctgctgctgctgctgctactgctgctgctgctataatccaagtgttgccaacaccttccatttccactaaccggtctctcgcaaggagcaccattgtcggtggttgctccacaaattaatataatatcatcac

SEQ ID NO: 51036 - DNA, 378 bp, Gossypium hirsutum
  Clone ID: LIB3828-032-Q6-N6-F11
acatgaataatgctaatgcaatgttttatttatctttaaaatttacacttacatattttaaaaaataaattaagtagttttcgggtaacaaatacttattaattaagaaaagaaaaaagaaaccctttttttcatatcaaaatatatttcattcacgctctccacttgcaaacaaaagaggggggggggggttatggggaagatgataatgcatgttgtttatgggtaatggtgatctaatggtcattatcactaccggttccatcgggttttttcttttttcctttcttcttctttttcttcttcccggcaacactaccaccatcgctatcacgggcggtttcacgaacactattacgggccccatcgcgatggggc

SEQ ID NO: 51037 - DNA, 395 bp, Gossypium hirsutum
  Clone ID: LIB3828-032-Q6-N6-F3
gtaattcataatagagaatcaacaaggggaaaaggcagaacaagaccccaaatacaagccgccaaagcggggggcggcacgccgaccctcgcagcggaaacaaaaaaagaacagaacgaaacaaaaacacaaggccaagagaagcaagaaaagccgtgcaaccacgagaaaaaaacaaaaaacagaaacaacggaagcacttccggccataaggagaacctcaccggccgaactggctccgggacgaaacatgttcccttggcttctgaatcttcaaaaccaccataggcacggtacacaggcctcctgttcctagggaacctagacctctcggattccgcaggtctcaagcgaggaatcctcagggggagccattttccgcacagcagtcggag

SEQ ID NO: 51038 - DNA, 436 bp, Gossypium hirsutum
  Clone ID: LIB3828-032-Q6-N6-F9
aaaaaggaaagcccccatcggggttaaaaaattccccttaaaaaaaaaaaaaagggaactttccatccccaaaaattggcccccaaaaggggggacaaaaaaaatttccccttaaaaaaaaaggcaaaggggttggccagttcaaactggaaaaaaaaaaaaaattcctaaaaaaaaaaaccaaagccccccccggggttattaatttttggccagggggtagcccaaccaaaaaattggcaaaaaattccccacttttgaaaaaaaaaagggggttcaaaaaaaaaaaaattgggttgggaaaaaaaaagggggaaaccaaaaacccgggggaagtttccccaaaagggctgttaacgggaaggggaacccttaaatggcccaacccaacattggaaacaaatggacagaccgcacattggggggggggggcccc

SEQ ID NO: 51039 - DNA, 438 bp, Gossypium hirsutum
  Clone ID: LIB3828-032-Q6-N6-G2
ctatgttgtttatttaaataacagccccaaaccagccacacaaaggcacaaggaaccggaacccaaagggaacaacaaaaaaccggaagaccaaaccgagggaaggcgaaggtatacagcaaaataaaaccaaaaaaaaccaaaagaaaaaggaaaaagcaagcaccgaaagaaaggggaagaaacgccgaacaagcaaccacggccccaagcaccaaggcacaacccccagaaaaagacccaaaaaaaaacaaaaaaaaaacccaggaggcaaaaagaaaaaaaaaaaacgaacgcaaggggcgaccaaaaaaagacaaaccgggaccggcaggcggaccagctgaacccaaacagaggcccaagagagcccggcgaaaaaacggacagagccgggaccagagcgaaaacaaaacccggtcacaaggccgcccaaaa

SEQ ID NO: 51040 - DNA, 436 bp, Gossypium hirsutum
  Clone ID: LIB3828-032-Q6-N6-H1
acagacaacttacacattaggttcatttaattaaaaccacccttgttttaacaagcaaattcaaaacttttgacagggggttatgctacaaaagaccacaccaaacatgtcttcaagatgggtgacattttcataaacactctgcatgcttaagggacacactggggacacaatttggattaggcgacctacaaatggcgcctggtaccagaattgattgaaaatgtgagtgcgtactgaatcattgggaactccacaccttgcaaaccgtccagcactacctattggggctttcgcactctaagactaggcgacttcatctgccctaccaccagtgcattgtagaggctccagcgttaataacaacatgactgattaacgggcttgcttttggattatagctcaaacaatagtatgccaagctggatgccttacg

SEQ ID NO: 51041 - DNA, 498 bp, Gossypium hirsutum
  Clone ID: LIB3828-032-Q6-N6-H12
ttgttttagcttttagatcagcggggggaaggatggtgtaagctacgaggtaattgaagtgatcagaatcggtttctatggagctttgtttgcagaacagaatgattctacttgttcatattttctgtcatctcctctttttttgttttattttgaaattgaatgctttatgctaaaaaaaaaaaaaaaaaaaaaaaaaaaaaaaaaaaaaaaaaaaaaaaaaaaaaaaaaaaaaaaaaaaaaaaaaaaaaaaaaaaaaaaaaaaaaaaaaaggaggggggcccccccccttttttttttcttttttcccccccaaaaaaaaaaacgttgttcaacgggtctttttttctcatttcttaaagcttaaaaacaaaaaacccccccggagatcggtcttcctttttttctttaataccatcccagacaaaaaaaaacggggttcattacccgcgtcatttctctttaaaagaaaaaaaaaattttaaacaactttttcaa

SEQ ID NO: 51042 - DNA, 524 bp, Gossypium hirsutum
  unsure (1)..(524): unsure at all n locations
  Clone ID: LIB3828-033-Q6-K6-A10
gttgcagtacatgagnanatgggggggcgggcggggggggtgatacaagatctgaactggataagataattagcctcctcccattgtttgttcggttttcggtggagaacatctttgacctgtttccaacagagctttacggcgaggaaggtccgactggaccaaagaaaggataggggggtgggagatgaaagaagttgataccttatcttgctttgtgtacattcatactggcatggtattcatagtccatagaccttccactgtttaaagtcagcatggggaactggtcgagaacaaaggatgtgcccatgctcccggcatagagagaaaccacaaattgatgaatcaaaatacagaatgcagaatgcagagtgcagaggtagtatgcatccgtgtggctatatacaaattcttttaaggtggatagagaataggttgaaatgggggaagttgtataaaaatgtgttgtttggcattgatccgtaaatatatagtgttatggttaaaggttgtttgctttt

SEQ ID NO: 51043 - DNA, 579 bp, Gossypium hirsutum
  unsure (1)..(579): unsure at all n locations
  Clone ID: LIB3828-033-Q6-K6-B10
tcggcanagttataacactaagggcggggggggggcgggcttctaagcctcactttgtcaacatcatcatcagcttccccatcccatgccccttattcttcaccttctgcaaatatacaccataaagttcaggcaccttttttcgagggatatccctaccctgaaaataagggatcggtgggatatgatagttatattgttccttgggcccagcctcagcctcaattccgaagacagtttcaggcagaatctctaactcaaacccagtcaaattctctgtttctgggccaacaacagccccaatcattgttacaacctcaatactcatctgggtatcccctaccgcaatgggccgctacacccggttatttcaccggccgaaatcacctttcctctgcgaataacatgcattcaacccaaaaacccaacgctgcctcaacaaatcccatggaaggaaacggacccttgcagcactctaattcttgggcgacgcctatgctggcacagaaaccttatattccgccctacagattgtttgaggatttgaatgtactcggagatggcgatggaaggcttaag

SEQ ID NO: 51044 - DNA, 577 bp, Gossypium hirsutum
  unsure (1)..(577): unsure at all n locations
  Clone ID: LIB3828-033-Q6-K6-C12
cggcttttngaagttgcaatttatggcgggggggggggtacattacaaatgtctaagccgccacaatttcggtacaagagtggacagtacatgtttgtccagtgcccggctgtctctccatttgaatggcatccattttcaatcacctccgctcctggtgatgactacctcagtgtacgtgtgcgtcagctaggtgactggacccaagcactcaaacgactattctctgaggtttgtgaacctcctgtagcggggaaaagtgggcttctcagggcagatgaggcaactaaaaaaagtttgccaaagctcttaattgatggaccgtatggtgcaccggcacaagactatagtaagtatgatgttctgttgcttgtgggtcttggaatcggtgcaacaccattcatcagcattttaaaagatctgctgaacaacattgtcaaaatggaggagcaggcagattcagtctcagataccagtaaggcatcagacgtaagtgttgcgagcagcaatgaatcaaccactccaaacagagttccatcgaaacgaaagaaaactcttaagaccacgaatgcttact

SEQ ID NO: 51045 - DNA, 588 bp, Gossypium hirsutum
  unsure (1)..(588): unsure at all n locations
  Clone ID: LIB3828-033-Q6-K6-D11
cgnatttggnagcaaatcaacctttggtgtatggggggggcccttttctcaaatttccttgttttggcataatatatngagaaaatcgatgctcaaataattgttcaaaagtcagctgcgtgataaatatcagtaagagatcattgtttggtgcatgtattgcttatacacctaacttggggatgccctattttctttggttgagtcctattcatttctgaactaaaatgcaaatgctttcatgttgtttgaatgttggcttcgacatttgttccttgcctcttcccaaccatctgccttgttatttgcatgaatatatgatctttgcattgaagttgacataatttgcatttcaatctatttggacccaagtaaactatatccgggttagggatggatttggttaggaagcttccctcacagattcaggtagggtatgggtttttaccccctggatacctataccataaccggattatttttaattggaaaaatataattttgtttggtgtttgagaaaattatctcattttgaagttcaaacataagaaagcaacaaattggatgctcataaagcgctaagtctca

SEQ ID NO: 51046 - DNA, 506 bp, Gossypium hirsutum
  unsure (1)..(506): unsure at all n locations
  Clone ID: LIB3828-033-Q6-K6-H11
tcggnaaaatttaccggtttacaaaaggggggaggatcgtttggaataaaatacatctagaatatcatccctttgagttgcaatgtcttgcatttgttttgtacagtcttcattcttgtgtaaacaaacttttgtcatttggtgagtaaaaaaaacaaaaaaaaggggttttgggtatttggggggtttaggacacttaattttgttttaatttaattttggtccagctacattagttaaaaagagattcaaaatgggtgtttaattttatttttgattgaataaagtgttttaaatttttattaaaaaaaaaaaaaaaaaaaaaaaaaaaaaaaaaaaaaaaaaagggggaaaaaaaaaaaaaaaaaattttttttaaaaaaaaaaaaaaaaaaaaaaaaaaaaaaatataatataaaaaaaaaataaattaaattgagtgtgatttttaaattaaggtggggttaaaaaaaaaaaaggggtgggttttgttaaaattggttttg

SEQ ID NO: 51047 - DNA, 534 bp, Gossypium hirsutum
  Clone ID: LIB3828-033-Q6-N6-A1
aaaaaaaaaaaatggttctttataattatttgacgtcttcttgcttcacacagaacatgggaagctgctgcagtaattatagtataattaaaaatctctaaacatttagccgccggttaatagcagacaagattttacacggttacgatattccagccagtctccttaacgaattgaccatatggggcagtcaaccgtcagcctggttaccattccaagtgatcggatgagccaaaatttgactccgacccacaacaaataaattctcctccccctattgcaagcgaagcaaacttgcttgaatttgaagcttttgtagaggtaattgaatttccaactccatcaccctggtgatcagccaagatgctcccgataatcttgttgattttcatggcttccctcgttgccagcagcctctgtgtttaccaaaaagtgtcgaaacggtggtttgtaggtagcggaagcggccatgaagttgaatgcgtggtttgcctcggcaaggtctgcaaaggggaaaagctccggtcgttacca

SEQ ID NO: 51048 - DNA, 461 bp, Gossypium hirsutum
  Clone ID: LIB3828-033-Q6-N6-A10
gagaaaaaaacctttaaccaaaaaactttttattagggggggaaggccaaaaaacaaatttttataaaacttcccccatttaaacctattttttatccacctaaaaaaaatttggttttagccccaggggggggaaccaccggggaactttgaatttgggaatggggatttagaaaaaaaaaaaggggggttttttttagggcggggggaggggcacatcttttgttttcaacaaagtccccatggggatttaaaaaaggggaagggttatggactttaaataccctgccgggatgaagggccccaaaggaagaaaagggttaaacttttttaatctccaacccaattatccttttcctttggaaaaaggggacctttctcgccaaaaagatctggggaaaacagggaaaaaatgttctcccccgaaaaccgtaaaaaaaaggggggggggctaattattt

SEQ ID NO: 51049 - DNA, 373 bp, Gossypium hirsutum
  Clone ID: LIB3828-033-Q6-N6-A2
ggaaggtatttatgtatatcccacaggcttcataggataccatccatgtttatctcttcttctcaaaccttaagaactgtaaattacaactgaataattactaaaaatacaggtatagagtatccctataaggctcttatattgactaattgcctgttctgtttccactctcaataactggctcaagaatggagcataaaccaacttatttaagtgacaaacaagcacttttgagtacaaataaagggcagtatttaggttttacaaacacttgttcaggacaacgccagcatacaacatcgaataatttcagttgacatgtaatgtaagggcgggtgtgcaggggtcgaggcatatgcaaatatttacaggc

SEQ ID NO: 51050 - DNA, 492 bp, Gossypium hirsutum
  Clone ID: LIB3828-033-Q6-N6-A3
aaaaaattctaattattttatgaaaataggagggggggaaaagtccatattaaatatcccctaaaatagaaaaccctaatgcctataacaaaataacccaaaaaaaaccccatgttcttaattttttcccccaacttgaaaacccaccgagaaaagcctaaaacctataataatatcaacattaaatttaaaggctttcctatcacccgaatgcccattgattctccctcctaaccccctttttttcctcgggggggaaaaccttcttgatgttaaagggcttgcaaatctccccgggggtctttccctttatcaaatcacccacagtttggcaggtcaagcccaacaagctcttgatattcaaatagttccctcccaagatgaggtcaaaaagggtattttggtcaaccttgacaaaaacaacatcccaagccttgagttccccatcgggagtcttttccttgtcggcagcagcatcaacatgctttttgc

SEQ ID NO: 51051 - DNA, 462 bp, Gossypium hirsutum
  Clone ID: LIB3828-033-Q6-N6-B3
aacaaaaacccaaacccccatcactgggatctatttataaagccctaaaataaagggcccggcctagggaatctaaataccccaacccagggttttttaagggcccaatgggaaaaccgggcaaaacccgggggaaaccggggggggaacaaaaggccgggtttagggaacccagggcccgccaaaaatttttccccggcggcaacaagggcccgggggcccaaacccttcaatccttcaggggggatttcagcaaccggtactagagaggacagccccccctggggatcttcaacaacatttctctggggggggaggcgaaccctaatccttctggggacacttgggaccccccgggtccaaaggggcttggtcagctggacataaactctcacatcctttggccccaggggtttttcggcaaacctccggatccccttgatagcccggggggccttcttc

SEQ ID NO: 51052 - DNA, 523 bp, Gossypium hirsutum
  Clone ID: LIB3828-033-Q6-N6-B7
atggaaaacaaaatttataatcatctttctttaacactacttacaacttttgtgaggggataatgtacaagttgcccttagccaagtcaacggctagtagccttaactcccatcttttttagggtgcttgtctctcagaagcttctgagtttgagataaaatctgtcgtctttcatatttacaattcaagtttgatgtatcagtctgtcctctcaacaacaacctatccattaccttcgctgtgcagatgctgttaccatctcatctccaagaacaggaagctttttaggttttgaggtctgaatgaattaaacattgctggtccgaatggaactgcgtaataattcttctgattcattcttttgcgaagcattcatcttcaacttctcactttccgacaacttcttcatttcgttctcaagctgcttacagttctcttcatgagctttgttaaacaacctcacgaagttaagtagagttgaagtaacttgttcaaagggacaacgagctggatcctctccaa

SEQ ID NO: 51053 - DNA, 505 bp, Gossypium hirsutum
  Clone ID: LIB3828-033-Q6-N6-C11
gattactaacaatgaaatgtatatgtaaaggggtaagcacttcgcgtgtccaaatgttccctaggacgtcaatttttgaaaagcacagacacagatttcagtaatcaaagtaacaccaacaagtcctacaaatgaccaaacatacagatatataatatatttatatatttatatatggaaatacaaagcaaacaaaacaatggacatcaaatggaaagctacatttacatttttcaaaagtacaccaacagtggaaaaaaatttcctagtcctaaaaaattatatttttgctcctctttttttaaagggttcacaactacagagacagatgggaacagtagtagtcagccgctgcaaactatagtcgttgcttgacccgcctaccattggcatcacttccgtcaaggatggcttcgttcccatgcctgcatacaatcactgagtgctcgttgactctagccacatgctccaacagctcggtcaagacagacgggcaactttcctt

SEQ ID NO: 51054 - DNA, 555 bp, Gossypium hirsutum
  Clone ID: LIB3828-033-Q6-N6-C6
aaagagacaaaagttaggaattaaatcgtaattaaaggagggcaacattttgtactaagactataacgtgacgacgacaggagtctaatgctgaaaaatcaccagaatttgtgcccattgagttacaaggttgaataagcggtgatgaaacttgtcatatgcttctactttcttataaaacaaacgatactcaagcaagtgaattgccaattatgagaaataatgaatttggccagacaaggttacaatgaattcagattcccctgttctaactttggcaaataaccctgaaccgaagaaaaataattcaacgcttacagtgatatgcttagaatctctaatgagtatattttcaggagaaatcaaagggaatattatcctagttctgaactgagagataattaatttttaccagaataatggacataaactgtcatacaacataataggggttaatttaaagaataaactgtacttaatggctaaaccaaaaacttcaaaattgtatatgaagaaggatcgtgagtctagtttcatgaaaaatatcggatctta

SEQ ID NO: 51055 - DNA, 204 bp, Gossypium hirsutum
  Clone ID: LIB3828-033-Q6-N6-C7
gctatcaaaccatcatccgataatctatgatgtcgccaatgggctaaaaattcatacataaaaactaatagaaaatgaaaaatgttgaaaccagcttttttgttcccaggtgcttcagacatttgtgtcatccacccagaaaagactttgttttgacatagttggaagtaaaaattaattcctctgttcgctgcatacggcaca

SEQ ID NO: 51056 - DNA, 537 bp, Gossypium hirsutum
  Clone ID: LIB3828-033-Q6-N6-D11
aaaaaaagctttctcaaacagtgaaatccaattttgaaaaacatgttaaaatcaggacttaaatgtttgagatggtaacaaaaaagtcctacacaaaattctctagtctctaaagctaaaaccactgccctctctcatattaacattcaatccaaccattttgattcctttgtcaaactcgaatgaatccctaccccaactcccattcatccgaattatccatcactatctctataaaaaataatcataatcataatcataatcataatcataataatttctccgcgacaaaaataataagcttactctacggggttttcaagtagaagccatattctggtttggtcgacttgatcggttacctctccctctcccttcacgacctgttgaaccccccctaggtcgactgctatattcacctctgtttccatattcatttcttccaaagcttcgatttccaccaaagttacgtcccctgaagctgtcatttcgaaatgttcctcttcgtcctgggaaactacctcttccactaacaac

SEQ ID NO: 51057 - DNA, 366 bp, Gossypium hirsutum
  Clone ID: LIB3828-033-Q6-N6-D3
aagttattctcattttgacaaagattaacattaatattaggaaagtacatagtacaaacctcttatggcataacatgcgaggattaacaaaatctctcatttaaggtttcactgaataaaaataagtgaaacacaaataaccaacagttgttacttagaaggaaatgtaactataattcaataattaaatatctttgtttgtaatatgcatcaattgcctccaccaaacccttctcctcgtcctaaaccaaaatgaaacttaccacttccaccaaaatgcaagttaccgctaccacttccaccaccttttccactaaaccctccttcccctcctgctccaccagcaacattagcgctaccacttcc

SEQ ID NO: 51058 - DNA, 571 bp, Gossypium hirsutum
  unsure (1)..(571): unsure at all n locations
  Clone ID: LIB3828-033-Q6-N6-G11
gaacataagcagcagtcttctgttcaaccaataatttaatattggtacaatcccatgagataaatcgatgaacacaaccaaagtcaaatcgatctcatgttagaaataaaaacttatgaagctagctcggcttaacacaatagagaacatacaaataaagccaaccagcctcattgaaggcagcatatagggagggcagatgtcgttagggccaaaccctatccaatctgctatagtcgtgatatttcgagtgatatcttcactctttagagctataacattgtcctctgctctgggtagctttctatagcctcctcgatcatgagtttttgagacaacagtcaagtaaatgaactggaaactcaaatcacatgcaggacaacacattggttcttaatccatcaaataacacattgttgtaggtttggagcacttgggataatctacaatgtttcccccttcttccatcacagacctttcccaattcaacacnattagaatcaaatgcttgcttgcctgctgctgctaaagaaattatttaatggacactcaaattattatcgtctaaaaa

SEQ ID NO: 51059 - DNA, 428 bp, Gossypium hirsutum
  unsure (1)..(428): unsure at all n locations
  Clone ID: LIB3828-033-Q6-N6-G6
atctaatgaatcaaanatagattacgatccaaaatttacagataatgttcctcctataaaggagatcattaatgtcaaagcttgtttcaaaagtccaaatgtccctatgattgctcaacataagaggttaaagccaacatgtataccctcaatgtttgctaaagttgctaccaaggcaagggaagaagaggcaactctactggagaagtaagaacaaacattcctctcctttacttgctccaagaggtaccttgccttgttgaaaaaaaaagcttcattaaggagcaaaacattgattaagccaactttacaaaaacatgtaattaacacatttctccatgataatgggtctgatgggcatagttagctttgttaagccctatgacaggcaactagtactcaaattccatgttaatctcttgaggagc

SEQ ID NO: 51060 - DNA, 554 bp, Gossypium hirsutum
  Clone ID: LIB3828-033-Q6-N6-G8
aaatcaaaaaggatagtgttataatattatatatatatagcagtaagaaaaggcagataggccaggcagtatcattttctctctcttttcaaccaaccatctcactttataattgactatggctatgccacaaagaataggaaaaccatcaggaaaaatatcaatacaaaaaatatcttcatcatcaaccacctgtttgacgatatgctgtttaggtacttgagcaattgtccttgtgctccctccacgtttgctaaggtgtcgtccatgttttcatcaatcctggttgaaaatggtgcctagctcatgaattgtagattctacattttgaagagcttcagctctgctcttcatgtaactgtcctgctgtggaaccatttgttgctgttgctgctggagcaatggctgactctgaccatccatatgctttctcggaaacaattgtgatgaagatttattgccattggcccattgaggaaggttgtttgaagctccagctgctgatttgatggccaaagggcgctgccgtacaaaaggatttggagaatctttcg

SEQ ID NO: 51061 - DNA, 277 bp, Gossypium hirsutum
  Clone ID: LIB3828-033-Q6-N6-G9
caaagcttcatcttaattaaagttgattatcccccatcaaagagacaaacaatcccacccatattttctatgtaaattaaaagtttagagtttattaatggtgtgaggagcaggaaaaaccaagaacggccttccacaagatgagattgggggatcacaaaaaaccgcatggaacgcatccttgagcttgcgcagcccattggtacccccaatccctaggaacagcgatatcaaagccaccacaacggggcacatgcaaagcatgtatattcggggg

SEQ ID NO: 51062 - DNA, 389 bp, Gossypium hirsutum
  Clone ID: LIB3828-033-Q6-N6-H4
ggccaaaacggggggaattccctaaaaaggaaacccggaaaaaggtttagacaacccccgggaacatgggcgggacaaaatctcacaaaacatgggggagggaattgaaagataacatcaaagctcccggggcaaacaaaaccaggggaacctttcaaacaaaagcatgggggggccttggaattttagggcacagggcaacacacccctttccaagggggccaggggaagcaaaacctttcatttctcccttggggggggcaaggacccccgccttttttttgaaggacaaggaaacccccccctttttaccccaagggttgcgttgtcggacaaaaacggggggcaaaacctttttcccaaaaaggggctttcctttttttacgggg

SEQ ID NO: 51063 - DNA, 545 bp, Gossypium hirsutum
  Clone ID: LIB3828-033-Q6-N6-H7
acagaaaataaatatttcttttcttttttatcaaaaaaagatattacatttgagaaaagcactatgtgcacatgagccaatccataaaacttatgtgctgttctcagttacatggggtgattctcaattccctcttctaccttacagaaattttatatgaggaactgccaaaatgggtttaaaccgaaacaaaaactgtaaaccattcttctataactcgtcagaacatgcagtgtgcgaccctgaggtatatcagtcaccttgtaggcagtacagttgacgaatatttccagaagcatataaccagtctttgaaatacacatgaagagcactggatagttctcttttccgattttcttcaaggggagcttctctcaacatttgctttatctcacttaaattcttttgatttctctgttgagatgtcatgtacgcatcaggtaatgggaacgggttatcctttgtcgatccagtagattcattttcaaaccagtttggaatcaggaaattggtgaactgatcaggatctaggcatgtagctgact

SEQ ID NO: 51064 - DNA, 581 bp, Gossypium hirsutum
  Clone ID: LIB3828-034-Q6-K6-A12
gggacaccaaagactctttggaagcggggggggggggggaggaccaattaagtctctgcatctatcacattagctttcaatacgtgccaagaacactacttttttgcaggcgtacttccgtggggttgcactcaaaccagtctcattggatggcaaaacaaatacgctcccgaggagcgcggagggtctccattcaatgccacatcacctgcactcctattatcataagaaactcaagttcgacacatatcaaaggaagaatcgtttcacttgatatgacacacaaaaccttgaaaatacatgatcaccaaagctgaaaccgaggtgggggtagaataaaccggatgcgcccctctctctatgtgcaaaataacctaccaaaaacccaaccactcatatagatcttgaaaaaaaaaaaaaaaagcccgccgttgtacactgaccaagctgacatactctctcttccaaggtaatacctaaaccatatcatcacttacttgaaaaacactgcattgaatatgacaaacaagacgactatgaaaaccatcaagcatgcacaacctattcacattcactatcat

SEQ ID NO: 51065 - DNA, 519 bp, Gossypium hirsutum
  unsure (1)..(519): unsure at all n locations
  Clone ID: LIB3828-034-Q6-K6-B10
gcgttcgcccacgcgtccgaacaacaaacgtgggggttcgttagaaatagaaaatacaagcactaattgtctgatggctacaaacttctatcatgccgacaattagtgaactacactgactatttnattctactgaaaagcatagcagctgagccatttcctctaaccattattaagctgggggggagatgacggtcttcacattcctaagtaaatgagtgaataaaattcatccatcaacctaaagaagcatcgacaccctatggcaactcaaatggaacgttacgtcagtgtaactaactttcgatttcagtttgacaaagtgcagctaactatgcaagagattggatttcattctatgttgttacgactctccgtttcttgaaatacctgtgttcgacacccgtttgggatgtgcatattggaacatcggtgtggagatgttacagttcaaggacctttcttctgcctgaaaaagcgttggaaattttaaacatacgtgtggtgggtgcctgcctg

SEQ ID NO: 51066 - DNA, 517 bp, Gossypium hirsutum
  Clone ID: LIB3828-034-Q6-N6-A12
gaaacaaaacataactcatttattgggcttgcagtgataataaaacaggctacagacggtatacgtttgattctaacccaccggagattaaacctaaaactacccttgtctggacagtatttcaatgccaactatttacatcacagtttacttactattgccctagcagctaagcgcaatcggactatggcggcattctgcatgggccagaaccgcttctggagcttgctcaccacatatgttacttaccttgcgttgagcacatgctcatgcttcaagggaccagatgtgctccctttaaacgttatcttattagtgatccaaaagtaagcccctgttttcggagatccgtatttttgataaccttccatctgggggacaatcattaccatgctcactcctctctagtacagcgctgactataccatggctattctggatcgatacccagaggcttactacctggccctctatcaatcatcccaatgatttggaacctttatacccataggggttc

SEQ ID NO: 51067 - DNA, 521 bp, Gossypium hirsutum
  Clone ID: LIB3828-034-Q6-N6-A8
attaaagctgaaacaggggatcaaaatgacagaaagacgaatgccagaaataggtcaacataaattttcactgacagccaatcatgatgtacaaatattctaccattcttggcttaatcctcaaacttatcgaggaggagatgaacaatttttgaacaggaaatggccggggtgcatcagccaaaaaaaaaaaggcagcttttttatgggtggaaaaatatcagaccatgtttgtcatacctacctgcaagatattcatgtgcgggacgctcatatttgcggccccggctcgacagtttctccttaggaatgcatagaggtagtttatgacgagtttcttgaggaaaaatgagttctttttggctctcacatctccatgtgccaggaaatatgtaaacccaaaatcgattgcttctcgcaatgctgaaagctcatattccaaacttggatctatttctgatgacatgatgctagaaggcaacgctgctgaagcagcttctgagttggatgtttctgcttct

SEQ ID NO: 51068 - DNA, 111 bp, Gossypium hirsutum
  Clone ID: LIB3828-034-Q6-N6-B1
gaggcaaaaactttgtaggtatatccacgtaaaacgagtgtatcagagctgacaaatgttgatgcaggcatctaaaacgcaccaagtaggtaacaataagcaaactccttc

SEQ ID NO: 51069 - DNA, 422 bp, Gossypium hirsutum
  Clone ID: LIB3828-034-Q6-N6-B3
caagcacaatcaacaccagggaaaataaacaccaaccgatcgggtccaggggttactataccaaaatacatggggacattgaatgaccaaagagtgcgaaacaaaccctttaccaataaaccgtggtaacagaactgaaacaggactctgaatccaaactttgggaggcagatgtgatgggaacacagtaaaaagggggatggtcgcaaaaattaaaggggggggggagggaaaacttccaaaaccttattgtaaacagggttttaaaaaaacaaacggaaggggaactatttgctggggggacacccagaaacattcaccaaactaagggttgtcactcccatcacccaaaaaaagggatttttcttctttccccgggaatttaaagaaaaaccacttttgaacttgacctttccagattg

SEQ ID NO: 51070 - DNA, 577 bp, Gossypium hirsutum
  unsure (1)..(577): unsure at all n locations
  Clone ID: LIB3828-034-Q6-N6-C10
cacaaattacagttgattcttcaaaaaaaaaaattacacttttcaacatattcaagtaagataaaataatgtctcatatcactggatttggacacacagcatctcattccatgatgccatgagccatgaaactcattctcgtataatatagcaaagccaagtgccgtgatatacttgngaaaaaggaagagcagaattttatacaccaacagaatgagaatgttgagaaagaaaaaaagaataaaccactgaccacaagacaatacatacatacatacatacatacatacacacgtatatatatatttgctattcactaagatggagaatttaacatattggatgaaatgaaaattttcaacaagcatatccaaaaggatgtgtccttgccttttgtctttttaagagtcactccaactatcttcgtcatcatcttcatcacttccagccaatgcctggcgaattgcatttgctttctccaagattgctgctactcttaagttggttttaggaccctgaatactgggtctggtaaccacagcaggcttcaagttgaaggactttgttcgtatctgtt

SEQ ID NO: 51071 - DNA, 568 bp, Gossypium hirsutum
  Clone ID: LIB3828-034-Q6-N6-C6
ccagcttcaaagtctaatcgtacaaatcatattataataatgttgttatcagataaaatgtgaaagaagatgcatacattgacaatacaataatcagctatccttggctccttcaggctttttttggttggaatacatacctacaaaggaatggcaaaaggagaaaagagaacagccctacacaccaatattgatttgtctgccatatatgtaatccaatatgcatttgctgttagtagtttgtattgaagaagtcaacgatggatacattctttgcggatccacccttcactctataaatcttgctatacacatctaggggattcttctcgtatatgtttctctacttttgtgcattagtatcacatcgaaacattaaaaagaaagccgtttgactggaatgtgaaaaagattagttcatacattatagttactcctttcctgagttctgacaatacttacctttatttcctaaagttaattagcttcatgcccatgataaaaccttggcattaagaataggataacttaaatggaagtcatgccactagtagaagtggcaagtagt

SEQ ID NO: 51072 - DNA, 222 bp, Gossypium hirsutum
  Clone ID: LIB3828-034-Q6-N6-C8
aataaaaaaagttatattaaaattttaaaataataaaaaataaaataaaaaattatattaatatataattcggaccgggccgggctcgggccaaaaaaccttacccgaggcccggcctgttttctaaacgggcctcgtttttttgcccaagcccatttttcgggcctatatttttatctaaaccctcctatttttcaggcagaccttcgagccgggccgggc

SEQ ID NO: 51073 - DNA, 559 bp, Gossypium hirsutum
  Clone ID: LIB3828-034-Q6-N6-D3
gcataaacagatcaccttgctaaatacctgtggttgtgttattattggtgtattagacatccaccataattctcacattacgggcttttatttacctacatataagtctatgttctatgtcaaaacatggcttaggatattctataatataccactatgccttgtgagcgtaggagcttatacgctcacaacttacatcctcctatcgggcgagaaaacacacctggcgtactttctaattacgaacaggaggtaataggcgtgcatatgcgtataatgctctatcattgtgaactatagagttagctgggggtcattgaggacacttagtgtcttcacccctggagtattgatatggaccaattaaaatcctgtcaaatcttctaaagaatgacagtacttatctccgggaaaggcacttctccatgcttcggctcatggaatccacctatagaagtaagcttgtttcaggttggtcgagaaaccataacccgttatttgtctatcacgaattgcattccttcaacgctaatgagtttcactgcgtcttatttcttga

SEQ ID NO: 51074 - DNA, 277 bp, Gossypium hirsutum
  Clone ID: LIB3828-034-Q6-N6-D7
gggaaaaaacgataacggtaaaaattaaagggggccaaaaaaaatgggggggccaaagggaaaaaggggtttccctcaaaaaccaaaaggggccttaagcccggttttaaaaaaagggggaaaccaaggggaaaggctgctcccccaacccggttttggctgccccccctgggatgcgcctttagggttaattcggggttaaagggtttctggcaaaaactgggcggggcccctgggaccggaaaaacccaccggggggcgagaggttcggaccccg

SEQ ID NO: 51075 - DNA, 432 bp, Gossypium hirsutum
  Clone ID: LIB3828-034-Q6-N6-E3
ggaaacctcaaaaatccaaatttttaaattagggaaaataaagggctttttaaaaaaaaaaggggaaaagtaaaaaaaaaaggatttggttttttccaaaacccaaattccaaagggaaaaggggggactaaaaaaaaaaaaatcggttttttttcccgggttaaaacttgggggaaccaaaaaaaaaaagggccaaaatttgggaaaaaccttccaagggggaagggggggggccaaaaaagggggaaagggccaacccccaaaaaggggggaaaaaaaaggggtaattccctttggaacctggggtaaaaaattaaaaaaaggggggggggaaacccaaagggtttaaaattttcccttggggccggggggtaaaaaagggggaacggtttttttggaggccccaacttttaaaaattggggggggcccc

SEQ ID NO: 51076 - DNA, 427 bp, Gossypium hirsutum
  Clone ID: LIB3828-034-Q6-N6-E5
gaaacaaaactgaatgcttaagcatgactgcactctatacctacaataagaagagatgttcaccccaggaatgaagacaatccatgcacacgtaacaaaacccagaatgcctttgtgggagaaaccctaattccaccaggtcatgatttgtttgcagcagtaaattggcgggcaggactaattgtcaacttcaaagcctatgcttaaaccctaaataccccgctctcacttctatgtatgcccctggaaacctcactccccttatgacgaacataacgcttataaaggctgtgaggcgcaccaggcgctggaccaaagtgtttaactggtggacgagcggaggtcgaacctcgcagtatcacctgcaagttcatgcaaggtaattaaaataaagacagacccctgtgttttatttgacacgacatga

SEQ ID NO: 51077 - DNA, 472 bp, Gossypium hirsutum
  Clone ID: LIB3828-034-Q6-N6-F3
gggaaaagcagttttataaaaaagcatgcaacaaccaaaacaaggctaaacccttccaaatccaaacccgggaaaaaacaaaaaagagaaagaaaccgccccaacggggaaattaaagggggccaaactgaaagatctcaaaaggcatggaagacagagatagagcttcccaaccccccatttttattgggggaaaaaccaaaaaaagggggtccgggcggggcccaactagaaccttatcttgaggggggggacgagcttaaaaggggcatcgaaggcgtcttcattttgggggggatcttcgcaacgttggctatcgccaggctgagcacccccatgggtgcccccaagaacgttttgactgggggtggtggctttaactaaaaaaaacacccccccagcgtgaggaagcaaaaaacgatcattcgtcgggatacggccattgggggtggcctttgagaagtatgcccaa

SEQ ID NO: 51078 - DNA, 519 bp, Gossypium hirsutum
  Clone ID: LIB3828-034-Q6-N6-F5
gaaaattaaaattgttgatctgctttggctttatcaagagcttacgagttaacagactgaggttacaccacactagtaggatgttgtctaatattgttgagttcacaaagaacactttgacacccaacagatagcactacggaaccatgacaagctgatagtttgcctatagtttaatttaaccccatagcctatagcatataggtcactataggtcaatgatgggaagcatgctgcgcattgagcatccacggaagttctaatcttgatcctctaaatgttaatacaattactgtataatcattcagctttatgctttatagatatagttgcaggagaataccgcggcccggttgtgcatctgccaatgcatttgagaacctcgtcgatcagaatgactggaaaagcaactgccaataccagcaaccattcgttgtggctgaggggaacaatcccaaacacttgagcaaggaatggcacgtagagaatcaagaaatggagtccaaatgaaattgacat

SEQ ID NO: 51079 - DNA, 537 bp, Gossypium hirsutum
  unsure (1)..(537): unsure at all n locations
  Clone ID: LIB3828-034-Q6-N6-G2
aggcccttggataagccatatctacattcccacaatttgtagtccaaaaaaaaaaaaaaaaaaaaaaaaaaaaaaaaaaaaaaaaaaaaaaaaaaaaaaaaaaaaaaaaaaaaaaaaaaaaaaaaaaaaaggggcgggccccccttntttttttttttggggggcctttttattaaaaaaaaaaaaaattttcttttaaaaaaaagggtttggacccatttgctttttaaggccccccttttgggaaaaaaaacaagcccaaaaaaggctttccccccccttgggttagcccccaagttttgctttaaatggggcccaaaaacaggggattttgggaagggaaaccccttttttttttaagggttgaaccccaccttttttgaaactaaaaaccccctggggtttttgaaaacagggttttttaccccaacgtatttagaatgtccaaatcgaagggggttaaccctgcccaaattttaagtggtgggaatttttagaggggaaaagaaaccttggccccccccatccaaaaatttt

SEQ ID NO: 51080 - DNA, 523 bp, Gossypium hirsutum
  Clone ID: LIB3828-034-Q6-N6-G3
gcaattcattaccgaagaacaatgctttcatataacaccaaccagtatcttgactgctgagcctttgactttgaattaagacattttaactcaaagactaaatggacataaagacttcccttatggctactaccaaccaaccccatcaaaaatctctactcctttctaactcataaatactgtacacttattagtttggcgaaataagaagctcatggtagaacctgactgaaataagcaggcagacccatcaatcagaatataacaagagtttgtttatccattgtgcatggtgtttgtacatgtaaaagattgagccactccacaaagtgacatgtatgccatctcttctgatagtcagagcattcttgtttccttatcactattagagtagtccacaccagaatcactgtggaacgagtcggttgatgcctgccttacgggtccaaactcctttacatccgcaaaagaatggcgcaaccctttgacagcctcaaaattcttgtatgtatagcccacaaaa

SEQ ID NO: 51081 - DNA, 524 bp, Gossypium hirsutum
  Clone ID: LIB3828-034-Q6-N6-H2
acatggaaaaagatacaaatgcaaatgtagttctcagcccacaaacacaatgcaaaggggagagaacaaatttgggaagatcatatttaatgactaaacaaattatcagaaggggaaaaaaataatggtgtgaaaatttatgcacaattatatataagctttggaagataaagcttcagtcacttcgctcatatgcttccagtagaatgagatgaactgcttgaactaaaatgatctttcttcagcattgcctccagactctgaaaccattttaatggtctagcctgaacataatgcacccgtagagaacaattatcagcctaatagttaaaaaagattgcaccacacctgcaaaattggaccaaaatgctaactgtgcaagggaccaaaacagtaaaccaaatgtaacagatgttcattttgtaaagagtagcctaatcaaacttctgttggccatccaaaaatggcaaattacaaaagttgatgtattcctcaaatttcaattgtagatcatactttatttt

SEQ ID NO: 51082 - DNA, 440 bp, Gossypium hirsutum
  Clone ID: LIB3828-034-Q6-N6-H3
aatagattcttaataaatgatggccgtagaaacgggggggggcacaggatggggggcccacaaaatgggggcgacaaaaaagaggagcaaacaaatgggtgcaataaatggggcaagaattaataaaaacagattatacaactggggcccagaacttcaagccccaagcaatctagggcggaaattattcagctttatcggccctgggagggcgcactaaggggagttgcacgaccggagaaaccggggaaagcacccgggggaccatggggaaaacacctttggcatttctcagtttccggattcacttcttcagagcatgaagatgaactattaaaaaaaatccctggaaacccaaacccgaagggaaaaaaaggccttaaaaagctatcagcacacactggatttaaagagctagctaagaaaagggcaccatacca

SEQ ID NO: 51083 - DNA, 551 bp, Gossypium hirsutum
  unsure (1)..(551): unsure at all n locations
  Clone ID: LIB3829-015-Q1-N6-A10
aacatactgaagtcatataaatatatatatnntctttttatcatctccagggagtattataaagacatctagtttttacatatttccatataggggcctcaaaaagaagcagggtatatanttctttacactttgaatcaatataagagacttctttgtgatgcctgcttcttccgtagccacaccatctctaggtgttattccctttgggaaaaacaccctgcatttttttcttttttctcataaacactcgaagtaagatgagtggcctgccagctttctggcttggaccatcagttcatcatccatctcatttacatgtacattgcttgcctgaaggaaaaaaaaacttcgaaactttttgtacgtgcttctacaacccttgccatatcaaaatttggaaatgaacatctatcatggacgacttgngaactttgggtggtatggcacataatgaatcaatccgatcataaaaggagacaaaagatcaagactccntaaagatcccaataaccagaattccttggggagaacactaactgctttagctg

SEQ ID NO: 51084 - DNA, 440 bp, Gossypium hirsutum
  Clone ID: LIB3829-015-Q1-N6-A6
gtagaagagcagataaaatatcatactaagcatcagaacaagcacaagggcatatgtatagcctaatagtgaaccgttcactcgaaaacacaagcaacgagtcaacaacagttctaccgtttcactgcaatgcatatttcctaatattctgggactttacatgtcaaaatccaaatggaaagaattcgcaaatgtgatgcaagaccttttaccagtaatcaccgcaagaacataagccatccttgaaatgatggaagcgcttgttgtctctaataatcaattccctcccgacaatcctcgatatgatcttgatggcattgtgacagtcaccgcatacacggagattcttgatgatcctaagggtttgccttgcaggggtactgattagaccaaatgctatcgccaatcgttcactgtggtacagcagtgcttgctctttc

SEQ ID NO: 51085 - DNA, 543 bp, Gossypium hirsutum
  unsure (1)..(543): unsure at all n locations
  Clone ID: LIB3829-015-Q1-N6-A9
tttntttttaattcgattgacattcattcatggctatgttaaaacaaaacccaaagcgatggaacatccatccatctctgcttactaaaaactatattatataaggcctagcgggtgccaataaaccacctcagctatatacagccacaatgggactgagcctctcctactctaagtctccctcttataccttcccctgtctcaaacactggctattacatacacatcttccagttagggaccctttgccttaaactctagaactgaccaccttcgaatgtttgtccgaactgccagtttgctggagccacattgtagcttgtcacagtccggccgtcacttgtggtgacttggaacgacaaactttggccgttgaggtaggagttgctctgccagttttggccccaatttctggacattgattgccatcctgttttagagcctttgattgagactgcatggacatctccagcaccaccaacatttgagatgaggaccaagttgaagtaagagtgaccattgatagtaaacctgattcctcct

SEQ ID NO: 51086 - DNA, 449 bp, Gossypium hirsutum
  Clone ID: LIB3829-015-Q1-N6-C10
ctgcatacagccatatgaatattttgcataataaatggggggcattgattaatccctcgaccatattcctccctaccgagggaccatgcacaaccaacaaccccaataggagaaccaggagcgtcacctcttatacaaaagaccatattccgaaaagactcgaattgcaactatggcaatcttcctgagactgaaaactaccttactgcacaatgcaggaaccaccacagggattccggcttatggcatcggtaagattactgctcccacaaaacgcttccaaggttcccttagcctcttgagacagagtctccgctaaggcactggatggtggaatgagcccaacttaaagggaaccaaacagctaaagcgagatttcaaatagatagcccattgtgctccccactgatccacattctttatacccaaggtaaaggcccacagccaaa

SEQ ID NO: 51087 - DNA, 540 bp, Gossypium hirsutum
  Clone ID: LIB3829-015-Q1-N6-C12
ttctttttttttttttttttttttttttttttttttttttttttttttttttttttttttttaaataccccaaaaaaaacagcccttttcatttaaaggcctcgaaattaactaacaaaggccccaaacaaattggaaaacaagctaacaggtgcttcaaaaggccgaaaaatctacgggttagggttcatataaaaacatggtggggttaataaacttcctccattttggtgccttggggatcagcatcctccaaggggggcatataaacataagtttcagtttcacctgcatccttgtaaatgctcaagccgggtttcagcatcctggggatcctggggccaaaggggttaggggcatcaagggtgaacccaggaggtcaggaaagccgtcccaaaaagaaaggaaaacaagggccttcacaaatttattatttttggcgggatgggctttttttttaagcttttccatgagggggttctccggggttgatctccatcggctttttgcttgacatggaaccagccttgctgttatccc

SEQ ID NO: 51088 - DNA, 513 bp, Gossypium hirsutum
  unsure (1)..(513): unsure at all n locations
  Clone ID: LIB3829-015-Q1-N6-C8
accaaaatgtaaaaattcaataatgaaaaaatactgtttgngaaacaacaacaaaaataaaggggaaaatactgtacatgttaggagctaacagaaaaagcgtgacaaaattttccggcaggcaaaaaaaacattgatcttttttacagacacagacagtgaatgaacggtgactcttctgccggaaaaaaacatcacgagcagctatctacagtgacccggcattgattttccaagcaaaactcagcagctcagtgcctcgtacttcacctgaatcggacgattaaacccagcttgtgatagcaaactcccgaccgcagcgagatccctgcaaaacacaccttgaaaggcatttgttgtggctttgttttcacccgaattaaccctgtcattgaaacccgtttcaggttccaatttaaagttacaacactgtgtttgctgcacttgaattgctgcttgtaaagccgccgcaactttcttcctttgcttctcagccgcttcttcatccacaat

SEQ ID NO: 51089 - DNA, 517 bp, Gossypium hirsutum
  unsure (1)..(517): unsure at all n locations
  Clone ID: LIB3829-015-Q1-N6-C9
acttacacaagataaatatttatccactaatataccatctatccttaaacagcgtcaccagtgggaaaaataagtattttgctctactaatcgcaactgggaaggcacctttcctagttcaaatctcgaatctacctaattagctattgaaaagcaagcctctacctttgacccttaacaagcgagatcacgaacatttttctgaggataaagggaacacacaaaaacaaacctagatcaattgcatataaactactccttaaacgatgcggtgataagcgatttgggaatgagtggaatgacacctccgtcttgccatagctcctttgatcaaggtgtaaaccatcttcatcccacagnaggcgagctgcaaatgcctatgcgtagtactctcaaccctcaaagacttgcttgcattacctgccaatactaggacttctgcggacaggcatcccagactggcatggtgcgcacactgaagctgtggctccaaccctttcattagcactaaccctag

SEQ ID NO: 51090 - DNA, 544 bp, Gossypium hirsutum
  Clone ID: LIB3829-015-Q1-N6-D8
aataggagctatagtttgattgaataacattgcattaaaacagctcgctgcgctcccccactggtgccagcctcatcaaacctagcatacaactttttcatttgatatcccagtacatacctgccagctcacttcacaagaccactactgctactgatacatatagcagatgatacgacatgctgatttatggtcgtggaccatgaatcccttgagtttgcttgaacgggatgagcaatcatgtgccatgggagttggataaaaaaccgcggccacagtactacgaacggccaacaccgtggcgcaacctttcttagagcacagtacagggacctattctgactttaccgccaatctatggcggaagtacacgattgtggcatctaactgttgtgttgctgcatcacatcttcttgaagcattctgaaacgtatctgactgtttgtaattgcccatatatccatgtacctgctttggattttaagcctatggagtctgcacatatctccggcagattaccacgccacatagtcctataccacct

SEQ ID NO: 51091 - DNA, 408 bp, Gossypium hirsutum
  Clone ID: LIB3829-015-Q1-N6-D9
gtacttggtgcttggagccatggttctgagcaaaattcccagggtgtggttttttccaaaaagcagaactagaaaggagggggccgcagatagagaatgcccgcatcactgagtatcaggaacaagcggattatgcacgggataagacaaaggagccgaaggacacacttggtcttctgcgaaactgaggggaagaaaacaagactatgatggcactgggacatgacagagagaggggaagctacggctagacaccgcggaagctagtaaattccaggggcgccgcagctaaggacgatgctccccaagactgatgtggccgacggactaatgatgactacactaaggagcaacgacccaaaaaaagaaaaggggggcggccgccgactagggagcccggagacccgg

SEQ ID NO: 51092 - DNA, 524 bp, Gossypium hirsutum
  Clone ID: LIB3829-015-Q1-N6-F9
atatcattcgattaaatcgtcaattcttaattcaaccaatcaaattggatcagtgcaacactagttggtccacatgcttttttgcacatcaaccaagccatgggcactcatttccccctaccaacaaaccaagtgacatgaaataaaccattggtacttcaaattttcttccctacctcaacatgcatatgagaaactatggttctcaaacagatttggtttcaacaacttaagattttcaccgtaaaacaattaaagcatttttttcactaattttgttcacatcctagaatgtgaggtttaaacttatctagctcggctaagacttcatctaccggacggtaaatcaaatcaatcatccgccatatctgtagagtaccaccaccattagtgctttcgcaatcatctgacacgctgacaattgtccagggatcagatgtattccaatgaaagtccacaaccttgtccctatgccctgcatgttgaaagaacaatccaggaggagcatttggtgccttcaatcc

SEQ ID NO: 51093 - DNA, 403 bp, Gossypium hirsutum
  Clone ID: LIB3829-015-Q1-N6-G10
aaattaataagagatatttttataaaaatttcttttaaaatgtcttaaaaatgatgcttgttcagttaaaaaacaaactgctgaaagacgccccccccccctacccaaacaaacaacaacaagacgcgccgcccaaacaccaaaatgcctgggaaacgaggccctaaaagggaaagaaaaaaaaggaagaaaggggcccagggaggtggtttaaggggggaaaaaaaattttttgaaaaaaaaggaagccgatgtaaagcatataaaaaaaaaaaaagggggggacaagaaaaaaggggagaaaaaggaaagatttagcgaacccgggcacctgaggcaaaaaaactccagggggggacccttggaggagaacccccccttcgtgggggagagcaccgaaaaa

SEQ ID NO: 51094 - DNA, 538 bp, Gossypium hirsutum
  Clone ID: LIB3829-015-Q1-N6-G2
cctggcattactaggaaacaatcttagaaacgtagcttatcgccaaccttgctaacattgctttttgtctgacacaaccgaaacgttgtaactgtcccgcgctgaataaacactatttaaacattaccttaacctacgacccaagaagactaaaggcttaacaaaggtgtaagtggcaaaattgatcacgtgaaaccaaaaatgactgcaaaggataaatgggaggaaagaaccatagctccttgcaaaattggcctttgttgatcccgcaaagggagactttgcttacaatgagaggagagcgctctctgaaggacatttatcgacttgaggtcattaacgggcctcaccaaacgtggtgcactctcaacccggtttccgagaacatgagctataaccaggccaccactcaacgcccacatggattttggatttaatgactcttcaaatgaccaacggctagatgccaaagccagtgatggaaaaactacaatctgttttagaacatgggatggattgccccaagcaacattggttt

SEQ ID NO: 51095 - DNA, 492 bp, Gossypium hirsutum
  Clone ID: LIB3829-015-Q1-N6-H11
gggcagagaaaaaaattttaattaaagaatttggctttctaacatcagccccccaaatgaaaggggggggtagaccttacaacagcatgcaaatggcagctcaaaaaggaaagcccccctaacaatgacttcgggggggcttttcccccttaaaataatggaagccaaccttggggaccaaaaccccaaatgaaatcacttgtttctctctcaaccgggtttcaaaggaaaccccccaaaaaaatagacctcccgcccaaaagaatggttctatcttttgaaccaagggcaatgcagggagtctatggaatggaatattcacccgcttaacccgccctgattggactgggaattccagccatcaaaaagggtcgttatggtttctgcaaacttcttcgcttgagggccgggtttcaagacatttacctcaccccactgggagcaagtttcactccaccagcttttccggccagtgcaccatgcccctggggc

SEQ ID NO: 51096 - DNA, 430 bp, Gossypium hirsutum
  Clone ID: LIB3829-015-Q1-N6-H12
caaattgccccaaagttcatttttaaaaaataaattgttgcaagggaacggttttcccaaatgtccaatccccaaggaaaaaaaaaaacactccgccaacaactactatttcaaaaactaacggccctggaacaaccgggaggaaaaaaaaaagaaacaaaaacgattccggacgcggggggcaaacaaaaaaacccggacggggacccagaggggaaccaaattgaaataaagggagaaacaaaaaagatgggcgcaggcagggggataggtgaaaacaggggaaaaaaagaacccggccacaatgccaaacaagaggctaccccggagcggaaaggggaagaacccggggggcctaaggagagagggaactcaaactaagggggctagaaaaagcggaccttgttgagggggaaaaacaggcgggcca

SEQ ID NO: 51097 - DNA, 537 bp, Gossypium hirsutum
  Clone ID: LIB3829-015-Q1-N6-H9
aaaaaggaaaattgcactcaactttcattttttcaggtttatgcaaatttgagacaaacagattgtgttttttctcaaacaaattataatggaacatgaacttattgattcaaaaaacttctggtagaggcttcccttcaaggaatgatttaaataacatgagtgatctttcaggctgtgagaaaggagcttcatgagaagcacctctgattgtagcaaatgacaggatattaccataaacttgagtccatccaccaacctgtttcccttcaaaccaaactctgtaaggcacagttgtttcaagttctaactcctttgccagtcggcttaccagggagcggcttcccgtcaatggtataacagaatcttgatctccgctgtaaaccaagactggtatcccggatttgattagtgaaccaacaatggagattgtaggcatctcgaggttcagcagctgataatccagtatgttgctgcacacggtccatcggcggactccaacaagccgagcatgaagagctttttggacatcctttc

SEQ ID NO: 51098 - DNA, 413 bp, Gossypium hirsutum
  unsure (1)..(413): unsure at all n locations
  Clone ID: LIB3829-016-Q1-K6-B1
ctcccgaacatgagtgattagccaggnaaaaacgaaagcctacctagtgttcctgaaagctaactagaaattccgttcctagaaccccacaacccactgccatgcgcagatctgcaaggcttctcaaccaaaacactccctttaagtcaaaggtcaattccaaggacagtactgctagctctacagttaaactttccaagaaacccatacactcaaatcatggttccacaaatcatataaggtcaacgcctcagttgcgaaggtctcaaagaaccagcactgtttcaagtgagatatcaagaaattgtgcaaactcaacgcctgngttgcgaaaatctccaagattgagcagtgggtctttgtctaacaagcccgagggtagcaaatttgtcgagacaaagaatgatggatct

SEQ ID NO: 51099 - DNA, 592 bp, Gossypium hirsutum
  Clone ID: LIB3829-016-Q1-K6-B4
gctttttctttgatttctgtttctccttcattcttttatccaaacattatcttccaagcaccaacatcaccaccgtgaacggcggttgttcccgccatggtacgaagcgttcaccaccactttcatgacctcatggttccaaaaggtacccttcaaatcttcacctccaccatgccattaaagaagctcaaacccaaagcaaaaaacctcgtatggtcgtcatcaacggagaaccaaaaagaagatcacaacaaaacgacgccgtctccgtcgttgctggacttgcccgagctcgtactggactgcattttcgaccgtcttcaaccggcggagctttgtgccatgtctggtgtttgttcttctttgagagaacggtgtgtgagtgactatatttgggcgaaaaggatgaaagggaaatgggggaaagtgattggagatgctgcttatagagaatggcaatggtatattgctttgcaaaatagatccaatctgttgaataatcaaaggaatcaaagcaatttgtcgtttgaatctgttgctaaaatttggccattcctttcttggtttaacattaaacccagagctcaaaaag

SEQ ID NO: 51100 - DNA, 577 bp, Gossypium hirsutum
  unsure (1)..(577): unsure at all n locations
  Clone ID: LIB3829-016-Q1-K6-D9
atttggccaccaagnaaatgcccgncaagccgattctggctgccgtgnaatcaggnaaaatcgcattcttgatccaaagaagtcacagaacattgccattttattgagagcactaaatgtgaccattgatgaagtctgtgaagcacttatggaaggcaattcagacactcttgggattgagctcttggaaagcttattaaagatggctccaaccaaagaagaagagcataaactgaaggagttcaatgatgaatccccttttaagctaggtcctgctgagaaattcctcaaggcagtgcttgacataccttttgccttcgagagggttgatgctttgctttacattgctaattttgactctgaaattgagtacctgaaaggatcttttgaaactttacaggctgcttgtggagagttgagaaatagcagaatgtttctgaagcttttggaggcagtactcaaaactgggaaccgcatgaatgttggcaccaaccgtggtgatgcacatgccttcaagctcgacacactcttaaaacttgttgatgtgaagggcacggatgggaaaaccacacttctg

SEQ ID NO: 51101 - DNA, 597 bp, Gossypium hirsutum
  unsure (1)..(597): unsure at all n locations
  Clone ID: LIB3829-016-Q1-K6-E1
cngagtggggtacttgggaggagcttttgttaggtggggcagttctccgccatggtacccgagattggaacctcgtcgcttcggagctccgaacctgagctctttctccttttgccttcactcctgaggcatgtaaggccaagtatgaggatctacaacgacgttactcaggttgcaaagcttggtttgaggagttacgtaaacaacaaatggctgatgtgaggcaagctttagaggaatccgaagattcaatcgggtctctggaatcaaagcttgaaagcctaaaagttaagaaaagaaatgattcaagggttgattatgattccagtccaacagaatcaaccttaccatgtcctaaatccgagggatttaagttttccagtaaggacacatgcaaggatggcctctctgctggtagttttacgcaggaggcccagacaaactgggcgcttgattgtcagattccagctgcagtgcctactgaagatatggattccaagccagtaggagatgcactgacctatgagagggagaaattttcaagcattgataagttggcagatgctctacttggaggaaagttaccgtgtatgcgga

SEQ ID NO: 51102 - DNA, 580 bp, Gossypium hirsutum
  unsure (1)..(580): unsure at all n locations
  Clone ID: LIB3829-016-Q1-K6-E11
gggagtccttncgccgaaacacggctctgctagcggaaccttcctttccctccctccaatcgctagcaacgaccccattatctcctgggtttggtcttgcatcgcaaccgtccaaatgggccaattaaccgaccgaatcgaagccgccaacaacctcgcttccctcgctcaagacaacgaccgaaacaaaaagatagccgttgaagaaggcggcgtccctcctttgctgaaacttcttaaagaaagctcctcaatggaagcgcaaatcgccgcggctaatgcccttcttgttttggcaaacgaaccggaaagagttcgcagtattgttgaagaaatgggggtcccaattgtggttcaagtgttgcgagattctccgatgaaggttcaaatccccgtagcgaaattgatagcgagaatggcggagtatgatccggtggctcaagaggatttcgccagagagaatgtgattaggccgttggtcactttgttgtcgtttgagacattcgtggacgattctgggactcttttgggtaagcaaagcatccattccatagttcaaattaataaagaaatggagaaa

SEQ ID NO: 51103 - DNA, 328 bp, Gossypium hirsutum
  unsure (1)..(328): unsure at all n locations
  Clone ID: LIB3829-016-Q1-K6-E6
naaaaaaaaaaaaaaaaaaaaaaaaaaaaaaaaaaaaaaaagaaaaaaaaaaaaaaaaaaaaaaaaaaaaaaaaaaaaaaaaaaatacaaaaaaaataaataataaatatagagaaacctaaaataaaataaagggggcgcgtcttttgaaagaccccacgttctgggaacccccgtgatcggaacccaatattatttgtttttggggcccatatctttctttttccagggccgcgggatttcccaacgaggccccccacgaaaaaccctgggccatcaccccctttaatccgcttggcgaaatggcccccttccatgccagtggggc

SEQ ID NO: 51104 - DNA, 609 bp, Gossypium hirsutum
  Clone ID: LIB3829-016-Q1-K6-F2
ggcatttgggtcttttggtttacattgaggggagtgttgggttttgcgggaagagtcgatgggtgtttgtggtggttggcaggtgcgcccgtgtcggggtctgaaaccgccatcttactcggcggttgcagcagtagaagaagggggttttggcaggaagtgtcagtgggtgtcgtgttggttgggaggtgcgcccgtgtctgagtctgaaaccgccacttgacacggcggtctcagcggttttggcgggaagagtcgatggggaggtgagctcgtttcagggcccgaaacagctagctgggacaatccctttcagttgcataattcttctcttatcaggcaaattaaacgctgtcattagtcttcctctcttggctttcactttcagatacatattggcaaattgcttggaatttcgatctaatttcgaaattaatgaatcccctttccttttgctggcttaaatatgaattgtatccaagctgaagcaatgttgggtattaggctattagccatctttttaataggaaatttctcctcctccatttggcgccgtcgaggcccaggttggctcagcggagggacctgtctatgtacatacccctttga

SEQ ID NO: 51105 - DNA, 602 bp, Gossypium hirsutum
  unsure (1)..(602): unsure at all n locations
  Clone ID: LIB3829-016-Q1-K6-G1
gcagaagtgcagtagtctcttatcctacatcaacggaatctcttggccgtggaattgacttgatacaaaatgggcaaaagtatcctttcacatttgacaaggttttcaatcctgaagcttcacagcaagatgtttttgtggagatatcccagttggtccagagtgcccttgatggatacaaggtttgtatatttgcctatggacagacaggatcaggtaagacttatactatgatgggaaggccagaagcccaagagcaaaaagggttgatacctcgttcgttggagcagatattccaaagtagccagtcactgcaggcacaaggatggaaatacaaaatgctggcttcaatgttggaaatatacaacgagaccattcgtgatttgttatcaaccaatcgatctattggttcagatccaacgcgtgcagaaagtgcagtttctggaaagcagtatacaattaaacatgatgcaaatggtaatacacatgtcagtgatctgaccattgtcgatgttagtaccataacagagatttcctctcttttaaggcaggctgctcaaagcangtctgtgggcaggacgcagatgaatgaacaatcgtct

SEQ ID NO: 51106 - DNA, 595 bp, Gossypium hirsutum
  unsure (1)..(595): unsure at all n locations
  Clone ID: LIB3829-016-Q1-K6-G11
tgagacgcanaaaaagcaaaatttttttcatctgttatctttcaacagtctagttgtagcggaagtgggagtggcatacagactcaaaaatccacaaaatcaaagagtggtggttcagacaacaatactgngaaataataaggaggatgacatcggaagtgtgggattgaatgcgcaggaaagaagtgacaatggaagtggcactcagagctcgtggacaaagagggcgatagaggttgacagctcccagccaatatcagcacgagaccaggtcatgcattcaaggtctgaagtgcttggtaatagctgggttcctgtaacaatcacgagggagtgtgacagtcgggatgatgaacttggtatgtgcggaactgttaatggacttccactatttatactgttgttttctttttctttgattaaattgtgatgcatcacaatgccagacaatgcagttaagggaaaagatttagagataggagttcctaaaattacagctttgcagcttgaaaacccaagtgaaaaggtcaataccaacgcagcaggtggtaatcaagaaaaattatctgaactcaaccctagtaaagatgatgag

SEQ ID NO: 51107 - DNA, 587 bp, Gossypium hirsutum
  Clone ID: LIB3829-016-Q1-K6-G7
cttgtattaaggtaactgaccaggacagctgccaggacaatgcttaaatttgtttgcattatcgaccactgttactaaaataactgtgggccaagctatatatgacatgggtgcattgttaattttcatagttattgagcaatgataaagagacaaagatatttttctaatcgtagaaggatatatgattctaggtgttgaaatgcatgctggataacattagagtggtttaacttcaaacaatttggaaaagctatatgcaaactgataataaaatcgagagtttctctggatataggttagaaacaaattttgtaacactgtagtttttgtgtatttacttgtttttgtttttattactatgtttcatagtagttgactaacatgtgcatacagatcttatgcttgcagggatcaccagatggacctgaacagtaagttatttttttttgggttatttatgctttcaacctctggcctttagactcaaagaaatattttttctttcagatatgttgcaatcatgaacgcgatattctctgcccaacgctcttcggttcctatagattcttgttacctaggttcta

SEQ ID NO: 51108 - DNA, 574 bp, Gossypium hirsutum
  Clone ID: LIB3829-016-Q1-K6-H6
tgtgcccaatgctaaagctatgtacggttgctgacttgagcactgaaggaatgccgatcattgcattcaacctatctagtaaccgctgagcactacaatagaaaggcattaaatcacttcagtgagatgttgacgctagccaacctgccttgcagcatttcggacatgaataaagccatttacctttaatcatgattcagagtgatgatggtaagaacattttaaaccaaatttgatggctgatgacattgcaccatggatgaaagatttcaaggcaagaactgccgcaccgtatgtgaacgatgacacctattcccaaggagaacattcaaccactgacaagacgagcgttgctgacacctctgcaagacatggctctcaaatcatgtaaaaatgctccggtcgagtattatgccccttgtggaggacattgccaaaaatacgctccaatcttggatgcaagagctgatcatctatgaaaaagactccgatatgttaatcgcaaagcttgacgccacttgcaatgatatattgcatgataacttcgatgtcagaggttacccaactgtgctac

SEQ ID NO: 51109 - DNA, 373 bp, Gossypium hirsutum
  Clone ID: LIB3829-016-Q1-K6-H8
aattcggccctctacacttccctacacagagaacgcgcacactgtcttgttaatcagcaataacctgctatagggagccagactacagttgcggctgcctcaccctggccctccgatgattcccttccctgtgcggcttcttccttattctgctgcatgccatgaccatcgccgacgtcggcgcgggtcgctccgacgccatttaaggacccaacaaaccctactgcgctaacatggtgacgctggtgccgacatcaatactaaaacgctcgtgatctggtgcttatcacgacccgcacctgctatcactggacgtactggaggtcgtacaccaaggaaaacgatggggaagagctcatggaactggctggcg

SEQ ID NO: 51110 - DNA, 581 bp, Gossypium hirsutum
  Clone ID: LIB3829-016-Q1-K6-H9
gggctctcttgtgctagacaggtacagtaggagtggaccgaatctgttattatttatgctggtattggttatgattcatatggtatgtgtggaatactgcagaaacctggttgatgtgtctgtgagaatgggaaccagtcagtggagcgtactaagctgaatttaaagcctcgctcacagactgtcgaacactgggagggctacattgagaaaaaagaatgtgttgttcggagacgctcacccacatagactggttctgaaggatagaggggttgatgacaccattcatgacctggacgcaacattctggtagggtcgtctagcatagtgcttcgaggagagaaaaagtacctgagtaagctgctcctatttcaattgaatgatgtgcgatttctggtgtcgatcagagagctggatgaaaatctgttagaaaccatggggtttacaatgacagagtggatgcacaaaggacgatccggactaatgaaaactggatgattgacatggaaattgagaggcagtcatctgatggagaggcagacatcacctgagacctggcgtatgcctgcggagcagcctaa

SEQ ID NO: 51111 - DNA, 460 bp, Gossypium hirsutum
  Clone ID: LIB3829-017-Q6-N6-A5
aagggggaagaaatagttcataaaataaatccctcccacacaatctatttagttttaaacatgctacagttctaactggtgaagagaaaatttattctctcaatcatactttaaaaacaggaagaaatgataaaacctacaacacagactttagacctttttttttttcaccctcacactcacaatcacaccatttggttttgagtttctacattatttcgagcaaaatacgacatttacaggttacaacaatcaataagagttttggacctccaaataaactgaaagatatatatatttactttttttgagcttggatctttattttcaacaacttgcactcctccaaaggtggactccactgggatttcacaagacaaggagatccttcacatcaatttcaaaataacccaacccaagcaaagctgttattaacaaaaacttgtttaattatcactta

SEQ ID NO: 51112 - DNA, 507 bp, Gossypium hirsutum
  unsure (1)..(507): unsure at all n locations
  Clone ID: LIB3829-017-Q6-N6-A7
cgaacccaaagaaaagtgatttgaatctaacaatctgcttgaagacaggcaaaaacctgagttttcctgtagtttatttagaacaaaacatgaactgcaatggtaagaactagaacaaagaaaatgaatatgggttttgatcatatcatcttacattagtcttactttcttcaagattgttgctaaatgagcagtcaaagcatctagaaactatgatgcatatagcttggccaggtcttcagaaaaagctcttctaatggcctctctcttgatcttgagagctgcagtcacaagccctgattctggagtccatggactagaaatcaatttgatttttgcaggaatctcaaatttctccaatcgtgacttcttggctgtctgagcaagagaggaatgtacttccttgatagtttcttctttctcacacaagtctgcaaaatcagtaaatgtaatgccttgctttgaagcccaatcttncaccattttgttgggaagccaccacgagag

SEQ ID NO: 51113 - DNA, 474 bp, Gossypium hirsutum
  Clone ID: LIB3829-017-Q6-N6-B8
cacaaaaagcttagtccctgcatgccaatgttctctacaacgaaatgtacaacgagttttatataaatggcttgttccaaaatccagcaagcttcatagcatgaaagaattacagagctggggtatgctacaaaaacatatggaggcagttgaagctccgcttaggttagactttggatcaggaaacaaacaatgagctaaaacggggtagtccttgacatcagaaacacctcctggagaaatccgaaatagggcttctagcctcaggcaagcaaggggaacttattactttacaaatacgctactctgctcttcccttacggaaagccaatcttgttgtggaagcattagccctgatgttcccaccaataagcttgatttgaagaccgggaaaaatagctgaaccatccacttgagcaactacctggtttgtgaatacaacacccacaccaaactcgtctgccaacttctgaa

SEQ ID NO: 51114 - DNA, 548 bp, Gossypium hirsutum
  Clone ID: LIB3829-017-Q6-N6-D12
acaaaaatcaacaacttatactaatttaagcgtgccctccgaagttccatttgtctccgagaggatgatgatggatataggcaaagaatgcaaaatcaaagttattgccaaagcccttgcttactccatcatgtattttacaggttctattacacatccccgttaccccaaaaaacgaaaataaggtgaaatgacgatagcttatggtctattagtgctgcacatttaacatatcttgatcagcttcgaccatgtagagatttggttgcttttgaggccaaagctaatgccttggctcgtgtacttgtcatcatccactccctctctgcacggcgctgatgctgtcttgcatttttcgcacgctttggagctaaacgtgtgtctctttccacaaaggcaagtctaaacttttctgctatggataactcattggcacttgaaagtgaaggagacattgcctttggcatagatcgacaaatagaccatgttttgggatcaatgtcctcaacaatcggatcatccaaagcaacatctggaaatgcttccct

SEQ ID NO: 51115 - DNA, 470 bp, Gossypium hirsutum
  Clone ID: LIB3829-017-Q6-N6-D2
aatatatatactcaaatcaattcggaaatggaagggaaataataaaaatacaaattttcatgaaacccttaaactaccctttctttagtctttagtatattagcagccaaaaaatgccttttttgctcccaccaaaaaggaaaaaaataatgggggcaaactacaaaatctttatcacatccctccaaaaaaaaacactaaaatagcacatttttccaaattgataaaaactacggttttttttcctaaaaataaccttaaataaaaaacaaaccatgcttttaaggcttaatagctgcccattgggggcataccaaaagggggcatcaaaggggggattcccattcctcccatgggggggggggggggagaaaaacctcctcccattccaggcattggtggtgcaggtaaggctagaggtaacacctgagcatacatgtatgtgtgggcaaacacttcctttttttttt

SEQ ID NO: 51116 - DNA, 359 bp, Gossypium hirsutum
  unsure (1)..(359): unsure at all n locations
  Clone ID: LIB3829-017-Q6-N6-D5
atccattaaaatagtcgagtcactaaactcattttcctatatccctcaaaaaataaggggttgaactcacaaagacttaaaattttacaagatgaaaacctccctaacataaacagcagtttgggtaggcaaacctgagccctaccttcggaaagagcctgcctttctttgggtgataggaaaggaccaaattgaaggagctgggcgcggccacactttgcaggcccaccgggaaagagcgttctaaaacatgctaacacccggtccagcaccttatcacccttggntgaataatgagtagtatgctgccttatttaagactacgattgtgatcctgggatatgctgacttgccctact

SEQ ID NO: 51117 - DNA, 467 bp, Gossypium hirsutum
  Clone ID: LIB3829-017-Q6-N6-D8
atgggctcaaacattacctaattacatcaaggacattggcaacttagttcaaatcaaactaaacttagttcaaatcaaactaaggaacaaaacaaacacttggaggaaccaaaatgaatcagccgcctgggcttttgtcgcaactgcatgggtcggcagcttgggctgctcctagggctgcatggaagccagcttcaacaactttaagcacccttttgcgggggttcaaggattacgggaattccctggtctgggtgaagggggaaaataggccctggggaggggacataagccggggagaggggaaaggagtaacgttttaaaaaaaaggagagaggaattttgggttttgggggtggaaagggcataccaacacaaaaacgggggcccaatccaaaggggaaaaaagcagcccccttgtaattgggagcttcgggaatcccatcagggaattttttcgggttaaa

SEQ ID NO: 51118 - DNA, 435 bp, Gossypium hirsutum
  Clone ID: LIB3829-017-Q6-N6-F11
ttttttttttttttttttttttttttttttttttttttttttttttttttttttttttttttttttttttctctttttgttttttgtgtttccttttcttttgggaaaaacggggggaccggaaacccaaccaaatgggggggaacccggggggtaaaatgggggggggaaacaaaaaaaagggaaaacaactgggccaccaaggggcagacaaaacagggggaaaaccccacagaaagcataaagggggaacagcccccccctggggggtcacaaaaaaaaaagcccccccaaaattttttcccccaaattggggggaagggcttttttcgggacgacaaaaacccggcccgggggaaactcgggtaaaaccccaacacaaaaaccaaaaagggcccaccttccattaacaaattaatttttcccaaggaaccc

SEQ ID NO: 51119 - DNA, 461 bp, Gossypium hirsutum
  Clone ID: LIB3829-017-Q6-N6-F4
agcagaaaatagttgctgcgatttaagaaaaatgcctgactacacctccacacaattctgaattcaattttggttccactccacatgagacatgactatattatattcagttaaggtaatcataaacaatggatggaggtgacctgacgtgacttctagcgtgtatgataaaacacctatctatactagcaaatacataagagggttgaatgtcaattgcaatatttctttcaagacaaaatctacgccaaaaaagttgacagatctcaccactggtttacagtaaacatactagatcacggcgatgagtcagatttcggcaggttcaactccctaagttgctggagctttagtggatggttcatcctgaggtttcatggctgggaagagaagaacttccttgatattctgtgaatctggtaatagcatagctagccgatcgatacccaatccccaaccac

SEQ ID NO: 51120 - DNA, 535 bp, Gossypium hirsutum
  Clone ID: LIB3829-017-Q6-N6-G12
cacgagggaaaatcttacagttatgataaatataaaaacattgatagcacataactagtttgttttcatacaggcaatgaaacaataatacaaggagctaggaaagaagatgaaacaagaaaatgggaaattttcattatacaaaacgggagtgtttcttccaatttcttcccccctacttccggttaaacaaacatctaagttttcccctttccaacctctcaagtagcttcttggcaccaggggtttccatctcgaaaagcttcttgagatacccaatggctccatatgagatcataagctttttgcatttcttacttgatgagagagatgccaggcaagacacagcatacttttttgcggtgttttggggacttggatcaagcaactggaccagatttggcacacttttatcgtcctttttcacttccctgcaattctgggacacagttaccaagcttgaaagggcttgagcagctacctctctagcattgtttgatttagcctcaagcatcctaataagaagaggaatgca

SEQ ID NO: 51121 - DNA, 384 bp, Gossypium hirsutum
  Clone ID: LIB3829-017-Q6-N6-G4
aagcttaataatatttcctttaaaaataccaagttcactaaacacgaccaaaattcatcttattcacaaaatagttaatccgtacaggctgaaatggggcgatctcctttaactaaatagttgaaaactggagtgaaacactacattcaagactcatttggggtgggctctaaaccacaacgggaacctcgatattggcatggggagcacgcggatcaaagacaaacttaaagtggatactctccctcttacttgggagggtggatggggactagatcatgctatggggacaaaggaccctggttgcccttcgaatcccaaaacaggatgattctaactttgatacccagaacaccctgcctaacaaggacatgtgttacaggg

SEQ ID NO: 51122 - DNA, 453 bp, Gossypium hirsutum
  Clone ID: LIB3829-017-Q6-N6-G6
aaaaaacttcagttttactattaaaatatcaattaattatttaccaatggttttttatgcaacttttagatttactggtaaaaccacaagcaagcatggggctttgaaacagaaaataaataaatgctcactttggccgacattcgggcaagggtaatctataaaaagggggccggaacggggcaatcaaaccgggaagacagggtcgaagctaatacaaattttgacaggatactactttggatataaagcacaaaaaggttttccagggttgatgacaaaacgatggtggtttcagggtcttttagctgggattttttcacctttctccgaaataaaccttcatccgagggtcttggttctcctcctcgagttctgaatttttggacgtaccattcagcttcgggtcactttgagtaaacctttcaaccatattccctttaccaattggat

SEQ ID NO: 51123 - DNA, 265 bp, Gossypium hirsutum
  Clone ID: LIB3829-017-Q6-N6-G9
attccaaaaaggggggagccaaaaaggggggggtaggccttcggaaaattcgataccccgaaccccggggtgggggtttcccaggtaaaaaaaagggggggggggaatttaccccccaacaaaaaagggggcgggaagggggccaaaacacccaaaaaaggggcctccccgggaaaaccggggcccaaaaaccaaatttccgggagcaggtttttgtccccggccaagaacatcagggggggaaaaaacccccggacccgggggg

SEQ ID NO: 51124 - DNA, 487 bp, Gossypium hirsutum
  Clone ID: LIB3829-017-Q6-N6-H11
ggggccaaactatcaatattccattggttgggaggaccattaaatgctaacaggcatagagattgggggaagaaattaccaggggtggggggatacaatccatcaatggccactccaaagtggaaatgaagccggaaaaaaaagggattaaacattattacaggccatcaatccattcggaaaatatgggaaaacaatcatttttttactgggggaattcagttttatgaaaaaattagttttttctaacataccattttaacttttcacactcccaaaaaatcttgacagggggactggaccctcacctttttcattttgggggcttgggtttttatttcttgggtggggcctctttttcttctctcttctagacttggacttggatctttttgattctctcttttcatcatcactactcgaagattctgggggtgaactcggggggcttggctcaaaagacccccggcttgaaccctttcttttt

SEQ ID NO: 51125 - DNA, 396 bp, Gossypium hirsutum
  Clone ID: LIB3829-017-Q6-N6-H4
gggcccgaaaaaaaaaaagcatgccctttttaacacactgaaacaaataaacagggggcaattttcaaagaaaattaaagaaaaaaaaaacttgaaaacgaactaaaggggggggctaacccccacaaacaggggcatttaggggggaaggggattaaaactccccaaagggccccaatacatagggtctatagaaaacaaatcacatttccccgaaactacggggttatcatcatcaaaactgataaaaggcttatgggataactctggaaaacccgagtttgccggttcgaaacctataaacatttcacttaagaaaaaacatactgggggaaggaaggaagcttcccgggggcaaatgcctaaaaaaacccgtttcagttagcacgggttttg

SEQ ID NO: 51126 - DNA, 365 bp, Gossypium hirsutum
  Clone ID: LIB3829-018-Q6_N6-A3
ggcacaacactactcatacatatatgcccaaaaatttggctaaggttttaaacaaaaacaaatggcaaaagggtacactacttgaaataattaataaatatataaaatacactatggaattgactctgcaaaagaattttggaacaacaaatttgtcttttctcagggccccatgttctaggcaaggggggaaaacaaatataatctacaagcccttttgggggaagacagaccatgctttacctcgatcccgggtttatgccgatatcattctttattgatcattaaagactgaaaaggcaccctcttaattgcgagaaatggcaaatgatccaaacttatgggctgtttccatgggcccccac

SEQ ID NO: 51127 - DNA, 520 bp, Gossypium hirsutum
  Clone ID: LIB3829-018-Q6_N6-A6
gatctcaaaaaaatcaaaatgaatacccttaaaagggttaacatttttactcgttacattgcatcattgtttaagttcttcaacatacaaaactattcaattaacataaaataaaaacaaaaaataagacaacaccatatgccaaaggatagcatttttaatgtaaaaaaaatacttattgtatatatcctgatctgcaacatgaaatcacacccttactctataatatgtaagatgttgtgtttttcaccatcttccattttcagcgataactttatcgtcgataacttcttctgaggatgttgcaaattctcttcttagattctcaaccttctgtttcaatgctgtgtcatccaaggaggtacgaatctcctccttgatctctgcttgtaatttttctacctttggtgaactagagtctatcgccatctccgctttcaattcttcgatttttccatgaagaccggcaacatcgattaccctttcgatctctccatcaatctctttcttcacgtttacg

SEQ ID NO: 51128 - DNA, 547 bp, Gossypium hirsutum
  Clone ID: LIB3829-018-Q6_N6-A8
gaaattcgtatgaaactttaggttccattatttattatatttcatgaaaattttaaaacagaaggaatgtacaacattcggattaaagagctcttcctaatctcagtaccaagcgtcacaaaattaataatttacttactaagtttacatgaaatgagaacgtcaatttgttgaaatgaatgctgccgtatctcagaatgtaaatcatgtatttagctatacattgtttgtatacctcaattgtccttgcagttccttgaatagcttgaagacaatcttgattgcgactgaaagaaatcaaaaggagctcctgatcccagcgaccttcttgaagagtttggtgaatccgatagaagaggttcataaactgggtttctgttctttggttgactaatttgcaagggagaaactacttctttctccatcggtcttgggtgcggctcgatattgcctaaagtcagaatcggcccacccattcgttcagcctgctgaagtgtattgattttacttggtctgtatgtataccgggagtacttcaaagctagaa

SEQ ID NO: 51129 - DNA, 387 bp, Gossypium hirsutum
  unsure (1)..(387): unsure at all n locations
  Clone ID: LIB3829-018-Q6_N6-B1
acatcggaaaaanataattattctgatttattactaaaataatccaaccgaaaaccgaatacattgctactaattgcattacccaatttaaagatagatcgagaaaaatgattcctaaatagctacgaacagattctcctgaaataaaattttatagaaaatggtttggtgaaatgcattgaaaggtaaaaaagataaaaatttcaaaagataaccaaattactctggatttacagcaagatcttagttactattaccctgcccctactatgaagatgacatatgattatcccacgctggcacggcttgccaagccgaagccgcgatgagagggctgttatgccaaccaagactcaagcacccttttattttttttccctgaatacc

SEQ ID NO: 51130 - DNA, 287 bp, Gossypium hirsutum
  Clone ID: LIB3829-018-Q6_N6-B7
gcagaagaactatagatcatcttatttttattatgtaaacattgggatcctataagtataaactagctcgtgaacgttgcaggcactggcctacagtcctttttacctttgttcactccttgtacagcacccatgtgcgagatcttaagctgtcagccgtgaagaacacatgatacctaaggcagaatctggactactcggttgaaaagaatggcggggttacatagataaatctgaagaaagctgtgaatgggcatattccggaccacgtaaaagtgagattcttt

SEQ ID NO: 51131 - DNA, 501 bp, Gossypium hirsutum
  Clone ID: LIB3829-018-Q6_N6-C12
gaaaaaagttgacttgcattgcattcaagaaaacaagttgcatatttaatacagtagggtaaccatctttacaactactaattgttaacaacagactaactaacacttaactaacactgcttaacttcttcattactaacatacatcataacatgcccctatcaacctcttccttctggggcactctcttctcctttggaaataactcgaagcttgttcctgaatctttcaaataagccaactgatagaggcttagtcaatatatctgcaatttgattttggccagatatatgaccaatctgaaaagaaccatccgcaaccctttttttgacaaaaaaacgaatccaactccatatgtttaaacttggaatgcatcacagggatgttagctatagcaattgtagctgagctatcacaccagaacaatcctttgtgagtaactagagtaccaagttcagatagtaacgacttaacccataccattttagcagggacctgagc

SEQ ID NO: 51132 - DNA, 472 bp, Gossypium hirsutum
  Clone ID: LIB3829-018-Q6_N6-C7
gagacattaactacaatatatgttttttaaaactttgttttctaaatttttggaaaaggtctcaggatccaggagatgagaagggaggacctaacaacggaaaaaaatggttgggggggagggggatatgacactgttacagagattatatccactgtcacccatctgaagaaaacagatcttctctctttacctcgttgtcctctcagttatctttggagctcttccacattaaggtggaaaacctgtctattggtgacttcatgtggctcctactccaagaaagtcaatgaatggcggtagaatagtctcatagtggctgtagttactgcttcctgccacggatgatgaaggttcaatggctgaaacttgaggtgttattgatgctgtggaatctgtgttactttgggagctgaggaactctgactgttgcattgtcatcatgtgtgaagggtgcagctgctgatgttga

SEQ ID NO: 51133 - DNA, 466 bp, Gossypium hirsutum
  Clone ID: LIB3829-018-Q6_N6-D1
gggggaaaaacccaatctataaaaaaaggaaaaggggcccaaaataattagggcattaaaaatttacaccccccgaatcttggcccttggaagggccaaagtaaaacccatagataaaaaaaaggggcaaacatgttaaaaaaacaatctggttggttttaattttggagaaaaacaaaactggaaaccctgagcggcccattgggaaagggagccccacaaaggcaatttccaattagcccaaacacctttttggggggacttttttccggccgaaagaatttatttttttaaacgggtttcccccccggggcttgggaggcaaaaaatttccctttattcaaaatgcaaatagaaatgcaattgcgcctcggggattatccccaaaaaaacacaaggaaacccaaaagatatacgcaccctaaaagggctttccaaagcaagggggtagggggttctcccaaag

SEQ ID NO: 51134 - DNA, 544 bp, Gossypium hirsutum
  Clone ID: LIB3829-018-Q6_N6-D2
gattagatcgttagcaaaagagccagtatattttggtgtttgcaatatttcactcgaagtaaccatcgctaagctggcatacatatacttttgcggacttgctgccatactcggagtgaatactgccataaacacttcctccgtcatcacatttcccacctccttcatatacatatcataatcatacatagatgacataaatacatatggcttatatcacataacatgcttatatgcataatttgtattacacttaattgggagttgcaactaattatcatgcttttatatctactcatacgtacttagatactaaatttatagttttccggcccttacaatgctgttggaaccgaatatcaaattccttaatggacacttaattgggccccaaaattagcccaaaaggcccacacggccctattacatacgtgatgctaagcagtaggtgaggctatgccgtaggggagatttgacacaggaaaaaaatataatcttcaggacccagagcattatcttggtttgcctaatatggaaggaagaa

SEQ ID NO: 51135 - DNA, 362 bp, Gossypium hirsutum
  Clone ID: LIB3829-018-Q6_N6-D9
gcagaacatagtaaaaggcaaaattatatttagctttataagaggagcaggtacagaagaaacaagagcattaacactagcctttccctcgtctttccttttttctcatcattgcctagaccattgctaaggctggggtgggcgctaagaccctcatttgagcattactgagagggctacagtcaatactctgctcttcaccctgttaccacggcctgtacgaataacccgaacatggtgaacttccccagccttccggaggttgactacctcgccgtgcgcctatcgtatgcctttgggtcgtcgggtcggccccttggttctcttctgccccctgggcaccgtgggtcggtcccttcacc

SEQ ID NO: 51136 - DNA, 517 bp, Gossypium hirsutum
  Clone ID: LIB3829-018-Q6_N6-E3
accctattctaacatacatgaactaatttttaataataaaaggggataaaaattttaacaaatcactagtttacgacaaactgtaacctgacttttaagacaaagaccttacttgtaccggcattttagctatcaactacaccattaaagaccacataaactgaaaggaatgggccaaaaaaattaactcaagggattcaaaaaaaaaaaaaaaaaccgtactttgtacatttgcatagctgcattcgaaatcaaaaccatccttttaataatcgttgtcatcggcgttatcgtcattgacgtgtcgatcatcgtcatcctcgaacggagggtccaaaaccgaaacagggctgcattggtcttcctcttcttcttctacttggaattttttaaaggtcccaacttggaaattttctttggcctctttttggcgtctacttggggaagtcgtctgtgaaaagaaaagtggtgtccgatgagtaaaggaagggcttttttgaagcacgaaatggaaagg

SEQ ID NO: 51137 - DNA, 221 bp, Gossypium hirsutum
  Clone ID: LIB3829-018-Q6_N6-E5
cattaccccaaaaaaccatgggatgactctagaaaattgaataacaaaatgacctcaacatataaaaacggtgtcagaagcaaacaggcaaccaccgaccaaaatgccaaaccacaggtaagcggcaaaggaaggcggagaagcagcacagagcccggaactcgagcgggctaagctctcactcctgcgcagacacggccaccttaaacctcagggcaagc

SEQ ID NO: 51138 - DNA, 551 bp, Gossypium hirsutum
  Clone ID: LIB3829-018-Q6_N6-F1
aatactaataaagacggcatcataattatgattttgttttggagaatatgaacaagctaacaaacgaaatcaatctggcaaaggagatccaaaacattatgaataggataaacaaactaccttcctttcatttgttacaatgatctgtttactttgctcatatctatatataaaatatatgtgggggtgaaaatagtgcgaggaagagaaaggatgatcatcactagctttaacaatcacagagctcgagagtcaggactcagcaagttaacagccacggccagtgtcatccatcatctgttggagaaagtcgatcatggaggcctggccataaaactattgccatgaaagtccagggccactcgtcatggctctagcttctgccagagatacagccattgccagcatcatctgctcctcgtaactttctggaaccatgggaccaggtccacccacactctgaaagctgcctctaatttcatcttgttgaggtattgcagagatcccaccgctatcttctgtcacatcagagcttgcatagctagtccctg

SEQ ID NO: 51139 - DNA, 553 bp, Gossypium hirsutum
  Clone ID: LIB3829-018-Q6_N6-F10
caccatgaacaaatgctgccagccggcttctagaacaaagagttaagaaagaatgttttaatgttatgctgctactatgcatgatgatgaatgatagtcgatacatataactacggagggaactcaaagctaaagatacgtttaattcacctcgacaactaaacagctgattgatgactgatgtcggactctccaacgatctgttcattttacctgatatcaaggtatagatttcaccatgtaattggtagacaaagaagttattggtttccattacgtcctcggaccctcgggattcgccttagtcccattgaccccaaaaagcgagcaggccaagtgtgggttactggggaaacaggacggtaaggagggtgcatcccaaagtcatcatcatcaaatagatcataatccaagaatctaccacgcaagcgaatggatgaatctagatgaataaagccatcatcgaaagggtcatcaaaagaatcatctagaccatattcatccgcatagatatcatgatagcccggatcaatcacattatcacccaacacca

SEQ ID NO: 51140 - DNA, 478 bp, Gossypium hirsutum
  Clone ID: LIB3829-018-Q6_N6-F2
aaacagaacacgaattaccctaattttatcctcatgtaaacattgcttctaaagtcattttaactgtctattacagaaattaccctaatttaccaccaaaaaaagccaaagaattgataatgcatacgaacttgtgtcttttcatgaccaaaaaaatatgcttgaaaacatgtctaaaatgaaaacagacgaaagcaaatgaaagtgattcagacataaggttactgccattcagaggagggagctcgatctattgttgccgaactctccccgtcattctaggctttcccgctgcaaccttggcaggggttgaacgctcggactgagtgaagagaatcaatatttgcatgaggaaggtgaccatggccaatatgaatgctgacaatgcaatgcccctccatgaggataaaagcgaagactgttggagaaacttgagagccccgtaacccacgatacacgcccaagagcaaacaaccag

SEQ ID NO: 51141 - DNA, 515 bp, Gossypium hirsutum
  Clone ID: LIB3829-018-Q6_N6-G12
agaggctgaaaacataggtaattgtctgattttatttggagtccagctaggaaatttgtcatagccgtcacagtagaagggatgaaaagacggtgcaaattaatgaaagttgaaagaaaaaaacacaggaactatagtagtaataaaaacggtgaaaaatctacgtgcatggagggcccaaaccactgccaagtctctttttctcttcagtctcttccaccaccgcagtcagtggccccccatcacctttcacaagactccatttcccagtccatgactcgttgtttgatttacatggtgtgagtgtccactactctaaatcaactccatgggtgaatggaacccattgaagcaaacttggctagcccttgttgcaacaacggtctgcttgattcacctcccacaccaagaaaatccctggttaagctcaattcaacttcatttgaatttgtgttattcagcttcgatgcaagtacaaccgcttggccaccttgttttcctttgctgctggcgtt

SEQ ID NO: 51142 - DNA, 193 bp, Gossypium hirsutum
  Clone ID: LIB3829-018-Q6_N6-H3
ggacaaagcatcaaataaacatgtgtttaaataaactacaaagaattgtaaaggagggaagatccaagattcctcctatggtaaaacacgacgataacaggatagcacagctaataagtgctctggcgggatgctttgagtatgatagggatagaatttatcactgcgctgacatagtatacaataaatacaa

SEQ ID NO: 51143 - DNA, 395 bp, Gossypium hirsutum
  Clone ID: LIB3829-020-Q6-N6-A1
agaatccaacagccattcttccatgaaattaaaaaatcacaaactagaattcaaaccaaaagcaacaatgctaccaatattaaagctaaaatcaccattttagtttcaaagccaacaccgtcataccttccggcatggggactcttccaacagagaacaacacatgatccatcccacctccttggaaaataatactcggaatgcgggcaatcttccgtactgaaccatgtacatactaactacatctctagacaacagagcatcaaaataagctccaatgtatggaaaggacccaagaatatcaaaaatatctcacaagggttgtatcacaatgcacattgggcaactagtatgattcctaaaaaacatctgtttttaaagatgaagacaccaac

SEQ ID NO: 51144 - DNA, 453 bp, Gossypium hirsutum
  unsure (1)..(453): unsure at all n locations
  Clone ID: LIB3829-020-Q6-N6-B12
aagccccaatcaatcatgcgagagccccaaaaaaaaaaaaaaaaagggggggcaaacaaaaaaaaaaagggaaaacacccgggggggggcatatttttttaaatcagtaagcaaacattaaaaaacctgctggaaaggacaaaaagaaaccccgctgggaacccaagggggcccttttggacaaacaccagggccccaaaagagagggaaaaaaacccctttggggggggaactaaacccgaggcaaggcctggctaaaccaaaaccaagggaaatgcaacggataacaacccctttgaaaaaaaagcgtggccgagtggaaggaaacccattaagggggcaatggcccccatttggggggaaaaattcgcccaaattcccaaaaacagttgatggcaacggaaccccccgggggggccccgaggccggaaacncaaccgggagacaccggga

SEQ ID NO: 51145 - DNA, 219 bp, Gossypium hirsutum
  unsure (1)..(219): unsure at all n locations
  Clone ID: LIB3829-020-Q6-N6-B8
aagttcattggtattatttaagagtatctaagcgcagtaacataatcatatagtttacaagggtcactaaaccttccatcttatggcagataatttaactacactacaagaaaaccttttacgctgngaatcgtngaaccatctttgnnnatgcatacttacnntgttttctggnacnncaaatatataataaagtatttgagttggataagtcggttt

SEQ ID NO: 51146 - DNA, 545 bp, Gossypium hirsutum
  Clone ID: LIB3829-020-Q6-N6-D11
aacgccttggttttcataacattaactactctgtttcattcagacaatgaaacattaacatcgtacaaacagaatacttgcattccttcttcctcttctacttccggctgaacaaacttctaagcctccctctctgtaacctctcgaggagcttcttcgcacccgggatttccatctccgacagcttcttcagataccctatcgccccatatgagatcataagcttcttgcatttcttacttgtcgacagcaatgcaaggcaggaaactgcgtacttctttgcggtattttgtggacttggatcgagcagctggactagatatggcacacttttatcgtcctttttgacttctcggcgatttggagatatggttagcaagctcgaaagcgcttgagaagccgtttctctagcattattcgatttagcctcgagcattttaataaggagagtgatgcacccggcttcacccaccagctttttcgtttcgattgagttgcaaacacgacagatggccgccgcagcggctgtttgtgcgcccagcgat

SEQ ID NO: 51147 - DNA, 365 bp, Gossypium hirsutum
  Clone ID: LIB3829-020-Q6-N6-D5
gcatgctctacgcttgatatatatttctaaaccaaaagacaaaagcgcagttagttcaatcaaatattcagcggctcttggagtacaactctccagtattctacaacatgattccaatctaatcctacaacaaaaacaagtcaggtgtacagttcccgagcgttttttttaccgtgaaaatttagtttgcttcaaacgcaagacatgaacgggacatggtcgtataggtttaaactaaaccacaaatcaagtaaaaggtgtttctcctcccccttggtccaaagacgaataatattcacaccaatcccttctattcaagttcacaacatttcacaggaccagagagaataaactattgcctggcc

SEQ ID NO: 51148 - DNA, 522 bp, Gossypium hirsutum
  Clone ID: LIB3829-020-Q6-N6-E3
attaataaaaaagggctccggacaaagggttcattaggcaggctaatcaccttacgtaacaacagaccctggccatgattgaaattatgtcacctgtatgccacatacaacaactgctttgtacaaaaggatgggttgttttacaaaggaacccatagtgcccccggctaaggggttcccatcctgaatctttttgctgcccttactttatagaaggaaggaagggccatggctattcttgcctttacccgggcctgtttatcggacccaagtaactaataaaaaaaactaagctcctctggataaacaagaacctaactattctgattaatgaatatgaaccaaaggttaccagatgaccttacagctagcacaatcaaatgtggacccaactctaaatcacccagataacaaatattccttaaacatatcaggccctattacctggtcgattccaactctctgggaaaagaaaccatgggcacctaataaccggaacttccctgaattctttccaactaa

SEQ ID NO: 51149 - DNA, 594 bp, Gossypium hirsutum
  Clone ID: LIB3829-020-Q6-N6-E8
tcgccttttaacagccaagtctctgagatctttgtcttttagcccctccgctccatctctaaattccagtctttttgtctgggaaacagataataacttgtctgacattggctcagcagatcgaccaattgatacgattttcaaatttcataaagccatcagcaaagacttggaatatctggatgttgaatctggaaagcttggcgattgtgatgagacattccttaggcagtttattggaagatttcatctattatggggtttatacagagctcatagtaatgccgaggatgatattgttttcccagcattggagtctaaagagacacttcataacgtcagtcactcatatacactagatcataagcaggaggaaaaattgtttgaagacattaacagtgttctttctgaactctcacaccttcatgaaagttttaccataggtcatatgccaactgatactggcactgaactttctggtgcctacaatggtgattgtctgagaaaaataatgagctggctactaagcttcaggggatgtgcaaatcaatcagagttacccctggatcatcatatttaccgagaggaacttga

SEQ ID NO: 51150 - DNA, 261 bp, Gossypium hirsutum
  Clone ID: LIB3829-020-Q6-N6-F1
gcaatgaaacaaacatctctttctgcgtattttcatagaaaagaaatttaaacttcaagcatctacctcatgctatttttttccaaatattggatatacatcaatgcaaccttatgaaatgaatttgcactataatgaattctaacaacgcattaaaattttaccacaagaaagacaaatgctaaaagaccaaacaaatctaatcatcggcatgcatgtccatacagtcattagagccgggggaattggcttccctatttt

SEQ ID NO: 51151 - DNA, 338 bp, Gossypium hirsutum
  Clone ID: LIB3829-020-Q6-N6-F11
acataatagttcaaaccattgttgtttttttcatcatcaactatgacaaattgacaataatctatcttaatttcttcaaagtcagataccccaaacccttttctctccatgaattacatatatatataaattaaaaccctgcttaatttccttagagatcatcacaatattaatacatagaaacacaacaaataatttttttcaagagtagaaaatatctaccattaatttttctaagaactcttgtttttagtcacccattccttcattcaaaaagttagagcttgttcttcagtgaaaaccctttatctatgactcgattgctccttgttgaaacc

SEQ ID NO: 51152 - DNA, 451 bp, Gossypium hirsutum
  Clone ID: LIB3829-020-Q6-N6-F8
aataaaaaattttttgttacatttttttgttaaactttttagtaaaaacaaaaagggggttcccaaaacccctaaaaaggaaaaccctcaagaggggggggcgagccgccttttaagggcctacaaaaggggcccaaaacaaccaaaaaccaaggcccgcccaaaaagggacccttacaagaaaaacctggaaaagcctcaggccaaaaatcaaaatttcccggaagccccaaaaagggacccaagcctggaaaaaattggttttaacaacattgcccccccctcccaaaccaaattatctaccaaggctggaaaaccccggggaaaggtgcatttttctgaacaagatggcgggccaaaaaaaatttggtgggggaaacaaacccggcccggaaccggggggcaggaaataaaggaaaaaagtccttttcaaagcccggcacaaatggtt

SEQ ID NO: 51153 - DNA, 510 bp, Gossypium hirsutum
  Clone ID: LIB3829-020-Q6-N6-F9
atattgaatatggtgatgatcaatatttaacttatttgtgataaatcatatgtttgatggcgacgtaatacagacacactgcccaaattggtgctatgatatttgagacgtacacaattaccatagccatcggaatctattgaggtagacataagtatgccttggataagatgaaaattgaaaaagatgggagcaccttgttgaataaaacgctacatgtgttgcaacgcataatacttgtacttcaagcggtcgattctaggctaggttgacacctgagaaaattcacattttgcactatgaattcatgctaactgaatccttgttgggacattaataacatttgcttataatgccatagtgagatgaaaccactgaagattaaccgcagtgacagaaatatcttttagaggaaaataatcgaccacctttaataaatactccagaggttacctgtgaccatatgacaggactctgttggcaataccttttgaagtatccagagtagat

SEQ ID NO: 51154 - DNA, 540 bp, Gossypium hirsutum
  unsure (1)..(540): unsure at all n locations
  Clone ID: LIB3829-020-Q6-N6-H10
aagatgaatttacaaagggtaatgggtgacaaataattacaattaaaagaaaaataatttaaatgatttgatttctgattatgcccaattagattattctgctggattttaaatttacggtaaaattatagttttgctctctataccatacacgattttgagaatcaatttttgtaatttaatttaacataatttgatattcttgctattattcatgttatgccttaatccatatcattaatatacggagtttttatttaggaaaaaaaaatctaaaatcatgaggctgagcaattctttttaaaatgataaattagtaaaaaataataataataactataatttcaccatttaaatgacataaggaattttgagtttcgggttttcaaaaataatttggcttaaggcataacatttataatagtaggaagattaaattatgccaaattaaaatacaagtagtaaaccccaaagttgaatatagtncagggactaaaaccacatttaaccaaaattaccttttgcctttctaagatgatt

SEQ ID NO: 51155 - DNA, 532 bp, Gossypium hirsutum
  Clone ID: LIB3829-020-Q6-N6-H8
gacctgcacatccttatcttcactaacatttaatggtcaataacaggtacaagaaaactggatcatttatgcttctcatcaacacctggcaaaacagaagatactactattgacaagtttttggtttttctgatgacctcgaacgatttacactcagttaactctggccaatgatgtatcttcttgatgtcctccattcaaacctattggagtttcccaaaaacaccccaagattggacattgaatgtcttggttggttggttttacaaaaaaagagatgttttgttcctttttttttttcaatagttactgggccagttcatctgtgcatgttgaggctgccgataaacaccagcggcagatccccccatgttaacagctccggccatagtttgagcttgttgtaaaagaggatgaacggctgccgctgttgctgcttgtggatgatatataccagcaaaggagccaggaacaacctgcgttggagcaaaagttacattctgaccttgaggggcaaggttatagaatgaac

SEQ ID NO: 51156 - DNA, 508 bp, Gossypium hirsutum
  Clone ID: LIB3829-021-Q6-N6-B3
atcttcaaatttttttttttttaaaataaaacgacatatcaattgaaatcatcttgacaccaggcctttacaaacagacaaagtaagaactgtttccttaaatgacccgggccccaaaccatgcaaagctcatactacctgtactgccccccttacttccaccccaaaacctgcagggttttcctccatcctctgggtaacaccaaactccataaaccaaggtactcctcttaaaactgcttaaccaaggagcggcttttgttggacaccccgctcaaaggatctaactcaaaaacagcttcatcaaacgcttttttcacacggggaaacgccctttcaagaaaggacttattttcctaagacaaaacctagatcttcaaggccaaacccaaccggttttaataccaaagacggaacttagctcccactgtaaatggtgacaactgatttgctttcaaagccagatcagcggcctttttcctgtcatcacccattttaaacccctcca

SEQ ID NO: 51157 - DNA, 277 bp, Gossypium hirsutum
  unsure (1)..(277): unsure at all n locations
  Clone ID: LIB3829-021-Q6-N6-D1
agatatgaaattacaatccaaatttatttaataagaaaatcaataacatgtattaaaaaaatattaattaaatttaaacaaatgataatatttttttttagttgtggaatattgntttttagtctgctaccctagcacgtctctgtctgcctctctggcaagcctaggtttttttatgttttctgggttcgactgccgacatctccttagccttgaatagggttatttttcacatcttacgaccatggaatctgaattttgtcacctttgcccaccc

SEQ ID NO: 51158 - DNA, 534 bp, Gossypium hirsutum
  Clone ID: LIB3829-021-Q6-N6-D6
aagagtaatgtcttctgaattttaccacacgaaatgaaagtgtttgatggtatgcgccctaaattacattataaccattgaataagtcattggctgatagcagaggagctgaagatcattacacctaacagtagctcaatatcattggattggagattatccctgctgggaattgggagatctagataatacagtttcagatgcatcattcctgcaagacaatggatcttggacctgcaatgttgtctgtcgccttggttccatcatggattcctctttgctcaattcactctgtgtctgaacctgagatgctgtgatctgtccttcttgctgtcttttttcttgttcttactgctgctgcacgtaaggatggagatttggtggtggaaactgctgctgatatgagccttgcggttgtagttgttgctgctgctgctgcagatactggtgctgttgaataaattgttgttgctgcagcagctgtggctgctgatagggtaattgttgctgttgaagaattgctgttgcacttgt

SEQ ID NO: 51159 - DNA, 543 bp, Gossypium hirsutum
  Clone ID: LIB3829-021-Q6-N6-D7
cacaataccaaatgatacttatcttctttgtggcaaagcaataatgatatcaaagttgtacaaatataaacatcctcttatttaggataaaccaagatgctgtcataacatgttatacataatatgcttctataaatctgctaaagatatccaatcattcattagctacagttaaatcccaagcaaatccatttgaaccatttcccaataggtagatatgcaaaattactcatgctaggtatcagcatcgtcaatggttctcaattccatcaaagaattgtatttgtactcaaagggcaaaaaaatatggcaacgtcttcacgcattatatcagttttacttgtgtttagaacagttttcagctcgtgtaagtgcatctgtaagaacatctattgtccaattcttcatgtcctccatatgcagcggttctccagttcttatttttgcatgtggacgagcaagcttggattcaaaaggagttcttggtctgacttctctaatttcttcccactcttcacgagtaagcatccgaatggtgccttg

SEQ ID NO: 51160 - DNA, 456 bp, Gossypium hirsutum
  Clone ID: LIB3829-021-Q6-N6-E12
caatgagtaattcgactgcaaaatatatgttgcaactctcgttgaataggtgctcgcaatactcgtttctcaaaggaccagaacctttatacccacacatcttcaaaaaaccatcgcctctttgcagttgatgaaagcgtcccaacatgcatgtccggaaagcccaccaagctctattctttatttacatggatcgggtactgtgaagagcttttcttgtccgtgatgtgaaacgtgagatttactctaagagcctgtgcctcagagcagtgcataccggatggagattttttaaaaaaaccccttccacgatatgggtctggcctgtctacattgcaaccctaaacgctgtcatatgaatgggttaatttgaacagctgaacctatggctgtcggcaataacaactctaagaactgcgcacagccctgactatttaattgctgtcgttcccacca

SEQ ID NO: 51161 - DNA, 521 bp, Gossypium hirsutum
  Clone ID: LIB3829-021-Q6-N6-E6
gctcctactgttaaaattcatctgtatatatcatataaaattacaattactaatgtatttatacaactcatatataactgattcataacaaaagaaactaactactctaactgcatcaatagcctacaactctttctacactccccctcaagttggaggtataaaaatactttctaaccccaacttggaaatcagatgactatgctgttgtaaccccaaggctttcgtcataacatcaaccaattgttctgctgttgatacatattcagtagctataagccctccttgtattttttctcttacaaaatgacaatcaatctctatgtgcttagtcctctcatgatacacagggtttgctgctatttgaagggctgctttgttgtcacaaaacaatctcactggttcagttacacctatatccagttctctaaacaaacctgaaatccaacccagttctgatgttacagctgccatacttcggtattctgcttcagcagaagacttagatacagtacactgtt

SEQ ID NO: 51162 - DNA, 544 bp, Gossypium hirsutum
  Clone ID: LIB3829-021-Q6-N6-G8
ctggtaatggatcctaatcaatattccatgtaatgttttagttatttttcatagtagagcaggtagacccccccaacaaagaacattgttctgtttttcttcggtgaaacctataggaaatcagatatatttgaaaacccaatgtacatttttataaatatgaacacttagtttaaaataataatggcaaaatgattgaatgctagtttatctgaagctctcaatatgtactatgcattattgattactataaacttatatacagatgttcaaaagaaacagagtcccacctcaaatgataagatgcatttacccgtagtaccaccgtctagatcgtaatcggaatagcaatggtcttctcaagaactttcacggctcttctttgtgtattatgcagtaccaaaatgtataacttaatactccttaaagaacttatggcagtactacaccagatgtgagaaagtgaaatcgtcgcttcggcattggtttttattctatatttatcgcagcagccatgtttcttagcttctgagatatttctgaa

SEQ ID NO: 51163 - DNA, 523 bp, Gossypium hirsutum
  Clone ID: LIB3829-021-Q6-N6-H12
aataacttattaaattatttaaaaataaaaaattttaagagaagttggcttacaagttacaagcaaccccaagacaaggaaatggcaaaagcaaagatgaaaatggagaatagcaaaaagaagagaaagttgaaagatttgtcattcatctttttatgtgttccgatggtcacaaattttagcattttattcacaagctaatttcgtgtcaaagctgctgaggcagattgcaaaagcctgaaatgcagataggggatatcgataatccatggtaaacatatctttgccaaccttcccaaactgtaggattaccttatccatatcgggtggggcagggccactggatgctggttgcgtggcagcgatcaactgaaagttcttaacggacgcaaccgttacccggccgcggaaattcaggcaccaacactgtaattgctcatgccatcgaggggccttgtttttgaggatcaagggtctcatattcccatctccatcatctttatgagacacaccaacatctgaa

SEQ ID NO: 51164 - DNA, 544 bp, Gossypium hirsutum
  Clone ID: LIB3829-021-Q6-N6-H6
atagattgaagactttaaaacatggtatttgataaagtagcatgcgttcaaaatcaattagtgcaaactttatctgcatgactaggttagatgattgttgggtggtaaagcctaagcgtaataaaaatgcccatggtctagggatggcggatgacattgacctctggcatgtggcgataattctgcaacactgctttggatacagtgaagcaatcacgctttttacaattaaattcatagagtgatgtcccagaattgaaatcattaaatggcatctttatgaggtcctactttttaaaacatcgccttggcaacctggtgagccaatacgactttttcgtttcaaaaccatttttgtcattttcacgtaaaattgcatgctcgcttattaacttgaaccatttattatcacctagaactttacgacaacagaagatgaacaaggcccacagccactttagattattgtgaataggtgtgcctcttatgactatacgatgagcacttggtatatcaagcaaactttttgctctttgagtggtat

SEQ ID NO: 51165 - DNA, 486 bp, Gossypium hirsutum
  Clone ID: LIB3829-021-Q6-N6-H9
agtgtacctactgcacacattatcttgcatattaatttcctcgaaataaggacaagaacacttcacacgtcatggctgggtgtaaccttccagacggattaacagacatgaaatgcctactctactataaacaagaggcaacatcgcaccctatatgccaatagaaccatagaccgaaacaaacaacaactctgcataaatattggtatttacacccgatacaaaaagatcccgtactcgaatgcgacccttgatgggaacgcaacacctggccctaaagaatacactactaagacgagtgcctggagatagctcatgcccccttggtagaaatgctaaagaacttagccgccatgtttatagacactggcctgagattttaccataggaaacatcaaacaatggttgcatttaatgctgcgctgtagcggtaatatggagtgcctaaaaccaacgttggccctgtgcggaaaacaccgaccggaa

SEQ ID NO: 51166 - DNA, 543 bp, Gossypium hirsutum
  Clone ID: LIB3829-022-Q6-N6-A5
actaaaacaccaagtataataataatattaataaatgaatatttacaaaggtaccctcgcaccctttccaatttttttctacacattttaatcaagtcttattcaaaataaacgggactaacagttacattgactcgtccgagacgatgacggcgtcagcatcccaccaagtttcaacctcagaatccgttaggttccttaacggcgaactcgccttcctcatatcacccaccgttaacattcccttcacgtcacccctgatataaactttctcgacgccgtcagtattgaccgctgagattttctccatgggtttttcggggctccattctgttagaatcaccggctgccggcaatcaaggcgcgtgtcccatgcactgacggcgactcgtcgagttgacgaatcaccgccggtggagactacaactgctggcgacgacgacgatgctgaaaccgcctgaaagtcgctcttctccccaaatattgacttgatttttgtttctttgttgatgtcgtaaacatttaaaacgttgtcgctttcat

SEQ ID NO: 51167 - DNA, 419 bp, Gossypium hirsutum
  Clone ID: LIB3829-022-Q6-N6-C10
ggggaacagaaaaggttgtttaaaaattcaggcaaacattttgggggtaaattaaacagggccagaacctaggggggagggtacccacccgggtaaaattttcatttttggcagaaaggggccttttacaaaaattaaggggggggggcataaaaacatttgagggcctaaaccaataaagcctttgaaaccatggggggattggcaacacttggcggggtttgcctttgcccgcccacggggttttaaacagccagccctgaacctccaaagaaaaaatactgactccttaacccctttttaaggggccttggcttaatgggatcggggttttaaaaaaaaaggctgggattggaacaagaagggccaattatatcaccttcaaggaaaatccctttttggtaaaccattgagccgga

SEQ ID NO: 51168 - DNA, 558 bp, Gossypium hirsutum
  Clone ID: LIB3829-022-Q6-N6-D1
gaaatgaaagtgccatattttttttcctgaacacaaagttccaacagatgtaaacaataccagtagtagatctacaccaataattaaaccctgaaattaacccccccccccaaaaaaaagattgaaaatgtaaagcttttcacctaccactccctctattgatcatctccttgtacctaatgatggaatcaagcttttgcagtttcagctggtgcttgaacttgttgatgaaatcatcagctttggcatccacctcatcgtcttcttcctccgtagctttctctttcccttctctcacggtggccggccgtcgattttccacgatatctccttcctcgaaatgttgaaaagcagactttacacttgcagatttcttcatcttcctcggaagcttagttggtacctcaccagatgctggtttagtatcagatttggtcctcgcaacatgatttccctccttcagttgactgtatacttcatcaagcgtttttccttcaccttgggttccctccctttcatcttgtttttcaggctcttgcaccttttcatcatgtccct

SEQ ID NO: 51169 - DNA, 468 bp, Gossypium hirsutum
  Clone ID: LIB3829-022-Q6-N6-D2
aagcgaaaatttaaaactttttttaaagaaaaatatgatcaacaatgggagccaaaatatgaaagggagaaatgaaaattctgaaaaggggacaaaatgagaatgactaactgttttctacttatctatcaggacaaccttatgaacagactaaaccagggggggtattacccaaaattcactaaagaaatccgagccaagttgaaaaaaaaagattgaccttttgaaaacaacttacaagaaactgtcaagctgggattccaattcttctattgaaaccaagttgattgcacctttctctaccggagaaaacactggttttaaaagagaaagaaaccggatatgggcttccacaataattgggttgagaggtttgaaaagaattgggcttgatggtgggtacggaaaaaaaagttccacctgtgctatcacacccgggaagtggctgctaaaaaaaagaaaggaccc

SEQ ID NO: 51170 - DNA, 524 bp, Gossypium hirsutum
  Clone ID: LIB3829-022-Q6-N6-D6
acaatgaaaggtgctctatttatatttcagaacaacagtgtttctatatccagcttattaacttacaatggtaaaatactggttcaatgcgagctagaaatgaacagtctaaatggtcgaatgatcgtatcctgttacatttcagaggataggtcatcctagaaatcgcaattcataaaccatgactgaattctgcagagcacttatctgacttgcaatggatcgaaacctaaattataactatcctactggtcctgcatataagtctctcatcattactctgttatgccttcctaaaaaaatatcgagccccttcagcaacaaattctacatcgttcatagtatatgtgtagaacggcacatgccatgaaacatgggccacccattttccgacaaaaccattaggattcaatgaatcagaaaaaccactagctgctttcatgagtgagattgacaacacaaaaaagcttgttaaggacgggttccctgtttatagggttccaccatcattaaattcttgccgc

SEQ ID NO: 51171 - DNA, 294 bp, Gossypium hirsutum
  Clone ID: LIB3829-022-Q6-N6-D9
caattggggggcagctggcgctcctgaagaggataatgacatccactgcgcacagcagtgatattagacttaagaatgcctcggaggtacgcaagtgagcctgtagcacacactatgctttggccctcccacgggtaaggtcctaggacgccaaccattttttgcgaatcaaagggctgcggtgaaaatatgtctaaatccatattgcctgcgcagaaatggagatgtttaaaggtcaccaggatcatattacttgccaggatgctgaacgtcttaggggacaaagaccatgcc

SEQ ID NO: 51172 - DNA, 535 bp, Gossypium hirsutum
  Clone ID: LIB3829-022-Q6-N6-E4
aatagagaaaattattaacttgatatttagattaattaattatacaagagcttcaacttggaagttggaactgtatttctatcaacactattatatacagaagaaggtgctcaattccacatcctagccattttatactgtaaaacttcatttaccaatggctcatctttaatcaatgtatgcattatagatccaatgtttcatttcaattccatctcttggcattcttctgccctttcgacttctgtttcgcagcttgaaacgcctgccgtttttgtttcttctgagcttctttctcagcctttgacatcttggatttggttttcacttttggagctttctcatcaagctccgcctcacgctcgagctccttttcccttgcctcaagggtcttctccagaaaataattgtaatcgcctacatagtcctgcaaatgcccggcttttacttccactactctggtcacaatttgctttataaagaatcgggcatgagaaacagtaatgactgtgccactgtactctctaattgcctc

SEQ ID NO: 51173 - DNA, 420 bp, Gossypium hirsutum
  Clone ID: LIB3829-022-Q6-N6-F10
aaaaacggggatacccataaaaaaaaggttttaaaaagcttttaggggggaaggccaaaagtttagtaaaaacctttaggggaaaggggggttttgcaaaaaacccccttttaagaaaaacctaaaaaaaaaaaccgggggttttcacaaaaccgggaaacccctgggcctttttttaggggacttttttccttttccaaagggagggggggttttttgtttaaaaccaaagggggggggaccccaaggggggaattaagggttattttttgggggaaaaaactagaaaatttgtaagggccaccggcaccggggggtccccccggaaattcggggcggggcccggggggggaaccaattttccctaaaggggggcgattaaaaggtgggggaaaaaaggggaaaaggggttcccggggg

SEQ ID NO: 51174 - DNA, 540 bp, Gossypium hirsutum
  Clone ID: LIB3829-022-Q6-N6-F2
gttaaatgctcttttattggttcctaaactacattatcacattcttgatttccttatataaaccaaaatacgatatacctacaacatcaactactaacctaatactatactgcaaatttcccaacaaaacaaatactattaagagaattctcaactaaaatttccagggttcaatagctccactcctggggaagatttaggcctctttctgctctataatttctccttgtttggttcaatagtatatttcttctggcaaccaaagcatcatagtttggggcaaagctagctttgagatgtggctgaacatgactgctggaatcagcaaaattcagatttaaagcttgaacaaccttcgctgggactagcactgttgagcaacctgatttcttctgagggcgcaggggtgttgtttggatatgtacgaggtaagaaaacaccagttccagcactctctcttttaacactttgagatccaccaagaaacatagctctggtgcaagtaccagaggaccttcccccaacagcattattccttgc

SEQ ID NO: 51175 - DNA, 504 bp, Gossypium hirsutum
  Clone ID: LIB3829-022-Q6-N6-F8
ggaggaagttaattggggaattcagataaatgaaaaggccagccattttcttcttttttgaaagctggtacaacaatttagaagtgaaaccaagtgattttaaacttggtcctctttgtcacaacatgggtgatgtaataggttcaaaacacaacaacaaaaagcttgagattgcaatgaaaagaggtaaaaatggagttgataacaatatgtcgcttcccgacatgtcatcaaaatagtcgtcgtcttcgtcatcacccaagtcaaaaccgcttccaccgccgttggctccgctgctccacttccccaaattgttgtccctgccaccaactccaaaaacaccggagtgcatggtgagttggtcaatgaggacagctgatttaggctcaacactataagctttttcatacttaaactcaacaccttcaccggaggcaacaaagtaagctccattcaccattacatcaccttctgatctccaattccaccctttccaatctcctt

SEQ ID NO: 51176 - DNA, 448 bp, Gossypium hirsutum
  Clone ID: LIB3829-023-Q6-N6-A3
gtgcaaccaacctatcttggtactaatgatggagcgacattagctttctgaatacgatcaaggtgcttacatgttttacagcactgcgtgatcacatgccgggggctcggatcctaaaccaatcccacgtcttttaatccaaggttttcaaagtatgatgaaatctacggcccaaaagttgcgttgttacctacttcttggttaagtacggaggggctaccttttatcgtgtaaaagggaaaaaaagaagcctgacagatttctcccttacttacgattgtactttacgggggctttaacaggcccgaatagcgtgcttagagttctaaccactaacccaactagtcctagattggattaaacatttgaatgtacacattttgcgaaagagaactatgggatatccgacctttttaccggacccctggacttgcaccaatgtacgatc

SEQ ID NO: 51177 - DNA, 534 bp, Gossypium hirsutum
  Clone ID: LIB3829-023-Q6-N6-A6
caaattcgcaatgtcattttcacttatgtctacatatttcataaaacatgtcaactacaaattcttcttttacacactgacaacagaataatgcctgaagaacaaaataagatcccttgacagagttacgtgaattagattttaaaaggggaaaaaaagaacaccatagtaaacacctattcctttgcaaaattgtacagaattctttggtgaaccaaaccgctgcaaaatgaaaatccattctctttagttaataagcaaacctagaactagggctggagctttaatcgccttggctatccaaaacatttactagataatcttcccgaagcagtggagcaagcatgctctcaacggaggacctctgcttacaagtctcctcaagaatcaataaccgagcagtctcacaagccttagcaatatgaaaaccaagtgtccatctcccatcagcaggaggagtggaaaccttagattggctgcctttagctttaacaaaatttggttcgaattctcttatccgaagatgtaaccatg

SEQ ID NO: 51178 - DNA, 357 bp, Gossypium hirsutum
  Clone ID: LIB3829-023-Q6-N6-A7
aaggtataaggccttcaacaccttcataaacctaaattcaaactccacacgatcttacagacatcaaatatcaattttccatttgcatatgggataactccctactacatggacccagcaacatagaagagctaatctactcagctagcgcaatgggggcaacattgcaattacataactacccactttttttaagggtttctacaggacacatacaagcagggtggacatgttactgggtacatgtccatgttatcaaatatttcaccattttcctcaaaacataagttggcagcagggaatccatcacccaccaaattacttaagcagcaaaagctgaaactcacaacacgtttc

SEQ ID NO: 51179 - DNA, 559 bp, Gossypium hirsutum
  unsure (1)..(559): unsure at all n locations
  Clone ID: LIB3829-023-Q6-N6-C1
gttcaaagaaatgaaaactgcctgtgttgtatccaacttatgtctacataccttcnagcttgaaaactacaagttaaagagttattagaatttggaaaacaagaactagcctgcatagccaactttgcaaacctactatggagataaggacctatgtgcactcaaggcaaaggattgtttaacttcggtgcaccataacactgaacatcatctgaactaaaaatatagaggtcaatcgagtttccatcgctggttccaatggtcttccaaagtttgctcctgctctagcttccttctttttgaatccagatgattgtttctttttagagatgtatcttgttttacactagactctttcctcttctcagagccaaccgtttgttgatcaggctttttggatgctccatttactaatttagtactcatttcccctgtaactgcattaagaaaccttatgccttgagagtgtctatttgttgtcactttatctccatttcttaatgcccgtttgagtgcatccacagacagtagtttaactggcttagaggccttttccatg

SEQ ID NO: 51180 - DNA, 536 bp, Gossypium hirsutum
  Clone ID: LIB3829-023-Q6-N6-E3
caaaataaaaaagttctatccatatagtataaaataattaaaaaaatatcaaaatggtattaataacaaattattgacgaaaatggtatggggagggtgatgctgcctatggcagaggcgtgaccaccctcccacctgacatgaacaggaaaaaacagttaaaaaaagctgaaaaaagaaaaaaaaaattaaaatacaacaaaattaccttttttttttctcctttttctttcttttttttcttccttccttccttccctccctccctcttcttctccttctctttttcttttttctttccctcaccagccgactccttctccttctccttcttctcttttttcttttcttcttcccgaaatggagacagcagaaaaaaacaaggtgtgcatgcaggaaaccggtgccgcctctgccactggcaccatcggtgccgcctgtggcaggcacaccgccaggctagctttttttttttagattcagcttctttttttcagtttcagccttttttttttcaacaattttttctccttttt

SEQ ID NO: 51181 - DNA, 509 bp, Gossypium hirsutum
  Clone ID: LIB3829-023-Q6-N6-E5
acttcatgacgaagccgagctagaattgagcctaactcttaatttcaatgttatgcagatatttcttccctcatctaagcctcatttctcctttaacccgtacatagcactcaggattatgagaagataaattattaaaggaaaggagtacaaacgaatcaatgaatattgttcgtcacaaccataatgtttgatcttctgaatgtacatcatcattatcaagcgtccctgtgtgattccttgagcaacattagcccagattcatctttttcgaacaggcgttcaatcaattcattccagcttacttttgtcttgcttttccctgatgacccaacagatgattcgccagttgatttatgggagttgtctccatcctcgtgctcgtcgaaagttccataacgggaaggtaaataagcatggggtactgacagtgtaacggccctttggagtgcagctttgtgctcttcactatgttctctagccagagtttcttgccgttccattctctg

SEQ ID NO: 51182 - DNA, 530 bp, Gossypium hirsutum
  Clone ID: LIB3829-023-Q6-N6-F11
aaaggagcaactgtttttccgttacttacaaaaagctttgacatgcataacaggctcaagttaaagatctccaagctaatccccaaaactagatcttatcaagactcgaccttgcttcaaaaaagcacaacggcacaaacgtttttgttttaacatttatacagatatgcccttcaccaaaatacattataaatatccatcaccttccttcacctcttgggatgaaacctcactttcaacaggaactgcatcttaacttgagaagtgttataaacaatgtattcattatacatcagctcaaattccttcacactggatggaaccggtttgccacaaggaacaataatgtcatccttccactttacaaagtcagacttcttaggtactttctttccgagccctttggtagagtgctttccttttggtagtttttctatatacttggcctttgttagttcatagacctcccctaaagcaacttcactgagaagcatgaggcccacaggatttttcctatcagtaaagcaata

SEQ ID NO: 51183 - DNA, 549 bp, Gossypium hirsutum
  unsure (1)..(549): unsure at all n locations
  Clone ID: LIB3829-023-Q6-N6-F2
atcaactaattgaatcctacaataatttccctgggttcctccccgngaaaaaaaaaaccaatttacaagaaataaattacttgtgtaggtgccaccgccgctacgtcgaggtatattagtgcaagggtttccaccagaaggtggcaccatacccctttgaagcacttgaattataagatttttatttgaaaatcacagcaaacaggtgatcttcaacatgagggagaggccttatggcggaaacatgttggtaggcgaataacaaaataatgcagaaaaggaatgtaacagtaactttaagcgaagccatattggaaaacacaaccatccttctagtaagccgttactcttactgatttaaataagcttcccaaccatccttccgtagcttctcagcttttgtcaagacatagtcccttgtgtcttcttgatactgattcattctcgccaatagatcagcatcaccaactcccaacatccttactgccagcaatcctgcgtttgtagcgttgtttactgcaaccgttgcaacaggaacaccccttggca

SEQ ID NO: 51184 - DNA, 526 bp, Gossypium hirsutum
  Clone ID: LIB3829-023-Q6-N6-G3
atgatagcttataaactttatatgataaattattttaatgtaccatgtgctggctgccatgaaaccttaaacataagcagagaactaaaaaagggtttataaattacaacttgtagcatttagccactgcattacagccggcttaatttgacaaacataaaactaggaacattttgttgaaccccatcataaaagacacttgttaaaaacaccactcggaaaccaccgcgaaggcggaggacaaggagcatagacgatttcttctggatgttgaaatctgacaagggccttccatcttcaagaagattacgtgcgaaaatcaacctctgctggactggggggatcccttgcttgaattgggtcttggtttttacattatcaatagtgttcgcaatttcaacttccaaagtgatggtctcacctgtcaatggcttcacaaaaattttcttcccccccctaaaacaaataaccaaatggaaggtcgactcccttttaatgttgtaaactgcaagtgttctgacatcct

SEQ ID NO: 51185 - DNA, 532 bp, Gossypium hirsutum
  Clone ID: LIB3829-023-Q6-N6-G6
atgcaaatgcaaatattatttatatgctcatctacaaaatgatacacttctcttctgtcaatttatattatatattatatataaaagcccccaacaagcagcacaaatgagacaccagatcattgctgtgagatgaaaaaccaaaaggagctactggtggggaagaaaagggaaaatcattccttccaaaacaatcaaaatatacatgcatacatacatccggggaaggaggaaacttgtttaagacacatgaatttacaagacggtgttaatatgaagggctttgagcaaggaagttgccatttgcttcaccaacacttggcccccggatcgctgtccatcccttcgttcctctattagagtctgaagcttctgtggtaaatcattctccacgattaattgttttggccgtgggtggcgctcatacacagccttaattaatttaagtagattaagacgggcaatagcatcctgatgatccaaccttgcaatcagcagtggcgtcaaaccattaacagctaatgttgtgttt

SEQ ID NO: 51186 - DNA, 159 bp, Gossypium hirsutum
  Clone ID: LIB3829-023-Q6-N6-H3
aatcattccactgcagacttaacttgtattatttgaacgaacgattctcatcttacactgatattacactaagacaacatatcagcaaagcgaaaagggaacatacgacatctcagacatatttataagaattgccatcctagcaagccttattttttc

SEQ ID NO: 51187 - DNA, 568 bp, Gossypium hirsutum
  Clone ID: LIB3829-024-Q6-N6-A5
ggtaagaatatatggcatgtatatgccaaatgaaggaattaatcactcaaataagtagacaatagtacatatattttattttgaggatgaaatttatacaagtgatgtagaaatagaagctaggaagaagagatgcttgctagagaatatggaaagataaatatataaacaaaaattttacagctagagatgattataaaagaatggaaaattgcaggaactgaattattctatagtgaaaatgggggggaaagaagaaaagcttatctaaaagagcgttggatttcttcgagtgttctgcccttagtctcagggacccaaagactcacgaatagaatagtgaaagcgcttacaagcatgtaaatggtgaaggttcctccactgttccaatccaaaagcaggttggcagtcatggtaaccagccaggcagagaaccaattggaaagtgttgctatgcttcccgctagaccctttatatttactggaaggatctctgacattataacccaaggaatgggccccattcccagagagaaagttatcaccaaggtcacaactccaactaccg

SEQ ID NO: 51188 - DNA, 556 bp, Gossypium hirsutum
  Clone ID: LIB3829-024-Q6-N6-B11
aaaacaacacaaacattcatttccattgccaagtcatcaattaacctaatagtaataatatacacaagtcatttactccactttgcttgcaaactaatccttagatattccactttaaattcctcacacaagaataacagggatttgatttcacagttctcagatgtacacacaaccaaatatgtttctctcaaccattgataaatgtacaaagatcaggcaaatcaatgttacagagtcttctcaccaggcagatacgacggagatccaccctcaatttggttctttcttcgattgaagataccgctgatattaggtaaaagcacctttttcgagacagaagacttctctttttccaacattttagcctgcacaattttctctggtgggttctgcttttgaattctgtagtgctggggggatgattctgttgacatctgtgcttctatcagaatccgagatgcagctgcaactgctttcttctgttccttttcacgccacttccggagctctccctccacagccctctttgcagcttcagccatctctgccctct

SEQ ID NO: 51189 - DNA, 521 bp, Gossypium hirsutum
  Clone ID: LIB3829-024-Q6-N6-B7
caaacatatcgactgattatatattaatacaaacagtttctctaaaatggtacggtaaaagatgttgcaagtgtagctgcctaatgctttttcttctggctctttcccagtctttgacaatctatggttaaaggggagctttcgtaagtcaaaaaatatggaaaagctcgcccaagttgagatgattcgatcaaaagcataccaaatggtacattcgcttctccattaatctgatcttggtctattcgagccacttttatgactattatacataggtaaaagccatcgcgacttgtgtttccgtctgccataacaccgccaataaagcatccaaagagctactgtacaaccaatgggaatggcccatctgtccaaatcaaggatgggattgtagacaatagtttcccaagtggatacaataaaatgccacacagggttgtagtaaagagactccgatgaccagaacatcctcgtatatgtctctaagaaagaaaatagtacccaagctgccatttcaatca

SEQ ID NO: 51190 - DNA, 548 bp, Gossypium hirsutum
  Clone ID: LIB3829-024-Q6-N6-C4
aaaccataaaaatatgaatatttgcctatttggtacgtaaagttgatcaaccaacccccctttgaaatattttttgggattctctggtttcttcatttcccatgaccatgagctaggagccattttttcagcccaatcccttttacaacaataggattgcttgtttatgaacaaaaataaataaataaaaacgcctccaataaagtggtctggcctagcttgacatggtgacctgatcgattgactgaagtccttggactgcaaaataacggacatcaacatctgggtcctcactcagctctaccaagcatggacgtatcgtcttctccaccacagactgatcaactactgaaatcagagactgcaaaaccttcgcaacattaaacttaatattgggaaccctgtcttttgatgcattgacaacaactggcaacagtttagaacatgttatttcttgagcccaaaacaggaccaaggagagaaatagcacgaagaagggtcatccgatgaagatagtgtgaatcattagctatctctagtacctgtgg

SEQ ID NO: 51191 - DNA, 453 bp, Gossypium hirsutum
  Clone ID: LIB3829-024-Q6-N6-C5
ctgcaaattaaaacatataatattcccactcaaaagaggaaaataaatatatatgtgtaaccttgcattgaactggcatatcccaaattaagcctttgcaggttaaataaacttgttcttaccgttgaacaaagggtagcaatatgtatatatatatatgtatttcagtatttatatatgccacctctaaactactttatctactgccattttcatcatttgatgagagctctaatgaaccccaccaacaaactgatcgattttgaccttttttttccttcttttgctttgctatccggccaaatcatgaagcaattgggcccccatcaagttcctgtaaggaaaaagttgcccctcgttgtctaaaagtgagtactgaactggctgacaatcttctatggggtctctacggtaaaaaaagaattttgtgttgcaggcaaaaaaattaaactc

SEQ ID NO: 51192 - DNA, 542 bp, Gossypium hirsutum
  Clone ID: LIB3829-024-Q6-N6-C7
aataaaacacaaaatccagcaaattatctataatgctgttcctaatacatttccaaaattactccttgatgcacaaagtaatggagatgttgaagaagagcatgaatcctaaatgacaaaacataaagcagatgcagataatcatgaagttaatggccataaatgtgccaaagcagagttgccttaaacaaccgtgcttcacgaatccctccctgttaatgaaaattcacacgagagctggactctcaggaagctagaatctgcacaagtgattcgtcacctttggactgcaaactgtcaaacaagatcaagctgctgcctcttcaaatgcttttttcgaacatcttcaaggaatctctcaggaaactccagatattcaatacaatccttctttacaaccgctgcaagctcttctttccccacattctcaaggtttcttatcaaaattgtaaaggtcaacttatctggagaacagccacatgcctttagtctctcatatgtctccatcgccttctccatcataccaacttgcaaatatgctc

SEQ ID NO: 51193 - DNA, 473 bp, Gossypium hirsutum
  Clone ID: LIB3829-024-Q6-N6-C9
gggatatcaaaaacattttaaatacaaagctcaattggacaaaaaaacaaattttggggccgaaaaaaaaagaaagtaaatgaaaggccaaaaggggttcaagcaaaaacaaaagaggggaaaacgggtacattaaacaagggaaaaaaacgggcattggaccggccatccggactaaaaaatttccacatccggggacaaattggcaagggaccccaggcccgaaaattggaaatctcaaaacaaaaaaaaaccggggggtttttaaactaaaacataaggggccaaaaaaataaatttttttaaaaggagaaaaagggtactttcccttacctgaaactattcccggctaatttttggaggggaaaaaccgggacaaaaaccttgaaccggctgagttcctggaaaaaacttttgaaaaacaaaataggggagggcagggactacatcggctaaaagggggcgcaaattcg

SEQ ID NO: 51194 - DNA, 375 bp, Gossypium hirsutum
  Clone ID: LIB3829-024-Q6-N6-D2
gggggaaaaaggcaaatccccttcaaaggaaaaacaaacccaggggcccccgggaaaaaaaaaaaaaaaaatttgaaagggccggaaaagggcccaaaacggcccgaaaaacgggaaaacccaaattgggggggcccctagggggtaaaccccaacaggggaaccaaaaccagggggaaaaggggccccctttggaaagaaaaccccttggaaaacaccctattgaggaccaaggggaacggttcccccttaagggaccttttaaaaaaaaaaaacccaacgggggggaagcggggaaaaaccggtccaaaagggcgcccaaaagaatttgcccccagccaaaagggttaaaaaaccaaccccccacccataaaa

SEQ ID NO: 51195 - DNA, 484 bp, Gossypium hirsutum
  Clone ID: LIB3829-024-Q6-N6-E10
gagagagaagactcagatgcccttaatatttatctgacatatcaggaatgacacactcaaaaaaaaaacatatacatatacgtatatatatacaagtaataatgcacaaaaaatcaaacaaacttttgaacaacaaaacaatcgaacaaatcaaaaggcttttcagttttgttcaatgcactgagttaagcacccaactggaaataatcttttgcttttcctcctgagacccatacagaccctaagcaaaattatttaaaaaaccctcgggatactgataattaacagtaaacatttaaagacgattttaacataaaaaagaaaaaccaataacacgacatgaaacacaaacccccgggttaccgttagggggggaataaatcatccaggtgtaggaaagcttacctagctagggactaaaaacagctttgggccaccctaaattaaaacaggcagctagctcgcctacttcttttatcgaaat

SEQ ID NO: 51196 - DNA, 547 bp, Gossypium hirsutum
  Clone ID: LIB3829-024-Q6-N6-E11
gaaacaaaatttatttttattttcagattcagcaaaagtgtattaaagaacctcagactgcatcaattacaatcctaaaatcaagttctgcccctatgctcataaagcccaaaggcttacaaataaaaattgaaaaaaaaaaaaaatggccccagttctggtgttagaattcacaaccctgaaaggccaaaatcaatctaataactagtttccataatgaacatagatgtttgtaggataagactatagatagcagtaagaaagatcaattagagtaggagccgaagttaaatcagattagcgaacatgctacattctcctttgacaacatgaaatcacatgtcgaatatatggaagcagcagctgccctgacagccaattccctgtcaaagcggtccccactccctgatctgatattatttgccgatgctccttgttgcggtaaactgtaaagcacattccagtgcatatgttgcaagccctggtcacaatgcagttgcatcccttttatttggttggaccagatttcaagctgtttctcttcttc

SEQ ID NO: 51197 - DNA, 553 bp, Gossypium hirsutum
  Clone ID: LIB3829-024-Q6-N6-E2
atccaaaatgcagcatcttatttcgagtgcctgtagtctcgtatggtctgtcaagtctgttaaaaaaagttcaaaacagatgctaatatgctttacaattacagtatcgatcgcaacaaaataaatactactagctactgtacatggatctgacaggggatttcagctccagcctgttggataagacttatccaaagcttcccgtgtcatttaaaaaggagatatctatcatcaaaggaaacaaaaggatgaaaagaataaaataaactaaggctatgccaagtaattgtatatttgtgggttgttcttgtcccgctccaggtactccctgtcaatgagagattcgatccttttcttcaaatcagccggttttatgggaaacttgagctgttggaagagttcagttatcagaagagtgtgactcaacaccttcctggtcttcattatccgaacaatagcagcatcaacctgatattgacggtcttgaaatactctttcagtagtgcttgtgttctcctccactgtctctttcatctggatagcatttaccttt

SEQ ID NO: 51198 - DNA, 507 bp, Gossypium hirsutum
  Clone ID: LIB3829-024-Q6-N6-E6
gctgcataacatacatcccacaagataagagacccaaaatactgcactcgactttcatatttggggacatcacgggctcatgctttctagaaccaagatccgcccctatccttagatgggaattagcgtcccacacaaattcagtgacctaaccagaatccgacatgttgccttgcacattggaatcaaactacccgttggtctatcgctttgactaacgctgcaggccaccgagatgatataacccaatctgaaattactcgcaaaacaaacctgataactatcctgagggagcacaatttgttttttgtgactggacaacaacccttaacttctgataaacatcagagcaaacaccgcaaaatagacctacataccccggaatatgttatgctgcccgattttaaggcttaccaaagatttttctctcacttgaacgcaatgcttacacgcgagctaccacttcctcttccaacctatatttcaagctctgaaccacaaactgcc

SEQ ID NO: 51199 - DNA, 554 bp, Gossypium hirsutum
  Clone ID: LIB3829-024-Q6-N6-F10
gaaataatcgtaggcgaatggcgtcgtagatttccataaaattagctacatgaatatttggatattcgtcttacaaaccatcgaactgaacaaactgttgtaccatctgaatagtgttcagcttcaattcaaaattatttgcaacaatggtgggtctcacaatactcgatttagccccagtcagagtaagcttggcataatcgtaatagtacgagaaacagaagttgcagtaactgttctttcaatcttacgatcgtaaatcaatgatctcgacgattcttctaatcagaaacgaaaggaatctgagagatcagcctgtcgaggttagtgtaagcaggcctctcaatatcgagagaccttcgacaaatatcatagatagcttcattatcaaggagaacagcaacatcagtatgctctaacagagaatgggttgatcaaacactattgtaaggctctacaacaaatgtggaaaactgtggagaagggtaaacagtgaaacccaattttgatttcttaccataatccactgaaagcgtttcaagaagcagtgatcc

SEQ ID NO: 51200 - DNA, 553 bp, Gossypium hirsutum
  Clone ID: LIB3829-024-Q6-N6-F11
aaaaagtgatacactagagcataatttgttgattcatacactcctatgagatcagcatctggctctcttctttcatagtgaattgcggtagtattttaccctaaaaaacaagaatatgaatgggtgtagggaatggcaaaatatgtacaaatatatgtaaggaaacccgacatctggtcatcaaaggattgcgcctgataatcctcaaactttgaagagctaaactaaagctaaactctaaaaagttgggaagaaactaaagaaaagaaaaggccctatgtgacgcctatttgtcaagaacctggcaatgcctccctaaatccaatgctcaaacccttaccctcacgacccctcttaccaacttcaggattccctttctgcatcatcgctacaaattcgttgtaatctatccggccgtcattgtcctgatcgacttcacgcatcatttcatccatgcggatatccttgatgccaaactcttgacaagctttttgaagctcatctagagtgatgtaaccactgccgtctctgtcgaaatacgagaaggcagcca

SEQ ID NO: 51201 - DNA, 519 bp, Gossypium hirsutum
  unsure (1)..(519): unsure at all n locations
  Clone ID: LIB3829-024-Q6-N6-F3
aagacagaatgagattcgcatataacattangaaacctcgagacatgtacattcattagcacatcaccacatcaagttaaaacttgcgggtagcttagcactaagccaatgctcatcacatttaatttatatacccatataccataaacacgctgtacattcaaatttcctcatactcatcatgcttcttaatgttctcaccccaagcagcaactctcttcttccggcagcagaggagtcctgcaaagagggcaagtaactttcaaataattcaaccatttttccaagcacaccttgtgaaagagatggccgcaagacaatcggttaatctccgatttaggctcaaactcagacaggcagaccggacagtcattctcggctcgcttgcaactgcataaagtgtcaaattgaattgccggcgtcctactccggaactcctcaatgtaaaattcagatgtactgaactggaaatcaaatgattcattttcgatggaatctggggatggtgatagcgacgag

SEQ ID NO: 51202 - DNA, 524 bp, Gossypium hirsutum
  Clone ID: LIB3829-024-Q6-N6-F6
aaaacaaaacaaaacaaagtttcttcactacaagcacaggtaataaataaggaatcccgcaattccaaattttccgtacagcaaaagaagaaaaagagggccatgcacaagcccaacacttttccaaactctttgtatctttttactgactacaattgcactattccttcaagacaataaacacagccaagtcaaccatatcaatcatcaactcagcaacactgtccgcatcccatcttttacaggccagttgtgccacgatggggtattatatatttcaaaggtgaaaacaattcttggagttttctttcaaaaaaagtcatctcatgagagaaaagtaactttttgtcttcagtccaccctagagtaatcaatgtggaatgatttcaagaccttactcacagaacccccaatgctcagtcgtattaacgtttcttggaaataagttgagtttgcatatcgaaaagaaaatctagctctccctccaaacatttctcctataaacaccacaacacagaattaca

SEQ ID NO: 51203 - DNA, 546 bp, Gossypium hirsutum
  Clone ID: LIB3829-024-Q6-N6-G11
gtaaggacataaataatagatagctatattgcattgccaagaagtactgtttaccctaaaagctgcagttcactaaaagatactataagttaataggaaattaccaacaagtggtggtgaggtatgttatgaaggggcaccatttgttttttgtgactgagtgacactccttaacttttcataagcttcagagcaggcgtgagaatagtccgacaatgcgcggaatatctcaggcaaccggattttaagacttccaatagatttctctcgcacttgaatgcagtgctttttgagagcttcggcttcctcttccaacctctttttcaagctctcgaccacaagctgcctctcggagacaggatcctttgcattcgtgtcttcacctgcatcattttcatccaatgcagatcttcgttgcttgtacttgtgataccattcctcgaatgcctggctcttgcgcaagaattccttcctagtttcctcgcatttttcttttagcttcatctcttcgtcttgatggatgattattgtttttatcactgcagc

SEQ ID NO: 51204 - DNA, 539 bp, Gossypium hirsutum
  Clone ID: LIB3829-024-Q6-N6-G2
ggatagctaataataaccataaaatttttattactttcaactcataaggacattaattttaaacttgcatccataaccttaaatcactaacatgaacacagtatggagatgtgaaaactacgatgatccaactttcttattgaacattgccgtagaaatagaatggtctagtattgcataataggcctacattaaaagctacaaagtattatgaatatatatatcctgtgacacgtcatggaaatttgacgaagttatcccatccagttccttggggaagaacctactgatgttgacattatgtataaactgacgatcgagggctgatttctactggtgaagtaagttacagaaaaggctcatataacgctttcctggcacttgggttcgaagaaaacatggatcgatacttgggcttctttggaaggatttgacagcactctgagctccacacttttatactcatcattcaacattatctgaagaatatctgaaatgtacataacaagagcttcatgaacaggcttgacatccaccca

SEQ ID NO: 51205 - DNA, 531 bp, Gossypium hirsutum
  Clone ID: LIB3829-024-Q6-N6-G3
aataaaatgcacatatacatgcatgtgaatatatacatatatatatagcctcagaatacaaggattaaagggtattcctagctcaaaacctctggttcaaggattgcattccgcatactaacgtgccaagcatgtcaacttattgattaaacaaaattcaactgtttgttattagggaagcgtgtgtatcagtttcaagctacaggttcagaacctaaaacatctctctcaactgcatttagctttatatgcttcccatccttgaaggcggtattcgcgagctgcctctgcagggtttgctgcctttatgattccgcgccccacaattattatgtcactacccctatcaaagatgacagaatatggagtgttatactgctggccaagatcatcaccaccctttaccatttggactccaggggttgcctgaatgaatgctggatttaccggtgccctagaccatgatgccggattgacagagataaaaccaatgacaaaatcagaatgctcttctgcaatttttactgcagc

SEQ ID NO: 51206 - DNA, 477 bp, Gossypium hirsutum
  Clone ID: LIB3829-024-Q6-N6-H1
aaaataaaaacaaaacaaacattgaaaaggggaaaaccacgaagcaattcatgcctgtacctacaaccaagaaaacctccgaagatcgcccattctacacttcaaaaattaaaatgccgaaagggacccggtgccagtaggatttggaaaacccaacaaaccacaacccaaaaagtctgaactttaaaaaaaggtgaccctaaaaaccaaaaaagggcttttgaaataaccaatttaacctgaacccaattattttttgcccaacctgtgggtttttaggcaaaagggccaaaaacttgagctaactttacaacaaggaaccgtaaaacgggtatcttcacccataaagaaaagattataggcttattggaaggaaaaaccaccttttaggaaattataaaaaaaatttcaaaaaaactaccattggttataaggaaaaggaatttttcaattccggcaccttgaaaaacacggggg

SEQ ID NO: 51207 - DNA, 495 bp, Gossypium hirsutum
  Clone ID: LIB3829-024-Q6-N6-H3
aaaaaaaactagatgtttcatttccattaaagtaccatccatcataaggggattctaacaatgcttccattttgcttaaagcagcctccccctgccctgggaaaaacaatcccaattcccaccccgcaaccaaaaaaaggggggggggttccttttaaattcaaaaaaaggatgatgggggagagccattggggaacatcaaagaacagtgggaacaaaatttcaaaatcattttacagttgggaaacatgggaaagattgaacgagttgtttacttcacttttttcatgtcctcctcagttttccacacaacattttaaaaacatgttgaaaggtttttgtaaaacttatggaattccaatgtgtccccctttgctttccgcaactcgaccatttgtaaaaaaggggccatttgaaatatctccgcccccacgttaaggtttcctttcctcccggtttttgaactctcgagtctcatcttgaagtttttcttgg

SEQ ID NO: 51208 - DNA, 362 bp, Gossypium hirsutum
  Clone ID: LIB3829-025-Q6-N6-B9
gagtgacatcccagcatacttgccctcgaactaatggcttgcggcccaactcgacgttgcaaagactccacgcgatactgaccctctggaacaaacgaccagagtccattatgattacccatcttcatagttgcaaacatcaaaccggatgaactgacttgttgttacaatatgttgtcgagcccattaaccttttacagtataagatcgcttttccaatgcacaaccttacctttggtaaaaaacaccatgaaaattgactccatgtagaatcaatgaaacacccacacaatagtatacctataaattactaactatataaaaactgcataacttctttagtcttgtttactaccccacct

SEQ ID NO: 51209 - DNA, 505 bp, Gossypium hirsutum
  Clone ID: LIB3829-025-Q6-N6-C3
acccctgtcaagtcttctggattggattttttcaaagctctggtacaaaattacttctatttattaaatattagtttttagtcgagttttgattaatacacataaacaccatcaatcctgcacgtttttgggtttcttgtcgtcgttagtgtcgactgcgtccattaaagactccatcttatcttcaatttcttgcaccttgtcaatgaaatcaccggcgagatgtgcgttcttagctgttccctcggctaaatcctcaaccaattcaagagtagcccgaagttttccaccgtccggcagctgttcgccgacctgatctgctatctcctccactttccccgccacgttttccaccacatccgttatctgttcagctgtctctagcatgttatcagcctcatttttcagttttgaaaatggcccccatttgcttgttgtgaaggataggaaaagtggtactaacgttcccagagcccacagttgccaactggaaccggcaggaata

SEQ ID NO: 51210 - DNA, 475 bp, Gossypium hirsutum
  Clone ID: LIB3829-025-Q6-N6-D12
tttcttgtcccttgggggccagaggcccctaagatgggtatgcaatattgctacaggcgagtgcggaaatagtatcctcttatatggcttacaactggttatacttactgcaaagacataaatctggaaccactgcgtgggcaattcaatgacctttaccaatgtctgtagttcttcaaaaaaaaaaaaactagttgtgaatgaataaacagggatgaccgtgattctgaggcaaaatgagtttactaagggccgcttaaaccgcctttcttacctggttggctgggttttataccttgactgttgcattactggtctgaacactgaccaaacatttacttttgaagtaattaacattaccgcattatgagcactggactcctacagtgcggttagccagtgataacaccaaacctttacgccttttaggttcaaacatgagcggactgcatgattgaagtcttttttcggataa

SEQ ID NO: 51211 - DNA, 459 bp, Gossypium hirsutum
  unsure (1)..(459): unsure at all n locations
  Clone ID: LIB3829-025-Q6-N6-F9
aaattcttaaacattaggattcaatattaaaatctgagatttgatttttgatcatgataatcttagggataatttgcctgaatgcctaatggacccaagtggtacggcattatggaacccctgacgcatgtatcaatattgagcttgtattataacaactgtgccaactgacacacttcatctaggttttgggggccgggcgttatacatataattgactacttaattgtgcctgttttaactgttcctgcactgttcagggttctattaatgaattgtttatgccaaacaggaactgtttggtcccaatcaccatagcttggaggggaattttcagggatgccattctgtttttttatgactgagcttttgtgtcatgctcatncacatttgaattcttgtgcctgccaccaccaattgctttaaattatagtgcattcacttcatcaaatctattgt

SEQ ID NO: 51212 - DNA, 541 bp, Gossypium hirsutum
  Clone ID: LIB3829-025-Q6-N6-G11
ggattcaatttatacatttttttatctccgggtgaccaagggtctgattatacactgcaaacaattccagaaaattttcaatctctttccaacagaaattgcatatttcaaacacaaccacacttatggagggggttaatgaaaagacacaaatccacatcacgaattacccaagctggagttagaagggctgcttgagttcatatcaaattagtaattttagcttaggcttgggtctccttgaagctcttagccaaccagatggcagtttccctaggagaaactttctcagttccgaatggtttcaaaagcaccccaagctcgtcatacctttgatgttgtaagagtctcgcactgaactcaagcaacccttctaatgcctctgctcgctgccggtacgacgaggtgtcgaaccgccgctgtcgtgaatcagaagatgaatgagtggatgcagcagcatgatcatgttctgagccttcaccatcatctcgtccaactcctagactttggtcactgcaattggatgttgtgataactttgt

SEQ ID NO: 51213 - DNA, 539 bp, Gossypium hirsutum
  Clone ID: LIB3829-025-Q6-N6-G2
cacataactaaacttaatatccattgctatggttaaaactggaaatgcatgtgttaaaatatagacatcaaatacgagtactttgttacatcactacaaccgctgtaatactacccatcataagaagattactccataagcctctcctaaaaccaaggagatgatgatatgataggctcataacaactggctttcatatacataaggcagtagggatctatatatatgaatcaaataattttggaactgctttgttttactggaaaaatctgtcaatgcctgaggatgggtatccattggtaccctgagctcagcttatatttttctcttgggggcagtagctaaagctaaagaagctatagctgttggtgataaaactttcttgactagcagcttgcacttggcataatcacccattttttgtggttgcgctttcactttgaattgcctgcaaagtggaaccctgcatgaatcagggtgatcacaaatgggaggaaggagtcgaagaagctgtcacattcgattgcggtgagagcacc

SEQ ID NO: 51214 - DNA, 403 bp, Gossypium hirsutum
  unsure (1)..(403): unsure at all n locations
  Clone ID: LIB3829-025-Q6-N6-H11
ctctanacggccgcgcctgtgggttttttttttttttttttttttgaagaaagagatgtttaattcgtttaaccatcacgaggctctggctaattccattgctcatcatccagcaacaaggtttaatttttggtccgtttttattttttttccttttttggggggggggggacgactgggcgcggaaagagttttcggttggcggggcattgaggtggnagagcccggatttgacatttgcaacttccatgcccgccgggcgaaagttgcggaagcgatgaccatgccagaagctccgagactctgtgttggatgctgctcccgtgactgctgtggttgccgtggaactgtttgcctcgtttggttgctctgtccggctgggcctcggtccctccctctgcgt

SEQ ID NO: 51215 - DNA, 546 bp, Gossypium hirsutum
  Clone ID: LIB3829-025-Q6-N6-H12
cctactacacttgcccttgggggccagtagcccctactgagggtcggcaatcgggcgacgggcgcgtgcgtcgcttctagcccggcttctgactaaaaggcggtcagtcataatacagcgcacggaagcttctcgccactgccttttgaaccgagcgcgatgaccaactgttcgactcaacggaaactatcgggctatgctgcaattactattgcgacgcggccatcacaagggaaaaactaacctggcttacgactgtctacacccagctcaagaaacctattgtttgttgaacaaagcatcgctagttgaaaacggatccacaaggatgccataagccgacatggtgggctcaagccgtaacgtagttatgaacactagtccttcacaacccatctatccctgtgcctactggaaaaacacctataccttccgatttaataggtcggattgaaatggatgacatacttatacattctttactcgccactggcactcataatgtaacgagctggataacttctggcccacacgacaaaattggtc

SEQ ID NO: 51216 - DNA, 534 bp, Gossypium hirsutum
  Clone ID: LIB3829-025-Q6-N6-H6
aatgttactacacttgggatgggagcgttaactcatgatgtaagtgtaactctaactgaggccattttacaggttgatcgaaaggatgtgtctaggaagctaatataaagaaattagacccaaatactgatataaaagggccgccagcgccagctctgtttttgaactcagaaactgtaaaacgggacttaatgctctttcaggagtggcgatattatcaattcgatatgcgctgtcatcaacgggatggtatgcccttggcccttatctttgccattaacactgatccattctactcaagcttgttaattcccatatggatcgaaacacatcgctcactcttaatttattcagacatggcaggatctaggattagtgaacaagggctcagtgataccattagttgacatgtatatctccctctacttggctgcaactggcattttttttttcatcgtagcgttataaacttgcagtaatttgcacacccgttccaaaagtctgaatttgcactaataacaacattaggccaaa

SEQ ID NO: 51217 - DNA, 363 bp, Gossypium hirsutum
  Clone ID: LIB3829-026-Q6-N6-A7
aaaggaaaaacggaatcacaattttactagactttattttgggaattgggggtaatagaaaagggtctataatctctttattccaaaatttccccttcacaacttttagcccccccccttttctattaacccccaatttgagaattgggggtaaagggaaaagggtctattagcgctttatgccaatttttcccctgcacaacctttagcaccctttcttttttattttttcccccaaaaaactatgccactaagggcatggggtgtttttgggggtaaaggaactttatttgaggactgggcgtcacggaccattttctcttcttgggctggcccccaaaccacgggataaaatccaaaggg

SEQ ID NO: 51218 - DNA, 563 bp, Gossypium hirsutum
  Clone ID: LIB3829-026-Q6-N6-B1
gatgaataaataaattggtaggtagaagaaattgtatttgcttggtagggatggtagcattaagcctatcataactatagctatatagctatataatagctgaggcaactaaatgttataggaacatcaatggttgtccactaagagaagataatccatggcagtgaaacaaatgcatttgatgaaataattctattgcttaccctaattattacaaaacataaactagcttaattcctcgtgtcggagttcaaagctaagagggtgcttagattcatcggactcacgtaatttgttgatccgcttacgatgttgtttacgatgatcccattagctctttccgatggatgaaatggatcccaaaaaacatattcatctcgatttgagcataaattcgaaaacacggtacataatccaataccattgtaaggtccttgcccacaacatgctatctttgatgttgtaaatccgtaggccccaggattggtaacgaaatcactggtttgtagttgtgtattagcagcaatgaagatatttgcaccatactcgctattgagtccatt

SEQ ID NO: 51219 - DNA, 298 bp, Gossypium hirsutum
  Clone ID: LIB3829-026-Q6-N6-B11
ataaaggaacttattagggaactgtaatgtaataattggaactgcaggatatagactaagccttaaggttccttcccacaccatcaaagacctctagcctttaacaataaacacacaaattcatgggatttaaacaatctaaaaaggaaaaaagaagaagataaaactgaaagccaaggggagaacgaccaattacttaaaaagcatgttggattaactaaacacaacaacactgtggggcacaacaggctgaacagtgggggcagattcaaacccaaaggcactaaccacagcaacc

SEQ ID NO: 51220 - DNA, 524 bp, Gossypium hirsutum
  Clone ID: LIB3829-026-Q6-N6-B2
ggagctaaaaccaaatccatacaaagactagcaaaaatttttcaacataaatcattttccaacattggaaagtgaatacaggtcaaatttgagttttatcaatatgcagccagggggtgatatatataggtacatcaatatcaacagccacaattaagtttttggctgagctctacagttgatatattaaaaagaaaaagaaaattaccagaaccagtctcagctaatttccacaagtcaatctttgacaaaagcctagatttggttttggttccccaccttctgtacagaacttttaatccccaaccacttttcttcaacctgtaaaaatgtaagagggaggggaaaatggcaaaagaatagctcttcttctaactatgggtttcttgggtgtaataaaatgtacagttctgtttacactagcaaatgttcattgtccggaactgcttaagtggactccagagattagtttggttttcaacttactttgcctccatttttgcacaatctactcacaaaaacac

SEQ ID NO: 51221 - DNA, 187 bp, Gossypium hirsutum
  Clone ID: LIB3829-026-Q6-N6-B3
gcgcagtaagataatgtctgaaatatctccagaaaaaaaacagcacttgatcattataaaagtactgcgcaaaataactagacaagaagcaccagagacaaaatgtcaacaacaagtctaacagcatgcttgcaacaagtacgatgtaatctgactgcattagaagtttcatatgacaaaacatagt

SEQ ID NO: 51222 - DNA, 480 bp, Gossypium hirsutum
  Clone ID: LIB3829-026-Q6-N6-C2
ggggaaactagggcctcccgggtatgaaaagggttaaagaggcgggggatttaatgaaatgcaaatcggggggcctgtttgaaatggaagaagggtataaaaaatggggccccggggggagtcaatctttggatatcaccccccaaattttgaagcttcatggcaatattctcggagccccgttcaatatgggcaatatcatgaatctgagggggtccttttgcaccccatcccgctaatataattgaaaccccccccctcaagtctcttgcaataaccccagagccctccaatgcacttccttcgtcaaaccccgaaaccagggcattgctccccctaacccgaattctcccccccagcttttgcagttcccttgcatgagtcataccggtggaaaacacggacccctccaccaagctggaaccagtgcatgtagggaaaagtgcccttgtttgagggtgcaaatctgttggaaaaccc

SEQ ID NO: 51223 - DNA, 547 bp, Gossypium hirsutum
  Clone ID: LIB3829-026-Q6-N6-C8
agaaatgacgagggaaaaaactgctatagcagatgaacatatagtttcatctaaagtattcatacatatcattgggggcccctttaaacaaaagttcattaaatattctgaaagcaaaacacacaaacaacttcataaattccatctggtttgaaggaagaatggaatgggcagatattcactcccatgagaaggagagtgtatggtgagcaccagttgcagaggaaccaaaatgttcattttggaacatttcatgcccttggaggtggctgttgttacctccaccatcggcgtccaaaatggaggtcccgattggctcacctcccattcctcctacatcattaaattgcaagtttgggatgacgaaggaagcagaggcaggttgcaccatggggctcaaacctatctcccgagtctcagccggttgcgatgacagaagagagagagcacgatcagagtcaatagcttgattcaactcatcggagaacattttccggctgttgtcaccactgcttgacgcctcgagaaacggttgacaaagggaacc

SEQ ID NO: 51224 - DNA, 287 bp, Gossypium hirsutum
  Clone ID: LIB3829-026-Q6-N6-D12
attgttccgcctccatcaaaaaacagggggaattgtttttggccacaatgtgcgatggcggtattctcctatataccgaaacggggtgggaagtggatcaattggaaatttggtagaaggagagcacactacaaaccctgggcctgtttacccctttctaagccttgaacacaaatcctaaataggtcccaaaagcccgaaatgggatcacaaatataacatcctttttcttacgaaaaccctgaaacacgatgttgattaaaatcacacattttggcaatgaacaa

SEQ ID NO: 51225 - DNA, 495 bp, Gossypium hirsutum
  Clone ID: LIB3829-026-Q6-N6-D2
acatctaaagcactagaatattgcaaatcaaacaagaggtgatagagggtctcacacaaaggtaaaacgcggcttatcgtcgccttacttacaaaaactggtcagaacaatctgtccctaacaaaaaaacacagcagccaaggatgtggaataacaccaaacgtgccaaactatccatagcaggtaccccattcttggcttgcttcaaaaccgagtcaggcgcatatggtgggaaaggatttgacctaaagaattggggactctgtatgacaaaacattgcccgaacgtgatatacccaacgccttcatgtattgtaccgaataaaccacacattgtcacatcccatgggcccctatttccaagggtgtgaaacatacaaaaccttataaatccacatacacactggttcagcgcacaataaccgctgattctaagcgacctgaccttgcaaagcaagctattgacaggaaaaggaagaacttccactgttaact

SEQ ID NO: 51226 - DNA, 518 bp, Gossypium hirsutum
  Clone ID: LIB3829-026-Q6-N6-D6
gcaatgagaaaaaacttctgtgttatatctatatgaaggcaaataacaagaaaatagaaaataaaacctagcaccttatccttgaattttttggggggtgtcactaaagaccccaatccttaaagaaaagaacaaaaccccacggagtcagatacaacaacggaacataactcttatggtgaatatacaatcacttctcctttccatcctttaaataacccgctagcctctgcagaaaaaccaaagcaataacaaaatttccagttaaccaaccaaaaagaggtttagagtgttgaagcatataatatatatgcaagtgatacacatgtataactattcctattcagctttttataattaccaggcttcaaaaccctagtcaaatctaagaccttgatacctgaccttagcagaaaggaaagccaataggcaaccgcatgggaccatatcactttagaccattacctataggaaaacatgctaccaaacaacatcacaatgatcataaaacagtgcac

SEQ ID NO: 51227 - DNA, 536 bp, Gossypium hirsutum
  Clone ID: LIB3829-026-Q6-N6-E1
acttaacactgcttttcctctattccaaaataggatggcaaaaacatccaacaggtagagacagaattcttttacgcctttcttttttcaataaaacataaggtttaaatagaagctacaatccaacgtaaaaaccgtacaccaaaaattactatattatatagttgaacgccttaccacacatgcatgcaaaacggctttactcaaattcttccttactgacctccaaggcatgtatcatttgcgtctttattcttagcttctcggagctctctcttcacacctttagctttgttcggtaaagccatttttcctaccttatgttcaggaatgtagatctcgccaataggtccttgaattgtatctgagctaacggtattaacctttttcttacgctgaacgttagcaggtttcattgcttcgttcctcaagccctcgctaggtagaccatgactttcaaccaccaaatccatggaagggcctactttaacgagatgcatcctctgcactacagtgccggacttttttaagccaag

SEQ ID NO: 51228 - DNA, 493 bp, Gossypium hirsutum
  unsure (1)..(493): unsure at all n locations
  Clone ID: LIB3829-026-Q6-N6-E10
aactggcattactattcatatatgtataaagaaaaaaagagtacactttgttatttacacaacttccttcataatccgaactgaaatctgtaatattagtagccggaagtttcttcttcggataacgaagaacgaactcaaacaatcatctattttcaatggtttttacaatggaagaatggaaggcgtagtaatatgtaagtgggaatcaatgaagaagaaaccacaaactgttaagactatgcattatatgtagcttcccttccgtttgacagagaatttattctcggaacaagcgtggctggatctcttgacaatacgatattccctttgtcatctgttttttcatactcttcgacacgagggttcatcacaattctgcgggacctccatcgtntgaatgttaaatcaacaccggaatagttcaaatggtctgtgatgctgctccccggcactgacctactgcagtctggatctttttcggaaccattac

SEQ ID NO: 51229 - DNA, 535 bp, Gossypium hirsutum
  Clone ID: LIB3829-026-Q6-N6-E11
aagttaaatttgaccttatgaatttaaataactactattacatgaatgtgataaatctcaacacactatcattagttacaattagcaactctgtgtcacaatgacaagaatacccccccatcaccccccccccaaaatatatatatgtaatttgactaatttttgtgctcctatacctaacatgattaacaatttggaactttaattcagagctggcaccagaaattctgccaaaaagaaccatttttgaatgaaacattcatcattgcatctcactaattacagacattgatgattcatggaggcatctcccatctaacaacagattctgagataaccatcttcagtcccaactagaaacagtcttgagaagggtattatacttatgctcgacagcaccgacacatttcgacttccatgatctgatgaatacagtttctgaggtataatccgatgttgcccatcctcatcagcggaattagctaacgaggaaagtccaatcttatttctagatattgaaataacatcctgtccc

SEQ ID NO: 51230 - DNA, 558 bp, Gossypium hirsutum
  Clone ID: LIB3829-026-Q6-N6-F10
gaaaacatatttatatttatacataatcaaaacaaaaggaggagcaaaaaaatgaaagaaccctatagtgaattaacatagcagaccttaatgagactcgcaaaacccaccaaacatctgttaagcaaatataaagcgtcaaaagggaacgactctaatgatatgataagggcagttgagacttgaaaatgatgtaaaggcaaagggagcaaggtgagcaaatggtgaatgaacgaacgaaagaggggatactgaatggctaataaaatgtggagatggagggacggagatcaaactcctgggtccaagcggtccggtcttgaacgtgcaagcaccatgaggattgagccaacgcgtatggatccattatcatccatgacccgaccttctctcctactctgccgctttgctgatgattcccaacacaaccctctgtgcgatgctgctgcccccctgggtgaaccaatgacttcgacaatgataacatgggcaacatgaacacccagaggctggaactctcttgccatgcattgcgataatgctctcaggacaaacttt

SEQ ID NO: 51231 - DNA, 538 bp, Gossypium hirsutum
  Clone ID: LIB3829-026-Q6-N6-F2
tttttttttttttttttttttttttttttttttttttttttttttttttttttttttttttttttttttttttttttttttttttttttttttttttaaaaaacaaaaaaaaaaaattaattttaaaagagggggggaaaagggaaaacccaaaggggaaaaaactggaaaaaaacaacacgtttaaaaaaaaaaaaggggaacccaaaaaatgagggaaaaaaaaaaaaaaaaaaaaaaaaaaaggggggaaccccatggggggttggggggtccaattctctcaaaaaaaggggaaatctggggggggattttaagttaaatttggaagaaaaaacccggggaagggccaaaaacctaaaggcctccaatttaattccttcccctttccttggtccccggaaaaaaaagggggaaaagcttttggggaaatcccttttcaaatttttgggactgggccgggaaaaccccaaggaaacttcccacttttttccgggcttaatgggcctggtttggaaaaaaaagggcttggggtacc

SEQ ID NO: 51232 - DNA, 477 bp, Gossypium hirsutum
  Clone ID: LIB3829-027-Q6-N6-A10
ggcccaaaaacgcatttttttcacctctcctactaaaagggtcactacatacataaatccatacatacatacctgcgtgcatgaatggcgaagcacatgaatggtaaaacctttttaagcccaatagtttgctagaatccaaagggggacggcaagagggaaaaaaatgttgttggtggggctcgggaaaaggggcacagcatgacttggatcattggtgccggggggtgttcccgacggaccaagggggggggggccaccaccaaacaccgggggagacccggggggtgtccccggggggggtgttggggaaggaatcccggggcttggccctgttggcgggggccccgttgttggggggggaggaaaccctgggggcggggtcccccttgtgggggggggaggaggccctggggttgggggtgaagaaggcgtccctgggggcggggatcacggaacccctgggggggggggggg

SEQ ID NO: 51233 - DNA, 216 bp, Gossypium hirsutum
  Clone ID: LIB3829-027-Q6-N6-C2
attaaatatttaatagtattaatttttttttcgtggaagaagccatcgaagatgtttgttttagagtttataatgtgaataattctatagtaaaaaagaagcaatactgccgggccaagaggggagcccgaaggccgacgcccgggacacgcaggggccaaaaaacgccaagggggcgcgggctggaaggccacgagcgaggcgcgaaagcggggg

SEQ ID NO: 51234 - DNA, 450 bp, Gossypium hirsutum
  Clone ID: LIB3829-027-Q6-N6-C3
gggcaaaaggcaaaaataattcccaaaaccacaggggaaatcccccctaggggggctttcaaacccaagaaaagaaggtaatttttttaagccccccccaaaattcaacccaggttggggggcaaaaaaacctggaaacaagagggttaacaccctaaaccattccagggaagggcccaacccccaaaaaaacccaaccggaaaggaaaccttcagggaccccccccggggggatccaactatgtaaaacccgaaaaaatgaccatgaagaccccgggggacccgggtcactgggaccaccgaaaatggatggctctaacaaaaaaccccggcagggggggggacaaaagccccggctgcaaaaacaaccaaaaaaaaagggttgaggaaaaaaaagacggcaaaaaaggcgggggggccccggaatgcccggagggtgcaaaacagaac

SEQ ID NO: 51235 - DNA, 533 bp, Gossypium hirsutum
  unsure (1)..(533): unsure at all n locations
  Clone ID: LIB3829-027-Q6-N6-C8
ggattaaataataaaagtaaaatacatagnaactataatacaaattacaaataatacatgtccgaccaactaaaattaatatcaatacaaaaccacgcataaacttcgcacatcaaaatcccaataccaatgaagccaccaacaacatgcttatgcacagcagattggcaatgaggttaactctggacagtccttaatttgcaagtctcggagtgcagtcagatatcacaccccctcagataaagaggctaatgtctgacaatctccaatcttcagtgaacacaaggaagataagccttgcaatccatttaccggaaggcatacaaggctgtgacactgatctaaacgcaaagtttctaaagagctgaggttttttagccctgcaggcaagctttctattgagcaagcatcaatatccaagtatttaagggaggatagatttatccagcagatcggataaagactttagactacaacaaagaacatacaaccaatcaagttgcttttgattttttagcagtctattcggtaat

SEQ ID NO: 51236 - DNA, 464 bp, Gossypium hirsutum
  Clone ID: LIB3829-027-Q6-N6-D10
aaaaaaaaaagagggggcccgccccttaagaccccccctcggaaaataccagggggccccccctttgaaaaagagagaaaaaaaaagccccccctaaaagaaaactaaaaccaatcctaaagagaggggggaaaaaaatggaaaaagaaaacccgggattcccccctggggcggggtttaaaaaaccccccatttttttaaatcccccggccatttgggaaccaaggaaaaaaaaagcccccccttttttttttaaacggggtttttcctttttcccaacccagccccgggggaaaccccccaccgggccaaagccccgggggggcccaacccgggggggggaaaaggggccttgttcccccccccagcataaaaccccctttttttccctccactttaaacccacccccggggggaagaggggcccaccacaaactggctgggttaaaaggggggggacccaa

SEQ ID NO: 51237 - DNA, 525 bp, Gossypium hirsutum
  Clone ID: LIB3829-027-Q6-N6-E7
gaggaaaaaggaaggttttaactacaacatacaagcttatacaatacgagtcactttttgcttaagcataatcgaaaagggagtggcgccagatctttccacaggataaaaagggcatgttgacacggtgttctggcgaaccataagaggggaatgccctcaccaatgaatgtatatggcttggacctgcttaccaacctgaggtggatgaacactgtcccaaataagtgctggcaggattgggaacatgtaacaaacgaatccgaattgcttaagaattcatttaaccatacagtgcctgaaacacatcactctcttgttgattctacaaaaccatactttgaatggccattaacaacataaataagggtcttgcttatgtgaaaaaccacaatattgaaatcaggctgttgcttcaaaagattgggtgctgcttcatgctatctttcagttgaatagctgagcgtcacgaataaaacctggtcacacatgccttctcatggcaaccaaacaatgttcttggtg

SEQ ID NO: 51238 - DNA, 511 bp, Gossypium hirsutum
  Clone ID: LIB3829-027-Q6-N6-F1
acctaaaaaataaaggggctacttgcttcaataagtctatattattcaactacatgcgccatggaaaaacccttgtaacaacagggaaaaacatatgaatcttggttccaatgcttaaaaagttccaattacaacaagggttgatagcaaatggaactgccctcaccaatgaataaaaacaataggcctgagtaaaacttgaccttgtctaccgagattagaactggaactgcatataaggtgaatagccaatagcataaaaacctcgtatgccaatgaacccacctgacggaccaagtccttgccatcaaatatttaatgggcaagcaaataaaggaatgctttctaagactggatttgaatatcaacaacaggtcagccttgaaatgagacctgtaggagctcacatgccaaatttctttataccaatggaacaacaaagccaacaatgtcaacgacccggctttagaaggtgtggggctcctaatgatagcaagcaaccaaatgcatt

SEQ ID NO: 51239 - DNA, 537 bp, Gossypium hirsutum
  Clone ID: LIB3829-027-Q6-N6-F2
agaagtaataaataacttgagaattatatttcacatccaaatataatattcatatattaacaaaaagttacatatgtatttgatgttctaaccaaaaaaatggtttctcaatgcctacatctatctatattttacaaattaaactctaataccaactccaaccatttggtttggggagtactggaatttggtaatgaacaagggaatatgtacaatgatccatgtaacacggactttttgttaagtcatactagaagacaccaatcctaaactcgagagttcctcagggggcacaacaacagtgtactgaaatgcaacctgcactataggtagttcagaagaatgtctgcaaaggaaaaatgatattaaaatatctaaataatataacagtaatgctccacaaattactatcaacaaaaaaaggtagcacaaccacaaaacactgaaagggagcatgtttcaagcatttaggtgggcccatctggtgcaggcaagaaattgatacaatgagaaaaaaaaataatcataataacattg

SEQ ID NO: 51240 - DNA, 407 bp, Gossypium hirsutum
  Clone ID: LIB3829-027-Q6-N6-G10
aagttgaaattcctaggtgagggtttttttaccctttacaaacaaactatcgaaaattcatccttgatattctaggatgtatggaaacaccattttttgaactacccttccaagggaaacaaaaaaaagggccccccgtatgcctgttgaattttcacccaccattgtaactttttttaaccatttaaccataatatcgcatacactgtttgtttgggtgattcttattctcaaaccaccttaaaagaaataagccgcgcctatggaaagatgaaatccaattgctgatgttaggtcttataaccctgggaagggaaaacaaattttggaaacctggtggtgaaacatcttaaggtttgtaaggtagattttttttaaaaagaataccatttgttaaaacaaaggtt

SEQ ID NO: 51241 - DNA, 532 bp, Gossypium hirsutum
  Clone ID: LIB3829-027-Q6-N6-G4
acttaaggttagttatgaatcttaaattaaaaataggggcctaatataaggtctcatatgctagtcttttaggtctatttagcccatataacccatagtcatagtcagacatgaactctaaacatatagagaaacatactaataaaaaccgaactcatcgaatagcctgatacttctttcatatctgaaatagctacctacaatggcgggaaatgcggctaacgtgggcatcgatattaactaagaaagttgattgaatggttgtgcggacaattcaggagtaaaagccaacatcatatggagccttaagcaataggaactcccgaaaacggtcgtcgacgtcgctagtatgcatgcgggacttgggggaagcatcttcttgttgtacgatctgccagtttactggcaaggcatgttgaaaaccttgtgggattgcattcattgctggctgaccaatactggtaaggctgacatgcataatggggtaggtaagtgaaccgtgtctcgattcacttgaaatctgggaatcatt

SEQ ID NO: 51242 - DNA, 451 bp, Gossypium hirsutum
  Clone ID: LIB3829-027-Q6-N6-G7
aaaaaaagaccccccaaaatctataaggggaaaaaatattttacgcattaaaaaaacgggttatgcccaaaccaaatggccccccagggctaaaaagggaaaaaggacatccaaaacaaaaaggggaaacgttaaaaccgggttttatcctaaaaaaaaacaaagggggggttgggctgggcaaaaaaaaaaaaaaatagttccggggggggggccgggaggagcccaaaacaaatttggggagggaaaacacaaacaggtccgggaccaggggggaaaaacacagggggggacttaaaagcacccccaattttttttaggggggaaaaggacgggggaaccaggaccaaatccaaaaaatcctttggagaaggccccgggacattaacggaaaatccaagccccctttttcgaaaacaaaaaaaaattgtttggcgtgggggaaggaaac

SEQ ID NO: 51243 - DNA, 569 bp, Gossypium hirsutum
  unsure (1)..(569): unsure at all n locations
  Clone ID: LIB3829-027-Q6-N6-H7
attacagtattaaaacttatataaatatataatatgttacacaagtatgacactaagaaataatgaattgccagaaatcaacattttattataaaatataaataggatcaaatgatagtgtgatttagaaagagttatgagaacaaaactttcggtgctgtacagagataaaccctaaatcaagtgcaaatatctactagcttatactatttgatgtgttcttccactcatgtccgaaaattcaagagctaaacgcttatgttgaatttctaacatcggaccaattgcgatcacagacacattttcagtctcatcgcatctgttacggtggcggattgatgaccgagtcgaaatcgtaaaataacgatcataacttatctctctatttagttacctgatctgaggcatgcgataggatcggtttagagatccaaaactctttgtggatatgtgaacttaatgtctctcaatcaactcaggcaagattggtaaggaaaagattcgttgtatggcattaccatggctcgnagttgttgccaagaaaattacggccataaatcggttggcac

SEQ ID NO: 51244 - DNA, 527 bp, Gossypium hirsutum
  Clone ID: LIB3829-028-Q6-N6-A3
aacagtgaacaagcgttgttttattaatgataatttgataacaatattgttgaaaaataccaatttgtttagagctactgaagtctctgtttctccaggtttatgaaagcaaatacatgaatggttacctttcccagttggcataattccagtaggggtgaaagtagagtacttcctcctcaagttgaactccaaacttgctgtcaaccttatccttcaccaaagcaatgagattgagcatgtcttgagaagtggaggcaccattattaactaagaaattggcatggatattggaaaccattgctcctcctatgctacaccctttcaatccagctttatcaatcaactcagctgctgaaacacccaaattcaccggattccgaaacactgacccagcgctgcgttcatttactggttgagttgctcttggcctcttcaaaagctcttgttgccttttcttagctgaccctgagcgctctaaccggaacgtagcagccacgattgctgccaagttgtccatgtcctga

SEQ ID NO: 51245 - DNA, 529 bp, Gossypium hirsutum
  Clone ID: LIB3829-028-Q6-N6-B1
attaaaaaaaagcttattaaaacataaaaaattcaaatcccaaaacaaaatacaaccaacaattaaacatgctaaatgatatataattcatgtgttaaacaggaacagcaggcctgagggagatgagtgctttcttaattctctcaaaagcagcttgtaaggtggtgagggatgctgcatatgatatccgaatgcagctatcatccccaaatgcatctccagggactagtgcaacctgagccttgtccaggaagtatcgacaaagtgactccgaattttcgattttgccaaaaccttcagcttctattccgtagtaggagctgaaatcaatgaatagatagaaagctccctgaggttctgatatcttaacaccttccaattccccaaagctcttaaccaagaaatctcgccgttccctgaatgcttccaccatggtggaaattgcttccccaccagcacagcccaagcctaatgcggcaactcctgctttttgtgctatactactagctcctgaagtggactgactctg

SEQ ID NO: 51246 - DNA, 509 bp, Gossypium hirsutum
  Clone ID: LIB3829-028-Q6-N6-B10
gttggtcttttaaataatttctagtcttaccggaccggttgcatctatgtatggcttctatatggaatgggctttgcttccttacctaaaaaaaaaaaaaaaaaggcgggccgcccgccctttttttttttttttttttgtcaagtccataccttattatactcaacagtcaggaatccagagcagcccaaccattttttttttgtctccacaccaaagaaaaacgaaaccgaaccaacaacacaaagcaaatgggaatggtgttagttaacgaggcaaagaaaactgaacacctcaccttaccttacatgaactaaaaccctaccctatctacaataaaagtaaggccaacccgggcactgtccttccttgaaaggaaaaccttcacctaacctacagttttgttttttggaccccccaaccctcataccttttaacttttgcattgaataacttaactaaatctggcctggcatgacaatccaagcctctggctttgtgtctggcct

SEQ ID NO: 51247 - DNA, 443 bp, Gossypium hirsutum
  Clone ID: LIB3829-028-Q6-N6-B4
ggggcaaataacaactatattatatcatataccaatggggattgcatctttaggaaacaaaaacctgcaccgggcctggggttaatttttgcgaaccctaaaaccaacttttcctttaccttggaaatgggaatataaataaccgaatgtttatgtacccgctgccaccttttattcaaattcctcgctttcctactttctagcccaaaaaatggccgcttaaagatctcaagcctaaccttaaccctacaaagaatttccatttccaactaaaaggcttataacccaccaccccctgcaataattttaaaccttttaccccttcccccactaatttttcacaataaaaagcttttttaatatcacattgatactcaaattcttatttaacttggggatgtttgtaagggaaacaattgaaagtccattatgcggacttttta

SEQ ID NO: 51248 - DNA, 538 bp, Gossypium hirsutum
  Clone ID: LIB3829-028-Q6-N6-C6
gcatcaaaattgtcacttttattataattaatcattatttaatttcatacaagttcaaaaggacaatgaaacaacaagaacaacctgccagacagcatataaacataccacaaattatgaaaactaaaacccctactacaaaataccaattcaagaaactaaccattgctccggctccagctccagctcctcatcttccttgaagtaccaatgctcaacatttccaagtctttttttttttattagtataaacaattatgcatatatttatggctaattaccatgaacaacaagcacggcaccttattaacccattttcattacaatcagggcaccttcttaacctacattcatcttcttcaaacacttttttgcttccactacagtttggacatggcacaaacctagcatcaccacaaccttcacaaacaaccccaggatctctaacaggaaacccttttaaaagcttagccaattctccattttcattaagctgtttgatttcttcaaccccaccaacgtgttttccttgtatgaa

SEQ ID NO: 51249 - DNA, 549 bp, Gossypium hirsutum
  Clone ID: LIB3829-028-Q6-N6-D1
gcagacatgattggagctaattaccaggtcaataaagaaacataaacccatttgcacccatttatacgtgctggttcttttagcaccgatggccgtccagtggttgcaaagtaattcaatatcctagaggtgttagggttgcaaccaccgtgagcatttcagtgcaacaacatgcactctcactttacagcagccacttcaagcgttgctccttagaaagattaaaattgtatttctgtctaaatttggttcatggggatatggatccaattttaagaaagaaccgccacatatcacatttatatcaaatattgaaagcaatatatatatatataataatcattgaagaatttataagctagtagtggtagtagcagtaccaagattacccgcagttcctccgctacccccaccataatcaaccgcttgagtggcagccaccgccgacacattgacccctacagcgctagttgtgacagaaggcctttttcgcttctttttctcataaggtatccctctagctctagcctgtccttccctcacttccct

SEQ ID NO: 51250 - DNA, 534 bp, Gossypium hirsutum
  Clone ID: LIB3829-028-Q6-N6-D6
tttttttttttttttttttttttttttttttttttttttttttttttttttttttttttttttttttttttttttcccgggaaaatcggccaaccggcgcgaaaatttttccccggtttcaaccaacccccaaaaaatttttcccgggaaatcttttcccaaaaaaggaaaacttttccccgaaatctttttagggaaaattttttacgggcaaaaaaacagcccctaaaattaagccctttaaaaaggacaaacttgggtaaaaaaaatcttttaaacacccccaaaaaagggttttttaattggagcccaaggaaaggaaaaccccccttttttggttacaaaaaccccaatcgggggcggttttaaaggggggggttacccaaaaccaaggaagcaggtttaaaactaaaaaaacccccggggaaacttttaaaaagcttcccattttggggggccattttagggttttaagctaaaaccctttaaaaataaccttttcttaaaaaaaaccaaagggggaaaccccttttt

SEQ ID NO: 51251 - DNA, 445 bp, Gossypium hirsutum
  Clone ID: LIB3829-028-Q6-N6-F3
caaaatgggccccaaaaaacctggaattaggccccaaatcagttcaaacaaacggccccctttggaaaattaaggggtttaacaaaaattggggggtaaatggggcagcaaacaaacacataaggggctaacatggggtccctttttttccaaagcccccgcaccttgccccgccgggtaagaattcccatcggcctgggaaaggtctggccaaaagggcttcgaaacttttggcttttaatgggaacggggggcctaaaaatgggccatgccacggccatccatgcctcccatatggccaaagctggaaaagcccattccccccaaggaaatatccccaggaccattcttttgggtttaatggacccattggccccaacccacttaaataaaagggggggccttgccttcaccgggcaaaagttttttccaccacactttttgg

SEQ ID NO: 51252 - DNA, 403 bp, Gossypium hirsutum
  Clone ID: LIB3829-028-Q6-N6-F7
acccccccacaaaaaattttcccattaggccaaggggggggccccccccccggggggtttaaaaagggggcaaaggggaaaaaacagggggaaaaaaaaaaaaccgggggctaattttatgggggagggaaaaaaaaaccacccccggggttcaccctatacggaaaaattcccccccccctttaaaataaagttggattttttggccgggccccctaaaaatgggttcccccaagttgggggggaggggcccaaaaaaaaaaggagcccttggtttttaaacccggggctttaaaaccccgggagaatttgccccccaaccttggaagggggggaaaaaagggtggggggaaaaaaagggggggggggtattttcaccgggaagagaaaaaaaccccttttt

SEQ ID NO: 51253 - DNA, 522 bp, Gossypium hirsutum
  Clone ID: LIB3829-028-Q6-N6-G5
caatctaaacaatgttacatagcatggagaggtgaagcgtctggaaaatattctgttcgtaggggttacaagctcataatacaagacctttcaaaccctactgctagataggtccaagatataaaaggtaatctttacaaaaaaaaaaggctattaaatgtgccaccaaaaatcaagattaaaatgtggcgtataacttgaaattttattcctactttcaacaacctacattacaagaaactgatgagcacggcgtgttaccttcgatgcgatgaaaaagcaaaaatagtcttacatgtgattcaagactgtagatttacaacagaggtctaggaaaatttaagcttcaaatagccacaaaatttggaaaatactacccacagagactggattgcttacatgtttgaacgttattcacaaagttaatgtcgattatttgggtgtgctttataggcaatttaaatgaaaagaaatcaatgggtgcatgaaatgggcagtcaaaatgagctatttactgtgaat

SEQ ID NO: 51254 - DNA, 452 bp, Gossypium hirsutum
  Clone ID: LIB3829-028-Q6-N6-H1
ccacgattggtttctccaacaactgcatgttggggaaaatggctcaagccttgcagtctagctggcccaattcctccaaactgctccaaatcttgctgcggttggtgaggatgatgatgatgatgacgatgctgtttctccagcagattccttggtcttgatcccccaatccccaagaaagctacagtcattgtgtcagcactgaaacctgataaaccagctgttcttggggggctgctctgtacactcttaaaaaacgcattgttttgctctaaaatccctggggtggtataacttttccccatcaagggagagttgagactacccgtgctagcagctgcacccattagagctgctttctgtaacaatgcattggtagacatggaggctgacccacaaaaaagtggcctccgttttcttcaaataacgttgctgaattcccgttcagctgc

SEQ ID NO: 51255 - DNA, 552 bp, Gossypium hirsutum
  Clone ID: LIB3829-028-Q6-N6-H7
gaccaaatagctataattctcctttttttgacaccttgatgagagaacaagaagattttcaaagggaaatgttgtgaatgtgaatccctttagaggtcacacaactcagtcacaaagtgtacataaaatataaatagaatcgcatcaactaatatgaacattagggtagtaacataccagtcgctcatataaacttcggacataaagaaactgaaatctccagcgagaccataatcatcgtctcattccatgctgaagtaaaatggtacaacaagaactgaaacctcgctgcttaattgaagcctgctgagaacggaatatatcggaaacacaacatcaacgtctaaaagcatttccttctgattcataacggccttgtgaataatgcgccctacgacggacgctctcttctattgttgagcttccacccttctcagcaccataaatgcttctattggcagcatccaagaagtttttgccaacagatgtgctggacagtgtagcctcccgagcatcattttcctcggcctttttcaaccgcttccacctttg

SEQ ID NO: 51256 - DNA, 464 bp, Gossypium hirsutum
  Clone ID: LIB3828-027-Q6-N6-E5
aaaaaccaagcaacattcctatcattttagaaaaaaaaaattttttggaaaccctacaaagggggggggcatataacaatccttataaaccatatttaaaacattcagggggggcggaaataaaaaaccaaccaaaccaaaggggaacccccccagggggcccgcaaaagaacccaagcccatttttagaagcccttcctaagaacaagggggggcccagattccccaaaccccggtttgggtacccacatgggggggaagggcccaagagaagctaaaatagaccccccaatccaaaccctggttttttttttggggggggccaccaccttaatcttcaagccactgggggcaaaagcggggatttccttggtcattctatcagcaatccccggaaaaggggggatagcaaaaaaaccaggcccctttttagaagccctttctaaaaaaaggaacccgggggt

SEQ ID NO: 51257 - DNA, 372 bp, Gossypium hirsutum
  Clone ID: LIB3828-027-Q6-N6-G5
aaaacaaaattaagccatggcatattaaacggggaaaaataaagatgggggaggcaaccttatcccccgccctataaaacaataatttaccaataaagggagaggggaagaaatagtaccgggggggggctatctacgggcatttcacaaggcgaaaagtaaaccgctgggtggggggggctatctacgggtaccctttgggggttcccaaaggggcttccccccttggctttatggaaaaaacacttaaacatcttcaaggcaaccccctaggggccctcatttgggcaaggaattggcttattttagggaattcgaaggttaacaacccctgaaaaagggaaaaatccccaaagtttttccggcacccgg

SEQ ID NO: 51258 - DNA, 568 bp, Gossypium hirsutum
  Clone ID: LIB3828-028-Q6-N6-D5
gcataggtcaggccatatgaatgcaggattgagagaccaaatagacagacaatattacagttcatacacttacaagacaagctgcaataactagtcgtgtgcgtttcagacattagacggataaattaaataaaaaattgcagccattgtgtttgtctgtcgatcaaattttacatcaaattgcctttaccttacaacttgccctaatctacggaaaactggtccctctgtatcttcctgcttcatgagttgaacaactaaataatcgagttcagcctttttatcttttacttggctcaactaaactgtatgaacaaaattgttatcacgtgtgaatgatatctcttgaaatgttacaccccatatcgcctcaatgctttgcttaaacttggcatgacattatatgcttggtacgatcttcttagctcaattatggaacccacaattattaaaattgatgtaaaaccaattgcaaatccttcattgatatgtcgcaagtaatgatcaagtatggttgatgtagttgccaaaatacttaacagtagccctccccagaaacgtgttgatg

SEQ ID NO: 51259 - DNA, 553 bp, Gossypium hirsutum
  Clone ID: LIB3828-028-Q6-N6-D6
gtctccaaatatgatcaagatgcataattattttcagcactgttgaacacatgccggtagctcggatactaaacgaagcacatgtattttcatacaagttcttcagagaatgatgaaatctagttcccaaaacttgcattgtcccttttcttggtaaagactaattcctcccttttattggtaaaaaggaaaaaaaaaatcctacagatttctcccttccttatgattttactctcatgggactcttctgatttgaatagcgtgcttcgagttcaaaccacgagtccaacttgactagttggttaaattcttcgaatgtagccatcttgtgaaggtgatctctggtagttccgttttctttcagggtcctgaggacgtccaccaatgcacgagctgaagcatagagggcggtgagtggatgcacaatcaaatgaaaccccattgctctaagctcctcaggcgtgtgcaagggtgtgaccccaccttcaatcatattacaaactctgtaaccttttgtatggcgtccaatctccttaagctcgtcatcgttcct

SEQ ID NO: 51260 - DNA, 512 bp, Gossypium hirsutum
  Clone ID: LIB3828-028-Q6-N6-F6
acaaaaataatttggctcgatcggaatggcccattacttggaaaaatttaagggccatctacaagtttgactcatacagaaacataatcttcaatggtatgcaatcttaaatgggatatgcaatcttagatatgatacaatcttagatatgattgcaatcttaaatatgatacaatcttaaatatgattgcaatcttagatatgatatacaatcttaaaagatatgattttgtaatcttggaaatttaatttggagatatcctttaatcttaaccggtgatgtaattgacctgtaccattggatttagggaggatagaggcctctcccctcattgtaaaaacaacttgacttcactggagttttgggaagcaaaaaaaattcttaaaagcattcactcaaatttctctccctcttgcgttcttattttctgcaggggggtcttatttattctttggtcattttcggtttcaaccttttttttattttgatttaatccctatttctttgattt

SEQ ID NO: 51261 - DNA, 557 bp, Gossypium hirsutum
  Clone ID: LIB3828-028-Q6-N6-G5
cagttaaaattacaagtctttgcattactcttactccattctcaatcactaattccattccaatctccacaattataataacttgggaaataaagtaattcaaaagggggtcttctaggagccaaaattagaacagagaagatgaaaaaaaaaaaaaaccaaatcttttgattgatgattagtatatatatttatgggggatctggttcaaagggggcacacaaaatcaccacttgactttacattttcaagatcttcatcgccatctaaatcatcatcaagatccatgctccctcccagaaaaagttccccgcccttggggacctcaggggttttcatggcctctcgtattataaactgggcttcttccaagctttgggaagggttgttcacatcatggctctcccagtttcccccttccttcagttccataggcaagttctttaaaaaccatggggggcttttaatctctgttatacttattctctttccaggattttccacaaatatccgaaacaaaagatgcttgcagtccatagaaactcggatataatcgg

SEQ ID NO: 51262 - DNA, 579 bp, Gossypium hirsutum
  Clone ID: LIB3828-028-Q6-N6-H5
aaaaataaatataaaatactataacatgttaatgtaagtgaacaaaagtgactagtttgatagttatccaaagtcacccttctctagccgcccatccacgctgtccgtgtcaccttttccctttcggtccctttttgtatccactcaggggaaaaaagttataccctttcttgcaagggaaaaaaagttactcctcgtagcaaagaaaggttaagggttacattaatctaaaaaacattgcaaaactcgtaacattttatgtacactgatattcacggatagattacatgcaatgtttcagctattcagccagtccagactataccatttctctgcaatttgaacatgtaggtttggcactgtcttttccagatttctccactgaccaaaaacttcatcatcacagataactcgttgtaatgactttaagttcgataaagcagcatgggtcggtagattcactatttgtaaacagtccctcatgtctatcttttccaggctaactaatttacctacttccttcggtagacatttcaagttaacgcattctgaaatatcaaggtattttaacccgactag

SEQ ID NO: 51263 - DNA, 412 bp, Gossypium hirsutum
  unsure (1)..(412): unsure at all n locations
  Clone ID: LIB3828-028-Q6-N6-H6
atctattnttaaaaaaaaaaaaaaaaaaaaaaaaaaaaaaaaaagggcgggccgccctttnttttttttttttatttttttttttattttttgttttttttgttagcacaaaaaaataattttttttatgcatgttcatgccttaatttcctttgggttcaaaacaaaatttaaggaacttttggatattggaaattaaatattgttttgagctttttatttttcaaaaatacttttttttttcaacaagattttatagtaagcccttttgcaacaaaattactttttattttggttaaataaaaccaccacaaccaacttttttttattatttcatcttaaaaagggataatctccctactttgggggactgggttaaatttccaaaaacccttttattcctttggttttt

SEQ ID NO: 51264 - DNA, 519 bp, Gossypium hirsutum
  Clone ID: LIB3828-029-Q6-N6-D4
attgcaacaggtaactatttgaaggagcaaccatgaattacaaccacatttttctacaaagagcaatctctgacactgtacagctttgctccttctcggtctgtatgcaaaagcggactagactttaaagtagtagtttcaactttacaggagaaaattttcctaaatccatactatttattccgagcactcgagcaaaattttcttttttctcaatttctccttgactagctatgacataattggcaagaactactaattctactatggaaaaagcattttaactacgaagttcacgtgacggaggaaataataatcagcaatctaaagtaggtgagaattgaaccggttttgatgcaccatagcattgtcttcatatctcctccttgacccccttcaatccattgaaaatatctaaatccgtaaaccttgtactcaagaagtcttcggcttcatcacctgggggtgttaaagttgttctgttaccaacagggggatcaagtgacttccaatctgaac

SEQ ID NO: 51265 - DNA, 475 bp, Gossypium hirsutum
  Clone ID: LIB3828-029-Q6-N6-D5
aaataaaaaggggggctgcttatttgagacattaactacaatatatgttttttaaaactttgttttctaaattttcggaaaaggtctcaggatccacgggaagagaagggaggacctacacaacggaaaaaaaggttgggggggagggggatatgacactgttacagaaattatctccactggcacccatctgaaaaaaacagatcttttttttttacctcggggtcctctcagttatctttggagcttttccacattaagggggaaaacctgtctattggggacttgatgtggctcctaccccaaaaaagccaatgaatggcggtagaaacagcctcatagaggctggaggtactgcttcctgccacggatgatgaaagctcaatggctgaaacttgaggggttattgatgctggggaatctgcgctactttgggagctggggaactttgccagttgcattgtaaccatgggcg

SEQ ID NO: 51266 - DNA, 517 bp, Gossypium hirsutum
  Clone ID: LIB3828-029-Q6-N6-G4
gagaccactatatatatatatatatatgagattcaagagttctacaatagcaagaatgtaccaaaaatcttacgaagaatagactacaatgcatcatcttcacgagttttttttttttcaaaactcagtttattggattaccataacccaaaccaccaccgagaaatccaccaccagtagcggcataaacgtctgaaggatcgagaacaggtgatgaagaagacccagcatttcttccaccaccacctaaatgcaattcagatatatttggaaatccatctcttccttcaactccttgatcataaagaaaccctttgaacacatgtccaccgatcttaacgacggcttgatatgcgtactcgtcttcaccgccctccactgccgttactcgtacgcatttgaacaccgcaggcgcacggacttgccctggcaatgtctctttaaaaccaacatcttggtggctcgagcttgtatcaaagcttcgaggaggggtagtatttgaagttgatgtatgtga

SEQ ID NO: 51267 - DNA, 551 bp, Gossypium hirsutum
  Clone ID: LIB3828-029-Q6-N6-G5
gggaaaggattgttatatatatacgtgcaataattacataatttataagaggccctcgcagtcaaattaatatatgggagttcatcaaccatatatacattacattgcattcatattcatggccactttagatagtataaggtgaaggcttgggcaacccggagacgatgccacacagcggcgtgttctcagggatgttgtactcgtcccttagtgatttttctggtgacagaacactaacgtaaagctgttcccctaaatatgttctctcccatatctccgacctgatattccacatgcctgcattatcaaacgtcaaaagtatagcagcccatgatttagggaacacttgcaccgtatgcctactcactgcgtcgagcagattatagttctctctcttctcagggctccatgttcccggctcaacggcgaccgcaaagaaggaatacccgtcaatatggaacgattgaaggcttttttcatggttctcgaatatgatttcaacgaagttacgaaatgtcatgttgagtacatttggttgtatggtgagg

SEQ ID NO: 51268 - DNA, 389 bp, Gossypium hirsutum
  Clone ID: LIB3828-029-Q6-N6-H4
gtagtagcccaatttacccgggcccaattaaataaataagcacaaaaaataaaaaccaaaataataaaacagtccagtttcttttttacaaacccaaacttaaagcccaaattcactacccaattacagcggcccaaatgcctaaaccctagcccactagtccaaaacaaagcaaaaaaaaaaactagcctacaagcttcctgcgccgcagcaaccagggtcttcccccgcgcgtgctgcgcttccgcgtgcgtgcgcctcctccagctgaccttgtaccttcatgaaatcgcgccatcggagccctgtcaattccgtccgaaatggagttggatggggttcggacttgtccagcggcggagagaaagggagatttttttctagatcgc

SEQ ID NO: 51269 - DNA, 476 bp, Gossypium hirsutum
  unsure (1)..(476): unsure at all n locations
  Clone ID: LIB3828-030-Q6-N6-E4
gggcaaaccaccaggttcattctaaaaaaaaaagacacaaggcccttataggcgaaattagggggaaaaaaagggtttaaaaaaaaaattcatttatggggaggcgggggtatcccagcccggagagggcaaaggaaaccaaacgggattctagcggggggaagaaaatgaaaccccacacaatttagccattttcgcaaactcaactctggaaaaaacacgggggacaacttctatcttcagggacccgcaaaagcaggggggggggtccttcatctttggggaacaaccagcgggggggggggggtttttggccccattcaagcatgagctataccccaagggggtaaaaaatttgggggggggggctgcctttggacccgaaaaaacaccccccctagaggcaccccgcccaaaacaataggggaaaaccccttcatggttttttaaaaaaaaaattanctagctgggcccgg

SEQ ID NO: 51270 - DNA, 437 bp, Gossypium hirsutum
  Clone ID: LIB3828-030-Q6-N6-H5
acccaaaaaaagcatcggtccaggggaaaaaacaaaaataaaggggcccaaaacccagggggggggttgggttaaagggggtcccatttcaaccctaaaaactaaaccaaaatccaacaaatttgaatatgggggaaaaccaaaggctatacggaaataaggtcgggaacccaaacaaataaaccctcgaccgggggggggggggcaggaacatgaaagcaaacctaaccgggtccaaaaaaaaaggtggaaagggggaaaaaaaagagctggacaaaaaaacctacaaatcccaaaaccacaaatcccatcggtggacggggcgccaccttggaaaaatttttgggaacgggcttgggggaatttttggagagaagaacactggccttagggaacccccttagggggtcaaaaacgggggcaatggcgcccatttt

SEQ ID NO: 51271 - DNA, 647 bp, Gossypium hirsutum
  unsure (1)..(647): unsure at all n locations
  Clone ID: LIB3543-007-Q1-K6-B2
ngacactactcctttcttcttctcctttctttttctgttattttttcttagaggcaaactcatggaacgtggtgatgggttcaatcgtttttacaagcatgcaaaatcaagttcagggctgagcatcatgcatggcgattcttcaaactccaacaccaacaccaacaccatcatcaataacaacgccgctaacaatggcaacgccgccaactcaaacaccatgcctccgccgtgtatggtacgtgagcaagatcaatacatgccgatagccaacgtgatccgcatcatgcgtcgcatccttccgacgcatgccaaaatctccgacgacgcaaaggaaaccatccaggaatgcgtctcggagtacataagcttcatcactggggaagccaacgaacggtgccaacgcgagcaacgcaagaccatcactgcggaggacgtgctttgggccatgggaaagctgggtttcgacgactacgttgagcccctcaccgtattcttgaacaggtaccgggaaaatgagaacgaaaggacttcgctgcgtagcgagccgatgttgaagcgtgggatagactatggaccgtctatgatgatggcaccatatggagctggattccatgtgggacatcagcaggggattttcgatgggg

SEQ ID NO: 51272 - DNA, 629 bp, Gossypium hirsutum
  unsure (1)..(629): unsure at all n locations
  Clone ID: LIB3543-007-Q1-K6-C3
cggccgcgtgggtggaactggtgatttgagtggctctngaagaagctatgaacacagaagtgaaggaagttgataagaagttgagtagggaagttaacggttctaatccaaaaaagagcagcgcagaggagaaatccgagctggcaaggcagattttgcttagcttcattgtccggtccgccaagcagaacatggatggtgaatgtgaggctttaatcaatgacaaaaggctcaaccattcccaaaacttttcggatgcagttacaagcgacactgcaataataaaaattctatatgggaatgaaggaaaggacttggattctcaatccagtagcaatgaagaaccaaaagcgttggatataaataataagaaacccggagatggcgaaggatttacagttgtaaagaaacggcggaaaaacaggcagcagcttactaatggagtcactgggctatataatcagcaatccatatctgcttctgtaaggtgaagaaataaccttaggaaaataacagtgtaagtgtcatcatgttccatttccagttttatttattatcatatccttgcttccatattaacaaagcaatttagagtgaaacctggttctttagttcctactttattttga

SEQ ID NO: 51273 - DNA, 620 bp, Gossypium hirsutum
  unsure (1)..(620): unsure at all n locations
  Clone ID: LIB3543-007-Q1-K6-C4
cccngacccaaaaaattgccaataaacacaaaaggtattcctatgtaaatctattgatttatagagaactgaatgaagaacatgttgaagagtttgagtttgaactgggccttcaattcaatggcttggaaaggacttgtctacacagcttttatactgaattttgtattgatttgtcagcatttgcttcttcagcctctcgtttctgctttggatgaaaatctaggaaatgctgctgagttgttcgagagagtttcacagagtataaaagtgaagcgttatagtgaggcactcaatgatctcaatgctgctattgaggcagatccagcactttcagaagcatatatgcgccgtgcatcccttttatgtcagctatgccgatacgaggaatcggagaaaagctacaaaaagtttctagaactaaaacccagaaattctgttgctgaaaaggaactatctcagttacatcaggctcaaagtgctttggaaacagctttcggtttatttgagtccaaggattatacaaaagctttggattatgtggataaagttgtactcgttttttctccagcatgctcgaaggctaagatgctaaagttgaaactgcttttagcggctaa

SEQ ID NO: 51274 - DNA, 632 bp, Gossypium hirsutum
  unsure (1)..(632): unsure at all n locations
  Clone ID: LIB3543-007-Q1-K6-C6
ctggnatccactttcccatcattgccggagccaaagttgagccaatatcatggaacgataactacttttggtccttcaaatggttccagtatggaaacattatctgggtcacagttcctttggggaaattcaaattcatatacagatcaaaccaacccatcagtctggccaaagtcatctatgggacatccgttttcatccaatggaaagggacatggctttccatactcaggtcagcaagtgtctttctcaggctcatccccccactatggtcatcatcacattgggtctgctccatctggtgttcctcttggaagacactttggtttcttccccaaatcatcagatacttcactcacgaaccctgctgcctttggaggcctaggtgtaggccagaataatcgaggttttatggttaataggggttcccgtgctgctacgagttcaggtattagcattccatggaacgtgtctgagaatagttcaagtatgagaatgatgtctttacctaggttaagtcctgtatttttgggcaatggccctttccaagnactacataatagtatggagggattggctgagaatggacggagcagacaagttgaaaataatgggaaccagcttgataacaa

SEQ ID NO: 51275 - DNA, 539 bp, Gossypium hirsutum
  unsure (1)..(539): unsure at all n locations
  Clone ID: LIB3543-007-Q1-K6-E3
ccggtcgccccgcgtccgcccagnctncgcgacctgggcggcgcgtgggcgacccgtaaattgaggctggtctagtggcgttcaagctaaactctcgcgataaatttagcctagctgtagtttaacctcgtatcattcctctctttttctttttttctccgccgccattaacttttggggggtgcaatgcatctatggaaaacgacggtaagcttggcaaaccctacaggatgcattgaactatcaggaaaaacacgtagtcgggaaagtttcgaaggtaaagatatggcctggattaccggccaagaaggtctttgagttcactcaaatttgattcctgcatcatagattttgtctgaaaacgctgttgtgtaccttttttgctagacggatcaagatcaaaccgtggagcatggctgttatttttgttagctaaagcntcgacaaccgtacaatgcagaagcaaagacgcgattttgcggatactgatgtcgagcgtagttacataatttctgttntgatatcaaaatcttttttta

SEQ ID NO: 51276 - DNA, 353 bp, Gossypium hirsutum
  unsure (1)..(353): unsure at all n locations
  Clone ID: LIB3543-007-Q1-K6-F6
tgnaacaatnntagctgaagatnnttgagtatcatcagnntcgtgaaaccagtggaacaggtgccactagcccaggccaaaagctacctatgccacccacaacaagaaagtggaatagtggagatcctaatacaatactcagggttttatgccataggaatgatcgagaagccaatcagttcttgaaaagggaatttcaattgccaaaaaggaaatgatatgaaagacgacaatgtattcatttgaacaacagatttttggtttgggtttgttttagcatccattttcagttgatctaatattgtcttcaaacttttgacttaatgtttatatcaacgtctttatggggggtt

SEQ ID NO: 51277 - DNA, 671 bp, Gossypium hirsutum
  unsure (1)..(671): unsure at all n locations
  Clone ID: LIB3543-007-Q1-K6-G6
ncccacgcgtccgatacaagnncaatgtaccagcnnncgccgcccagnnacctccaacagnaaaccaatagtaaaatggggacactgttgttccttactgctaatttatttacaatatttttttagggttttaaaacattttttataaaccccaaatagcattaaaaaggaaaacgaagaaattcccattctctctatcttctctctaggttttaatgctgtaagctggtaaaccttcttatcctcatgcatgctgtaaaaggtgggtgggttgggcaaacatttgccctagctaagtgcaatgagtccggagggaagaagactcgggttcggcgttcaaaggaggaaaggaagtcaatggttgaatcttttataaagaagtatcaagaatcaaacaatgggaattttccatctcttaacctcacccacaaggaagttggtgggtctttctacataatacgggagattgtgcgagagataattcaagaaaatagagtgttgggtcctgctaagttgactgaaggggaacatgacattgatcggttcttgcaacaaaatccactgggttccatttcaactccacccgaacctcttctgtccgaacaatcaaatggaagttcttttgttcctagtcatcatgaggatgaaagtgatgaatcggttatgattac

SEQ ID NO: 51278 - DNA, 682 bp, Gossypium hirsutum
  unsure (1)..(682): unsure at all n locations
  Clone ID: LIB3543-007-Q1-K6-H2
cccggtcgacccagcgtccgncccacgcgtccgcggnacgcgtgggnnttctttgaaaatataacatatgagaatttgtgagctaagataaagtatatatgcatattgctaacagtcttcattggagtttgatagtcatatgccatcctggtgaagtagctggttttaaaggtacattcatgtcactgttgaatttcattcgggagttctacctttcgtccatgcatttgtcatgtttcagatgaagacttggacaagtcatccaaagtaccatgcatattgcatatggactctatcaaaggaaatcatgcaggtcttaaaaatcttgtccaaaggtatcctcaagcttttacaattgatttattcaacttaataaatgcgtgcccctgcaaaattcccttactttttcactgattttcctgattcacggttgggtctctaagtgggaagtactgaaagcttttctagattacatataagaactttcgcttttgattctgaagctatcatctcatctcatctcatatcttagcttggttaggatgtttattttgagcagcattttctagttgttggaacttcagttctgcaaatttagtttcatataatatttctagagctattcagtgagtggaaaatcttgtccaaaggtatcctaaagtttctgccattcatatatttg

SEQ ID NO: 51279 - DNA, 613 bp, Gossypium hirsutum
  Clone ID: LIB3543-008-Q1-K6-A1
tagcgctttccttttctctctctctttagtttcttagtttccttctttttctttctttcctcccaaaaaactgaaaaaagaaatttcgcattgattacgaatttttttttacttttgaacgcccccaagttttaacataaaaagacaagaaaatcacaaccattaaatgatgttttctagcattgatcatcaccatcaattccgatgccagcagcaatggatgaaccataatccggtacaagcctgagcattttttgtaaaccccccaaaaagaaacaaaaaaaacaccaaccatgatcgcttttgttgaaattaggaggatttgagatttacaaagaagaaaaaaaggaaattgtgattttttcataatattatgtcggatttggtggcccgtacgggtcgtcttcagcaaaggtacgaggctggttttcgccttgtcgctggatgtatcccatttaggtatagaagtacaaatgaggcagatgatgtaaaatttggaaaggtggtcgaggtactgatgattaactcaactagtggaccaggtcttttatttccaagggaggttgggagaatgatgaaacggtcgaggaggctgcagtgagggaagctattg

SEQ ID NO: 51280 - DNA, 535 bp, Gossypium hirsutum
  unsure (1)..(535): unsure at all n locations
  Clone ID: LIB3543-008-Q1-K6-D3
cccagcgtccgcccagcgtccgcccagcgtccgcccacgcgtccngaaaaaaaaaaaaaaaaaaaaaaaaaaaaaaaaaaaaaaaaaaaaaaaaaaaaaaaaaaaaaaaaaaaaaaaaaaaaaaaaaaaaaaaaaaaaaaaaaaaaaaaaaaaaaaaaaaaaaaaaaaaaaaacaaagaagggggggggggggtactggaaaaacaaaaacaaaaaaaaaaattaaagggacggggaaaaaaaaaaaaaatagacaggaaaaaaaaaatgggtaacagaacttaaccgatgggcatacaaaacacaatgcgaagactggaagaaaaatggaaaaggccctgcagaggctcgttaaaaaaagagggagaaggcgataagggcacagggaaaccctccactagccagggaaaatacgcagaggccttggggtttactcccaaggtgactgtacaagttcgcagggttttcccgccaagttctaaagtttgggctccttttttggtaccaaatttaggcttttttgccccttaactcc

SEQ ID NO: 51281 - DNA, 355 bp, Gossypium hirsutum
  Clone ID: LIB3543-008-Q1-K6-D6
ccccgcgtccggcagaacttaaaaaatgaatcaagcaaggtcaatatcgtcaattacaaattttctgttcccctcctttttttgaaattcaaattatttttcaatatatgtaaaatatttctttcatccttttcttcccaatctccatctctctttttatttttggtttctctcgaaagtcccatcaccaaatccaacgtctcttaacgtgcgcatcaacatttcattgcttgttaccaatggcgcacgatagcgtccagcttccatgcgacggagatggcgcctgcatgcgctgcaaggtcacccctctggcggaggaaaccctgacttgtagcacgtgcgcgactccttggca

SEQ ID NO: 51282 - DNA, 596 bp, Gossypium hirsutum
  Clone ID: LIB3543-008-Q1-K6-G1
agcgtaatgaatatttcaagggatttttatattccacctactggctgtcgtttctctttaaagtagaactccgacgcctttgttcaaaccaaggacctcgtcttgcacacaagctgatgaacttataaccaagttcgtctttcactgcagtcatgaatggactgtttcagctccctttttcttgtattctgctaactggtttgctatcattccattgattaatctttcttaattggttttctttagagcttgttttcacttgggatttttgttagatttcagaatgtagtcaatttggtaatttctccctctatctagtttttcatatggaagatatgctccacttggttgattacttttttattattatacttggttacatacttaaactgtcaatagtgaccagaatctagaggtttatcctttgtagcacctatgtattagctccatttagctgctttggtggttctatcccaaaagaactctggtggtaagtgaaaacagatcatatgggtttcaaaattctgagatcctaattagattcttttaggcttagttcaccaaccagttacattactattgacataaataggtaa

SEQ ID NO: 51283 - DNA, 627 bp, Gossypium hirsutum
  unsure (1)..(627): unsure at all n locations
  Clone ID: LIB3543-008-Q1-K6-H1
cagnaacatcacatgctgatagtcaaaacacagcatagagtccaagnactccaaaaataagaataggtgccttgaagggttctatgaggagcagtccattgtaaaagaagtttctgttggtaacttagtgagtgttgcagttaggaagtcccctgaaacaggaaaagttattgtgtgtttggaaactgatatacctggagatgttgtagttcactggggtgtttgcagagatgatgctaaaatatgggaaattcctgctgccccgtacccgccagaaacgactgtattcaagaacaaggctttacgcactttattgcagccaaaagctacggggaacagatcaggagcattattcactttagatgaggaacattttggatttctttttgtactcaagctggatgataatacttggttgaaatttaaagaaaacgacttctatgttcccctcttgggtacaagtagtgttccaggtcaatatggtcaatctgacagtacaagtgaagagatttctagtaaatcatatactgatggtatcatcaatgagatacgaaacttggttagcggccttagctctgagaagagtcagaagaccaaaaagaaggaagtacaagaaagcattcttca

SEQ ID NO: 51284 - DNA, 634 bp, Gossypium hirsutum
  Clone ID: LIB3543-009-Q1-K6-B3
cggccgcgtgggtgcaaatgaatgtgcagcagggggttggactaagggtggatctcagaatcagtctgatggttggggcaagcaacatgggggttcttcatggggtggtggagccagccagaatgcgggccaaaactctagttggaactctggttctggtaatgcaaaccaggattctggttgggctaagaaaaatgattcagactttggatctggtgatgcaaccaaagattctagttgggggaagagaagtgactggaactcaggatctgcagatgcaaatcaggaatcagaatgtggtaagaaaagtagctggggtgctggttccaataatgctggccaagactctggttggggcaaaaggggcagttggaactctggttctggtagtgcaaacgaggatggttgggctaagaaaaatgattctaactttggatctggtgatgcaaccaatgattctagttgggggaaaaagggatcagcagatgcaagtcaggactctaactggggtaagaaaaattggggcactggaaatgatgctggccaagactctggttggggcaaaaaagattgacagatgcaagtcaggattcaagctggggtaagaagagttggggtactggcaatgattctg

SEQ ID NO: 51285 - DNA, 257 bp, Gossypium hirsutum
  unsure (1)..(257): unsure at all n locations
  Clone ID: LIB3543-009-Q1-K6-C4
gnaactgataagagtagaggaacccaagcttttctttttctcatttcgggttttgtatttttttagaaccatactgtttttggcagttttgagagtgaatttagcgaaaaaaaaagatccacacaaaaatggagaggagcactccagtgaggnnaaaccacacacttccacagcagatcttctcacttggtccgaaactccaaataccgattcccccgcctccgccccgcgctccacccggcccttaccaggccgtc

SEQ ID NO: 51286 - DNA, 638 bp, Gossypium hirsutum
  Clone ID: LIB3543-009-Q1-K6-E1
cagatttttggacatctcacgagtgcttgctcttgccttacgagcaggcactcactcctgaggattcaactactgggctttactacgactgctcagcgcacatgctttgggttggagaacgcacccgccaacttgatggtgcccatgttgaatttttaaggggagttgctaatcctcttggcataaaggttagcgataagatggatcctagtgaactagttaggctcattgaaattctaaatcctcggaacaagccaggcagaataacagtcattgtaaggatgggagctgagaatatgcgagtgaaacttccccatttgatcagagcggtccgtggagctgggcaggttgtaacttgggttagcgaccccatgcatgggaacaccattaaagctccttgtggactgaaaactcgttcctttgatgccattagggccgaagtgagagcattcttcgatgtacatgatgatgaaggtagccatcccggaggaattcatttagagatgacggggcagaatgtgacagaatgtcttggaggctcaagaactataacctataacgacctgggttcacgctatcacacccattgtgatccaaggctcaatgcttctcaatcaactcagctcgccttcattatc

SEQ ID NO: 51287 - DNA, 503 bp, Gossypium hirsutum
  Clone ID: LIB3543-009-Q1-K6-H5
cccagcgtccgcgctcacagctaacagacttcgcacccactagggtcgtacacattaacaaacgatcgaggcctctatctcttgaagtgtgatctaccctagccaaatggagctttacgaactcaacagggtacatgccatcacttgtgggatatgatcttggagtagtgttttgaccatacactcacatacaagcatcatcaaatctgccttctccatatatgaatatacgatacttaagggaatcagtattacttgcgccttatgtctatgtgggatactgagcctatgaactttgaattttgggctttttcaagccctgaaattgagacacaggcaaacaaaagcagttgggagacattctttacaagtggtggctatgtagcacaattattattaacatttattatgaatatacaatataaatatgcatgtatacttggtttatgggaaatgacgacacagactgatgatgaataaaaatcatggtgctacacaaactt

SEQ ID NO: 51288 - DNA, 317 bp, Gossypium hirsutum
  Clone ID: LIB3543-010-Q1-K6-B2
ctactttaagtgtttaaacgtttggtgttttttttttccttttcttgtgtatagtaggattggtgggggtattttgttataaaaaggaagaagctcgtctttcatcatgctgtactgctagttttcttccctttctgtttgagtttatgaaacagctgttttatcgaaaaaaaaaaaaaaaaaaaaaaaaaaaaaaaaaaagaaaaaaaaaaaaaaaaagatcaaaaataatgtaaaacaaaaatacaaaaataaaaacatcttctaaagagaaaccaaaaattcaattcactacacctacctttaacaacgaaaac

SEQ ID NO: 51289 - DNA, 621 bp, Gossypium hirsutum
  unsure (1)..(621): unsure at all n locations
  Clone ID: LIB3543-010-Q1-K6-C2
gncctttgnanaatccccttccctgtagctaaaagttgagtcttctatggtttcacagcacagatttggctccgatttctttgtccctcatatctataaattagaaaattggaacaataatacagtatgatagcttaactaggaactatgtaaacaattaggttcttgcatgttgcaggtgatttctaccagcatgcaatttatatttagaaggaaatatagccctagccctacaattatttctctttcattggtgtttagttggtataaaagaatgtggactatttgtgtttcgaagctcttgatactctgtgagcttgatgctgaaggaaaacttttctaaataaggctacttaagtaaaagccaaaattcatagttaaaccactccaatggtggtctgcattacctaatttgtcaaaggctgatgttatgtgaacattggtcacagttgcctttgcaactggcagttcattccatttccccaatacactagcagtctaattggctgggatgctgcattggattggctcacagttccctctttggattaattttaaaaggaattttgctgatagataaatagtaattaagtaaattcataagctggtgacaataaaaca

SEQ ID NO: 51290 - DNA, 650 bp, Gossypium hirsutum
  unsure (1)..(650): unsure at all n locations
  Clone ID: LIB3543-010-Q1-K6-C4
cccagcgtccgctggctgttgagagaattgctctcaacttgaggtatcctagtggtgtggtgaagcatgtggctgttgaggaagaattcgacaacgttctgagcatgactgacattgtgatatatggctcatttcttgatgagccatcattcccggaagttttgacgaaagccatgtcccttggngaaaccaatcatagcaccagaactctccaatatcaggaaatatgttgatgacagggtaaacggctatatttttcccaaggagaatattaaagttttgacccaaatcattttgcaagtgatatcaaatggaaaattgtctccattggcacgcaatattgcttcgatcgggagagaaactgttaaaaacttgatggttcaggaaactgttgaaggatatgcctttctactggaaaatgttctcaagcttccatcagaagttgcacctcttaaggctgttgctgaacttccttcaaagttaaaagaagaatggcaatggaacctgtttggggattttctaaattttactctcgaagacaggagtgccaattttttgaacaagttagaggagcaatggaaccattctcgaagggagaagtttggttcattaattgctgtggatgattcatttntcatatgaaatttgga

SEQ ID NO: 51291 - DNA, 645 bp, Gossypium hirsutum
  unsure (1)..(645): unsure at all n locations
  Clone ID: LIB3543-010-Q1-K6-E1
ggacattgcttctcgatgtcagagtaaatccacggacaaatcagtgcctaagacatcaaggaaacggcagaactctggaaaggatgtttcatttgagatgagaactccagaaccacaactgcagacgttgncgcaggcgaaaaaccaacaaacaatcagctgggaatggaagaggtagaggtggtggggaaggaagaaggcgtaaaggaagttctggttttcagcagtttgaaaccagctcttctggtggtgatagcggcaatgataaccaggaagttgatggggagaagttagatcagccacgggaagtgcgaaggtccatgcgtactcgaaaccctgtgaattacactgtgaaggacctagaagacgagggtggcttgagccataaagaatcctctggtgaagatgcaatggagaaagaagctggtgaagatgtaaaggaaaagattcagtgtgaagctagagagccttctcttgacaacatctatggagactatctcgaaacaggaggcggattttgtatggacgagagaggaactgatctacctgatgctaaccaagacgttgatcttgaaactgaaccaactaatgattacctgaaaatgggaggtggattntgcatggaaggagacattgatcaacctg

SEQ ID NO: 51292 - DNA, 628 bp, Gossypium hirsutum
  unsure (1)..(628): unsure at all n locations
  Clone ID: LIB3543-010-Q1-K6-E3
ggcgtganaaaaaaaaatgccttcgtgtcaaatttcacccataaataattagaaaaaaaattttaagaaaaaaaaaggcaaatggggggttttaggaggttttaggcagggcaagccggcaatggaggaaagttttgtacttgtcgtcaaccaacaccgcaaacacctatagaaaccttgacccagctctctgacccaccgatttcaactcgcccaaatctcccaaagaaatgtcttctcaaaacccagaacccgaacaatcccctgatcccaaagccctgaaagacccagaactcaagcaaccctcggaagaacccccaaatcaagaatccaaagtagaaggagaaggaaaagaggaagaagaagaagaaggtgagtgtgggttttgcttgttcatgaaagcaggaggatgcaaagaaagctttgttgggtgggaaaattgcatccgagaagctgaagaaaacaaggaagatatcgtggaaaaatgctttgaagcaacctcagctttgaagaagtgcatggaagcccacgctgattactatgaacccattttacgagccgagaagaaggctgaggaacaggcaattattgagttggagaaagaaaagaagaggagggtttgagtcct

SEQ ID NO: 51293 - DNA, 632 bp, Gossypium hirsutum
  unsure (1)..(632): unsure at all n locations
  Clone ID: LIB3543-010-Q1-K6-F6
cggccgcgtgggctcgccccctttttttcttctctctaaggaattccngatggaagacgacgatgagttcggagatctatacaccgacgttctcaagcctttctcttccgctgctgcgccaccgcttcagccttctacacccacccatttccaccgtccgattgattccaatcctcaatctcagggtggcgacgacgacgatatcctcttcgggcgctcacgttcgattccggacactcaaaacctagcgccgttgaagtttcatcctgttcttcctcctgctgttgccgctgcagcagctctgggttcgatccctaattcagctcccgaaccaatggttttggattctggaaaagaggttgtatttgatattgaagaagggggtagtaaagagattgaggactcaggcttggatgacccgataatcccgggtttaaccgattcggttcgccaggaagattctggacggaacgatgacggaggcgatggtggacttagagacagcggccaagtggaagcggaagcggatggagaaggggatgattgggatagtgacagtgaagatgatctacagatagtgttaaacgacaacaaccacgggcctatggctatggaaagaggagtgattgggg

SEQ ID NO: 51294 - DNA, 545 bp, Gossypium hirsutum
  Clone ID: LIB3543-010-Q1-K6-G1
cccagcgtccgcccagcgtccggccagcttactctactcatagaaagaaaacaattcctaacgcataaccctacataataacttagtcttctccacgacagcaccctcagtcaccagctagcaggaacggacgtctgtgagggagagagcacacctatccctgcatacaaccggtctatagcctaatgggaggaagaagatgtcgatgaacctgatgccactgaatcatgggaggatgaggatgaatacaaaccttctcaggctcctagttcatatgcatcgggatagaaggccccttagaagcttcattaaaatgctactgaccttgaagagtgatatctattaatagtagctcaacatgcatcctcatatacctgaatatgataaactattgctacattagctttgcagataagaagctaacatcaagatgcactcgtaaaactttgagccaatgaacgtataaaacataatgctgtaaatttgactcatatatgtggaagtgactaaatacaatagacctaatttatgtcacataagctttg

SEQ ID NO: 51295 - DNA, 626 bp, Gossypium hirsutum
  unsure (1)..(626): unsure at all n locations
  Clone ID: LIB3543-010-Q1-K6-G3
cccagcgtccgctcatgcttttngatttgttttttttagggaaaagtttaatgcttttttaatattttcataactttaaaacccgccaaaagaaaatctagccatagctgtaagtttaacctcgtatcattcctctctggaacatgcatctctccgccgccattaactcattcaagtcctccaatcgcatctcatgngaaaacgacaggtaagcttcaacaaaccctagcaggatgcatcgaactatcggngaaaaacacgtcagtcgggaaaggtttcgaaggtaaagatatggccgggattcaccggccaaggaaggtactttgagtttcactcaaatttgattcctgcatccatcgattttgtttgagaatcgctgttgtgtacctctctttgcaaagacggatacaagattcagaccgtcgagcatttgctttcggctttggaagctaaaggcatcgacaattgtagaattcagattcaaagtctcgattctgaggatactgaggtcgaggttagtgccataatttttgtttggatatcaaaattgatttttaatttgcttaaaattgtaagttttgttattcatttgattgttacttttgtcacattctttcctttttgca

SEQ ID NO: 51296 - DNA, 613 bp, Gossypium hirsutum
  unsure (1)..(613): unsure at all n locations
  Clone ID: LIB3543-010-Q1-K6-G6
cccagcgtccggnaggtttctcttttgaggacgtcggccattcatatcaaatccaagtatctctctacaatctactggttttctttgttacgctacattttgaagccagcagatagttgggtttctatttgctaatgttggatagtaattctccttaaaaactacccatcttcatctgttttatgcaatttaaagtaagtctggtagccttcataatgttgatagttgattggacagagagattataacttgatcaccaatctatcgtaagatttttgtatttagttgcaggcaattgttcattacctctcatttttccactggtttggtttccttcattgcgctagtttggtttcttttccactgatttgatttgtttttctctagcaagccttattaagattgtgtataattcttttgccttcaatgttttgtctcttttcttttgccttgaatgtttaaatgagaagcggaagcaggagctatcatctctctaaatctctaatgaaactgcattatctaacttgagccttgcaaaaaaggccatcagaaaggggaattttaggtcttacaaggaaactagaggcagggtgtacggtggacaaggtttaaa

SEQ ID NO: 51297 - DNA, 569 bp, Gossypium hirsutum
  Clone ID: LIB3543-011-Q1-K6-A2
gtttagctttcccttgtataagctttgcttaaaaagcaaacaaaatggcagcaagagagacattcaatgtcacagcagcgtcgccttccacgattccacactcgccatggcattcaccagttccctacttgttcggcggcttggctgccatgcttggtctcatagcctttgcgctcctcatacttgcttgttcttattggaaactgtcagggtaccttgagaatggcgagagaggtgaaggggacagagacttggaagcaggagatgagacccagaaaggaggagctcctgttatggaacaaaagtttcttgtgataatggcaggcgaagtaaagccaacgttcttggccacccccatttcttctagcaggtcttcttctttcggcgataagagctgttgctgtggtgaaaagggtgagaaattggaggaggagactactagtggtgacgctgaggatcagcatcagcaacccccgactcaggagactcaacaccattgaatttccaggtgatgtgctgaggcggatggtgggtttggttccgtaaaagagactccaggttttgctttt

SEQ ID NO: 51298 - DNA, 660 bp, Gossypium hirsutum
  unsure (1)..(660): unsure at all n locations
  Clone ID: LIB3543-011-Q1-K6-B5
cccagcgtccgccccgcgtccgcaaattatccacgtggattcttcccttgttngaaaagccattatgcacttactgtttgtatggttctcatctttcttgtaagtctttgtatggtgaggacagtttggtaattaccttaatgtattctggttttggaattgtaattgggaggaaacctaggtaacttttttgtttcttcaagtctttaaaagttgtagcttattacctcatcctcgaactattgacttttgttgccatatatgctctttgttgaagatgatgaattgtagttgtctttgaagttagttttaatctcttgttgaccaagttctttgtcatgagaatatacatgttacttgttctgtctaatcaatgaccctaccagactaaagttgtaggttctgtctgaatatttttctttagttagatccaatgttatttgttaattttgtctttggccttatgataatattggtttagctcactaagcagttaataaacaaatctatgtcaactttgttggcaaactttatgttctatggattgtagctaaattacagttgtaaacctgataagccacttcttagtgccatgattgccttgttttaatgaagtttctatttaggtttctatttatggtattctgagtgggttattag

SEQ ID NO: 51299 - DNA, 561 bp, Gossypium hirsutum
  Clone ID: LIB3543-011-Q1-K6-D1
gccatgcgttcgaacaggtatagctctgtatctgccctgaggatttgaaaattttttgctatgtgcccggttgcttttaaggtctttggctcttaagatgcagaggctgacatcatgattggctttgtggctaccccttatggcagtcttcatactgattcagtgactgacaataactggtaattgtgggtgcatgcagttactctgtggataaacagaaccgactattgcccaggatttttgttattgaacaagacatcctcatgctggcttcaaagtcaatttaagcatgttaaaggctttaatcgtcaataagattggaactaagatgtcaatgaggtatttatataaattgagtctgtacatgacgctacaaacacagatgtacgtaccctgctaaccaatgtgaccgaaatattcaaaggagagaatctgccactgatttaccatgggtctccgacaactatcgaaatatgttggtgatgctaatactacaccaccttttcttgaagcaactgcatgctgaatgttctatcgaactggcaaatgacatgcagactg

SEQ ID NO: 51300 - DNA, 579 bp, Gossypium hirsutum
  Clone ID: LIB3543-011-Q1-K6-E5
ctttgctttaccttttttttttttttttagacttggctatttcaccaaaaaacatatctggactatttgcttttagcccagttattcggtgaaatacatggatgggatttttttagcaaaatcccagtgttttcaccaagataaaaagtgaccatcataggataacaaaccatttccgggctaaaagaccaagaaacaagggtttccccaatacccaataaggataatgggtttacggaaacgagaatagttatgtaccgtctagcaacgccggtaccaaaaaaacctgtgaaccctatgggacacctgatcaaatccaccctgatgaaccctacaataaaatacctgcgtgcttaacccactacctagactcttacttttattgcaggaccaatgcgtacaggaacactgagtcaggttacgaaacgcggttcactgaaataggcatgacctccaaataaacctacaactacaatggtaactattacaatggaaacaaagaggtcttgttcactgtggaaagggggtgtactaaggcaaaaccaaaatagcaactacttttacacaggtctcaatgag

SEQ ID NO: 51301 - DNA, 634 bp, Gossypium hirsutum
  Clone ID: LIB3543-011-Q1-K6-E6
cccaacgttcgacgcacagaaacccaggatgtcatagctctacctgtacctactttgctttgcctgactatctcgttctgggccttcgatgcatcattcctggtccaatattccaaggatctcctgtctgcaagcgccagattacctaccctgattccggactgccgcgtggatggagccccatgtttgggctttattggacatggaagtggggaggggcattattgtagaactgttacactgagcctcagatatagatggtgctaccaaaaccttgtatatacacagaaagcgatgaaatctaaagcactatattacattcgacatatgtccttgacatgcgaaattatgtgctaaatgaatgcgtagctcttcttatctgttctgcctctgaagattgttcttcttttttggtcaactattgatagggtgaaagtagagctcctaagatcagaaatatgaaggttcctctcaaccatctatgtgcacacccttggcaaaacttcccctgtttatagaatattaaaataaattaccaaaatttaccatggaagatagctttttgtgtttaaaaatctatatttttgtatgtgggtttaagacgagaaatcaatattagtaataccgatgggag

SEQ ID NO: 51302 - DNA, 566 bp, Gossypium hirsutum
  Clone ID: LIB3543-011-Q1-K6-F3
accctttctctttgtatttcaaagaacaataacagaggaggagaagcaattaaattggttaaaagatataaaggatacttgttaactagtaggaatggatatactagtaataagagctgattgatgggcttgttgtacctggcaagggttgcggcattatcttgaaggatcatgttaataacagagaacggaatgctcaattttgcaaccaaattgtgtgcagtggcaggctgaactcaatgaaaggtactctgaatggctgctcagaaaagctaaatatttcatgcctttttaccggacttacatcgattggcaaggaaataattgtaagcttctttaaggtatactctgcacctatcaactctagaaaattctttactaatcctcagaaaaagctataatctcagctggaaacagattcatctgaaactagcaatgttcaagatgagccacaatggtcagagctcatatccccaccagcagagattcatagagggtgcaaaccggagccgatgatgctgattctagggaatttattaataatggaagttggaagatttaacaca

SEQ ID NO: 51303 - DNA, 580 bp, Gossypium hirsutum
  unsure (1)..(580): unsure at all n locations
  Clone ID: LIB3543-011-Q1-K6-G5
ngattactttaataatttataaattttttaaattttaaaaataaaaaattaaaaaaattccggttattcgggtttttttcaagaattccggtaattcgggtaattccggtaattcgggttattccggtaattttttacccaaaattaaaaatacctaattttccggtaattcgggtaaccgcaccttattaacccaaaaaatttgggtcgggtaattttttttaaaaaaaatcgggtcggttaacgggtaaaatttttggaagggcggttaattcggttatagtaatttcggggcggttaaccgggcggttaaccgaatgaacacccctagccataatgcagaaataattgtcaagtttaagacttaacttgaataaaaaaaaaagttcatgccccaatatgaaaaagataccaagtttaggttccaaaaagtgatttactgaactcccacattaattgaaaatataatttcaataaaactcataagactcgagttaaggtttaaaatattagttaaatatttgagttcagttcagcaagcacaacaaaatttgattactttttttagccaagactaaat

SEQ ID NO: 51304 - DNA, 508 bp, Gossypium hirsutum
  Clone ID: LIB3543-011-Q1-K6-H2
ctccccgttttgtttcaaggcactgttgcagataatattcgatatggaccaaacttgagaggaaagaagttaactgatgttgaagtttccaagttgctaacactggcctgaccttgattcctcctttctcagtaaaactggtggggaattatctggtggtcaagctcaaagagttgcacttgctcggacacttgcttaccaaccttgaggtttgctgctggatgaaccaacaagtgccttggatcccatttcgacacaaaacataaaggatgtgatagtgaagctttagaagaaaaggagaatgacagttgtgatgggttcacacagcattaagcaaattccaaggttgcagatgttgtttgccttcttgtgaatggtgaaaaatttgagattttgaagcctaatgaactctctgtagccaagcatcccatgggacacaagtttcttcagctaaattcgtgatttacttttctataataagggggtatatttcccttttctttgtgct

SEQ ID NO: 51305 - DNA, 536 bp, Gossypium hirsutum
  Clone ID: LIB3543-011-Q1-K6-H5
cccagcgtccgcggccgcgtgggtggaaagcaaaaatttgtgaattgggaaatgatgtggtaagcaaaggaaactacttaatggtggcgtgaggactacgcactttgctttatatcctttccgcctcacaacgagttaatgaaatttgaggtttattggggttgtttttgagcagtttcgtgtttggtgtgtgaatgttggaccgaatttggagtttgatgtttggttttggacgcacttaaaaaaaaaaaaataggggttggtaattgggatttgaattgaagttaccgctaataatatctagaaaagggcgctaggcagccctctctgtcttttgttggttccctcccggatgaattaaaatttaaagttttgagtggggactgcgatggataaggacattgggttttggagggtcgaaaagtggagcccccgaaggagcattcttttattggaggggaccccccccagttaaatgacttggtacaacttaccacacaggtgactcaggttttatctgctcttggtttcttcct

SEQ ID NO: 51306 - DNA, 279 bp, Gossypium hirsutum
  unsure (1)..(279): unsure at all n locations
  Clone ID: LIB3543-012-Q1-K6-A1
tgggtctgacggatatcgcagnatggtcagaggccaaaananaagtcgntcgaaaaaatgtatnnatggacggaaaatctttactggttggagacaacaggaattactgtctcgtttgcttacccatgtcccagatgaatcacaaagtaatttgcttgaggtatctaagtcatttttggaaggtaaaacttcgcttgaaaattatatttgccacttgaagactagtgttggcatatctgcacttgtagaagctgtaggtatcggtaaagggaagacaga

SEQ ID NO: 51307 - DNA, 616 bp, Gossypium hirsutum
  Clone ID: LIB3543-012-Q1-K6-A2
gtgcaaaacatccgctggcatggcagccatgctctcaatctctctaaaccctaatatctcagcttcaatttcccttcatgtccatttccaaggggaaactcgaggaatttaaggcctgaattcacttcacattatcccaatcagaaccaggctgaggcctgaacaagagactaggtgtttagtcctggcgaatcaagcggtgataaagtactcacagttccggttcaggtttctaatgtccggttccggttggataacctcggaccacaacctgggtcacggaagaagggaagcggcctgggagaggaatatcggtcggacatggtggtcgctgtgggttcgggatgaggggtcctgaatcacggcctggaccaagtgttacgaaagggttcgttggcggtcaaatgccgctttataggcgcatccctccattgacaggcattgctggtggtctgcatgcgggattgcctaaattcgttcctgcttacttgcgagccttcgcaccagccggctttcgtgacggcgacgaggtgtcgctggagactgttgcgaaaaggggtccgatttatccctctggcagagacagaaagctaccctttaagattcttggcgacgg

SEQ ID NO: 51308 - DNA, 200 bp, Gossypium hirsutum
  unsure (1)..(200): unsure at all n locations
  Clone ID: LIB3543-012-Q1-K6-A6
cccacgcccgtccggtacatncttcgctttgngaattagnatccaaaattccccttntcannncttatttccgattccccaattttttcctggaaacccttaatccttaatcccgggattccttcttcgtctaccattcgtctagacaaatggggcaaccggagggagacccgggcagtcgtgggcagaacaccccgcac

SEQ ID NO: 51309 - DNA, 587 bp, Gossypium hirsutum
  unsure (1)..(587): unsure at all n locations
  Clone ID: LIB3543-012-Q1-K6-B5
ccccgcgtccgacttgacacacaaacttnatgaatatattgagcctcttatggaagtgaaaccaatggagtttgaggaaaacttgcttatttgcctgagtttgttaatgtatcttcgaagcaacggttggtttatattgatatcggggccagtgaacatatgaactcgaatgtttcaagctggttcttcccatcttatcctttggatcataaagctttcgatgtttatttcgttgatcataatatttcagtgatgctatcttatatcaaaagacctggtattaactttgtttattaccctggccttgctgaaaaccgagctgcattgagttcaactaatagggattcggatccatttgttgaagatgaagggtttgactttcaactctggtttaaagatacagtccaatatgcagattatgtggttctgaaaatgaatgcaggtgatgtggagttgcaacttctatcagatttgtttgaaagtggaatcatatgcttcatcgatgaactttttcttcactgctcggaccgaactgaaagtggacaagctgtgaaaggaagagactgtatggagtctcttcaagtccc

SEQ ID NO: 51310 - DNA, 652 bp, Gossypium hirsutum
  Clone ID: LIB3543-012-Q1-K6-C4
gggaatgtggttcattatgacaggaggaattgcttgtgaaacagcatcaatagaggaggttataggcggcctatatgggaactctgaaatgattggaggcggaatgtacggtggaggccttggaggcatctttaaaagtcctatgtgctggttatgaaatgggaatagttgccatatggacgtgcaagatccaaattatgcttatgtacctcccccatacgcagctgcttatgaatgacccttcctacgaaacatgcaatgggttgttaaccgattcatcagtatatctattctcatagaccataatacacaagcgtatccacatgtgcaagactgctctttttcagataaaacatcgcactgaataattgtaaggatagatagctagatatgagttaatactggtgctaatgaaaataaatacccaaaagaacaatcaaccaacaccaggtgtactcaccatgaccacataaccttcatgggtaatacaaatctacattgaatggccaatggctgataccagtagtgcatgagacaatagttgggaagaaaatgtcagcacctaaaatagattatcaacggtggctcagctgaaacacacgcaccaatttgagtaccctgcttgatgaagaccaggtggacctcatttgaa

SEQ ID NO: 51311 - DNA, 370 bp, Gossypium hirsutum
  Clone ID: LIB3543-012-Q1-K6-D3
gccatgcgtgtcgaggaaaagatttgtgtgcctttttggggaccaaaaccaagaaccttttacataaacggaacttttcttgaaaaaaaagaggcaactccttctttttcatttgcttttttttcttaaagcttttccttacttggtggaaaccaacccccttgaaaaaaaaccaaaaattctttgatttgactgaaccttaggcgtcgtgaaaggtctaccttttttcaattgccccgtcctctttttttcaagatgtgaaccatggggaaaaatttatatccactgagccggttccggggtccgcggataactttttaagacaagctgataaaaaccagtgtttttagtgttttggtcaaccagctat

SEQ ID NO: 51312 - DNA, 555 bp, Gossypium hirsutum
  Clone ID: LIB3543-012-Q1-K6-E4
cccggcgataaggtcttcttcgatgcatcggtcatctggggtttggttggaccaaaacgaattttcggctcactgggggagtactcaactcttaactggttcttcctaggaggactattaggaccagttgtagtatggctgttgcacaaggcattccccagtcaggcttggattccccttatcaatctgccagtgcttttaggcgcaacaggcaacatgccaccagcaaccccattgaactatacttcctggattatcgttggaactatcttcaacttctttgtcttcaggtatcgaaaacgatggtggcagaggtataattacattctatcagcagcattggatgcagggacagcattcatgacagtgctgatttacgttgcactgggtgttgagagtaagagtttgcactggtggggtgctagtcctgatgttgtcccggagcattgtgatctagcaacttgccctaccgctaagggtatattggttgaagggtgcccaatattttaagcttcgtgctctgttagagtctgctacttttttaattaatgttct

SEQ ID NO: 51313 - DNA, 647 bp, Gossypium hirsutum
  Clone ID: LIB3543-012-Q1-K6-G2
cccagcgtccgccccgcgtccgcggacgcgtgggcagaccctgagtctcttttgcctactcctgtttctcctccttactttgagtccgagccatgcacaactcggggtcggttactatcacaactcgtgtcctgacgttgaatcaatcgtcaaatctgcagttaaacagaagttggagcagacacttgttacagctccagcaactcttagactattctttcatgactgtttcgtccgggggtgtgatgcttcggtgatgctagcttcttcatggaaaaaaagtgcagagaaggataatccggataatctttcgttagctggggatggattcgacacagtgatgaaagccaaggctgctgtcgatagtgtacctcagtgccgtaacaaggtttcatgtgctgacatcttagccctggctactagggatgtcatagctttgactggagggccatcttatgcagtagaattgggaagacttgatggtaggatctcaacaagagccagcgtgcgtcatcatctccctcatccagatttcaagttaggcaagctcaaggccatgtttgcctctcatggtctcactcttacagatctggttgcactatcaggagcacatacaattgggttctcacactgcagccggttctcca

SEQ ID NO: 51314 - DNA, 631 bp, Gossypium hirsutum
  unsure (1)..(631): unsure at all n locations
  Clone ID: LIB3543-012-Q1-K6-G3
gnatttacagnaaaaatagaataataactttggcattcaagtcttgtcagttctattggcttgaaaatgtatggtacatatttttcaaagaaaaggaaaaaaatcaatgaagccaattctgtacctaaccattctgtagtttcctcttatgaatgatgatattgaactcagaaattgtgtgaaatttttacctcaaatacacctagttcttattgtggttactgtgctgtctcagactgaatattgaattatttatgttcttacaaacaataatttatgtaactgcaggtttctatccttcctcccctggcttccgtttttgtaacaagcatagctgcacagtttgctgacaatctaattgcaaatggagttgagaccactacggtgagaaagatctgccaggcaatttcctttttgtctcctgctacttgcatgattctatcttctctagatctaggactgcaaccatgggaaattgttggatttctctcctgtggactagctctctccagttttgccttgtcagggctttattgtacacatcaagatatatcacctgaatatgcaagtatacttttggggtattaccaacactgtcggagcagtgcctggaaatgtaggtgttgccctt

SEQ ID NO: 51315 - DNA, 671 bp, Gossypium hirsutum
  unsure (1)..(671): unsure at all n locations
  Clone ID: LIB3543-012-Q1-K6-G5
cttttcagccgaatcanacccccagttttatgggttttcctcccactcaattctctactcctgacttcagctccagctccgactttcaaggtccaaggttgttcactgcaactgaaaatgcttctgctttcagtggtggttttgagggcttcgatgcatcagggaatgctgtctttgtgaacagagcaaagattttgaagccccttgaagttttcccttcagttggttctcaaccaactttgtttcagaagcgagcagcgatgcgtcagggctctggtgtggctgatgaatcggggaatttggatgtttcagacgggaagaggaagaggcatgagcaaggggagattgaggaagccagcttcgatgtatcgggtttgaactatgattctgatgattgcaagctggaggagagtgccaagaacggtggttgcaattcaaatgcgactagtacactcaccgctggtggggatcacaagggtaagaggaaaggaatgccggccaaaaatttgatggccgaaaggcggaggaggaagaagctcaatgatagactttacatgctgaggtctgttgtgcctaagattagcaagatgaatagggcttcaatacttcgggacgccattgattacttaaaggagcttctgcaaagaatcaacgatcttcacactgaactc

SEQ ID NO: 51316 - DNA, 611 bp, Gossypium hirsutum
  unsure (1)..(611): unsure at all n locations
  Clone ID: LIB3543-013-Q1-K6-B3
ccgcttgnaagnnctctatgcccagcattatagcactttcnnggtattgtatttccaaattaaatgggagccaaaagggaggggtgaggaattgggaaaaagttggtcgggaagatgcttccacccggtgcctcgctccctgaagattcattagagcttgattactccatagcaatagaatataaaggtcctccagttgcttatgaagtacctagagttgagcctctggatgtaaattcacatgccatccctactgcagaagctctgtcagagtcccaaagatcagttgctaatactgcgaccctgctgattgagccaatccccttgccagtgtctcatattgccagtgtcacaagtccacgtactcagagtccaagggtttcagcaagctctgagtccctagtgtctgtgctgcaaaatcctgatttttcttcggtttctccttcagcatcacctggctcagttggcaaccctcctagtaatcctcctaaacaagttgttaatgaaggaaagagagttccagttgttacattcaatactgttgaaaaagtcggatgggaaagatatggatatggtaaagagagtctttcctgaatatgttgggggttcca

SEQ ID NO: 51317 - DNA, 517 bp, Gossypium hirsutum
  Clone ID: LIB3543-013-Q1-K6-C1
cccacacacacgaacaaacccgctctgtatattgcaattttctatataaaaattctttttttcctaaatgctgcagatatactaaaagactataaccggtatgacaaccactctctaggttgaaagctccgacacgaaccgacaacgtgaagaccaaaatcctattataatgaaagcctacctgcaaacacagacaacgggtgatattccacggaaaacagcttgatgacgggcggaccttggccgattacaacatccaaaacgagtcaactgtccacacttgtactgaatttgcgcggggggatgcaaatgttcgagaaaaccttgaccgaaaagacaatcactctaaaagacaagagctacgacacgatcgacaacattaaggcgaatatccaagacaaggatagcatgcacccagaccagcaacgaataatcttcgccctaaaacaacttgaagacggccggaccttggccgactacaacatgcatgaagagtcaacgcttcatatagcacttc

SEQ ID NO: 51318 - DNA, 602 bp, Gossypium hirsutum
  unsure (1)..(602): unsure at all n locations
  Clone ID: LIB3543-013-Q1-K6-D4
ctttcatttcttctctcctttcgattcctggactcggtatcttgttgctttaattttctggatggcaggaacattgataacagaagctgttttgggtgcttttttggaaggagcggtgtctaaagcgaattcaattgtcactaaccaaatcagccgtatatggaatttcaagaaggagctgagaagactgggtgactcactagaaatgatgaacgctttcttgcaagatgcgcgagaaaaagcaaacaaagatggacgcagtgaagctttggttgcagaggctcaaagatgttgctgaagaggctgctgatgtccttgatgagtttgactatgaaattctccgaaggaaactgaagattcggagccaaattcgaaggaagttagtcgacttcctttcttctaacaattccattttatttcgtctcaagatggctaaaaaaattaaggacatccttgaaacactggaggtcgttaacagagaggccaacgaatttggtcttcagcagagagctacagaacatgtgtctcctagaagatcaaatgtggnagacgttctctgtcatggatgactcgcccattgttggaagggaaaatgatgtctc

SEQ ID NO: 51319 - DNA, 651 bp, Gossypium hirsutum
  Clone ID: LIB3543-013-Q1-K6-D6
cagcattctacagcagcaccaacttcagctatggggccagctccaccgccgcctcagaggaaaaagagaaaccaaccagtccgaccaaatccagatgtggaagtgatagcactgtctcccaagagcctaatggcaacaaacaggtttatttgtgaggtatgcaacaaagggttccaaagggagcaaaacttacagcttcacagaagaggacataatctcccttggaagcttagacagaagactacaaaagaagtgaagaggaaggtttatctctgccctgaacccacatgcgtccaccatgacccgtctagggcacttggtgaccttacaggcatcaaaaagcattactcgaggaaacatggtgagaagaaatggaagtgcgagaagtgttctaagaggtatgccgtgcaatctgactggaaagctcattcaaagacctgtggaactcgagagtacagatgtgactgtggtactctcttctcaaggcgtgacagtttcatcacacatagggcattttgtgatgcactggctcaagaaaatgcaaggcaacctccttccttcaactccattggcaaccatttatatgggaagtactagtaatatttgctttagggttatctcaagtgggaactcaaagtgattagtacaaga

SEQ ID NO: 51320 - DNA, 653 bp, Gossypium hirsutum
  unsure (1)..(653): unsure at all n locations
  Clone ID: LIB3543-013-Q1-K6-E1
ccctttcactgctttcctttcactgattgatcccttctctttcgccctcaaaacttccttggggttcctatggctgccgctgcggctgcctcaattcaaactgcaccttttcgtaggagaaactgccagaacacgctgggatcaagacgctgcagcagattaagtttgtgccgacccttcagcatcggtaccagttcgtcctgagtagccaaacgatagccgcgtagcgctgcgtgcgggtggtttgcctagggaaccttgaagcctcactttgaagttgaaaccaaagaggtggtgacaagaaccaaaggactgtgttctgtngagccagagtctctgaggaggcttcctacagtaaacaatgtccagtaaccagacagccgatgaggatcaatgaatccactaaacaaaccgattagaccatagatactacagagtcatagtgaggcacactgcgtaatcacccacctaggatgattagaaggaataagaatcatacccagctgatagtgcaggagaaagtcgaaacactacctgatccagccgagatgactgagataaataataactcttcctatatgaacatgcgggtgtcaatggaagtgcgtattaaatggctacagtttgataagtgtgcatgctaagtcaactca

SEQ ID NO: 51321 - DNA, 437 bp, Gossypium hirsutum
  Clone ID: LIB3543-013-Q1-K6-E5
tctatatatatagggagaggcgtgaagggaggaagtgacattggctatatggctttgctgcattgttacttgttaagcgctggtgagtgtgtaccatggtccatgggcttggtcttggtaatgcccattgcttgctattgtctcgatccctgatggggactggtggtcggcataaaaactggaagaatgcaccaccaggccctgttggttgtcctatccttggcagccttccacactctctccaatcgtgatccttgaagatttatttcacatggtctagatgtactgaccgcttttctatctaaacttgggaataaagacggtcgtagtggcgtcatcacacggaaatggaagcccaagttctgctggaaaatgatggggtgttttataagtgtgccatctgcgcttacattgctgttctttcttatgatgcccat

SEQ ID NO: 51322 - DNA, 608 bp, Gossypium hirsutum
  Clone ID: LIB3543-013-Q1-K6-F6
ccccgcgtccgcccacgcgtccgcccacgcgtccgcctgcatctatttttgccattggcccttatgcacatgaaacccagttagtcacgccacctgtattctctgccttggcaactgaaccatctactgctccttttacaccccctcccgaatcagttcaagtgaccacaccttcatcccctgaagtaccatttgctaaattgctgacatcttcattggagcgtgctcagagaaatagtgggatcaatcagaaatttgggttttcccattatgaatttcagtctcatcaaatataccctgtgtcacctggtggtaatctcatatcacctgggtctgtaatctctaattctggcacatcctctccatttcctgatagacgtcccatccttgagttgcgcaaagcggaggctcctaaaatcttaggctttgaacattttactactagcaaatggggttcaaggctcggctctggatcattaactccagatggactggggcaaagtccaacactgggttctggatgtatgactccagatggtatggggttggattcaggatcatggacacctgatggtttgcctccttcctcacgagacgatttgttttgg

SEQ ID NO: 51323 - DNA, 644 bp, Gossypium hirsutum
  unsure (1)..(644): unsure at all n locations
  Clone ID: LIB3543-014-Q1-K6-B2
tcaagaatcatcctttcttctcttctttgggtgtattgtgctgcgctgtttcatcctcgattcatggccgctgctgcttctgcagctactgtttcacaagtctttcaaaaccatcacagtgataacaatggcgttgaagttagcaggcaagagatacaggccgccatcgccaaggctgtggagctcagagctttacatgcagctctcatgcaaggaaactaccctccaaatctcagatacccttcttcttcttcttcctcccctgtttcacgcccttttcctcttttctctgctcaagattaccctgttttcactcctgtaagttaatatcctttttttcttttttcttaatcagttgctaaaattgtgtatctttttctggtaacctttgttgctatcaagttgattcctgccttgtttattgaattctaagttttatgatataattaaaaaagttaattaacttcagcatcaatatagtctatgttgtctttcttttccctgttgaattctcttgataagttttggctagttgactctctagatcattgttagcttagtaattagtaatagccttttcacaagaaatttagcctcattcgncttcttcttcttcttcttcttcttcttcattgctcattgct

SEQ ID NO: 51324 - DNA, 573 bp, Gossypium hirsutum
  unsure (1)..(573): unsure at all n locations
  Clone ID: LIB3543-014-Q1-K6-D6
tttcgtttcttctctgctagggtgatgcacccatcatcgcgccgccaccagaccacctcccctccaccatggacggtggtcggagaggtgctaaatggcccttttagcccttgttcgtggcaaaaaacaaataaaagaggacgctttggtccttttaccaaaccgacgcacccgccaaagccgagaccaaaccttgaaaggttttgaggcccttggtgccggtgaaacacccttggcgacggtagagcgtaggaccactcaggtaagtttattcctctttctttttatttaaaagatttgtgtttagaaataaaataaaaatgaaagaaacaagaaacgaaaatatctaatgaaagattgaaaaccttcgaagtttctgttctgccttgtattttcagtgtgcgtaccccagagaagggatatcctttttcgctttttaaagccggattacaatattttacatccatttttcttatcgttttgctatttgtttcttttatttgncatttttttcttggttttttttttactgctcgcgtgttcctctctttgcaggtgtgtcagaagcatgtg

SEQ ID NO: 51325 - DNA, 294 bp, Gossypium hirsutum
  Clone ID: LIB3582-058-E4.F2B
aaaaaaaaaaccatacttttttttcctgatttttttaattccatgcaaaaagggggaaaaaaaaaagaaagagaacattttttgggttactataccccaaaacgtctaatctaagaatctggccaggcagcaaaaacaggcatttgggggatggaaattgcgggcctgggctgggccgaaggaatccaagaattcacagtttttggggaaggagtgaacaacttggatgatgggggggggggctttgcaaaccccataggtaaacggcttctttttgggttaccttctttgggg

SEQ ID NO: 51326 - DNA, 407 bp, Gossypium hirsutum
  unsure (1)..(407): unsure at all n locations
  Clone ID: LIB3543-022-Q1-K1-A1
ncacgcgtncgnngacgcgtgngccggccccttggnncgcccgggttttacagaccagtctcttttttttcacgggggtgtggggtatgttgagccttttttatcaatggctctttacttgttgctcgagtcatcttctgggtgcacgttgttgcacgctcaagggctcgatgaaataagtcccaatactgacgccgttacgaactcggtgggagagataaaatgacatgggtaaagtggtccaactcactgctttttnggccaccgggaacagtcttggtggtcgccatcagatgcaattctgttcctggaagggttatgagcgatcaattgaggagtcctatggagctgaatctcccaaaagtgcaagcaggtactatataaagttcagactgtgtgttgcagag

SEQ ID NO: 51327 - DNA, 474 bp, Gossypium hirsutum
  Clone ID: LIB3543-022-Q1-K1-B10
cccaaaccagctctacttgacaatggatgatcttgctgatcaatttggtatcggaacacttagattgaccacagggcaaacgtttcagctccatggagttttgaagaagaacctcaagacggtaatgagcacgattattaagaacatgggttcaactcttggtgcctgcggggatctcaatagaaatgtgcttgctcctgctgctcccttgatgacaaaagagtgcctgtttgcccaggaaactgctgataacatagctgctctgttaaccccgcagtcaggtttttactatgatgtgtgggtggacggggagaggttcatgacatcagagcctccggaagtagtgaaggcaaggaatgataattctcataaaacgaattttccagattcgcctgagccaatatatggggctcagttcttgccgaggaagtttaaaattgctgtcactgtgccaactgataactcggtggatat

SEQ ID NO: 51328 - DNA, 398 bp, Gossypium hirsutum
  Clone ID: LIB3543-022-Q1-K1-B11
aagcgtccgcccacgcgtccgaccacgcgttcgcagagttcaaagattttagatttacttatgcaaaatgctcatccaccaatgggatcatgtcgagaagtggggagggcgcatattattagatgcttatttataataactgatgtctccggcgctgcttggcgtggaggaggaaggggttcacagcaatggtactttacaaggttgtacaggcgtaatggaaagtgtgtgccagaatagtgctgaattgaaggaacggaactacatgggcttggctgattgggcaaaaggggatagctctgattggtgaactgcgctagaggaaagaaaggctagtgtgaatctaaaggcgagtgaacttagactcggacatcctggattgcagtctcctgaaagaa

SEQ ID NO: 51329 - DNA, 259 bp, Gossypium hirsutum
  unsure (1)..(259): unsure at all n locations
  Clone ID: LIB3543-022-Q1-K1-B3
gcgcaaanacgcaacacccaagganaacccaaaacnccaccaccntcgcacacaaacgaacacccaacacacaggaaaaacccccaaacggggaaacccccgcggcgacaagaagcagaaacacggcaaaacccgaacggggaaaaccaaaaaccangaggacaaggcngccgacaccaccgacaanggcaaagccaagagccaagacaaggaaggcaaccctccagaacaacaacgccgaaacaacgccgaaaagcac

SEQ ID NO: 51330 - DNA, 479 bp, Gossypium hirsutum
  Clone ID: LIB3543-022-Q1-K1-B7
gcggcgatgccgtagaaattggttccggttgtggcggcggtgtaagcagttcgcaatgctggccggttctggacaaagggtcgccgttgtagagaaggggaactactttacttcaaccgactattcacccttcgaaggtccctccatggataaactatacgaatctggaggaatccttcccagtttggacggacagctgctgattcttgcagggtcatacaggacgtggcggctcggctgtgaattggtcggcctgtataaaatcaccaaaatatgttcttaaagaatgggctgaggactgtaaaatacctctttttggaagcaatgaatatgtttcatcagtggaaactgattgtgaaaaaattggtttcacgcatgattgtaaagaggaaggatttcataatcaaatgcttcaaaaagggagtgaaaattttggtctataagacataaagtgccacggaatttctccgagagccatt

SEQ ID NO: 51331 - DNA, 474 bp, Gossypium hirsutum
  Clone ID: LIB3543-022-Q1-K1-C1
aaaattctctctctgccacttcatcttcttccccaagctttccttccatctatttcctctgccggaaactcaacaaaatttcaacttgttctgagtgatgatgggtgtgatctgccgctgttcccacacatcccatatcactgaaatcatcatcaccagcttctttcgccacaagccttaaacaagtgaagtgaagaatttcatattctttgaaacaaagaaacccacctatccagagtggccttcttttccccttttaatcttgttggatcttcttctgacgatgttgatgataatgatgaagttgatattttgaaaaaaaaaaagaaaaaacagcaagatcgatcctttagcttgaaaattttaatggcgggtgggagggtctatcgtagtaatactagtgctgatgctggttctaataatctctctgttttgcttcaaagtcgatgggttccttcctcttctgagcctctt

SEQ ID NO: 51332 - DNA, 473 bp, Gossypium hirsutum
  Clone ID: LIB3543-022-Q1-K1-C12
gaaaaacccacagaatctagggtttttctttttctttttggaggttcatttttgctctctctatcgaaaacacgaagcattgctcccaaaagaatgccatttttttgggtacattaaaactaagaaacatggcgttttggcgtagaatcaatcaatctaagcttcaacttatatcgaatcaatacaggagattttactttcaagccccctttacttcctctcttcatcaaacgaggatccgtgttttggagaaacctttttgcagtattgaagataagccctcgtatttttacagcaatgttagatcttttgctgccccagttcaggctattaagaacaagaaggctgagtcaggcaaggaaaagccacgtttaaataagcaaatcactgctagtgttgtaagattggtgacggaagacggtcagcattccgttgtctcaattcaagaagcattgcaacaggcaaagaagaaa

SEQ ID NO: 51333 - DNA, 475 bp, Gossypium hirsutum
  Clone ID: LIB3543-022-Q1-K1-D10
cccacgcgtccgcccacgcgtccgcccacgcgtccgcggacgcgtgggtttttttttgttaatgaaaattaaccatataaatatcaatcgaattgaataacataaaaattactatttcggtacaggtttaagaatgggaagtgaagtggtacagttttggtttaaaaagggataagatccaagaagagggtgggacacttggggtactagtggacaaatatataaaatgaagaatcacatgacatcaccctgaaccgaaacggttcaagtggggcccccacttcccaactgccaacccaccaaatgagccctcatttaaatttaaaataattggaattcgaaataaatatataataaaagaaaagccgtaccaagaaaggcggaggcgttcacaggggtcgatgttttggggtggaccctagcgaaccaggccgggaccacgttagaccgtccgatgacgcacatgtaccgagcc

SEQ ID NO: 51334 - DNA, 476 bp, Gossypium hirsutum
  Clone ID: LIB3543-022-Q1-K1-D3
cccacgcgtccgcccacgcgtccgtctttctttatatggtaaaaattctctcagcaaccaaacatatttttttttctttgtaagctattgatgtgtacaattcagctttacaaaaatctttttccttttgttttttttcacgggttgatgttgatgattaacagaaatatgacaattctgtttgtgtttcaatttcttaatacatacaaaaagggtttcaaatataactcaaaatcttgcttgtttttcaggtggtatcatcaacaagctttatcaagaagaaactaaattatgagatagcatccccttctttgctttttctttttttgagggggggagggagagggtttcattaattgatatcaatccaagtcccgtgaatcagtgaattggttttctctaaacccaaaactcacattcaaaatctgggtttctctttttttccagaaattttaaattaaatgcgaagataattg

SEQ ID NO: 51335 - DNA, 476 bp, Gossypium hirsutum
  Clone ID: LIB3543-022-Q1-K1-E1
cccacgcgtccggcatgaggttcttcgtgacagagaatcagattcaaattccaatgcagatcgtaataagattatgagaaaggcatcttttaaactttcatggtggtgcaatggtgagaatggtgatcagcacaaacatgacattgtctcttttgaaagagggaatattacaacggcagaacgcagtagtaaacaggtattgcttcctctatcctgttaggaagcttttgtttgctgcgagtttgtagatttctctgaagtgggaatctgacccgcagactgtgcttattttgacaaaaccaaattcggtttctgttcggattctttgtgtacaaatggtcagatggttgagagagaggaaaaagttaaatgtttatgttgaaccacgtgtgaaggttgaacttctagcagagtcatccaacttcagctatgtacaaacatggaaagatgacagtgaaatttcacacctacacatg

SEQ ID NO: 51336 - DNA, 374 bp, Gossypium hirsutum
  Clone ID: LIB3543-022-Q1-K1-E7
ccggatttatctatgggttatcctccattgcatccgtctcaacctggacttgttcaagctcctcttcctgttatagggaatagttctgatgttattcataaagctcttagttctcagttgacatcgatgactggaggattgaaggagcccaatcagcactcgaatgcatgggaggatgagctccacaatgttgttcaaatgaactaaggaaccagtgctccttctgacagcctaaatgtaaatgggccaagaccatccggtaatacgaaagtagaactttgatccttaagtgtctatcactctatgccaggcaattcattatagctccactacttactatatatatgccaagcattcatgaaggtagccaaggg

SEQ ID NO: 51337 - DNA, 476 bp, Gossypium hirsutum
  Clone ID: LIB3543-022-Q1-K1-F5
ttctttttctgctaagaaattataaaagatgatatcaacttcatcatcccaaaagaaaaaccttcaatcccttttagcctctaacctcaagaaactcaccatcactcctccttcttctaatcatgagtttgattttggcgatgttttcggccctttgactcctcaccatcccgaccccaccctccattcaccttcctccacgtctcccccttctgctttccttggggatcctcaagttatccacaccaggtcccattcttatgtgggtccttctcctcgttacaccgtctcttcttccctccctctccaaatccaaactgaaaccgagtatgaagccgaggaacaagatgacgatgaagaagaagcaaaacccaagattgggcccgaggattttgtgatcctgagagttgttggacaaggagcttttgggaaagtttttcaagtgagaaaaaaaggaaggaatgatgaggatggtg

SEQ ID NO: 51338 - DNA, 477 bp, Gossypium hirsutum
  Clone ID: LIB3543-022-Q1-K1-F7
caaaattcaaccacataagtgaaccttctcatgcaaaaaacatgctgcctaaaaggcaaacacaacatgcattaaactcaagaaatagtgatgaaagtgctagggtcattcctaatgactcagacattgtgtttcttggttcatctaggaagtcatctagttcaaggtcatctagaattaatgggaaacatctggatgttttggatctttatgagtcatctgaaattagaggggaaaattccaataatatggagaatggaaatgatgaggactccgaggatagggcaagacaaattgaagcagatgaaatgttggcccgtgaactgcaagaacaattatatcatgaggttgatggagacattgcatgggcacttcagctggaggagcacacactccatccaactattcagaatatccaagagccagatcatataggctcaacaaggcattatcgtacccagtctccattcccgactt

SEQ ID NO: 51339 - DNA, 476 bp, Gossypium hirsutum
  Clone ID: LIB3543-022-Q1-K1-G8
cggacgcgtgggcggacgcgtgggcggacgcgtgggttcgaatttcaaaactctcaacagtgtgtgagcgtgaaaatggaggcaagttcattgccgatcgattcatgctccaaagagcaccaaaagatctacagagattggttcaatatcgccgattcagatcgagatggacgtgttactggaaacgatgctacgaagttcttcgccatgtctaaactctctcgtcaagaactcaagcagatttgggcaattgcagattctaaacgacagggatatctaggattgaaagaattcattgttgctatgcagctgatatcttgggcacaagccggtcatgaaataacctttgatattcttaaaagttcagcggacttggagaatattggtcttcctgcaatggaaggtgtggatgctttagcagcgaacaaaaaggatttcgcaacaaatggtgtgcatgacattaatggatctaatca

SEQ ID NO: 51340 - DNA, 475 bp, Gossypium hirsutum
  unsure (1)..(475): unsure at all n locations
  Clone ID: LIB3543-022-Q1-K1-G9
cccacgcgtccgctgcaatgaaattccatgcactgataagtgagttttgtgttgccaaacccctcaaaaacaaatggaggaatcaatccaggagaataaattgcagcaaatatttgtgctttcttcttatgttttccattgttttagtagtctttctttgtcacctgtttttcttttcaatcgatgctcgaccttcatctcaccaccactcaatgaagaagattcatagtttagttggtgaaagttcaagtcaagattcttgcttgggttgatatatttatattcatgatcttcccatgcgattcaatcaagatttgctcaccaactgtcaggttcttacaaggtccattgataaaaccagtatgtgtgaatatgtacaaaattctggttntggtcctcagattataagctctgaggcttcggatttatggaacagcaattggttttggacgaatcaattcatgttagaagttat

SEQ ID NO: 51341 - DNA, 423 bp, Gossypium hirsutum
  Clone ID: LIB3543-022-Q1-K1-H1
cccacgcgtccgcaaaaaaatggcgaattctaatgatacatatgttttgtcatcattacctgttcaatgctgggtggaatctatatggacagacgtataacatgtagaaaccaaagaattcataggccaatgaagctgactgcgaagtgccaactcatcccgtagttgctattcttgacggtagagtgtcgagattatccatatttgcctctgaatttcaggttgtgatggacaaacccttgagttgatctcataggagcttgtattcctgtaataattgcttatatgagagcttggatctgtaaaagctggcattatattgtttcttcttagaagcttagtcccttttctgctatatggaaacctgtatgctctatttcctacaatgtccatattgataaagaagggtatgatttcaatact

SEQ ID NO: 51342 - DNA, 472 bp, Gossypium hirsutum
  Clone ID: LIB3543-022-Q1-K1-H10
cccacgcgtccggaaacaaagagtagccccctgtttgtgctctgctagggtttatgcacccatcatcgccgccgccatgaagccaccgtaggtggtgatcggggttgcgtgaaaggggttttttgaccccggttttggagagcccgaaggtcctattcccttagccatgaatccgagagaaaagacacccttttttagtcggtttcaccgatagagcaggagcttcgatgatgcgacttcggagttggggtaagtctctttttgtctattcttttaggttttgtttaaactaatttgaaaacagaagaacaaaaataaaaatgaaaacagaaaatagggaagaaaagaagatgagattcaaccttttgttttttgattgcttaatggtctgtaaaaaaaatacaatatgttctttcttggctttatagccgaaatacaatctatttttttatttttgtttaagcctctgttc

SEQ ID NO: 51343 - DNA, 469 bp, Gossypium hirsutum
  Clone ID: LIB3543-022-Q1-K1-H5
cccacgcgtccgaccccctttctcattattccatttttttctttgttgtctttcttctttttcttttattattccccctttccttttctttgcttagttcctcaaaagttactgtttttcttttaagaacttccccttaagctgaactggttacttagtacttctatctatatgtaatccttggtgctttgaattccagcttagagccaaggcaaggtcagcttaattcttttttttgtcaaaattcgattattttgctatttggtttgcgtttaggtttgtttttttctctgcaaaattgtacgggtaaaaggttaagattgtgtgtgtttaattttgggaagtttgaatttagtgtagcttgttgatttcattttgggggttaggttatcttgagttatcgtgatattttggttgacttgttagaagtaattgaagtcgcgcaggtgggaatttgtttgtaaagaga

SEQ ID NO: 51344 - DNA, 633 bp, Gossypium hirsutum
  Clone ID: LIB3543-053-Q1-K6-A1
ccccgcgtccgcccagcgtccgcggtcgcgtgggcggacgcgtgggaaaagactgagaattatacgccgcattccgaacacagtgttgttcaacactatgtttgttacagtcaacatactaatggcttccactcgcttctctctctcccgctcagttcatcccatcctaaaacgccccccttgttcttcttctccccgttttgcccccaaggctttgcttaaatcctacccttgtcctctctggtcctcttctttctccttctgccttcagaccttgcatcactctacttctccttatctctcgtcctcttccttttcattttcttcttgttcttctttttctcctccttcaatggcttcctcatttaccgtcgatgatagcatcggctccaatcctctcctgcaagatttcgactttccaccttttgatattgttgaagccaaacatgttaggcctgggattcgtgccttgttgaagaaactcgagagtggcttggatgaattggagaagacagtggagccgtcatggccaaagttggtggagccattggaaaagatgttgatcggttgactgtcgtgtggggaatggttaatcatcttaaggctgttaaagattcagctgagctccgtgct

SEQ ID NO: 51345 - DNA, 645 bp, Gossypium hirsutum
  unsure (1)..(645): unsure at all n locations
  Clone ID: LIB3543-053-Q1-K6-A3
ngtgagcaagtcaggaattggaggctcaggnttgggctaaaccgatgactcgtatatccggcgacggttcagccgactcggtggatcaaaccgtcgccatggcctttcaacaatgcagaagcagtaattacgtaagaattcaggcaaatgggtccagtttaggaaggtgtggtccaaatgtagatacagaccctagccccagcaatgttaaattgctgatggagataggtgaggaaatgctgaagcaaaaaaacgttgaatcaattctgttntggaggtaataaggattatgtgatagaaagcaatatggagaaattagattggtttgccggtgaacttgttttggaacatcagaggaggagttgcagaattgctcccactgttgctttcaagcaacccagccctaagatcaactaggtttctctctcaaccaacacagtttgtgccatttcttgaaacccaaaaacaactcacaaaggaagaagaagaagaagaaagatagcaccttttaatgaaaccatggaattgaattaaagaagaaaaaacacattaaaaagggtttcgaagatagtttggatgatgttgtccactcccatcctattttttctcccaatcaaaacccttcaacagttgttaaaactagca

SEQ ID NO: 51346 - DNA, 613 bp, Gossypium hirsutum
  Clone ID: LIB3543-053-Q1-K6-A5
gccctctctcactctcattttgacacaaaaaaagaccagagaattatttttagggttttaggctttgggattttctgatcccaaaatgaagcaaaagaatgagcaaattcatactacaaggctgttaacttatcttttaatcgggttaatcggggttctggggttggtttgtttgtactatggatcttcagttgctccggggtcgaggagatatgacgacacagattctcggctggatggatcggacccagtttttggtgggttttcaaggaaccgagatttggttgatttgcttgacgagcaaggatactaccttgaagttcctaagagcatccctatatgtgacatgaaatattcagagttgataccctgcttggataggaaccttatatatcagttgaaactaaagcctaatttaacagtaatggagcactatgagcgtcattgtccgccaccagaacgacgttacaattgcttaattccaccgccaaaaggttacaagattcctataagatggcctgcaagtagagatgaagtctggaaagccaatataccccatacgcatcttgcggaagagaaatcagatcagcattggatggttgttgatggggaa

SEQ ID NO: 51347 - DNA, 635 bp, Gossypium hirsutum
  unsure (1)..(635): unsure at all n locations
  Clone ID: LIB3543-053-Q1-K6-A6
ccccgcgtccggnaaggtgatgacactctgccaacgacgacggcgacggcgaatttgaaaaaggaaagctcagattcatgtttatttggtcgtggccggtataagttttgggcattcgcggcgattttgttgctggcattttggtctatgttcaccggaaccgttactctccgttggtccgccggtaatctcaatcgtctttccgatgatattggtagccccattcacgacgatctagatgtcctcgtacgttctctcttttcaattttttttttttgcattaggataaagaaaattaaaaatatatgtattgtgtatgtgtgtgtgtgtgtgtgttttaattttctgtttgttaggaaatggaggagagggagaaggtggtgaagcacatgtgggatgtgtacactaacagccgtcggattagattaccacggttttggcaagaggcgtttgaagctgcatacgaggagttaaccagtgatgtgcctggagttagggaggctgcagttactgagatcgctaagatgtccgtacaatatgtggatcttgatcctcctcctatccaatcaacgagtgtaagagaactgagcaagggtctgaaaggcagatccaaggtaacttcaagaggtcaatga

SEQ ID NO: 51348 - DNA, 646 bp, Gossypium hirsutum
  Clone ID: LIB3543-053-Q1-K6-A7
cgtcgttgctgaaagattgtgttgaaaaatgttttttctgtttaatgtttcgtattatacccccaattaccaatctatcagtcttctccgagtttctcttttttatcattgttgctgagtctccttcgataataactgatttaaaccccatttgttttcccacaatcactacttggaggtacgcaagtgcctctgctgcaaatagagaagccacctccctatggatctttgttttgaagccgagtaccttccccgatgcatttctggttaccacccctgagactgattttgcccaagaggcatcaaaagtggcgtcaaaattaactttgtagtagaaaattctagtgggcaccaacccacagcctcatgattcatggtaaagttctgaatttcacacccctcctgttccttaatatatttgtttatccatgtagcaacttcttgacccatactgtttttccttcatgtaaacctttgtttctagctgttcagatcgcgcacatagagcagcaaaaaattcgacactaagtgttggaattgtttttgaacacctaagtaagccactcgcaatgtgacaaaattatatttgttaaatacccactccagtttcaaactaatccatacttcttgcgtcacagggcattct

SEQ ID NO: 51349 - DNA, 597 bp, Gossypium hirsutum
  unsure (1)..(597): unsure at all n locations
  Clone ID: LIB3543-053-Q1-K6-B1
cccagcgtccggtngaacaattgtgattgtgagccaagaaaatatcagcttgtttgcgttttaaaaaaaaaaaaaaaaaaaaaaaaaaaaaaaaaaaaaaaaaaaaaaaaaaaaaaaaaaaaaaaaaaaaaaaaaaaaacaaaagaatgcaaaaaaaaaaaaaaataaaatagaagaaaaaaaaaaaaaaaataaaaatggcacgaagataaaaaaaaaaaggggggtggggaaaaccaatggcggtcacccaacattaatccgccttgcgagaaaatacatcctttctttcaggtggcggtaataaataaaaaggccgcgcccgcgatcgctccttacccaacagtgtgggcaaaacatcaatggatgaatggcaacgacaccctcgtagggagcgcattaacccctggcgggtgggggtggtatacgcgcaaggatgaccgctacatttgccagcccccatagctgccgctcctttaggtatattgcctccctttctcgccaggttcgtttagctttccccggcaggctggtaaatcgggcggcggctttatggatccgaccaagcgcttgacggcacctcttccccaataaact

SEQ ID NO: 51350 - DNA, 641 bp, Gossypium hirsutum
  unsure (1)..(641): unsure at all n locations
  Clone ID: LIB3543-053-Q1-K6-B2
cgtttacaacanaaaatagtctcttcagatttggaagatttctcgagaatgcaaaactatccgataactatttcttcgctaactgtgaagaaatgttgaaagttgctgctgtaatcgatgaactgcctctaagtttgcaagataagtaccttttctgcctcagtccagttgacatgaatgatgaaatttcatctcagggtctaacacagtttgnccgaaaattatgcaaagaaaggcctcgttcgtcttaaagaaatattctcacctggttcacttcaggtgcctaaaacgcattctgctctcaaggagcttgaatccattcacaaggtgttggaactctatgtttggttgagttttcgtttggacgaatcgtttccagaccacgagttggcttcatcacaaaaggccatctgcagtatgttaattgaggaattccttgaaaggcttggtttccaaaacccaacatcaagaaagttaaattcattaatggcaaaaaaagagaagacaatacctctgattaaatgtaaactactattaccatgtatttatccattaaccccatcaccctgttcgttcccaccacatatacctttctgtttgtcaaacggatttgtttgtcaaattcggactcgagatctcaa

SEQ ID NO: 51351 - DNA, 551 bp, Gossypium hirsutum
  Clone ID: LIB3543-053-Q1-K6-B7
cccagcgtccgcccagcgtccgcccacgcgtccgcggacgcgtgggcaaaaatgaaaaaaaactgaaaagctctctccccccccctctctcagctcttattctggccatgggtccggtcaccagacagccgcgcctgccaccggaccgccgtcgtcagccaccgcaccggggtcaaaaatcgaaaaatcgcccccttttttttaaaagggtggttggtggcagagcagttagagtggttgaagctaggggagatggctgacggttagggaagaagacctaggtgcggcgcacctagggtttgaaattttttttttgttatgggtttgggctagggtttagtgtcatttgagctaggtttagttgggtttgtaatagtaggctgatggttgtttgtgtttgtttggggtttagttgatttagtttggttttgagtgtataattttaaactggacagtttaattttattttgtttttttgtctgatttgggcttgttgggcccgagtaaatttgggtacttacattaaggtaataaaaataaatttaattgtc

SEQ ID NO: 51352 - DNA, 638 bp, Gossypium hirsutum
  Clone ID: LIB3543-053-Q1-K6-C1
aaaccttgaacaaatttcaaaccccaaaatcccaatgggtaagtacattaggaaggccaaaacggcaggggaggttgccgtaatggaactttcccaggcttctctcggggttcggacaagggccaaaaccctcgcccttcaacgcctacagaaatcctccacttcttctccgcctacggttgtttcggctccggctacaggagacggctcgtttctccagctgcggagtcgacggttagagaaaccgccgcttgtggtgcaccatcatgtttcgaagaggcacaagcagcagcaacaggggagtaagaaggatagctgtgtgcagaatcctaaccctaattcgtattctagggttcgaccgtgtggcggttcgaattcggaaaagaaaaaaggtgaagacattgtgcaagaagataatggaaatgataatattattaactacagcaatcttaacaataatcataatgaaagcaatgattttggtggtgttgaagcttcttttggagaaaatattttggacatggaagctagagagaggggcactagggaatcaactccttgcagcttgataagggactcggagagtataagaaccccaggttctgctactaggcctaccaactcagcagatactaacc

SEQ ID NO: 51353 - DNA, 649 bp, Gossypium hirsutum
  Clone ID: LIB3543-053-Q1-K6-C4
cccagcgtccgcccagcgtccgcccacgcgtccgcggacgcgtgggttttttttttttaatttaaccattcatttatggattcccttgtttctcaacatagaccagcctactgagttggggcatctgagttgactcaggcaattctctcagcataatagatgtcatattcaagggaaggaaggtcggtttctccgggaagaagacgacagcctaggtctggtaggagtcgctccaggtctaggagccgtgaatctcaggatgcatccaatccaggaaataacttatatgttactgggttatccacaagagttactgctgttgatctcgagaagtatttcagcaatgaaggaaaggttttggagtgccatctagttactgatccacacaccaaagaatctcgtggatttgctttcgtgaccatggaaactgttgagggtgcagagcgctgcatcaagtatctgaatcgttcagtgcttgaaggtcgattaatcactgtggaaaaggtattaatttatacgaaggatcgagttgttagtctataccgaagctaaatcgtttatatagaattttatcttaacttctttcttccgaagtgttgcctgataaattttggcagcaggtcttgtatgtgtagcttcatcgaaaact

SEQ ID NO: 51354 - DNA, 642 bp, Gossypium hirsutum
  Clone ID: LIB3543-053-Q1-K6-D1
gcaagttatgggctttttctcaacctaaatttcctttttgtggggatagaatacgtttttagggaagtagataatgttgggctagatgaattcctgctttctgaaatggtttcaaagggactttcagtttgtacattatgattgaggaaggcaggggacttgtctgattcattactaatcaatataactcgagcattgtggtcctctgaatgatattgttcatcagtggttatccatcactcccatctcttctaagggaacatatatggtattactcaacactgatttatggaaattttattgtgttgaataatgcttaataattggttaaacagataaaacctgtgagagatgccatgacagaagcattgcaattatggaagaagattgcagggaaaggggatgctgaagctgcagattaccagaaagcctcatctcgtgatggtgacaatactcaaactactgaatcatcacaaaagaatggcttgaaacacccaaatgctggtggtaaaaaaaatgacccatcagcaaaggattcatctaataatctttcccctacttctgattctgtttcgaaaggcaaaggtggaagcattcctgaaaaacagttgtaattttaaagaagaaagcacctgcattaac

SEQ ID NO: 51355 - DNA, 458 bp, Gossypium hirsutum
  unsure (1)..(458): unsure at all n locations
  Clone ID: LIB3543-053-Q1-K6-D3
cccagcgtccggctgagtctgaaaagtagtggngaaacagttacatcgatcgaaatggaggcccccntcgaaaagaggacgaagaggtagcagttgagcaataaacagcaggcaaatgcagttcattttcttcacctctggtgactgtcagcatatcacacacaccatcatcaaaatactggtgaaagccctgatggcacagatgatgaataagccggagagcaacttgagatgaatctcaccgtttccctaggtcgagttcagagttatggatctcccaatgaagacagagtttccaggcattggattatgctgcatgagagctcaaattttgttgtatatttaatgtagaatgtgatgcacttcctttgcttgcaaaattgtacttattaaaaggtttgaatcccaaatctttagattttgtgcacacgaacaataataaaaatcatattaaccca

SEQ ID NO: 51356 - DNA, 616 bp, Gossypium hirsutum
  Clone ID: LIB3543-053-Q1-K6-E6
ccccgcgtccgtattgaggccgtccgatggtcgtccggacagcacaaccgtcatatcagttgatcacattccggcgatctttttttccgatgtctctctccaaattcacggtcaatcaacgttgctaaaatccgatcatttggggaacaaaagactgatgaaaatcccccattctcttcccataatttaaaatctttcagatccattattggattttctttcttccattgaaacctttgcttaaccctagcgcgattagtcaacataatcttcattaggtttccaaaatgtttaagaaaattatcaaaggaggacagcggaagcattccaaatctgattcaacggatgcatctttatacgggtcgggtccaaactccaatgccgtcgccgctccatcccgaaattccgacgtccctatggctccaccaccgatggctactgtggaaccgttgccgttattccgcgacgtccccgtttctgataggcagaatttgttcatgagaaaattacagatttgttgctttcaattcgatttctccgataccttgaaatcggcccgagaaaaagaaatcaagcggcaaacactgctggaactagttgatatcattcaatccgg

SEQ ID NO: 51357 - DNA, 641 bp, Gossypium hirsutum
  Clone ID: LIB3543-053-Q1-K6-E8
cggccgcgtgggcggacgcgtgggcggacgcgtgggatcagattcttcatcctctccttcagtctggccttcgtgctcatcttccctccgagactaaagggtgccgattcacctcctctcccaccaggtaagagatctctctgctttgtagagtgtgctttgagaatctgtatgcttgccagttccctgatctatggatgtgcttaaagataatttcttgaaagtatgaattcttgttctgaatgtcttttatgatcgctccaatccctaatttatctgttgaagacatctgaaattttttaattacggttctggaatcccccattattataaccgattgtatacctattgttatccctagctttataccttccaagcatgcgaatgcttctgctgcgaacggggaagggatgttgttgtgaagggtcgattttaaaactaggagttcgcccatcagtccccaaaccaccaaacctgtcactgattttaagtttcgattgtcgaacgctgcatcaaactggatcgttattctcgatatgtcctcttgaactttgtaatttttacttgtgtttaaaggggtctgattttctctcactctttcattttctgccatatacccctatattcgttggacaagttgt

SEQ ID NO: 51358 - DNA, 654 bp, Gossypium hirsutum
  Clone ID: LIB3543-053-Q1-K6-F8
cattggctactgttgtggttagtcagacctctacacctgctgcaattaccattcctgctaccaatatatccaagtccactgataaattcattacatctgtctctggtaatcatctcaaaagggtgaccaagaatcagatcagagggctagtctctctgaagaaactcttagtaaacacaaaaatgctcagaagcatgcagaggatgctgctgctcttgctgctgctgctgttaatcgcagtgaagaaatatggaggcagttggacaagcacaaaaattcagggttggcaccagatgttgaaactaaattgacttccgcagctgttgcaatagcagcagctgctgctgttgcaaaggctgcggctgcggctgccaatgttgcctcaaatgctgccttacaagcaaaattgatggctgatgaagcattggtttcaagtggctacagaaattccactcccaataatgcaatatctgatagtgggaagaggttgagcgaggctactcctgcatccatcttaaagggtgaggatgctgctgctagttcaaattctgtcattgttgttgccaaagaagttgctagaaggagggtagaagcagcttcagctgctgcaaagcaagctgaaaacaggatgccattgttaaagctgctgagctg

SEQ ID NO: 51359 - DNA, 655 bp, Gossypium hirsutum
  Clone ID: LIB3543-053-Q1-K6-G1
cgacattcccttcaaaagttgctgcttgtgagataggagaagttggaaaagatcaattcgaagaaagcgttctgctagaagatatagcaagaatatttctagttcatcatggaattgtaattatcaggagttgagtcacaaactaaaacccgaaacatctaagagcatgcaatcaaagttggatgaatctgtgagccagaacaacctagaaaactgtgagacttacgtgactgcattcactcctgatatgcagaacttgtgcaggaaacaattgtcacaggaggaacctatcattcatcaaactaggcactgcaagggaggagctaatgtaaaaaagattaaggatcaaatggagaaaccaagagtaatgaccaataatgttaaggagggaagtattctaacatataagagaaagaggaagagcgtggttgctgatccacctaagttattgagtggcaagcagaaatgcaccaagctgcattcatatgcctctgctgaaactcttgacggcaaattgagtgaacaacgaagtagtccacaagaagctgctatagccagatatttgagattagatacatggaactgtcccaaaggcaaaagaacacaacggaaagtgccgatccattccagtggaaagagtaacatgcatgcttca

SEQ ID NO: 51360 - DNA, 640 bp, Gossypium hirsutum
  Clone ID: LIB3543-053-Q1-K6-H7
ctttctcccccaggctttcacgggcgtgctgcggggacagctaactccttagctccactcgcgattcgactcacccgagtccagagaagctaccactcttgcatcttcacggccttgaaccatggcctccagtctcagcatcctactgtgaaccgtttttacccaaacaccctgcgtttctcaacggctgttgattctcaaaaatccgcttctgatgagtctcttctccgagttattgagtctgagattcagtgtgccgaggagagtgatgaatatgatcaggctgaaggaaccccaagtgaattccctttcaaaatcgaagacactcctgggcttcaaaccataacattgacacgagagtatgatggtgaactcatcaaagttaatgttcacatgcctgatcttgtcactggtgaaggcgaagcggatgatgacgatgatgatgacactgaaaagcctagtaaatcaaatgtcccattggttgttaatgtctcaaaaaaaggctgtccgagtttagagttcaactgtaccgcttaccctgatgagattaccatagatagtttgtccgttcgaaatcccaactccgaggatgaactcgcctatgaaggcccagatttctatgatttggatgagaacctgc

SEQ ID NO: 51361 - DNA, 652 bp, Gossypium hirsutum
  Clone ID: LIB3543-054-Q1-K6-A2
cccagcgtccgcggccgcgtgggttttccggtgcttttcttttgatcggccaccaccacttcttcttcaaaagccaatagcagtgtccttatcggcgtcgtgtcgaaactggtgtggccgtcgttcaggcgagtacgagcatcatagaattatagtcaaagtcaagatagctgaaaagtgaaaaaatgaacaagaaggagatattaaagttggccaagggattcaggggaagggcaaagaactgtatacggatagcaagagaacgggttgagaaggccttgcagtattcctatagagatcgcagaaacaagaagcgtgacatgcgttctttatggattcaacgcatcaatgctggcactcgtcaacatggggtaaactatagtaacttcatgcatggactgatgaaagagaacatacaattgaacaggaaagtactgtctgaaatatctatgcatgaaccatacagttttaaggctctcgtagacatttcccggaatgccttccccggaaataaaaatgttgtgctccctacaagaaaagcagatatttcaatcaatgtataattacctgtttttggtgtctttagtaatgactgttttttgaacacttaatttcaactgaacattttgggaaataagagaggattattgct

SEQ ID NO: 51362 - DNA, 294 bp, Gossypium hirsutum
  unsure (1)..(294): unsure at all n locations
  Clone ID: LIB3543-054-Q1-K6-C3
ccctcgtccgccccgcgtncgcggtcgcgtgggcggtcgcgtgggcggacgcgtgggctggaaaaagaaatangggtcgtacaactttgaatcangctcgacagcttatggatagtgcattagcaaacgcctcggaaattatagaccacaggctgaaaatccagcactacaaacacattctggtggggttgtttctcatccaacgacctcgngcacgccanngantccatgggtcatatgctatcggacgatgntccactggcggtctcaaggcagccnttacaaactcncgct

SEQ ID NO: 51363 - DNA, 631 bp, Gossypium hirsutum
  Clone ID: LIB3543-054-Q1-K6-D3
cccagcgtccggatgctcaaagtggctgatcatatttatcttggtggagatgccgttgcaaaggatagggaaatactaaaacagaatgggattactcatgttttgaactgtgtgggatttgtttgtcctgagtatttcaaggccgactttgtttacagaactctgtggttgcaagatagtccatcagaggatattactagcatactttatgatgtttttgattattttgagcatgttagggaacagagtggaagagtttttgttcattgttgccagggggtatcaaggtccacatcactggtgatagcgtatcttatgtggagagagggacagagttttgacgatgcctttcagtatgtgaaggctgcaagaggaattgcagatccaaatatgggttttgcttgccagttgttacagtgtcaaaaaagggttcatgctttcccgttgagccctagttccttactgaggatgtatagaattgcgcctcattcgccttatgatcctttgcatctagtccctaaaatgctgaatgatccatccccttctgtactggattctagaggtgcatttattgttcagataccttctgcagtatatatttggattggtaaaaactgtgaatctataatgg

SEQ ID NO: 51364 - DNA, 557 bp, Gossypium hirsutum
  Clone ID: LIB3543-054-Q1-K6-E9
gcacaacgtaagggctctcgtagcatctgtcgaaagagacttaaagcgtattgcctacaatctggaccgcaccagggcaccacaacaccgtcgactatagaacaggaagcatcacacgctctatcaaagtaaagctatcaaaatgttagatgaggagctagatggaactgttgtgttcactgcgatcaagatagacgctgatggcatgaaactgtaaatacagatgttgcagaatgtgatacatgagcataaaacctactttgctgctctgaatgtctggggtgtgaatgcagaagagcatatacatgttagttattctggcattcttagataacatatactcgacagttgttcacatgaccacaatgtgtcgttacaattacatagcattacatattaaagcgtgggacttgtatatatgaatatggaataggatcagatcatcaacataatggtcctcatagtattgatgacactcaccacacgcttaaatcacctgtgttatgaacgataattagtcagaagaatgagcaatggcttctgatacatataatgca

SEQ ID NO: 51365 - DNA, 621 bp, Gossypium hirsutum
  unsure (1)..(621): unsure at all n locations
  Clone ID: LIB3543-054-Q1-K6-F1
gattaacanaccagcgtctcgacgatgcccagaaccttttcgatcaaatgtctataagagatagcattacatataatttgctaattactgggcacggtcgatatgggaatccaaagcaagcactgtatatttataaggaaatggtttcacaggaaatccaagaaactggtcctacatattcgtctctgattactgtttgtgcgaatgaggggttttatagagaaggtattcaagttcattgcagggtgatttcacttgggtttggattgaatttgtttattgggagctcacttgttaacctatatcatcatatgggacttgttgatgtggcttggaagttgttcgatcaattgcctgaacggaatttagccgcatggaatttgctgttaaatgggtttttggagcttggaaaaatagaggaattatttgggttgcacgaccaaatgaaagggagggtgtcaagccaaatggtcttagtttttgttatttaattcgtgcttgctgtaatgcgaggtttctggacgaaggaatgcagctgcattgtcatgtgattaaagctggatgggtggaatgcaatgtttttgttgccaatgctttggtggacttttattctgcttgtgg

SEQ ID NO: 51366 - DNA, 417 bp, Gossypium hirsutum
  Clone ID: LIB3543-054-Q1-K6-G5
aaaaaaaaaaaaaaaaaaaaaaaaaaaaaaaaaaaaaaaaaaaaaaaaaaaaaaaaaaggggggtgccgaacttataaaagcctaacaatacgggcggcctggcttgttgtcatcctgttttcatatctccaggtcacctgaacttcatttgtccggtgtggcgacctcctaaaatcctgggcagtggccgggggtggggcgcctttacctacttggccttgtcgtgccgtttccgtttttgggcgtttggccgaaccggcccggtccgccaccagttgcgtttcctgaatggccctggccgcgggccgtgacacgccgccgccccgtgcggtggggttaggggcaccgggcgtgttgacccatccaatcgccagcgcttgagtaggccactactctcggttcctttcttttttttc

SEQ ID NO: 51367 - DNA, 646 bp, Gossypium hirsutum
  unsure (1)..(646): unsure at all n locations
  Clone ID: LIB3543-054-Q1-K6-G7
cccagcgtccgactattgaagatttgagaactatccaanaattgcgggatgtgtttgatgccgaagttaataaacttgaagctgatagatgccaacttggaacagaaattgcagtcacaggtgatagtaattggcctttgcctgttaacttgaagaggctgatctggaatgcacagaagacttttaaagttgattttagaagggtgtcagatttgcatcctgtagaaattgtagattctgttgataagctccaggaaaggttaaaggttgttccaggtacagatcctttgagtgtggaagcccagaaaaatgctaccctctttttttgcattttgcttcgcagtactttggccagtaaaagggtgttggaggaatatagactgacaaaagaagcatttgagtgggttattggtgaaatagagtcacgattcttgcagtctttggtagcagctggtgagatgataggttgtgttgctgcacaatcgattggtgaacctgctactcaaatgactcttaacacctttcactatgctggtgttagtgcaaagaatgttacacttggtgtcccccggctgagggaaattatcaatgtagctaagaaaatcaaaacaccttctctctcagtttacctctctgctgaagctag

SEQ ID NO: 51368 - DNA, 640 bp, Gossypium hirsutum
  Clone ID: LIB3543-054-Q1-K6-G8
ccctaaacatcgactgcttttctaatgaacgctctcggccttggaagttaagggacacttttcagaagatggatgctaaagttgcagacaatggtgatggctaattaatatcatgtaaagcaaaattcataacagctcataaaagttgacactgttaaactgttctacccttatttttggtttataatcaagtccttaaattattcgggattaaaaaaaaaaaaaaaaaaaaaaaaaaaaaaaaaaaaaaaaaaaaaaaaaaaaaaaaaaaaaaaaaaaaaaaaaaaaaaaaaaaaaaaaaaaaaaaaaaaaaaaaaaaaaaaaaaaaaaaaaaaaaaaaaaaaaaaaagggggggcccctttaaaagaaccaaattttactccccggggttggaaagaaaaaattttttttttggggcccccaaattaaattaccgggcccgggttttaaaacgggggggctggaaaaacccgggggttccccaatttaaatcccttgaaaaaaatcccccttttcccagtgggggttaataaaaaaaacccccccccattcccccttcccaaaatttggccccccctaatgggaaatgggacccccccttttggggccttttaaacccgggggggtggggggttcccc

SEQ ID NO: 51369 - DNA, 644 bp, Gossypium hirsutum
  Clone ID: LIB3543-054-Q1-K6-G9
cccagcgtccgctttcatctctgttgacacattccctccgccaccgcctccgtgtcctcctccagtttaggacgcaagccttctattccagcttccgacggaccaggaaattaagttaattgaagtttgttaaggaaataatgatctatacggcgattgacaacttctatttaacggatgagcagctaaagaactcaccttcaagtaaagatggcatagatggagcaactgaaactacactaagaatctatggctgtgatctcatccaagaaagtggaatattacttaaattgcctcaagctgtcatggctactggccaggttcttttccatcgtttttattgcaagaagtcatttgcccgctttgatgtcaagatagttgcagctagctctttgtggcttgcatcaaaattagaggaaagtcctcggagagcaaggcaagtaatcatagttttccacagaatggaatgtagaagagagaacttaccaatagagcatttggatctatattcaaagaaattttcagacttgaaagcagaattgagcagaaccgaaaggcacatactgaaagagatgggttttgtttgtcatgttgaacatccccataagttcatatctaactatcttgctacccttgaaacacct

SEQ ID NO: 51370 - DNA, 628 bp, Gossypium hirsutum
  Clone ID: LIB3543-054-Q1-K6-H8
gttaccttgtttccaaaccttttatttgtgctttcattcagtccggaggctttagccgaaagttctccagcgcttgacgaaccaaatctgggattcctcccaccaggtaaaaacttccttttctctttagggcctcctttgcaataagatgagtgtagacattctttgctttagggacaaaatgaaactcattctcctggaacttgtcttttttgctttgtatgtccctgataattgctccaatgaccgatttatttgtatcagtactttgacatttcttaataacagtttttgaatcttccactacttccattttatttaatcccataaaaatccctaattttactgcctataaaccttcatatgcttctgccgtgaacggagttgccatcttagagtgaaggactgccttcgatgctaggatctccccctcctcattccgtatgagcaagcccgtagctgatctggacgattaatggtgtcaaactgaactgcgacccttctccttctacctacctgttgattattaccagtggactgaagaattaaccaaagtctacagtagaaaagccggatctgctcattagtcctttgatcgaagacgcagggcactgttggaaaattggct

SEQ ID NO: 51371 - DNA, 311 bp, Gossypium hirsutum
  unsure (1)..(311): unsure at all n locations
  Clone ID: LIB3543-054-Q1-K6-H9
cgccgttcgcccacgcgtccgctgattgcaccttggagggagggtggcctatacgccaatgttcctcccaaaccaaaatgcaagtcccatctccaactctgcatttcaaacccaattgcgataaaccctttgcacactaaatacttttccaagttataatagggataagaacctaaatctgattgggggggggggggggaagggaaatatttatcttttaagaaacataccacagacaaatgagggttggtcttcattctccatccctgcttaccgtttttngtctgcttttgttgggatttctccttctt

SEQ ID NO: 51372 - DNA, 632 bp, Gossypium hirsutum
  unsure (1)..(632): unsure at all n locations
  Clone ID: LIB3543-055-Q1-K6-A3
cgnatagtatattttagctccatgaagctaagaacgacttcatcgagacggtcatggaacacagcattctttggtagttggagacaaagctcgtctgagaacaccaacatttcgggtcaacaaaaccgagaaggttttagtggtataaggcaagcaagtagagtaggttctcatagtagtgggaatatcgatcactcgtcttcaaataaaaggtcttcgaatgaaattttccctgagccaatcgacatacaggacacggagaggttagatgagaactagccgatcgagtgtttgctatttgtatcaaagattgttagtgccggttcaaccttcgggtttgatagctgtgttacgaggaaaccttataggctccgactaggcctaaccaaagcagcctaagctggccatgacgacaagattggggaactatcgagtgatagagaatttttggatatttcaaagcttgttttgtagtcaaatttctcattacaagcagcattttttcagtgaatttgtcactttctatatagagtgtaaagttgcgttagtactttttgttgcattataagtactaccacaacacaatattaaattaggggaagagcgttcgatttaactggtttgattaaaaa

SEQ ID NO: 51373 - DNA, 598 bp, Gossypium hirsutum
  Clone ID: LIB3543-055-Q1-K6-A5
cccagcgtccgcggccgcgtgggcgggcgcgtgggcaacgccaaattctaaaagcaggaagtgagcggactcagcgcctcgccccccccccccgagtctcctcgtctgactcacctcagcgccacgaatcatctgaaaggatgctgtaggcgctataggggttaaactatgctggaggggaggcttgtcaccttgtcctgtaagtagataatccatgggcttctcagtgcttcagaatcatttgctcgattattgtttgatgggaaagctgatgaaggtgattctttttcatggacaatatgaagaacagcagtatagtttgagttgaagatggaagaagtttgcctcaatagcgagccggtatttgatatggttgatgagtatgagggtgagggagactgcagtgccgtggaacatgatgatgaaactggttcaaaacattcaaagaaagaaccacctctgccgaccattggtttggagttcgattctttcgatgaagcttatgactattacaatatctatgctaaggaacagggttttggcatcagagttagcaattcgtggtttacaaccaaaagaaaagatcgctatagagcaa

SEQ ID NO: 51374 - DNA, 635 bp, Gossypium hirsutum
  unsure (1)..(635): unsure at all n locations
  Clone ID: LIB3543-055-Q1-K6-A7
ngattattagccgtttctctctctctctctctcggtctccctgttttgtgctctttttcttcctcatttcttctgctttcataacaaatcctcaaattatctcttcaatccaaatctcctcccatttctttacccatttctttacccattctctctctcggtctattttgaatttttttcctctcatttttttagctttgggtaaccaaaggccaaaacacacacatgcgctacactctgttttttgtggtttttgaaatcccctgcttcatcggatactgattttgagtgggtttatttatctgccgtttctttgttgcgatttttgtaacccctgcttcatcggagactgatttcagaaaacgaaggtttctcttttgacgacgtcggccattcatatcaactcaagatcccagtctctatgcagctttcttctcactagctctcatgtgaaatgcttgcatattgctttcctttaatcattcagctatcaaattacaaaatcaggattatccgtaacattggtttgcttgtgggtaatttgaagtataggagaacatattccagcgagaatctacttgaggcagttagtggaaggcttatcactagtagtcaatttgttaatcacccttttc

SEQ ID NO: 51375 - DNA, 649 bp, Gossypium hirsutum
  Clone ID: LIB3543-055-Q1-K6-A8
cgcaaattctaatttctctggaggggggtggggggggggctaaatttgttgcagcccttgccgaaaggttcgttagtttatacggagacgatctatcgaatactgtaatcgttaaagctccgacggggccagaatggaaagtagagttgatgaaatgtgatggtgagatttgggggggggagtggttggaaagacttcgcggattatttctctttgaagtatgggaacctattgatctttagatacgaaggtcattcgcggttttacgtgttcatgatatttgatcagactacactggaaatcgaatacccgaacggtatcgataaccatgaggtggagctccaaataccggacgtggaagaagtcgggagtgaggatgtggttgaaatagtcaacaacgtatcgcgatcccggaaaacaacggagaaaacacgttcttcgcctcgtaagagaacaagaatgcagggcgctacgaatgcgaaaaaaatcggagtttcgaatgtcaagcagagatggaagtatagtatatatgatgatataaatttactgatttaatatgttctttttgagctcagattttgttcactattctttcgaatttgatgttactcgacaggtaaaatcggtccggaacaagctggtggaggca

SEQ ID NO: 51376 - DNA, 640 bp, Gossypium hirsutum
  unsure (1)..(640): unsure at all n locations
  Clone ID: LIB3543-055-Q1-K6-B1
cccagcgtccgntttattcggcatcttgttgtacacattttggtgaactatgtattagttaaatgcttccattgatggttcaatgatcaagtccagtgacagaacatggtgaaggttgcaactattgttggtggagctgcaggaacacttgctttaatggctgtaataatgggattcttttggtttttcaagtcatgtaagagtttttcgaatagagcttcggagaccggctcgtcggatccttcggcattaacggagtggaatcgaggagttggaccgagttcatcggccggtccgtctttatatggaccacaaggagcaagggagttcatgttggaagagctagagcaagctaccaaacaatttgctgagagtagtctcattggatacggaagtttcggcttggtttataaaggtttgcttcgtgacgttgtcgttgctatcaaaagacatcccggtattccccgaccagaattcgttgcaggggtaatgtatttgtccgagattcaacaccgaaacttggttactcttttaggctattgtcaagaaggtggttcccaaatgttggtatatgaatatttacccaatggtagcatgtgcaatcacctatatgataccggacgagaggctccgactcgtc

SEQ ID NO: 51377 - DNA, 641 bp, Gossypium hirsutum
  Clone ID: LIB3543-055-Q1-K6-B3
cagatgtactcactattggcttagtacatactggaacccaaccgccaggcttacagacaggttttgctcacaactcctggcctcgggcatatgtttccggcgccattcttctcgcggtaaacactttacctgccacctacacatggcatggaagttagttggtgtctggcacgaccagatgctcgtgcctggcctcaaaggggaaagggcttgctctcctctacctggatgctacaatgaaccttggtgccactgctagtatggattgcctatcaagatctgaactacctctacaaacactgagctgctatttgccatgcggagaacggcctttagcatgccttgaggcccttctgctctggctgaccatgaagctgcgtggggacctgctcgtattgctgccattcctcaagacaatggacttgagccaatagaggaacccaagattcttctgggtacgtgatcaccctatcgctaggtacctagatgtatctgagataggttgagcagaggcctaccactactgctccgtaaacaatgttatatctgtacgcgtcttactcaaccccactatgtaaccactgatctgacacaagagaggctaaagctgatactttgctgatctacgctcacaatgctga

SEQ ID NO: 51378 - DNA, 485 bp, Gossypium hirsutum
  unsure (1)..(485): unsure at all n locations
  Clone ID: LIB3543-055-Q1-K6-C3
ngatgttgatagtggatttccagtcgtaaagttccattttgaagattcccttgttttaacagtttttccccatgagtatacattccaaattcgtgaagatatttggtgttttggttggcagaacagtggagtgcaatctaaagatggcaaagatatgattcttttgggagatttggtgctttcaaataagttggttatatatgatatagaaaatcagaacattggatggactgaatacaattgctcttcgagcgtcaaagtgaaggatgaaagttcgggggcggtgtattcggttggtgcccatgatattggttcagcttccagtttgagaattggaggaattctaacattattgtctataataattgctttactccacagttctatagcatagattgttggaagcagcgataaaacattctttgattctgttgtaccataattcatttttttttacagtgaaattgcgcgggttttcttttttt

SEQ ID NO: 51379 - DNA, 627 bp, Gossypium hirsutum
  Clone ID: LIB3543-055-Q1-K6-C8
ccaaccatggagttaaaagtaaaacccttcccaggagctaaagtgaggattcagaatagagtgctttggttagtatattcctgtgggaaggtgataggcggggggttgatgaaagctaaaaagggattagggtttagcttgagtctggcttatatgataatatcactttgtttaatgtgtatgcaattcattgttccacgtgctcctggggactttctcccccctccccctcttcaatgccatatttattttttcccactcaattacactctctgactctatgtttcccttcttttgtttgcatcttccccttcccatttctctctcttttcttggcatggaaaaaagtgagtaacttgcgggaaagcaaaaacaaagccatatctttgatgtgaaaagagagcaataccagttacaaagatcaaagattttctagatatttttgccttcccatttagtttaacatgatggaaggaatcaaaagtggacgaagaggtatagttggtgttggtgctggcgttccaagaaaatatgggagtatggtatgcactgcagtaataatacttatagaaataaccctgatgggatcagtgctttatgccttcaagaaaagctaggcaagctggt

SEQ ID NO: 51380 - DNA, 644 bp, Gossypium hirsutum
  Clone ID: LIB3543-055-Q1-K6-D9
ccccgcgtccgcggccgcgtgggtgctgtcgagccaggaagtccgcacatattctttagttgtggtgaagacggcttagttcaacattatgatctgcgatgtggttcagcctttgaagctattccattgcttctcattcaaagaaactaacagtccgcctttaaacataaggttaaacgccattataattgatccaaggaatccaaattactttgctattggaggttccgatgaatatgcacgcgtctatgatatcagaagatatcagtcggatggatctaatgtttcggatgaacctgtgaacttattttgccctcgccatctgtttcactctaaccatgttcatattacaggattagcttattctaaagcaagtgaactacttgtttcttataatgatgagctgatttatttattccaagagaacatggggctcggaccttctccgttatctcttgagtctgaaactcagttgagaaatgaggaaccgcaagtttatgcgggtcatagaaactcacaaaccgtcaaaggagtgagtttttttggccccaaagatgaatatgtgatgagtggttctgattgtgggcatatatttatttggaggaagaagggtgctaagcttgttcgagtaatggtaggtgatc

SEQ ID NO: 51381 - DNA, 642 bp, Gossypium hirsutum
  Clone ID: LIB3543-055-Q1-K6-E5
gttatggagcaaaaggagtttctcgagttgaacatgaaactgcaacaaatacttctttatgtgattggatgtctggtaatgaaacttggcagatgactcctaaatgtgatggtacttcacaagctggatgtaaagaggctgaggattcatgccttcccttacccagaactggttctcagcagccatctgtgaatgtaatgtttgaaagtcctatgccgatttcagtttacagtagggggaagaaacggtggggcagcagcagcagcgctagctctattgttgccaacttttgtgcacaggagcatgttaattcaaagagaagtgcggattgtctttctgttgttagttctgatgcactttcagaggcagttaagcgaaagggagtttctcgagttgagcatcaaactgcaacaaagatttctttatgtgattggatgtctggtaatggaacttgcaagatgactcctaaatgtgatggtacttcacaaagtggatgtaaagaggctgaggattcatgccttcccttacccaaaattggttctcagcagtcatctgtaagtatgaggtttgaaagtcctattccgaatttaatttacaggaggaagaaacggtggggcagaagcagcagtgctaaagctgttg

SEQ ID NO: 51382 - DNA, 624 bp, Gossypium hirsutum
  Clone ID: LIB3543-055-Q1-K6-E6
gccacgcaacctgagggataacctcataggaatactcgaatgaataccctatcctggacccttacctttcgttatactttttgaagtaaatggaatggtttgaagagtgaaatgcaaagaccattgcaaggaccacagatgcacatacacatgcgcattaccaacaacggaagatatagctggagatactattggtaaaactatcattaacagactgatagactgcctgactcaatgcataaaatagcgcatataaatggattgatggattgaatgtatctatgcttataactacgcccatgactgctgtcaactgggcgcttgactgagtgtgcactttagattggactctccatttgtgcttcatttttagctataagctgaactaaaaccaaaactgattctcataatgatttcaaatcgtatatgcgagcaaagatactaaaagtaacaccaaaagtgaaacaataatggaaacagtcacatgaatagcaacataaatagcacctgatatctgaccgagatcatgatgattaacattgcatctgatgaagcatcattagtcacatgactactcccaagcatcctgccattgagcctgaaattgggcaacctatctggtta

SEQ ID NO: 51383 - DNA, 651 bp, Gossypium hirsutum
  Clone ID: LIB3543-055-Q1-K6-E7
gggcaatccgaggacgaaacacacgtgtgcagcatggacgtgtccataggtggatattgtagggcttgccgttcatacatgcattaggctactaactgcttacttgagtgtagttacgatgccgcctagtgcattgcgactactcatgaggcgtagctcgggtctccgcgtcgatcttgtctgctgctccgtgtgtatcacatacttgataaccaaaatatcgcactgaaataggatccaatcggtaacgtgactgtcttgaacttgctatacacgaaatgcagataaagattccatgaactctcatacatgttgttgaccccatacagcgtagatacagagtgctgggagattatcttgacaggtggagcagggactaagctatccccactagcatagaaaagagcttaaccagttgttccatctcgagcatactataagctaatcgacatacctgtgagcaattgttagaacagaaacatatcaaaaatctacgttcgtgactcaatacaatactgcttatctgaaccaacacctttcccgcgcttatgctagcaacatggtgtggctacaagaaccaaaggctcgtcgaggatcttggtgctcagcagtatcctgataacccaaactgcttgcaatggacagcatatg

SEQ ID NO: 51384 - DNA, 660 bp, Gossypium hirsutum
  unsure (1)..(660): unsure at all n locations
  Clone ID: LIB3543-055-Q1-K6-G4
cccagcgtccgctcaattccattctctcgctttccgagctttgtcgtgctttaattcatcgcaacagaagaaaccacctgagggaagggaagcgatacggcggcgccttcagactccgacgattaatagcacaagcttttaaaaaagaaatgttcctgcgattggtctcgcggccattgttggcgaagttcaaagagacgacggggatcgtcggattagacgtggtaccaaacgccagggaagtccttatcgggctctacaacaagaccttgaaggagatccaggccgtaccggaagacgaaggataccgtaaggccgtggagagcttcacacgccaccgtctgaaggtatgccaagaggaagaagactgggaaatgatcgagaagcgcctcggatgcggccaagtcgaggagcttatcgaggaagcgcgtgacgagctcactcttgtcgggaaaatgatcgagtgggttccttggggtgttcccgatgactacggatgcgagattattgaaaatgattctccaattccaaagcacgtacctcaacaccgtcccggtcctctaccanaggagttctacaagacgctcgaagctttttccaagaaagatgagcctaaaatcacctctggggagccacagataaaggagtaatagcatgctg

SEQ ID NO: 51385 - DNA, 576 bp, Gossypium hirsutum
  Clone ID: LIB3543-055-Q1-K6-G8
cccacacgtccaaccactcgtaccgacaggtacttaaccttaacggataccacaatggcaagcctacatagtaacgtatatacctttaggcgtgttattatcttgaaatagtaacgagctgggacgccttacttgtaggataatgggtcatatgaagacatggatttagactattcgagaagggagcacgccctaatatagatggtctatcctactctaaactccttttgacaagggaccaatttctacctgatcggggaggtgattaaatcttgcactgaccctgagcctggacacaataccgacatatgatgaggaagggacgtgcattgattgatgagagataactgcaatcactcctgataatgcaatccccaaactttgtcctctttggagggcacagcttgagatcatgtctactgaagcaagctaaaggctcaacttgacattgtaagtaagaaactcgaatgcttgtttcttgtgcttatgtcatggcagaggcaaaaataagctagcctgaacgatggtactgaatatatctatttacacagcacatggaaagccgttgtgtatatt

SEQ ID NO: 51386 - DNA, 631 bp, Gossypium hirsutum
  unsure (1)..(631): unsure at all n locations
  Clone ID: LIB3543-056-Q1-K6-A7
accggtgctgcatttccatttttaggattttcattggctatgtttctattctactcgtttgtcccagtcttacttaagatgagtggttccacaatgctcaacctctcgttgcttacctcagacatgtgggctgttgtaatccgaatttttgcttatcatgaaaaggttgattggatgtactttttggcctttgttgcagtagctgttggacttatcatttattccggaggtgacaaggatgatgatcaaagccgagctgatgttgccgatcaaggtactgaaagaagcaagcattttgatgaggaagctggttttgacaacctcagtcgaggaaataccgttggaagctcgaaaatgggggatatgagcaggcatgattgtatgactagctccggtggaagagaaactatcgagaacacgagcatggngaaaagatatgcaaggcaagaaatcatgatgaatttattactttagataaaagaaactatctactatagtacttgtaaaaaggattatgaagatgataaagaaacatcaattttggttgattatgttgctaaatggcattgaaaataaagaaaattataaatgtggtgttgcaattgtcatttaattccagtgctttcactgc

SEQ ID NO: 51387 - DNA, 643 bp, Gossypium hirsutum
  unsure (1)..(643): unsure at all n locations
  Clone ID: LIB3543-056-Q1-K6-B2
tctaattcattggnagctttctttgaattctaacaattcgactgccaagttgtcagacccgatctaacttgaaaactcttcagtctttgttggaatatgtcgcagagggggataaagaaggcaacaaaagtagctttgacttggaggagatgttagcagcccaaatcttttatcttcagcagtctcttggcataaattgtagtgctcttccatcagttgtctctgcactttgtctcctactttgtgatcattccaagttctcagacttcatgcatgactgtaggacttcaatggtgaccctatgttcgaagatacgctgtcctcctgaacttaatcctgcttggagatggtcatttgagcatccatgggaggatcagtcatcacaacttaatgatttggagaggattgatgagcttcacgcctgccaatcgctattattgattatctcaaatgtgcttcggaagaagtcttcagattttcaggctttatcactgcaagatgtagacaactctggtgcatttaaatgggaaagaagcattttggagactgaatgatatatctatctataacattttatagaaaaacatacgacggggtactgtggaagttatgacttctaatgttgacacgttaaagcctttgt

SEQ ID NO: 51388 - DNA, 575 bp, Gossypium hirsutum
  Clone ID: LIB3543-056-Q1-K6-B4
gggccgcatggaacagactcggtgctgcatttaattgaagacacaaatttacattttggataaaccacatgtaaaagttcgacatatacttatacgacgaggacatgccgatagagggataaggtgcatgcttcataataaggctgacgaaagctaaactcaacatgctatgatcgcaataggccatgcttatgatctttagaggaaatcactaatgggcatccaggcaggataataatgatggaaatttgagacattacatgaaccctattgactaggccataagaaatgattcatatgacactactagtacactatggcatgataatatgggcatcatctaaacatacaataaataatgacacagattaagtctattctgaagcctttggaactattggaaagggttcactcactcttgtaactgatgacaagagaaaatcgtcattatagacttcaacaacctttgaggacttattgaaactaaaatctaacctgatacatacaaagctcgtagtaactacgtttggacatgcattaaactaagcaaacatagtgtgcactgactaattgtt

SEQ ID NO: 51389 - DNA, 633 bp, Gossypium hirsutum
  unsure (1)..(633): unsure at all n locations
  Clone ID: LIB3543-056-Q1-K6-B5
attttgaaaataagccgccggctagatgagaatgggtctaattcgtacacaagaggaaacaggtcgacatgtcaggatgcttacacatgagatcagaagcactttggatagacatacaatattaaaaaccactcttgttgaattgggtcgaactttggcactagaagaatgtgccctgtggatgccaacacgtactggacttgagctccaactttcatacactcttcgtcaacagaatccagttgggtatactgtgccaatccatcttcctgtgatcaatcaggtatttagtagcagtcatgcagtaaaaatatccccaaattgtcccgttgcacgaatacgccctgcagggaagtacatgcctggggaggtggttgctgttcgtgtcccactcctgcatctctctaacttccaaattaatgattggccggagctttcaacaaaacgatatgctttgatggttttgatgctcccttcagatagtgcaaggcaatggcatgtccacgaactggagcttgttgaagtagttgctgatcaggtggccgttgctctttcgcatgctgcaattttagaagagtcaatgagggctaggngatcttcttatggagcagaatgtggcacttgaccttgcca

SEQ ID NO: 51390 - DNA, 648 bp, Gossypium hirsutum
  unsure (1)..(648): unsure at all n locations
  Clone ID: LIB3543-056-Q1-K6-B8
gcctagttctagnagcagccctcatcaccaccaccaccaccataaccagcagggagcaatacaaatgaactctctttcagatcccttttaacttcttcggtaaacttatcttcttcatttctctttactgaagtttattttctggggtttttttaatatactttgccttttaatctgcgtttctgagctgttcatttcattcaagatattgggttttggttttcattttcaaactcaaatctgggtattgtgttttttgatgatttgttgataatggtgcctttggagaatcggttcttgtaatatctgggtatgattgattatattaggttcatgtctttgggactgtgattcttaattttgttaaatgggtaattaagagttttgtagatggtgtcttatggatgagaggatatcagaacatgttatttctgcgacaaattcgcagattttttcgcattgcagctcactcaaagcaatttccgaagacaatacctttagaagaacctgctctttcgaagcttaaattggaaagagaccccgataagttattcaatttatttaaagaaaatgcccacaataaacttgttgttgaaaacaggattgcttttgaagatacggtttcaagattagctggggctggccgat

SEQ ID NO: 51391 - DNA, 209 bp, Gossypium hirsutum
  Clone ID: LIB3543-056-Q1-K6-B9
cggccgcgtgggctgttttagaaaaaatgaacgtctctaatgtctggccgggggggggggtggtacttgttttgtttctcatagcatccacaacattttctttttggcccattatctgtaatttttctgttcgcaacatattatgatatatgtattttgctatattatagatgttgcaaaaggataaaaataaatgtttcctaagatat

SEQ ID NO: 51392 - DNA, 618 bp, Gossypium hirsutum
  unsure (1)..(618): unsure at all n locations
  Clone ID: LIB3543-056-Q1-K6-C4
nannaaggcacaaaaaaaaaaaaccccccaaacctgagctagcttgatctattatgaattaattaaaaggaaaaaatcaaggttttttttatttatttttgtttttgttttattattttttattacactgaaagtcgtctccaaatcgttgttgagatttgtttgaatcttgagagttaaaaaacgagagatttaaagtttcttcatgaagctgatgttattaacgcatcgatttaagcttaaaaatcgaagatgagaagtgtaaacgacagcgttgaaaccgttaacgccgctgcctccgccatcgtctccgccgagtctagagttcagcctaccaccgttcagaagaaaagatggggaagctgctggagcttttactggtgttttggatctcataagagcagtaaacgaattggccatgctgtccttgtccctgaaccagttgtacctggagctttgatttcaactgctgaaaatgcaagtaacccaacgggcattgtaatgccttttattgctcctccctcatctcctgcatcattcctgcaatcggatcctccatctgccacccaatcaccggctggattgctatctctaactgccctttcagttaatgcctac

SEQ ID NO: 51393 - DNA, 534 bp, Gossypium hirsutum
  unsure (1)..(534): unsure at all n locations
  Clone ID: LIB3543-056-Q1-K6-C5
gntcctcctgggcgtcttcggcctcatctggtcgctctacaccgtctacacctccggcctcgacgaggacgaggagtccggcggcctctcgctctaagctacacatagtttcctcgtcgtctcatgtaatccgctcgcgagcatcgccatgatcggtgtaatgtaattccagagatggatatttgtatctaagcgtttccattctgagaaaaaaaaaaaaaaaaaaaaaaaaaaaaaaaaaaaaaaaaaaaaaaaaaaaaaaaaaaaaaaaaaaaaaaaaaaaaaaaaaaaaaaaaaaaaaaaaaaaaaaaaaaaaaaaaaaaaaaaaaaaaaaaaaaaaaaaaaaaaaaaaaaaaaagggggggcccttttttaaggatccaattttaaaacccccggggtggcgaaattaaatttttttttggggccccccaaattaaaaaagcgggcccggtttttaaaacgttggtagcggaaaaacccgtgggttccccaaattaatcgttttggaaaaaaacccctctttgaaagggg

SEQ ID NO: 51394 - DNA, 626 bp, Gossypium hirsutum
  Clone ID: LIB3543-056-Q1-K6-E2
atttcctttattttctcgtatgatgcaagaactgccatttcttaggattgaaacttttagatgatacacaactggtttattatctaaacttctatgtgatggtataggaataatcatctagctttggccagtagtttcttccttgttgcgcatcaaaattagctgtcttgtgtgtcatgtctaaatcataacgtgtagcttcattttaagatgcaaagagtggtgttagataatttgttgatcctgaagagtgtgactgtttaagctccatttgtaaagattggtcaattcttcctgttttcctgttttaaatatgaaaacttttaaaaccttatcttgcttggagagtggaactaagtgacctcagattatattatggagttgcctaaattggtaaaagggtcatgctttgtcttaacttctcctaggagagcctatattacattcaaacactgttgattcgcaggacttacccatttctcaagatgtctgtttatactattcttgctgttggatgctatcggcagtaatgacttaccaatggagtatggactatgaaagactacaaaataagacctgaaatttagctgctgttattacaagcacttatgtctaaaatgctatct

SEQ ID NO: 51395 - DNA, 636 bp, Gossypium hirsutum
  unsure (1)..(636): unsure at all n locations
  Clone ID: LIB3543-056-Q1-K6-F2
cggacgcgtgggttcattaccagacagcgaccattaagtatcatacttacaaaaaatttcttatgtggtatcttatgaacatacaggcactaacgagtatggaaaagtcaaatggagccaggtatataaagtggatgcatgtcgggncacgcgtgtgtcagtgtaatttaaccgtgacaagtagaactccgtgaaaatacaaggtctgttaaccgacattgaagatcttcgcattagatgtgcaacaatccctttaaggaatcgatcttaaatacattatggttttcttaacctctaccaaaaagcaagttcatcaatcattcatgtgaagatgactcgcaagtagccatatcaaaatctttactactgcaaaccgtgagttaactatctcggcaatgctaaaggtcttcaaatatattgcaattacaaattttagatgtgaatcaattacagctctagtttagagttctctgatgtaattactttgtgacttgaaaactgttggataacaacataatataatagcttttttttggatggctgctgttggtggtggtactggttctggtcttggatctcttctcttggagcgtctctctgttgactatggaaagaagtcgaagcttgggtcgaccg

SEQ ID NO: 51396 - DNA, 610 bp, Gossypium hirsutum
  Clone ID: LIB3543-056-Q1-K6-F8
tatgtgtaaaccaattttggtctgactattgcacgagtgactaaaaaaaatgtcctctgaacagaacggtccaaatctaaaaaaaacttcctggcctacaggaactaggggcagaatcacccgaggaatgccagccacacgtctgactgaaggagacaaatgaaatattttgacccggataacgatgcatgacaactgggtaccattgaaaccccagattatctttcccaaaaaatatcccataacatgatccctaccagttctggcatcagtgagcaattaccacattgccctgctcaatcccaacttaccatctattatgacggaaaagtgtctcaatttgatgcaattcccgctgaaaacatacaaaaaattatgctcattgctgctactgtggctgctgctgatgtagactactgttgacatgaagaatcctccaccgattatgccaccatttcacctgctcttacaaggagtgcttcacattaaagtactgcaactgcctctgctctatcacaagcacagatgactactcttcccaggacatcgtttagcacactgcaagctgaactaccaattgcaaggagacactcacttcaccgttttcttg

SEQ ID NO: 51397 - DNA, 640 bp, Gossypium hirsutum
  unsure (1)..(640): unsure at all n locations
  Clone ID: LIB3543-056-Q1-K6-F9
ncacattttacaaggcacaggatttctgggatttttctgtatgttttaaactctctttcttttattgcttcttcttcttgattgttttgttctctaatgttgtgctgaaaaagttggagaagataaccacccattgcagtatcttgatttttcttagaaacttaaataacaaagaatgaattttcttgtacattcagtttatattaattcttttcatttcatatagcagccaaaaaccaagaaaaaacactacgtttttccatctgttcttcattgaaaaccaagctatcttttcttacaccttattggggttttttccatctgttcttcattcaaaaccaaactatcttttcttacaccttattggggttttttcagaccttcatataacacttttttcaattcagcgtgtattgtttttcattgcatattaggttttttttttttgagttgcttcattacacccgagttcgagtaatgtaattcgattctacttgttttaacacaactttcatcacctcaatttgggattgtaagtgagcatcatattcctctttaatctcaaggcaaattggaagaaagataaagatggcaagaacaagaattaccatcttttttatgggngctcgtgcttttggtg

SEQ ID NO: 51398 - DNA, 639 bp, Gossypium hirsutum
  unsure (1)..(639): unsure at all n locations
  Clone ID: LIB3543-056-Q1-K6-G9
ccccgcgtccgattcgatctcttttgctagaaacgggactgaatggcggttagtacaatttttttttctaaccactcttnngtttgtttggtggagaaaatttatgatcaaacaagaaaaaaagagattttgtattttccaattcaatttcaccatgatgatctaagatattcttgttctaacataaatatctttaatttagttagtaatttatgttttatctgctgttgctgtgcacttcatttacctttttcgtatttcgttatatgatactatcagttaccctggttcttagaaattttattacacttttttgcactaggttaataaagaatccggctatatcttctgtggatttgtatgcaactatttatagatctggttgatttcatttcgtattgtataatcagtagtatgctaattaggaatttattatgtaaaattttgctccaagtaatgcttacttgaaagaaaaatgaaaaagtgcgaatttaacttgctaatattgaactgcgctcgcgtttttgtgattattaatctaagatgctagttttctatgatggtcagcctaatacaaattttgttcgtattcagcctaaatttaatgggaggttttcttttttaatggatgtaataatg

SEQ ID NO: 51399 - DNA, 617 bp, Gossypium hirsutum
  Clone ID: LIB3543-056-Q1-K6-H6
atcccaatgccattccaccacgcgccgccgcggcaccccgagaacggcgaccgacgtcgcacaaagcagggcctttaagcccgtttctcaggtttcggggaggagcgcctcttttcccacaaagaagaaaagagaacgaagcctccctttcctcaaccttcagcccttgcgatggagatcggccctccgacaaagcggtcacggggcctctccggtaagtctctttcttattattcttgtttatgaaaataaaaaaaaaaacaattatataaatcaagataaaaaagaaagattgaaataaaaggaaaatcctctcaaagttttgttttttgtttttatttctcaagattcgtaaagaggtcgaagacgattacaagtctctgatttttggctttatagccaatctaaacaactttttgtttctttttttttgttttttgcctattgctgctcgttgttgcgtgtttttgctgttttgtaggtgttctgacacgcgtggaggaggcctggtacgcatgcggcggttgacggctaagagcaggggcgtgcggcatgcggggagttggagcggcgccagtggctaggcctgcggctagggaaagtcccaattgaagaaa

SEQ ID NO: 51400 - DNA, 423 bp, Gossypium hirsutum
  Clone ID: LIB3543-019-Q1-K1-A5
aaactctccactcaaattcatggttttaagccattactcattagtttgattctatgtatctccgtacccacaactccactcaacctttattcaatggaggtcgagccggcgctggtaatggagttaataccccaagcggggcaaagacagttgggagatggttaaaggataggaaagagaaaaagaaagaagaaacccgagctcacaatgcacagctccacgctgctatctcagtcgctgcagttgcctccgccatagcggccattgcagctgccaccgcaacttcttcttcttcttcttccaccacgccgggaaaaaacgaacagtcggcaaagaccgacatggccgtcgcatcagcagcaacattagtagcggcgcaatgcgtggaggccgccgaagctatgggagctgaacgcgatcacc

SEQ ID NO: 51401 - DNA, 416 bp, Gossypium hirsutum
  Clone ID: LIB3543-019-Q1-K1-B11
gttttctaagggttttgtcagtgtgcatggggagaggccttctgccgagtatgcaaagttgaggaaagaatcactggaaagtgaattcgggcatattgttggaacacacagctccaaaagagtgtctgttgtctaccgatttggtccatttttggcattctacagagcagcaatcatttcatttcatgtattgaagttgaccatttggcgatttttttttcgagacattaaagagcgtgcttccaagtttcgggagactctaattcgcttgggtcctttctacaataagcttgggcaggctctgagcactagaccagatatattgccacctgtttattgccaagaacttgctaagttacaggaccaaattcccccatttacaacccatgtcgcaataaaatctattgaaaatgaac

SEQ ID NO: 51402 - DNA, 341 bp, Gossypium hirsutum
  Clone ID: LIB3543-019-Q1-K1-B7
accacgcgtaacgttagcaattatgctgagcatggtcgcaaggaatttaactcatgtgacggctaacgatcctagcgatgcactgaattgaccaccggggacctgtatgaaccagagtgtatgaagatgtgcgttcgaaatatattcttgacagtggaaacaactggtacaatgattgtaatcctgaattctatgctagatggtgctacatgaagtcatgcactaataaggaaaatgagtgatacccttactgtacaataaataaagaaccttactactatcctatgtacataagaatgaaagatagagattatgaaagacatttgatggtgcctacatgc

SEQ ID NO: 51403 - DNA, 380 bp, Gossypium hirsutum
  Clone ID: LIB3543-019-Q1-K1-C5
cggacgcctgggatcattgtcgagagtaggcagtggacgattgggctcggctacggaagctgatagaaacggaggaaaggactgtacgccatatatctggaagtgtatctatggaccaccataacatttggtcgtgtgctgtacattgccgaatataaattatattaactttgagaagatgggggatgagagcctatatcgactgattaaattactgaatacggacggctgcttcatgaacatgaggttgaattatacattgaacttgatataaaagatactaagttcagccaaactatgagtgcagatctggtagttcaacacattatagcatgtgtgaaggaacatgtagagcatttatatagcctggtctaacatgt

SEQ ID NO: 51404 - DNA, 537 bp, Gossypium hirsutum
  Clone ID: LIB3543-019-Q1-K1-D10
cccacgcgtccgctttcttttaggtttcgtttctgtaaccgttctggaagcctacaggagacgtcacaataacgctcatgttgaagcgccggcgatgtttgaggatccagaatcattgaaacaggttccttgtcctgatattgttgatccagcggagaaatacttgtctttgataattccagcttacaatgaagagtataggcttcctggtaccctcaacgaaacaatgaattatcttcaacaacgggcagcaaatgataagtccttttcttatgaggtagtgatcgttgatgatggaagtaaggatggaacaaagagagtagcttttgactttgtaaagaagtatggcgtagacaatgtaagggttatccttcttggtaaaaaccatggaaaaggagaagcaataagaaaaggaatgctacattcatgtggtgaattacttctaatgctagatgccgatggggctaccaaggttactgacctagaaaaacttgaaaaccagatccatgcaattgtgagaaaagattatcaccctgg

SEQ ID NO: 51405 - DNA, 535 bp, Gossypium hirsutum
  Clone ID: LIB3543-019-Q1-K1-D11
ctttttaatttatttttacttccaacacaaacagcaatggctaaatcacctgtctcacttccccttctctattttctcctccttttgtcatttaactctgggatcttgctgaagttggccaatggacaggtcaaaaaatggtgtgttgcaaagccttccactgatgataaagcactggtttccaacataaactatgcctgtgaacaacttggaatccttggattcaactgcagccagatacaaccaggtggagcatgctatgatccctacacttacatcaaccatgcatcgtctgtcatgaattcttattaccaggccaatggtcgtcaagaacataactgtaacttccagggttctggtctcatcactatatccgatccaagctatggaaactgccagtatccatgaagggtctaaaatggaagagaagttctgcatgtgtgaaggtttctgggtttagtgtgtaataaatgtgtcaacattttatttacatttaggagattgatttctgtagtaggtgctttgtgtgcttata

SEQ ID NO: 51406 - DNA, 535 bp, Gossypium hirsutum
  Clone ID: LIB3543-019-Q1-K1-D2
ctggctcacaaaaaatacccataaaccctaaaaacggcaaaaaaattcctctaaaatctatcaaaacgatcgaaatcaaaatcaatggctccttcgttaaatgacgattcgcctccttcaaccattgacgaagccttcaccgaaaataatctccagccgtttgttgttcttcaaaaaggatcgtctcggaaatcagatagaaaatcatcaggaactggaagaacaaggagaaccgatttgtcttcagcatcaccaaagaattctgcgaatatcgaagacgaaaaggaagatgaaaacatgaacttgagaatggaagcctttgaatttgtttggtcaaaaattgaatcaaccattaaagatgttttgagagatattaatatgaacgtgtttagcgagatacaaacttgggtgcatcaatcttttgacacaatcagatcacttgggactcccgagtttcctgaagctactcaatcattccctattataactgatgctaattctaaaaggctatttactggtcttgttcttaccaaga

SEQ ID NO: 51407 - DNA, 533 bp, Gossypium hirsutum
  unsure (1)..(533): unsure at all n locations
  Clone ID: LIB3543-019-Q1-K1-D7
cacaaattgtgcgtaaaagaggtggtgtttatgaaacaatgttgcccaaggaagaagacttctccagtgccttgtacaccttcgacattggccaaaatgatctcacttctggttatttcttaaacatgtccgtagacgaagttaaggcttatgttcccgatgtgcttaaccagttcctcactataattaaggatatatatgacgtaggaggcagatacttttggatacacaatacaggtcccgttgggtgtttaccctatgtcatggagcgtatcccggtgttagcaggtcagattgatagatatggatgtgcctcgccattcaatgaagtcgcccaatttttcaaccatggtctgaaaaagacggttcaacagctgcgcanagatttgccacatgctgcaatcacttacgttgatgtttactcagtgaaatactccctaattagccaaggaagaaaccatgggttcaatcaacctcttagaacatgctgcggccatggtggaaagtacaattacaacaagaacctgnggtgt

SEQ ID NO: 51408 - DNA, 378 bp, Gossypium hirsutum
  Clone ID: LIB3543-019-Q1-K1-E10
gtaaaacctgcggctaatattgcgaacactgcaagcagccaggtattggatgattgtgcattaaaacaacatctcatagatggcaccatagctgggtgtgctctgaatggagctgaaaggccgcagtggatggaagcatgggtgaaggagaggcccaatgtactgatacttccacgaagtgcagattctagtgaagaagcatggatggagataacggagaaggctatctctatgtgagcaatcatttgtctttgatggggtcataacaacggatgccatctctgatgaggatgacgaagaaagagaaatagtacatgaaaaaggacaatctagcatacaagacatataaagtgcttataagggatctagtgctgaaca

SEQ ID NO: 51409 - DNA, 501 bp, Gossypium hirsutum
  Clone ID: LIB3543-019-Q1-K1-E9
gaacagttcaagcttgagaacagaagcaacccagaatggcgcttatggatagcgttggcggcctgtgaaattcgcgggacgcctcctgtgctgatattcactagagacatggggagcttaacgccatgaacaacataaactatgattagatggcattcactaccttaagtagatgcattgcaggaggaatccttcatccaccagcagctaaaatccacagtgcatgcagcattacactctgcttgacatacacgtggtaggaactcatggtgatctgtgtcttgcacgaattaattgatcaactgctcgtgtcaaaggcattgctataaataagatcgctcagcctaaagacggtgatggagtcatcgctactgctatcctaggaataatgccgctcaatgagatgatttatgatattgtcgtgtaccttggatatgctcacattaagcacgcggatatatcggcgtacttgggtgtcgataaagctgaatatgacctata

SEQ ID NO: 51410 - DNA, 538 bp, Gossypium hirsutum
  Clone ID: LIB3543-019-Q1-K1-F2
atcattagcattttattctctgtttccacgtcttcctcttgtttatatattccccctcactctgccttcttacctccgacatacatttcctctattgtccatacaaacgaacacacaatttcagatcaaaatctaaccacgaaaatacccttccaaaatgaagcgattcatccgccgtctctcccgcgtcgctgacgcttcctcccattactgccttctccgttccgactccaccgctcgacatcgcactacctccacccgccgacccgaaccgttccgcgtcgccgtctctttgttgaaaaagcaagcacgccggtcggtccccgagggtcacgtgcccatttacgtaggggaagatatggagctgttcgttgtgaacgccgagttgctgaaccacccggttttcactgcattgcttaacaagtcggctcaggagtatgggtacgagcaaaaaggggtgcttcatataccgtgtcacgtactggtttttgagcgcgttatggaagccttgagactcggggttgattcacgtgacctc

SEQ ID NO: 51411 - DNA, 445 bp, Gossypium hirsutum
  unsure (1)..(445): unsure at all n locations
  Clone ID: LIB3543-019-Q1-K1-H10
cacaaactttcgtacaatctctgtattgtattatacatgccattcaaacgctcattcaacacttcaaaatacacatactattttgcagactgctccgtataaaacttcccaatcaatctatgtatccaacgacgagttcctagacaggacactaagctgaacactataatttcctgaaacattttccaatgcataatgacgaggacagaggcgacaagaggagagaccggaaggagtccgagaatgaggagtcaaatgctaactcagatgcttacttaaaactctcttgagaacactctcccgagcacactcgcgaggaatctggccttgaatacgtgcacgatcacgtgcacgagacaaagcatatgacagaggatatgctgaacgatctggacgactncgagcacgacattgaacctgagatggggattgaggtactggacta

SEQ ID NO: 51412 - DNA, 545 bp, Gossypium hirsutum
  Clone ID: LIB3543-019-Q1-K1-H9
aaaaacgaaggagactagggccgcttatgaggctatgttgagtttgattcagcagcagttgggtggacagccacttaatatagttagtggtgcagcggatgagatattggctgtgcttaagaacgaggggattaagaatccggataagaaggaggagaaagtggatgagatgaaagaagaagatgaagaagagcaggaagagaaggctgaagaagagtcgaaagaagaagaagatgaggaggagcatgaagaaaaggatggagatgatgaagagaaggatggggatgatgaagaggagcaagaagagaaggctgaagaaagcgaggaggaaaaaggttcaaagaagcatgggaaaggtaaaaaaactgaggagaaagttaaggggaagacaaaaaagttggaggagaagaaggagccagagcaaagaactcctctcactgatcgacctgtgcgtgagcggaaatctgttgaaagacttgttgcttctattgaaaaagattcttctagggaattccaaatcgaaaagggcaagggtactccactta

SEQ ID NO: 51413 - DNA, 479 bp, Gossypium hirsutum
  unsure (1)..(479): unsure at all n locations
  Clone ID: LIB3543-020-Q1-K1-A10
cccacgcgtccgcttgctttcatggcaacggagctaacttgtcaaataactgctggtcagatactattatnntntcaagagcaatgttgccaggaagaatcttagtcctaatcatgtcagttctgttcaagcatcaaataaacaaatgtttatgagtgattcaggaggaacgtctgaatatgatgatgacctccgtaaggatacaagttcacctgattcttatggccaaacctatgagcccctggaaggtagaggttctaatgcatctgctccaaatcctgctgcttctttatctgatgatgccatcaaagctgcatcatcaattgctgtgaacttgcaacaactaagtttagggaaggaagagagagcagtgactcctaaagaggataatcgtggcgtggtgctttcagattatttgcaagccttttctgctgattgctcacatttgagcttttgtacctacaaatctggcaagagta

SEQ ID NO: 51414 - DNA, 545 bp, Gossypium hirsutum
  unsure (1)..(545): unsure at all n locations
  Clone ID: LIB3543-020-Q1-K1-A3
tgctcaagtaataccgacagtcggccaccaagttttaggagacataacattttatactaaattagcgacanttctnaaggattgaaccatgagttgttttggctgttgtgaagaggacaatatccgcaaaaccactgataatggaggccaacacatggttaaaatttcagcaggaagcgatggagtttactattcatctgaaactgcagcaaagagtgctcaaactttgaaggttcagcctattgaagtccctgatattcccgtagatgaattgaaagaagtcacagataattttggtgcaaattctttgattggagaaggctcatatggtagagtctactatggcgctcttaaaagtaggcaggctgcagcaatcaaaaagttagatgccagcaagcaacctgatgatgagtttttagcccaggtttccctggcatctaggttgcagcatgaaaactttgttcaattgcttggttactgtgttgatgggagctcccgtattcttgcttatgaatttgcatctaatggatcgttgcatgatattc

SEQ ID NO: 51415 - DNA, 368 bp, Gossypium hirsutum
  unsure (1)..(368): unsure at all n locations
  Clone ID: LIB3543-020-Q1-K1-A5
ctaaaataaaatgcctaatcccacccctcttatttcgctcccaccattcatagtggaaactaaaattagtcactcanntctctctacttcttttaatcgttcgccaaaaccaaaaaatattaaatcatgtccagcagtaaccaaccatggatccaatccagaaagttttcaaccaattcgacaaaaacaaggacggcaagatctctgtatcggagctcgacgaggttttgaaagcgttgggttgctcctcccctgaggaggaaatcaaacgtgtcatggaagaactcgacatcgacaaagacggattcatcaacctttccgagttcatcaacctctgtagttcctctttcgacaccnggcaacgctga

SEQ ID NO: 51416 - DNA, 548 bp, Gossypium hirsutum
  Clone ID: LIB3543-020-Q1-K1-B5
ggagctagtcaatgttcctctcccaacctcgtctcctccttcgaaaatcccttcccgccctagaaaaatccggaaacttcccctgacctgagcttcgaccccaatgcctcccaacaagcaacgacctcctcctccacatccctgaccgaacagcgtaaaaccgtcggcagaacttccaaaacaaaactcagtcaacatcgagccctagcggtggtggctccacgaatcatttctcggtccctctcttgcgagggcgaggtcgaaaacgccatccaccaccttcgcgacgccgatcccctcctcgcttccttaatcgacctccatccacctccaaccttcgacactttccatgcccctttcctcgcgctcactcggagcattctctaccaacagctcgctttcaaagccggaacctccatctacacccgcttcatctctctctgcggaggcgaaaacggggttgttcctgaaactgttctttctttaacctctcaacagctgcgacaaattggtgtctcgggacgaaaagcgagttaccttcatgatct

SEQ ID NO: 51417 - DNA, 546 bp, Gossypium hirsutum
  unsure (1)..(546): unsure at all n locations
  Clone ID: LIB3543-020-Q1-K1-C10
cccacgcgtccgcccacgcgtccgcccacgcgtccgcaagtccaaaagaaaagaattttcagcagatctttcangacctctgacatccttatagatgagaatcaagataatgggccagagttaccaatttttaatttcggtgttgtggctgctgcaacaaagaacttttatgaaggaaacaaacttgggcaaggaggttttggtgctgtatacaagggagagcttcctggaggtaaagaaatagcagtgaagaggctttcaggaagctccgggcaaggcttagaggagttcaaaactgaaattatcttgattgccagactgcaacatagaaatcttgttagactattgggctgctccattcaaggggaagaaaagctgctgatttatgagtatatgcccaataaaagtttggacaatcttctttttgatgcaaccaagaaagcagagctaggctggagatcccgcctggacattatcgaaggcatcgcaagaggacttctttatctccatcgagattcaagactccgaataatacatagagactta

SEQ ID NO: 51418 - DNA, 543 bp, Gossypium hirsutum
  Clone ID: LIB3543-020-Q1-K1-C11
gctttccctcatcttgttctctttctcctttcatcacgtctcctcttaatctagcgaaaagacaaagtgagaaacgtaaagcagtatcacatctggttacggaagaagtaaaaactggagctggaaatggaaatgaaaatgatctattgttttcggggtactatggaggaggttgaagaagctaacaaagcagcaatagagagctctcatagagttttgagtatcttgtctcagcctcaagatgaggttagctgtagacatttaatggctgaaactggggaagctgtttttaggttcaaaagagtagtttcccttttgaactctggtttgggacatgcaagggtgaggaagttaaggaaactgcaagccccttttcctcagagcacccttttggatactccacgctgtaatccctcagcctcagattatccatccaagaatctgcaccttggttgccatgaaagctcggttcaagaactgacttcacacgctaggaaatctccatatttagggaacccatctttggaattgagttctaatggg

SEQ ID NO: 51419 - DNA, 526 bp, Gossypium hirsutum
  unsure (1)..(526): unsure at all n locations
  Clone ID: LIB3543-020-Q1-K1-C4
gatattgccaatattcaacactcaaaaagctgttaccttttcccaatggcttcaatcaaattcgatgccttcgaannccgttcaggaaacctcaaaacccaatccaacccatcaaccttctctcactcactcaatcattcctccccacaacatcctcaaactctccgaatttcgcttctataagctcttctggtttcttcagcagaaaacccaagaaacccggcctggattcggacaagcccgggccttacaagcagatggtggaccagttcttttgggaatgtgagaacctcccagattacagacacacgcctgaagtcgaaaattttttgaacgaagacccctttttcgagaacaaagagaacccaaccgaggatgaacttaaagagaatgaaaagtggtggcaagactttagaggaagtcctgtggttcagtttttggcaagagctgaggaaattgctgacgaaatcaataggatagagcttaaagaaaatgaagaaccgtttagaaaggaagataagaagct

SEQ ID NO: 51420 - DNA, 459 bp, Gossypium hirsutum
  unsure (1)..(459): unsure at all n locations
  Clone ID: LIB3543-020-Q1-K1-C6
ggccgccctttttttttttttttgttttttggttttttttgtttctttttttcatntcctgggattaaaaannaagggctgtatttattaaagaactacattcattcaaatggtgagttttgcctgcgatttaaaacatgaatttcacagcaatacaaacaaaaggcctttttttatagaacaaaagaaagtggccatacagttttgaaattttttttagaatgaccattttcatagggagcattatcattggtttcattggcaaacttttggaagggaaaaattttggtattaattcaacctttaagaggatattgggaaaaagggctacacactaaaactattcttgggaaaaaaaaaaggaaaattggaagaaaacccggagagaatggaaccggttttgggctcttttactcaaaatattcttggaaaggaggccaccgtgtgtagggaaaaagg

SEQ ID NO: 51421 - DNA, 432 bp, Gossypium hirsutum
  unsure (1)..(432): unsure at all n locations
  Clone ID: LIB3543-020-Q1-K1-D3
cggacgcgtgggcggacgcgtgggctgacccttttattctgccccgggttcttcaggtccgcttcctgcaggcgtnnnnncgatagtatcgtgcgcagagctcggcagatcttctacagccgtgtaaatccaacggttgaggttgatgtagaaacatcgaacgatataatggctacggccgcacttcctatcgctgcatccactggattttacgaggctcttgagctgagagatggaagttccgattacctcgaataaggtgtatcgaaggctgtcgctaatgataacacaatcattagccctgcattgattgtaaaggacccaacctaccagactgctattgacaattatatgtgtcaacaactggatgtaacccaaaatgaggagggttggtgcatacagaaccttcgttgcaaatgccatatcttgccg

SEQ ID NO: 51422 - DNA, 544 bp, Gossypium hirsutum
  unsure (1)..(544): unsure at all n locations
  Clone ID: LIB3543-020-Q1-K1-D7
ctcctccacccccgactttatctcccacccctctattattctgctcctcccatcttcctcttctttcctccnnnccacccttatcccctttgctaaagtccacggcaaccccttatccatcactcccacccacctctgccaaactgcgcctcccttttcccctatcttttaacctaatcccatgtccaacccatcttctccctcacccgaacagggtataccatccaacacatcgcctccaccaccatcggaaacgctgctgtcgctcccggcaccgcctacgtccagatccacgccgtcggcaaccgccaccgtcacgcccaacccaaggcggctccctccgccttgttggtctcacgatgaaaccgtcgcgttaatcgacgcctaccgcgacaaatggtatacgcttcgtcgtgggaaccttaaggccagccactggcaagaagttgcggacgcggtgactcggcgctgccctatggcgacgcctcctaagacggccgtgcagtgccgccacaagatggagaagctccggaagcggtaccgg

SEQ ID NO: 51423 - DNA, 476 bp, Gossypium hirsutum
  unsure (1)..(476): unsure at all n locations
  Clone ID: LIB3543-020-Q1-K1-F1
cccacgcgtccgtgaatctgttgctactgaactcgatgttaaagtgtgtgatatttgtggggatgctggaccccnnnncttgctcgctatatgtagcaagtgtgctgatggtgcagagcatacttactgtatgcgagaaatgcttcaaaaagttcctgaaggtgattggctttgtgaagaatgtaagctggccgaggaaattgaaagccaaaagcaaggtctggattctgaggggaaaaaggcaaaaaaaacttagctcaactacacagaacttaggtaagagacatgcagaaaatttagaggatgcttcagcttcgaaaagacaagctgttgaacaaaaaatgggatcaccgaaatcattgagccccagtaaagcatctgcattgtctagagagggttctttcaagaacatggacaaggggaaagtgaggccatctccacaactttctcttggcagtcattctggtaacgacctg

SEQ ID NO: 51424 - DNA, 545 bp, Gossypium hirsutum
  unsure (1)..(545): unsure at all n locations
  Clone ID: LIB3543-020-Q1-K1-F10
agccaacagaagacatgaaaatggttgcaatttgtgcattgcaaaacttcgttatgcggagtagaactaatangcnanctgtagctgaagccggtggcatattagtaattcaggaacttctgctttctcctaatgctgatgttgctgtgcaggcagcattgcttatcaaattcttattctctaatcacacccttcaggaatatgtatcaaatgagctcatcagatcattgacagctgccctagagagagatttgtggtctgctgcaactattaatgaagaagtcttgagaacattgaatgtgatatttgccaactttcctatgctccatatttctgaagcggctaccttgtgtattccccatctcataggagcactgaagtccgggagtgagggtgcccaggaagctgtattagacaccctgtgcttgttaaaacattcttggtcaaccatgcctatagaaattgcgaaatctcagtccatgattgcagctgaagcaattcctattttgcaaatgctgatgaaaacctgtcctccgagcttccat

SEQ ID NO: 51425 - DNA, 236 bp, Gossypium hirsutum
  Clone ID: LIB3543-020-Q1-K1-F5
tataatctgtatatccagtaaagcatatcaatcatgtttgcagttacatacaaatagttaatgttttggtggtgtgtcctatcctccagggttggtctgttatctatcttgggcattcatttgaagaaaaataagggtatatgttcatcattctcagccttgtacttttgaactggagaaatcccatatgatctcatctaatacactttgtgcgaggtcatcagttccttttggat

SEQ ID NO: 51426 - DNA, 224 bp, Gossypium hirsutum
  unsure (1)..(224): unsure at all n locations
  Clone ID: LIB3543-020-Q1-K1-G12
ccgacgcttggtcagtacccttgggctggacgcgcaggcgagacgcgtgtttctgacgcagtgactggtttagctcantctccactgaatttaacatcaactgaattcccaattgttctcatggacacatgtggtaacaaaaccgagtcgaccaagatcaagcatcaagatcattgtgtgctaagatgcaggcaatgaagattcgctcaacgatcacatttaac

SEQ ID NO: 51427 - DNA, 363 bp, Gossypium hirsutum
  Clone ID: LIB3543-020-Q1-K1-G3
gcctaagaccaaacctatccgcatcaattgtgatccatcaaaaccgagtccgggttggagctggctggagaggtggatgtccacgtcatcatctgaaaagacatcaatggcagagttacctaacgaacaacctcgtgactctccactcgatgctacagttccatctaaagctatttctgagtcgaacgatgtaaacaagatattggtttcatcagagagtgaagagaatctaatcacctatgttgctggcgactctaagtccaaaggctagcctgcccacttcttcaggaacaggtgattgggagcgaactcagattgacaacatgagtacattcgacctgaaagagacctcgctggatcaaa

SEQ ID NO: 51428 - DNA, 363 bp, Gossypium hirsutum
  unsure (1)..(363): unsure at all n locations
  Clone ID: LIB3543-020-Q1-K1-G6
tccggccccgaaacattggcacaactcactcattcattattctctcccccctctcccttcttctcgcactgnaatcccagnnctccatcccnannccattctgctatctccctcttcttctccatgggttgaagaacaacaccccgccgcctcgattgcctctttttccccctttttttttctagaaatatatggagtgggatagtaattctgatctgagtggagatgaagatgagggcttcttgctcaatgatggcgcccctgttcctttccctattaaccgaagggtcttcaccaatccagttgtgagaattgtatctcaatcttgggattggcgaagacccttctgctatatactaaaga

SEQ ID NO: 51429 - DNA, 432 bp, Gossypium hirsutum
  unsure (1)..(432): unsure at all n locations
  Clone ID: LIB3543-020-Q1-K1-G8
gtgaaaacaaggttgatgactcatgttcatgggaataaagttgctgctgctatgtatggtgaggttaatgctnnnncctgcagattttgaaggaggaaggttggattggtttgactagtggactggggcctagagttgttcatagtgcttgtttttcagctttgggctattttgcatttgagactgccaggcttgcaattttgcatcagtatttgaagcataaggagaaggagttgtccaaaatcagtgttgcaccggcttgagttacaattagttggtgataatgctaatttttatcactgttntgttaaatttgttatgttaccatgtagtgtagttcaaagacactgatttttggcattacattatcgtacatttcttagttaaagtttctgttttgtctactaatatatatcaatagaaaataagttt

SEQ ID NO: 51430 - DNA, 547 bp, Gossypium hirsutum
  unsure (1)..(547): unsure at all n locations
  Clone ID: LIB3543-020-Q1-K1-G9
aaatgatatatgtatctgcacttgtaggcaagtccatgcacacactctcacatttagtaggtacggtcagaanagnnccggtctacgaaggtgtttatgtaattcatttggttcattactctgtttaaagttggggaaacatgcgtgttggaaggaagacaccagttgagagagcattgtagaattattgatattaaaggagaagtacattgtccataaattttaccccacaaaaaacaagaaaagatcgtgacttaaatattaagtgtgtcatgggagatcagtataggagtttgctacaaatgattgagggattagaatacctgcaatcccgtgggtgaaattattacaaattgaattatgatgaattcattttggccattattggataaattatttgagaattgtagtcaatccaactatgcatttgaaaagcatgtcgtcctcaaaatattttttctctgcaggttatatatatgtgtatatataaaaattagaatagctagtaggctgaaagtaataaattattttttggatcttatgcggc

SEQ ID NO: 51431 - DNA, 541 bp, Gossypium hirsutum
  unsure (1)..(541): unsure at all n locations
  Clone ID: LIB3543-020-Q1-K1-H5
ccgagagaagacagaaacgttagttggtctggttttttttttttcggttggtttggtctcagttaaaaaggttgcgttgtttatgaaagaaaaccatggtgtcggaccaagaaatagcaagaggtgtggagaacttactccggcaatcggaccctagcgttgccaccaccttaaacggcgtcgttcaacagcttgaagccaagttaggtcttgacctttctcataaagctggtttcattaggggccagatcaacctcctcctccgtccaccacaaacccaagctcagccacctccaaaagaccattttaacctccaacaccaccctcaattcacttcccatcatcatcattcccaatttcctccccattttgcccttcaacatcactcacaattcccttctcatgaactcaacttccgtcaaccacatcctcctctcacagctcaaccaccgccgcagcttcagccacaattgcagcagcaccacccccaccaccgncagcaccatcaccaccagcagcaacctcaacagctacagcagcc

SEQ ID NO: 51432 - DNA, 533 bp, Gossypium hirsutum
  Clone ID: LIB3543-021-Q1-K1-A2
gcggcaaataatacgattgtgcctccctatccatgcgatgaacaaccccaagctcaaaggctatggcttcaacccctccgagcaaatcctcatcggctatctccgagaccgaacacttttcggccgtgattacttggtccaagacatcatcgacctcagtcacgatatttgcagctatgatccatgggatctacctggttgtgattcggtcacaccaaatgattcggaacggttttttatttacccgaaaacgtataagtatgcaaacagtaagtccaaggtgatcggtacgcctacaggacaagtaccaaacagtgatcagcggcagccgatgataaatcgagctaccaagaacggaaattggaaagtctcgggggttcgagttaacattaactctagggatgaaactaaacaagtgattggtattaagacaaggttgtatttcaagcacaacagttgcccaaacaaaacatcatgtgtgttacatcagtttcgaacttgttggtattgatccttgccaagataaatatttt

SEQ ID NO: 51433 - DNA, 451 bp, Gossypium hirsutum
  Clone ID: LIB3543-021-Q1-K1-A3
gggctacattgtttgttggtgaaagctgaaacagagactactgcagggctcttggcacgcccagtcctcacaagctactacaacagcgaccactttaagactcgcccatatgaccctttcaatgtttacactagccccaacgaagccatcctttgcgttgactcttttcaaagcatgtacgcccagatgctttgtggcttgatcatgaggaacgaggtccttcgtgttggtgccgtttttgcctctggcctgcttagggccattcatttacttcaaaacaactggaaacaactggctcatgacatcgcaacgggaaccttaaaccctaaaataaccgatgctccggttcgagaatgcatgagaaaaatcttgaaacctaacccagaacttgcccagttcgttaccatggaatgttatgaggagaattgggaatgtatcatcaaaagaattt

SEQ ID NO: 51434 - DNA, 278 bp, Gossypium hirsutum
  unsure (1)..(278): unsure at all n locations
  Clone ID: LIB3543-021-Q1-K1-B11
cccacgcgtccgttctcatttttcttctcccaattgaattcaccatggatgaactaaggaaacattcgaccatcttcttctccttgcatggccgtggtggtggtggtgggtttaggggcagaggtgatggggggagagggagaggacngattattagcccgtggaggtacggcgtgaaccgcatacttattctgcgtctgatcgatacaaagatgaacctggatataaaaatcctgcaggttcaagtactactatacgtcgtatggatgcagatcacc

SEQ ID NO: 51435 - DNA, 517 bp, Gossypium hirsutum
  Clone ID: LIB3543-021-Q1-K1-B4
ccacgcgtccaaacttattctcaatatcgaattagagagcgaaaaggtgaaagctagggatattgaatcggataatggagggactcatttacctgaagtcaagtcctcggacttcgttgagctcttttccttcctttaatcaaccgcccaattacttcgccagacgctactgaatggaccttgcactccgtcgctccagttttgccgtcattcgagctcagcagccggggacgatatccccgaaagaggaagatgaagaagatgctttgaaagcaaaggaatgggaagttggaatgttccaaaaccaagtctcagctagtcagggtataagaatactgcgaccgcctccgacgagtcccccgttgcactacgtgggtcccttctagatccgcttgcagaacgacggcaacactcctcgtaacattctcgaagaaatcgtttggcacaaagacacggaagtttcccaaatgaaagagaggaagcctttggctacattgaagaagtttatcgagaatgc

SEQ ID NO: 51436 - DNA, 233 bp, Gossypium hirsutum
  Clone ID: LIB3543-021-Q1-K1-B6
acggcgagctttgaaaaatatggtatctgaataggaagaaagctaccctgaaaactatagctgaaaatgcctgagcagattgatgagaatacaggactgccttctcactgctagaaggaaagatgctacctcatgtaaaaatgaggaaaaacagagatgttttgaagttcaaggtccggtgctccaagtacttgtacaccctatgagtgtctgatgctgaaaaagccgacaag

SEQ ID NO: 51437 - DNA, 520 bp, Gossypium hirsutum
  Clone ID: LIB3543-021-Q1-K1-C1
cacgcgtccgcccacgcgtccgctgaagggtcgtggatcagtgatgctgtttcctttgccgtttcaaggccagataaatcccatgcttcagcttgcaaacatcctccatgaaagaggtttttccatttccataatccacactcgcttcaattctcctaaccctttaaactaccctcttttcagattctatcccattcccgatggattatctgaaaaccatgtcatttcttcggatcctaatcgtattgtggccttcgttaagttcctcaactccaattgccaaaccccatttcgcgtttgcttggctaagttgatctccaccagtttggaagatgaagatcccactgcgtgcttggttactgatgctttgtggtactccacacaagcttgtcgctgatgaccttaagcttcctaggattgtgttaaggaccagtaatgtctcgtcttttattgttttgtcctccatgtcattgctgttcgaaaagggttacctttcgttgcaagattctgtggtagaaat

SEQ ID NO: 51438 - DNA, 306 bp, Gossypium hirsutum
  Clone ID: LIB3543-021-Q1-K1-C4
cggacgcgtgcgcggacgcgtgggttgtcttgcaacttgactctatggatatgagtatgtgctagagtgatgacttgttgttatatgcatggactttagtttaacatagtacttaaatcattgattaaagctgacagatatggatcgtagtactgataaccctgagcctacaagaacctgaacatttagccggacgggcagacttggatccttattcaggaagcgatgctttagtgtatcaagatctgtgacctatctgattgatgatgacattggaagtgaggctgccaaataggcaggtgatat

SEQ ID NO: 51439 - DNA, 527 bp, Gossypium hirsutum
  unsure (1)..(527): unsure at all n locations
  Clone ID: LIB3543-021-Q1-K1-C5
aaaggatgctagcaatgggaatacaagggttttcatcaatggccgcgaaatcacaaagactgagcttagagtgttgaagctggcaaaggtacaatgccccagggatactcatttttgggtatacgaagatggatcttatgaggaggaaggtcaaaataacatcaagggcaagatatgggaaaaggcttttactcgtttctgttgttcattgttttccctgcctgtacctgctacaaatcctcatgggccacaagaagatccaactaccttttcagggaggtcagtgcctgagtatttggggcatggaagggtacagaagttgctactatatgagttggaaggatctggaaccagtaccatcttcaagcaggcaaaggttttatatggaaatggattctctccagaagagatggggaacatcaagcatatgattcaaagtaacatgtacaagtatcttagtgtattacttgaaggacgagaaagatttgaagaagaagctntatcggagttaagaactaacaatttgg

SEQ ID NO: 51440 - DNA, 277 bp, Gossypium hirsutum
  Clone ID: LIB3543-021-Q1-K1-C8
tgttactttacttgttgacgctgggaaacctatcaacacacttttatttgtgcatgacggctcgaaaagatacttgcccgatgaaaaggttcagtctgtgcacggtataacccttactgctgatggaatggctgcagcatatgatgatgcagaagatgatgcggaaacatttcttactgttgctgaaaatgcatctaatgttaacttacaggagttgaagaatgcgtatccaccctcgcgacagacggacatgtctagatgaatatttggtggggga

SEQ ID NO: 51441 - DNA, 440 bp, Gossypium hirsutum
  Clone ID: LIB3543-021-Q1-K1-D10
cccacgcatgcgagaacacagaataacacccaaactaatgtgtaatagaacacaatcaaagaaaactaacaaaacccacagaaaggcataaaggaataattgtctactccataacataaaaatatatgttagtgtaccgcggaggtagacaaaagaggtaaatgacaagcaaagcaaaggtgggaagacaaaagatgaactcgagctttgataagctgttgatggctgctgctggaaatagcgacgtgcgagttaagatggagacagcggtgatcaccgactggaaagatattccaaaggacctgctggtgagaatcgtgtctcttgcacatgatcggactgctatcgcagctatcggtgatcgttgtaagtagcgggatgctatatgacagcgcctaacacacctgattctataatgcggcacaacgaacatgaacaac

SEQ ID NO: 51442 - DNA, 273 bp, Gossypium hirsutum
  Clone ID: LIB3543-021-Q1-K1-D4
cttccgccacacccttccgttagttctagaccgcggagcggccccctttttttttttttccttatcattttatccttggggttctttattgggggggggctttttttgccgctcctctcggtttttatttttggagtgccaaatgaatcatgcggcggctgccgtttttttttttttttttaaaaaagggggtttttccccggaggggctgaaggaaccgatgcagcctttactttccccccccccgcttgcttaggaatttccataaaaggg

SEQ ID NO: 51443 - DNA, 509 bp, Gossypium hirsutum
  Clone ID: LIB3543-021-Q1-K1-D7
attttgagtattgatagcggtggcatgaaaggaattctgtgcgggaaagcgttggcttatcttgaaaaagcctggaaatccaagtcgggtaatccaaacgctcgaatcgccgattatttcgacgtcgtcgcgggttcaagtgtcagcggtatcttcaccgccatgctttgtgccaccagagataacaaccaaccgattttcaccgccgaggagacgtggcgcgtccttgctgataatgggaagaggatctaccggtccggtgcgggtataaacggcggtattctaaagaagattttgaaaaacggatcgaccgggtcaagttcgaacggtatggagaaggtcatgaacgaggcgttcacggcgggtagaacgagtatgacgttgacagatacactaaagccgggtctgatttcgtgttatgatctttccagtacggcgccttttttgctttcgagggccgatgctacggagacggctagtatcgacttaccattatgggaggattgtcg

SEQ ID NO: 51444 - DNA, 527 bp, Gossypium hirsutum
  Clone ID: LIB3543-021-Q1-K1-E11
cccacgcgtccgcccacgcgtccgcatggcttcaaccaccatggccgctggctttggttcacttgctgttgacgagaatcggggatcatcgacacatcaatcatcaacgaagatatgcagggtgtgtggggataagatcgggcaaaaggaaaacggacaaccgttcgtggcttgtcatgtctgtgctttcccggtttgccgtccttgttatgaatatgaaaggagtgaaggaaaccagtgctgtcctcagtgcaatactcgctataagcgtcacaaaggtagtccaagaatttcaggagatgaagaagatgattcagatcaagatgattttgatgatgaatttcagattaagaaccgcaaggatgactcgcatccacaacatgaaaatgaggagtataataataataatcatcaatggcatcccaatggtcaagctttctcagttgccggaagcacggcggggaaggatttggaaggggataaagagatttacggaagcgaagaatggaaagaaagagttgagaaat

SEQ ID NO: 51445 - DNA, 284 bp, Gossypium hirsutum
  Clone ID: LIB3543-021-Q1-K1-E2
gaagccttcatgttgcaagtaaacttaggattattgtaaacaacaggcgttatatagagccaatttcttgttctcttatgaagattgtaataacgatgcatcattttcttgaacatatgttaggtgagagttcagtttagttgattcatgcagctaaactaggagctatcctagggatgtgttgtcttgggcaaggaggtttttcaaattcggaccaacttagctcgaattattgtttaataataactatttttattttaatctaaaatatgaatttcagagtt

SEQ ID NO: 51446 - DNA, 258 bp, Gossypium hirsutum
  Clone ID: LIB3543-021-Q1-K1-F10
gggagcagaaagatcgacgagacaacgatggggtatgtattgagggtgagattggcttcattcttcacgggggcagcaacagcgtcctttctgggtctctacatcttgtacaaggattacaaggtcgcccatgaatccattgcccaacgggtgaaaaggcttcatgagcccctagataggcgaatctctgctctggagagtttgaaacaaggtgaaacttcacaacatgtggaagcaacagaataggtccttcgtgac

SEQ ID NO: 51447 - DNA, 528 bp, Gossypium hirsutum
  Clone ID: LIB3543-021-Q1-K1-F3
gaaaaaagaaaaaaagttcatggtcccaaacatatcgtttatctctttacaaaaaaacttcaactccaattataacatttaatattgtaaaatcactccgtcaccaaaatctataaaataaggctttctgtatcccatcactcgctttcagaaggcaactacttaataaatgtgaactttttttttttttgccaaattaagagaaaggccaggccaccatacaattgccaccaccgggaggcctagctgacgtccggtggggaaagtgaaaaccttttgctcttttgaaagatgggtcaggggctgagttgtgtagcgagtcaagagaatgaattgtttactgcagttcaagttggagactttgaaactgtggaaactttgttagagagagaacccaatctttcgcatcacacaactgtttatgatcgccactctgctcttcatatagcagctgctaatggtcagatcgagattttggccatgtttttggagaaatccgtgaatccggatgtagtgaatcgtcacaag

SEQ ID NO: 51448 - DNA, 519 bp, Gossypium hirsutum
  unsure (1)..(519): unsure at all n locations
  Clone ID: LIB3543-021-Q1-K1-F6
atgaagtgctttcttttattttttaatattttccattattggaacaaaacaaaggtgctttctttaataatttctgtttattattattttattatgcgtcggtgatttattcagtagaacgggaaagatgaacagaaaaaagagtacttggaacgaacttcaaaacttttataactactatactattaggaatctgaaaaagtctactattagatactcagcttcaagtgaagaagaacaaaaagaagattacaaggactgcaccatagggtattaactggaaaaaaagaaccaagtaaaagtaaagaaaagatgggtgaaacagagaaccaccaccaccacccaccgncaccgtaagcggctgcaccgccggctgcaccgccggctgcaccacccagtcttgccctttcaaggggacctacttggactcctgctgagcaactccatcagcttcagtactgcatccactccaatccttcttggcctcaagctcttttactagctttccaacactacatt

SEQ ID NO: 51449 - DNA, 312 bp, Gossypium hirsutum
  Clone ID: LIB3543-021-Q1-K1-G1
cgagcgcatgtgtgaggctgatgtgcgtgcaggggttagcgatcatgagcacaatgatggttggtcgtccactcatggaagacctgaggatggatatgcacagcaggagagcttgcctcaggtggctactgttgaaatatggcctgatgggactgtaagggcacatcctgaattttgagtatgcgctgagtgcgttgactatatatattacgtgggtggctatgactgaatacaacaatgctattgatcctgctgcatcaactctaccatcgtgattaccttgatgcttaagagccgcgcactatgacacat

SEQ ID NO: 51450 - DNA, 401 bp, Gossypium hirsutum
  Clone ID: LIB3543-021-Q1-K1-G7
cccacgcgtacgggactggacaacaccaaggcggctaacgagactggccacaagttccgagagaccattcttgctcttggaggtggaaaagcaccatcggaggtctgtgctgagttccgtggacgtgaaccttcacctgaggcattgctcaagcacaatggattgataccaggtgcagcctgagcatgagctggctttttaagctgccattcaaggtcttaccaatgagacatggacatataagtccatgatataaatcaccactacttctatgtaaagcttgttaaactgtatgtagttggaggggctagatatagccctagaaagaacacagaaacaaccattcccaagctatggaaggagatacgtgttatggatgtcttctgaccttaacatgaata

SEQ ID NO: 51451 - DNA, 259 bp, Gossypium hirsutum
  Clone ID: LIB3543-021-Q1-K1-H1
cagcacggacgttcacgcgtacgaccgacttacgggcactggctgtgaaatgagactgcgcctcaatggacgatccggtacactgcctgctcggggcaatacgtcactcgaactgggcgagagacgcaatgcgctagcgtcatgaatgctgtgacaagcgtggcaccagtgtcatgcttaccgtactgattgaccctaccaagtctcaagtacgtagcgagtctataggcgctgggaggctggcccgtgctgagtgatt

SEQ ID NO: 51452 - DNA, 527 bp, Gossypium hirsutum
  Clone ID: LIB3543-021-Q1-K1-H9
gagattttcaaggaaaaaaaactatagctttcttcagttatgtaatggaattcctcgccaattctatcttaatctaagctatccaagttccaaagactaaagcttttctgaagcggtgattcctgtttgattctcccaaaatataaatgtaaagattcagaatagtagtacctgaagaagtgaaagttctttaatggcgaagaagaagagctggttcaatctagtgaagaggttctttctctttgagacacttataaatgcacaaaaggataacagaaggaaatggatgtttggaaggtttaggaccaaaaggttagcatccattaaagctccatcaccaccaagagacagcataaaatatgaaacagaggaagaccagaagaaacatgccttaacagtggcaattgccgcagtggctgctgctgaagcagctgttgcagctgctcaggttgcagccgaggttgttcgcctcacaggcgctgatgcccctaaagctaaagaagaacaaaccattgatgttaaacctg

SEQ ID NO: 51453 - DNA, 499 bp, Gossypium hirsutum
  Clone ID: LIB3543-028-Q1-K6-A1
tcactggtgatcaaccctgggttgggggggtacacatgcacgtgttacttgttcaagaagaaaccaaaatgaaacattcgaggtcttggtgaaagtgttgctgagtgtcggtccgggtgaagattaggagttgttgaggagagaatttgaggaattcatcaaagggttgatttgcttacctatcaaattgccagggactacactgtataaatctctcaaggcaaaagaaaggttactgaaagtggtgaaaaagatagtggaagacaggaaattagctatggaggaagaaacagacgaaaagggtatggccaatgatgcaggttacttgctgatacttgacagcactgaagaaccatcaaatgatcagatcaatcaatccctgccgttggatttcatcactgcgaacattatagagatgatgatccctgctgaaaagactgttccaatggctatgaccttagctgtcaaattcctcagtgcctgccctgttgctctacag

SEQ ID NO: 51454 - DNA, 561 bp, Gossypium hirsutum
  Clone ID: LIB3543-028-Q1-K6-A10
aaaaaaaaaaacccggcgggggggggggggttactattatatatgctcttcgccgaaggcctatgcctaggccttcaaccgccctaaaatcgcctgcgaccagcgaagcagggctctcagacagtgcgagcacgatgcgcggtacgtgggcgagcacccctctggagggggggcgagtattttttccttggagccccaagtggagtgggacgcggaggtcgttggtggagcggcggctcctgcaagtattgggggttaggggttttttttgttgaagggtttaggtttaagttttattttgggctttagatttggattaaaataactgggcctgtaatttggactgtaaaaaaaacctttatttatgttttttgtttgtgggtcttgggcccaggctaaaattgggccctacacaaagaaattaaaccatgctcaatccattactttcttgcagggaaaactagtcttgtttgttcacaaatttgtgaaactgcacaggatatacatgaaaaagttatgttaaatgttgaggacttttttacaaacacatgggagcaattt

SEQ ID NO: 51455 - DNA, 616 bp, Gossypium hirsutum
  Clone ID: LIB3543-028-Q1-K6-A2
tcccagcgtccggtcggtggccgttaaaatcatttctaaagctaagatgacctcagcaatatcagtagaagatgttcggcgggaggtcaaaatactgaaagccttatccggtcataaaaacatgatcaagtttcatgatgcttttgaggatgccaataacgtttatattgtcatggaattatgtgaaggtggagaactacttgacagaattttgtctagaggtggtagatacaccgaaggggatgctaaaaatataattgtgcaaattttaagtgtagtagctttttgtcaccttcaaggggttgtgcaccgtgatctaaagcccgagaattttctttttaccacaagagatgaggatgctccaatgaaaattatcgattttggtttatctgattttattaggccagatcaacgtatgaatgatattgttggcagtgcatactatgttgcaccggaagtactgcatagatcatacagtgttgaagctgatatgtggagtattggtgtcataacatatatattgttgtgtggaagcagacctttctgggctagaactgaatcaggaatttttcgttctgtgcttagagctgatcctaacttcgatgattcaccttgg

SEQ ID NO: 51456 - DNA, 623 bp, Gossypium hirsutum
  Clone ID: LIB3543-028-Q1-K6-A7
gtcgacccagcttttttttcgaagccttaaactttccgcgggggagcgaaggccggaacagatcaggcaacggcggcggcggaccggctagcggcgatgaatttgaccggatccgttgagaaccatgcattctctgaccgtgtcttgatccggtccatcgctggccggccggacggtgggctggcctctcggggcaacgtgtccgcgccggtggttggctgaagactgggagagagcaagggaaaggttcttggaactgaacgacggtgcgtgtctggggaacttgcaggtgattatggatgccggagtggctgttctcagtaagctggtggcgaccggcacttgcgtagtggttgatggaatattgaaggttccgcctgaagggacgaagcagaggattgagcttcgggtcgaaaaggtggtccatattggttaggtggatccggctaagtatccgataccgaaaacgaagctcacacttgaattcttgagggatcatcttcatcttcgatctcgaaccaactcgattgccgccattgctcaaatacggaatgcgcttgctttcgctacccattctttcttccaagaacgtaccatttcctttatgtgcacactccaattat

SEQ ID NO: 51457 - DNA, 359 bp, Gossypium hirsutum
  Clone ID: LIB3543-028-Q1-K6-B10
gggggatcaaaaaaaaaaatgtagcgtcgcttatacgtctggttgtaggtgaggaaggctgctaccatggctgcaaagaacagcgtgggggacttgcaggaagctgatttgtaaggtagtgaatgtgtctgatagagtcggggggggggggggattgtttttttattaaaacataactgatgacccatggatccgtgcagttgttcccaccatcaactatttgatgggtaatggctctaaactgatactctctagtcatttggagacgcccaaagggtgtcactaccaagtacagtttgaagccgcttgggccacggttatcagaactccttggagtcgcgggtcaaatggcaaatgac

SEQ ID NO: 51458 - DNA, 491 bp, Gossypium hirsutum
  Clone ID: LIB3543-028-Q1-K6-B4
cccaaatttggccaattctcggggctgccgacgaggacctgattagcagtttaccagattccctgttgcaggaaatcctttgttttttacccattgaagacgctatcaaaaccagctttttgtctcgacgatggaggtctctgtggacccaaatgcccaccctttcatttactcgtgaatgctatgttttcaagcacgctaaacgtgctgccttcgttaacgaaacgctggcgcgcttcattggtcccaagattaagaatttcctcatcaacttcaaattcgatgaattcatggatgctttcttcgatgaatgggtcctttttgctacatcccaccatgtcgaaaagctctctctgcttctcgatggtgggttcctttatgccccgtttgctgagtgtaaaccttacagtttgcctcagtttctgtacgtgaatttttctctgaatgagttaattttaagacaatgtgttgtcttacccaccagccaagtt

SEQ ID NO: 51459 - DNA, 615 bp, Gossypium hirsutum
  Clone ID: LIB3543-028-Q1-K6-C2
ccgggtcgaccccgcgtttttcccgcgtccgcccaatttcccttccagagtaatttcttttcccttccatcgattctgccatctattcttctcgttcgtttcttttattttcttcatggattatctctgttgttgttgttattttctttatggattatctcattcggttctgccatcggttcttctcgttttattttcttttattttcttcatagattatctctgtaatttcttttcccttccatcggttctgccatcggttctgccgtcgcttaatcaaccgacttcagtaattctcaagaaaggcttttatgagggggtgtttgaagcaacatttttggaggcattaataatacgttcaatcttgggaaccaacgcagtttttaatctgatatttccagttttctttataaacaattttcgccatttttttctcaactaacccgtggaaaatctctcccaaattcacctaatacccagattccaactcttatttttgataaaaatcatggaggcagcatctttatctggagttctttcatatatcaaactctgtggttccagtctctgctattctgatgatagaatttcaagggcagacgcattgcgtctttc

SEQ ID NO: 51460 - DNA, 424 bp, Gossypium hirsutum
  Clone ID: LIB3543-028-Q1-K6-D4
tgacttagatcattatacccagccacaacagcagcaatggctgtttcagctgccaccttctccctttcagccactgctttcagccgctgcctttcagctcttgaaccaataacctgccccaggatagaagctccaattgtcaaggccatagctgttttaggcattatgacggacttccgaatcatgggtatcaatggcgccacatcttgcacctcttctaacgatgacagacaaacataaatgagcgtgcttcatgaacactcccaaacgccaccttatctgccttgcctaaaatagcaattaccatcgtctggagctgcaggggcttgaggcgaagatgttcaaactggcattgcgtgcttaggctgtccttgggaaggtacggcttggggccctctcaactaggtctgatgtgccctgtgac

SEQ ID NO: 51461 - DNA, 584 bp, Gossypium hirsutum
  Clone ID: LIB3543-028-Q1-K6-E12
tgagatcccctaactgtgggggggggggtgcttgtaaccgaccaaagggacacccaaatctccatctatcgtgccaccactgtacccggcggccgacagtgcacaagggtgggcattaagccccgtttcaaggcgcgtttgaaggttataacaccatcaatcctcgggggtcgagggggaatggttcgcacccccttttgggttcgaacgcgacaacgacgaaaagccctccgacgaagcggtcacggggcggtttcggtgagtttttactccctttttattttgtttaaaatagatttatgattaaaaaaataaaaatgaaaaataaaaaaatgaaagcataaataaaatatgaagaacgagtcgaaaacgagattggaatcaacctttgcttgtattttgctctttttccttaatagtctgtgtaaaaaaattgtttgttccaggcttttcttatagccgaatacaaagatttttctactgtttgttactatttccttttgcttctgctgctttgctctcttttgcttctgttttgcaggcctaggggggtcaacggcagtgaaagcatgccattttggtgt

SEQ ID NO: 51462 - DNA, 608 bp, Gossypium hirsutum
  unsure (1)..(608): unsure at all n locations
  Clone ID: LIB3543-028-Q1-K6-F9
gctttttaaagnaactgcgtgttcgagggaacggaggggggctgttaaaccctgctctgtcggaacggcacctggaaaaacccttctctatttcgatcgccggagattgaaacgaggaatttttattcttcgtatcaatggcgtttagccgtagcctttccagtagagcaaccctaatagctagacggtatcaaccatcgtttgcctacattttccatgatgatgaccgtaagactcatccttctaccgagcctcaatctacacaaaagcctggtaattttggtcaacaaagatcttttggaactgggtttagtaattcatcctcggggctttgtggtgtattgttccatgatagaagatgttcccaactagcctttctccctggcactggtgtctcttttggtcggtttatgtcgactaaggttaatgatggggcgaaagaggtcgagcttatgactgatgttgcggaagcttttaaggatactgccattgaagctgtgacttcgcaggttcctgctgtgaatgaggttgccgttgctgctgctgattgttggttaccagttgctacattgcagtatgttattgatgcggttcattcttttacaggc

SEQ ID NO: 51463 - DNA, 603 bp, Gossypium hirsutum
  Clone ID: LIB3543-028-Q1-K6-G12
tcgggttcaccttcagctgttgtcgggggggggtgggcgggtgcctcgactttgtctaactattctaatttgtctctcatttcatcccgaagttctccgcaccccaaaactaatagctcagaaattgccagtgtcaatctcacttctcaaccttgttcaaaatccgcattttcacctctggggggaggggcaccttcccttgctgaacgccgaggtagtttgtcaaagtctctcaagctgccagtgatgagcgatagtataagagaaacaaatgatcggtcttgttttcttgttaagcaagatggggttcggatagatactagctcatcatgtgaatcagatattgaaattgtctttgactccaagcgtggtgttagaaatggtggggatattttggttcaaggttctggtttgaagatatccccaggtagactagctaatgttggccaacgtgattctgaatctacttttgttaatagttgttgtgaaagtccaagaaaccattctcctcaggatggtctcctgtctgctgttccaaacaggatggaggaaattattccagcttgcacgggtgtagttcagcctttagtatgccgctggccc

SEQ ID NO: 51464 - DNA, 396 bp, Gossypium hirsutum
  unsure (1)..(396): unsure at all n locations
  Clone ID: LIB3543-028-Q1-K6-H1
gggcggnacgcgtggcggtggggggggggggggggaaaaaaaaaaaaaaaaaaaaaaaaaaaaaaaaaaaaaaaaaggggggacagatataaaggatacgggcgttacgtttctgcgaggcatgcaaacttactaactcttgtatggggacacttaaatttattaagtggcccctattttaaaggggggggacttttttttccatggcgttacctgggtaaaccgtgtggtagcacatcttattttcgtcagctggcgtactagttaagagggctggactgatcgcccttaggaccagttgcacagcctttatgaaaaatgggacaccccctgtggcgacggattcaccccctggggtgtggcgtttacccccagggtgaccgttgtcttgccagg

SEQ ID NO: 51465 - DNA, 291 bp, Gossypium hirsutum
  unsure (1)..(291): unsure at all n locations
  Clone ID: LIB3543-028-Q1-K6-H10
gggggaaaaaaaaaaaacaatcattccacccacnnnacctccnttcaaaaccagcatcntcttctcacaccaannaagaaccancgtgcttttcaaagtgttgtcggcgttcttttttangaacatcacttnnaccatggggggaggagggggtttccttcnttttccnanccnnctagncnacgacgcggaaggaggagccgcgaagcatcccccacacatgccccacgnggannncgaagcgncaagggcggaggccagagcncaaaacgcgagggcggagggccaaga

SEQ ID NO: 51466 - DNA, 611 bp, Gossypium hirsutum
  unsure (1)..(611): unsure at all n locations
  Clone ID: LIB3543-029-Q1-K6-A2
ttcttcaaaaatagggnaaaatcatctacagggagaccacggccgtgattcctttacggacgaactccgggctctcccatctcatttctcccatcatcttttctttttcaggccagccattcccttgttttcagattttgtttaaccaataaatttgagcataatttttgtggagttaagtttggtttgttgttatgggtgctgcaactaatgtcgtagacaataaagaggcaaggttgccacgagaagtaaaggacgctctgcagtcgatggcgtctgagtgggatgatgtagtggattcaaaagctttgcaggtgatccctcttaaaggtgctatgaccaatgaggtgttccagataaaatggccaaccaggggagataatgtgtcacaaaaggttttagttaggatttacggtgagggtgtggatgtgttttttgatcgggaggatgaaatccggacgtttgagtttatgtcgaagcatggacaaggacctcgtttgctacgacggttccgcaatgggcgaattgaagagttcatccgtgcgcggacactatcagcatctgatttgcgtgatccagccatatcagctctaatagcaaccagattaagg

SEQ ID NO: 51467 - DNA, 373 bp, Gossypium hirsutum
  Clone ID: LIB3543-029-Q1-K6-A8
gatactctctgctggggttttggccctagcttttacgccgctcggaaactctgccgatctttagccttacagtcctcgctcgtgctccgattacgacgaagcgaacggggatccgatcggcaccgtcatgaaggggcacgcctggatgctcacgcgtgcggaggcgcaacatgcgcggggaagtctggttggcatgcggcgcacgtggagggtggacggaggagtggtgctggaagctgttagattttagggtttcgattaattggggaatattttgggctgattcaagggttgggttcagtattttggattgggcctttagattttattttttggttttgtaatctggacggtttaattggacgtttttatt

SEQ ID NO: 51468 - DNA, 564 bp, Gossypium hirsutum
  Clone ID: LIB3543-029-Q1-K6-B1
gcgttcttcctcatctgagccaccaattgacctaacccagaaccatccgatccccaagttggactcacccacagcagtaagaatcaaaattaaagccaccagcttgaccttcgctacttaccttaagatactaggcaaataccaggagaagcatcccttgcctttcatcccaggctccgattatgccggcactgtcgatgccgttggcccttccgttactaaatttaaggttggtgattatgtttgcgccgtttcccccataggctccttcgcttccttcatcgtccaagaccagtcccgattgtttgaagtgcccaaaggatgtgatctggtggcagctgctggtcttcctgttgcctttgggacctcgcatttagcccttgttcatagggctaacttgacttcttctcaggttcatagagcaagagcagcctcattagcctctcaagacactggagatcttcgtggatttgagagacaaaacctcaattgacaacaatactagtaattgaggaggttcatcaacgcccaacaaatgacaacaaatgacattttgaagacttt

SEQ ID NO: 51469 - DNA, 531 bp, Gossypium hirsutum
  Clone ID: LIB3543-029-Q1-K6-C6
ggcacctacaaaaacaacggcggggggggggggaacacctttgctatggccttatatatacgagagaccaccttctttcccattaaggttgaacaaaacatctatccggtctcgttcgatcatcttccatattgatcggggggggggaattttctttattgcaaaccttccaacctccgagcagaacgatgagataccccaccttacccaaagtatttctagctacgattcctgatcccgatctgaagcgcactttatcaaacgtcgtttcaaagtttattttgattctcgcccttgtaggaggttcctattgcttgccctcacatcgtctgcttcttgtttctttctgtccacaggctccataatgcaacacacaataaataaccaagacccagatcaagaacgagttggcaatcgtggaaaagaaaaggttgttgagtagtccctgtactttggcatttctacaaaccagtccttatgaccttgaaaacaagtaaagtggaatacggattttctatcaagccttgggtc

SEQ ID NO: 51470 - DNA, 531 bp, Gossypium hirsutum
  unsure (1)..(531): unsure at all n locations
  Clone ID: LIB3543-029-Q1-K6-D11
gcgttttcanaanaggagatgcttaatgggggggggggtacgtatttagtgtacgtggcattatgatggaacttatcaagcaaatgggggaaattggaacagcaacaccgtcggatgagataaactgtttatctggggccttgccttttcctctccctgggtctcgttattagcggacttggggtgggggcatggaatatagttggagagtttatattttcagtaaggtaattgcaattaactggtttcagctttcaagttgacatggttttggagcccggcttctgcatgtatgctgtctcctatatatatacacacattttattcgaacatgaaatttcgtttatatataaatcattacaatcgaagaaaagtagtnnaaaaaaaaaaaaaaaaaaaaaaaaaaaaaaaaaaaaaaaaaaaaaaaaaaaaaaaaaaaaaaaaaaaaaaaaagggaaaaaagaggaagaaagaagagaggggaaaggagaganaagaagaaaaaaaaaaaaaaaaaagggggggggcccc

SEQ ID NO: 51471 - DNA, 598 bp, Gossypium hirsutum
  Clone ID: LIB3543-029-Q1-K6-D9
gcttttgccccgcgtccgcccagcgtgcggggggggggcgactaatacaaattggagagtacataacatggctgaaaatagacttgggggttcttttttatggttaagctcttgagtttatgtttgatctttaggctcacaggttcccaatctccacctgcatattggaatgcagggcgggcgggtttttatggtgacatgaatgggactgaaacaatgatgggagcttgcggttatggtgatcttataaaacaaggttatggccttgaaacgactgccttaagtacagctctcttcaataacggtctgacctgtggagcctgtttcgaaatccggtgctatgactcggtacaatggtgtctaaacgacaccatcattgtaactgctacgaacttttgccctccgaactacagtaaacctgaaggaaactggtgcaatccaccattgcaacactttgatctatcccaaccgatgtttcgcaagattgctgtttatagagctggcattgttcctgtcctgtatagacgtgttccttgtgtaaaatccggtggtgttaagttcaaaatcaacggaaaccagtactggatactgatattag

SEQ ID NO: 51472 - DNA, 612 bp, Gossypium hirsutum
  unsure (1)..(612): unsure at all n locations
  Clone ID: LIB3543-029-Q1-K6-E12
tttcgtccagcgtccgntagcatttgggggggggaggggaggtgaaaaaaactcaagacactgggataaagtgagaaaattgtcatgtacacgtggaattgcagtgcattggatgttgacaaccactctaaaacagaacctggttgtggttgtttccaacttccatcgggccctgggggggggggggttctttgtggtgggtcatcgaggaagcgaaagcagctacgtgagacagaattaagttttcacaagcaagtctccagtgaaaaggccctcaaacacaatacacgtggatcagctaaggctgagacgaaacatcaagcatttgctctccagcatcaagcatttgctctcgatgatgatataattccaccgcctccgacactagaattgaagtccggttcggagattgagttgtctgatatacagaagaatttccagcgtttatatgactataatgtcatgctgagagagaagttcgtagccacccagtctttgcttcacgatttagccgctaagtccccatctccaacaacagaaaggcaaacataacattgctgaatttattcaatcaaatgttctctccttgtatccctagattttcctggggta

SEQ ID NO: 51473 - DNA, 569 bp, Gossypium hirsutum
  Clone ID: LIB3543-029-Q1-K6-E4
gagattcagcaaattggacctctataggaaattctcaaatgcactagctgtggcagtgattgcttcagtcgcatggataacttttgaggtatattttgtttagattttggtttctttcttagtgtctcttgctattttattgcagataaatgacaaatatttgtgtttcaagtgaagtattacgagttgtacttaaagctggtatctagccgtcagtaagatacaatgggttcaatttatcacagatctgatttatttggtacgacaggtatacttcaaagcaacagatccattcaatgagaggtggcaaagtgcttggatcatcacagctttctgggacattctttcatttgcactgctctgtgttatttgctacctctgggctccatctcagagctcccaaaggtgcgttttactcttttgaagtattactgagtcaattggatgaccttagccttttttccccctcaaatttaaaaggatggcaaattttgctgctgaatagagctcaatttgaccaaaaggatggcaaattgtggccctattctacttcgagtacttaccttttt

SEQ ID NO: 51474 - DNA, 608 bp, Gossypium hirsutum
  unsure (1)..(608): unsure at all n locations
  Clone ID: LIB3543-029-Q1-K6-E9
gcgttcgcccatttccaatctcctcactcactgagtgtagttctctgaaatttccctttgccaaacatccatgtctttcttgttgtctggttggtctatatagatactgtgtgtcagaatttgtcaaaaaaaactaaaaagttgagatttttgtccttgagatcatttctgggcaactggcccccctctgtgtcangaaaatcacatctctcttcaattccttctcccccctgctcaactaatttttcatttgaccctctgatccatccaaaaaaggaaaaccctgtacgacagttggttattatatatatcttcttatccaccttcatataaaagaaaaccctagatagttaatactctagaaaaacccatcatggattctcagcacttgaaccctagttctcttaaatccaggttcaccgcaaggttccttagggctctgattaaaataaatgctcaaaaacctatatcatcatcttctcccagagagattttccaacgttatcgaagaattaaggttgcagctgacaagtccatggcttactcggttaggtcgaggagaacttggagtagggcaacgctttggaagctccgaagccggtcccgta

SEQ ID NO: 51475 - DNA, 166 bp, Gossypium hirsutum
  Clone ID: LIB3543-029-Q1-K6-F4
acacaatcacacgagtcgcggaatcattataagttccgaatgataaacttgcagtttgacattcatattgtacattgttattgtcctcatgataatatatcaaccttgtggcttaacaactaatatactatggcaaaaagcttgacctacttcattgcctacaagt

SEQ ID NO: 51476 - DNA, 479 bp, Gossypium hirsutum
  unsure (1)..(479): unsure at all n locations
  Clone ID: LIB3543-029-Q1-K6-H3
aaacaaatttactgtctccccaaagnnaaatttttttgcttcctnnctccgcttcagnnaaaaatggctcaagntgtagcatcactgaagggctctnntttggtcgctttttattcactgggcatttcttaacccgcnncgccacggcacccaagttaggtgagggcgcgcgtgtctccgttctttctttacgcnnncggtgcccgnngtttctccccgtgggcccgtgttccaccccgctgnnctgttgnnggttttctttttggttnngtgtctctttctnntgctttnngttgaaagcctnntaaatttnnatgggacttttnntttttnntgggtggtgcnntttttgtacccacttnngagtttatttttnnngggttttgttnntttaatttnncattctttgttaccttcatgnnggattgattgtaatnngaagttgattnncattgagtattattattatattntgagcc

SEQ ID NO: 51477 - DNA, 606 bp, Gossypium hirsutum
  Clone ID: LIB3543-029-Q1-K6-H5
ggacttatctcaaatcacgggggggtgaggggggtccaaacaatgttttagatatgcattcggtgggaaacctcttctggctacagcagaggtggataatgctgggaaatgcgggctttgtggtgcatcaaggcactttgaactgcagcttatgcccccattaatatatggggggggagaagaattctatggttgtcataaaggttctctggagaactggaactggctgactcttgttgtctatacctgttccaagagctgttctaattcatttgatgaagagaagtccatccatggccatggtcaatggtttgtcgtagaggagactgttctcatgcaattcgataagcccttaaatgagtgtcttcaatgctatttctcatgatttacaatttttgtcaaacatttgtgtgaataggaactctttcagtctttaatctatgttgagcagcttccatgcatacagagatgaacctacaaggatcctgaaagtttactgatttattttatgccctcgacaaagctagagcgtgtcattattatctctgacaaagtgttatgcattggttgaagatcgatgagaggtatcaaattttgtatcatgaa

SEQ ID NO: 51478 - DNA, 548 bp, Gossypium hirsutum
  Clone ID: LIB3543-030-Q1-K6-A1
acgcgtccgcccacaaaaccgggggggcggggagggttttgcgccgttcggccatcatttcatcactgcgacgatggatgatggccttcggtgacccctttttacttgtctgtttaatctagcgtggcatttttcgatttaaaccccgaaatcccatcctcgatttcgatttcagtgaaagggacgaggtctcctgtggctcatatgcgaaggtacagagtatggggcacgggcgtggcaccaggaggctggggcgtacggaggcatggagctgctgtccggttgctgttgcggcacgagccaaggctgctagggtttctgccttggcccttgttttagacattgggcctattgggcctgtatttgggtcctaggttttaaaaataggtctaggtttaattattgggtctgggtttagctattgggctgtgaggtattgatttgggtttgtattggtatttggggcattgggcctattgtatttagttttaggtttcggactgtaaaaatgactttttataaatgggctgatgaactggtaattaacc

SEQ ID NO: 51479 - DNA, 532 bp, Gossypium hirsutum
  unsure (1)..(532): unsure at all n locations
  Clone ID: LIB3543-030-Q1-K6-A4
ccccggtcgacccagcgtttttcccgcgnccgctttcataaaccccggcgggggtgggtggcctatttctccttttgcttccaaccaaaatgaaacttagtgacagcatttctaacttcttcttcttctagtttttcttttgaagtcataagaaaacctagcaatatctttctgtacatatagaattatatggttcattccatagtttagctcctgtctttagaacttagttctaatatatccttcacaccattttctgtgaattttgattgtctcaggttattttttcttattcatgctgagaagctggtctccgtttattgcggtgttggtttgataggaaaaagctcctgagcagtttaagattgttataccaagaattcctgtatattttacggccaagaagaaacaagtaatgtagttgattacagttatctcactatctgttcttttcaattttggaaattaggagaaggttgtgaatccattgtttgagaagcgtccaaagcaattaggtattggaggagcttta

SEQ ID NO: 51480 - DNA, 592 bp, Gossypium hirsutum
  Clone ID: LIB3543-030-Q1-K6-A5
tgtccagcgttcgcttgggatcaccgggtggggggggaggttctacataaacgtgtcgaagtccgaaaccgtcaacatcttacttgcaaagattgaattgcgaagtcttggtcatcaatgagcctgtggttaatgctatgttttttacccagatgggaagattgtgcgtctttacacctttgctgaagcgttttccttctgattcacatatagccaccatacttcaacatgaagtttcacatgcattggctcgccttatagccgatatcaataaccaaaaatttgtggtttggcattctacaattgatactttatcagtttattatgcctgatctggtcaacacaatgtcaacacttttctttaggctccccttctctcgcagatggaacttgaatcagattacatcggactgttgttgctttcatctgctggctatgatcctcgaactgctcccaaactgtatgagtaaactatgaatggttgcaaaggattcaacactgcaagattatctctctacgcttccatctgggaagaaaagagctcagttgctggctcaagcccaagtaatgggaagaagcactcatgatttac

SEQ ID NO: 51481 - DNA, 478 bp, Gossypium hirsutum
  Clone ID: LIB3543-030-Q1-K6-A7
gaacactccaaaataatcctcggcggggggggcggggcgcttaaggtatgaccagaaaggggtcacgaggcccactgagaggccttttcaagagacaaaaaatagctctactcacatgataaataatgaatgttaaagaacctttatgctcagacaggctgcaacgaattgttgcgagagtgactcaactcatggagcaagcggttcataatggaccagcgcgagacatagaaacactcatggaataaaaactcatatatttaatattggctcaaagacgctgggctcacacagcgtgcataacattaatattctatatacgaactgataacacagactgctacaaatacaccgtcactacgactatcgaaacatgatggtgatatagattgcatctattaatgatggacttacacaaaatgaaaaaaagagccgcacactgtcaagggaccaatctgacacacacatgaatacgaaa

SEQ ID NO: 51482 - DNA, 561 bp, Gossypium hirsutum
  unsure (1)..(561): unsure at all n locations
  Clone ID: LIB3543-030-Q1-K6-B1
ttttgtcacccttttaggcttttccttacgggcggaaaaagaccttgatttatgagttcatcgcccaacggnatcgttcagaaaaattcatctatggacaaaatatttctgaggataatcgtcagcacttgacagtacaagtcttgtatcaaattgcaatcggaatatctcgtgggctcgagtacttacaccttggctgcaacattcggattctgcatttcgacataaagcctcataatattcttctagatgatcaattttgcccgaaaatctctgattttgggcttgcgaaactgtgtgggaggacggatggtatggtatctatgttggaagctagaggaacaattggttacatagctccagaagtattttgcaggaacattggatttgtttcgcataaatcagatgtgtatagctatggcatgatgattctagagatgggtggaggcagaaagaacctagatgttggggtacatcacaccagcgagatatattttccgcaatggatttatgagcatattgaacaagcaatattgagccggaattgcttggtcttgtgag

SEQ ID NO: 51483 - DNA, 569 bp, Gossypium hirsutum
  unsure (1)..(569): unsure at all n locations
  Clone ID: LIB3543-030-Q1-K6-B12
gtaaactatggtctatcatgcgggggggagggggaggacgtgtctatataaaatgattattatgtcctgtcttgccatcccctaatgctgccagttacagtactcagacattaccccaggatctctactttcaatgttgcaatgggtctgtatacatgttgacttagtactgtgaaaatcnaanttaatgtgggggggggggaggaggcgttacactttttccaagcttgcatgtgctccattttggaccgtacatgttctcaaattttcaccttgtcattggaaaacttcctagtactggaaaatattctaatattgataattagttaaaataatgtccatataacacagacattattcaggtgtccacttcaatgctcaataggtgatacagttacagagtctggaaaaccaagtaagtccatccttgcaaatgcaataagatttactatgcttgcatgtgctccatttgagccctacatgtaatcaaatgttctacttcgacttcgattgaatgtatttgctccacacacttgtaaatatatgctccaaaaatgataatttctgat

SEQ ID NO: 51484 - DNA, 581 bp, Gossypium hirsutum
  Clone ID: LIB3543-030-Q1-K6-B4
tttttgacgcgtgggttcaattcaccctccggaaacagaaactgaaggaacagattcttcgcttgaaacgtggaaaggaacttccagagaaacagcgagaaacggcgtaggtttaaaaagggaagggaaaaggagatgacggtgatagacttgatcactagagttgacgcgatttgcaagaagtacgacaagtacgacatcgataagcaaaaggcggttaacgtcgccggcgatgacgctttcgctcgcctttacggcgtcgttgactccgaaatcgatgccgctctccagaaatctgaagctgctgcaacggaaaagaatagggctacagcggttgctatgaatgcggaaattcgaagaaccaaagctcgattgcttgaagaactccccaaattacaacgactcgctctcaaaaaggtgaaggggatttcgaaagaagagcttgaagctcgaaacgatttggtttattcactgaaagataggattgattcaataccagatggatcatcaactgcaactaagcaaagtactggtggttgggcaacttcaacttccttcactggcattaaatttgattcatc

SEQ ID NO: 51485 - DNA, 594 bp, Gossypium hirsutum
  unsure (1)..(594): unsure at all n locations
  Clone ID: LIB3543-030-Q1-K6-C1
ttccagcgtccggnaaatgcttgtcgcatctgaccagattggttgtgttattgggaaaggtggacaagtgattcaaagtataaggagcgaaacacaagctcagattcgggttttaagcaatgagcatttacccccgtgtgcattgacttcagatgagcttcttcagataattggagagccctcagttgtgaggaaggctctttatcaggtggcatctcgccttcatgataacccttcaagatcccagcacttgcttctctcctctctatctaatatgaatccatcaggtgggatgtacatgaatgcctcccttattggttcttatggaaattattcttctagaagagatgatggttctgcaagggagttttctcttcgtttggtatgcccggttggaaatattgggggtgtgattggaaaaggtggtggtattatcaaacagattagacaggagtctggggcatcgattaaagttgatagctctgcagctgaaggagatgattgcattatattcatatcaacaaaagagttcattgaagacccatcccctaccatcaatgctgctttgcgcttgcaatcacgatgcagtgaaaa

SEQ ID NO: 51486 - DNA, 237 bp, Gossypium hirsutum
  unsure (1)..(237): unsure at all n locations
  Clone ID: LIB3543-030-Q1-K6-C4
ttagnatttagtgaatggatttctggcgtgggagcaggaaataatggggtttttctctgatctaacacttccaattcgaacttagttgtttttttttcttctgatagcactagcagttgaaacttgaaactcaaccttaaaaaactgtcttgttcccttggtttcttgttttctctctgttgaagttcaaaataataatggngaatgaggagaagagaaatgggtttttatttcctg

SEQ ID NO: 51487 - DNA, 599 bp, Gossypium hirsutum
  unsure (1)..(599): unsure at all n locations
  Clone ID: LIB3543-030-Q1-K6-C8
tcgcggncgcgtgggcttggagttgagaaacaggaggacagattgatgctgacactgccgaagtaggtgaacatgngtgaaattgatttcaaagaagatgctaaatttgcacaacatttgaagaagggggaggctgtaagtgaatttgcaatgtccaaaagcatggctgagcagcgtcaatacttgccgatatattctgtgcgggatgagttgctgcaggtgattagagaaaatcaggtagtagttgttgtgggtgaaactgggtctggtaaaacaactcaacttacacagtatcttcatgaagatgggtacactataaatggtgtagttggttgtacccagcctaggcgtgtggctgccatgagtgtagcaaaaagagttagtgaagagatggagacagaactcggtgataaagttggctatgccatacgtttcgaagatgtgactgggccaaacaccataattaagtatatgactgatggtgtcctccttcgtgaaacattaaaagatgctgatcttgacaagtatcgtgtcatcgtaatggatgaggcacatgagagatcactaaacactgatgtgctatttggaatattgaaaaa

SEQ ID NO: 51488 - DNA, 589 bp, Gossypium hirsutum
  unsure (1)..(589): unsure at all n locations
  Clone ID: LIB3543-030-Q1-K6-D11
ccccgcgtccgcccagcgtccgcccagcgtccgtgaagtagtcctagaatnatggggtccttggaagaacgatggaactggcatcagctgctctctagaggtgattttttatctttaagacatgttagagatcagttgccacaagatcttgttgatgcttatgacaaattccaggaacaagtggacaagcatttggcacctaccaaagctagaatggcattggaggaagaagaaaagagggtaagagaagaagaggaacagaaatattctgagcgcacagtagatgatctgaccaagttgtgtatgaaggtttctgcacccatagaacttgttcggaaggctgtcagaatggttggttttacgaataatatgggtcgtcccaggccaatcagcgtactatttgcattagaagatgctgatattgttaagtggtatgctggtgttggcagaagatggctggatttcttctgctgctgtcacaacttcagaatggtgaaaacaattgtttcttatcaccttangttctcttgtattttaacactggcacacaagcatgaatccaccaaacttgaagcaattaaacattaca

SEQ ID NO: 51489 - DNA, 253 bp, Gossypium hirsutum
  Clone ID: LIB3543-030-Q1-K6-D3
ccccgcgtccgattctcgatccctagcgagaaccaaaccctagaaaagtctcccttgccttgccttgccttaactctttcacagaaaaagaagtgttggaggttaaatattgattcccctttcactttgcaagagaaaggagaagacaacacccaaaaaaaaaaaaaaaaaaaaaaaaaaaaaaaaaaaaaaaaaaaaaaaaaaaaaaaaaaaaaaaaaaaaaaaaaaaaaaaaaggggcgggccgttttaaa

SEQ ID NO: 51490 - DNA, 605 bp, Gossypium hirsutum
  Clone ID: LIB3543-030-Q1-K6-D8
ccccgcgtccgcccagcgtgcgggggggcgtgggcggacgcgtgggccgattctgaccgccgccaacttagctcggatggatctctggcgctggggtggcacaaagatgaagatgcatctgctaatcgttcttcggtttctgaattcggggatgataattttgctgttgggactggggggcaaaaagaagtggtaagccgtgatggacacatgaagcttcgagcgcaagtcttctttgcttctattgatcaacgaaacgagcgagctgccggtgaaagtgcatgtacggcccttgttgctgttattgccgattggtttcagaagaatcgtgatctgatgccaattaagtctcaacttgatagtttgatcagagacggctcgctggaatggaggaatctctgtgaaaatgagacttatagggagcggttccccgacaagcactttgatctcgagactgttctccaagcaaaaatacgtccccttactgtagttccaagaaagtcctttatcgggtttttccatccggagggaatggatgaggaaaagtttgattttttgcatggtgcaatgtcttttgatagcatttgggatgagatcaatcgtgc

SEQ ID NO: 51491 - DNA, 594 bp, Gossypium hirsutum
  Clone ID: LIB3543-030-Q1-K6-E9
cggccgcgtgggttccttagttcctgtctctttcaaccctccttttctccactctcattctcattccttttcttccaaaccctcctccctctctccttccccttccaatctcttcgtctgcttcttctcctcttctcctcctcctcctcctcctccttcttcttcttcttcttcacataattcctcaaatttcgaccgcgaagaaaccaggtggcttcgtgaggaacagcgatggctccgtgaagagcaacgctggctaagagaagagcagcgctggcttaaagggaaagaatcgctactttgggaaatctcccaactcaagcttcaaatccaagccttagaaaaccggaattcctttcatggagcttcggttacggagacaatatcccgtatcggagctttactgcaggtgttgaaagacaagaatcggattgcggaaagcggagaaagcgcgagagatatggttttcgaagaagtaaaagagaaagaggtggttgtagaggaaggagttagggttctggaaaagaagcaaaagagttgaaaagaagaagagagaaaaacgttgagagtaggcagcgaaggagagcaagttcg

SEQ ID NO: 51492 - DNA, 604 bp, Gossypium hirsutum
  unsure (1)..(604): unsure at all n locations
  Clone ID: LIB3543-030-Q1-K6-F2
gcgttcttcccgcgtccggnattttanaaaaaaaggaaaaggaaaaggaaaaaaaaaaatcccttctcaatttcctctcgtattattttctatctcatgatttgcttcaaaagggaaattgaatgaaagccatattacttcttatgttttcctctctaactgatccttttcttttctgggggattttttttttgtgttttattttttttgtgttttgacagtgccttgtgacttttgagcactcttctgctgatcccaaatttgcttttccatctaaactggagctagtaagatctggaaaggagggaaatcagaaatggatgcttttatcctgtgcatgtaaggaaaacctaagggtgtttctaggttagttataaatgcgttgattatattctttttaggggtgagatttgatctgggttttccgaaaactattcatctttgttctttttgggatttgtggattgggttgtttgggggtggtttaggatatgaaaatagaattgggtatgggaggtggggcttggaacgatgaagataaggctatggtagccactgtattaggaacaagggcatttgactacttgatatcaagctcagtgtc

SEQ ID NO: 51493 - DNA, 607 bp, Gossypium hirsutum
  Clone ID: LIB3543-030-Q1-K6-F4
gtatgcatgcttactttttgcgggtaatcatatcatacataaagctaatggagacaattttttatttaatgatgccattactgcaaattatgcaaattttggcttaaatttcagttgctgatgtccaggttactcgtaatccagtgtgactatgtgtctcccactggtatatttaaatgttttttagtttgtggagggtcattcggatacactcttgtgcggatatgttttggaaacaactatcagacatgaatactccaagaaaaacgaagagtaagagcaacgtaaactgatatgttgctcatatgtttatttcttcatatctttaagcaattgtaccaattgaatgaacatagaacgcttacccaatactggaaaaggaagagaatgtaaattctgttggcttgattgaaacattgaaatagttggaactttggaagtattgtccttgatcatgaaagactgctttagtcgtatcctaagagcatctctttgtttttaatggccaagagaactgcaactcgatttcagttgtgcattccttatataatctcacataaacttcatctttcaaatgccattgatgtaaggcctgtgttgtgtttaa

SEQ ID NO: 51494 - DNA, 582 bp, Gossypium hirsutum
  unsure (1)..(582): unsure at all n locations
  Clone ID: LIB3543-030-Q1-K6-F6
tttttagccttattaatcccgggggaggggggggggggtttatagggatatcctcaacagacaaaaacagtttcttttatttttcttcttttttggccttaaatcattggagttcagttcacctacattattagcttgcatgcatgatagaaaagtggcctaaataattctgattatgctatgaaaagccaagcctctaaattacaaanacatagaaaaataacattgtcaaaaacaaactgacatacacaaaagttattattacagcctcttgcattgcatgattttgatattcaaaatctttgcttcacatgccattgcccctttgccatgcccacgtctttctgttttgaatctcatcaatgtagccgtccctacaacgttttagtgtggtcttatctctaaacttatccttctttgaggggaagggtagtttggactctgaacgccatcagattttaatgatgtaataaaaataaaatattactgttacttaaagtttaggaaattaaagtctagtttttaggtatgaagtatgaaaattttagttaaaagaaatgagacctaaaccttctttaatca

SEQ ID NO: 51495 - DNA, 593 bp, Gossypium hirsutum
  Clone ID: LIB3543-030-Q1-K6-F7
gcgtttttccacacgtccgtttttatttaaaagagcggggggttgtggttttactcatgttaataaaaccatagcactctctgtctggcagtctttgttgccctcttcattacaatcctcttggtttactcctgtcatgaatatgaacaatatcacattaattaattttggtgaaatattatatataacgcagtaattgaggcttttctatgatttttttcgtgagtttttaatttatagaataggctatttaatttaccatctgttttcatctaagatataactttttagtcacatgaaaatacacgagtgaacttttatcatcaatgaattagatcactaatgttaatttcatttaagtaattttaatggaaaaatcgagtcaacatgcatttgagacttaacatgatatcccaaagtctgtgtttaaaacgtgtaataattgaaagatttatgttcgatatacatatagtgaatttgatgatgagatgtcataaaaaaatgaaagtatgacatgttatacaattgtatctgcatcacatacaaatcctataatataatagcaaacaaatcatcatatatgcactaacaca

SEQ ID NO: 51496 - DNA, 602 bp, Gossypium hirsutum
  unsure (1)..(602): unsure at all n locations
  Clone ID: LIB3543-030-Q1-K6-G9
gcgttcgggacctctattcccctgctaaagaatgaaattcgatcacaagagattcaacgagttacatngaaagtatcaaggaagatttcaatatcagctcccctgatgagtgttcaaaggcttcgaacaaaatcatcagatggatgactcattcatgcttgaagatgtgaatggtgttgcttctcaagtacaaagttggcatttcatggatgatgacttcagcattcaagaaaaagcaggaatctcttctcccaagcggggaagtgtaagccattctcatcttaaagaattccaacaaggaaatcacacaatactgagctccttggatcttgaagttgatgatgacttgcactacaaaagaactgtttctgctattctaagtacttcaaactggttgatcgaaagccccagtttcactacctgtggctacaaatctagttttatcagttggaagaaagaaggaatggaaaattttcatagaccaaggctacatcaaaacatattcaaaaagattctatttgcagtgcctctaatgcatagaggcaaatgtagccttgggaaattggaaaacaatattgatgccacagnacacgttttacctg

SEQ ID NO: 51497 - DNA, 606 bp, Gossypium hirsutum
  Clone ID: LIB3543-030-Q1-K6-H12
gcgtttcgggggctaaccctaaaacactggagggtggggggagggtgtccaactattctgaaatctgtttctgtctgagttgagtcagcgaatagatgacaacttctattttcacaaatcataaggctacacctatacgccatgccatccactccgctgatgtatttagccggaggaggaagtggtggggggggccttgcaaacttaatgtgaagcagtcagtggaaactgtccaattatgggcaaaaattaagaacactcgcactaccacgactacagcttttgctactccaaacgaaaatgatgaaggtgaaagaagcggttcgcatgcttgttccggtgagcaagtgtttgtgcctttggaaaataattatagttccaatgatctggatgaggaagctgctggttctcttccggagtcgggttcaggagtctttcagatggccgagcactcggtaaatctggcaagcctcctggacaaattgaaggctttacatttgcatgtattagcgtcagagcagtggaatgcatctaggctgaaattatgtcacaacaattacgtggagagtgcaaaaaacttaatccattatttggctttgaaatgtc

SEQ ID NO: 51498 - DNA, 491 bp, Gossypium hirsutum
  Clone ID: LIB3543-030-Q1-K6-H5
ccggggggggggaccaaaaatggaagttgatcaagagaaccgtgtgccatcaacgcgctcttcatctccatctaggaagcgaacttccctcactaactctcttcctctgcaaccttccttgggcaacaaacgggtcggactcggtggacgggcgggggcgcccttttttggatcgggtcagaacccgaactgcggatccaagatcgagaaatgcccaagctgcgagaagagactgacgcgtgaaccgcaagagaagaagaagaaacacgaacctagtgatgcgattgatgaaagctttggcgatctgaaaaaatgctccttctcctcttctatatatggacatctccactctttggagattgaggagaaaaggaggccattgcccgattacatggagaatgtgcataatggtattacagtgaatatgcgagaaatgctgatggcatggctggtggcagtaactgaagaatacaaacttgtttccgacaccc

SEQ ID NO: 51499 - DNA, 587 bp, Gossypium hirsutum
  Clone ID: LIB3543-030-Q1-K6-H9
ccagcgtccgcccacacccccgcggatagttggggcttctctaacttcattactaggggttttggctttttgtcaaagccttctccaagtcattttcccacccgaactccgttttgcttgtctcaaagtatttaaccgcgtcttcaatttgttctcttcttactgctattttgaggtgggggagatcttttttttcaacaccaacgagctttacaacgccgttcaagtttacctgagttcctctgtttccaccaacggtagtcgattgagcctcactcgtgctcttaattcaagcgctattacatttggtctttccaacaatgactgcatcgtcgatacgtttaatggtgtcagtgtggtttgggaacacgttgtgactcaaaggcaagcccaaaccttctcttggcgacccttgccggaagagaaacgaggcttcacactgcgaatcaggaagagagacaagtccttgatccttgattcttacctggattacgtaatggaaaaggctaatgaaatccgacggaagaatcaagacaggctgttgtacaccaattctcgaggcgggtctttggattccaggggacatc

SEQ ID NO: 51500 - DNA, 232 bp, Gossypium hirsutum
  unsure (1)..(232): unsure at all n locations
  Clone ID: LIB3543-031-Q1-K6-A10
anaaaaaataatacttccacaaatcattcaatgaactaggaagatataaattctttacctctacacaagtaccaggtccatgcccctcatagttcttatcatcattacaacaaacatattctttgtccgtcacaattcaacaaaagcaactattccaaaacatgtgattacaacattaaatcttcatataataaactaactttctctattttcttggatcaactaaaagacc

SEQ ID NO: 51501 - DNA, 598 bp, Gossypium hirsutum
  Clone ID: LIB3543-031-Q1-K6-A2
gcgttcgccccgcgtccgcccagcgtccgcttttaggtgttgctctccgccaccaccgttttcatcatcaccgtttcccaaatcaaaatcccaacccatctgctgcatcgccgtcgaccatctgacttgttttgcgaggtgaaagccatttgaaaagtagttaggggctttctctttgtcgacttacaattgcaagtctttcactttcgttggcattcttctattaagtcgcagtaaaatttcaagatcaagcttacactgtcaatgaaagtacaatagtgttaaggaaagatagtgtgcaatagggtttttcttttccctacttcggtacttccttcctcattctatctcgatttctccctctttctcccctaaatgacaaagttaaggaagcttaatcgacccactagtcatcgcgtgtccatgctcaggcaaaggagattcggtgacttgctgataacatggtacaacttgggaaagaggtattttaatcaattgtagcaagtgtttccatggttgggcaacattggaaaattcttcctcatttctaatggtgacatggttaatgttttgtgttagtaaatgagtgttgttactc

SEQ ID NO: 51502 - DNA, 587 bp, Gossypium hirsutum
  Clone ID: LIB3543-031-Q1-K6-A5
tttggttcgtaatgcatgaccttaccatgggggagctcaggtagttgcaggaaagatatggtccaaattggagggcgataagcaacaaaagttctcaaatcgcactcgacattcttcttatattgtcagcagatatgacacagtgaagaagttcgaagcatttgatcaagtgaaacaattacgtacttttctacctttacaggtgtcacgttattggcagctttatttaactaatgttgttttggttgatttgttgccaagacttggctacttaagagtgctttctttgagtgggtataagatcactgatttgcctgatgatgtttttgaaaatttaaaacatcttcgctgcttaaatttttctggcactgatatcaaatacttacctgattctttgtgcactctttaccatttggaaactttattattaaaaaagtgttccaagcttcgaaggttaccttcaaagatgggaaatcttgtcaatttgcattatcttgatatcagaggtgcgaactcaattgaaaggattccttttagaattgataagctaaccaatcttcaaaggttatcaaactttatcatagggg

SEQ ID NO: 51503 - DNA, 560 bp, Gossypium hirsutum
  Clone ID: LIB3543-031-Q1-K6-A8
tcgacccagcttttttcattcgatttctttctctccgtggggggggggtgaccctaataattcgttttcaatcgataataaaaaagttaattactttttaattatttttgttctcataattactgatgccctgaactccaatgcgaggtaggcatcgatctggtgcgtggagcttagagttatcaatctggagcgtaggtgatggatgtgttgaaggagaatctggcagagctagagattgggagcaccgtggagtctattcagaagttcatagaaattcagagggagctcttccacagccagatcgaccagcttcagaacgttgttgttacacaatgcaaactcaccggtgtcaatcctctcgcccaagaaatggcagctggtgctttgtccataaaaattgggaaacgaccaagagatttgctaaaccctaaggctgtaaagtatatgcaagctgttttttccattaaagatgcgattactaagaaagaatcccgtgagattagtgctcaatttggcgttactgtcacacaggtgcgtgatttttttaatagccaacg

SEQ ID NO: 51504 - DNA, 587 bp, Gossypium hirsutum
  unsure (1)..(587): unsure at all n locations
  Clone ID: LIB3543-031-Q1-K6-B10
cccagcgtccgcactgagttaccatgggtgaactttcccgaaactcgctcgcttgcatctcttctccagttctcaatgatgcatcgcttctcccggcgctcggtatcggccgcccttcgcgcccccgctactcgttaccggatcgctgcggctgctccaatctccttctccactcccatccctgtctcggcagtggagagtgataatagtaccaggtggtactcagcaataactggagggaaatgtaacacgaccagacattcctctcaattgaacttgaaaaatgatttgtttttgggaagccgatacgagtcaacctcggcagcatctgattcaggaaatccacctccacctccagctgagaaatatgagtatcaagctgaggttagtcgtctcatggatcttattgtcaatagcttgtacagcaacaaagaggtgttccttcgggagcttatcagcaatgcaagtgatgccttggacaagttacggtatctaagtgttactgatcctcagctttcgaagatgctgntgatcttgacattcgtatccaaactgacaaagacaatggaataataacaattacggac

SEQ ID NO: 51505 - DNA, 507 bp, Gossypium hirsutum
  Clone ID: LIB3543-031-Q1-K6-B6
agcttttgaagtccttgagagttccctggagcgaaaccaaatctcgaaatggctccaaaggattttaaggctgagttctcatacaagaagtaaagaatggacaaatcttgctctagttgttgatttatctagaaggtttttctcttattaaaatttggtcaatggttccacaaagcacaaagttcggaatttcatttttggttcagaaaggccacacagtttgggatagagtagagttgcagatgcctagatctactggctgcatggggctaaaccgcagcttagagtttggaattttgatagcaatgtactaattggtttgcatgctggtgtcatcatctgcttatcaatccctggattttgcaactcagtcaaatgtaatctggacttggagagccagcaataccatttgttaaaaaaaaaaaaaaaaaaaaaaaaaaaaaaaaaaaaaaaaaaaaaaaaaaaaaaaaaaaaaaaaaaaaaaaaaaaaaaaggggggggcccgct

SEQ ID NO: 51506 - DNA, 577 bp, Gossypium hirsutum
  Clone ID: LIB3543-031-Q1-K6-B7
gcgtttttccagcgtccgatggtgctatcgggcttgggggtattgaggataatgttattgattactggaacatcagcagaattggggactactgtgccggtggcaagtgtgaagtgcgtgctgagactaaggcaactcgatctgattcctctgcgttgccatctacagaaggttcgaaatctatcttcttgtgttctcaatgtcagagcaaggcttgtcgagtttgctctgcagggagaggagcccttcttctgccaaattattcaagggagacgatgaattacaatggcttgtctaaccaagttggtctcactacaaatcgttcagaggcactggacagtgttatttgcaggaagtgctgtcatgagataattcttgatgcattggtcttggactatgttagggtcttgattagctcacgaagaaaagtccgtgctgatagtgcagcacataatgctctggatgaggttacaggatcctccttcctgggtagcctttctgaaaggagtcagtcctctggtaatctgagagctgctaaagttttgaaacaattacttaatagggaagaatcgctcgc

SEQ ID NO: 51507 - DNA, 607 bp, Gossypium hirsutum
  unsure (1)..(607): unsure at all n locations
  Clone ID: LIB3543-031-Q1-K6-C3
gcgtttttccnacgcgtccgtgnaaatccaaccctatttggaccgacaaagcgttcaaaaccttgtggaaacacttgaaggttcggatgacgaggatgagaaagtgaaggttttggccgagtttgagaagcgtttatcgcaaggttttgatagttattttcaagatttaattttgaaagccaaagtgttctcaatccttgaacttttactttgtgattcatcatgctctataagaattcaggaccaggtagcactagtaatagcttcattgattagattcaataaagatgtttttgtgggactggtgctaatgggtccaactgttcgagctttaatatcaatgccatcttgttgttcgattcgagttctttctttgctaatcaagttcattagaatccctttggttgatgaattagaagcacacaaagaaatccctagaattataagccttttaagctcggaaaatgtgtcgattcaagttggagccttagattgcatacttggaatcgcgtattatgggagaagagaagccattgaagcaatgctcgaagcagggttggttgagaagctggtgaagttgcagagattagaaaagcaatcgaatgat

SEQ ID NO: 51508 - DNA, 560 bp, Gossypium hirsutum
  Clone ID: LIB3543-031-Q1-K6-C4
cggccgcgtgggcggacgcgtgggatcctttaagaaacatactttcctgccaatgaattctcagggtgtgagcagtggtgaaggaggaaatgatttttttgaaaacttgacaacccttggtctcaacaatgagtttccaaggtctggaaggacaacaggtgaaacttatgtgcctgatcacatgggtccaactaatccaggtgatatgccaactaatcctggtgatatgctttcttcaccaaccgaagagaatgcagaggctgtggaaaaaaacagtccagctatgatatttttgccttcacaatcaaccagggaagtgttgaatgaaatgatagatgctaccaacaatggagttgcactaactggtgctgcagccactggatcaatgggaccacttattggaaaagtggaaattggtgaattgaaggattcatactatttccgtgtttcccttcctggggtatccatggataaaagagaattcaattgtgtgattagagcagatggtaaggttacaatacagggtatactgactacgggggaacagatagtatccaacg

SEQ ID NO: 51509 - DNA, 632 bp, Gossypium hirsutum
  unsure (1)..(632): unsure at all n locations
  Clone ID: LIB3543-031-Q1-K6-D2
ccgggtcgnacccacgccgttctgtaaaactccaaacaaactttcatccttgttttgtggaacccaanacaagtgtgctgcatgccacaagacagtgtacccattagaaaagttcgtaaattctttttatatgtcttcattgtaacggaaagatctcgttaagtcaatcattatgaacaaatatttcactcaatcaactttagaaatattctcatcatctcacctcatcaaatgctacatgactacagacgtgtggactatacgcaattgacacataacccttacaagctaatagaagacttagttgaggacactcactctcaacataatagaaagctaagagaagagagagagggagctcctctttccaactccgaaactttcaaccgttatttttttatacgattattagtctctatgtgtggcagtttatatttatttatcaacacttgtaaaattatttatgtaatgatgcataaaattaatatgtaatttaaaccactaataggtgacaatggaaggggaatgtttccacaagacatgctttaggtgtgcccatggagggtgcgcattaacacactcttcttatgctgctctagatggggtcctctattgtaaacaccattttgcgc

SEQ ID NO: 51510 - DNA, 613 bp, Gossypium hirsutum
  Clone ID: LIB3543-031-Q1-K6-D8
gttatatatatatatatagttgtgtgtgggagatggagaatctagcaaagaacgtgttgatcacttcagatggagatgaaatttcagtgaacattgctttgcatttagccaaacgtggttgcaggttggtattaatggggaatgagtgctccttgaggagtgccaaacagaaaataatgggttcaattatgaatgtggtggtcccagagccagtagcggtggttggcttggacatggatgatgaaagagaaggagcttttaatgatgcagtggataaagcatggagagcttttggacacttggatgctcttgtcaattgtcatgcttacgaagggaagatgcaagaccatctgcaattagctgaaggagagttcagaaaaatcgtaaaagtaaattttatggctccatggtatctgttaaaagctgttgggaggcgaatgcgggatcgtaaatcgggtggttccgtcgtattcatgaccaccatacttggtgctgaaagaggactttatcaaggagctgcagcatatggttcatgtttggcaggagtgcagcagttagttagagtatctgctttggagattggaaaacacatattagggttaatgcaattgct

SEQ ID NO: 51511 - DNA, 582 bp, Gossypium hirsutum
  Clone ID: LIB3543-031-Q1-K6-F3
cccagcgtccggttttcaagttgtttaagcaacaacattacctgttaaaggcataggcacaagcatagattctctttttctctctgttggtgaacaatttgagcaaagaaatcaatggcaccgactttaccttcgagcgatcaagcatcagatcaggataattgggacaatggaagactagcacgcaagcgacaactacttattgaaattgttctgaggaataagctgacagctcttgtggttgatggtgacacgacgtgtcgggttttggagcaattacttcttcgttcttatggggttcaaactcaaggtgtcgacaacggcagggatgcagtcgcccttattgcctctggtgtcaaactcgatctcatcatcatcgacatgattcttcctgtcttgaacggccttgagacaacaaggcagattcgtgacatgggggtgcattgtaagatgctgggggtcacaatttgctcaagagaaagtgaaaggcaggtatttctggcagctggtgttgatgtgttcattgagaaacctttggatcctgagcatctagttcccatcctaagggaacttgatgggcag

SEQ ID NO: 51512 - DNA, 601 bp, Gossypium hirsutum
  Clone ID: LIB3543-031-Q1-K6-F9
aagtcttctctttttcctatcatcgtccgcctacaatcgtcccgcttctctctgtcgtctctgcaaatcactttttttttcttctcttcttatctcagttctcacccaactccgtgaccgctggtttttgccggatctgacccgtatcccgtgtcggatcgtgtcgacacggcactgcaccccaaattgccgagtcctggtaacgaagaatgttggaacttattctcattgatgatctcctgtttgcgttggttggaattgaaggacgatacatttcaatcaaaagagtgcatggaaaggctgatgttgtcagtttccaggttgattcatctatggatttagcacttcaggaattcgcaaaacggatatttcctttgtgtgagagctatctcctgattgatgagtttgtagagtccagatctcagttcaagcatgggcttgtcaatcatgcctttgctgctgcactgagggcattccttttggattatcaggccatggttgcacaacttgaacaccaatttcgacttagaagactttctattcaaggattgtggttttattgtcagcccatgacgggctccatgcaagcattgtccactgt

SEQ ID NO: 51513 - DNA, 456 bp, Gossypium hirsutum
  Clone ID: LIB3543-031-Q1-K6-G10
cgtccgtatataacccagggggggggggggggggaaacacactgtagctgggtctctctgattgtgtcaatcaaatctcccttctttatatataaatatatattctctctttttctctttctttgttgagttccatgattttcagggcctcatctttgaatccaatcgtgtggggggagaaactgctcaaatcttcttctttttctgaaaatcaaaatcagaatcaaaatcccattttgattttccagagattccagatttgttgcctttttctcgccctttgtgttgaccccaaggcatatcttgttgtttccagaggaataattgcgatggaaggtgatgtgctttcagggctcagcaatgcgactcaaatagatgggaaagttttgcagacattacacaagagcattgtgcaggtacaagacatcctagaccaaaacaggctgctaatcaatg

SEQ ID NO: 51514 - DNA, 514 bp, Gossypium hirsutum
  unsure (1)..(514): unsure at all n locations
  Clone ID: LIB3543-031-Q1-K6-G7
ggggggggggggggctatactgcgaagatacccatgcaagcaattcaaaatgctctgcgtgggcaggaatctgaaaactctcaagaagcactgagggtgctggatatcattttaaggcagcatgctgctaaacagggatgcctccttgggggggggggtttcttttttgataatcagaacaacttcacagacattggaggaggtgtccttggctgtaggggtttccattcaagtttcagagccactcaaggaggcctttcactaaatatcgatgtatcaactaccatgataattcaacctggtccggtagttgattttttacttgcaaatcagaatgctagagatccttactctcttgactggaacaaggcaaaacgggtgctgaagaatctgaggataaaagttagtccgtctaatcaagagtacaagattactggcttgagtgaacaattgtgcaaagatcagttgttctcaatgaagcanaaaaatgcaaaaaatgaaaatggtgaagctg

SEQ ID NO: 51515 - DNA, 166 bp, Gossypium hirsutum
  Clone ID: LIB3543-031-Q1-K6-H3
aggaggctctgaagaaatcttcgcccatgaagatctaaagggacagctcctttgtaggattccgagctaaggatttacagatacgctggactctaaaaacatgtttaggaagaacattcaggtaaagccacatcggcctgagacacggttgtgcgaactaggacgg

SEQ ID NO: 51516 - DNA, 361 bp, Gossypium hirsutum
  Clone ID: LIB3543-031-Q1-K6-H4
atataaaacaaaatggtgtatgacaatgtcaacaagcatgctggttggcaacaccgctcgacatggaatgatagcaacagggctgtgccaagcctccaagggtaaagccctagatgatgaggccggtatcaagttctgcgaggctggggctatatatttttttaatgcggaggatgttcaatttccaatagccaccgacattaagcaaacgcttacagagctctgataacaaggctgaatctactggactcaaatttaataagcaagacttagcaccggctaaactagctgctcaaaactcacgttgctgcaggtaaatcgaacaactaaaggactgcttattccatatggactgttccgc

SEQ ID NO: 51517 - DNA, 580 bp, Gossypium hirsutum
  Clone ID: LIB3543-031-Q1-K6-H9
agctcttggacctgggaaaatccgtgggaggggggaagcttaagttctatttcacttggtgaaaacgtgcgctatgggaatttacgaaaaacagacaggttttcccttttcccttgcactttatgctattttctatgcttgcagacttggtcataaatgtgctttgagcttttcattgcattattcttatggcataggttaaagaatggcttcaaagcttagggatagttgaccaggttgcggtcgtgcaagatgatgatgaacctgatgatggagccttcccgttacacaacgaaggaagctcgagaaatagaaatgttccatctattgctgctttgccaattcttcgccccacattaggaaggcagcaaactgtttgtgacaaagccaaagtggcaatgcaaggttatttgaatcatttcctgggaaacttagacatagtgaactctagagaggtatgcaaatttttggaggtatctaagttttcgttttcacgggaatacggcccaaagttaaaagaaggatatgttatggtgaagcgtctatcgaaagtcaccggagatgatgatgtcggatgctt

SEQ ID NO: 51518 - DNA, 652 bp, Gossypium hirsutum
  unsure (1)..(652): unsure at all n locations
  Clone ID: LIB3543-040-Q1-K6-A10
gctttcgcggncgcgtggggggaggatcacggggggggaagttgggactggggattgatgggacgacgtcggagaaacccgtgaagaacacgggaagtgtgtgtttacgacagctcagttgcatgacctgcaattacaaacgctcatcttcaaatacatagcgggtggaatccaagttcctgggaacgttgttatacccatttggaaaagcgtcgcttcctcctttggctctgctcatggcggtatctatgaacggtatcccagttttgtaggagtcagtcctcaaggattggattataggaacatggcggatcctgagccgggaaggtgtcgaagaactgatgggaaaaaatggcggtgcagtaagaatgtgattccttatcagaaatattgtgaacagcacatgcatagaggttgtcggcgttcaagaaagcctgtggaaacttctcaatccgctttgcctgactcaacatcatcaaaattttcaatcagattgtcagaaaactcaaaaaaccttccaacacctgtaagttttcagtacacgaacccattttcctgtaataccagcaccagccatggaaccactgctatagaaagcagctatgtatgcagcaaccgaaactccatttctatcaatgctgcaactagtggc

SEQ ID NO: 51519 - DNA, 724 bp, Gossypium hirsutum
  unsure (1)..(724): unsure at all n locations
  Clone ID: LIB3543-040-Q1-K6-A3
ttctcccagtatcaaccctttgaagaaccactnggcctcttttagtaaatcttgagntgtcgtcgggccaatacatatcatccacnatcagtctcgggacctcttacctnnctctatnnctccnnccgccagnatagttgccanntttctnntctctnncttgggattcatccatggnatcnnntccacncgtnnatacnnggtgcncnntcctctnatttctaggaagtgcgagggatgncnntcgtaacgnnnccctccttnnnctttcgcncnnatcgcatggagcccatactttgttaggnncttccctttggttcaagcttggcgtnnattatggttatgcgcnnatccccttctattgcatgatgccctagnataccccatnnatcttctgcncataacaatatgattgcatgatcatcgcccttacctcatgccatcnatcttggtctgaaatatanttcctatggngtaggtacaantgctgccatcattaaaccttccttgtttcgtgctatgattcctgagatagaacatcttgttttttgattaaaggaagcgtcaaaattaatttttatggtgtcattgtctggtggttcccaagatgaatgtctgacatcacatgtgccctataatctctcccccaaaatagttgtttccgcatagtaggccataataaatcccacaacttcatgtgcttgctctcgtatcctctcatgat

SEQ ID NO: 51520 - DNA, 644 bp, Gossypium hirsutum
  Clone ID: LIB3543-040-Q1-K6-B3
ggctctatccatggttgcaagaagttgaggaagctcaacttgtcatactgcaatgaagtttctgacagagggctaggttatatcggtcgtctagaggaactttctgatctcgaaatgcgtgcacttcataaaatcacaggtgtgggtttggaagcagttgcagttggatgtaagagactggcagatttggatatgaaacactgtgagaaagttggtgattcgggcttttgggcacttgcctattactcaaagaatctacgacagataaacttgagctactgtggcatctctgatatggcattgtgcatggtgatggggaacttgtcacggctgcaagaggcaaagcttgtgcacctcagcaattgcacggtcgaaggggttgagcttgcacttagagcctgctgtgtacggataaaaaaggtcaagctatttgcccctttaaggttcatgctttcatcagagattcttgaaatcctgcatgctagaggttgcatcataaggtgggattagatgaattattacatcaaggaaagttagtaataaataaactcctcatgccttggttccggatgctttcttcgatattataatgatgttcgaagttcgtattttgctccatgataacaggtttaagttaaaactac

SEQ ID NO: 51521 - DNA, 637 bp, Gossypium hirsutum
  Clone ID: LIB3543-040-Q1-K6-B6
cccagcgtccgcttcctttttgttttcttaagtttcagctaagtggtagaaagaataaaataaagttcactttgtttttatcacctattttatgttataaaataacatatattattttataccataatttaagtttataatttattaatattattaaacacatgatgcattaaacccaccccactaccgtacacttaaataaaatggtaaaatagacatgcaaatcctctactttagtaatttacaaaataatcacttggacattcacttactacattatcaaagtttctcaaacaagtcctttttagctaattccacattaaaatgaaaaaaattaagacacgatactttcacacatgcactctcacatataataagcatagaacataacatttaattatgttcgtgactcgattttgtggtcccgaaaccactttctgactagggtcaaattagggctgtcacaaattctttactccctattttctctgtcctttttctccttttctagggtgtatttataggctttggaatgcttatgagccctcaaaattggccttttcctaattggactctacttgggctcggcaaggacacgcctgtgtgcgattactttaggctgtgttcgagcctgtta

SEQ ID NO: 51522 - DNA, 491 bp, Gossypium hirsutum
  Clone ID: LIB3543-040-Q1-K6-B8
ctttcggtaaagatcttgacgatttgtgggctgatgccagctgaagtggaagtggtttcctttaagaattgcccatgagtggtagaaaaagtatcaacatcttgaggattttcactgggctgtgaggccactcctgattgcattgggtctatttacagcaatgaagatgggatcattggttggaaagagaattgggaggtcaaaagcaaagcgacagagcagtgtgattcataatgatgtccaacatatggatcatgcaagcagtggcaacccatcatggcttccacctcccgtggcaaatattctttttggggaaggtgctgctcgatagtttcctggaccactccatatacccaagaagcatcttctaactctgttgatttacagtaggaaactgttacaactataattggttatttaccacaaacttcttattgtaaacatctcaatcatctataatcatattttagtgcatagtatctttgttctgc

SEQ ID NO: 51523 - DNA, 630 bp, Gossypium hirsutum
  Clone ID: LIB3543-040-Q1-K6-C2
ccccgcgtccgccccgcgtccgatccctacaccatccctcaccctaacacgttcatcaatttcttcattccttttcttcagttcatcagtcaaatcttaataaatcaaccacatcttctaaccctttcattgtcaaatctcagatctcattactgtgtcattctttattttttttatttagtttcactaatcagtctaagagacggacagaaacaaagcagtgtaaatagctgaatttcgatggctgtggctatcaggggagctcgcggtggcggatccggcggtgttggagctggtttccgcagttttttttcttacaggatcttcgtctcggccatgttttcgcttctcttcattgccactgccaccgttctcctcactactcgtccttctacaactcatcagcactctaggtttcgaagtggcggaaatgcttacatgcatagaacgtttgtggcattgaactcggaccctctcaaaacaaggctagatttgatatacaggcaagccaatgatcacatcacattagtgaaagcttatgcagcttatgcaaggaaactaaagcttgacatttcgaggcaattgaaaatgtttgatgatttggctaagaatttctccgatattacatct

SEQ ID NO: 51524 - DNA, 488 bp, Gossypium hirsutum
  unsure (1)..(488): unsure at all n locations
  Clone ID: LIB3543-040-Q1-K6-C3
cccacncggtcagcaccaaaacacagagcaactacactttgcctccttgggtggcgcaatgggcggcgcgctggctagcaacacatgccacctcacatgctgccactctgagcgcctcatcatatatcatgctcaagctaaaccatacggtaaacgatgctgtgatcgctactttcatgtctacttcattgtattactgaaagaagtaccgaaaaagaaacttgagaactagctaagagactataactgaaagaagtacctaaaataaatctgcagatgaatctatgctcaacccaatgctaaagaaatggatattgaacattaaatcattcatacaactataataaccgctatcataaaccctaaatttaagccctaaacaagcaaatacacatgctaatgcggcaaatacaagaacttaaacaataacagaatgtaactgatatgcaaaaatgtacacatctaggatcccttatagaatacttaaa

SEQ ID NO: 51525 - DNA, 601 bp, Gossypium hirsutum
  unsure (1)..(601): unsure at all n locations
  Clone ID: LIB3543-040-Q1-K6-C7
attacaaataaccgatacaaagcaaacggcgaggaagtacagttccggtcactgtcattttgaataattcaaataccccttttttttatactgtaatgacttctcggggaactttttccgacgaaccgttgagccctgccggtcgactttttattgatccaaaaacagacgtggtcatccattgcatagccgttagcaaaaaccccattgacttagacgtagctaagacggctctaaagtcatcggtgatggtccaacaccctagattttgtagcctgttggttcgtgacgaaaacgggttcgagcattggcgaagaaccgagctcgacatcgaccggcatttcatcgtcatcaaaaaccggctcaataaatcgggtaagttcgtcggagaaaacgaaacccaaggtttcgacgatgatgatggtgatggtgatggtgaaggggcggtgaatcagtacgtagcggatttatcggtgagcagtccgttgagtatggacaagcctttgtgggaactacaccttttaaaggcgcacaattgtgtcgttttcaggattcatcatgctttangggatgggttttcgttaatgtccatgttgatggc

SEQ ID NO: 51526 - DNA, 634 bp, Gossypium hirsutum
  unsure (1)..(634): unsure at all n locations
  Clone ID: LIB3543-040-Q1-K6-D10
gcgttcgcattaaaactacaccaaattgcgcgcgcctttttctttttcaattttttgctctaatcttaaaagaaaaaaagaagaggtttcctagcaggcattcagtttacgggtgngaaaacgatggcgttgattacactcaattcccaaatataaagcctcaaaaagaaaattaaaccttcgaaaagcctgaacagatagaaacaatagcagtagcagtcttaacagttacagacagccttgcaatgcaaagctgtatgtgaatttatatctgtaaaacaaatctggcgcgcgccaaggcacacgcttacgcattaaacatttggtggttcatttttttaaaagaatatttgtaaatccttttgctcttctttgagtcattttcacaagcaaataacaagtggcagctcctagatctctcctcgatactgtgtcaccaaacaagcttcatttaacagctttttaccgttgtatttggaatggttattattacttaaattttttgatttaaagttgaaagctggtatttggtgaaaatagaaaaccttcaattacaacttttttgaggaaaaatggacggtggagatgggacggtgagattaggagctttgaatttgaaagcgggtcgaggctt

SEQ ID NO: 51527 - DNA, 631 bp, Gossypium hirsutum
  Clone ID: LIB3543-040-Q1-K6-F3
gtttattataattgatttgacttcctacaaacaatttatgcaggcttgtcgtaggagtaattcatcaaaaatgcagttcgcaaggtttcaaaacaagttgcattggcttttgtcaagcgaactctagataaatgtcaaaaatttgaacagacgggtactagttgctttagcgaatctgcattgcaagatgtcatgttttctgtaccgccatgcagcaatgaagcgaagtctgttgattgtattggctctggaactgctagtaatatttgtaatgaaacttccaaccatcaagcagaagccaggggatcgggtgctgtttcgagtacttttgagaggtttgatacttcggatgctcatccaggcattcacaacaaagggaggaagagggaagtacttattgatgaggttgttggtagtgcatcttctagggtaacatcaacaacacttgatggcaaagttggaggagcaaacggaaagagaagtgaaagcagagatgagcggaagatgaaagcaaaagccaagcaaaagaataataatttatcaagttccagaaatggtagggcatcatctccaggtaagaatcacgggagttcaactaaagaagtagaggaacccatggattttgggaact

SEQ ID NO: 51528 - DNA, 649 bp, Gossypium hirsutum
  unsure (1)..(649): unsure at all n locations
  Clone ID: LIB3543-040-Q1-K6-F9
cccgggtncaacccattctttcgcggncgcgtggggataaaattgggggagggctgtatattgtcatttgaatctttgaggggatatgtaatttccataatttgctgtagaaattttttgtctcggtctgtaacaataaaccattaggatcccggttagactcatgtaatagtttataggcactcctcacagagaacggcggtggcggttctcctctccatacttgaagatctttttatgctgtctctgcaagtgggatctgtaaaattttctccgctacatccggttggaagcccaaatggaaatttgatcgcctctccccaccctccagcaacgtcctttttcaagaagccctctcgcagcccatatacttttccaggttaatgaaggatttcttcttcttcttcatcaaggataaaccaccaattctaattccatggacgcatgacaagaaaacccagataaagaaaactcttcaagtctatggagcaaatagccgccgaaacaagaaaaacttaagaaaaccaatatacttgccagagaagcagacagagacgtgctagggtagcagactttttctaaataaccacacatatttactttgtaactacaatgtaagttaaaaaataaaattttaaaacctttttat

SEQ ID NO: 51529 - DNA, 658 bp, Gossypium hirsutum
  Clone ID: LIB3543-040-Q1-K6-G10
gctttcgcttctatggtgaattggtacatgggggggaaactatggctaaacaagggtgttggtcactgttaaaaggtggcatagttgctgaatttacaggcgttgttgagattcttttgatgagcaaagcaatggagattcgagtcgataatgtttcgttgcagccgttcacagcaaaggagatggagatcccaccaagacaaaagtattgacaaggttcgtaagaagaaggtgagtttcaaggtaacatatgccaatggaactgcggctgatggtgctttgatcttgatacttcaaaccaagtccggtttcccattcggatgcggaatgaaccattatatcgtcacggatgaagcttatcggcaatggttcgcctcgagattcaaggttaccagtttcaccaacgagatgaaatggtacagcactgaaaaaacacgaggcgtagagaactataccgttgcggatgcaatggtgaattttgccgaacaaaatgggatttccattagaggtcataatgttttctgggacaatcgtgtaatgcagcctaaatgggttaaagaccttccaccggccgagctaatgaacgctgcaactcgaaggttgaactcggtggtttcgagatatgcaggacggttaatcgggtgggatgtaatgaatg

SEQ ID NO: 51530 - DNA, 343 bp, Gossypium hirsutum
  Clone ID: LIB3543-040-Q1-K6-G4
caaaactataaccgtgatctctagagtgttttgtcgtccctagctttaagttccacaggatcgctgacatatgtgctggtttgcccaagagattaatacataatagcagaggctgcaaaagggactggcacacgtcctttgatctttaaacaaaagggtggtgacaccttctcgagcagcttatcttccatgttcgtttctacgcgtgggctgtatctctaagcattattggatgacatgccacaactcttatagtttgttgcacaactcctggggtctagaatagcaactggggattatggaattagaccaacgctatggcactagtaatgcacggctttaa

SEQ ID NO: 51531 - DNA, 667 bp, Gossypium hirsutum
  unsure (1)..(667): unsure at all n locations
  Clone ID: LIB3543-040-Q1-K6-H1
cgtctcggtgccatggtgcaggnaaagctgctagctgaagagtgaactttgaacagcttgtatttcgcacagttggtttttccggggcagatatccgaaatcttgtcaatgaagcagcaataatgtcggtgagaaagggcattctaagatctcccagcaagatattattgatgtgttagataaacaggtgcttgaaggtatgggtgtactccttacagaggaagagcaacaaaaatgtgaagcaagtgtatcttttgaaaagaagagacttctggctgttcatgaagctgggcacatagttttagctcacttgtttcctcgatttgattggcatgcattttctcagctcctgcctggtggcaaggaaacggcaatatctgtattctacccccgtgaagacatggttgaccaaggttatacaacatttggttacatgaaaatgcaaatggtggtagcccatggtggacgttgtgctgaacgtgttgtgtttggtgatgacataactgatggtggaagggatgatttggaaaagataacaaagattgcaagggaaatggtaatcagtccacaaaatgcaaggttagggcttactcaactaaccaaaagatggggctgttagatcgaccagctagcccagatggtgaattaataaaatataggtgggatg

SEQ ID NO: 51532 - DNA, 618 bp, Gossypium hirsutum
  Clone ID: LIB3543-040-Q1-K6-H2
gcaacttcttcatttcttcactatcactttcaagctcttcagttctttattttcaaattctttgaattttagaagaaaaaaaagtgaaagaaatgtttgagccccacatttgttagatttacatagaaaattcaggttttggaacttggctttcaggggataacagtaactcgtccccgactcaccgtcgagttgagtcctcactcgttcattcagctcctggcgatgtggatcgtgtcctctacaaggatctcgttgagatgatccctcttgttcagtccctcattgagcgtaaagcaaatagttcatttacaaggcgtggatcgatgatatataccaagacaccttcaagggaatccctatctcgtaaaactacggatgtaaaaggaaggaatgcaggtttggctattccagtgaaaaagaaaaaggatcaagtagacaagattggtgatagtttaccaatattttcctcgagggatttgatagcagaaaaggaaaatgaggagttaattgcactgagaggacaagtggaggatctgcaaaagaagttgttggagaaagaggaccttctaaaatctgcagagatttcaaagaaccatattaatgatgttcaagcag

SEQ ID NO: 51533 - DNA, 648 bp, Gossypium hirsutum
  Clone ID: LIB3543-041-Q1-K6-A2
gttaaactggactgtggtacttttccaggagcagaatttctgtgcaaagaagaattgttgcatggtccggtttccctttgaacccccaatggccccggcaaaccattaatgaatttccagtgccgtgatgagctacctgagattttagtcacagttcctgaaccagctgcagaacttcttgcatcctcctttactggaatttcccccatcttcgcatgatcactagaacatgacagagtattgttgtgggattgactagaactgttgattttctcatcccttgtggttgtttgaggatcagaggtgccaacaatagtagcattccgcgcctttgttctggctgaagcaggcaatgttgatgccttcataggtaccggcattgcagaagcagacttggttgcagtccctccttgaaaaagcttaacaaaaccagttttagttgcagagaattgtgttgctgaactcttcactgcaacctcagaaggtctatagtgcttgattccacatttagcaacatcagaccagggaacagactgatttggaccgtatttagcatccaactcaacctgaactcttttttttccatgtattccgcgcctttgttctggctgaagcaggcaatgttgatgccttcataggtaccggcat

SEQ ID NO: 51534 - DNA, 645 bp, Gossypium hirsutum
  unsure (1)..(645): unsure at all n locations
  Clone ID: LIB3543-041-Q1-K6-A4
ccccgcgtccgcttanagaagtgatgttgatactggtgaaggcaatgaacaacccaagaagtgccctttgcaagacctcgattatggctgcttcagatatcttcaacgcatttggtgaaaaactgcttgatttcactgactctggtgcatttgatcggttgttgctgcaactgttactaaaagcttctcaggacaagaaatttgtatgtgaagaagcagataagtcattaaaatcaatggttaacaccattgctcctttgcctctgcttaataagcttagtggatatgttaaccatggcaaccttagagtcagagccaaagctgctgtttccatctcaaactcggtttccaaaatgggtgtggatgaaattaaagaattcgggttggttaaactgctacaaatggccacgggttcgttaaatgatagattgccggaggccagagaagcagcaagaagcattgtgttttcagtatacaaggcatttactgaaaatgaagatgagaatccaggggaggcttggcaaagcttttgccaatcaagcttgtcacctattcaagctcagtccattatcaaagctgtaggttcacagtagggtttatggtaaaagtttttagggtttctcaaacttttttaatgtaaatgct

SEQ ID NO: 51535 - DNA, 313 bp, Gossypium hirsutum
  unsure (1)..(313): unsure at all n locations
  Clone ID: LIB3543-041-Q1-K6-A5
ggnaaatttgctttgcaaagtaagtttcaaaatgacccaattgaccgccgtgtaattctgtatttgaaagattgtgattgtgggagaaagtttgccaagaaaatgcagcatatcttgttaagaatcatttgagaagagtcaaactcaaagatattgcagtagatttcgtcattgagtatgttcaatctcataatcactccgctttctggggttccattcccccccccccaatattttgtttgttgaaaaggtggatgtaaaatacgggaaaattttcattatttaattttcacttacaaggtgctttatttat

SEQ ID NO: 51536 - DNA, 540 bp, Gossypium hirsutum
  unsure (1)..(540): unsure at all n locations
  Clone ID: LIB3543-041-Q1-K6-A6
ngattaatttgtgctctgtaattttcaaggttatgcaaaatcatctcgcttgtaaggactttaggttttattgccatcctttaaatccaagtaacaatggataaaacaagtaaagaaaatttaaagaaccaaatttcaagcaaaatatcccaaaataacccaaggaaagccaccaacttcaaaccgaagaggggaatcatctgaatttcctaaaacttattagccacaaaatgcccaaacaatcgcacaaatccaaaccgatacaaattccctaaaacccagctttgatcaggcacccaaaggctgggttatggtcaaacagactagtcggcaccggaggaagaattcggtgaaaagaaggcctcccaggcttccccatgcaccgccatgtgacgaaggtttgctcagctttggatggtgagtgagcttcttcacacacttgctttccagttgtcagaagttgcaaatctgctgaagaaatgatggcactccttttgctggcagtgcacactataaaaatcactttaaaagtgactcatt

SEQ ID NO: 51537 - DNA, 643 bp, Gossypium hirsutum
  Clone ID: LIB3543-041-Q1-K6-A9
tctttcgtaatgattgtgatggaactgagggggggagggtggcagttaattcaagcaagagctttagcagcacatcaaatcctgccaatgctctctcgttccttgggggtgttctgtgtgccaaggcatccatgttgcttcaaaatattgcgcctgctgtgcttgtacgttttcttagggagcgtgggggagagtgggctgatttcaatgtcgacgcttattgtgctgcatcgttgaaggctggaacaaatgcttatcctggaatgagacctacaaggtttacggggagtcagatcatcatgccacttggccacaccattgaacatgaggagctactcgaagtgataagacttgaaggccattcttttgtgcaagaagatgcctttgtatcaagggatattcatctattgcagatatgtagtggaatcgatgagaatgctgttggagcctgttcggagcttgtctttgccccaattgatgaaatgtttccggatgatggtcccctactaccttctggatttcgtgttatccctttggattcaaaatcatctgatacacaggactcattgactacaaatcggactttggatctgacttctagtctcgaggtaggacctgcaacaaatcatgctgcaggagacac

SEQ ID NO: 51538 - DNA, 649 bp, Gossypium hirsutum
  Clone ID: LIB3543-041-Q1-K6-B2
gaaaagaccgccgaggaagttttgggggagccgataattcgaaacgccgaaatagaccggagatggatttgtgagatggttggagctcgaggagcttggacttgacgacgccaccttcctttctctcaacttatccactaaatttccggatttattggctcttagcttgtgcgggaacaagctggaaaaccaggagaaacttgtcgaggaagttactaaatttaagaacttaaaggctctttggttgaacaataatccagttcttgaaaaaagtgactgtggcatggaagatacaattcttcaaggatgtcccaaactcgaaatctataactctcgatttacccataattttggtgtgtgggcattgggattttgtgctgatgtgtatgggaaggataatcctgcaagtagtcatcagggaaaccttcctttgcaaagtgtgacctcacttgacctttcgaatagaggcatccataatctgatcaataaggcgttctcgccttttgagatgccaaatctttcatatttgaacattcgaggcaatctgattgaagaaaattcagtcagtgatttgtttggactcttgaaggccttttattgcttacaatctttggaggtggatatacctggcccactcggagatagtgca

SEQ ID NO: 51539 - DNA, 631 bp, Gossypium hirsutum
  Clone ID: LIB3543-041-Q1-K6-C6
ctttggtcacaatctactttgggtttggatcggcagtctccatagatggatgtcgcaagcactgcagaaaaccggtggcgataggtccaatcacattagtttagattctgagcaaggcacctacgtacctcccacgattgacgaagtcgcagatgtatcatccaaccagtccaaacattttgatccccgtgaagcttcttatcatccttctattgcaggtccatggacttatgcgtttcaaattatttatcagatttgtgcaggtgcagtaatgctcactgattcagtattttggctgatcatttttccgttcctaatgcccaaatctcgcagcttgaattttattgttgtctgtatgcactcaatcaatgctgttttcctaattggtgacacaactttgaattgcatgcggttccctttgttccgaattgcatattttattttatggacgggtgcttttgttatattccaatggatcatccatgcttgtgttaacctttggtggccatatccatttcttgacttgtcatcctcatatgctcccttatggtacttgggaataggagtaatgctcattccatgttatgggatctttgctttaatagttaaactcaaggacttctctttgtca

SEQ ID NO: 51540 - DNA, 644 bp, Gossypium hirsutum
  unsure (1)..(644): unsure at all n locations
  Clone ID: LIB3543-041-Q1-K6-D4
cccagcgtccgcgcaggnattggcaagaccacacttgctcagctggtttacaatgatttaagtattgcttccttctcatttcccctgccgaaaaccttgatttcactgactacagatgttgtgggcagtctttgatgatctcttgctttgtgggcctttcctccaacattatctccaagtctcaggctgttcttttcacttgcaatctgctgcagccttgtggtgatcccctttatctttgacaccatcttcacattaaacatgccactccatttcaaacctctcaagcaatgcattttcaccttactatgtttcactgttgacttgcgccgcaaagcttcgtagtcaaacttctctaatatgtccttgacttggtaagccaagtcttgtaattctttcaaccatattttggcactcctatccattacttgcttctcttctgcatctgcgacaactgctttgatattctgcaatatgttcttcaacttttggagttcagcataaatcttcttctgccgagcaaagtttatcaagtcagaagcgttgaacttggtgagtaactcctcaaacatttcagagaaaaaagcttctccaactgcagcaacggcttccatgattagtacttcgaagaaacaaaacaagca

SEQ ID NO: 51541 - DNA, 643 bp, Gossypium hirsutum
  Clone ID: LIB3543-041-Q1-K6-E10
cgctttcgccccgcgtccgccccgcgtgcggggggcgggcgcccacgcgtccggttctttttaattgtttctagggtttagctttacgataagaaacattactaattactcgaattcaagctctccaatctattgttgatatttcgatacttgaaaattaattatataaatgatcataaaatgacgtgcaacggttggattttgcaatgaatcagattcgtatccaagctaaaggggaaggtttgatttgaaaatgctgtgaagtactttcaaattgataaccagcaaggcctttcttcttagaaaagtcaaatagattgaatgtgcagattccaactttgctcagtttatgtaattgttcttagatctgtttgattatattaaaggctgaagtcccttttcttcttttagtaaaatatggaattggttctgcttgttgcattctttgcattcgagaatcgagagaaaaatcaagaagaagcaaagagttttatttattaataatgatatttaagtaatgaaaacttgattggttctttccatttttggtgtttttactttgtggtttggaagtagttagtaagatgcttttggaattaattcttatctaatataacaattgatttgatcaacgtgattgctt

SEQ ID NO: 51542 - DNA, 646 bp, Gossypium hirsutum
  unsure (1)..(646): unsure at all n locations
  Clone ID: LIB3543-041-Q1-K6-E7
ttttgaagaaaatgagcttgtcgggacaggtgatggaaagcctgcgcaacctataaaaattctgactgtggtgaaacctccgaaagtaaaattcaggatgctcttggaaaagcaaaagattctgatgtctcttcatctgagtcaagttcctcaagtgatggaagaagacataggagaaagaagtcagccaaaagaggcaagcatcaacgtgggaaaaagaggaaggatgggcgaagggagaggaaaaaaagtcggcaaggaaaaagatcaaagcgcaaatccaaatggagttcagatagttcaactgacagtgaaagtgagggtacaagcacaagcggtggcagtgatgatggaaaggccagtttacgtcgtaaaaaacccatctccagatcccaacctgctgaagatgaatctccacagaatattggactacaaaggaataagttgaaggtaaccgaggacaactcacatgaagaaggtgaattgtcacctaaaagtgatgagcttgccaacaatggtcatggcaacaaggctgctgctactaacctacataccaatgcagatggctcggatagattgagaagtgtgagcccaacccctaaacggnggccaaacaacagccgcagaagcagtcgaagcatgagtc

SEQ ID NO: 51543 - DNA, 652 bp, Gossypium hirsutum
  unsure (1)..(652): unsure at all n locations
  Clone ID: LIB3543-041-Q1-K6-G7
gctttcgcccgnacacaccttaccttcacgaggggcgtgggagttggggtgcagtattcttccccaagcttggagagaattctatgtatacatgaacatgagattcaccgaagacgccaaagcaaatccagttcaaatcccaaagtcgagaacgaacggttggcaagcttcatggaagaaattgctgggggacatgatgtaccttagaggatatgttagcctttaccccaacttcccaaaccaagctagcttttcaactaaccatatggaaccaggggctcatatcagtgcaaaggacaatgtggttaggcacgacaaagcagattttgaagtcccattgttgattgaagattttagaaccctattgcctaatgggaaattacctccagcttcaaagctgccatcacttaaccttttcaatcaacctgtgtcactgaaagggctcaaagcagcaggagccaagttgggtcaagatgtattaccatgcaacaatgctacagagattgtcacagttgatcatattacaggtctgccacagcaatgctccaaattcatatgactgaaccctttcttctttttatattctttatttcttccatccacccaagtctgatattnttgtttgttttttatattttgttgatatgaaaat

SEQ ID NO: 51544 - DNA, 649 bp, Gossypium hirsutum
  Clone ID: LIB3543-041-Q1-K6-H8
gtgccccttctctttctctccatcgcgcgggtgtgagtgtgtgaaaccctaagtcctttttttttttttggcaatcccctactaaagtgattccgtagtctcaatacgagacctctggaacggcagaatggataatgtacctgctgacaagccaagttcgcctcctgctaaagattctgaggtgcaaactcctgctgtcacagattcaggatctactaatcctactcttgatgcaccatccaagctgtcatcatgggccaaaaatttaaaaattcctcagccatttactacctcgcaagagaactcaccaacaggaaatgctggaaaatcaactttttcacgatttactagtgggtttggactgcgttcatctccaaaatctcctgctagtgatagttctgacggtgcttcagcaaccacgcagtctggttttcttggaacaattacgaaaggtatagtggactcatctaaaaatgcagtaaaagctgtacaggttaaggctcgtcatgttgtttcacagaacaaacggagataccaggaaggaggatttgacttagatatgacatacatcactgagaacataattgctatggggttccctgctggtgacttgagctctgggttttttggatatgttgagggtttctat

SEQ ID NO: 51545 - DNA, 434 bp, Gossypium hirsutum
  Clone ID: LIB3543-042-Q1-K6-A8
cccagcgtccgcccacgcgtgggggggggggggggggggtgccatgcaaaattagtatcatcacttaagctttgtttttttgtatgcaagtcttttagtttattaagagtgttgtgaaaaatggagaaaattacaattaaaaaaaagtataaaaagaagggtaggaaattaggaggggtgtgggggttgtttaaagggtcaaggccaacaacaaccaacaagatgggtgtgtcggattaatggatcccacaaatcacagccaggatttgttactgagagagagactgtgatgtatgattatattttggttaagggaattggagggaactatgataattattagtaatttataattattagtaatttatatatgtaagtcgtcttgtttaatcttttgtgtttctggaaatcaagcttttccctcttctcagttt

SEQ ID NO: 51546 - DNA, 640 bp, Gossypium hirsutum
  Clone ID: LIB3543-042-Q1-K6-B12
gcgttcgccccgcgtccgccccgcgggggggcggggggggggccgcgtccgccccgcgtccggaaacgctctttccccactctacaacttccatccttcagctaaccaactttcgctacccggatccaacctccatcaccgctctgatctacgcctctgatccaatcctcaactggggcttggtcgaggggatctgccttgcggctctcttaaacacctacatagatggttccgtcaggggagtgtgtaacagatgaagttggtaaagataaattacggagcccagatactgggagtcatgcattgcaacataacactgatggtaaaattccctcgtcacaatctgatcaaggaggagaatcagagaaagacccactttcacaatcggagaaattaggaaatgcttcctctgtgataaccaagcagactccctctctgttgcctggtatggaaggaagcagtcctgtagcatgtgagagagcatcgcaggatggatataactggcgtaaatatgggcagaaacttgttaaaggaaatgaatttgttcgaagttattacaaatgcacacatccaaactgccgagcaaaaaagcaactagaacgttcacacgatgggaaaatggttgacactgtttatgttg

SEQ ID NO: 51547 - DNA, 645 bp, Gossypium hirsutum
  Clone ID: LIB3543-042-Q1-K6-C8
cccagcgtccgcccagcgtccgtgcgtggcaacgagaaaatattctatatgcatgcgattgtagcaatgagaccctacagagagctaaagagttcgtagctgctagtaatgtagcatcagttgagaatcgtttcaggccattctattgtgattttgcaacaacgggatttccaaagtggttagcttgtgctaattgcagagaaaatcttggacaaaaggaccaaatttgtgtttcagatgttggagaagaaagaacccttgaaactggttcatggtcaatggaagaaagaagctgttgcgttggtggtgttgactttgttaccttgatattcactctatcggcagtaccgctccaaataatgccaacagccctgcgagagtgtttttctgtcttaaaaccgggcggcatgctcttatttagggactatggtctctatgatatgacaatgctgagatttgaaccggaccaaagagttgggttcagggaatacatgcgtgcagatggcacccgttcatattttttctgtttagatactgccaaaaatctcttcaattgtgctggcttcatcgagctagagattgaatattgttgtgtgaagtcagtgaatcgccgaaacggaagagcatgcaaagagtatgggtaca

SEQ ID NO: 51548 - DNA, 637 bp, Gossypium hirsutum
  Clone ID: LIB3543-042-Q1-K6-D2
ctagttctagtacgcgagcggccggcccttttttttttttttttaggtatcaaaatgaacaaattaaaaatatataaattacattgacaatttcattaaaatatagggataaaacttgcaattatcctttttacttttaatgtgtgttattttcctaattactattacaattataacatcttaaaagtatccaatttacatcaataatttttttttataattatttaggtaatttgcaactataaagtaattaattacctatgttgattgaacgtgatacaataaagaatgccttctcttggaaagacaagcttgtaggagggcttaatccctaagaaggttcatttttgggataaatatggaaatggagatagtgaaatgttgatagatccgagtgctgaacagacaacctcttggaaagacaaggttgtaggccaatcttccaaatctgatggtaatggtgtagaggaggaggaggattgtgatttactggaaggagatatccaaaaatctgttgtgaacggtattccttctattgagtttttagatcgagtccatcaaatcctcatcggggatatggaaaatacagtgatattgaaacttttgggtcgcaatattgggtactcgattttgcaaa

SEQ ID NO: 51549 - DNA, 638 bp, Gossypium hirsutum
  Clone ID: LIB3543-042-Q1-K6-D8
gtcccactcccactcccactacaccactactctcctctcgcaagaaaaatagagttctttggttcatcttttggccaattctttaacctcaaactcttgtatttttattttcccttcaataatgggttgtcttcatctctcttccaccttcctttctttcttgttcttgatttctctcctttcagaagtgaatccagcttctttcaagatcgtcaacagatgccgccacacgatatggcctggctttctatccggcgccaacacacctcagcttcctactactggcttcgttcttaaccctggcaaatcaagaaccgtaacgatacccaggtcttggtccggtcgactctggggtcgagccctttgcggccaagattcctccggtaaattcgtttgccttagcggcgactgtcgctccggtcaaatcgaatgttccgggagtggcgccaagccgccagccactctcgcggaattcactttaaacggtgacggaggattggatttttacgacgtgagcttagtcgacggatacaatttgccgatgttggtcgtggccaagggaggaaaaggcgggaactgtagcgccacgggttgcttattggacctcacggcgcgtgtcctcctcattacgtggtgat

SEQ ID NO: 51550 - DNA, 649 bp, Gossypium hirsutum
  Clone ID: LIB3543-042-Q1-K6-E10
tgaagcatttcatattgccactcagtgcttttagctaccctatgaggcgtcattctatccctactagctattagaaaccattcaataaccaagcactaggataaatccatggcgaaaaaattcccaccatccaattccaagtttcaaagtaagggacccaattgtgtctattcacggaacaaggagcaactaaagcctaattttaagacaatgagtagtgcatggcaacaaaaacataataagtaaaagtaaaacaacatagaattcccatatccggacctccattaccagaaatagctatctccccaatgatattcgaattgtcatgcacgaacctaataaaggaacactggtgatccaattcagtaagactaatgatctcagcagcctctaattttattacgaaatgattgaataaaaaaacaatacacaaacttcatatttcatttctttaaaattatgtatttatataaacaaaaataacacattagttagaaaaacatttttatgttccaattaatcgtatttcgtttctataaaataaacctgaagactacaactattgacttaggtttcatataggtaaagttttgccttctaattttcgttcttctaactggaccggtatgcatttctagtagacattgat

SEQ ID NO: 51551 - DNA, 648 bp, Gossypium hirsutum
  Clone ID: LIB3543-042-Q1-K6-E12
gctttcgcccagcgtccgactttttacgaatgtactggcgttactcgatatctgttccgcaaggatgatgatggcctgctcgattacttgaatgaagatggccaatccattgagccttcctggtatgtacctgttataccaatggttctcgtgaacggaagtgaaggaattgggacaggaggggtgggttatatcccgaactataatccaagagatatagtggcaaatgtgaggcgtttgctaaatggtgaaccaatggagcccatgcatccgtggtaccgaggtttcaaagggactattgagaaaaccgcatcaaaagaatctggtgttacctacaccataagtgggattgtagaggaggttgatgagaccacactgaaaataactgaacttccaatccgtaggtggactcaagattataaggaatttttggaatccatcataacagcaaatgattcattcatcaaggaatttaagcaatacagtgatgatagaactgtacattttgaggtcttcatgactgaagagaacatgatgttggccaagcaagagggtttgatgaagaagtttaagctaacaacaactgttagcacaagtaacatgcacttgtttgattcgagagggatgatcaagaaatatgacacccct

SEQ ID NO: 51552 - DNA, 539 bp, Gossypium hirsutum
  unsure (1)..(539): unsure at all n locations
  Clone ID: LIB3543-042-Q1-K6-E4
aaaaaatgattaaatccttttccctattatatatttttgccatccttctcctattcacctcaggtaaagtaaactgtgcagtatgtgaagaacaattggggaaatgtgatgagaattgcgattttaaatgtcaaacttcaaagaatgggaaaggaatatgtgatgaaaacggaatatgcaaatgcgtgtatgaatgcaaggggccgggaactaaaagctgcaatgtgggaataggaccctgcagtgagcattgcagtgatgattgttgtgaacaaaattgtgaatttaaatatccaggggttcaagatggacatggtttttgcttggatattgctgggatacctgcttcaaatcaatgtctttgctatttttattgttaagcaacaatgtattgtctaccatttgcatgaaataaaattatataaaaaaaatttgatttanaaaaaaaaaaaaaaaaaaaaaaaaaaaaacttggaaaaaaaaaaaaaacaaaggaaaaaacaaaaaaaaaaaaaaaaaaaaaaaaaaaaaaggggggg

SEQ ID NO: 51553 - DNA, 640 bp, Gossypium hirsutum
  Clone ID: LIB3543-042-Q1-K6-E6
cccactgccacatgacgataaaccctaccaaaaccctagttctactacacttcttccattccaagctccgccagcttctccacacacgtctgcaaccgcactcctacaaaaagcagctcaaatgggggtgactttgagcaagcccttacaatcaccagtagtatccatgcaaagaccttactactaccaccaccaggctcacatgtgtggttccacaacttttgccacgtctagagctaggggtttgtcggcacgtgaagagttgggaagtaagttcacccatagtttgtcatcttttgggaataaagctggtgtcacccctggtttcttggaacaggtggctaatgcaacaaagagtagtgcagttgctggagccggtgctgcagctcctagttctctactccatgatatgatgacttctttatcttgtacaagtgagctagaagggtcttcatcttttgaacagtctttcaatgggacatggatcaccaaaagaaacagcaataattttcaagaaaattatatcgatcgtcgtaatttctcagaaacaaaacaatcccaatcatgcagaagtgataatcatgaaggtaaaggaagtggtagtagtagtaataacataggagggaacgataggttgaca

SEQ ID NO: 51554 - DNA, 655 bp, Gossypium hirsutum
  unsure (1)..(655): unsure at all n locations
  Clone ID: LIB3543-042-Q1-K6-E8
ctgcacctggnatagcaaatttagcagagcaaacaaataaggaaatgaagcgattacctccaaacaccttcaaaccatgactcaccaatctgccaattagggatagcctttaaacggaatatcggtgactgccgccgccatttggggtttcatttgaagctcacctctttcttttcctttcgcttaatttcaagatatgggtaagcttcattcttcattgcttcttcgtcatattgttaatggtggaaggaacttttctaatttccactcttcattttcttgttattttaacaccatttctccccatatctctgcaaggggaaaccaaaaaaagtatgattgcttctataacgtggatgatgctttgactttgtttaataagatggttgcgaagcaccgaaagccttcagttgtggaattcaacaaattattaggagccattgttagaatgaaacattatgccattgttgtttctatgtatagccagatggaattattaggagtttcctatgacatttattctttcaacatcttgattaattgcttttgtcaattaggttatattgattttgggtcttctgttttggggaaaatgatgaaggtaggtgttcaacctgatgttgtaactttgtccactttgattaatggactttgt

SEQ ID NO: 51555 - DNA, 644 bp, Gossypium hirsutum
  Clone ID: LIB3543-042-Q1-K6-F11
cggccgcgtgggtgcttttggggggggagggcttctgcttgatgaagttactggtggacttgattttgaagctgaaagaactgttcaggaagctctagatctactcatgttgggacgttcaactataataatagctcggcagctttgtctcataagaaatgttgattatataggtgggatggaggagggtcagctggttgaaatgggtacacatgatgagttagtagcccttgatgggttgtatgctgagctcctcagatgtgaggaggctgcaaaacttccaaggaggatgccagttaggaattacaaggagacgtcaacattccaaattgaaaaggattcttcatcagttcacagcttccaagaatcttcatctccaaagtttgtcaaatcaccttctctccaaagagttcatggtatatttcggccccaagatggtgcttttaacacacaagaatcacctaaagctcatagtccaccaccagagaagatgctggaaaatggcttaccagtggatgctggtgataaggaaccatcaattaggaggcaggatagttttgaaaggagacttccggagttgcctaaacttgatgttcagtctgctcagcagcagaaatcaaatgattcggacccagaatctcctg

SEQ ID NO: 51556 - DNA, 219 bp, Gossypium hirsutum
  Clone ID: LIB3543-042-Q1-K6-F8
gggtgatgttatacacctcggaataaatgaggcgattgtggccaagcacataagggcccttttaaatttggcggatgaactcgcgtataaggttgcaagatgaatattgctaccttccttaactgagaaaaactttaagaaaaaaaaatgttctgactattgtgcccttgctatcacacatctggtttgacctttgaaccggaaaactgtgtcaccttt

SEQ ID NO: 51557 - DNA, 440 bp, Gossypium hirsutum
  unsure (1)..(440): unsure at all n locations
  Clone ID: LIB3543-042-Q1-K6-G11
tttctatccatacaaaccaagtgctgcaaatcgaaggatagaccattgacatacctgagcacaaccgtttttgagtgttgctccccggagcttctaagggacttctatttttataatgattatagaaagcantgggatgggagcgttgtttactctttgcaactgcaggtgtacacaacaagtggaattgaaattggtcgcacaataaaaaaatttccacttttaacacctagagagtatatattggccttggagatttgtgggaagcgaaaaagatacaactttatactgtttcatcaaggtgactctcacttaaaattagtctttcatctctggtatttattattgcattttctttatctctcgcttgcttcttcataccatttgacttgattgtttgtttaaaatgttagaagtcactagaatggttcttgacctaa

SEQ ID NO: 51558 - DNA, 702 bp, Gossypium hirsutum
  unsure (1)..(702): unsure at all n locations
  Clone ID: LIB3543-042-Q1-K6-G8
ggccattatcatgctccctctcatcagtctcagggatatttttgcaggggaagaacatcntctgcatcactcactcatactggaagnacaanacnnacaccagnatatttggtgctagccctgcaacataccacatgtttcatccttccctttgataccacgagagatgggggggggggagagggaaagtctgttnnnctcttgatggcctagtacccgatgaggaagaagagtcatnatcaaacccagtgtactnnncttaaagagtatttggacccactgagccttatacctntgtctccgcacccatacccccgtaagcatagccaggatagaaagtgacccaccggtgnnatgatatatcgggactagacacccaccgaacnnttctgagatctnntctggttaacctaccgnngctagcnnatgttaaccatttnncggatttatacttagatgaccaattaccggtnncaggtttnnngtgtctcttttttgtatttctcaccaaagccctccattagaaaccactccagaagtggatgaatgtagaaatgccatgcagtagccctcaagatgtgttctcacnccgaagtaaactgntttttttccttttaaccttnntttcttggngtagaattttaagcagcctggctaccttacttntnnttctgatnnaattttctattcatannnattttc

SEQ ID NO: 51559 - DNA, 617 bp, Gossypium hirsutum
  unsure (1)..(617): unsure at all n locations
  Clone ID: LIB3543-042-Q1-K6-H10
gctttcgggctaagaaccccaatctttttggtgttttgttcttgttttggcctttgggtatcttatttaaacaataataataaaccctttctttagtttttttcttcttttttgaaagaaaaaggagaaaagaaaaatggcactagaagctgttgtttttcagcaagatttgtttgggtgcggcggggaagatctatacagcttgttgggagggaatttgagctatgaagacatacattttcctcatcacaatcaaacatctgatgaagctaataataatttcgttaatggcggagatagttattgggtttcttcttcttcttcaccaacttcaatggctccgccaccaccacctgatgaagctactaataataatgttaatggatcatcatcttcagctttggatacttanactagtcgtcctaagagacgtcgactcaagacccgtaaaaacaaagaagagattgagaatcaaagaatgacccacattgctgttgaacgtaataggagaagacaaatgaatgaatatctttctgttcttcgttctctcatgcctgaatcttatgttcaaaggggagatcaagcttcaattataggaggagctatcaatttcgtga

SEQ ID NO: 51560 - DNA, 636 bp, Gossypium hirsutum
  Clone ID: LIB3543-042-Q1-K6-H12
gcgttcgcccacgcgtccgggggaaattgagggggggggggggcaggcaaagtagtttaccatgaattattactagcattagcagccaccaagcattgacattagtatatcgattcgattctgtttttctggggttgtgtgagtgtgactgaggcgacaatgaagaagctccgatgggcaataggcggggaggtatgggaattggacgcttccacccctcgtacccttgaaggagcggcgcgtgctgttccagggaaggcattacctttgggtttatcaagagggaccaaacttttcaggcctaaccaaatcgatttcatgcaacggttcatggctgccccttttcttccctcttatacccatcaccttggggttacaattcagcgagtattgagcatccctgttagtgagaattggtctgctcttttgcttggtcagttcaacctgcgtaagtttttgtcgtctttaaaggaaaatggaggtggagatggtgtgcataagcgtgaccttaaatcaattgggaagctttttcttgataagtcattgtatgcccttgggttctcttccgaagtgttgttaacccctgatgacactctgcttttaagctctgattcatattatgatcataattcctct

SEQ ID NO: 51561 - DNA, 450 bp, Gossypium hirsutum
  unsure (1)..(450): unsure at all n locations
  Clone ID: LIB3543-042-Q1-K6-H3
cccttttgccgccgctcgtcatgggctctgctgaagtctgctgagttctccatcggtngacggtggtcataagccatcaagnatccagtagtagttgatttggcggtggaatgggggtncgacagnanatgatggngacagaggcggcctgctggtggaggcaggtggcctgccacttgctagggttttgtcttttctgtgtttcttttattacttggttgggctactagggcttttattttttgtttctgggttatggtattgtatttgggccttgctttgttggngctttgggtttaaatgggctctttgtattgggcttggggtagggtttatggttaaaaatnngggcctgggattatttttgggcttctacaattacactttcagcttattgtttntcttttacttntctaacagatacacangacannacttcaattctattag

SEQ ID NO: 51562 - DNA, 624 bp, Gossypium hirsutum
  unsure (1)..(624): unsure at all n locations
  Clone ID: LIB3543-042-Q1-K6-H4
ccccgcgtccggnatccgcttgctgactgctggctcgcctcctctccctcgtcccttctcattccttccttcgaagttcgaagctaaaagataatagtaacagtaataaattaaaaaataaaacagctaaaaaacaggtttatccttcccttaaaaatcactactaaacgagagatggaaaaaaaaaaaaagagaatgaaaaatccctaaacgatgcaagaaacagagattcacgatttatcagatgacgccgattacgccgcgtctcagcaacaaggatcggctagcatgatgcaatgcgaaagtggaaaaagaagctcgtcaaatgaaccggagggagccgaagttgtttatatgaaggataatgttacaattcatcctactcagtttgcatctgaacggattagtgggagattaaagctaattaagcaaagctcttctcttttcatgacatggattccatacaaagggcaaagtacaaatgcaaggttgtctgagaaagatatgaatctttacaccattagggcggtaccatttgctgatgtgaggtctattcgaagacacactccagcttttggatggcagtacataatcgttgttttgtcatctggacttgcatttcct

SEQ ID NO: 51563 - DNA, 631 bp, Gossypium hirsutum
  Clone ID: LIB3543-045-Q1-K6-A2
ccccgcgtccgaaaaaatcaaatcaattcaaatcttttatatacacacaacgctccttttcttcttcttcgtcgtcgtttagcccatggaagaagccgtttcagctgacatggcagtggcacctccatcatcaagggtttcactttcaccattctctcctgtccgtcgacggcggaggaggctttctgttcacttcgccgatctgagccggccggttgtttcttctgctacgcggctggcgagggtttcactccaaggacgtcttgtaaatgccgaggaagccagctcggctcgaactgtaggaggcggtttgggctgcaaggaggccgtggcttgggagctatttagtcctattgagaggttcttgatcgtggcggtgatcggcgtcgcaactgccgagtctaagaagaattggttgataagccacctaagaaaatcggtcgagttgagggatgaggtgctttcaagcatgcagcagaaggtagacaatctatgcgaacagctgaataacggcgacgagaagcccagaactggggctaaaatagaagtaggaactccattgaatgaaacttttggctctgggagtatgaaggttgatgactgtggttgttggatttgctatcaacatcgc

SEQ ID NO: 51564 - DNA, 622 bp, Gossypium hirsutum
  Clone ID: LIB3543-045-Q1-K6-D3
ccccgcgtccgccccgcgtccgccatggcacttttggcccccactcctgcaaatacaccccaggtccctaatctttctgaggatggaggattgggttcaatgctgatggatcttcctgttgtcgaagaagagttgaacatatctgagatggtgagtgctaacattgaaggacagaaatgtgtgattacaagatcgctgctgctggattttgctgagaaatcagaatgccgttccgataatggagtgataataacagacagtagtgcaagcaacgagaagacatcggcattccacaatgatgacatcgactgcgcctctatttggtctatccaggttaatgcaagcacccaggatgaatacgaggatgaggaaacttttgaagaaatgggagctgaatactatgaccatgaagaagatggaggattggtggatgacctatgtaaatgcataagcaagataagcatgacagagatgttcacgggaaagcacacgagatttatatacgatagtgatgatgagattggagaagaagaaagtggagagaattggagtactattcaagtgatataatgaggttgaaggggttgccaacacccaaaggaaagcacctgcgctttcctct

SEQ ID NO: 51565 - DNA, 642 bp, Gossypium hirsutum
  unsure (1)..(642): unsure at all n locations
  Clone ID: LIB3543-045-Q1-K6-D7
gtctttgtctacanaatttgggaccaaactgtaataggctgtaccttgtacaagatgcattcttgctataaatgaatcaactctgccatgaaaaactctcctttcttcttcccaccatttttccttatctgttccttcagtgtcttctccctcctttcccatcaacaaattccataccctatttgtctctggatcaaggtctactctaggtcgtacttttttcttgatagactcaaacccctcataagggacaactgttccagctccattgtatagaacaagtgcattctgcagttctgccttgggtttgttgttcttttcttcaagagtgagacccttgaatctattaatcatctcctcgactggattgagagatacatgttttgctgatggccctgcatattttaccaagaacagttgatgaagtggtggtcagtagaacattttgggaaaaatttgtagacaagagtttcaaggtactacagttgatgaaagataaaggtttgttagtacctcttgctttggtggactgctggttctcagacacttgtttcttttcttgcaccatctttccaactctggatggaacatttctgggcagaccaggttctcttttcttgttttctgaaacattggtatgga

SEQ ID NO: 51566 - DNA, 153 bp, Gossypium hirsutum
  unsure (1)..(153): unsure at all n locations
  Clone ID: LIB3543-045-Q1-K6-D8
agaaaacgngagaaggggccacgncaagcaancaanaagccgggaacangagaangggcnnccaccagagnggncgccacccgggcggaggcagacanggngcgnacnaaggaggaanaccagcgaagaaacagngngacccnggaaaaagcg

SEQ ID NO: 51567 - DNA, 299 bp, Gossypium hirsutum
  unsure (1)..(299): unsure at all n locations
  Clone ID: LIB3543-045-Q1-K6-E3
agaaaaaaacccaagggggnaagnacnncncaaaccccaccacagnanngngnccaanncaaaacganngaagaagcaggggaagggngcangcanggagagcggggcggggacnacgacaccatnaaanacanngaaaacacccgcaacancaaaanngacccccnccgnngnnanggngannnccaggcagncaggaaggaaaaagaanggacagccccaagggggccccaaaanacagggagaagaagncacncnnggaaaaccanncgggncaggagggggccccagnncccacg

SEQ ID NO: 51568 - DNA, 609 bp, Gossypium hirsutum
  Clone ID: LIB3543-045-Q1-K6-E8
cggccgcgtggggcagtaaggaatgccatgatgatggcactttcataataactccttgaactgctctcatacctcatataaagattcttcgtcaagttgctgaaatgaagtgatttaattttggatcttggcagtcagagatggaggaaagtatttcagtaagaaacgttcaaccaactttttccatgtagttatggaacctaacagtagggatttcaaccatgctcgtgctatatctcttaaagagtatggaaataatctcagtctcaaggtgtccttagtcaccccgactagtttaaatgagtcattcacttccatgaatagcagaagaagaagatgtggatcttcagtaggaatcttactaaattaacccatattttgcaatatttggaacatgatcggctttagcttgaatagttgtgccatgatttcgggtctcctaatgctcatatagagctcattgaatagaggaatggcatattgtcaaatggaacaatttgtgtcattagaaacaatgatcagactgtgaatattgtaagcgagtgttcctcctggattttggttttgattttcgaaattatctcttcgatccttttttggttcgcctat

SEQ ID NO: 51569 - DNA, 571 bp, Gossypium hirsutum
  Clone ID: LIB3543-045-Q1-K6-F10
gcgttcggtctgacaccatctttcgtaggggaggaggggaacgcaagcactacaaccactaggttaaaagcgcgcctgcttactacacccttgacttgtatatcatgcatagaaaccggcctccagccacaactatacataatggtggatcttacagaagaagggcctatccaaaactactggagggggggcatgactgtacgaagaccaacgcgatcggactgaatatggggacagaaccgttgacgttgatgagatacatcggattgactaccgttacctgaaagacaacaaaaagaaaagaggtgtattgctgggcacgaatagtgcataaaacagaggaggacggtgaacatgccctgaactgaatgatgcttgtaagggaatcaaactaaattggtgtgatttggtaccgggtctgaacagccaacgcaagcaataatcctaggatactgtagcatagcaaaatctcaacttaatgagaatagtgtgttaaagaaaggccctcactacttccactgagagcgagctgtagatgaactgaagagaacagagctctgagggacatatg

SEQ ID NO: 51570 - DNA, 156 bp, Gossypium hirsutum
  Clone ID: LIB3543-045-Q1-K6-F3
gctaattataattgatatgcacttcctgaccaacattttatgcaggctgtgtcaacggcagctaattcatcataatagtgcatttcggcaggcttttataaacaagcttgtcttgtgattattgtcagagcgaactctatgatctatgttaataat

SEQ ID NO: 51571 - DNA, 638 bp, Gossypium hirsutum
  unsure (1)..(638): unsure at all n locations
  Clone ID: LIB3543-045-Q1-K6-F6
cagtgcccgaaactcgctactatcagctccgatttggaacggagcaagcagcgattccgacggcgtgctcacaggtaagctccctcttttcttttttatttcgagctatttatgaacggagtagtnaaaaaacaaagaaaagtaaagagaaaaaaaagaaattcaaaagccaccttacgaaactctgctcttttttttacttgaatatttttttttgcttcctttgtatcccttctctgtatgcgtaaaaaagggaaaagagagccccctttcagtacatttttgggttttttataacttgaaaacaaaaagaaaagaaaacgaatccaaattccttttttttgtttttctttttctctgcctctcttttttttgtttgtttgttccattttgctgtcgatttgttgtttgctgtaggtacgaaggagtccaactggagtgtacggaggcgcgtgtgaggagcgacacgaaggtgtggtggcgcacgcacgagaggggagcgtgctggctgtgcagccatgcggcgcctaaggttttccagggtttcctgcttctgattttgggctgcgttgtgccttgggcacgggttagatggggtatttgggctagggtctgttgggtctagtattttccgggtt

SEQ ID NO: 51572 - DNA, 629 bp, Gossypium hirsutum
  Clone ID: LIB3543-045-Q1-K6-F7
cccaaattatttttgtggggggggggtggaagaacttattttttttttttttaaataatgccggttattagccttatcacaaaaaagacccgtagggaaaataaatcgacaggctgagaattagccacacatgacattacccacaaatatgtcgagactcgcagaccgggggggggagctttgcttcttccccataacctccacctcacaattttatcattttgcccaattccccgataaaagatagagagtttcgttgtctaaaagaagttttagtaggaaatgtaaatgtaaatactctgtggcacccaccgattttgttgctgaggcaaacaattcctcttcttataaagatagtgatgctgaaattgttcttaaacctgcccccaagccggttttgaagtccgaaggggtgaaaaacgataagggtttgtcttggaatgctgaattgagtgagggtgaggatgaggataaagaagaaaatgagaggaataaagtgattgagtctttaggtgaagtattggagaaagctgaaaagctggaaacctctaatgtaaatgttaatgtgaatgtgaataaacccaaaccagtggtgatggtagtggttcgggtggtggcaaaaaagctaa

SEQ ID NO: 51573 - DNA, 467 bp, Gossypium hirsutum
  Clone ID: LIB3543-045-Q1-K6-G10
cccacgcgtccgcccacgcgtggggtggtgggccccccctttcctgctcttcttcgacaaatccaagagaagcagctcaaccgccattttgagccaagcttcgatttcagagagggtttctccgacgccgcgacggtgggttcaggtataatggacgtggggcgtgggtcgtgcgggaggctcgttggccggacatgcgaggtggagtgcgtggtggtggagaacgtgggtagtagaagcatggaggcagttggaggctagggtcttggctgaaaaatgtttttggggtttgtgggttagggttaagtatttgggcttcaaaattgggtctgtttttggtttaaaattttggggtttaatggtaaatgggcccgggcaaaaattggtacccacaaagaggagatggactatgaactttgtttagtcggtaaattttcggcttaaagagtaatcaattttgcagcgaa

SEQ ID NO: 51574 - DNA, 592 bp, Gossypium hirsutum
  Clone ID: LIB3543-045-Q1-K6-H3
cccaggctaggcgaacacacatactaaaaaaacttttctgtaagaacgaggatgggagctacggatctgggctgcggacgagacgcgccgatacatgcgccgccctaagggtccatgtctgtgaagatgggagggaaaaacaaaccctctccatatcaaggataccaaaacaagaatgctcttctccttttaaaataacccagccttagggataaacagcacatacttataggcaaaaaaatgaagaacaagacagtcgagcatcacctgggaaactgtcaaaattcatggtgtatttgtggaaaagtgttaccatggataagggttacaaatgcaatgtacataacctactgactggtgacataaagaaagaaacatttaattgcccgtatatctgactgacgtactgcgattgacttgccatcatttactctgcattctcgcatatatgcatgggaatgccttctattacatgcactggtgcgatgcatccggtacagaccatacataggcagacgcgtcacactgaacacggtgcttgaggaacatcgaggatggctaaaacgtaattactggccacacgaatgggcca

SEQ ID NO: 51575 - DNA, 645 bp, Gossypium hirsutum
  unsure (1)..(645): unsure at all n locations
  Clone ID: LIB3543-045-Q1-K6-H4
gctttcgggnataacattttgggaacagtggtgttagtactaggggcacttttggtggtttaactgggctgttgaatcttgggaatacttgcttcatgaatagtgcaatacagtgccttgttcatacaccagagtttgctagatactttcgggaagactatcatcaggagataaattggcaaaaccctttgggcatggttggtgaacttgctctagcatttggtgagttgctaagaaagctgtgggcacctgggcgaactccagttgcccctcggccttttaaagcaaagcttgcccgctttgccccccaatttagtggatacaatcaacatgactctcaggagcttttagcatttctgcttgatggtcttcatgaagatctgaaccgtgtcaaacacaaaccttatgtaaactctagagatgcagatggccgcccagatgaagaagttgctgatgagtattgggcaaatcatattgctcgtaatgattcgataattgttgatgtgtgccagggtcaatacaaatcaacacttgtttgtccagtgtgcaataaagtttctgtaacatttgatcccttcatgtacctttccttgccactgcaattcgccactactcggtctatgacaataacaatttttacttgtg

SEQ ID NO: 51576 - DNA, 182 bp, Gossypium hirsutum
  Clone ID: LIB3543-045-Q1-K6-H6
agcgtccgcttatatggcacttagtagagtgagggtctaccaatgtaccaatgtgtgcatattgaaaaagcaggtattacatcaaatgaatttcatttgcttaccagggatatttagattgacccataagactcatataaagtggaaaatgattgtcattttgagatttcttttgttttttc

SEQ ID NO: 51577 - DNA, 536 bp, Gossypium hirsutum
  Clone ID: LIB3543-052-Q1-K1-A12
cacaaacaccgaaagcctattttataatttcacttttttgactatttttccttttttcttttcacctgaaaatgtttcctaattttccatcattttatcaattcgcattcccttttgatccgctgagagaaaatccgccgtcgattttcagatatgtcaagaatgcacatggaaggatttgacaggcatgtcttattacttgtttccaagatatttagcttgatgtgtttgagatggagcatgcattttttggcttggggatccattctttaagttcgcagcaaatttcatattggagaagaagcaaaaaagccagacaacgacctctaagggttgttatcctgatacacaaaagttcagaacaatggagcaagtggaagtgattaagccagatgttgaaaagagagtagaaagaatcttgaagctcatcaagaggaaaagcaggaaaagggagctagaacttattgggcatgttgaggagttttacagacagtaccagtcactctctgcgcaatatgaacatcttaaacgagagt

SEQ ID NO: 51578 - DNA, 534 bp, Gossypium hirsutum
  unsure (1)..(534): unsure at all n locations
  Clone ID: LIB3543-052-Q1-K1-A3
cccacgcgtccgcccacgcgtccgatttagatctacctctaccaggatcagcatgtaagtgtcagggaagagaaaacaaatccggcccctgtaatcaaccttgtggaaacaaccataagccactgccaaggcctacgccacaagcgctaccaccaggtcagaagcatgatgagcaaagcttgttggttactggcttcacagtagtggcaagcatgctaagttccgctcttctactatgtattttctttgcacttgttagattgtattttaacaagaggaccaatcattcaaggagaagaagtttgcccgttgtttttttcggtactcaagatgactntntccttgatgaagatcaaataccacaagtagataaccccatatggtacatcaatactgttggtctccaacagtcggtcattgattccatcacagttttcaagtataaaaaatatgatgggttgattgaagggaccgagtgttctgtttgcttgaacgagttccaagaaaatgaaagcctcaggcttttgcccaagt

SEQ ID NO: 51579 - DNA, 531 bp, Gossypium hirsutum
  Clone ID: LIB3543-052-Q1-K1-B1
cggacgcgtggccttcttacgagccgccgacaattatttctttgtgtttcgtttctcatctgtaaatcccacaatggtgttaagtttcagctctgtaattttagtttcagttttaatactgagttatggagtcaactcagaaccggttcaagacaagcaagctttacttacgttcctttcaatggtcaaacatgagaaccggattcaatggaactcatcaacttcagcttgtgattgggtcggtgtcgaatgtgatgctacacggtcttttgttttcactctccggttacctggtgtgggactcgtcggttccattccacctaaaacgatcggtcttttgaaccgactccgggtcttaagtttaagggcgaaccgtttatccggtaccgttccggccgatttttccaatttgactctgttgcggagtctttatttgcaagagaatcagttcaccggttcgtttacgtctagcttgactcgtttaactcgtttggtacggcttgatctttcttctaacaatttcaccggtcc

SEQ ID NO: 51580 - DNA, 536 bp, Gossypium hirsutum
  Clone ID: LIB3543-052-Q1-K1-B10
gtagccttcaagaaaccttagaaagactaccagaaaaacaaagaaacaaaccaaacaaatcagaaaaaattgcagcctaaactgattggcattcctctccgtctgttctattaccatcgtctatctccaaaaaaacattattgttaacgtccaacgatggatccttaaagaacctgaaaccgtcggagtccgcaaaaatccccttcctacgacccatttcatcctcaaaacagagcccttctatcttcttcggccaccgcttcaactcttgaaggtgcctccttaacccaaatcatcgccgatggccattgatttccttccttcgcaatcgtatgcgccgctcggttcaccgctctgcccacaaaatgacgagaatccccttccaccactagtcgtcggaatcccaactcttcggccaccgtcaccgcttgtaaacaagtcttcgcctcaaccgtggtggcatcggccacaaaactatttgggtaagcacaagtcgccaaaatgtgcccctcactatatctaaagattatcctaaa

SEQ ID NO: 51581 - DNA, 533 bp, Gossypium hirsutum
  Clone ID: LIB3543-052-Q1-K1-B8
cccacgcgtccgcccacgcgtccggaaaaaccaataacaaaaataataattaaaaaaaacctttgctgccgagtggcgctcactggcggcagtagcggcggctgccggaagcaaaaaaatcgtgtagctcatcgtcgtatgtgattgtgagatggggaatccaaagcagaagtggacggcggaggaagaagaagcattaagggcgggagtggccaaatacggcaaagggaattggaaattaattcaaagagaccctgagttaagccctttcctctttgctcgctccaacattgatctcaaggacaagtggcggaacttgagtggtggtcccggcggccatggttcacgggaaaaatcaagggcgtcgaagcccaagccgagctccgacggttcgcagggcgctgttgttgttaagcaaactgcattgcctaaaccacttgttgatgattcttcgaaaagctttgctccaaaccggtacaatgaaatgattattgaagccatatcagcgttgaaagagccaaacggatcagata

SEQ ID NO: 51582 - DNA, 529 bp, Gossypium hirsutum
  Clone ID: LIB3543-052-Q1-K1-B9
gtactcttgttaatctaatatggtattagaggagaatccatttgctttcgcatcttagaaggttgcgactttgattgatgatggcaatttcttagcctagaagaacatgtcttacttgtgattaagacttatcgtcttcggagttatcttgatggtacaatgttggttcctccatttgtggtcactagttatgggggtctaccagtggaaaccctgtttttgctcaatctgagtagtaagatgttgctatctctacgtggctcttgcccactataagtcttactctgcataactggttaattggtgattctttatctacatctatgttgtggtttgattgaaaagaatttttggcagttaatcaacaacaaaagccttgaggtgtggttagagagttcttcaagaagagcaatagttagagattttaaatagccttctgttggagtacgaccatgtggttttcatcatcaccgcaagtcaaacaccatttgatttacaagaaattgcaactgccttgttaaatgcgaag

SEQ ID NO: 51583 - DNA, 530 bp, Gossypium hirsutum
  unsure (1)..(530): unsure at all n locations
  Clone ID: LIB3543-052-Q1-K1-D7
accttctcaaatcggatgcccagatcctcaaaatcctcaaatccgtcacctcctcttcctcttcttccacttccaaacccttaaccctagccgacctggccctctccgccacctgccgggaagtgtccgacctctcactctcctccgtccaatccaccatcgaagccctcgttctccagctcacccaccaaatcctctccggccaaggcttctccttcaccgtgccttcccgttcttcctccaaccaactctacgtccccgaacttgaccgcatcgtcttaaaagacaaatccaccgtccgccctttctcccacatctnctctgtacgcaaaaccactataaaccgcaagatcctctctttagtccatcaactctgtctcaaaaatattcacgtcaccaagcgtgaccttttctacacagacgttaagctcttccaagaccaggttcaatccgacgctgttctggacgacgtttcctgtatacttggctgcactcggtccagtctcaacgtaatcgctgcggaaaaagga

SEQ ID NO: 51584 - DNA, 526 bp, Gossypium hirsutum
  Clone ID: LIB3543-052-Q1-K1-E1
cccacgcgtccgcccacgcgtccgaaccaaccaaccaatcaatctctctctggaaatctcactatttttacactctgaaagatttatccaaaaaccctccgatcgttaaaacccaaacttctcctatttctgttctccaccgctctcttttttttttttggtcatatatgctctcctttttcttctaaaattttctattctctagtgttttgttaattttattttttattgaaaaccctagatttcttttttcttcttctctttgggtctgcttttgttttgcagatagaggaatttggagagttgtagcggtgtgagacattcctgatccaatggaggccgcggccagggtcgccgcctcgcggagcggttcgttgcctatgcaatcatcgtcgctgaaagagtggcgtgccgtttccgacaatcatgtggttcggaaccccggggataatgtgtgattggacagatcaaagttgggacaatctgatgagggaaccttatatgagatgcaacatggaggagagcc

SEQ ID NO: 51585 - DNA, 529 bp, Gossypium hirsutum
  Clone ID: LIB3543-052-Q1-K1-E3
ggccaaatcagtctaacatcttgcctcctactttgcagcttcctggtagtaggttgaaagctgcgttaagtgctcgggatatggacttagacatggaactatttgggttggaaagtcatcatctccaccagcacaagcagctaattgatgagatatctggtatttcctccccaaccagctggaacaatcccttgtctactgcttcagccttttctgcctctggtgaccgaaatggggaattaaataggtttggaggggtgaagcccactagccttgaggatatttttggatctcttgatcctattaatttgccgcaattacagggaaattcacttgacgctgcagctcctcagctgcaatctcccactggattgcggatgcgtcagaatattaaccagcagctccgtgctagctaccctaccaacctagcatcctctcctgtgagggcatctccatcctttgggattgatccctctgggccaactgcagcaacacttttaagttcgaggtcagctgcctttgcaaaccg

SEQ ID NO: 51586 - DNA, 529 bp, Gossypium hirsutum
  unsure (1)..(529): unsure at all n locations
  Clone ID: LIB3543-052-Q1-K1-E8
aaaccctaatccattttcccctttctttttcaaaccctaaatcctccttttaatggccgattcatccccaccaaatggtgttcttcaagcctggaggaatttcagcctcgaaaactcctcttgacttcgatttcaatgaagcaaaaagaagtctacggcgcgtttgcaaggtaagagttacttctttcccttgttatctctttctttttaaaaaaatgcgacaacgatgtattcagaaagcgaattgaaaagaaaaacttagaaaacacccaaatcagaaatcacctgcaatttcggtggcttttctctctatttcaatatgcgtatttcgaaaaaaaaaggaacccttacaatcgaatatcaaaagggctttatagccgaataatcaaaggaaaaaaaataaaaaataaaataaaatagaataaaatacaattttcttctttgttcgtatttgttgctgggtttgtctcgtttgtttgcaggtacggagtacggngcatgcgctggcccttcacgtgaggcgtacgga

SEQ ID NO: 51587 - DNA, 532 bp, Gossypium hirsutum
  unsure (1)..(532): unsure at all n locations
  Clone ID: LIB3543-052-Q1-K1-E9
atcgaaccttctccattttcaaagcaaacaagaggaaccttagagatgctggatccaagtcaaacggtcttccatcgctatcttcttcactgaagcaggcacgccattaacccatccaccgcaaatctgccttcttcggtcttccaacgcaagagtatgagctactccgttaaccattccgggcacaaaaagtcaccttccacgaccagagcttagtgctctttcacaagccagagcttctgctacaaaagcgtcagcaacttcttcgattagataagtttctgctcctacgatttctcctgtaaaatctctagctaaaacttctgttgtagtgattntgtcttctttttggaaagccacatcaaagtttatcttgataactccatcgtctaggggtctccacagatccttcaccataactttaagagaaggacggagattctcttgattaagtttgagctcttgttcataacctcgaataaaccctacaaactctggcaaagaaaatttgaccccttcatggattagttta

SEQ ID NO: 51588 - DNA, 513 bp, Gossypium hirsutum
  Clone ID: LIB3543-052-Q1-K1-F1
cggacgcgtgggcggcggaacatctcgtcgacgtaaaaaaccgccttaaaatcaacggccatgattttaccaccacgtggaaccgtaatatttttcatccttctcgccgtgaccttccccgaagccgttgattccctatccttttctcaatacaaaaccttagtctccctctcccaatctctgctaacgcgcgtgtccaatttacgatccgcacgcggggacgcggatggctcgaaccgcgcgaggctcatcgccgagaagttggagcgatggcaaggggtaggattttggggcgcggcgtggtcggtaggatgggactacgtttggaactacgcctggggtagcgatttggattacgcggaaatcttcggtgtcgcatcggatttgaaccagttaggtaggatgttaggcgagttgactcggtctaactcggatacggagagggctagctgggttgctggaaattacagaaacgccctcgcgatttcgaaacggatttttaatcgccttctc

SEQ ID NO: 51589 - DNA, 448 bp, Gossypium hirsutum
  Clone ID: LIB3543-052-Q1-K1-F5
ggcagcttgattcaaatggccgtatttcatcttctggaacttttactgttctgtcttacaacatattgtctgacacatatgccagcagtgagttatacagttattgtccttcatgggctctttcttggccataccgcagacagaatttgttgcgagaaattgttggttatcgtgcagacattgtttgtcttcaagaggtgcaaaatgaccatttcgaggaatttttcgcccccgagctggacaaacatgggtatcaagctttatacaagaggaagacaaatgaggtttatggtggaaatatccatacaattgacggctgtgctacttttttccgtagagataggttttcccatgtcaaaaaatatgagggtgaatttaataaggctgctcaattcttgactgaaggtgcaggtcaaactacttaaaagaaagcttgtttaaaatggtt

SEQ ID NO: 51590 - DNA, 384 bp, Gossypium hirsutum
  Clone ID: LIB3543-052-Q1-K1-F8
ataaagcgattgaataagaaagtatggtaattaaaattacaagggaaaaagacttctctttttaatgagtagaaggggaaaaattaatcatggcctcgtattgtacccatggtttaacctaaactcactgactcatgggtcttgttttccacatcttgcatggcttaaatcttgagttactactggaactctgcatcctccacattctcttatcccacttcttggtagaacaccatccgctaagactgcacactattatataaatatgcaccaactgcacgatcaacgtgactcatcatgtaatcaggattccttctctcacaatctcactgaaaagcaactcccgtgagttacttaatgcagctttatccatcccgatgcttt

SEQ ID NO: 51591 - DNA, 532 bp, Gossypium hirsutum
  Clone ID: LIB3543-052-Q1-K1-G1
cccacgcgtccgcagctcaatataagtatatgttaaaaaaatagcagaacataaggaagaagagaagaaagaaatgatatttttatttttattgttatttcaaatagaatagattatgataagaaaatgttattttgttagtattatatagtttgtttaatgttatttttatgttttgttttaaagttattttgtttattgtgatttattagtaagttttgtgtttagattaattatttgtctaaagtttattatgatttgtcgggttatgaatgttatgtttttaaatttttttaatatatttgaaagtttttatattagtaactattataaagtaattgttaattagtgataacaatagaaaaaatagataaatactgaaaatatttatgtcatagatatttttagaaatggcaataaatttgatattacctgatgagataataacttcagcacaaaaggagaaacttgataagatgataagagaattgcaagattacagaatgaaaccagaataagatatcgttcaaca

SEQ ID NO: 51592 - DNA, 533 bp, Gossypium hirsutum
  Clone ID: LIB3543-052-Q1-K1-G3
aaaaagtgaaagcagattaaagagagttcaattggaacaacttttagagaaagagagagattgtattgaagcattatagacaaaaagttaagggcttaaaggcagataactatggtgaacgcaattctttatcatcaaacttcaccactgcttctctgccaatgttgttcatcctctcatcctcctcatattcccaggggattgcctggaaagctgacattaaattgctctatcaagagccctcctaataaagttattgcaagtcatattgtttcaggccttgcatctttgatatttttgtctcaaacaaaccaggttcttgctgctgatttatctcatcaccccagcatctgccagcttgcaagtgccacggataatgaactaactctaccccttgaagaagattctggtgaaggaaatggaaagctaatgatgatgagagggatgacagcaaagaactttgatcctgttagatattctggaaggtggttcgaagtagcatcactcaaacgcggatttgcaggagagggtca

SEQ ID NO: 51593 - DNA, 536 bp, Gossypium hirsutum
  Clone ID: LIB3543-052-Q1-K1-G5
gctactaatcgtttgttgtatccaagtcaggcttttgacttgatacattggtcaagatgtagaattaattggacccgtgatggatgcttaaagctggaggctattttgtctgggctgcacagcctgtatataaacatgaagagattctacaagagcaatggaaagaaatggaggatcttactgctcgcatatgctgggaactagtaaagaaggaaggatatattgccatatggcggaagcctttgaacaatagttgctatcttaatcgtgatactggagtgctacctcccctttgtaactccaatgataattcagacaatgtttggtatgttgatttgagtgcctgcatcactctattgccagtgaatggttatggctctaatgttagcacatggcctgcgcgtcttcatgatccacctgacaggcttcaaagcatagaaatgaatgcctatatatccagaaaggaaatctttagagctgaatcaaaatactggaatgaaataatagacagttacatacgtgcttttcgctggaaa

SEQ ID NO: 51594 - DNA, 538 bp, Gossypium hirsutum
  unsure (1)..(538): unsure at all n locations
  Clone ID: LIB3543-052-Q1-K1-H9
cccacgcgtccggaggaattggctttcgaagctacaacagaaggataaggtgagggctttgcgaaggaatgaggcgacgtccaacgttgaaggcggagggaatgacgaagccaatacggacgaagaagctctctccaaaatcactaaacaaaaggccgccgctgccaagcagtatattgagaatcattacagagaacaaatgaagaatcttcaagaaagaagagagcgaaactggcggaagctgacgtctctgaggaagatcaaactaacttactgaagtacttggagaaaaaagaaactgaatacatgcgtcgtcaaaggcataaaatgggtgttgatgactntgaattattaactatgattggcaagggtgcatttggagagagtttgtagggaaaagacaacaggccaagtatatgctatgaagaagcttaagaaatcagaaatgcttcgaagaggccaggttgagcatgtgaaagctgaaaggaaccttcttgctgaagttgacagcaattgtattgtcaaattctactgttct

SEQ ID NO: 51595 - DNA, 651 bp, Gossypium hirsutum
  Clone ID: LIB3543-053-Q1-K6-B10
ctccaccatttcgtgcttctttcaaaggttggcttttttctcactcctatttcctttgtactagaaatttgaagaatgcaaaagacaaattgtcaatgaaatttcaatttcatgttttaattgctttgctttttctttgtagaaactaagcgccattttcaaatcacgcttgactaatttttaacatgattttcactttttgagtttctgattatccttagtttctaggatttgcttcatctcttggtttgaacttacgttaatggcagtttgattataaataacaagtattgttgctgtttgatttcaatttaattaatttagacaggaaccatttttgggtttcttcttttttggttctatcgtcgtttctagatgggaatttgaatttaggattctgtttaattggttactttactcacttcagaaacttcatcgattgaagcaacttgaagagtcttagcaaatgcatggatttagaatcgcagaaagaagttgcatatctaagcattattttttaacttggtttaatgaaagagttatatgtttagaagagcacctagaaagttcatgttggcaaaatggccagttgtcttcatcaatgtatggacaatatatttcggttgcaaaactgacaatgtgcttgtttcg

SEQ ID NO: 51596 - DNA, 512 bp, Gossypium hirsutum
  Clone ID: LIB3543-053-Q1-K6-D12
gcgttcgcccagcgtccgcccacgcgtccgggaggatgaggggggccatgcaaagtctggtggtaatgaagaaaagttcagtaatggggcgactgcaaatagaagatgggtctaaacaatttcctcaagctaggcgacgacaagcttttcctgcatctgggaacagaagtgcaactttccgatggggcgggggtcaggcacccataatcctgtaagacaaattagaaacaagtgtgcatttgaagtgttaatcctaatcaatagaaaaagatgataatcttgctaaaaaaaaaaaaaaaaaaaaaaaaaaaaaaaaaaaaaaaaaaaaaaaaaaaaaaaaaaaaaaaaaaaaaaaaaaaaaaaataaataaaacaagcattaactactctatagggaccacctaatatcaatttcatattgccagaccttttacaaatttcaaaaaaaggaaaaaagctgggcgttcccaggggaaaaccctttgatgccccccccctaacccccttgggtc

SEQ ID NO: 51597 - DNA, 657 bp, Gossypium hirsutum
  Clone ID: LIB3543-054-Q1-K6-C10
gttaagcagaactgtacaaatgttgaaaggtgaggagaggttttggaaatgatagatcttgtacactatgtagcataaaattagaagactcattacatgccatttgtgactgtgttaaggccaaggaggtttggttgcaagtaatccctataggaaaacaaaggggattctttttaggtagcttatatgactggtttgggaataatttgcaagataaatagaggctgtcattgatggatctagaatggacgagtctctttggcctccttgcatgacgcatatggaagaacagaaatctctttattttcagaggtacgcgatgtagtgctaatgagattatcaaaatatcttatagttggactaagtaatatagattagtacagaatagaagtctgtttaaaagccaacaagtaagaatggcgactcgttggaaggaatcatgggtccaactaaatacagatagtgtcgttaagatggaaactagtaatgctacttttagaggagtcttacgagatcatgaaggtaaatggattttaagcttcaacagatggtaggaaaaatgttcagtcttcaatacagaattgtgaggaatctataatggcttgttcattttgcaaagtcgaaatatgagagagtgttgatccaaacagacagcat

SEQ ID NO: 51598 - DNA, 365 bp, Gossypium hirsutum
  unsure (1)..(365): unsure at all n locations
  Clone ID: LIB3543-054-Q1-K6-D12
naaatctcagctggctcacccggggaggggggcgcttctactcggtgggggtgtatatactttcttggataggcttttcccagctactacgatggccatgtaaaggaatgtcattctctgtgatcaaaataaacacgaggtaaaattgaactacaaacaattatacataaatgggggggcaacgttatcagtatttcatgttctttctcttttacagatcatttgattttataatgaatctctcttttacaaatataggtaattaggcatcatttgatattttatatattgtggttttgattatgctaagaagctgtaaggcttgatattgccattgaattgcttataaagccatagcatgttct

SEQ ID NO: 51599 - DNA, 637 bp, Gossypium hirsutum
  Clone ID: LIB3543-055-Q1-K6-B12
cccagcgtccgactgtaacaaggggtggggggcggggggccaaagaaatatgctatgccctaatcagatgatagaaatggaccagcaaggccaaggatatctacatcctgagccctgcatctttatgggtggcaggcctaattacccaccacctgatatccagatgggagtcgcgggggcagggaatgctactagtcttgatactcatcccttaccagagcattatgacagtggtatgttctatgggttaccccagtacccaggtgttcagcatcataatcattccccaaatcttgatcttggtattggaagtgcatccaactattacatcccctatgtggctaacccttcgtcaagtgctcctgtaaatcatggaccggcagaccagatgccatcttcaagcaacttcaacctcctaggagtttctgcaaatgaatatgcaaggaattgccacttcatggataatgttaggggctcgtataagagaaagaattctgaaggagtcccaggaaattttcagcattttaatgcctcatcaagctctagttcctcagttacaccattaagttctagacatcccgatggagttgggacaatggatggtgcatccttcaacattcctcagtatagggggaat

SEQ ID NO: 51600 - DNA, 642 bp, Gossypium hirsutum
  Clone ID: LIB3543-055-Q1-K6-F12
catctcttaccttacaccctagggggggggggggggtgcaaattttgcatataccggaatcgaactccaagtgatcgataccgtgcttattcgcatctttatgccatggtggtctgcaaatgccgcaaggcgacaaagttatattgtttcgtgcacaaggttcctgtttggggggagggcgtatgctttcctgagcaccaaatatgcgtgatacgtacttactcagaatgggtaatagatggagagtatgactggcctcccaagtgttgcaagtgccaagccatttttgaggaggaggctggctctgaaaaaactcggttgggttgcttacatgtcatacatacaaattgcttgatttcacatattaaaagctttcctctgcacactgcatctgctggatacgtgtgtccttcatgttctacatctatatggcctcccaagagtgtaaaagattcggcatcccgtcttcattcactgctgaaggatgctgttatgcagactggcatggagaagaatttgtttggaaatcatcctgtttctcttaatacacctgagccttctggtcctcctcctgctattatgcgatataatgggaattcatcagcctctgtggccaaagatgaaggatactcatcggttgga

SEQ ID NO: 51601 - DNA, 661 bp, Gossypium hirsutum
  Clone ID: LIB3543-056-Q1-K6-D11
cccagcgtccgccccgcgtccgcccagcgtgcgcccacgcccgtccgtaaaaaataaactttcatagctacttgaaattatccttagttgtttagttgttggaaggaaatatggtagtgtggaattgcatgtctaggaaaggttctggttgaggaaacggttggtatttaagagtgtgcgttgtgacctatctttttttcctgggaacctacctgatgcatttttcatgaactactttcacgattccaatatttagttgtgagacatttgttgacaagatgacagacccacaagttgttagcgaaatgaataagcttaataacaattataatacatggtcaacttgcataatgtcttgtatatgagaggttgttaatggcagtgaagtgatgcaaccgaaagctgaggatgcaagtggcgcactaggaaaatggaaaataaaagctggcaagacaatgttcgccttaaagacaaccatttaagaagatgtgttagaatacatatgtgatgctaaaatcctgaaggaagcttgggatatgctccccaagttattctctaaaaggaattatgcgaagctctaacttctaacttaccagtagcacatgttagtaacacaatagtttcccctcaacataataagatcaaggtagcacttcaaaat

SEQ ID NO: 51602 - DNA, 624 bp, Gossypium hirsutum
  unsure (1)..(624): unsure at all n locations
  Clone ID: LIB3543-056-Q1-K6-D12
cagccttgaattgcagtgcatatgggcggggggaggagaaggaattgacggcgtgcttgaatttagcaacagatgagaagaaaagttagaagaggagtcccgagactacagtgaaaagcttgctgaagcagaaaatctggtggagatattgagggatgatttaaatatgacacagcagaaattggaaagcattgaaaatgatcttaaggctgctggtttgagagaaagtgaggtaatggaaaagcttaaagctgctgaagaggaactagagcaacatgtaaaagtattagagcaagctagtgcgaggaactcagagctcgagtcattacataaatctctatcaagggattcggaggttaagctccaagaactgatggaaagcttcaccaacaaggattcggaggcaaaatctctgtttgagaaacttaaatcgtttgaagatcagctaaaagtttatgaagaacaggttgctcaagcatctggacaatccgcaactctaaaagaagaattggatcagagtttaaagaagctggcttcgttagaaagcacaaatgagcagctcanaaaagtgatgttggaagtagaaaataaagctcttcaatctacctcggagaacgaacttct

SEQ ID NO: 51603 - DNA, 600 bp, Gossypium hirsutum
  Clone ID: LIB3543-056-Q1-K6-H12
gtcttcgttatggtcatcatgttgaggaggggggtgggggaatttaaaatactgtctggaaacgtctgaaactagccggctgctgttgttaaacgacagcgtttttggaccgtgatacccgagttgagattgagacggtgctgacttttcaagaaaacgcgttcgttgtgccgggggggggtgtgatagattttcttcaccaccattttcccatttgttgcaaccttgctttttttttacttttatcaaagactgttcttcattatttctaaattgatatattttatattattaactggtgcttttatatatttcatgttcatatttcttctctttctgaaggactatgtagacttctttttttctttgtctccgtggccgttcttgaatagatttaactagcctttcggagggtttgggtgatctatgcaaaaagaaaaacatggctgactcaaaaccagaccaacctttgatgccatcatcatcaacgaacctacctgattttaagaaatcagttaagctaaagtttgtgaagcttggataccattacttaatcacccacggaatgtacctcttccttacccctcttgtagttatcat

SEQ ID NO: 51604 - DNA, 574 bp, Gossypium hirsutum
  Clone ID: LIB3165-002-Q1-K1-B9.9C0
cctttgatgctccagagaagagggggcagccttcgaagatcccgacaaaacagaatactccgagaggctttgaaatgggtggtactacggatgccaaccgggggactcgggggtgttccatttctgtggacacggctctcgacaaaaagattacacccatgacaaagttgacttttttgacgaaacattgcgccctcttgatcacgaacccgaggggaacataatcgacgacgaaatcaacgaccccatcgtaaaaccggtgactcgaggaaccacactgcacgcgatcatcgatgcctgctacagtggaacagtcctcgatctccctttcgttggcaggatgaacaaggaagggcgttatatgtgggaagatcaaagaaatcctctattttacaagcgtactagtggaggattagccttttggtatagcgcttgagaagaacatcaaacctgtgcagataccactgttttcacaggaaccagtgtgagaaccggcgcgatgacatatagcttcgcacaagcgattcaaaatgaccggaggttgacttatgggcatttgcttaatgcagtgcgt

SEQ ID NO: 51605 - DNA, 803 bp, Gossypium hirsutum
  unsure (1)..(803): unsure at all n locations
  Clone ID: LIB3196-057-P1-M1-E3-F24
gggtgcggctgatccgggcactgctaatcttcgcccaactctactggctctgtgttgcattccttgcgtttgatgttatgtttgttgtcatttgcgtagcggttgctagtcttattggtattgctgtttgttgctgtttaccttgcatcattgcgatcttgtacgcattagcagatcaggaaggtgcaccggatgaagagatagagaggcttttaaaattcaagtttctcacagtaaagaattctgagaaagtgaatggcgaaatacgggaaactcaaggagggataatgactggattagataccgagtctcaaaccgaacgtatgttattaagcgaagatgctgaatgcagcatttgtctatgtgcttatgaagatggagtagaactaagggagcttccttgtagacaccattttcacagtttatgtgtagacaaatggctaaggatcaacgctacttgccctctctgcaaattcaatatcctcaaaaatggtgaacctagtggcagtgaacaagtgtgatgaggagaaagattttgctgttcaatctttgtggaatgtgatgagctcatcatcatcatttacttcaaagcctgtttgttcttttgaccattacagaggaaagaacaagaaagaagaccttgagatttgttttgagatgaagctgcacatcttgtctttntggatatgatatttgtaaatgcaataagtatatatagttcgggttggaagatgttattcatcgagtcagttgtgattttagcccgtttggtgtttttaagcaacggattaattagattatgt

SEQ ID NO: 51606 - DNA, 127 bp, Gossypium hirsutum
  Clone ID: LIB3582-058-E4.F4A
gaatttcctgcccagatgcctgtttttgctgcctggacagattcttagattagacgttttggggtactgtaccccaaaacccgcgctttcgctctactcgttcgcggtctcgtgggtggactccaaa

SEQ ID NO: 51607 - DNA, 550 bp, Gossypium hirsutum
  Clone ID: LIB3582-058-E4.R4A
tctgtggcatggaaattgcaggcctgagctgagccgaagaatccaagaattacagtatttggtgaagtagtgaccaacttggacgtagcaaggtgcaagcgttgaaagcaccataggtaacctgaccctttttgctctacaattctcttggctagatcaaacatgtcacccctgaagaaactgacaacatttgaactggtcatatctatgttgaatcctaccattctctttgcaccaaacaacaatttatggcacccatgataaaaactgatccttaataatctcatataaacagcaactgccgcatcatcatatgaaagattaaggatcatgcttcatcattggcgccctacaccattctttgccacagagaggatgatgattccagcatgatagggactactcactaggttcaaagctaccatcattggccgactatgtttgagctagctctagcaaaaggctagcaccagaaaagaagcagtgctacgctcatggagtcttgcaatgatctccatccacgcatatgtccaaagttggtcactacttt

SEQ ID NO: 51608 - DNA, 319 bp, Gossypium hirsutum
  Clone ID: LIB3272-056-P1-N1-E6
aaaaaggttcgataagagattaaaaaattcacccgtaaaagtctttgttcttatttaaaggactattttattatttttataacataataaacaaaacaataataatctcatttatttttttaagaaaaatcatacctaaaaagtttgcggtggagccttagcattcacgggaaccttaccgtcctgatttagcgccgcgacaccacctgctgttgccgccggtgccatcgcttggcatggtgttaccgtgtaataaacctgtcttcctgtcccatcggaagccacctgtacatatcttgactcaggaaccccacccttg

SEQ ID NO: 51609 - DNA, 391 bp, Gossypium hirsutum
  Clone ID: LIB3272-056-P1-N1-F12
aacaggataaggaatctgtatctagttattagaatgatctgagtcaatatataatagacaaaatcgacaagtaccgagaagaatgcagatagcaaatacagtatagatcacaactccgttttcaccattaaaacagaatcgggttcgtgaccatgcaccctcaaacggtaaatgcaggtatgtgaagcacttccatggttggaagaaaaatccagcctaactgtgtcaacaattccgatacctgctgtatccaatacatcaaaggtctgagcattactcttctcaaggtcatacgtgaattctgccaaaagaaacatcttgtcggcatcaacagtgacatcaagatcacggccttgcagccagccagagacgcggcaatccttgggtgcac

SEQ ID NO: 51610 - DNA, 404 bp, Gossypium hirsutum
  Clone ID: LIB3272-056-P1-N1-E8
cgtccttttttttttttttcttccaatccccgaccctggttatttaaaacacaataaatccctccattttaacatttaacccccacaaaaaaacttttatctaaattgcttaaaaagaagtctctcattttaaattgcaaaccacctacccacaacaataaaatccatttttaacctccatcccaacataaaacgttattaaacgcagcttttcttctgtttccccacttccttctcgccttttacaacctggaatttccaccttcttttaaggcttacacccattgatggtctaagcactcattcttgtaacaacacaaggtcccatgtttgatactccccttttgtgttcgaagaatttttttccctccttctcagtgtaactaccaacacggtatggaccc

SEQ ID NO: 51611 - DNA, 377 bp, Gossypium hirsutum
  Clone ID: LIB3272-056-P1-N1-E9
aaactcaaaaacattaataagtaatatgtattttattttaaaatatattatacatatttaaataatacaacaattttcacacctatattttaattgagtctcttatttgaacttcaacattattcatctttagcaatgaaaaactgtttgactaaattaagaactagtggtgagatatcgtagaattccgttggtaatatatgtgccagaagaaggtcgagcagtgatgtaataatggccaacgtttacgtttgcacacaacagaacgtcaacaacttgggcggatgctagggttagagaatttgtaaaggaacgtttggtgtaagccccattttgtccgacaatggtgaagctgtgggatgctacgccaaacacca

SEQ ID NO: 51612 - DNA, 359 bp, Gossypium hirsutum
  Clone ID: LIB3272-056-P1-N1-F11
aggccatcaatatttattggtcagataaactttgagaaatcaggccaaaaagttgaatatactttcaagtgtcccagatcattactacagcgatcaccccaacacctaacaagacagacaaaaacttgtgatggggtctgtcaactgaaaccatcttctggggtgcgtagcctttagccagcagatggtttatcgatacgtagatgaacactccacaggctaaccccattgatatggcaaagatccagtctgctacagcaccctgagttgtggcatctattacgatcccaatggctaccccaacaggacttgaaatggcaaatgcaaatgcataggcgatgcacgacaacaatggacga

SEQ ID NO: 51613 - DNA, 382 bp, Gossypium hirsutum
  Clone ID: LIB3272-056-P1-N1-D7
aataataataaagatcttttccattaatttagcagaggaaaatattaattacgcaaaaaaaaaaggtcatataaaacagctaagtggctgccataggttagtagtataatattccctagttcatgtaagtatcgactcttatatgtcagcctgtagcatagacaatgattctcaacccactgggttacttcaatggaaatgcaaaaccttcaaaactatgagcataatccaccatccacttgctcttctagtttataaaatatgttttatactaccttcacggtctagatatagacctcttcccgcgttgtcgcttgcaagaaccatttccagaaccctgtgatttagacacacctgaaccggaagcaactgacgtagggtc

SEQ ID NO: 51614 - DNA, 329 bp, Gossypium hirsutum
  Clone ID: LIB3272-056-P1-N1-D8
ggaaatatcttcatcgaccacattaatatctaacttccaagggacatagggaaataacggattatagtcaactcataaatgaaaattaaaattcaaaagacgaactgcttgaaaataattaggtcttctcatacaacggaaaacatgttctgctccgatgcgctctgttcaatcttttaactgaataagccattgagtgctgcgcctacccttattgaaacccgaaaccccccaaataaaaaggttggtaacttcaagcctagattcttggagacctcaaaatgatattcctatgaagaattcgacaccaacccgaatattcaccttca

SEQ ID NO: 51615 - DNA, 111 bp, Gossypium hirsutum
  unsure (1)..(111): unsure at all n locations
  Clone ID: LIB3196-040-P1-M1-G1
tttaattttctcgatttacgtcgaatgctttgagttaaacaatgtagtggggtggtgttctggttatgacttccatcatgatgcncnggctaattggacaggccgtgggac

SEQ ID NO: 51616 - DNA, 387 bp, Gossypium hirsutum
  Clone ID: LIB3196-041-P1-M1-A1
acgcctggccggccgggtccggtactgcaggtgcgacccgagcgtcgcgtcacgcgttcaactgttcggtctggagtccttgctgtgaaagcactgcatgtgccgagaccagggacggagactaagataactgttaccgacacgatcggcgatcgtgtcaagaccatttatcgcagtgaggctagactcccgaactgggaatgatccatgaccaggcaggtcggccgcaggctcaagtcatattgcaggcactacctgagcttctgctggtgcgagccacagacactactggtggtttgctggggaacatgcttgatacatgcgcttggacagcatgtgatgctgcactggtgctgggctagagtcgaaagggctcatatgtgtagg

SEQ ID NO: 51617 - DNA, 376 bp, Gossypium hirsutum
  Clone ID: LIB3196-047-P1-M1-G2
atcaagcgtgcgcagaccttgtgttccagacaaagttgattacctaaattaacaaagaaactaacttatgttcctatataaccattaatccataaattaacaaagcaactaacttcattacccagtccatgatttccagacatgccattatttaacaaagctcaaatttgactcaattgatagctcgaccgagttcgagtctttcttcaagtagtttgcaagcacctttacacccctactatagacaaagcaaaccatgacatttcatattgagaattcctattgctgctaaatgaacaaggaagaacaaatctaataataaccttaaatagtatcaatcatatcagacacaaatttccaatagaatcaaaataaa

SEQ ID NO: 51618 - DNA, 424 bp, Gossypium hirsutum
  Clone ID: LIB3196-005-P1-M1-D11
tcaccgacccggcctgactggctggaccgacccatgcgtccactcgttccaccggctgatgctgttggccatggaagccacgttgcatcaattgccgctggaaatgctggggtccctgtgacagttaacggcttctattatggacgagccagtgggatggcaccgcttgcaagagttgctgtttataaggctgtctatccaacggtgggaacccttgcggatgtggttgcagcaattgatcaagcagtagcagatggagtggatatcttaacgctgtcgatcggaccggaggaaccaccacaagatacagtcacattcttgagcatttttgacatagccatgttattcgcacgaagagctggggttttcgtggtgcaggctgcgggaaactcacgtcctggtccttcgacagtattgtcttaca

SEQ ID NO: 51619 - DNA, 239 bp, Gossypium hirsutum
  Clone ID: LIB3196-032-P1-M1-E12
cgggttagccccacgcgcccggctctcttttaaagcctaacatggaccccccgtgttcccactccccgagggtcgccccagaggttattgatgacaacactggcggctctgtagcagaccacccctgctgcagaacccgctattatggtcttgtttgctgggggacaaagtgaggaggatactcctcatcaccttgacgcgacaaacatcctacacacaaaccaacgatactctctttc

SEQ ID NO: 51620 - DNA, 368 bp, Gossypium hirsutum
  Clone ID: LIB3196-033-P1-M1-H5
gggatccgcggcatggtccaggtacctgggttccacccagctggtatgagaacggaacccgcccaccatcacacgcatggctcatgcccgggaggccatggaccgcgtcaaggcccccgacggggagacccagcccatgacggaggtggacctgttcgtctccaccaagaggatcaaggtcttgacagcggattcccaggaggccatgatggaccacgccctgcatactatctcctacatagccgacatcggctgcgtgctggtgctgatggcgcggcggcggctggcgcggaggccggccccccaggaccacggccgtcgcctgtacaagatgctctgccacgtgttccacgcggaggacgcccagc

SEQ ID NO: 51621 - DNA, 334 bp, Gossypium hirsutum
  Clone ID: LIB3272-060-P1-N1-H6
gcgtggggaaaaaaaaaatgaagctcacaataaatttatctgcaaatccaatttaaggcccatgagttcaatgcaaccactctttcaaaagcattaacaacaaattatgtttcacatgccaaattctttttcttcaaacaaataaccatgggtaaaaaatgaacgaccccaaaaatggccaacattttccgtacgtcgaaacaaaagggcatgcattcaccattgagcttttttggtgaaagctttatcggcatttcccttttttggggaaagcaagtgctttatttggtccgcttcctaaatttttgttgaatcccccggggccgccgttgaa

SEQ ID NO: 51622 - DNA, 302 bp, Gossypium hirsutum
  Clone ID: LIB3272-060-P1-N1-H9
gccccctgaaattcattcatataattatgttgatccctccaagaactctgaacgatcaacatcagaaacaacaataggttactctacagaacatgttttgacgaaataaaacgaatttttgataagcctatatattagaaacaattttgatcaaacactcattagtttatcaatgcttaatccctaacagtgcccattcaaacatgccaaattatattaactcatatccatctacttcgatcaaaactatgaatcaaaccaagttaagattccaccttcagtcctcaaaatctccaccattt

SEQ ID NO: 51623 - DNA, 378 bp, Gossypium hirsutum
  Clone ID: LIB3272-060-P1-N1-G8
aaatcataaatattgattaaatatatctatggactctcattggaattgtagtcccggaaccattattttcgacaccactaaaaaataggttgttacacctgtagaacctatattttgcccggccttacaaaaattaaaaattaaacaaaaaataaaattaaacagtccatttaagtccttttacagaacccaaaatacaaacccactaaccactgcccaaaaactaaaacccaaaatcaaacctaaaaattctacccgtgaactataacccaaatacccattacacccatacctaaactcacaacccaaatcaggcccaaaatacccttttgacccaacaaacaaacacagcccaacttggccaactggcttaagggg

SEQ ID NO: 51624 - DNA, 319 bp, Gossypium hirsutum
  Clone ID: LIB3272-060-P1-N1-H10
tttaattttacgaacggggttttttgggaaacgtcaaatcgatggaacagcacttttaatttttttttcaaaacagaacaaaatttatttgcgcagcgggaggcttctttgaaattagatatttttcgtaattaggtacataagcaccgacttatgggtgattatgaaaagccttttctctgggatttaaagacggcttaaacatgcgtttatagttgcttaaggacaaaaaattagggcacttaataaataacttgagacttgatggaaaagacaggagcctatttagcagtttccaaatcaatgccctgtgtttgaa

SEQ ID NO: 51625 - DNA, 264 bp, Gossypium hirsutum
  Clone ID: LIB3272-060-P1-N1-F9
aatcataattattgaatatttggttaaaatctttaaaaacccatattatttaaaatccaatatgggccaaacgaaaatgtataacaccaaccctaaaataaataaggggttctaataacattacaaacggccataaaaaacacaccaaataaaaatccattctaaaaacttttgatgggggcaaaacgacccgaaatgcaagcaataaactaaaagtcaaaatctatttttcattgcctagaaaaagctaagggcagctgtaat

SEQ ID NO: 51626 - DNA, 217 bp, Gossypium hirsutum
  unsure (1)..(217): unsure at all n locations
  Clone ID: LIB3272-060-P1-N1-G1
cttgttattcttttgggttactttggggttttttnnnnatgcccctagattgaacgctcttttatagctgttcttatataagtccttaaaacatataacatcctatcggggattcgatcttgtccagaagctggggtttattctttacattaaaggcggtcatccataagtgtttccatgtgtatcaaagtcccacaccgcgttaaaactaaaaccc

SEQ ID NO: 51627 - DNA, 217 bp, Gossypium hirsutum
  Clone ID: LIB3272-060-P1-N1-G12
ctgggggcaaacaaattggtgatttatatatgtcgcaaggattttacccttattttttaatcacaaaactagccttgttaaacaaggtatttcaccatgtaagggccttcaagctcataacctaacttcctatagtaatggcgggttcctaccccaaatttaacagctttttttggtgatctattgctcttgctcgcaattcggtctggttttttca

SEQ ID NO: 51628 - DNA, 321 bp, Gossypium hirsutum
  Clone ID: LIB3272-060-P1-N1-G4
ggggaaaaacaacaaaaggtttttcaatattggacggggaattcgaagaaaacaaattttaaacctttaccctataaaattttttaccccttagctcctttattgtatggaaaacaatttaacttgtgggcccataactttactgtcattggaaagcttgaagggttcaatcttaaaaacaatgcccggggaatccttaagaaatttttaggggtactttctaggttaattaattgcggccggagctactaaaaacaagttattgcaaccaatggttggaccaaacgatttctttttacaaaaacatccatggaagtaaaa

SEQ ID NO: 51629 - DNA, 363 bp, Gossypium hirsutum
  Clone ID: LIB3272-060-P1-N1-F1
gcgaaaatgattgaaaacctgtttaatcttattatttgatattttctaaataaatatcgaaaaataggacataaagaaaaaggaaatgtttctagatttgtttctggagattgtaattgatggttttctcaaaccactcacccttttcaagatatttctcgtaaaagccgacttcttcaccagcagatatggtcaatgctatagtactccttgtgccacaaagccccagtggagtgtccgtttcaacaaatatggagctaagctcgaattcccaactccagagcacaaatgccaggtaacttgcttttatcagctttaaacttgtcttccatgagtttttcaaccattttcttcaccattact

SEQ ID NO: 51630 - DNA, 383 bp, Gossypium hirsutum
  Clone ID: LIB3272-060-P1-N1-F12
gagatggaatcaaatgacttgtattaatgaaactgattacaacgcaaatacatgggctatctttcatccttgagccaatattgtatcacatatgtaagaaagcctaggccaaattcagcacaagccaaaagaacaatgacccttacccacagcgaggagttaaatgcttgcaaaacaacagcatgccatgacaggttccataaaactgagaaaatggaacctaccacagcacccacaagaatttgattcatcgtatgaagcttttgtgacactcgaagccatgaaagatatgaaccaaatgccagagccagaacggaaatgcccaccgaaagttcattaattcctagccattccaataatgaagctatagcgaagacgacagt

SEQ ID NO: 51631 - DNA, 328 bp, Gossypium hirsutum
  Clone ID: LIB3272-060-P1-N1-F5
accaaacacccaaaggctctactggggggaacagcaactttcgaatagacgaaaccacattttgccggggcttttccagccatgcgttattgtccattaacatatgaaacgcccaactttatcatcatataacattggacctcccactcccattatggctcaaacgaggatcttaaaaaacaaaaggctaatgctttacgtctaaagataaacacatgcttcttgtaagggactgatccacactgatcgaaattaagcacgctctgccctgatctctacgagccaactcgatgtcctggggcataatggtgacacgcttggcatggat

SEQ ID NO: 51632 - DNA, 359 bp, Gossypium hirsutum
  Clone ID: LIB3272-060-P1-N1-D12
tcgcgatctagaaccggacgcgtgggtctatcctcaatttcctttgaaaaaaaccagcactttctccttttttttcctaagaaaaagaaaatttacatttgactcgtcagatcatggaactcatacctggtcttcccaatgatatagcccttcagtgtttagttcgtgtcccttacaacaaattctccaatatttcatcaacttgtaaagactggaaggtcgaaattcattcgcctccgtttttccgtcaacgaaaagccgctgggtgtactaaacatgtcatgctgatgacccaaagccgagtcaacccgaatcaaaattcgggtctgaaatgccatgccatgcctgtttatcggatc

SEQ ID NO: 51633 - DNA, 319 bp, Gossypium hirsutum
  Clone ID: LIB3272-060-P1-N1-D3
atctttctccctttttttttgatcacaaactgttttttttcgctgcaaaacaacgatctaattccccatcccccgaccaagggacaaattgagtaaccatcacatcacctttaatggatagaactaacaacaccaaaatttcccctgcactccttacctcctatatgatatagccaagaccacactcattttgcctacatattaacaacattactataatgctcacatcaaattcatatctcaatatatatttacattgaccaccctactaatccaacctacttgttttcgaacaactcaacaccttcaaaaatatact

SEQ ID NO: 51634 - DNA, 241 bp, Gossypium hirsutum
  Clone ID: LIB3272-060-P1-N1-D4
acaatcataaaacgggattaattggtagtaaacttgtaagcaaccaaaacctcactacatgtatacgtgttcttcaatttaatgcaaccatgctgatccacattcacaggttaaatgatttatcttaactgctctgacaggccataagccctagctggccctgacacacccgctcacagagcttgaccgggctgaccaagctttcgcatataattccttctttttttgaagcgggctgtgg

SEQ ID NO: 51635 - DNA, 308 bp, Gossypium hirsutum
  Clone ID: LIB3272-060-P1-N1-D5
aaacaaaaaaaaaaattttttttttttattggggcttaaaaaaaaaaacagaaaactggcttaaatggggcttatttaaacggggggtttttctggttcaaattacaaacccctttcccacaatttcgggattgtttttttttaaaaccaatgtttaagggaaaaagagtttggcaggttcttactttgggaaaaaccatggagggtcacaaacaaaggggtttaccctcctaaactaccatttttatttattgaacctaccccccgccgaagacatatattggaacataaacgggcccccaggggaa

SEQ ID NO: 51636 - DNA, 373 bp, Gossypium hirsutum
  Clone ID: LIB3272-060-P1-N1-C2
atggtagaaatatgaaggagatctgaaactaatgcccccatcaaatttatcactcaaaataacaacaattagcaggaattaattgtcttaaagttgctgcatatgatatgtacttatgtggttttacagtttttaaacaaactcctagtgactcgactttgttcaagtattcttccatccgtaagctcaaaaatggagcaattagggtaacatgaaaacaaaataaaagatctcagaatcgccttttgatgaagtctgatgatcctagtcggtagcttgtatataaagggtaagctaatctcacatgtatatgttttagaatattacttgttcaagcaacctgttgtctggtaaccggttgcaatttaccatg

SEQ ID NO: 51637 - DNA, 280 bp, Gossypium hirsutum
  Clone ID: LIB3272-060-P1-N1-C3
gacccaagaaggaaccaaacgtgcaataacccagttacgaaattacaataatactaaaccgatcttacatcccaaagaagataagaccaacattaacaatggccccttctcaaagccaaataccatgcccaaaggccattaaacgcttcccaagtttatttaccaagcttgacttaaaccactaaccctagccgccaaaattcagccttcgctaaccttttactgagagccattcatttgccacgcaacctcataacatataccgttccaagaatggaac

SEQ ID NO: 51638 - DNA, 379 bp, Gossypium hirsutum
  Clone ID: LIB3272-060-P1-N1-C4
gggtccaaccaatccaagattccttcattagtagtggggaatagaatcccaacagaaacaatattccacaggtgttacagataacataagagtgaagttcaagcgtaagaattcagcatgcattgcccaaaagcaataaggcatatcacacaagcaagaagcatctatcaacaacatcacaagtgaatctctattctaggcattgtttttggtttagactcctatataccatttattacattaagtgttaatgttccattttaaaggtgcttggcaaagatggactccacaactcctcgagctatggggtgataacactcacgagcctccgaaaacactcgtttggccaaaatcttatcttcctctttccctttacctt

SEQ ID NO: 51639 - DNA, 402 bp, Gossypium hirsutum
  Clone ID: LIB3272-060-P1-N1-A5
gcggtcctcctttttatcttaataatttacccgatttattgcggaaagaaaacacgacggatattcaatacatcatgaaaaatattgaattctcattctctctcaaatttattatccgattaaagaagaccgcgttaccgctgcgttttttaagagagacacgagaagtaacaagactttgttcacacgctctctctaataccggcactgtcaccattcccaaagaacttcgtccgaagcatcacaccaccatacttggctccacttttgatcttcggttgcatttgagaggttaatacatccggcggaatatagccattttcagccgccttccgtgatgcccgcaaccctaaaaatatacttcctgcatttatagaactccattgtttccacgaattcaaa

SEQ ID NO: 51640 - DNA, 378 bp, Gossypium hirsutum
  Clone ID: LIB3272-060-P1-N1-B11
aaaaatgcgaaaaattaatggtattaaagtataaatagtttgcaaaaagaaaagcgattaaaattgagtatttaagggaattaaattactgagggtaattacagtaaagcatattctaaaattggaacctcatagagaactgttgttagaataaacgtctgcatccaccgttaaacatcatcggacatcgatcaagtcgaaccagatttgcttgaaaaccttgatgataatttcatggtattcatcggaattgagagaaaggtaacaagcaagcaaatcctgcaaatccttagatgctgtaatgttattctccattatcatctgcaccattgattccttaaaatctctttgaggatcgaccgacgatttcaccactgc

SEQ ID NO: 51641 - DNA, 356 bp, Gossypium hirsutum
  Clone ID: LIB3272-059-P1-N1-H7
cgacacaataaagtagattttaattagagaagttgtaatacaactccaaaaaaaaatgtattttggagattaaatctccccatcccatagttcttcaagggacttgaatggtccactaggtgataccatttcaagtttaggaaataacctacgctgcttaatttcattgatttttttatggtcatctaatgataatccccaatcaaagatctgcaggttctctctcatcctttctttgttgaagctcttaaccacaaaacttaacccttgttcaaatgcccatcttagacaaacctgagcaacagtcttgttatgagcattagcaatctccttcagtgtttcattatccataactt

SEQ ID NO: 51642 - DNA, 328 bp, Gossypium hirsutum
  Clone ID: LIB3272-060-P1-N1-A11
aaatattatcatatcataggcccggagaataaaaaatgaagtggaaaccatgatcaggtccaacaacaactaaaagaggccccatttgcaacaaaaaattccattcatttctaccaaccttatttgaacattttcactccacaaaaatgaaccgaaaatttgcaagtttgcttgtcaggggcttttaattcgaaacccaatttccccggggggttcagggtcaaaaatgcattgggagaacccattttaacctggaaaggcgggtttttaaaaatttaataagcattgggggaaacaagaacccttggaaaaaacacgattttttttc

SEQ ID NO: 51643 - DNA, 386 bp, Gossypium hirsutum
  Clone ID: LIB3272-060-P1-N1-A4
atcttaataatttaccttatttatttcttaaagaaaatttgaaggataatcaatacataagggaaaatattgaaatgtaattctctctcaaatttattatccgattaaagaagaccgcgttaaggcagtgtcttttaagagagaacgagaagtagcaagactttgctcacacgctatttataatagcggcactgtaaccattgtcaaagaactttgaccaaagcataacaccaccatacttggctgaacttttgatcgtcggaagaatttgagaagttaatacatccggtggaatatagccatttccagccgcctccggtgatgccggcaaccctaaaaatatacttcctgcatttatagaagtccattggttccacgaattcaaa

SEQ ID NO: 51644 - DNA, 364 bp, Gossypium hirsutum
  Clone ID: LIB3272-059-P1-N1-H11
gggttctggggtttgggtttttttttttttttttttcaaaaaacaaatgcggaatttattcctttgtcaaattcggacacccccaccctaaatacttgtcaatggcattggcgttcccacaacacaagcttacattgggattacaaagagcccggttgtacccctcaaatttgtgtaaagttaaaatcaattccaactgggccttttttttggttacaatgaaacaaccgacaaactgtattcaaacttttgaacatgacataaaatgttgtccattggactcttttcagataagaaccttccgttgaaaacacaagcccggggaacacggtatatgggttatgtttcattcccaacccaactt

SEQ ID NO: 51645 - DNA, 374 bp, Gossypium hirsutum
  Clone ID: LIB3272-059-P1-N1-H4
aatcagagaacagagagttggatgatattataataccagtagccgtacaaaatttaggccagctgaaagtgaaccttaagtaacaccgagctgcacgacaagaccagacacaaatcttgactactattatatcctaaatttttatggaccaacataaagctttgaatgaggtaagaactcgcaaaatctctgttgtgtatttaatagccaccacagtaacccaaatttgaccggaaccggaaattttgatgatagtacgttttgtctccataatcgatcggccttatgaccacagcttcacgcttcccttcttgatcttgaactgctccaaaaattatctcattggttttctcatggctttgctcatagactgt

SEQ ID NO: 51646 - DNA, 360 bp, Gossypium hirsutum
  Clone ID: LIB3272-059-P1-N1-H5
agaaaataaaatgtctatttagcactcaatacagaaaatgcaacacaatcaatgtaattctttctcttcttcgaaatggaaatccaccataggccatatgattaggaacctcagcttgccatctagatttggtgcaagattatttgtgctccatgctgtggttgaagagtcataacagtgtatggagcatgagagtaagaaggtgatagcttgaatgagaagtgctgtagaatcatagccaaagcgaccttagcttcaatcatagcaaaatttttcccaatacaggtcctcgggccccaactgaatgcgaaaaacgccagttgatctttcgatgcctttgaaactccttgggaaaatctc

SEQ ID NO: 51647 - DNA, 364 bp, Gossypium hirsutum
  Clone ID: LIB3272-059-P1-N1-G1
gacaaactgaattgagagagtcatgaatgcatttgataacgaatatctactgtcatgtccaatatacaccaaagctttaatataaactgaaatgggcaacacatattacaagaataacaagaaattatagattcatgacatgctaattgagtcctaaaataaaataaaaagctgctacagtccacagctttctccttatttcagttgaggatatatccatgcggaacctttcagctggtattgggacaaacatatctttcaacacttcaggaacatcaaaatcctcaagaaccttaaaagtaccatcaactttccgaccagccacaatgaaggtgcatcctgttcttttgcatccagagagtgt

SEQ ID NO: 51648 - DNA, 303 bp, Gossypium hirsutum
  Clone ID: LIB3272-059-P1-N1-G12
gggtcaaggaaaaattttattatagacttttaataaatatatctattacataatattcttctcttaattaagtgcatcatgcatacaagtagatcctttttgggattctagtaagtatattttatttgatctgaaacgtaaaacacggggcttttatgcagattatgaagaatcctgcttaaggacgagaccatatagatagagatggtggaaggaatacaaacaagaagaggaaaataaggcaaggcctaagctgtctcctctttatcttcatcttcattcttaaccttgagggcatctagt

SEQ ID NO: 51649 - DNA, 366 bp, Gossypium hirsutum
  Clone ID: LIB3272-059-P1-N1-G4
aaaacaaaacttgaaaacatttctaatttcattctgcaaaattacacataaaaatcatataactctttgctgctatcatccaatactagcaaagagagtaaccaaaaaaagggtaaaaacactcacagaactgtttgtattaggaaatacagcattatccataagagacttatatttctgtcaaatatatatagggaaaagaaagaaaatttctatgcttaagatttatcagttcatttcaagcaaagaccagacggatgaataaaataaagagcttatacaacatgatcatggccatcagcagcagaaggaagagatttttcttgttctgcaacaaccataagcatctccaagcgcttatcaaaa

SEQ ID NO: 51650 - DNA, 259 bp, Gossypium hirsutum
  Clone ID: LIB3272-059-P1-N1-G5
aaggagacggagaattcttgggttgtatctaactcgcggtaatacattggaaaacaggcaaaccttgtaaccacactccaccattatagattgaacataaacatttattaaccaagaaaccgtactaagatatcagatacaatactacacatgcccagcaagtaccagcgggaatttatcataagaatcatgagtgtccatgacattaacacgagtcagtgggacactgttccttcgctggtactcagatgctatgatc

SEQ ID NO: 51651 - DNA, 367 bp, Gossypium hirsutum
  Clone ID: LIB3272-059-P1-N1-F12
ataaaaactcatgatctcaaaagtaaattttaaaattttcaaaaagagtacagtgaaactattctaaagttgtatcattcacaaaaactaaaagaggtggaatttgataacttgaaaagctcaagcacagttgaggggtatcccaccgacgatttagagcaaactggtgcttatctctgccttaatttacaaacaaataaaggtaaatctgatccccccatggtcgtttacttgcttcataaaaatggtgtctgaaaatacaacttaaactttaaccctcctacgcccaataaatctagcaggactaaaccgactaagatcaacaatggtagcacgtacctcaagaacaagctcagccacagcagca

SEQ ID NO: 51652 - DNA, 346 bp, Gossypium hirsutum
  Clone ID: LIB3272-059-P1-N1-F3
aaatataaccaaaatgttcttgtttaaagtaaaaagatcaaatccgaattgtaaatgtagcttaacatgtatatattgtctttcccatattactaaaaaagagcaatggtgtcatcattctagtcgagatatttgtttatgtccattttcctcgctcatttttgttgttgttgccgactttaggcatttgtcagcctacgagggtatgtttctctttaccttgtcagccttctttcccattaacaaatctcatctttccaaagttgaacacattaccaacttacaacaaaggactttgggaaggtgtgataccttagctcaccctttagtgacatttcttcccttg

SEQ ID NO: 51653 - DNA, 375 bp, Gossypium hirsutum
  Clone ID: LIB3272-059-P1-N1-F5
aaaaaatatgaaaagttcgataaacatgaaccaaatgtgttgttgtacaagctagctatttaattgttcataatcaccttaaagttcaaaccttaaaatcactactcacaaaagcaatcacaaagttggtttcaggacagatacatttacttccagctaagaggaaatgtccagaactaagttgtaaagtgtgcattttgaattatgatgacaatcaatcatcttcattcaaaagaagatttaatttgttgacaaaatttggatgaaagctatcctattcaagtcaaccaagtaaaacaacaatggatggtttctccatgattgattaacatcatatcatcttcacatctttttactgaactttttggacgtaga

SEQ ID NO: 51654 - DNA, 351 bp, Gossypium hirsutum
  Clone ID: LIB3272-059-P1-N1-E10
agctaatacctctgtctgatatcaaatctattattagtcaaacaaacgagattacacttgatttccagtttgccactaacaaaaggtagcctgaaatgttaacttttttctaaacaacttgtatagttcttaaagagcctttttgcatggtgtaataatacttgttcatatataatacaatactattagtggtagataattgccataatgtcccatgtttatggtatattctcatctactacatcttttgaatgtttggtcaagatgtagtggttcaaccccatcccatctgcttcattttgtatggtgggtgatgcagaagaattgtgagaatgccatctagcccagaag

SEQ ID NO: 51655 - DNA, 366 bp, Gossypium hirsutum
  Clone ID: LIB3272-059-P1-N1-E12
aatcgaagtaaaaaaaatgatcaattcgaaaattgaacgaaaataaggtcatttggaattggaggattgaaggggcaaaatccaacaaagtccaggtgtaggatacaacaaggctggcaggtactattccagcttggacaaaatagcaccaactgccgccaactactacataactcaaccacaacaacacaacagaagccggcatattcaaaacagaatcactacaaaaaccactaacactttctcaaactgcaggcctcaatcatacctgcaaactcaatgtcagtggattcccagttctagataatgttaacccccaaaaaaggaaaaaaaaaaaacaaaggagattgctatgctatgctgtgc

SEQ ID NO: 51656 - DNA, 360 bp, Gossypium hirsutum
  Clone ID: LIB3272-059-P1-N1-F1
ggaaacatctggaatcttattacagctttaatatataagagatatttacaagcatcacagatcctaaacatgttgtacgagtagattgatatacataaacagatttatgggttaagcactaaatgctaataatatattttctccaaatatcctaacaaaacaaaaatgcttcaagttgctctgctggttgtgctggttggagtttctggaactggattaatctcgcactgcataaacattttcttgatagcttcctctttctcgtcgatgaagtcgaaaaagttaaaaaggacttgagagcaacgagtagtagtttgaaccgaggatgaaaggcgacaaagtttcagttgccttcgccta

SEQ ID NO: 51657 - DNA, 345 bp, Gossypium hirsutum
  Clone ID: LIB3272-059-P1-N1-C7
ctataattataatagggtattgactcaaggaccgtggatagtttatagacagtacctgactgtgcaaccgtaaaccaaacgctttagtctgtcgcaaccataccctagtgtggtgctggcctggatccgattgccaaatcccttaggttcagacttgacgttcagactgataatcaaaccagggatcgatttgctagattagccgtctacattaatcttgataggtcactgattttgcagatttttgttgatggtgttgctcaacgggtcgaatatgaggccctttcaacggtgtgttttgcctgcggcaagtatggacatgtgcaagagatgtgtctatcgttc

SEQ ID NO: 51658 - DNA, 332 bp, Gossypium hirsutum
  unsure (1)..(332): unsure at all n locations
  Clone ID: LIB3272-059-P1-N1-D1
agctaacaaaaatgtctgatttcaaatttataagcagcaaaacaaaccggattccactcgagtaccagttggccacttacaaacgggcgaaagaaaggtttgcttatgtgtaaaccacttacctagttcataaagagccgctgcgcaccgtgggatattgctcaaacatatatgatacattcctagcaggggctgtttattgcaatgatggcccatgtgtatggactacgtntccatacttgatcatgacaatgtcagggcacacaccagcgaatcccaagcccaccgagctgatgccaaacttgtggacagcactgcagaaataaagggca

SEQ ID NO: 51659 - DNA, 265 bp, Gossypium hirsutum
  Clone ID: LIB3272-059-P1-N1-D3
gcataagttctaacttaaccaacaaatatgatccaacaggcgcgattcttgtgtaaaaaaatgagaacatcgcccgtactatccataacggatgtcccttatcacgtacgacacagcaacaatattgacttgctgggagggagttacccaagctagattgatgcatgtcttaaagtgtttgtaaagctatttgggttgaattaatatagcgctggtttgccaaccttgaagacctcttcacaatttggtctggattggactttaa

SEQ ID NO: 51660 - DNA, 308 bp, Gossypium hirsutum
  Clone ID: LIB3272-059-P1-N1-D4
aaagggggaaaaactttttttttaataaaagacaggtgggcggttaaaaactgggatccacactgtaaaaaaaacagggtgaaattgcagcctaagcaggttttacaaatccttttagatggctaattttttggaaattggcctacttggttttttttttttatccttatttagcgggggataaaacaaaataaaacccctcccttatttttgttttaggggggcctttaaaagaagatgttggaaacctatgggggctaaatttaatttaagccctttttttaacagccgacgaaggtcctttgcca

SEQ ID NO: 51661 - DNA, 357 bp, Gossypium hirsutum
  Clone ID: LIB3272-059-P1-N1-B10
gcataaataagggcaaacatatttgatatacaaattacctatttgggtgcccacaaatgttattttgctaccactctgtaaatggttttcttgtatcgccccaacaagctgcagaacattaattgtacacccaacccgtttaattttacactcaagattacacgcaaactaataattttcctaactaacggattatgatgaacacccttgtacttagcactttatatccaattaatgtggcaaatcaacaaaaaaccctgctatcaacaagatcacctttgcagataaataacatgtcccccattactatgctttgaatacactcattcttatgctgctaccatgagcttttatata

SEQ ID NO: 51662 - DNA, 370 bp, Gossypium hirsutum
  Clone ID: LIB3272-059-P1-N1-B5
aaaagtccaaatgtccattacattaacccaatttaaaaaaaaaaccaaaattacatacccaaagtccaattaacagaaacccaatacctaaactacccgacatcaggcccaaattgctaatccactagggcccattaaaatttaaacccaatttgcctagaccctagcccaatcacgaagtggcccaacgcaaaatcagaggctgaaaccctaggaacttccagcgccgttctccccagccacgcatgcctccgtacagccttcacacactgccacgcgctgcgcgtacatcgtaccttcatagtgcgacagtcggatccctatctctctcgtcgcaatcggagcagatggggatctgaagggtggagct

SEQ ID NO: 51663 - DNA, 371 bp, Gossypium hirsutum
  Clone ID: LIB3272-059-P1-N1-B7
cctactacacgtgcccttgggggaacagagaagatactgggttttttatttatcaaaccattaaaaagcttcaatttgatcaccgaatcaatcatatgtgggtaaacacaaatatcaaatcttgaatatttgaatgggatcacagttttacctggctcgagataatatgtgcgctaaacttctccaaactccaaagccgggtggaacgagctctgggacatcaggcatacacaagtgtaaacaaagaagcctaaacacagcctagaccatgttattaacgcctaccgaaaccagtacatattctcactaaaatggatggtgctactcaccgactggaacagccctcctcttgggatcttatatccaccatc

SEQ ID NO: 51664 - DNA, 359 bp, Gossypium hirsutum
  Clone ID: LIB3272-059-P1-N1-B8
aaaagcaacatataggactcaatttgatttaagaactacaaataaacaacaaatttctgataataaatacatgtaagcaagagagaacagcataacttatcgtgacaaaacttactaattgaacatttttaggcggcctaacataaatttatatgcgaggattagtacctcagcaaccactaagtggccaaactagccacaaaactttctccttctcttcttcttcttcttcagccacattgatgcatattatgactcatcaaagcctctttctctttcggcagaaactaaactcgactaatgctccactccttcaccaaaagtgttgttatttacatccaattaaaatcatacaatct

SEQ ID NO: 51665 - DNA, 358 bp, Gossypium hirsutum
  Clone ID: LIB3272-059-P1-N1-C2
gagctggaaatctttaccgctctaacccagaaaaggaaaaatctttgtagttttacagacgttataaaaagttaccaaatatctttatttaattttgatttctcttacataacttgccctactaacttctatggaatttaataatttctaccaataaatctgatcgtgttcttattcaaagaatcttcacagttcatcatgtaaattgccctctgtaggacgaagtttcgactctgcttcaaggagataagtagtaaccaatgatgcatgaagtgcagcaccgtaaggaagaacatcttcattgatagtgaagtttgggttgtggactgagctgagcttcgggctgttttcatcttgc

SEQ ID NO: 51666 - DNA, 386 bp, Gossypium hirsutum
  Clone ID: LIB3272-057-P1-N1-H7
tactacactttctcttgggggactgatgaatgaaaccatattaatagaactgatcaaaatgtcactactacataataggaagaactttgaaaaactagggtaaatcttattaatcacgctaaaaaaagaagaaaagattgtctttgcctgacacattaaaacctacctggatattaatcctacctcattatcctactgtgatatttaacaacacataacactccgtactttttgatgaacgaaaaacatcaaggattttagtctagtcagtctccgagtctgattttataagataaacctcatggcaacgaaatgttgatatccaatgctgaattccttggctcctgcatggtggacagccaattttctcttcagaaggtagcacc

SEQ ID NO: 51667 - DNA, 365 bp, Gossypium hirsutum
  Clone ID: LIB3272-059-P1-N1-A1
ataaagaattttcctgctcttttccacataaaaaccaagttgcatatgggagagtaattcttgaaactcaattctcacataaaatctaaaagcaatctaaccaaaacagaaaggtcatataattcgatatcaacgaagtccaaattaaaagatacaacattaccagcatctattctaccgatggatattaagcatgtccttggcttcactctgctcctccaacagcccttcactcgcatacttacttaaaagctccatcttcttcctttcaacaaccatcctctcaatctccttctcatcaggcaatggcacgtgcacgacaaattccctctccttatccttcctctctttctcctccctctccc

SEQ ID NO: 51668 - DNA, 302 bp, Gossypium hirsutum
  Clone ID: LIB3272-059-P1-N1-A12
caaaccaaaaacaccttttttgggttttagggggcgtaaattccaataaagggaaggctgaaaaaggtggccaaattaagaccccaaaaaaccaaaccctttaaaaaagccaaaacttgaccctttccaaaacccgaaccccacaaccggtccagaattaaatgaaaccccccacccttaaaacttgtcggaccaaaccaacccctgaagtgctctggaccaaaaagaatgatttttaagtgccagtaaaccacccccaccttactgttttttttaatagccccctgtctgttggtattttc

SEQ ID NO: 51669 - DNA, 364 bp, Gossypium hirsutum
  Clone ID: LIB3272-059-P1-N1-A6
ataaaaaaagaatcaatttgctatttggttttttttttcgctcactcaaagagcatacataaaaaccaaaaaccaatgaaataatcccctatgaaaaccagcacccgaaacaaaaccccactaaaaagccaagacaattgaaccatcaaagatcaacacacccccacaataactctgcccacaaagatagagcgcaacaacataataaaccaacaacgataaactaaaacaaaattgctgcaacagttaaaaactgaaaaacagctaagacagaaacagcaaccagtccccaaaaagaactcaccactaagccttgtacataccaggccttctaatgccagcaaccactagagcaaacgccaaa

SEQ ID NO: 51670 - DNA, 373 bp, Gossypium hirsutum
  Clone ID: LIB3272-059-P1-N1-A9
acctacgacacgtgcccttgggggccagaggcccttactgcacaacgaaaagaggtcgactgcatcatgcccttttgtagccaatattctaacttacaaaaatttaccattaatgcaccaaacgggagctaatggccaatgaatttgcaaccaatctctatgaccagatgaacgaatcaacagcttctacagcactaggttgaaaaactattgaaacgctgccatgagtaaggcaaaactaacctaagtgactacaaactaataccagctaacgtagcctatcggtgagggaacaatacaacacttagtgcaatttgcttaacaaagataaaaagacccgacactaaggatcaaaacgcaacgttgatatgaa

SEQ ID NO: 51671 - DNA, 369 bp, Gossypium hirsutum
  Clone ID: LIB3272-057-P1-N1-H10
gatggaaaatttctattatcggaataatttaataacacaaaaatgaaaacaataatacaaccgacaaacctcacggggtcacatctacttatgtagatattgtcttaatctacgcaactttaattaatccaaaaattatagtcaaaaaaagaaagggagtacacctttaaacttgcacttgccactttcctatgaacaaacaaaacagaatgaaaacatgaaaaccatcgcggataacaggcaacttatacacgcggtaactccatattttcactggccaatcaagttgcaaggtgtttttctttttttacacgtgttcttattcttctacgaaattcgatgaactccctccaccgtattttagctatt

SEQ ID NO: 51672 - DNA, 350 bp, Gossypium hirsutum
  Clone ID: LIB3272-057-P1-N1-H11
ggcataagaatcaattccttgtacccataaatgtcaaaacttatataatacaataaaatacacaaaattagaaaatctaacgcttaggctacctactttgccacaggtaaggtattgttttatttgtttataagcgtagaatcttatggtattcttatcgtgcctgacttgaataatgaatgatacactactgttacagctcacggtttaaattttgagaataaactaacagtcaatgcacagaattgctgtgctttaccttaccaagggtgccaacaactacacgatgctcccttcttgcagtctccccgttcataaaatttacaaatccgtagccctttgggtggagc

SEQ ID NO: 51673 - DNA, 350 bp, Gossypium hirsutum
  Clone ID: LIB3272-057-P1-N1-H2
atgcttaaatcaaactttaagtttatggtctttattttttggggtctttaatttttaaaaaaaaggaacactgaattgcattaaatcaactacccacccaaaagcgggttttggattcccaattgacgaacctttggctgagaaaacaggggatcatttgggctatcaatcccataaaggggggtaagaatggtatactggccaaaaatttttgcccaaaaaaaacaaaaatatttccggctttgggtggacaaaaacacccatagattctgctagccccatgaaaatgaaaaaacccgttttgaaggcaaataactttaagcttggacccaaacggcttttttttaaag

SEQ ID NO: 51674 - DNA, 296 bp, Gossypium hirsutum
  Clone ID: LIB3272-057-P1-N1-H3
accacaacaattatggcctgctttcatagaagattgtggccaaaacattaacatgaattatttggaacaatgcaaaaccagcatatgataactcataccaagtctggaattgcatggaaaacacaaaatatatgagtgcctgcgcttcacaaattcaacacgaacatacattccatagagccttggcaaacccaatcttcacaatatttgagactgcaaaggcatgttaacattaccaggcatcaagatcacggtatggaggaggcatgggatcggctagcaaagggtatatccac

SEQ ID NO: 51675 - DNA, 270 bp, Gossypium hirsutum
  Clone ID: LIB3272-057-P1-N1-H5
ggcataagaatcaaggccacgaacaccattaagcggaatcagaattgtacatgcataggcacatgatccgaaaaaatatcgcatacgctaaatacattgggagatgaaagggcatgggctgttaagcaaagggcgaaaagtttgtacagtcaaatctaaattctgtctgaatggtaaaccaaattccaaactaatcatgcttttttttgaatttttacatgcatgacaaggttaatgttaagcctttgcttgtgttgcattatgaaaaag

SEQ ID NO: 51676 - DNA, 365 bp, Gossypium hirsutum
  Clone ID: LIB3272-057-P1-N1-H6
cctacgacaacgtgccctggcgggagagtgaattccttgtacccataaatgtcggccacgggctcctgcctcacttttacccggattttaactttaacgctttcactaattatattgccacgcaaggtggcttggcttctttggctataaaccgaaaatcttatcggattcttatcgagccttgcttgaattatgaactaaatcccaatcttatcaggctccggtttaaattttggaaataatcacaaggttaatgcccagaatttctttcttttaccttaccaagggtgtcaaccactgcaccaggctgctttatttccgaacccctgttgataaaattaccaaattcttctccatttagctgg

SEQ ID NO: 51677 - DNA, 366 bp, Gossypium hirsutum
  Clone ID: LIB3272-057-P1-N1-F7
atgaaaattaagaatatgtttcataagtctcatattctgaagtgaaatcagtgagaagtgcatgatatgataatatcagcaacaccgaactaacaatgatagaaatagacaagctcgtgatcatttgtctgaataaagccaaaaacaagctacgaacatttccactcggactttaaacaggtttttcagatcagaacaaggatacatggtcctacgaaaagatatagccactaacaagctccgaattttcactccggaatttaaacaggcttgccaaataacaacacggtttgcttgcacaagggtcagccctttggaccgcgagtgcaaacttcgcttccatggtcaaatctcttggtgggaacc

SEQ ID NO: 51678 - DNA, 377 bp, Gossypium hirsutum
  Clone ID: LIB3272-057-P1-N1-G5
caaagaagcttgtaagaattgagttattcacattcagaagatgatgggagcatcaacaagcaagtaatttacaaaagaactttgtctagtagttagcagatcttctgattattcataagcaataacttagaagaggatactttagaactagttgtgaaatgttaaaagaaaaatgaaaagactcacctacttattcacatcaaacactctaatgcatgactccaagtaatacaaaattttgtccccaacagaaattttatctgaattcaagctatgtacaattgaaaattataacaagttgcaatgctttgacataaaattcatacacaagttgatgccttagaagtgcgatgattcgttccgagaataatcaccat

SEQ ID NO: 51679 - DNA, 362 bp, Gossypium hirsutum
  Clone ID: LIB3272-057-P1-N1-G12
gggaatcactaaatagcaaataaccgccaaatcgatatcatcaacaaccaagtagtgagaaaagtaagtagttacatgaacacttttgacgtactgattaaaccaacttattctgtaattatatccttacggagttcaacataggaacctcagcaaaactaaaagaacaacaacttcaagagcaaactaagaaacagtcatatgaatctcaacaacaggaaagaagatacattacttgatcaagctcctccttctccaaagggttccatcgtctcctcactgacattcaggcccgccatttcctcctccaatccacaactattttctactaaaacatgaggatcattgtaatgcctaactgc

SEQ ID NO: 51680 - DNA, 338 bp, Gossypium hirsutum
  Clone ID: LIB3272-057-P1-N1-G6
cttcgttcttttttttttttttttttttgggtgttgggatttttttatttttttttttttttttttttttttttcaagaaatattgaaggctcatattaaattttaagcctttattgtccagtttgtcattttgcaaaggactcggatccacatggggggtttttttggaccccccccattaatttaagaataaccggttccaacaaatgatgcaaaccccccacttgacttgaattaacaagagcccaagctttaagtaaataagcttttatttttttgggtcaatggttcaaaatttggatggtaaaaaacaaaaccaccttactgtttttttttt

SEQ ID NO: 51681 - DNA, 369 bp, Gossypium hirsutum
  Clone ID: LIB3272-057-P1-N1-F3
ggacaaaatatctcgagatcgatttcccaatcggggtgtttcatggtaactacattgaaccacagtatggaaattcctctggtcatggaaattcctctggtcacgatcaaagccaacttcatctatacaccacataacaatatacattcaattcctaatcaccttcataaagaaatcaaacaatatcaaacatctgaacctaatcgataaaaacgaatttacatggggtgataatcctatattttgttctttttgtgaagtgcaacccttaatccccgtagtgcttggtatgtattttcatgttggtttgattcacaaattgaccgtgtaaacaaactcttatttcaggtgtatactgcaaatctcatt

SEQ ID NO: 51682 - DNA, 306 bp, Gossypium hirsutum
  Clone ID: LIB3272-057-P1-N1-F4
ggctaaaggctgatctttcttaattacagtgaaatcttttcaagaagtataattaatgtaaaaaatatggagaagaagaatcccatatgtaaaaccccagccacccacataaaaagaatttttttgcgactagactaaagcgctagacatgaatttctttctagtaacaaaatacagaggggcatcagtcactaatctatactatacaattaaataaacttttctaaaatgcttgatttgttagaatgtggaggtcgaaagtcctccaatcgcagacacgaacttgctcgaattacattcaagaca

SEQ ID NO: 51683 - DNA, 267 bp, Gossypium hirsutum
  Clone ID: LIB3272-057-P1-N1-D5
agagactccagattttcatttacgacaaacactgttattacaaatcggaacatatgcacataacgatatgtgctcaaatagcattcgagttaattgcatttgttgatatagaacctactaaatagtgtatagaaaggacttaaaagcatcctaagtactgttcgtgggcagaaaataacgttgacattagtccttgtggggcatgaaaacaagcttgatgggtaatgcttagggtaactataagcatcggggcacctatacttgaaa

SEQ ID NO: 51684 - DNA, 375 bp, Gossypium hirsutum
  Clone ID: LIB3272-057-P1-N1-D7
aaacaaacagggtatgatacaacttagagactaaattttgggttttacaagactatcgaatttctaaacgtataggcatagcatcttcaaaatatcattctttttcttaaataaaatcctccacctggtaaaacctgagtgcattaggaaacaattttgttttagttagaaagggaactattctttccttttcttcctctgactatcgactttcacatcttaaactcagagcccaagcaaacaggaaggagaaattaggccatttatataacttgcagagttgtatagcctttgttttatcagccatttgagttccctcagaagtagaaagtaaatcctgcaaactttctgagttctgacttttaactagctgta

SEQ ID NO: 51685 - DNA, 350 bp, Gossypium hirsutum
  Clone ID: LIB3272-057-P1-N1-E1
aaaataaacgttgaattgagaaaaaatcatgatacaccaccatatattatttcaaaacatcaatgcaggggtagattaacctaaataagacatcatacaccccagttatactgtgaaatttttatctgaaaaaatacataaaacccactccatcttttttttaaaacaagggtaacttatgcataaactcctatggaaagaacaaaatttaaatttttaaaagcctgtatacggaacgcaacaacaagtaatggcaacccaacatccttttcagaatccatcacttatggacttggtttttacagcagccggattttgctgactgtactttagtttggacatcgggtaac

SEQ ID NO: 51686 - DNA, 378 bp, Gossypium hirsutum
  Clone ID: LIB3272-057-P1-N1-C9
gaagaagcagacactaatgacttttcaactttgtatttcatgtcaaactttgccttcaatgctcaaaacaaagatctaacactaaatgctcccacaaatttcttatttttaaatatcatccatcatccatcccactacaatttggtcatctaatgtcaattttcagatcaatttactctttaagaacagtacaacaaaaccttacaactacaaaactatatttttccatgtcttcaccatttttgccactttctcttctttttatgaagctatcatttctagtacagctttgttgttgtgaaggctaacctgtgtgactatcgcgggggaaaattttttagtccttcgtgagatggtctacaataaggctttgagccg

SEQ ID NO: 51687 - DNA, 377 bp, Gossypium hirsutum
  Clone ID: LIB3272-057-P1-N1-C12
agggtataaacttcagcactttcacatttagcaaggctaagttacaaaatcttggaaagagaagcaaaaacacataagcagtcaaataaagcaaatcaccaaagaggtaaagaagaagaattcgatcactattttacagttctctgattttcaaataggctgacccttgggaacaatttgatctttgagccacatgtaaattggaactagtacaaagtatgctgctgctaatgtcccaagaataaatcgtgaaaggaacaccaaaggatgaacaggtttctgaacatcttctgccttcggacccatcttcaatggagagtctccgccgaagggcttcactccagtgacagagcaacccatgatcaagccatgtcttc

SEQ ID NO: 51688 - DNA, 398 bp, Gossypium hirsutum
  unsure (1)..(398): unsure at all n locations
  Clone ID: LIB3272-057-P1-N1-A4
ttcaaacccaaagcactctaatcagaggaaaattcnaatttgatgaccttctatttcccacanaatnncaattttattatcagatactcaattccaccacaagagaacaacatnctcatgaactcttcatctaattcaagagctttcattgaagatggtggaaggcaaatttccaagtcaatacttcctccaccttcatgtcctggatacgccgaaactttcccatcaaacttatgagcatatccacttcgaagcgtcaatgctttccctaacccgaactcatttccgtacttgttgaaccttggtgagcttcccatcatcacactttgtgggtcaaaaagctgagcaatctggtaaatgaaaggtgaatcaagccaaccattgacgaaaccacgcac

SEQ ID NO: 51689 - DNA, 344 bp, Gossypium hirsutum
  Clone ID: LIB3272-057-P1-N1-A8
acaaggcactaatattttttccattaagccaaaggagaatttacattcccagaggcatataacagcgtgcaataaggacaaacagagtgaaaataaacaaatctagtgctaattttatcaggatatgataaataaactagcctacggtttcagcctatatgtgtagatttcccagcccctttcagattcggtttggattttttgtactggtaccttgaatattggtttccgtcagtttggagggcttggtcctaataatagaggagccttttgctttttcacactgggctttgaatcgccagtatgatctgcagcccaacctttgagaggaggctcaaaatgct

SEQ ID NO: 51690 - DNA, 361 bp, Gossypium hirsutum
  Clone ID: LIB3272-057-P1-N1-A9
aattaaaaaaaaaacagtagactgaagaattgttcaaagctccatgtacaggaaaaaatcgtctcaccaaaaaaaaaaacaacagaaattcatggaattgttatctaaaactaaaaagagggttttaaattgtttagttgacttcgattttgggtggtatcgataaacatggcttcttagcagggtgtgggctttgcacttcatcatcaccggcggcagaaacaaagaaattagctggcgagaattccggtaaagccggcatgttgaggtcgaaatcccggttactgatatgggtattggtgtttgtgttggttgaccccactccttcagataccgtcacgctgctagcggtggcagtggc

SEQ ID NO: 51691 - DNA, 256 bp, Gossypium hirsutum
  Clone ID: LIB3272-056-P1-N1-G9
gggaaggcaagacattttttgtttttttttgatgatggggggtaaaaaataaaaagctttagtccacatgggatttacatttagccgggaattgttgggccaagcaagacaagtgaattaaaaagaatgtcccccacataaaaactggttcactgttttttgaaaaaatcaatcaccccccaaggttccggtttttggtgaaaattcattgtgaaactctgaacgctattttttctcccagcccccttttttcctt

SEQ ID NO: 51692 - DNA, 467 bp, Gossypium hirsutum
  Clone ID: LIB3272-056-P1-N1-H6
gagctatgacgcgccatccacagcttcggtatacgctctgagagcggctcgacctgtctttttttttttaaacacgaaacttaaaattaaaggtgaattcttagattcgatataactgaaactagaaaagattaccttctgccttgctgaaataattgccaaaaattatttacaggtgtcagctcgaaaatccaaacaaggatacatgtactgaccatttatttgagttgcaaatgcagacaaaagaaatagctgtcaattagactatctatcaagtattcttccttgcagcataggcacgataagctgctagtccgaccacagtaacagcagtccccactgaaacaaacataagtgagctattaacatgccggcgatatcgctttcttttcttacctttctcggtctcaagaatgctcagatgagggcgttctgctgcacttacgattctagaaaatacacttttg

SEQ ID NO: 51693 - DNA, 288 bp, Gossypium hirsutum
  Clone ID: LIB3272-056-P1-N1-H7
atcaaacaataatccttgtgctttaaacaataacttttgacccaaaaaaacacccagcaacacatgctgcggtgaaatataacagagccagaaactggggtgctaaagtaaaagaaagcaatttgattgcttgctgcaacctaactttgggttgcattaattctacaaccctaagagaattggaactatagccttgtttgtcttcgaatagcatggcggcactttctgggtgaaaagcagagtaactctacaaccggtcttgatgaagtaatgacagctgcctttaag

SEQ ID NO: 51694 - DNA, 238 bp, Gossypium hirsutum
  Clone ID: LIB3272-056-P1-N1-H9
acgtgcccttgggggccagaggcgcctactggaaattgaaataatgccacaagcgcgtacaaagataatgcccgagcttcaaacaacgatgaatgcccaaattggggaatacgcttttagaagaaaccgctgagatttactcgaatcccgaagaccaccaaaaaagaatcaaccaaatctattgctctaggcagctttactgtggaaacacaaccttaaacgggggaaaacgaatctg

SEQ ID NO: 51695 - DNA, 170 bp, Gossypium hirsutum
  Clone ID: LIB3272-057-P1-N1-A3
ttcttttcgtgctctaaacaatcgggctctgcctttccaaattctatttaaaaacattccatcaaggaaacctctattttcgccggtgttttgttttttttgccgtcccaaaaaacagctggctcgatgaattttcggcggcccccttattatggagaggaaccacccaa

SEQ ID NO: 51696 - DNA, 384 bp, Gossypium hirsutum
  Clone ID: LIB3272-056-P1-N1-F6
aagaactaaatacatcgagaccaattatcagctaattcagtatcaacttacacacaacgtgattcatgcacaattagtcatacacctatatatacatataggtttacctaacaagctttttaccagatgttaacctaattccagagcaagatacatttgtaacaaactagatacatacaacatatttgctccggttttacggtaacatatctaagaggaagatagatcttatgtttctaatgttctaatatacttacatatgaaactaccatgttgttatactacttttctccgatcctctactttctatggtctttgagcatcatatccgaaagagggccgataaggctttcatattccaacgttgctaaatcatgagccaac

SEQ ID NO: 51697 - DNA, 377 bp, Gossypium hirsutum
  Clone ID: LIB3272-056-P1-N1-F7
aaaccaaataattactacaccatataacaattatacaatatcatgacaaaccacattataatttccatttgtcgtctttattacaataatctttgagggggttgttgttttgggggtcctcaaatctcaaattagtccaccaaatgccgaattaattattaaggacccaataaaagccgaataggttaaacaaacacattatttagacccatacctctcaaccctttcatcaatccactctctcatatgcttcaaaacaagatcagcattctcattaggctccccttgaaccaaggaatgatacatcccatcatacagtttcaaggttttgtccacacttgatgccttctcatacaacaatttagatgatgttgggc

SEQ ID NO: 51698 - DNA, 377 bp, Gossypium hirsutum
  Clone ID: LIB3272-056-P1-N1-G11
cgaatcaaaattccaaaaaaggaattcattttattaatattataaaaacaaaaataaagataatgaagtttttaatgctgtaaacttcatggaacataaaaaacaataaaattacatcaaggtccttcaaaaatctgtaaaaaaaaaaacattataacataagtaaaggtccaataaataaataactcaacaatagcaactgtggctaatgaagatcccctgtttttctcttttttattttgctttgccatttgttactgaagaaccagttgggttaagctcatcccaagcttcaatccatgtgaccatagcctcagccaacttgtcaaaatatgggtcaactttgcttagcttttctttgacctgtttagccaatt

SEQ ID NO: 51699 - DNA, 382 bp, Gossypium hirsutum
  Clone ID: LIB3272-056-P1-N1-G6
gaacaagaagaaagtgtaatccattatcaaaatattgcacaaacaggagaaagccacattagaatcggcaaggttttccgatttgtaccctttttcctatccttcctagcgagtaaagcccttattctactactctaaacgaaaacacgaaaaactagagtaaaacctgccttcacaatgtagataagctggtatagtctgttagtcaaatgtcctctgtctgccgtctctgaggtaactgcatgcttactatatcttctcgagggagacagtacattgatgtgttgcccgcatcgtcaaccatatgttgattttcggatgttaatgccagaaggtgcgttgcttctttgttaggccggaatacaaggtatgctattgcagc

SEQ ID NO: 51700 - DNA, 350 bp, Gossypium hirsutum
  Clone ID: LIB3272-056-P1-N1-G7
agcaatgagatttcataaagatataaattgtttacaacagtcaattaacacaagaaaataaaaataaaacaaagttgaaaactaacccccacccccaatttgccgtccacagtagttgtgaccttattatataatcttcaatccttaataatctatactatatatatagaacacagacacttaaaacatgcaataagcaaaccatgattatgacccaaattttatgtgaaaatattaaaccaagcaagcatcataagcaacaatcccatccatgatcttggccacactatctttggactcctttaacaccttgatgctgtttttaagcttctcacgctttgcaacaatgg

SEQ ID NO: 51701 - DNA, 243 bp, Gossypium hirsutum
  Clone ID: LIB3135-008-Q1-K1-E2-FPOLYA
ataggagcttgaccatggacacagattggagcgggtgaattacaggagaaattaagatttgggttatggcctactgagctggcttacgggaagcaatgatggcaaactttatcacccgtttgtggaaaccttttttcatgaatggcataaccagtgcaccttagatgggttttaatgtttttgggagcagagatgggaagcccttgcatgtgaatgctgaacgaatgactgatgggcaaaagg

SEQ ID NO: 51702 - DNA, 135 bp, Gossypium hirsutum
  Clone ID: LIB3165-033-P1-K1-H1-F18
agggctcaaaggaatgcctaggcattagctccataatacttgctagaacctaaaactgactgctatgccacacccaacatcaactattctcttgggtctgaaagctgggtcgattcgatatttgcagcagaaacg

SEQ ID NO: 51703 - DNA, 191 bp, Gossypium hirsutum
  unsure (1)..(191): unsure at all n locations
  Clone ID: LIB3584-003-P1-K1-A12-F20g
ccaaaattcctttctaccggnntttctcccctcaaatggtgtggtcnnttgtggccgnttctcttttacattgctttaaacatcccttttggtgtgggggaaaatgcgccaattnngttgtctgccaaactgatgcttcttttttncgtntggngntttgtgtggntgcnggggttccatttctaactctt

SEQ ID NO: 51704 - DNA, 503 bp, Gossypium hirsutum
  unsure (1)..(503): unsure at all n locations
  Clone ID: LIB3584-003-P1-K1-A12-F21g
tttgggcctgaaaacatcgtcctgtggtgttccanctttcggtggcggcttttgtcctccttttcccttcgccacgatggtctgttcccgcaatgtcgtatcccggctcgtcctttgcctcgtgcatgtgggcaccacttattttttaccaaatccccggcgtcttgggggagaactcctggttcccttcctgcatggtggcggtcgtcatagaccacgccggcgaccccacatgcgcggacggggaacccctgccacctggaaacgagcggaatgcagatgggancgacacggagagtcccggccgtggcgatagttggcgcgtgccatgggagcaaaggggtgcttctttttgaaacgcggctgccattgattattgctgcgtcggtgtggacgtgtcatcgtctgcaatggcggctttgtagcaccactggtggaagcggncgcctgggcctacccgggtttaacggaccggctcctgcgggcgcaccagcttttcctat

SEQ ID NO: 51705 - DNA, 398 bp, Gossypium hirsutum
  Clone ID: LIB3196-004-P1-M1-F12
aattcccgggatgtaagaagtacatgaaaatctaatactttctttttcacgattcatggggagaactgtgattctttacatcgctactttatttaagcctgtttattttcctacaaaataccctccttcaaaaggttgaagtgacatggaacaaaacttacatgtgggaattgcaagtgtttctcaaatacaaggttgtcatgaaaaaggggaaaagaaggaattttgttggtgaggatactgtgagatagtgtgttgagtggtaatagttggaaaactgccacctcagagtatatcacataaactgttcaagtccttaaccagcctcaggttcctgaaatcctgggagtatttccttctcagtttttggtgaatgtgtaatttaccattgagaataa

SEQ ID NO: 51706 - DNA, 378 bp, Gossypium hirsutum
  Clone ID: LIB3196-045-P1-M1-H4
gctgtcgcggtcccgctgtgtgtcccgggcattcagccgctcgctctctgccttccagaaggggaactgccctctagggagacgttccctgcctggggtctccttatgccagggaccaggttaccctaacagcaggaaggttgtcattaacaacaacagtgtcttcagtgttcgcttcttcagaactacagctgtatgcaaggatgacttggttacagtcaaaaccccagcatttgcagaatctgtcacagagggagatgtcaggtgggagaaagctgttggagacaccgttgcagaagatgaagtggtttgtgagattgaaactgacaagacatctgtgcaggttccatcaccagcaaatggcgtgattgaagctct

SEQ ID NO: 51707 - DNA, 385 bp, Gossypium hirsutum
  Clone ID: LIB3272-033-P1-K1-B4
cgcgtccgctccaatctctaatcgggtttctacaagcttctaattttctttttcttcactatttcggcgcatcagaatctcaagcttcgaagttccggagtttatgtttgaagatccatccatcattggattatttcctgaagatttatttttggtcgcgttttttcaagatctgaatcgggcggattgattgattcagagcgattctttagtacaataatcggtgatcgaagagttcgtgtgaatttgatgatctaagagcaaaggggctttttcattattccctacgatttgccctaaacttctggttttgctgaaagattcgatttattggaacacttcgtggagttaccgtcagagttgatatcttgaagacaaagcgcgg

SEQ ID NO: 51708 - DNA, 388 bp, Gossypium hirsutum
  Clone ID: LIB3272-033-P1-K1-E4
cgcgtccgcttcttatgctttctttttgttaacactgaaaaaaagagaagttcccttcccagtatttctctacaatgcaacttctccacgctccatcttggccacatctctcctttcaaacttcagaccgaaattcaaaaggaggattgctttcacttgagaaatgtcttcaactgtcaactgccaattgttcctttcagcctcaaaagctggaaaggtcgatatgggtatcgcataaaagaaacttttttagcttctgtgcaacaaaagctacctcagttgaagctggttcttcagcagcatcaagtggaacagctgaaggtgatgtattaaaagccttgtctcaaatcattgatccagactttggaacagatattgtcacctgtgg

SEQ ID NO: 51709 - DNA, 414 bp, Gossypium hirsutum
  Clone ID: LIB3048-003-Q1-L1-D2-F2
acgcgtaggtaagcttgttttttttttgggcttaacaaacattaaattctaaccataaaaggtgaatattttttttccggacggttttacaaacaaacaagataaggtaacaggggataaagatgctgctcagatgttgctgaaaacaaatttgaatatcctttctaacatcttcactaaatgctatagaaactggactgaatatcttgaagcaaggtcaggtagatcaatagagactaaatccgaaaaattggcttacgataatggctactccaagagcaattgctacaagagaagatgcccatgtaagtttctcagtgattctggggatcctatcttttaatgcttgactgcatgagcctataaacaccgtatagcttcccattgccaccacagttccgagcaagaacatga

SEQ ID NO: 51710 - DNA, 284 bp, Gossypium hirsutum
  Clone ID: LIB3048-008-Q1-L1-E11-F2
cccattgtaacttgtgctataagttattcttttacttataaggtttcaacaatattctaatcctttacaagctattcttgaagaaacaacaatggcgaaactagctaaccaaagagagatcattacaaacaaactacacttgaaaaaattagccctgtaaagacctggagaaaaccttactttcatgttcacggatcagtgttggaattcgtaacttggattaacatgacatacaaagattaataactgcatcccaagtgtacagattggagagaggccctccc

SEQ ID NO: 51711 - DNA, 143 bp, Gossypium hirsutum
  unsure (1)..(143): unsure at all n locations
  Clone ID: LIB3048-015-Q1-L1-E10-T3A
gctgcagtaccgtcccgnataattcccgacccacgcgttcactagacgacggccgcttttttttcatttaatacggcatgagatgtgccgtgaataacgtcgaattcgcagctgacgctgcaggatatcgccgacgcagctca

SEQ ID NO: 51712 - DNA, 188 bp, Gossypium hirsutum
  unsure (1)..(188): unsure at all n locations
  Clone ID: LIB3048-019-Q1-L1-D11-T3A
cagtaccgtccggaattccggctcgaccatcccccgcctgcagaatcagcacttattgaattttagaggataaacatggtgcctgacggcaatattaagaggtgaggatcatacccaagctgncaagccctgaaactgcccatcaagttagcactgattatgtttcaggccggttatgctttttatct

SEQ ID NO: 51713 - DNA, 472 bp, Gossypium hirsutum
  Clone ID: LIB3048-032-Q1-L1-E7-R2A
gaagcgtggacgcctgcgcgtaccgcgccgcgattaattcccggggcgacgagctcactattcggcgggcggccttattttttgttgtgatgataacagactgagacgagaggaagtgctatttcagaccctgtttcacatcatgtaccgacatgtggtgtgtcgaaaaaagactatggacggaaatacattaaacttatgcgcataatgggttatcgatgcgtgaccatatttttctaaggcattattgacgctctcgacgtaggaattatgaggtcacaagcgcacctagaatgatcgctggggtaatgatgcgcacctcttatgcggacttcaaagctgagtcgcttaaatgctttagcctgcggtaggagcatgagcctgagtcattaatatttgagcccgtatgcatcttaaggggggacaatgcatgattcaaaaacatacgctggggtgtgagaaagtaaaggat

SEQ ID NO: 51714 - DNA, 296 bp, Gossypium hirsutum
  Clone ID: LIB3048-033-Q1-L1-G1-T3A
gttctatttcaaacgacttttgagtataaacctaggttccctttagcaataactgaatacggcattaaaatcctaacttctaaagatctaggccgaataccgtgcttatgcgcatgtgatcataacattagaccttttaaaaacttcttccttgcatagttcatatatgacgtgtccagattttaacttataccaaaacctatcatcccgggtgatcgattgtcttcttgtaggtcaaccaagctagaaagtccgttggctcatgtaaatttacactgagtagagtcccatcctgt

SEQ ID NO: 51715 - DNA, 337 bp, Gossypium hirsutum
  Clone ID: LIB3083-003-Q1-L1-A12
acttgatttctctctatctctctctcaaactggcagttttctttgaaatttgcttaataaaaatcaaatggctgaagtaagtaatgatgaaattatcatacaggatatttttatttttattaaatcttataagaaagtcactagattgtttttttaacatataaatgtcatatattttatatgaaattcacaagaaagaaaaggaaagagatgacctaaattaaaaagaaagggaaagagaacgctatggattaaaggaatatgaatatacatcatctcaatttttttgttgtaacgtctacaagatttttaaattattttaatgtaaatacttata

SEQ ID NO: 51716 - DNA, 254 bp, Gossypium hirsutum
  Clone ID: LIB3083-003-Q1-L1-A2
tagagcttgcggatccctccagctattcgaatccagggcatatctgttggcaacacaatatcaccattggggctggtaaaaatgaaactcttgatcgggatctcgaccctgaattcaagccggttctgcttgaacctggtcatctcaagtccctacaaactatcttgctttaccacattgtgcctgctacgatcgatcgtaattcatggaccaaatcgacttccgcgttaacccatcattatactttatccaat

SEQ ID NO: 51717 - DNA, 118 bp, Gossypium hirsutum
  Clone ID: LIB3083-003-Q1-L1-A3
tatgcattttcatttgggttaccttaccgtgcaagagcaaattaacctaaacgtttatttcaaaatccccctataataactatcccataactcgaaaacctgaaattctacccatcaa

SEQ ID NO: 51718 - DNA, 335 bp, Gossypium hirsutum
  Clone ID: LIB3083-003-Q1-L1-A4
tgttttttggccaatgcttcaatgccacagggtttcaaccttccattaatgggctcaaagagatacaggcgtttctagaggcaactccatctgacattatcaccatattcattgaggattatgtggcatccccacaaagcttaacaaatgttctcaatgcatctgggttgacgcaatactcgttccctgtttcaaagatacctaataatggtgaatattgtcccacactgtaccatatggtcaagcagaatcaacgacttctacttttcacttccaaatcaactaaagacgcttttgaggggatcgcttatcaatggagatatgcattagaaaac

SEQ ID NO: 51719 - DNA, 290 bp, Gossypium hirsutum
  Clone ID: LIB3083-003-Q1-L1-A8
aaagtgggtattgcaactgtggctcccaaagctcgttggactagtgaaaggaaagttccagcagaccttagatatgaagtcccctaaccctatctggcatgggcattgtacacttcaagcgtcaaaaatccacattgaacaggaccaggacacgacggcaatgctctgagtcatctctatcaccatgcttccttttatgaacaagacaaagacggaattagatatccacgggcaacctactcaactattagaaatataagattctgtcatgaacgaagcattcttgctac

SEQ ID NO: 51720 - DNA, 358 bp, Gossypium hirsutum
  Clone ID: LIB3083-003-Q1-L1-B1
gaaataagggttgacaacatagagaaaggcaagaagagagccgcctctgtttctctttctctaaataaaaatttacggaggcttctcctttctttctctgctttctgtaacagacccacaagctttaactctattttcagatcatgttacgagcaaagcatatcggtaatctctccaatggtgcaaggacatttctatttagtgtctcacgaggtactgctgcacatgggaattcatgcacgtgccctgaagacgagtcctgtatttcaagaaagcataacataataaattaagctttgtcaaaatcctcatccaggggagctctgatattggctattgtatcccaagctgtacattc

SEQ ID NO: 51721 - DNA, 288 bp, Gossypium hirsutum
  unsure (1)..(288): unsure at all n locations
  Clone ID: LIB3083-003-Q1-L1-B10
ctttagccttcttcgaaaactgtaaccttcggaaagctgaattgcatcgaaactgaagcctaacctcagcatgaatatatctaaaggtgaccactgtattaggatatatagacatatagatgaacgataacacaactaatcgtcacgctacctaatgcacgcacantcattcactgctgaataatagcatcacagctgttaattcacaatgatgcagataaagcatcttatcaattactgcactcatggccgcatatactaatacttcaccatcaacataatatcaac

SEQ ID NO: 51722 - DNA, 303 bp, Gossypium hirsutum
  Clone ID: LIB3083-003-Q1-L1-B12
tcaaggattggccctgaccactaacgttgctgatacggccgatatattacccgaagaggctgcactttacactactttaatgactaaatgtaaacgacctatgccaatctaatcctgcatatgaagaactcacaccttatattgattgtactcccaattggcgcgtatggcttgcgtatgaccattataaaatcatcctcacagcttctgaacaatcatacttctacagcgtggattgctacatgtcccaatatccttaccctggacatgactgcgaaaactctcttattagaacatgcattg

SEQ ID NO: 51723 - DNA, 269 bp, Gossypium hirsutum
  Clone ID: LIB3083-003-Q1-L1-B3
ctctacaactaacggaggcccctagctgcagcaattcgacaccagcacttacgttttttactataaaaatttattaccgcaatgtcaaattacaccctacattcatcaatgaacatccatctctcaacatataatcccactaactcaattctattataaaaacacttccaacccaagcccaaaacattccttcaaaaacttagatcattcaaactttaacaccaccaaccttaaacaatcctaaatatcaccctggtattaatcaaaac

SEQ ID NO: 51724 - DNA, 329 bp, Gossypium hirsutum
  Clone ID: LIB3083-003-Q1-L1-B6
tcttatctcaaatcttttacctcactgtttcagtcatgcgtaaaacatcaacgaagttgccttacctaatgttgaagttcatgccatggcattcctgcaccaactcaattcacgtttcttccgaattcctctattacagatgatgtttcaaaccatacattgctttttcatttagaggcagcattatttaaagcatattcactcttcccttacttcacgttaatagctattcaagcttgtggactatccagagctttcatctcactatttcagtaccctcttgactgattactagaccatatacttgtactcaacgttctcattttaga

SEQ ID NO: 51725 - DNA, 150 bp, Gossypium hirsutum
  Clone ID: LIB3083-003-Q1-L1-B8
cattttctgcaatgacttatggtgatggttacggtgcagtgactgccacaatagttcatgttgtgcttttccatggaagagaaatatggatacaaagcaaagctagtttccaggagaaaaacatggacatacacaccatactcatgagga

SEQ ID NO: 51726 - DNA, 214 bp, Gossypium hirsutum
  Clone ID: LIB3083-003-Q1-L1-B9
gaagaagttacatcatttacagaaagcgtgggaccaaataatcgcatggatgctaaggacatacaaagggtacctaggactaaacgcggccacaatgttagaatgtctaaaccaattagctacatcatttatgagtataatatggtcaccaccaatgacataatgtctgacaaaactttctagtgccataacaatggttgatatgacagatgat

SEQ ID NO: 51727 - DNA, 256 bp, Gossypium hirsutum
  Clone ID: LIB3083-003-Q1-L1-C1
gcctctctacaactagaactaccccatcgctccagcaattcgaatccagcactataaattttacaaaatcaaaacattacggcaaagactaaaatcagcctacattaataattgaacatatattctgtcaagacattaatcaacaaatcaaaccttattactaatgcacttactatactagcctttattattacttcaaaagagattatcatacaaacttggccaccattaacattaaacattactaaaaatcacc

SEQ ID NO: 51728 - DNA, 317 bp, Gossypium hirsutum
  Clone ID: LIB3083-003-Q1-L1-C4
tagaactagcgcatccctccagcaatacgaatccagcacatacaaatagaagctaataataattccaatcgctacgtctaatactacaagcatttacaacatgccacctatcatattaataacatacaaaccatcaataacccctcacaacccttcacctcccacttcaacttgctgcttcgtcctctaccacactgacatacgttgcctttgctcatataataactctcaactcttgcctacccttgatattgaccccaacctttccatgaaattgcctatcttgtgcaaacttcctaattctacaaattgttaat

SEQ ID NO: 51729 - DNA, 362 bp, Gossypium hirsutum
  Clone ID: LIB3083-003-Q1-L1-C5
ccgatatgtactttactttaaaagttgattacggcaaggacaaattccagccgacattcgtgaacgagcgtctagctatgaagagagaatatgaagaattcaaggttaggataaatgcacttgtagccaaagcccaaaaggttccttcaaaagggtggatcattcaaaatgggacaccatggcaaggaaacattcctaaaaatccccctggtttaattaaagattttttcggcaaaagtggaggccatgatacccaaggaaatgagcttcctcgtctcgtctatttatctcgaaagaaaaggcctggtttcttgcattacaagaaaactggtgccatgaacgcccttgttcgggtcttgggg

SEQ ID NO: 51730 - DNA, 231 bp, Gossypium hirsutum
  Clone ID: LIB3083-003-Q1-L1-C9
cgtttactcaaagaacgataatcacgaaggggtgggcaaactcgtcggtatgaatcgcgataaccacatactcaagacacgctggactttctccgctgccgacactaacatgctcgagactgtcagattgatactacttcgatatccggtttgttctctgaatgcaccaatgctgacatatgtacaatcatctcacataccatgcctaatacaattaatgaatctatgaaa

SEQ ID NO: 51731 - DNA, 319 bp, Gossypium hirsutum
  Clone ID: LIB3083-003-Q1-L1-D12
agacaaccttatacatttcttgattgccaggggtgattcttacagtgtgactcttactcggctcttctatcttatctacaacgcgcccatggttgaaaacaagatcatgagtataagtaaagagacacttatcattgaaacaagtgcacggaatcttgcacatgccatccaactacgacgagttgtgtaagctgacatatcttcatgcatcgttgtacgaaaccctaaagctatatgcaccgaatccggtcgaattaagaacatgtgcatagcaagactttcttacgagcggtcatcgggtggatcaaaacgcccggat

SEQ ID NO: 51732 - DNA, 357 bp, Gossypium hirsutum
  Clone ID: LIB3083-003-Q1-L1-D2
ctacaactagcctatccctccagctaacacgaataccagcactatacactttaattatacaccgtccataacaagcgctacgtctaattctaaaaccattttctacatcccaacttcaactttcatagcattcaaaccatcactcaccccacccaacccttcacctcccacgtcaacttacttctaccccctatcacacacttacatacctttcctttgctcatataagaactcccatctcttacctttccttcctatttacccaaacctttccatgaaaatacctaacttattcaaactttctcatactccaaatacatacttcctatatcttcatatttgatcccaaatcttaca

SEQ ID NO: 51733 - DNA, 353 bp, Gossypium hirsutum
  Clone ID: LIB3083-003-Q1-L1-D6
aaaaattcctatttcaagcctggttaaggctaggtgttgaagcaatgaattaggtcctgctactggtttaccaccattaatggattcttcaccatacaatggccgcaaaagcgaacctgttttcgccgattcaagatacgtgccctgcttctccaatcctatcggttctcaaacaaaccaacaaatcacgatcgatcacaatttcaattatcgcactcttcacgtttcgtcgaatccttgtcacgttctcccgcaaaacccgttctacgctgctgagtttgaatcccttggttcggtgcaagaacagtcgatgttgaggactttgattgaaaaccatggatcgaaagttcaag

SEQ ID NO: 51734 - DNA, 341 bp, Gossypium hirsutum
  Clone ID: LIB3083-003-Q1-L1-D8
aacaattctgattctccaaagttttactttaaggggaaggatcgaataagtgaatgtgaattgtgcaccatgtggggtcccatgaaagggaggtgagtaatattggaccatttaaaaaccaattctttcattgctcagagcaatcctagacatgtaccttcttattgacacacttctcacaacaatcgaattacctaaagaagtgaacgaatcaatacaacacatgtattttttcattaccaaacttccttttagtaatcaatcaactgtgaatcatgttatacacatatatcaaaattataatataacataatattaaaattattaaaatatatattaaa

SEQ ID NO: 51735 - DNA, 362 bp, Gossypium hirsutum
  Clone ID: LIB3083-003-Q1-L1-E1
tctttttttttccttttttctttttttatcaatgtccaaccatcatagtttttgttttctgaaattcaatattacataaaaagaaccatcctcgcaaagtttgtccgcaaacctatattcactcaaccaacgtatactttaaatacaaattcttatacaaccctcgactaaaataaaaagtattgcatccacagcaatatgtgaaaactatatataaaactgaaactagaatctattaatacatgtattcattcaaaaaaaccccaatgggtcatttggtcaaaactatatatcttattcccatcatataaagaacttttattaactataaaaatgtatgtatttcacctaaaatttgatca

SEQ ID NO: 51736 - DNA, 354 bp, Gossypium hirsutum
  Clone ID: LIB3083-003-Q1-L1-E10
gattatctaagctgttgcgtgaccactgatggaatgaatgccattggttccacatgtgatccatacgggttcacttgcctgagcatgcagctgaacactgtaaagggatccattaagaaagctccatcaatttacctcagataacgtactgctcaacaacatcaactatggaatcaacatcgaaaatactatagaaatcaatgtcttcaaattgaaacatgctgaaccagctggacaaatactggaactactgataagcagctcaagaaatgctctataatgagcataactgacacacattaccgaggatgatatgctgtgtgatacatgatcatgctactatgctgaaactaa

SEQ ID NO: 51737 - DNA, 225 bp, Gossypium hirsutum
  Clone ID: LIB3083-003-Q1-L1-E11
cggagtgcataaaccctgtttgggattgtatacaatgccgttgcaaatccacacaatgtaccaagacaaaaaaatcggattgaatcactccaaaaatagctaagaaaaaaaagctttcatccctcattgactaagctccatgaaatatcattgattacagccatcgaatggggcgccgtttttggcttttggagcaacttttccatttggcaaacagggtttcac

SEQ ID NO: 51738 - DNA, 314 bp, Gossypium hirsutum
  Clone ID: LIB3083-003-Q1-L1-E12
tttatcctctgcttcgcataccaggttaaaggttatattaagcgtacagggagtgctcacggttgggatgtattgttttacatattcagtttcttgaaagggataacgcttttcacgctgatcgttttgattggtactgggtggtcgattttgaagccttacttgcaggacaaggagaagaaagttttgatgattgtgattccacttcaagtcgttgctaacatttgccaaattgttatcgatgaaacttggccttttaatcaagattggaacacatggaaacaagtgtttttgcttgttgatgtcgtttgttg

SEQ ID NO: 51739 - DNA, 207 bp, Gossypium hirsutum
  Clone ID: LIB3083-003-Q1-L1-E2
tacactagcacaatatctattctccaaaattttacttttaggtgaagtttcaaattaatcaatgttaattatacaccatcttctgtcccattaaaagtaatttttaatatatcttaccatttaaaaaccaattctttcatctccatatcaatctctatcaattaccttcttatatacacacattttacaacaatttatattacctaa

SEQ ID NO: 51740 - DNA, 319 bp, Gossypium hirsutum
  Clone ID: LIB3083-003-Q1-L1-E4
atctataaaccccccttatcttctccggggatgtttcacgtatgaggtcttgtacttgttccaatccccttttacggaactttcttcatctaattctcatttttcttatctatttatatttctcaagttcttatcttgcaatatattatcattgagactgaaatttaacagcctaaagattgtttcatcgaacggatccctatttcttcgacggcttaatctcttctgagatattgtacacgtttctttaatcctacctataattataataatagttatatcaataacttcaaccgcaacttaacatttaccattaaac

SEQ ID NO: 51741 - DNA, 364 bp, Gossypium hirsutum
  Clone ID: LIB3083-003-Q1-L1-E6
tttcagacttttttccaccatctaagaagtgctttttgcctgatggagaagttaaaaatttcaacttttcttcagccaaaagtccgtttggctgataatttctcattttaacctctcttctccccccaaaaaagtttcttttctctggttctttggagctctatactcatttttttcacattttcactttcaaagttttttgttcaggttctttgttcctcttccgccgttgtttcaatggattccaggcctgaatagcaaataataaaagagaaagtggagatcacgggggagtcatctggtttgattattgggatttctatagcagtggtaattggcgtattagatgtcatagaatgagatc

SEQ ID NO: 51742 - DNA, 365 bp, Gossypium hirsutum
  Clone ID: LIB3083-003-Q1-L1-E7
ctcctgccgtttgaggctagtcaagctgccttggactagtgcgcacttcaagaaagccaaatacctctcatcatcattcctgagaatgacgggaataagtatttgacgccaaacttggaggctgatcacattgcatcatggttgaaggcatacaacgaaggacaagttgcaccatatgtaaaatgtcaacctatttcggtggaaaatactgtacctctgaacgtgtcgtgaactgacacccttaatgacatatatctcaaatcaggcatagatgatctactcgagatctatgccacctggtaccaacattgccagaaatgagcacaaacctttgaagaagatggtatccactatgaaaaagatgc

SEQ ID NO: 51743 - DNA, 374 bp, Gossypium hirsutum
  Clone ID: LIB3083-003-Q1-L1-E8
tgatactcgaacatgaagccattggaggcttggtaacgcgattgtgggtggaactcgatactcgaaggggttgttgcaggtgtacccttcatcacatggccgattttcgccgagcaattctacaatgaaaagctggtgactcaagtgctgaatttgggagtatcaattggcaaccaggtgtggaaagcatgggcaacggaggattcactagtgataaaaagtggggatgatattctcatggcgattaatgcactgatgggggatactgaggaggcatttgatatgaacaaaagagctaaaaaacttggggaattagcatagaaagctgttgaagaaagccattcatcttataatgattttaaacgtttgattga

SEQ ID NO: 51744 - DNA, 156 bp, Gossypium hirsutum
  Clone ID: LIB3083-003-Q1-L1-F1
cctgcatcattctatactatcccttcgaacttcacgcgagtcgttaaacccacaatgtgctataacaagtcacattacaaatcactgaccataaattaacaacgtattaacttgtaaaacacttgcgttaccacaacttaaactaatttcaacaca

SEQ ID NO: 51745 - DNA, 189 bp, Gossypium hirsutum
  Clone ID: LIB3083-003-Q1-L1-F10
cttttcctcctatatctccatagaaaccctgggctcatactatgttcgttgagtaagaactcaacccttgaatcaaactcaccttgttactcctcctttcttatatcatacatacatccttctatacctgaaactatttgacaaaattcgtctaacaatgcttgctcgttggctatagcaccctatggg

SEQ ID NO: 51746 - DNA, 355 bp, Gossypium hirsutum
  Clone ID: LIB3083-003-Q1-L1-F12
ctcgtgccacgacaattctgatggccaaaatgatgaagaggcagtggtttataaaggtgcttcacaaagctgctacaacccatgggatttctcgacggcgtcgcgatctttagctgaatatacaacgtgctccttcagtacgcttaccttcttaccctgcaactcttaagtcggagagtctcccatgtggtttgaatgaaacatcgtgttgtaccggttattatgatcagtacgatacagtgtaggattaacctgtagacataaatgggatgaaaggacaactagtgaaaacgcttgaactttcaggaagatgcatgcctattacccgtattactgctgagtctcaaaagatttt

SEQ ID NO: 51747 - DNA, 346 bp, Gossypium hirsutum
  Clone ID: LIB3083-003-Q1-L1-F2
tatccttctccaatttcctttgacttttatgtctcgttacttccctctttattattacttttccttttcattttattacatttcacaatttccctcatcgtcaaaccctattgtcaccctttctttctccttgcttttcgaaattaaagatttcaatcttctaatactaattcccatatgcaagctaaaaagtgaaattacttgttgttgtttcatctactaatcaggttcttggttgtgttcttcaatgtcaacattttaccttaggatatcatattcaccactttcatatgtccaaaatgagaattattttcataactcctatcaatttgatgattattatatt

SEQ ID NO: 51748 - DNA, 375 bp, Gossypium hirsutum
  Clone ID: LIB3083-003-Q1-L1-F6
gccaaaacgatttccatttgagattagatattggaacggtatcatcaagcagcctttgccattggctcattgtttttccaagagcaagatctaaagatgatatctctctcaacctctgaatgctagaagcttgcctgaaattccttgtctcgggatgattaatttggagataacatcaacggtggttggactcgtgcaccttgctgcagtaggggggacaaaccaggtgacctcgacaagttgctgttataaccatgctcccaatttgccaggtatttttttctatatttttcatagttttggcaagcattacggaaaactgttcgaacattaaggatcggatggctataacttaatcttaatataatagtaatt

SEQ ID NO: 51749 - DNA, 335 bp, Gossypium hirsutum
  Clone ID: LIB3083-003-Q1-L1-F8
atcgaggccgcgggttcaatatgtaccctgacatgaaggttgcgtagcaaaccacatccgggccacttgttgttggtatggtaccaatgaaagggcactctgatgcagctgcaatgcagactggggcttaaaatggctgccaatgtggtgataactgcacttgcaaaccttgcaattgtaaatgagaaaaaatagctaagcatattatggaagctgatctaaataatatatgatgtatttcggtttttactatcagaataacgcatctatggatcattaagggttttgcttgttggattcatggacgctctgatggtgattcagtgattgtatat

SEQ ID NO: 51750 - DNA, 337 bp, Gossypium hirsutum
  Clone ID: LIB3083-003-Q1-L1-F9
atcttcctactaaacttccatagaaaccagcgtacaaaactagcttcatcacctattcaattatgccttgtttcaaactcccctcgtttctcttcctttcttctatgaacctccatgcttctctagctgaaattattagcgacgatttcgcccaacacatgtagcgcgtttgcaatagcatcttcagggaagagatgcttgttcggaaacggtgctggagacaaatgaaaaggacgagtaccaatgccggacatccgaggtgatggtagagagaatggccaagtatatcgagaacgacaactgcttgccgcctatgactgctgacagaaactcaatt

SEQ ID NO: 51751 - DNA, 261 bp, Gossypium hirsutum
  Clone ID: LIB3083-003-Q1-L1-G1
acttccatataacaaaatctatagatataataggatctggccaataaaatagttagcttcaactaatcctatacctgcactacaactttataaagagaccattacattttcatcacttttatcactatacacatattatattcatgaagatattatttatattctaccatctactactaaatcaaaagatctatgtcaacaacatttcaattaactattagcatatcatcacatcaattattttaaacttgaaatatcttt

SEQ ID NO: 51752 - DNA, 206 bp, Gossypium hirsutum
  Clone ID: LIB3083-003-Q1-L1-G11
gttttattctgaaaggaaactcgattcatatgaacgatctgcaggtgtgttggtttataacagtttgacgctctaatacttacgaaatctcctatcatacacgcccctgttctacgactattggagacgatgaatctggagcctctgacgaacgtgtctccatgcttacatcctagcctacaacgctattgatgacattatttgaa

SEQ ID NO: 51753 - DNA, 325 bp, Gossypium hirsutum
  Clone ID: LIB3083-003-Q1-L1-G2
taggttttacagaggcacccattgcacgaacggattcgtaccctaccacaacgtgtatgacactgtgttgaccgggatccgctacaaggtccataccgtccatcttaaaaacactcttgacctcaaaagcggtggcaatggtgttattactgttctttgaactcttgctagcatgaactatataattgagctctgcacattatgtatccctagctggcttattaacacggatgtgacattctactagtataatggacccaatatggcactcatcctagccctcatgttcattccatctcagctcattttggccatatgtgggtgt

SEQ ID NO: 51754 - DNA, 341 bp, Gossypium hirsutum
  Clone ID: LIB3083-003-Q1-L1-G3
gtactttcggtttccatttacttcttgggttccgacacatctcaataacttttgcacgaaaattaaaaaccgcattacagatcacatacatcaaccttgtctacacaccggatattcctactgccagctttactgcctataacatgcaatccaacccgatacgccacatgccacatgacaagactgtcccatgaagtgatgatgcttctaacaccttatacaccgaaactgctgctgcaaagcacgtacatactgctgcctctgaggatcttgagcccactgttattcatgaagtgacgactggtacttaccgactgctattccaccctgagcaacttatc

SEQ ID NO: 51755 - DNA, 286 bp, Gossypium hirsutum
  Clone ID: LIB3083-003-Q1-L1-G9
agcacctttcaaatactgcctctattcatcggggaggcacaacttccaagtgcctgcaaacgcttgagccaccatacaacctccgatcttctgaccgcccaacagaactcctaatacaacttagccatgaacctgctactcacgcacttagatatgtgctataccaccaatgatctttaaacggtcattctatcaattgccccgaaccttactttcaccatcatacaagctcttattcaaccatctatctctactcgcacaagttgcatccatacccctcaaatgc

SEQ ID NO: 51756 - DNA, 326 bp, Gossypium hirsutum
  Clone ID: LIB3083-003-Q1-L1-H1
gactacaaaatgaatataaaatttaccggcgattgtttgtttccctggaaactttgcttgtatataaaagtgccaaaatgaatttatttcttgtgattccctccaagaaggtgatcccattgataaagaaaaagcaaattaatcataataccggatccagaaagtacggcgtctgaaccagttactgtcgcacaaacctatgataggacccatggcattaatggcgatatccctggtataaatcaataggattgccacacgtttaacagtgctggggtcaacagcatctatcctagcaaatacttcagcaaatgggattcttcgac

SEQ ID NO: 51757 - DNA, 324 bp, Gossypium hirsutum
  Clone ID: LIB3083-003-Q1-L1-H5
gccatgtgtagagacctagacatctctgaaacgtactggaagttggtgaaagagcacgtcagcatgaaagagggatcggctttgcttgcgactttgcttagttttcaggaccaaatatatgcccttgacagggtgtgggttttatcgggccttggtcatgactatggacttgatatagaaggcatcaagaaagctgcagttttgcactataatggaaatatgaaaccttggcttgatttgggaaattcaaaatacaaggaatactggaagaagtttctgaacccttgaaatccatatctaaaccagttgcattgtaatcgatta

SEQ ID NO: 51758 - DNA, 383 bp, Gossypium hirsutum
  Clone ID: LIB3083-003-Q1-L1-H6
acaactaaaggatacgcgcatgctgcaggtattcgaatcgaggacatgctctggctttcctatttccaatgaatcgcatgcagaagcttgaccgtacaaggcgatccatgaatgttcatcagcgttgatgaaagacgctaataaatgtatcgtgtacaacaatgatgctatatatgatgtaccttatctctctgtctaccttaccactaaagctcatgccaatcttaaccacaatgatatcagatacatgatcagagtgaatgctttgtgagactgattagacaactcatctctatacattgattgttcgtccatatgctaattacattatcattatcactcatgttgataaacagactggcagcttatacactgataggaat

SEQ ID NO: 51759 - DNA, 371 bp, Gossypium hirsutum
  unsure (1)..(371): unsure at all n locations
  Clone ID: LIB3083-004-Q1-L1-A1
gtggaagtagatgccattggtcatgttcgtcataagaatctngtgcggctnttgggttattgtatagaaggagttcacaggatgctggtatatgaatatgtgaataatggtaacttggaacaatggctacacggngcaatgcgccagcatgggacccttacttgggaggctcgcatgaaggttattattggtactgccaaggcacttgcttatttgcatgaagcaatagaacccaaagttgttcaccgggacataaaatcaagtaacatcttgattgatgatgatttcaatgccaaggtttctgattttggactggccaagctcttgggttcaggagagagtcatatcacaactagagttatggggacttt

SEQ ID NO: 51760 - DNA, 177 bp, Gossypium hirsutum
  Clone ID: LIB3083-004-Q1-L1-D3
atgatgcacaagatgcttcttgtgttgacagaaaaaaaaacaatggaggttcttttgattcaactgaaacggtgcgaaactattaacttttggagattgaatcttgtgaattgcattttttcaaaaaaattaatgactgctggtaccaaccaaaatcttctttggcttgggattgga

SEQ ID NO: 51761 - DNA, 128 bp, Gossypium hirsutum
  Clone ID: LIB3083-004-Q1-L1-D7
tatcctagcaactcgtatctcaagccttctataatggatacgattgcgtgcggcttttcttacagccgcctaactatcccctacgaaaaactctctgttcttgtatctgctgatcatctctatgcacc

SEQ ID NO: 51762 - DNA, 326 bp, Gossypium hirsutum
  Clone ID: LIB3083-004-Q1-L1-D9
gtctatttgatgaatatgggtttccttcaactgcaggagatattacgtacattgattatctgtttttaggagactatgttgatcgaggacagcacagcttggagacaataacattgcttcttgctcttaagatagaacatcctgaaaatgttcacttgattcgcggaaaccatgaggcttctgacataaatgcactctttggtttccgtattgaatgcatcgagagaatgggggagaatgatggtatatgggcatggacacggtttaatcaactattcaattgtattccacttgctgctcttattgaaaagaaaattatctgcatg

SEQ ID NO: 51763 - DNA, 336 bp, Gossypium hirsutum
  unsure (1)..(336): unsure at all n locations
  Clone ID: LIB3083-004-Q1-L1-E3
aaaaaaggggaccccccggcctgcaggaaaaagtngccaacataaaaggtgctgacctgtttggtaaaacgggtttggaggtggacaggcttaatgatcacttgcctgatctagctgagtcttccaataaagcaagagcaatgatataccccactcctaagaaagcatcaaagctggttgaagttttaccagggatatgtgaaattgtagacaaggaacacaaaagactttctgcacggaaatcaatcattgacaaacgaaatgaagaacaataccgtcaattattggaaatggaacatgaggagtactcaaagaagcactatttgctgtaggaaa

SEQ ID NO: 51764 - DNA, 286 bp, Gossypium hirsutum
  Clone ID: LIB3083-004-Q1-L1-E7
cctctattctttctcagatgcactccaaagcgatcgtgaggcgtactattcatttattctttataaattgaactgaagcgggggactcgaaaagaggacagtcgaacttctcagcctcgaccctttatggctgaagttaacttctgagctgacgtatcagcatctcgtgtgctcttcaattgaacaacaaaactgataattatgcggctttcaaggtggaagcgacacaatcaaagacgtgctgcgttcgtcccaataccggggacgctgtggctctatacacatg

SEQ ID NO: 51765 - DNA, 268 bp, Gossypium hirsutum
  unsure (1)..(268): unsure at all n locations
  Clone ID: LIB3083-004-Q1-L1-F3
caaaccggggggccccgggcggaaggaatncgcacgaggaacaaacatgggaaaccgaggagacaatgcaaacgggggtgggattattccccacggagaccaaganggatttacagcttctactccagagngggangaaaggcnggcagggactctagagagggctacaaaaggccagaagctgcacatatcttgcaagaacaagagcaaaagggggaagagtgcctgtggaaaagatacaatccaaaaggaccgagttgtaatgctc

SEQ ID NO: 51766 - DNA, 248 bp, Gossypium hirsutum
  Clone ID: LIB3083-005-Q1-L1-A3
cttgcacgctagagcctaccgcaggaatcctatgctactgatgggctatagccattaaaagactcccttaacaggtacggtacatgaagaatatctgactaggggatcattctaagagcgaatgcgtactctgaatgctggcctctaatgatgaccattgaccttaacgataacaagggtaataacggactgcctttgacaacagctgcatatggacattcctatagggactaccaacacttaacctg

SEQ ID NO: 51767 - DNA, 403 bp, Gossypium hirsutum
  Clone ID: LIB3083-005-Q1-L1-A5
gaagatttgggattgattttgattgtgatcttaggtttaaatctcgtcaactgatcgctgtaaccgtcttaagaaagctagctaggactgtttgtattcattggtgttataaaaggaccatgttgggttcccgagaggtagatgatttgagtgaccttaaacaggcaatacttggtgcttgtttgaatgaatgtgttgggggtgataggagtggtgtggacgatttaattgagcaaggacatcaaagcaaaccttcacagaagtgtttaggcaagcgtgcctcattatctactacagtctctcctcctgaatatgatgttgatgaaatcgaaacttcattgaggtggctattctcagaggatttggcgcagtcatcttggtcctgttccgcttctttccctac

SEQ ID NO: 51768 - DNA, 254 bp, Gossypium hirsutum
  Clone ID: LIB3083-005-Q1-L1-A6
ctaagggctagggcgacttattctctgtgatcatgggtgtctctacatctctgaaggttgcaattacatacccaggtcctaagctctgaagcatgcattacaggcgcggcggcaaggccatgtctattgaagcaacctatatgtgacaggaacgactatgacaagcgtgatacgggctgcatgacgaaagcgatagaacaagagaatgcccttagagagctgagagctaaaggatcacagaagggatcattagg

SEQ ID NO: 51769 - DNA, 337 bp, Gossypium hirsutum
  Clone ID: LIB3083-005-Q1-L1-B10
ctttctcttgcagtcttcaccggcgcagttgcaaagcattatcctctctgcagaagttcacaccataaataatgcgtcgattcatccgtttgcttaacgccaaaaataccggaaaaaaatcacctgtttattttgacttacttccttattttgcttgctgggttctgatagctgtgttctttgtttcttttgaatcgattcgctgacgcacaccgcatgagaattgaggacgccgaagcgtcaagagccgtacgattgaggttctgattactttttaaatctgtcttcggtgatttagatggatagcgactgataatccttacgataatgtgagaat

SEQ ID NO: 51770 - DNA, 308 bp, Gossypium hirsutum
  Clone ID: LIB3083-005-Q1-L1-B4
gtggaggctccaccgatgacggaggcggcggtacacggtcctagagtaaggatgaaggacatccaaggcatgcctgggactaaaggtggcctctttcttcgtctttctcagttcattttctccatcatttctgtctctgtcatggccaccaccaatgacttccgctctgccacagctttttgctggcataacagtcttgattgacaatgatcttgataaatgtagtgtgaatcactgcactaagtttgaaacagctacagcaatggccgtcatcagctggtttgcaatgtcaccatcctttctgctga

SEQ ID NO: 51771 - DNA, 352 bp, Gossypium hirsutum
  Clone ID: LIB3083-005-Q1-L1-B5
cttttgcacccgaaggaccataagttctaagaaaacccatgaaacactctttacctatccaactcctaatgcacaacgagcacagctgacctggggaacctgagctataaaatatactaccactggtctacgatgcccatttcgatgtgagctagaccctacttcatcatcgcctatgaaccattcttctatcggatgttgaagcgcatcctgctttattgacaatcccggggcacatgcttaaaatggattaccatctcatcaactacgttaatgggaccactctcaggtatgactttcatgacagatctagaactaaaagttgccatacttactgtaacactagccttaa

SEQ ID NO: 51772 - DNA, 340 bp, Gossypium hirsutum
  Clone ID: LIB3083-005-Q1-L1-B8
ggaaattgaatagtcatggactacggttcatcagctaatggatgcagattcatgtacctgggatagaacgctgcttctaaagatcgttgatgagaattcagcggaccgaaatgttgctattgccatttatgggagtagaccacaggatagggtggactggaaacatgaaagctgcggggagcatacagtcaagagtgggtatgaggtactatttgccgattatctacagagtactggttacatgcctattattgacgaggtttacatagattattacaaagatttgatggcactaagtattaccggatagatcgaaattcacatttggaggcttgttaat

SEQ ID NO: 51773 - DNA, 325 bp, Gossypium hirsutum
  Clone ID: LIB3083-005-Q1-L1-C6
gaaaccccaatagtggaacatcaaaatgtaaagctcactgtggaaactctaaaggacgatggttcaaacaacaaattttataaagagatagatgaataagatcgaactgggaaggatcaagaacaagcgccagttgccgataaagaagccataactgttccaggggaagcaattgagaagcctgaagcaagatatttgcaacctgaaaaagctggggttgatcatggagaagagaaaacagatcattcacgtgttgaaattaaacttgaacctgcatacacaggtactggttatttatcattgtacgatctactccaacaatcta

SEQ ID NO: 51774 - DNA, 279 bp, Gossypium hirsutum
  Clone ID: LIB3083-005-Q1-L1-D1
tgatgatgctagcaacacctttctcagggagactggtgcggggaagcacgtcccttgtgccgtctttaggggtcttgaacccattgttatacgatgaaatgagaactggtgcttaccgccagatgttcctaccagaaccactgatctgcggctcggtcgacggagctaacaactatgcccggggtcactacagtattggcaaagggattgctgacgtgtggctgcaccgcataaacggacttgctgatgactcgcactggtcttgaaggatgcacttgc

SEQ ID NO: 51775 - DNA, 316 bp, Gossypium hirsutum
  Clone ID: LIB3083-005-Q1-L1-D11
cctttccttcaatagctctaacaccagctagtgcgctccttcaatctgaggccgcgcgtatgattaacgctcgattcaatgattatttcaaagatctccttatgcgcattgggcaccttacacgatgcttcttcacatcctccatttgcttggctcgaactcagcttaacgtgtctctaaaacctaacgccttctgtgtgtgattctaccatggccgatcctagcaacgttctgaactggatccgaccaacatgaagcaaagtatggctcaacgcgcgaggagatgtactccagtgacctagctggcaccgaccat

SEQ ID NO: 51776 - DNA, 198 bp, Gossypium hirsutum
  Clone ID: LIB3083-005-Q1-L1-D12
cggtcaccgagactgactttaagaactgctgtgatcagttcggtacaattacagatgttgtggtgatgtatgatcataatacgcaaaggccaagagggtttaggttcatcacttatgattcagaggatgcggtagatagagttatacataaaacattccatgaactcaaagggaaattaggtgaggtcaagagggcag

SEQ ID NO: 51777 - DNA, 416 bp, Gossypium hirsutum
  Clone ID: LIB3083-005-Q1-L1-D5
cggaagcagagtgtgaccgtttcttttctttgctcgacaagttgtccgctgcagtgcctgaacagaaggaagcagcaaaggagcttcgtttgttgacaaaaaaggtgccttcattccgagctcttttcggtgaatccgttgatgccattactcaactgctcaccccgctcactagatgcaactctcagagtggtgttcaccctgatctccaggaagatgtgattacgacactcttgaacctttcgatccatgacagcaataagaagcttgttgctgaaacaccaatggttgttccccttcttatggaagcactgagatctggaactattgaaacaaggagcaatgcagctgcgacccttttcactctatcggcacttgattctaacaaggttcttattggtaaatcttgtgtctta

SEQ ID NO: 51778 - DNA, 344 bp, Gossypium hirsutum
  Clone ID: LIB3083-005-Q1-L1-E11
gaaaagttgaaagatttgagagagaagcttgctattgaaaaggcttgtggaattattatcacagctttagatgaggtggctcggttatataatatccgtgggagtgatgtctcttactgtccagtcattcatgcatctgctattgtaacattgaactcggctttcctttatgtggacaagaagaaggtttcatctaaggtgagctcttccatacaagagaatggaattgaagttcgggagtatagtactgtgagctcagatgttgcgttgttagcatctaatcagctcgataaggacacaggatcaagttctggtcaaaatggtgtctgtgaaagtggcacatg

SEQ ID NO: 51779 - DNA, 365 bp, Gossypium hirsutum
  Clone ID: LIB3083-005-Q1-L1-E7
aatgaaatctccaaattgtatgaacaggcaaaagatctagtagagcttttggaaatctgaatcggaaaccacgtcgaagttctctttaatggcgaccccattctcgagcttagaacccggacgaggaggaggaggaggtatagcaatgatggcaggtcctctgaatccaatcgatccatccactccttccaaatcttgcttgaaaaactccggctctaaatctaccattcttatcttccaattttttcacaaggccatcaaggctgagctcgacgcccttcagcgagctgccatggcttttgccaccaaccaccacgactctgatcttacttctttgatggagagatgccatttgcttcggacta

SEQ ID NO: 51780 - DNA, 297 bp, Gossypium hirsutum
  Clone ID: LIB3083-005-Q1-L1-E9
ctgaacactggccgtatgtctatatcatggttgaatactaaactgaagccggtggacaactaccgggacgagtaaccgtatgataaggtttatgatgcaatcctacaagaagctgaactccagctgaaccatctgatattgaggaaattatgggtgacccacctccagctagcgagataacgattggtaaactctctacttgactatgacattgtgacaaatcacttagggcaatatacatagtaccatggacactgaatcaacgatttcctgatcatcaagctgatgccgctgtac

SEQ ID NO: 51781 - DNA, 351 bp, Gossypium hirsutum
  Clone ID: LIB3083-005-Q1-L1-F1
acctcgagaataggggcattaagcatcacattacaaaaaataactatttacattggtttgatctgaaatttccagaatcaagaagttgtaccaatagtttctcaagcctctttgaacttacagtaggtttaacagcattcgggttcccgtaaactacacacggatctttacctgagtttgaaccttccacgcaccaaccccctggggtaaaacgaccgttcgatctcctcaacaattccttgtcgatcttattgagggctgaatcatcatccttggcaaacttccgagcaaaaggggctccacttcgaaccatgtcgtcgaaatgttccaacgtcaaagtcattggatgct

SEQ ID NO: 51782 - DNA, 377 bp, Gossypium hirsutum
  Clone ID: LIB3083-005-Q1-L1-F2
ccaaaaccctaaaaccccctaacaaagacaaccatcatcttccttctgattatttttcccatcaattttcccggaaaatcacataaagaaggaaaaagtaccaaacaaaaaagatggtctggtttcaatgcgaggattgcggcgagaacttgaagaaacctaagttaccaaatcacttcaggatttgctctgcttcaaagctttcgtgcattgattgtggagtgatttttgggcagcaaaatgttcaaagccatacacagtgcatgactgagatggaaaaatatggtccgaaaggacaagggaaaacaccaaatggttcaatttcaaaaccgaacaagcaaacaagggaaaaacctgatattgatatcaatgtcggg

SEQ ID NO: 51783 - DNA, 374 bp, Gossypium hirsutum
  Clone ID: LIB3083-005-Q1-L1-F4
atcttccgactaaaatttcatagaaatcagcctacaaaactagcttcatcacctatttaattatgccttgtttcaaactccccttgtttctcttcctttcttctctgttcctccatgcttctctagctgaaattatttgcgaagatttgcccaacgatgtttgcgcgtttgcaatagcatcttcggggaagagatgcttgttggaaacggggctggagaaaaatgaaaaggaggagtaccaatgccggacatcggaggtgatggtagagagaatggcggagtatatcgagaacgacgactgtgtgcgggcttgtggtgttgacagaaactcaattggcatttcatccgattcccttcttgagccacaattcact

SEQ ID NO: 51784 - DNA, 322 bp, Gossypium hirsutum
  Clone ID: LIB3083-005-Q1-L1-G12
cctctctacagctgtatataccccttgctccaccaattctgcactaggtctttttttttcctcacaatattcattcttaccccattactcagcatcatccatttacaatcgctttcaatttcactacccactccataaaacttacaacccatcaaaaaatttcttcatcccaacctattccacttacaacacaacccactttctccctctcctttcatacataccaaacccatacttttcatttcttaccactactcctccaaacttcttttcctattacaaattttacatcaaatattcttcaaataacaccccaaaacaa

SEQ ID NO: 51785 - DNA, 344 bp, Gossypium hirsutum
  Clone ID: LIB3083-005-Q1-L1-G4
atcagcttgcttacgctgcctcttctcaaccctgacacgtgttcttcaggtgcctgcagacgcttgagccaccatacaatctgcgatcagcttaccgaccatcagatcgccttatacaacgtagccattaacctggtcctcacggacgtagatatgttcattactaccgatgatctttgaactggcatgctatcacttgcgccgaacctacctttggccatgcttctggctattagtcatgcatttatccctgctcgcactggttccattcatactcctcaaatgcttaacctggccgcttgtaccacttatgcttcggtcaccgatgtcgttcttccccatgc

SEQ ID NO: 51786 - DNA, 271 bp, Gossypium hirsutum
  Clone ID: LIB3083-005-Q1-L1-H10
gatccaaggaaacgggaaagggactggaatgggtcataacatgccgcacccattcggaaccttagaccgaatgtcgcttgtgttcagtatgaaagatcgacttggatcgctcaaacgaccatggatgaaactgatgacttatacctagatgctgataatacaaccgaagctacattgagattcagatgctgagagtagcaatcatttgacactaattactgacgctgatcatgtcatcggtacaggcattatagcgaatacacgatgtctg

SEQ ID NO: 51787 - DNA, 202 bp, Gossypium hirsutum
  Clone ID: LIB3083-005-Q1-L1-H12
cttttgttcaaaaggagctacaagacggtaggatagtataagactctgggcccattacggtacgtggcctatgccacctgatgaatatcacgactaccctaccctttttcaccatagatgatgcttaatcaatggcgatgccgacgagtcctacgacacctggtacaccatctacaccggagtctgctcgaatggacaacgt

SEQ ID NO: 51788 - DNA, 285 bp, Gossypium hirsutum
  Clone ID: LIB3083-005-Q1-L1-H5
gcaagaagctaaaaaatcttactttgagtgattgcaattgcctgggtgacaggggtctggaagcgattgccactggctgcactgaacttacgcatcttgaagttaatggctgccacaatattggaaccattggactggagtctgttgggaaatcttgcccgcgcctgactgagttggctttattatactgccaaagggttggcaattttgctcttactgaagttggaaggggctgtaaatacttgcaagctcttcacttggtagactgctctagccatggtgatg

SEQ ID NO: 51789 - DNA, 244 bp, Gossypium hirsutum
  Clone ID: LIB3083-005-Q1-L1-H8
tgaggtgatcttttttagtaaaagcacttgataaacttagggtattgaagaataccatggaactggaaatatcacccaaagttgccaaaacccagacaaaaaaaataaacattttaatctaaatgaccatcatagtcgcaaaggtgttatcattcctgacctttggtcatgtctcatctgcctcatacttctcaatctattgaacagaatcagttacaacttcctcatgatctttttccagggc

SEQ ID NO: 51790 - DNA, 370 bp, Gossypium hirsutum
  Clone ID: LIB3083-007-Q1-L1-G3
aatatcgaggctttaacattgggaagagggcagctgggatatgtttttttccatgcgttggtagagtgtagtatgttacggagtttggatgtgaatgatgctattcttggaaatggtgttcaagaaatacctattaaccatgatcgattgtgtgatctgaaagtaacaaaatgccgtgtgatgcgaatatctatcaggtgcccacaattaaaaagtttgtctttgaaacgtagtaacatggctcaagtggccctgaattgccctcttttaaatctgcttgacataagcgcttgccacaaacttacagatgcagctattcgttcggcagtgacttcttgcccccagttagaatctttagacatgtcaaatt

SEQ ID NO: 51791 - DNA, 350 bp, Gossypium hirsutum
  Clone ID: LIB3083-009-Q1-L1-A7
ccttaccaatattctactctaagacaatccaccgggggtgtttcctattctgggggcaaatccattctataaactacttcaccaaattcccaacagttaacaccaattagaaaaagacatcaacctgcgagctataccaaaaataccttatttattataacaaccaaattcctcatttacaatagccaatgttcatttcttaaacccaaaattgatataaactttaccgccactattcattgcttacgctcacgctcaagctcataccggcccattttcaccaaccaataaaccattaacctcttttaacccctgttagatttcacctttattaaccctaatacaacatt

SEQ ID NO: 51792 - DNA, 239 bp, Gossypium hirsutum
  unsure (1)..(239): unsure at all n locations
  Clone ID: LIB3083-009-Q1-L1-A9
tttatcctttttggatcaccctcaaactnggntggtttggtttattaatgaaactatgcagccaacaagatatncccgncaacaacancaacttttgtctaatccattttagagcaccataacccaatcttcatctgttaaaatttaataaactccatcttcattgatgaatccatcaaggaattttcttgttaattcatgaaattactatcaatacttttttttttctcgttttttca

SEQ ID NO: 51793 - DNA, 416 bp, Gossypium hirsutum
  Clone ID: LIB3083-009-Q1-L1-B10
cacactgtctaacttaagggacatcaatctacaatggttgtttttattaaaagcgaccggtggctcaaagaaacttaacccaatctgattgcaaaatcatcctaccacactttcttcctttattgataagtaatactaatggttcttattcttatcttgattccccaaattgctgcaacatcttcagtgatctatttaactctcttctctttatacttatatatgaacctaactaaccataaatctattcttacatcacattccattttcaaatatcatattttattaaaatctcatctttaatttattttttaaatattttaaaatcatatatttctcataaaatttactatatcaattactttcatctattttctttatttcaatattattatataaatttaacctttacttaa

SEQ ID NO: 51794 - DNA, 202 bp, Gossypium hirsutum
  unsure (1)..(202): unsure at all n locations
  Clone ID: LIB3083-009-Q1-L1-B11
cttatttctttcttagttctacatcatctttccccgggtgcttcccattaaacctctgtcgccctctctctctctaaaatctctccttcttccttcactctctcctcaatcctctntctacccatatacactatccccttgttcttcttcaaactcacccttccttttcctttccctttcaaattcaatantttccaattct

SEQ ID NO: 51795 - DNA, 314 bp, Gossypium hirsutum
  Clone ID: LIB3083-009-Q1-L1-B12
atcccacagctcataaattctcacgagcgagttttttttttatctcgtcaataccaactatctgttggatttatttaatggaaaagctctctctcaaatattatacaaaaactaacatccccaattctcaaataaagataaataaactttttcaactctcacaaatcacttaaaatcattcacaccttatacaaatttcatactcaaaattcaatcaaacaccaaatactctttataacctactctatctttacactacaaacaaatcacccccatttttcctctataatctctttcaaacatttacatacatt

SEQ ID NO: 51796 - DNA, 264 bp, Gossypium hirsutum
  Clone ID: LIB3083-009-Q1-L1-B9
atagtgtcatagacctcatacagggggtgtatttcttcaaagagtgtgtaccatataatatctaaaataaatctgctacacatatagtatcacaatatatacatcactattatatccaaactacctcgatctctaaatcatttcccctctatactaacaaatccatttctcatctagatcaacccaaaacctcactctttatacattaattttccactctcagcacatttttccctctatacaacaaaaccttcttgggatatt

SEQ ID NO: 51797 - DNA, 311 bp, Gossypium hirsutum
  Clone ID: LIB3083-009-Q1-L1-C10
atcttttctttatcctttcaaaaaaatatatcaactgccggcctcataatcaaggtaggctcgcttcattaatccaaattactcaagtatacacttttttctatcatctctaaaactttaacacttatcactaatttaactctaaccaataacattttcgatattcccaccattgacaccaataagacctaccttctttccaccaataccaccaataacattactaccaattacattttcaccaataacatttacaccaacagttacacctatcatccaaccaatatatccaccaacctaataaaccaaca

SEQ ID NO: 51798 - DNA, 265 bp, Gossypium hirsutum
  Clone ID: LIB3083-009-Q1-L1-C2
ctggccaagcttttcatatgcaaagtatgtgttttaaaagcagactggaagtctatgttcaaagatgggtttgggattgatctgaaatgcatggatggctcgagttaagaagggaacacctttatgaaggctttctatgatgccaatgagatggtgtactggcgctacgttgacccttttttgaaaggtaaaaggtctcttaatattggctacgaagctgccctaaaaaacaatatccaaatcattcacaattatcttcacaatg

SEQ ID NO: 51799 - DNA, 275 bp, Gossypium hirsutum
  Clone ID: LIB3083-009-Q1-L1-C7
cgatctctccccccaaatctttgtcagcgcttatcaggtaaattgggtgattactcttttctttctcagatcccttcaaaagccattcttcttcttctttttattctttttaaattgaattgaaattgcttattctaaatgagtacagcctaccttctcattatctaacctttatagctcaagttttcttttgaactgatgaatcatatctcgtgttctcttcaattgtctaataaaacttattattatctatctttcattgttaaaactacaaa

SEQ ID NO: 51800 - DNA, 286 bp, Gossypium hirsutum
  Clone ID: LIB3083-009-Q1-L1-C8
ttcaccaaagactttgtttcaaaacaaatcctaaaagagagtcggtgggctttatcacacggagaagcgcccacacatatcccccgactacctaatgacatgcaagcaatttaaccccacttctttttactgataaaccataacttagattcttcttatgaaattaaaaataattacttcaacatattatcaaatgcttatatcaaaacatcttcatcaacaccatctataatcctaccaatacccatttaagatcacaaacacaatcaatatccttccaaaccaa

SEQ ID NO: 51801 - DNA, 323 bp, Gossypium hirsutum
  Clone ID: LIB3083-009-Q1-L1-D3
aaagccctcatccactgcaatacgtagtcaatgcacccttgttgccatcctatatagcgatgatcttgatgctactcatacacctggatagtattgtcgtcccaattactattcaactgatgtcctgcgtgaatatgccaaaacccatattgattatattcttggcaaaaatactcgaaaaatgagctatcttgtgtgcttttgttaccattatacaaagcatgttcaccatacaggtgcatctatccctaagaataagatcaaatatcactttaaaggtggatggaaatggagggatactttaaaaccaaaccccaacacac

SEQ ID NO: 51802 - DNA, 262 bp, Gossypium hirsutum
  unsure (1)..(262): unsure at all n locations
  Clone ID: LIB3083-009-Q1-L1-D8
ttcactagacgatttctttttcttgaaccctacnncccaactcgttaggtttatacacatgctcgagcgtctcctccaatctcccaattcctccttcatagatgtccaatgtcaatgctgcttcaacataacaaccgtatttagccactctctatctgtgctagtatgtcaaaactgccacaacattctgtcccagcctaccctctgtatatcctaactcaccgaatgcttctctttcatgaaaaatgatgactaaatccta

SEQ ID NO: 51803 - DNA, 334 bp, Gossypium hirsutum
  Clone ID: LIB3083-009-Q1-L1-D9
caaattttatttcctctgcactttctctcaaatccgtggcctttaaaaggtgcgtgagactcttcatatacaggcaactcaatactgcaaccacatcctctccaacttttattaaattctacacgcctaccacagcctacatttatacttactctatctataagacattcatcacctacttgatcaccttcacttttactacaataaaccacattactataaactctttcaactatcctctcttatcaacttactacctcctacatattttaattcaaacatctcatccgaaccgttcacattttcaactcttacaacttattttttcaaccca

SEQ ID NO: 51804 - DNA, 261 bp, Gossypium hirsutum
  Clone ID: LIB3083-009-Q1-L1-F7
caattatctttatcttgctatcctcaacaatacagggccgtttcttttacacttgatggccatcactccccataacatcaaccctaatgatacgtttcctatgatcaattgctcatttgaacaaacttctcatatactactttatacttctgtttatgctaaatcatattattatatgctttgacatataaatatattctatatcacctctcaccaatttgtacaatataactttcctcttatctcaatgataagatcttt

SEQ ID NO: 51805 - DNA, 232 bp, Gossypium hirsutum
  unsure (1)..(232): unsure at all n locations
  Clone ID: LIB3083-009-Q1-L1-F9
tcttttatttacccacaagttggtcnaaatntatgctgtgggctttatttcggaaagatgggatcgcatacataggantgatccatattccaataggaacacacttttctttgatgttaacatgaaaggtcttgattgaatccaatttccattttatgtgctaacaagttgtgttttcaattagcaagcactttattgcttatgtccaccttcaatgccaagttttcccaat

SEQ ID NO: 51806 - DNA, 360 bp, Gossypium hirsutum
  Clone ID: LIB3083-009-Q1-L1-G8
gctattctttttctccaagttgtacatggctacacgggaggctttttccagggtccactaattaatcaaactgcattccaaaacgttcatacattcattcacaatacaatatcaaaaagagcaaaactccttcttgctcgtaaaatacatatccttcaaatgactttctattagcccacaattgttactgatgtcaataatgatattctatttactacctagtaaatatatctaccagtatcccctattatgtgattcaaaacttatcaacaaactattcacatagctaacaacaccaaatcagtgttagctactttcatatttacaaacacatgttaactaacatttcgtttctcataa

SEQ ID NO: 51807 - DNA, 179 bp, Gossypium hirsutum
  Clone ID: LIB3083-009-Q1-L1-H7
ctcaaatctagcctgcaacaaaaccgacaacttcgcttggtttttatctccagacaaatgagctaacaagaaaaaaaaatgttttttttggggattttgcactctattaaatcatgctaaatctcccaaatattatccattatcactgtttctacagaatctagagaatccactgcatc

SEQ ID NO: 51808 - DNA, 213 bp, Gossypium hirsutum
  Clone ID: LIB3083-009-Q1-L1-H8
ctcaacatatatcgtggtgcacaacctcatccaaccggggctttattaaggcatgcaagcttatcatcactcaacacaaaagcttcaccagtttttcctttaccaaatgctaccatcaaagaaatatatgcatacaacccatttgttccatctttaccctaaacctaataatattctttcaaattcaaattacaagcttaaaaccttttattt

SEQ ID NO: 51809 - DNA, 271 bp, Gossypium hirsutum
  Clone ID: LIB3083-013-Q1-L1-B11
ggcactcctgctgttacaagcagaagctaaggaaaggtgtttggtgccctgaagaagatgagaagctgttgaggcatattacaaagtacggccatggttgctggagctctgtccctaaacaagctggcctgcagaggtgtggaaagagctgcagattaaggtggattaattacttaaggcctgatttaaagagaggcacattctcacatgaagaagagaatctcataatcgaacttcatgcatttttggggaacctgtggtcccatatagc

SEQ ID NO: 51810 - DNA, 362 bp, Gossypium hirsutum
  Clone ID: LIB3083-013-Q1-L1-D10
gagtcgtctcaatctttaatttggcactatttgtcgtcgtgtcgagtatatactttgtgggatgttgtgcaagacaaaatgcctgccttacaaggcagtttaaagtttgaaaaaatgattaatcgtggttaaatttattcctttttttatttttgatttaatgaaattaatactttaattctatgtttttttaaatttatctatattttttattatttatttttttttttattttttatttattatatattttttttttttttttattttattttttctttttttgttataatatttttttatattatttttattttttattttatttttttttatttattattctttttatttattttttt

SEQ ID NO: 51811 - DNA, 143 bp, Gossypium hirsutum
  Clone ID: LIB3083-013-Q1-L1-D2
gtttttgttttttttttttttggttaaagaaaacttgagttctggttcacataaagggacaggaaagatctttggtttgttgaaaagagccaaataggtattaaagtaacatcaacctacatcaaattttcaacatttttact

SEQ ID NO: 51812 - DNA, 383 bp, Gossypium hirsutum
  Clone ID: LIB3083-013-Q1-L1-F2
cccatttttctttctaagaaaaaaaatcaggttttatattctggttaattaacaagtttgaggaaattttgggaatctaatgttaaagaataattaaaagaaatggaatcttttgtgggctttaattcacatgatattttatattttcttatttctcatcttattcatattaagcccttatcttatctatagattaaatctttaatttactagtctttttatttattttttttatttatatattttattattctttatatattcacttatttactttttttattatcatttttcttttttcttatttttaattttttattttttttttttatatttttttttttttatattatttttattattttcttttatttaattttttt

SEQ ID NO: 51813 - DNA, 448 bp, Gossypium hirsutum
  Clone ID: LIB3083-013-Q1-L1-G10
tgtttttttttctattttagtttatagtagagattgattttatcttttaattgggacttaagtagtgttagagttgcatatcaattaaaatttaagtttagtttataaatagcatctattagtttcatctaagaaaaatcattggtaaaaaaagtctgctaccctatcactctctgtctgcttctctggcaagtctttaggttttcttgagttttttttttgcttctgctgctgttatctctatagtctataacagtcttttttgttttgttttctattccttttttttattaatatctaatttttcttgtcttttctttttttttatattattttttctattcttatttttttttttttttttctttttttatattttttatatcttttttttattattatttttttttttttttttttttttctatttttatatttatttcttttt

SEQ ID NO: 51814 - DNA, 405 bp, Gossypium hirsutum
  Clone ID: LIB3083-013-Q1-L1-G9
tctccctcttactagttttcccccgctgcgaattctgctcgagtgagagttattgagatgagagagagagtttatagagtatggtaattcttacgccatacattttctcttctgtgccatcccttgaagtctccttgtagtcttattttatttccttttcttcctctttttatcttttctctttctctttttttctttccttttttttcttttttttctttttctttttttttttttttttttttcttttcttcttattttttttcttttttttttttttttttctttttttcttttttttttttttttttctttttttttttcttttttttttattttttctttttttttttttcttcttttttttttttttttttttttttttcttttttttttttttttttt

SEQ ID NO: 51815 - DNA, 432 bp, Gossypium hirsutum
  Clone ID: LIB3083-013-Q1-L1-H11
tatcttcactattctgcatctaggaaaaaaaccatttctttgataccagcttgattcctaaaggcggtcggtccctcaattttaaggtcctccttttaggagttttctttgcttttctccttctttttgtgttaagatctagtatattatctcttttaagatgattcatttttatttacatacatttttccttatcttaaaccttttatttgtgtttaattaagtctatcttttactaatttctttttcttcttttttcttttttctcttctttttttccattctcttatttacttctcattcttttttatttttttttttcattctattcttatatatttttttttttttcctttattttatttatttttttttcttattatttcttttatttttttttttttcctttttatccctatttttatttttttt

SEQ ID NO: 51816 - DNA, 344 bp, Gossypium hirsutum
  Clone ID: LIB3083-016-Q1-L1-A10
ctcacatgtcctatattctcatatcaaaatggggctcatgtgcactcggagtataacataaacctataaaaaccgaataaaaaattgaagacccccattcaggatcataaaaatgacatcaccatttggattgaatcccaacgaaaaataaataaatcaatgaaaagtttgcgcgacaagtctagcgaatgtttctatatcatcaactatatgataccccgccaaaacttatccctcttcaatttaatttcattgaaaaaatgtaacaaaaagaccctgctttagaaattagaagttcccataaggcacactaaagcaaacgaaggacagctcgaatccacaca

SEQ ID NO: 51817 - DNA, 380 bp, Gossypium hirsutum
  Clone ID: LIB3083-016-Q1-L1-A12
ccgaaaatctattctggatccctactttaggtaattactgtggttttatctttctaaccatcctataaacccactaaaatcaacgatttatattttagaaaatatagttttaaaccccagtttaatcaactgagatttggaagctctaaactgaaatttaaagagaaatccacttattgtctctcgatttaaaatatacccattcaaagaaggtctattttgttggatccaatttgattcagaatgatgagtttcgtgatcctggattcgggtgtagatcttgggtggattttggtcttagatggatgttagttcgaaatattgggcacccatttcaagaaattgttcctctcctttgaatttgtgcctttttttattgg

SEQ ID NO: 51818 - DNA, 320 bp, Gossypium hirsutum
  Clone ID: LIB3083-016-Q1-L1-A4
gtcacaaggctactgaactgtcaatcgaattagagacaagggaaattgtgttacttggccatgcttccgaatcatcgggcaagttactgagaggttcacttgtcctgtcattaactgagccaatgaaagtaagatcagttcatttggcttttacgggtaaaatgaaagtatcttggtctgaaggcattggtcatcatcaacattatcataaacaagaaaaagatatcattgaacataattgggaattcttacctgcagtagaccacaaaaaggcttttacattaggtgcaggtcaacataaatgggatttcgagctcatg

SEQ ID NO: 51819 - DNA, 285 bp, Gossypium hirsutum
  Clone ID: LIB3083-016-Q1-L1-A6
tagcaaagattttattgcaaatctttcaggatatgggtgtgtgggtcatttgctaaattctgaagacattgctactaattcattcgtaaatcatcctacctctaaaacaccataaaagtaacttgtttgggttatttgttgtttattatatctccattggtgcaggctgtggcgaatctttcagtagagacactggagagaggattgctaactccaaagagcaatgtttggacttttggaattgtcctacttgaattacttacccgccggaagaaccttgacacc

SEQ ID NO: 51820 - DNA, 289 bp, Gossypium hirsutum
  unsure (1)..(289): unsure at all n locations
  Clone ID: LIB3083-016-Q1-L1-C1
aaaaanaaccatcctctcaaattttttcctcaaacctatattcactcaaccaacgtatacctgaaattctttttttgtttcaaccctcaactaaaagaaaaagtattgcatccacaacaattttttaaaactatatttaaaactgaaacctgaatccattaagacattttttcattcaaaaaaaccccaatttgtcattttggcaaaactaaaaatcttattcccatcataaaaaaaaccttgattaactaaaaaaaatattttttttacccaaaaatttatcaatttt

SEQ ID NO: 51821 - DNA, 432 bp, Gossypium hirsutum
  unsure (1)..(432): unsure at all n locations
  Clone ID: LIB3083-016-Q1-L1-C4
ctgcatgaattcntcactatcgccacgatttttaccagtttcccttctactgttctcactgtcatttttgaatgttttgtaggttcccacttttttctttcaagatnttcctatcattaaacccaatcctataattctctaggcatttcaggataagacgtatctttttccgattccaaatggattaactatggagagttcaattgaatctattccatttcatgttttaagttaaaaaccacgatcttactattttcccaacttttcaacttcataacaatgtgaacatgtaatanaaattgcaaatgttaaccttaaaccatcttgttttgcttttcgcgagggagaaacttaataaagcacaaaaagaactataacaaattccataacttttattagttcatcagaaaattaaaaccctacctttgactt

SEQ ID NO: 51822 - DNA, 365 bp, Gossypium hirsutum
  Clone ID: LIB3083-016-Q1-L1-C8
ttcacgttccaaatcctttttatctttttttccagccagagatttagggattgattggaagaatatctagctaaaaaacaagcttcagtcttatatttgacccgtaaaacaaactactcatcaattatgttacattacagaaaacctttttacccttttaacatccaataaaaaaatacattccatctttccctaagaacgatagacaccaataacacatatctgcaaccattattacagatcctccataatactgataatgtgtacaatgaagctcttgaagcctctaatgacaagatcattgataaaacacatctaatcaacaaatatactgaactgcctattaaaatcctgagatttacata

SEQ ID NO: 51823 - DNA, 230 bp, Gossypium hirsutum
  unsure (1)..(230): unsure at all n locations
  Clone ID: LIB3083-016-Q1-L1-C9
catacaccttgtttacaatcttccccgacagacatatccagaatccttccaacatcatccaactattccccctctcnaacatttattgaataaccctggaacaaacgcccttacccgagcgagccatccagaaaatctttcttagaaactcactaccatcaaataatacactcagaccaagcgaaaaaccgacttctacccaaccatctagacaaagaccatgatacacc

SEQ ID NO: 51824 - DNA, 292 bp, Gossypium hirsutum
  unsure (1)..(292): unsure at all n locations
  Clone ID: LIB3083-016-Q1-L1-D1
attcggcaccagccaacacgtccaaataccttgttcccgcgattaanaacagccacncttggaaaatttaatacaacctttattcccccattaaaatctcttctccnatagctttcaatgctttaaaaacctcntatccttcatcggcccgggtcgttttttcttaattgattgaaccaaaaattaaacccanttttgatttttttaaacaaacccggtcttacttaattgtttattcgtacccgtttttttcttattcggcttattcggatcacatctcactttattattt

SEQ ID NO: 51825 - DNA, 329 bp, Gossypium hirsutum
  Clone ID: LIB3083-016-Q1-L1-D10
attcattcttccacctgatctttgccttgggaagcatgtgctctgctatgcttctttccagatggaccatctcatctgacagctcagatcttgtagatgttggctggacatcagtctgggtacgaatctgcaccgaatgggtcactgctgcactctacgtttggacccttgtggcacctttgattatccctgaccgtgagttcttctagacttttatttcagcaacatatctagctattctagaagctattagcatctaaatagtatataaagctactcatttcttagaactatcaaatgttctgttgactttccttccttttgttgga

SEQ ID NO: 51826 - DNA, 237 bp, Gossypium hirsutum
  Clone ID: LIB3083-016-Q1-L1-D12
attccgatctaccccacttctttcaatcaggtacttttgcgcactttagatgataccttgaatcaacaataacttgaactgggaaaggatgaatctaagaagatttcatcgaaccttacaaatggaataagctactataactttatctgtcaaaggaaaataaaatagaatcatacctcagttcaaaatatccctactcgtatgtaggaagagctactgacttccttacaatccaac

SEQ ID NO: 51827 - DNA, 295 bp, Gossypium hirsutum
  unsure (1)..(295): unsure at all n locations
  Clone ID: LIB3083-016-Q1-L1-D8
atgtgtttggtttttgtgttcgaaaaatatatgatgatcatatagaggcaacctcaaccttttttcctatccctactgnagaaaaaaactccaaactattaatataaagactcattgtaagcctttctttttgcccttctttttcttgaaaaaaattaaaatccattgcaacacttgcacaaaatatctatcttatcctctcaccaactttttttttccactctacccatccattctttcaaaacctttttattatcattctcctatcccttattatcttactcaatacctattt

SEQ ID NO: 51828 - DNA, 320 bp, Gossypium hirsutum
  unsure (1)..(320): unsure at all n locations
  Clone ID: LIB3083-016-Q1-L1-E1
aaannntnntttgaagaaattgcactctacattatctcttatagaattttcaaaacacttgagattagacatatccatatccatatccacatccatctcccatatggctcttccattgtgttatctaatgaaaaaaacatactttgcaaaccgagatcatcttcttcagcttcacattcactatcaaatttaacaattaatctactacctcaacaaccaataccatcaacaacaatcaccaattttcacaacaactcaaactatttgaacaatttatattaaaaccaaaaaaatttaaaaaaaaaaaaagattttttttt

SEQ ID NO: 51829 - DNA, 315 bp, Gossypium hirsutum
  unsure (1)..(315): unsure at all n locations
  Clone ID: LIB3083-016-Q1-L1-E3
gagatattgtcaagagttatacacaagaatctactnaatggactatatgctatgctgaagggcaataacgtcttattgtatactactacatgcccaacctaagtttgctttcacatcttcacgggcatcattcatcagaatgccatctttattggagtagaaggataaatatcgcaattggctctgctgaaagaattgcttaccttcaccatcattcaaccccacacataattcacagagacatcaaagctagtaatgtgttgctagattcagatttccagcctcaggttgctgatttttggtttgcaaaattta

SEQ ID NO: 51830 - DNA, 418 bp, Gossypium hirsutum
  unsure (1)..(418): unsure at all n locations
  Clone ID: LIB3083-016-Q1-L1-E6
tagcaagaaaattctttccctttttcttcatcaaggttnaatgataactttgagccatttaaaaacaaaacattgtcttaacttcatgaaaagttataagattcaaagctgcagtttgcataaatccatgtgaaccacttgtgatagatttaattattgttgacccacctaaaacttgggagattaggataaaaattctctgtacttctttttctcattctgaccttaccttcttgaaaatatccattgaccatattgcactttttacataaatttttagcattaaactgttgggttttttattgtatatactaccatctttttttttttcatttattttattaactttgtacttatattttttattttctataatttattaattttaaatctttatatttttttatatataaatttt

SEQ ID NO: 51831 - DNA, 224 bp, Gossypium hirsutum
  Clone ID: LIB3083-016-Q1-L1-E9
ttaccacatttttccattcctatcatcaaaagtgcatctggacatattatccactaactactggaactccaccctccaacctactatcaaatcaatccatactacattcaacatctcaccaatttacactggcaaatctttatcattccaaactgctaacacactacaaaacccaacccctaacctacatctcatacagacttatcatcatccgcatatgcttt

SEQ ID NO: 51832 - DNA, 404 bp, Gossypium hirsutum
  unsure (1)..(404): unsure at all n locations
  Clone ID: LIB3083-016-Q1-L1-F12
gagattttgtgttggtccatggangggttggaagaatcgtgtggattatgggttgnaaaggcanatnttnacaggaaacgagggcttggactgttgataccagaacatattccagtacaagtcgaagggaaagctttttagtttcgagtatctgagctaccaaaagctgctgcctcgttaagtactgcatcgatattcgttttccggaaacataatgagttatgaatttcttgaatttcagtcttggttttataggatacgtgtgtagcgacttgatcgatacaaacacttgcttagcaattttaggtattgatcaatttgtttgactttgtcgtcgtcgtatttatgtaaggttagtatcggtttgttgcctggatactgtaatggcagcgacctatgatcac

SEQ ID NO: 51833 - DNA, 282 bp, Gossypium hirsutum
  Clone ID: LIB3083-016-Q1-L1-F2
gtctggtaagtataaaattatgatcttccaaaggggcaagagaataaatacaagcaaaatcccaacgctatcatgaaaatgaattaacaaatatcacaagatttgtgagatcaacataatcatgaaaatgaattaacaaatatcaaattctaatataatctcagatccatattcaatatctaagtaaaaccacgtgtaaccccaaaatagttgtacttagtctcaaacgctatggacatctgatgattgtatgtacaactctaacattcaatactctcaata

SEQ ID NO: 51834 - DNA, 364 bp, Gossypium hirsutum
  Clone ID: LIB3083-016-Q1-L1-F3
gttggtacattttggatcttcgagcgaagttttggagcaccttagtgcatctgattcagcgcttgtatgcctaatacacttatgttctattccagcaaccactgtttctgacattgcagcatcttccgttgttctgtcttgtaaaattgctgatggtgtctcgattggtgaagattctctaatatacgactcgaacatatcaagtggaatccagattggttcccagtctatagttgttggtatgaatgttccaaaggacaatgataatatggcaggtaattccataaagttcatgcttcccaaaccgcatttgtttttggaaagtccctttgttagaatttcctaaaaaagtaattgttttttg

SEQ ID NO: 51835 - DNA, 314 bp, Gossypium hirsutum
  unsure (1)..(314): unsure at all n locations
  Clone ID: LIB3083-016-Q1-L1-G12
aaatgaaaatccacagtcatcctcgtaaaattttatcatatctcattccatctaatnaataatcccaatacaaaatgaaagataatgatgatgttcgcggttttaaccgtatcctcaggcatttcatttccattttagatccaacaaattccaaaaagtgaaaagtttagtacattagcctctcctttcataacaaatatttaaggatcaaccaatacctactaaatgtatcatacaatgattgctctaccctcaaattactaacgcttatctctatcctcatttctcatcatttcactttccctttttcttac

SEQ ID NO: 51836 - DNA, 217 bp, Gossypium hirsutum
  unsure (1)..(217): unsure at all n locations
  Clone ID: LIB3083-016-Q1-L1-H2
atccggcactatccaccccgttcttacacacttttaccatatcctctccctagtctattagaatatttatttagatcttcatcccctacttcntcccttcttctccctatttatctactccaatcatttatctattctccaagtttcttacccattanctaattcttacctttaacaactacctccctttcactcccatatccaactaatctaatca

SEQ ID NO: 51837 - DNA, 250 bp, Gossypium hirsutum
  Clone ID: LIB3083-016-Q1-L1-H3
cttaaccggcttaaaaatacacttactaatactgagaagggactactggaggcccttaaggccatcatcaaaaatatctacacccatcaatcagcctgatcgcttgcaccagttactacaaatgtctctgggatccttacaaattttgctaatcatgcattgacccctatagcctggctttataggtactcgcataaaatctattaaaagactagcatatataaacaccacaagctattctctcacatac

SEQ ID NO: 51838 - DNA, 263 bp, Gossypium hirsutum
  Clone ID: LIB3083-016-Q1-L1-H9
ggtaaaactcgaaatgctttttcataaccagataaaaccatttccaacttacttattcaaatgttcatatattaatacaacattcaaatacaaaaataccagcaatctttcttgtcatcttggaggaggcatatgtgattatctccccaggttatcaccatccatatcgacccacacgaaccaaattcataaacaagattattaaaagaagaggaaatcaattaattcataacctaaaatcctaaagctcaaatagtctcaca

SEQ ID NO: 51839 - DNA, 281 bp, Gossypium hirsutum
  Clone ID: LIB3083-017-Q1-L1-A10
cttcattgctctccaacctataatgtaatttctaaacctttgacattatgttcatcaacattccatgcaaacacttaaatattattatattccattacattaaataaaagtttttaacacgctatacttttgtcatctaaacatccttcttagttcatacattgacagatatctctgttggtatctattatcaagatactctagaaatcacttccaatcttttccccaaatgttcgatgatatctctagtaagagttgacctttttttatgctcaaaatca

SEQ ID NO: 51840 - DNA, 474 bp, Gossypium hirsutum
  Clone ID: LIB3083-017-Q1-L1-A11
gtagaggatcccctgcagtggcgaaaagacaatggcaactggaacaatacgccgcgaaccgcgaacaaggaaacggaagttgaaggtattgatgcgggtaactatcacgtaagggttagatctgttgcagctaatggttcagcgtctggatggtcagcaattgttagcgccggattaactggcaaagttggcgagccagaaaagccgattaaccttacagcttcagataatgaggttttcggcattcgcgtaaaatggggtatgccggagggaagcggagacacggcctatatagagttgcatcaagcgccaaatggtgctgatggtcatcctatagttgacgaagcaacgctattaacgcttgttccgttcccacaatatgagtattggcattcaatactgccagcgggtcatgttgtctggtacaaggcaagggcagttgacaaaatcgggaatgtgtctgattggactgac

SEQ ID NO: 51841 - DNA, 355 bp, Gossypium hirsutum
  Clone ID: LIB3083-017-Q1-L1-A9
tactggtcaacagtagcattaagtcctgggacaacataattaaaccatgcgctatgaaagtcctgggtttgcgcttctactacgcattttaggagctgcattaactaaaattggaaatgcaacctgcgtccaatttccaacagatccgctattttcagatagcgatataacatatgagtaattgaatggagcgccgatacctccagcatgactactatcaccataataaattataccagattttatatacggtgaatccatttgcataccatcatcaattgcactcatagcatctatgttgacacacgcacctctagcattgttagaacctgtgtcaccctttgcaacaccaagc

SEQ ID NO: 51842 - DNA, 216 bp, Gossypium hirsutum
  Clone ID: LIB3083-017-Q1-L1-B10
aaaatcccctcctttctgtacctcttcaaaattgcggatgcctgtccaaagccataccttatctgctatcatcttacagacttttctatcccatgccccatcaaagagcacaaatatcacaatgaatcttcacattacattattcaaccccttcttgttgatctcactaaattacacaactaccatatatacacttaatcttatctacacaaccca

SEQ ID NO: 51843 - DNA, 363 bp, Gossypium hirsutum
  Clone ID: LIB3083-017-Q1-L1-B11
aatcccccgctcttcatcaattcttcactagctttaatatttctgggcattttcaatatcatctgtgcgttttaatccctgaccttccctcactactcatctccctcatcctcttcatctccttcatcacaatcatctccaacttcctcataatctttttccatcacatcaatctcctcactaacctcttacaactctccttcctccattccttcaccaacataccacttcacaaattcactttcttcatacatcatatctaattttttttcaattctataaaacacttcctcaacactcctagaattatatatcatgcatactaccctcttaacctcctcatatactccaccctcaacaaca

SEQ ID NO: 51844 - DNA, 110 bp, Gossypium hirsutum
  Clone ID: LIB3083-017-Q1-L1-B12
aattcgcacgagtgattatttgtggttcaaaatcttcctcaactgcctgttcaaattccaatgaaagtggaaagccatggcttggtgggattatgttacggactttgcta

SEQ ID NO: 51845 - DNA, 397 bp, Gossypium hirsutum
  Clone ID: LIB3083-017-Q1-L1-B9
aacccccccaactgcaacaattcttcaccagcttttatattactatacattatcaatatcttttgagtcttttcacccttaaccttccctcacaactcatctacctcatcctccacatctccttcatcacatccatctccaactccctcataatcttcttccatggcaacccagacctcactatcctcctaaaactctcctaccttcattccttcaccaacataccaaaacactaaatcacgttatgcatacattacatctaactatatatcaatgctacaaaacactttctcatctacttttcatcctataatcatccatacttccctcttaaccctttcaacgtctccaccctaaacaacaattcattgcatacactttataccacacttaaaat

SEQ ID NO: 51846 - DNA, 317 bp, Gossypium hirsutum
  Clone ID: LIB3083-017-Q1-L1-C11
attcagctttcctgttggctttctatacacgcatactcctaacatcaatatcattcaccaaaacattctcaatcattaattcaaccacgctctgaatcttatcttttcatttcatcaccttttcttcaaaccatttataaccctcccaattcttaatatcaatcttaatatcatccctgataatccttctatcttctcatgacatacctctcacaaattcaatccaatcagacacattccccattttttcaactgccctatccttttaccatacaacattaccctcttgcattatttaatgccaatactcatatttt

SEQ ID NO: 51847 - DNA, 379 bp, Gossypium hirsutum
  Clone ID: LIB3083-017-Q1-L1-D10
gatttatcttacacggccattgccaagctaagaggcccgatcgaaaatgccagaaggggagcatcggcatcctaatgctcatcgttgcaacgatcaatctgaagatgatatccaagctcgatatgagaggaacccatctaagaccgttccaggaccttataagctcttttggcagtacatgccttctaaaccttgtatggaaccaacacaaccatacacctataagcagctggatcccccaaagaggcatgtggaacttgaatgaaattcccttttttgcacttatttttacataccagattgttgctgttactgcaagacacttttcatatcagtcatctactagaaaggtatatgttcagaaagtcactgatataat

SEQ ID NO: 51848 - DNA, 286 bp, Gossypium hirsutum
  Clone ID: LIB3083-017-Q1-L1-D11
aaaaggctttttaaatcacacatcggatgaaactgcgattaaactcaaagattattgatgctctttcatggtctcgtttatttggttgcgcttgaattatcgcaattgtcgcagataacataatgtttaaatcacctgttaaaccttgcacacaactttaagatattcacgtttatgatcgcaatcagatcaccattcaggaaagagaaactaactctcgcaatattctctactgtgagccaaatatttacaagatcttccctggtggtcatattcctgaattttt

SEQ ID NO: 51849 - DNA, 278 bp, Gossypium hirsutum
  Clone ID: LIB3083-017-Q1-L1-E12
cgtttaatttaccgatgtggtccattttctcgaggcacgcttcaaaatgagggcactcgttccagtaccaatgtaatttatcataactgactctcaaaaaccccatactgctagtgctgccgcttatcaactcgctcaattatcattaattcacatcctttaactcctgacttttaacttcctcctagactagactccacaaacaccatcacaaccttgcactcgattatattgcatcatttacctcactttaagctggttatcactctatactttta

SEQ ID NO: 51850 - DNA, 325 bp, Gossypium hirsutum
  Clone ID: LIB3083-017-Q1-L1-E8
atatcatttttaggggctcctgcacaccttctggatgggatcagctagttagaagtttatcttaatcgcaacctgtagagggctatgaaggaaaactacacggtttatcttatcagggttcattctcctagttccttacctactatacctgcattttcgatggtgaagtcgttgcatatgaatgatatgtccgatgcaagcatggactagatgttcgcacgactcgaccctgacagcaatgcataggctctttccaggtctactgaaatagttgatgatgtcattatgacacaatctgataaattgcatcacgttaatatgctaa

SEQ ID NO: 51851 - DNA, 410 bp, Gossypium hirsutum
  unsure (1)..(410): unsure at all n locations
  Clone ID: LIB3083-017-Q1-L1-E9
tcacaaatctatcctncttanttctcctacacttctatttgttatccacacaaaaagaacaaaattatgcccgatttaataataattaaaacaatatattatctatatatataaatttatattttcttttatctatatcatattcaatacactatcgcttaaccatatctattatttatattgctttctctatattatttatccaattattattcattttactattttcctccaaaaatctatatatctatataaaccctctaaaaatctttaacacattaacatctatttaacaataatttattctcattcatatcatatactttaaatttaattttactttatcatttctatttaactttatcacacaaaaaactactttaccaaaacaaaactcctccataataatc

SEQ ID NO: 51852 - DNA, 296 bp, Gossypium hirsutum
  Clone ID: LIB3083-017-Q1-L1-F10
gtttttcttaacttattggctctatttgaggatgaaggttttaaaatgtggtctagaaaacgaaaatcgtgaagatcttttacattagatctgattatgtagctgggcctacaattgctgtgattgcacttaaatgcccatttattgaaatcgctttcgtcgatatctctttaccatctattaatgcatggaatatttaccagcttccaatctattatcctggtcttgatgctgttgtgaaactatttacttttaagaaccttttcttcatcacttatgtataaaaacatgttctt

SEQ ID NO: 51853 - DNA, 176 bp, Gossypium hirsutum
  Clone ID: LIB3083-017-Q1-L1-F12
ggtattattaccaacgaagctataaaaccctacgtaacgtttaaaaagtgggagagccgacccaatacatacacaacatgcaccccaatacccatataaaacctaatcctaacaaattctaacccctactaccataccatttacaccaaactcacaacataattacataataaata

SEQ ID NO: 51854 - DNA, 125 bp, Gossypium hirsutum
  Clone ID: LIB3083-017-Q1-L1-F6
gtcaaagctatttttttcatcaaatttaggaagtaactgtctaatcatacttgctagacccacttgacttcatatcgctctttcactagttttcccttcatcatgtactacacatcattttcttc

SEQ ID NO: 51855 - DNA, 215 bp, Gossypium hirsutum
  Clone ID: LIB3083-017-Q1-L1-F8
gatcaacttaaggcacccactcctcaacgaggtgatagggaaatttcccaaggcctttgccgcttaggtataaagcaaactgtttaaattttttaacagaccggtctaaacgcaactagcttaaattcaacccatcccaattcatttgcctcccccattaaccaccttaccaaacccaaccctaacaataactccgatagcaccacttaagatta

SEQ ID NO: 51856 - DNA, 261 bp, Gossypium hirsutum
  Clone ID: LIB3083-017-Q1-L1-G11
ctctcttttagaaacctacttaatgacaatcgaacgtttaaataaaccaacgcccctacctatacatctaaacaagatattaacgagtccttttcgttctctagttacatcaaacatgtcaaaatacatctcaataaccagcgaacactagttgcatatgttactttcaaggatccacatggagcaaaaacctactttcttctttcacatgccacaaacgtacaacaatcatacaccattcatctgactcctaactacaat

SEQ ID NO: 51857 - DNA, 212 bp, Gossypium hirsutum
  Clone ID: LIB3083-017-Q1-L1-G12
ggatcttctcagacgcaaccagatcgaaaactcgtaccgtttcaaatgggcgaaatgcaccgcaacatctcgagcaccaacaacactccaaggaacatggtcatcactgatccctgctcatgaaaaagagtggcatttatggcatactgcttctggctgcaatatctgagcaatatacgcatgaaaatactgtctttcatcaaatccattgc

SEQ ID NO: 51858 - DNA, 278 bp, Gossypium hirsutum
  Clone ID: LIB3083-017-Q1-L1-G8
actttggttctagcggagtttagcgccgtgagggctaaggctagttcggtggcacttagggtgctggagaaacttcctgaggaggctgattcgagattatgcttctcgcaagatcgatatatgtttcatatccttagatccgatggcctatgtttcctctgtatggctaacgataacttctgaaggagaattccattttcgtacttggaggatattcacatgaggttcatgaaaaactatggcaaagtggctcattatgcacctgcatatgcaatgaa

SEQ ID NO: 51859 - DNA, 396 bp, Gossypium hirsutum
  Clone ID: LIB3083-017-Q1-L1-G9
aggatcccccacgaggggatgaaaaaccgcttgtgcgctcttgttacttgcgctgactaaaggcactgcaaagaggcggcggcagcgcttgcgtctggcacgaaatatcacattattaccggaaaaactggagagaaacagcggcgcttatggcttgatgatgcatatgaagggcgcgtgaaatatatcttccaggttcaggcgctaacaactggcgtgaacgttccgccgtgggatacttctgttattttgcgtaagatcggaagcctgacgctattaactcagcttttgggtcgcggtatgcgtcaattaaaaacttaccataaagaagtattggggatgcacaaaacggatcacctttgtttggatttttcaggcacgatgtttgaaatgggt

SEQ ID NO: 51860 - DNA, 245 bp, Gossypium hirsutum
  Clone ID: LIB3083-017-Q1-L1-H11
tcatgaatcatattgacatcttacagcagatttataaactatctccatcatttaaaaaagtacatcctgaattgattcatgcattgatccaattatcaaaagatttcgtttgcgttaaccacttcaaatacaagtacaatcgctcttttgcttcttatacattccaccttattactcttacttctcatttaaacatgaatttgaaagcgtacaaagctactcccatcgtatatcatcattttcac

SEQ ID NO: 51861 - DNA, 337 bp, Gossypium hirsutum
  Clone ID: LIB3083-017-Q1-L1-H12
cattggagtttgagatcactgctgacagttctggaatgtgcacatgtggaagaggggcaaatcattagcggaagtactacaacccattaatcccacgtagaatattgctgacttcttacacgacagcatacatagctactaaatcttacgacgctctcgatatttgtctgcacaggaattccgcaatacttacctttcaggacaatcctccagatataacatacgccgatcatttgacaccatatcaaatcagataagctgctttcaggcacgcacttacggataccggaccagaataaacggtattagcatccgctgctgccgataattcttacac

SEQ ID NO: 51862 - DNA, 384 bp, Gossypium hirsutum
  Clone ID: LIB3083-017-Q1-L1-H4
ttttcctccattcctaccagtttttgactctctggaactggagccgaacatggaaatgaaggcaaatctctcactcgacttaatcgccgacatcctcagccgtttacccgttaagcatcttctatgcttgcgatgcgtttccaagctgtggcgatctttgatcggcgatcccgatttcatcaatctgcaccttcgccactccctcgactcccgcactaaccacaccctcatcctcaaaaacaccgatcttcacaccgacgatctcgcctacctcggccctttcgccaagctggaacaccctttgatgagctacaaccatggcgtctagatccagggttcttgcaacggcttgctctgtatccgtaacatagttgaagacatggc

SEQ ID NO: 51863 - DNA, 286 bp, Gossypium hirsutum
  Clone ID: LIB3083-017-Q1-L1-H6
catacccttttcaccatcggattaaccttctagactaggttatcctgctacttgacctacatttcttctcacttccttcagaaactatctgcttccaacaacaagctcacttacaactgctacagccatacctttaactatctcattaataacgtctttacttactgtatacttgctcttgaatccactatgcaacaggtgccaattgcctttcttgagagaattaatgaggatattaccaagatatatcgaggattaaaagcttcacctgctcctgcatacatct

SEQ ID NO: 51864 - DNA, 255 bp, Gossypium hirsutum
  unsure (1)..(255): unsure at all n locations
  Clone ID: LIB3083-017-Q1-L1-H9
taggatccccctctggaggcaataaatagcgaaagatgatcgcatctaactcaaaagtctttgtaagagaattgaaagctcaacactggtncgcgttaattaacaacgctggtagatgaatatcaggaattctacgacccgttagacaaaatatactatatctgggttcctacatcacacaccacgccgcaactattacctacgaccctcactcttcatgtctactttgcaataattcacaacttaactttacct

SEQ ID NO: 51865 - DNA, 319 bp, Gossypium hirsutum
  Clone ID: LIB3083-019-Q1-L1-A3
tctacaccaatttctctcttctatccgtaacgacgtcacgggtaataaggagactcttatgatctagcctgatgaacagtgccctgtccacttcctcgttgccttcacctttgacgccactgtcactggcagcatgactgtttacttgtttgctaaggaagagctcaactgcaatctaacatcagtgaaagaagacctaatgaatcccgatactgttagcttcaaagagggtcttggtcaataattcaagctacctttatgaacatgaattgactttttattgtttgaaaaatcatatatattataatattgatacatg

SEQ ID NO: 51866 - DNA, 392 bp, Gossypium hirsutum
  Clone ID: LIB3083-019-Q1-L1-A9
ccgaccggaatgcccgggtcgacccacgcgtccgcccacgcgtccggttgattattttttcttcggctgcgtgctgatgctcttgggttctcacagacacacaacagcaatggaagcaatcacagagggagtgaacaacatcaacatctctgattcttacaagaagaatcacattcaggtctccaacaccaaaaagcctttcttcttctacgtcaatctcgccaagaggtatatgcaacaacataatgaggtcgatctctcagcactaggaatggctattgctacagtgtttactgttgctgaaatctttaaaaacaatgaacttgctattgaaaagaaaatcactacatcaacaggtgacattaaagatgattcatagaggcatacctttc

SEQ ID NO: 51867 - DNA, 482 bp, Gossypium hirsutum
  Clone ID: LIB3083-019-Q1-L1-B1
ttcctgggtcgacccacgcgtccggcgagagagatccggagcagccgcagtcccaccgaccccgccgccggtcgccctccatcgcctcgccggtgcctctcgtttctcttttcaataatcaagatgagccgtggtggtagtgccggtggtggtcaaagttctctgggttatctctttggaagcggtgagccccccaaaccagcagtggcaccagctgcaagtgctccacctgttgagaaaccatctgctgcaaagactgatgcggccaagcaggttgctgctggggttaccagccaaaccaataactaccacagggctgatggtcagaacactggcaacttccttacggaccgtccttcaaccaaggtccacgctgctcctggcggtggctcttccctgggctacctgttcggtggcaactgatgcccgtgctggtgcgctcaccaaagttatccttccctgcctgctgcgtgctatgtctg

SEQ ID NO: 51868 - DNA, 223 bp, Gossypium hirsutum
  Clone ID: LIB3083-019-Q1-L1-B5
ttaagatgttttggttcaaaatcttctccaggcttgtgtgtacaaatttgccaatgaatggtgaatgccatgtcttatgtgggattatgttacggactttgttatccttctgccctatgaatgatatgtaatataacaagtattgttctaataaagttattcataccctttgtgtttatctcaataaatattacaactgtctttaatacacttaatctgatat

SEQ ID NO: 51869 - DNA, 300 bp, Gossypium hirsutum
  Clone ID: LIB3083-019-Q1-L1-B6
ttaagatgttttgtttcaaaatcttttcctggctttcctgttcaatgttgccaatgaaagtggaaagccatggctttgttgggattatgtaacggactatgctatccgctgccctattaaagagaatatatataacaaggagtgttcatataaagttatccaatcccttgttttttatctcatttaagtagacaactgtattttatacacttaatctgattttgacaacccatttctgaaatctgttctatatccacacattgtaaaaggctctctttgagatttaactatactttcaac

SEQ ID NO: 51870 - DNA, 327 bp, Gossypium hirsutum
  Clone ID: LIB3083-019-Q1-L1-C1
ttctgggtcgaccgacgcgtccggataacctcaatggcagccagggccagatcctgtggatctgctggttcacgctatgctgcgacacatggcatatgaccatggtctacggttaatgagagctgatcgtcaaggcctgcaaccttactaactgcaagctggacttgactgattactagcatggctgatatgctgacgccggcgccgtgagcaccgatgcatcgctctgcgcctccctctgtaaggacagtgctactctgctgtcggatttggctgaagggaatatgctgtgcttgatcgattcgggatcaatcattgaatacatct

SEQ ID NO: 51871 - DNA, 274 bp, Gossypium hirsutum
  Clone ID: LIB3083-019-Q1-L1-C2
aattcccgggtcgacccacgcgtccggataacactaacggcagccagcaccacattctgtggatctgctggttcacactctgctagaacacatgtcatattacaattgtctactgttactgacacctgatcatcaatgcctacatccttactaactgcaagctccacttgactgattactatcattgttaatatgttaatgccttcaccatgagcaccgatacatcgctcttcgcctctctctctaaggactgtgttactctgctttcttattt

SEQ ID NO: 51872 - DNA, 271 bp, Gossypium hirsutum
  Clone ID: LIB3083-019-Q1-L1-D10
accggtctcggacttcccgggtcgacgccactcgtccgcggacgcgtgggcggacgcgtttcaaaaccctctctccccaaaaacccaaaccctttgcggctgctagacccgttgtgggctctcttctctctctcttcttttttttttctctttccctctcttcttcgctccttttagggttttctcaactcttcgatttggggcttaaaccctctccgattcaaattcggatttagggcttccctttctctattccgcctccaaagaaaaa

SEQ ID NO: 51873 - DNA, 301 bp, Gossypium hirsutum
  Clone ID: LIB3083-019-Q1-L1-D2
cgtgctttcggaatacctcgttacggccagcctgcgcgtcttgtagttcgggcaaatctcgtggcagcaggtggcacgccatgccgaccgccatgtctcacggattccacggcacgcgccccgacatcaactgcgtcatccacggctaccgcctcatggtctgcgttacctactcctaggccaacacctgcttcatgtgcgacgtagccagcaaccagtgtgaggagctgcccaagtacatcaatgctgacagcaaggccagctagttcctggccatattcttcttcgagcccatagtgga

SEQ ID NO: 51874 - DNA, 439 bp, Gossypium hirsutum
  Clone ID: LIB3083-019-Q1-L1-E1
attcccgggtcgacccacgcgtccgcccacgcgtccggatacgttcattaatcattatctggcacactcctctcctcactaccggggcactagcagcttttaataacatccttggcacattcctatactctcaagcaaaagcctgaggcagaccattatgactaacgtctgcagaatcattatcaagcactaaatgcaattttgctatgatccattaatatgtaaatatcgggttagctttccgtattagagtttgtaataatgcatgaatggctctactagttcgaacttgattgttgaccacactcaaattcataagccatgaactgctgtacagtgtacctaaataatactgtaacggataattcacctatgctgattattaataggtatatatatagcccaagccggaattcccttttaatataataaaataaaa

SEQ ID NO: 51875 - DNA, 350 bp, Gossypium hirsutum
  unsure (1)..(350): unsure at all n locations
  Clone ID: LIB3083-019-Q1-L1-E12
accggntcggaattcccggcgggacgccacgcatccggcgccttctgccctccccagccattaactgaaaaaaaaaaccaaaaaaccagaaatactgcaaattttttacagttggtcggccgccgcacaaccaccacctactccgttcggatctccggcggacctactatccctactactactctactctatttacacggaagaacaaaaaactatccccctcccccaaaaaaaaaccccaaagcggctcggttagggtttagttttgtaccatttcgtgtaatctaatttttcatccgtaaaaatctaattttgaagcggccagatggcggaaattcaagtgcaacatc

SEQ ID NO: 51876 - DNA, 398 bp, Gossypium hirsutum
  Clone ID: LIB3083-019-Q1-L1-E2
aattcctgggtcgacccacgcgtccgccacacgtacggatactatcattaatcattatctgcttcactcctctactcacatatagtgcacttgcaacttttaaaaccatgcttggcacattcctatactctcatgcaaaagcctcatactcaccatcatgactaacgtctgcataatcattatcaagcactaaatccaattttgcttaaaccatcaccatgtatatatcatattagctttacgcattagattttctaataataaatcaattgctctactgtttcaatcttgattattgtccacactcaaatccatataccattaactgctgtccaatgtacctaaataatacatctaacttaaaattcatctatactgattatttatatatatatata

SEQ ID NO: 51877 - DNA, 339 bp, Gossypium hirsutum
  Clone ID: LIB3083-019-Q1-L1-F10
taccggttcggaattcccgggtggacccactcgtccgatgaagtaaactcgataaagtataagttaatgtaggaccaacctctgctttgctcagcgtgtctcctgatgagtcaaaggagataaacaatatatatattgactcttctggaaggaagccagttactttacagagatcatggtctttaagttcaacaaaagtacatctcccacacgaattcaaggaaattttcaacttatgaacaatgaaccacagtcctgcaacaagaacctctatcaaatcaaatgaacaatcaattaaaaaatctttcattgcgccaaacattgtacctcatgacactc

SEQ ID NO: 51878 - DNA, 277 bp, Gossypium hirsutum
  Clone ID: LIB3083-019-Q1-L1-F3
ccatcatacatctacacggatttttgcaaattatatctaccataaaactatcttattcaattttaatttcttatcccttctcaatctttatattcttattcaaactatatatactcatcttcaaattcaatatcacttctattctattcataatttactttcttctcttataatcatactatctctttcataaactttctaccttaactactatatatattctttatatcaaccaactactaattcttattatccaaattcatatattcttactact

SEQ ID NO: 51879 - DNA, 314 bp, Gossypium hirsutum
  Clone ID: LIB3083-019-Q1-L1-F4
attcttattcttattttgctgttttcttatcatacatctaccgcgtatatttgtctatttattactactgtaaaactatcttattgaattttaatttcttaacccttctcaatctttatgttgttattcaaacttgtaatgcttatctacaaatgctatgtctcttcattgcttatcataagtttcttgcttctcttataatcatactatcactttctgaaactttctgcctgaacttgcttatattgtctttgtattatccaactactaatctatattatccaaattcatatagtctttctgctgctcttatt

SEQ ID NO: 51880 - DNA, 426 bp, Gossypium hirsutum
  Clone ID: LIB3083-019-Q1-L1-G1
gaattcccgggtcgacccacgcgtccggttgtatatctgctggagttggtctactacattcatgttccaccatttcatattctaaggtgattgggttttctagatacatagcttcaactattgtatgtcgaattgcatagcagaatcaatgcatctacaaaaactaaaacgtcttaaaacgcaggcagtcttactattcaaagggtgcctgacctgactggtactatcctaaactagtgaaataacaatactacattggacgccttgctatatcagtatgcaatacattagtatactcatagttgaagcatcgaaccatcttaaagtgagaaaactgtacccatcagaacagtattgtctactaagatgacaatctgctctagctgtgctcctttagtgtacctattaagatgatacctgacgcta

SEQ ID NO: 51881 - DNA, 460 bp, Gossypium hirsutum
  Clone ID: LIB3083-019-Q1-L1-G2
tccttgctcgacccacgcgtccggttctatatctgctggatttggtctactacatccatattccaccatttcaaattttaaggtgatagtcgtgtctatatacatttcttcaactattgtatgtccaattacatatcaaaatcaatacatctacaaaaactaaaacatcttaaaatgcaggcagtcttactattcaaaggttgcctgacctgaccggtactatcctcaactagataaataaccatcctacatttgacgctctactatatcagtatcctatacattaccatactcctacctgaaccatccaaccatcttaaagatacaaactgtacccattagaacaatatcgtctacttatattaccatttgttttaactatacttccttatttgtccttttaattttataactaccgctattaaattctatccaccaatttctcacccttattatttca

SEQ ID NO: 51882 - DNA, 306 bp, Gossypium hirsutum
  Clone ID: LIB3083-019-Q1-L1-G4
gacccacccgaacgattgtatatcttctcgatttagtctactacttccatatttcaccatttcaaattctaatgtgattttgtaaactatatacattccttcaactattttatatcaaattacataacaaaatcaatacatctacaaaaactaaaacatcttaaaactcatacaatcttattattcaaattttaccttaccttacctatactatattaaactagttaaataaccatactacatattactccttacaatatcactaatcaatacattaatatactcataccttaaatatccaaccat

SEQ ID NO: 51883 - DNA, 377 bp, Gossypium hirsutum
  Clone ID: LIB3083-021-Q1-L1-C11
aaaagaggcacaacacataaacaaatctctatcagcttgaggggatgtgattgcttcccttgcccaaaagaatacacatgttccgtaccgaaacagcaaactcactcaacttcttcaagactcactgggagggcaggctaagacactaatgtttgttcacataagccccgagcctgatgccttggctgaaacaataagtactctcaagtttgcagagcgtgtggctaccgtcgaactcggtgccgcccaagtgaataaagacactgcagatgtcaaacaactcaaagaacagattgcgagccttaaggcagctctagcaaggaaagagggagaaacagaagaaagtcgacattctatttcgcacactgattgctctg

SEQ ID NO: 51884 - DNA, 393 bp, Gossypium hirsutum
  Clone ID: LIB3083-021-Q1-L1-E9
agaaggtgaaggagattttggagagcaatgaaaggggagtaatccccaagacgcctaagggtactcgggattttgcgaaagagcaaatgacaataagaaagaaggccttttctattataacaaaggtttttgagaggcattgtgccactgccctggatactcctgctttcgaattgaaggagactcttaccggaaaatatggggaggattcaaaattgatttatgatcttgcagaccagggtggagagctttgttctctacgatatgatttaactgttccattttctcggtatgtggcaatgaatggtctcacctcatttaaaagataccacatagataaagtttggagaagggataacccatctaaagggagatatagagaattttatcaaa

SEQ ID NO: 51885 - DNA, 439 bp, Gossypium hirsutum
  Clone ID: LIB3083-029-Q1-L1-A1
aaagaaccctatgattattatttgcacatgcacaaaatttaagagaaaaaatatacaaattacaaagggggccctcaactcttcctttcggttagaggtcattaaaaagagtcccctaaaagaaactatgttccttctccatatgcataaatggaaggaaaattgtacccacaaagaaaaagaagaggataaatgagaaaaacctacagctattgagagaatagaggccccttatcaatttatcaacaattaaaattacttgagccttattaatgaaccaatgaatcaatgatgaaacaaatcacaaagtccattgatcaggtactgtgagaaaatatgtagtcattgcttttcggaaccttttcttgtattgtttgggagaaataattgttggggatgcattttttggcccacctagtatcccagatgctttaaccca

SEQ ID NO: 51886 - DNA, 237 bp, Gossypium hirsutum
  Clone ID: LIB3083-029-Q1-L1-A10
ctattgacataagactctaaacaatccttatttctttaaactcattgcctccaccatatatacctaacaaggtaattatcaatccgtataattacatacatactcctatacaattcaaccgaccaacttacttatcttttaaaacatcatccacattaatcataatgtcaacaacactttttcttttaccccattcattgtcctaccaatatacaacccttgtcataattttcattt

SEQ ID NO: 51887 - DNA, 191 bp, Gossypium hirsutum
  Clone ID: LIB3083-029-Q1-L1-A3
agaaaacacaaaattcattaattttcatcaaaacattcacttcattgttccttctggaactcaacagacgttatcatgctttctcttggccccttaattttattttgttggaatcaattatctttcttttgttgttagaatcataacgaacggcaagtacagttttttttttttaacttttcgaccttctt

SEQ ID NO: 51888 - DNA, 187 bp, Gossypium hirsutum
  Clone ID: LIB3083-029-Q1-L1-A4
aaaattatactcacctcaacaaaggcgattttttaaactataaccacccataatcactatttattcaaataaattcaccattacaacattaattatttcacacacacatttcccaatcaccatcatctttattaactatatattactatataccattaatttactacataatcatctcacatccacc

SEQ ID NO: 51889 - DNA, 394 bp, Gossypium hirsutum
  Clone ID: LIB3083-029-Q1-L1-A5
taaaaatattctattaatgcataaatacctcaacatcacattaactttattgaagtctagatgtcttaattagattcagaatgccaaaataaaatataattgtacactatatgttctattcaaatgcattcattgttagtctttaagctattttcctcaacatgctgaagcttgaaaaaaatgtgtaaaacaaacatggctagaaacataaactaaaaattaaaaggaaaaaggtaatctgttcctgggggggtgttttagaaaacaaattctaacaaattttgatcttgataatttttctctcactgacatatttttttccaaaaagcattcatcttccctttgtatctcaatatcattctttcttacaaccattcctctttttgccttcttt

SEQ ID NO: 51890 - DNA, 304 bp, Gossypium hirsutum
  Clone ID: LIB3083-029-Q1-L1-A8
aaaacattccaccttactttacctttaaaaaattattacataaatcttaaaatacaaattcccatttcataccaattctttaataacacccaaatatttcacttactaatcatttttattactccctctatatcttacaattacctactttatccaatataaaaaattcaacctcttcaaacccatttttcaataactttacttatacccttcttcccaataaaattcaaattacctcactccaaattaaccattttttaaatttcacactcctctttccaaccaaccacccaaatcttcttct

SEQ ID NO: 51891 - DNA, 357 bp, Gossypium hirsutum
  unsure (1)..(357): unsure at all n locations
  Clone ID: LIB3083-029-Q1-L1-B10
attctttccacaaactcacttattaacataatcacatnatatcagttggattttataaaccataatcacaacatatcctttaaattataaaaacaactgcaattaaacttgaaacattcaaatactttattaataaaacttaatcaacccttcttcacacaaaaatattctccctacatttcttttattctctcataacatctcttctaaattaaaatttcttaatcttttatacacaaaacacaattactcactcacttaaaccttatacattttttttatcaactctataacacttaaactttaaccccattccttttcataccaatcaacaatcttaacaatatttttctaatt

SEQ ID NO: 51892 - DNA, 143 bp, Gossypium hirsutum
  Clone ID: LIB3083-029-Q1-L1-B12
aatacataatttattttgaaatacatttctacaaaactcacaataaagaacaaaagcaactgcattggttttattctttctaaaacataaacagactatcaaactaacttatactcaaaaacctttcaaatcattgatactac

SEQ ID NO: 51893 - DNA, 379 bp, Gossypium hirsutum
  unsure (1)..(379): unsure at all n locations
  Clone ID: LIB3083-029-Q1-L1-B4
ggctnaaacatttanaaagctatactcatcaaagaatcaaagaccnataaggcagaggtttttttaaggaggggggtgacatttttctaataatttataaagatgtggggaatgaagatagtgtatttcccatattttatgaattttttttcaattcttctccgcctatttgtccttcaagattatcccataacataaagtttgaacattgctgtaattcaacccattcattcaactccttctgcttcctctgcaatcactcatatgtcatttctccttcctcttcaatcctacatgattggacttttaccttcatcaccatgttttccattttctctaccaatgttgtcaaataattgttttttatcctacccacttt

SEQ ID NO: 51894 - DNA, 357 bp, Gossypium hirsutum
  Clone ID: LIB3083-029-Q1-L1-B5
catttttacaaaaataaaacttttttccctaaaaacaaacaaataatcttccctaaacctttaattaaccttcatcttaaaaattaaatttctcataacatttttttaaaacaaaactttctcatcttaattataacccttatacttccatctatatgcttcacccttccctcatacaccacccacattctatatacacactccaaatttcaatattttcaacacttactaacctactacaatccccttccttaaaacatacacatactcctaacattttatttccttccactttatatcaaaacaataacatttaaattctctcaacaaaacaatacatatttcctccctctttaa

SEQ ID NO: 51895 - DNA, 224 bp, Gossypium hirsutum
  Clone ID: LIB3083-029-Q1-L1-B7
acccccttcctcttatcttcccttcactctctctctcacatctcccctttcttctctacactcttatctcactctcttttcaaacttccctaattacttcttttccttctaactcaatacatcttcactttccatctccctatcacaatttaccttcacatttattacaccaattttcctctcctataataatcattcattaacctccacaatctttataatct

SEQ ID NO: 51896 - DNA, 331 bp, Gossypium hirsutum
  Clone ID: LIB3083-029-Q1-L1-C1
ccaactctttctctcatttttaacacctccacatttttccgcatctatacaaaaattaatcaatatttctatctcaacaaacacaacaatttcctttcctcacattaccccatttatatccctcctcccaattttctacactcaaaacttttttcaccaactgatctattcaatactgcttaaacttcctaccttactgatcgctgtaacttcaactgcatatccattcattcttccaacatcctctgcattttactcattcccttcttaaaccttgccatatcggctctaagatcattaaccatctcccattcaatttcttatctattca

SEQ ID NO: 51897 - DNA, 268 bp, Gossypium hirsutum
  unsure (1)..(268): unsure at all n locations
  Clone ID: LIB3083-029-Q1-L1-C3
caaacacatttccaactttttttaaacattataaacacatnacaaagatagtttttttttattctctggccgaccctcaattcctnttntttctccttaaaaatcccaaaaccttaatatcctcctctctaaatatttacttattatatgcttccgcctcaagtactcccaccatttttccaacccataatatccatttttcattccaatccttttcgntgtttaaataacaacttcacctaatcttctatcacatataataccaatt

SEQ ID NO: 51898 - DNA, 346 bp, Gossypium hirsutum
  unsure (1)..(346): unsure at all n locations
  Clone ID: LIB3083-029-Q1-L1-D1
taaaattcagcagnggaaacactaaagnccttcatatccatcnaaatttattcttcacacaaacnaattcaaacaaacaagaaattttttaaaaaacagaaaccccaaaaatctttcacaaattaaaatcaaaatacccttacaaaaattactccttatcctttatccccccacaacttcaaaatatcatctaccacaccctttacttcaaccttcatctccttcaacacttcacctctacattctattactacccttaccatctaacaaacttaaaatatccttctaacaacaaatataccccccctctactatcttccaaacaccaacaaaccttccattctcc

SEQ ID NO: 51899 - DNA, 197 bp, Gossypium hirsutum
  unsure (1)..(197): unsure at all n locations
  Clone ID: LIB3083-029-Q1-L1-D2
ttttaaacaaacattcccccccaaactccccctcnctttcaatatttatcacatctttccactaactcaaatacttaccctccaacaacacctcacataataccatcctcatccactttatataaatcctcttctctcctaatgattctttctctactccacccaaacactcttctctcacctttccaccttcccac

SEQ ID NO: 51900 - DNA, 283 bp, Gossypium hirsutum
  Clone ID: LIB3083-029-Q1-L1-D7
tttattctatacacaatcaacctcatcatagctcccacaattttcttcaaaatactaaaaacacaaatactcttaatactaaaatccataatacaaacatcctaactatcactaatagtactcaaaacttttaaatcctaaaattcaaatccaataaaaaacaaaaaccctttaaacatcattaacaactccattaatcacaccaatcataatatcaaaaatatttctataaataaaatctccacttccccaaattttaatatcctaatcatctctattaaca

SEQ ID NO: 51901 - DNA, 358 bp, Gossypium hirsutum
  Clone ID: LIB3083-029-Q1-L1-D9
aataatattaataaggtgatttttaaactaaaaaggagacaaaatttataacctatacacaccgaggaaaggcattttaattgatcccatccataattggtcatctttctcttgcacttcacttatggaactcattttattcccactctcaagttccaaagtttctaaaacaacaccctcttcacttatcctcaatgccagcccacttcctaaatacttcgacatcactgaataagctttggtaatgacatcaacaggcaatacccaaatcaaagcattccctagttttgaatacgaaagaatccatgacaaaaccttgcatcttcgtgaatgaatggccacccaaaatcctccttct

SEQ ID NO: 51902 - DNA, 391 bp, Gossypium hirsutum
  unsure (1)..(391): unsure at all n locations
  Clone ID: LIB3083-029-Q1-L1-E1
aaaaaattggggnttcctttaatattatatgnctttatttttgnggtaatacaaggacaagaagagcattttctaaccatagcaggatgcctctaatgaaaactcgatacttattttgctttaatagttttaccctatgtgaggagacatttattaagcatttcagttacatcatacatatattttgctatgtctatcatgaaaaaaacaagataagagctattgatccaattgcttcatcactaatttcttgatctcagccattatcaaggattttgtcaagcattctgtgttaactcataaanatccattaaacgcattccgttactcaatcttttaaacattttttccaaatttattcaatccctcaacatattttctctgccaatct

SEQ ID NO: 51903 - DNA, 166 bp, Gossypium hirsutum
  unsure (1)..(166): unsure at all n locations
  Clone ID: LIB3083-029-Q1-L1-E2
gaaaaaaaataananatataataatcatccaaattttttcttctcataacaactgttctctcttcaagcatttttttaaaacattactacagcccatacaanattaaaacataacatcatccttcagttcctcttattctcattccaaattccttcaacccattta

SEQ ID NO: 51904 - DNA, 339 bp, Gossypium hirsutum
  Clone ID: LIB3083-029-Q1-L1-E9
ccccagagaaacatttctataaatcataaccaaattttctctcccgattcaggaaaagattgaaccaaaaataacaacatctattggaatcataccgacatactctagcaacccaatacattataatacaacataactacaaaatacatatatccatgtgtcatacaaatcctcgtctaaccttcacaccaccatccaaaaaacacctctttctaacatcaattaataactcctgcccatacctcacattccataaagttgcatccaacgcattcccattcctcccataaacaacgacgcacgcacaaatccaccaaccattgttcgttcctaccattc

SEQ ID NO: 51905 - DNA, 363 bp, Gossypium hirsutum
  Clone ID: LIB3083-029-Q1-L1-F3
aatggcccaaggagaccttcaagtcaattttaatataatagggggaaaaataatgtttccccaaaaaaaacaagaaaacttgcccccacaaatcacaatcttcaataccccatggaaaaaaaaaaaccattgccaataaaaggtccccgaattttcatcacaaaatcctatcaaaacccttttattttcacaaaaaaagtgcaaaagctttaacacttactacaaacaaatcttatttttgcatggcaaggctcaaaactttggatttcccataaacgtcaacaaccttcctaaacattcccggtgccgtgtccatatcttaaaacctatcagcgaaaacttgcaaaggttgaaccaccttat

SEQ ID NO: 51906 - DNA, 430 bp, Gossypium hirsutum
  Clone ID: LIB3083-029-Q1-L1-G8
acaccatttgctgtattctttattaaactgcctggaaagatgaacaactttacaaaagtcgtgatatcagccagtatgtgtcactaatctcacccacgaaatcaaagcaaaaggttgaaggaaaaagaaagtaaaagaaaactaacagactacagttaccgttaaactcataagccaaatcttacatatgaagcaaatcagccccatacgactttgttcaaatacggatgcactccaacagaatttcaccaaatgagagatccaactttgcataataattttttttaaaaaaaaaagaagctgaaaaagatgtttgtgtcacatacagtaaacaaaggctgcccgaaactccctgaatgcttattcttaacttgcctgagcaaaagaggctgctgctgtgataacatcttcaagtttaacccttgcacct

SEQ ID NO: 51907 - DNA, 438 bp, Gossypium hirsutum
  Clone ID: LIB3083-029-Q1-L1-G9
tggaacccaaatgggtttccctttaatagaatatgtttgaaaggtggggttaatacagggccaggaggggcaattccaaaccttaccagtttgcgtttagtgaaaactcgaaacttattttgcttaaatagttttaccctatgtgaggagacatttatgaagcagtgcaggtacagcatacatagattttgcgatggctatcaggaaaaaaacaagagaagagctattgatccaattgcttcagcacgaagttcttgatctcagccattagcaaggatgtgtcaggcagctgggggaacgcataaaagccatgaaacgcattcgggtactcaatcttgtaaacatgttttccagatttattcaatccctcaacatattttctctgccaatcttgtagaggatcaaaaccacctataaaaacaagggttggtggaaatg

SEQ ID NO: 51908 - DNA, 412 bp, Gossypium hirsutum
  Clone ID: LIB3083-029-Q1-L1-H9
taacaatccctccaaaaatttttttaccaaccaacccttgtacaaaaagtaagtgttctttttttttttgcaccattaaaacataacacacatcattttcctcaaaatcatatttatatacagggaaatacaattcatacaggctttaacatgtaatacctaaacaatcatttacttcccaatatcattaataaaactatctaacaaactaattgcaaagcagcgcggggaactactcattcaaaatctgtactgaatgattcatccttttatacaaaatggcattaatgcttttggatcttaacaaatcggtctttaataccgatttatatgcaatggctcatataaaccgccttttgaagcttctattggtaccttgttaagtactaaccaacaatccaactcctatacc

SEQ ID NO: 51909 - DNA, 234 bp, Gossypium hirsutum
  Clone ID: LIB3083-049-Q1-L1-A1
gggccagacacctgatgcaacagtatcactcactgagagagcaactactttggactgcacatcctgagatccatctcccattatttcattcgacacacttttatgtggcgcactacttgaacttgaatcatatgacgatgcagccttgctcaatggggtaccacttatatcaaagacgacaatggctgacacagaacttccagcaagactaactctccctgaatctgccagctt

SEQ ID NO: 51910 - DNA, 396 bp, Gossypium hirsutum
  Clone ID: LIB3083-049-Q1-L1-A7
aagaaactgggattaaactttacttacttcttctacttatcgctttaatttgtattttctataattaattttttattaattcaagagcaaaaaaagaaaaagtaaaagaaacgatcttgttacttcctacaatgcccaatttgttgcgggcaagggttttcatccggatcaacaaattggggggaatttcccaaattgggaactgattagggttctgattagagtataaatgagctcaacctctcgtttttgcagtatcggattgaagagctgtttgtttcgaggtttaagttattaaaacagattgcttaaagggaaatggtgattgaaaagcttttggacatggaagaagattgctttcgtatataattgtgtagatagtgattcaaaagcttg

SEQ ID NO: 51911 - DNA, 322 bp, Gossypium hirsutum
  Clone ID: LIB3083-049-Q1-L1-B4
actcttaaaatagtgtgtattactttatgaaaataaattattttggataatttcataattgggttgaaatccgataaggagcaacaccaatttaataaaacacttaaatacatctgttaaagcagtgattattattctttatttcggaaacatacttaaacatcacgtatgtcaaagccacaaccttcattccttaaatctatggctctttttgttaccagcattattcattttggcaacgtgttcaaacaaactcccatcgaaacaacccctcacagcttcttttgacagataaccattttcatcttttgcaagtctatac

SEQ ID NO: 51912 - DNA, 409 bp, Gossypium hirsutum
  Clone ID: LIB3083-049-Q1-L1-B7
ttgcatttcaaaaatcagcactgatacaacaatggtggggtcatctttaaccatttgcaatatttagttgtatatgattcttgaatcaaacttttggtggtcctaaatcatataagcagaagtgtatgtataaggcccaacatatttccatatctcctactgttgggacctttcgctaaatacagctcgtacctgccacttgcaccctcctatcaactttcaacactcaccaacatagaacgttgatttagagtcagccactctgtagtcgacagacaccttcaaaccatagcgcttgatggtatcaacacactcgtttttgttcgcgaatctttgacccacgaataactcttctaattcgtgatcttctaacatcagattagcatgtatgatgtccaagtactcgggg

SEQ ID NO: 51913 - DNA, 317 bp, Gossypium hirsutum
  unsure (1)..(317): unsure at all n locations
  Clone ID: LIB3083-049-Q1-L1-C12
cgagcaacgcctttgtttgttctgctcgttcacgtcgggatagtccgtcattcaaagagataggatgagagacgctctgctcttctatttactagaaagcggcacacagatcgatactatgtgtggtcgcatctgcataccgtnggagacatcataatggtcgatgaggtcacattgcatacacttgtatgaacatcgcatcttcgtgaagatagtctgtacttcaaaggatggtgacaggttctggagaatgcctgaatgctctatgcgagtatatacattataggatcttgcagttcctgatgaggctattgatg

SEQ ID NO: 51914 - DNA, 401 bp, Gossypium hirsutum
  Clone ID: LIB3083-049-Q1-L1-C2
ccaagaggctttgaaggctcctattggaagtgctgccggagacaagtttatcgtccgagacggtctcggtgaagacaaatcccaaccaccatcagattgggactgcctattcggtggatccgcatgggaacccgtcggggacggacaatggtatctccacctattcgacacctctcaaccggatttcaactgggacaaccaagaagttcgagacgactttatcaaaaccctacgcttctgggccgacaagggtgttcaaggattcaggattgatgtcgcgcatggatgtgtcaaggatatgtccctgccactgcctagtcaaaaggagatgaaggagcagtgggataaaaagatggagaatggagcaaaggcgaattcgcataggttatgggatcgggatg

SEQ ID NO: 51915 - DNA, 344 bp, Gossypium hirsutum
  Clone ID: LIB3083-049-Q1-L1-D10
gtttccttttattttgtttggagagaaggcagctgtatggtgacttaacaaagatggcagagcgttactcaaatgattgtgggctaccctgcatgaaagtaaggttgttagagcaggatggagaggccattcatccttaacgatattaaaccctgttacttatgttacaggcaattaacataactatgatagcgcatgcaaattatagcgctgatgtgaaaggcacaccggcgctcggaatccatgatttcccagccagatagttaccgacagtgaactttgacacctcgcttgcgctcttaagaacatgggagcctacccattcgactctatcagaagaggat

SEQ ID NO: 51916 - DNA, 314 bp, Gossypium hirsutum
  unsure (1)..(314): unsure at all n locations
  Clone ID: LIB3083-049-Q1-L1-D11
tnctctagcttacattttttctttaacactcactgaagataaatgcggctgctgttttctgcacagggatcattcancatcgatttcaacttccgtctcatatgttactttaaattgaaccatcaaggatttcaccgcttctttttgtaacctgccatctaacttttagtaccagattgttcacaatctttaaaaccaacatggttatcttcctatgctaatcaaaaaaaaaaacacttccttatcttacccgtatgaaaaatacatcctccatgatctcttcaagcaactgctctctttataactgcattttt

SEQ ID NO: 51917 - DNA, 380 bp, Gossypium hirsutum
  Clone ID: LIB3083-049-Q1-L1-D7
aagaaaacgaactcaaagttgatagacaaaattaaaactttcatgaacttgtaataattacagaacaatatccacaagaaaaaaaaaatgttattcagtggggagcttagccccattgtgaatcagtctcttaacctattactttcattcctgcatgttttgagcaggggtactggtagcaatggttgtggtgaatgcagcatttttagattcaggattagcagtttgtgcagctatggaaaaaacattagcatgggaaactcctactggggctggtgtcctcgatacatctcgattctgctgcttctgcatcgtttcggtaggagtggtggctgttggaggattcgtgctaggtttctgctctgtgttacttgaagcat

SEQ ID NO: 51918 - DNA, 401 bp, Gossypium hirsutum
  Clone ID: LIB3083-049-Q1-L1-E12
gttgactgatagtcctcttactgctcctgagaatcgagggtatacaggtgaaattatgtttgagacgtttaatgttccggggctttatattgctgtgaattccgtgcttgctttagcagctgggtacactacgtctaagtgtgagatgacaggagtggtggtggatgttggagatggggccacacatattgtacctgttgctgatggttatgttattgggagcagcattaaatcaataccgatagctggaaaagatgttacactcttcatacaacagctcatgcgggaaagaggagagaaaattccaccggaggactcatttgaagcagctcgaaaagtgaaggaaatgtactgctatacatgttctgatgtggtcaaggagttcaacaagcatgacaaag

SEQ ID NO: 51919 - DNA, 350 bp, Gossypium hirsutum
  Clone ID: LIB3083-049-Q1-L1-F1
gcaaaacttatttcttgggggaaaagaaaatggaggggggcattattttaatgagtagctcctctctattgattttgtcctcctcactgtcatatggtcaatttgcaatgagcacaaacccgacaccgtctccctcaccatcacctgctcccacaccaccattcacaaatattatatacttactctcttgagcaggtccatatcacaagttcctgcgctacctctactcgtactaattattcaactcgttccaaatacaagccaacatcacgactgaaggcattacgattttagcaccgaaagacagcgcattcaaagctcttactaagccttcattgtcaaatctaact

SEQ ID NO: 51920 - DNA, 338 bp, Gossypium hirsutum
  Clone ID: LIB3083-049-Q1-L1-G4
caaaaaacaactttattcatgtgatggtgctgacctctgggggattgcataggcttgtggggggcattatctttatccttggttactgcactaccattatcttaagtggacacattaaccctgcagtgacttttgggttgttttcggcccctaaagtgtctttcattaagcctgtgacttacatggcgtcacaatgcttgggtgctatatgtgtaattggattagttaaagctttcatgaaacatccatacaactccctttatggttgtacaaacaccgtagcttttggctacaacaatggaactgccttgggagctgatattattggaactttcgta

SEQ ID NO: 51921 - DNA, 328 bp, Gossypium hirsutum
  Clone ID: LIB3083-049-Q1-L1-H3
ccgcacgagtcgagttttttttttttttttttttattttttttgggagggttttttacgcgggggagcggcacctctcaccattatctcattctctgcttttacaataacccgctcaattattatatctttttcttcctacttaaaaactccccataaacttttttcctctaacttctcttacttgacacccctcatctctttttagatttttaatatatttactaatttctttctcctgctttactctttttttctgttccatcccccactgtacttaatcatttttttccttttctttaacatttactcgtttcttcacatattcc

SEQ ID NO: 51922 - DNA, 366 bp, Gossypium hirsutum
  Clone ID: LIB3083-049-Q1-L1-H8
tctaaggcttcagttgctgatgatgcatatggtttttcggtggaagcaaactcgggatatggttggcaagaaaatggacatgaaggacagtactcagtagacaaaaggtattttaccgaagatgaacaattgaatgttcaatcacaagagaatgctttaagaatgaaggccaatgatgtcaaatccattcgaccttcatcagacgtggttaatgaggagttgaaggaagttggttttgcagtggatgtacaccatatgccgggaagctccagaagcaaatcgagcaacaaaaggaaagattcaaaggtatatcccaaggatactcgaaatgtcattttggataacaaagtgcagcaattggaaaac

SEQ ID NO: 51923 - DNA, 315 bp, Gossypium hirsutum
  Clone ID: LIB3083-049-Q1-L1-H9
ccatcaaatatggaggaatgttaaagaaaagggggattacaaaatgggcacaatagctcgtgcaatttcactatctgattactcaccaaaaacactcttttgccaaacgcagcaaaccaaaaaaaaaagatgagtttatatttaattaaaagaacatgaaatcatcattgaaatgtattcacacattatacaaaatacacaacattgaattaagtaaacgtttctgaaacccgacatcccgttccaaatgaaccagctatcattggttagcatctataggggtaccagtcctggcctgtgaaaaccgattagcat

SEQ ID NO: 51924 - DNA, 383 bp, Gossypium hirsutum
  Clone ID: LIB3083-054-Q1-L1-A4
atcggttaaaagctctattaactgaagctacggttttggtacaacctgaatcaggcaaagaatttgttgtttacagtgatactttattgaatagactcggttgtgttctaatgcaagaaggaaaagttgttgcttatgcttcgagacagttgaagcctcatgagaagaactatccgacacacgatcttgagctagctgccattgtgtttgctttgaatatctggcgtcactatcagtttggtgaaaaatgtcacgtgttttttgatcataaaagtctaaagtatttaatgactcaaaaagatttgaatctacgacagagaagatggttagaactgctaaaagactacgaacttgtgattgattatcacctgggaaaagaaaat

SEQ ID NO: 51925 - DNA, 289 bp, Gossypium hirsutum
  Clone ID: LIB3083-054-Q1-L1-A5
atcctccacaggctcctgccactcgggctacaggaacggctcaacctgctgcatgcagacaagctggcgttcacggtgcctcgtaaccgaagctgcctacgtgaactctaagccgtgaaaggccattgttcggtgccgcttttcgactattgacgtctcgggagaagaacaaccatagcctcgaccgctagctaacggcctctgcgtgagatctgaatagcagcatgccttattcacacggatccagatgaaacgggttccgcttgcacaaaagcctacagaatcagat

SEQ ID NO: 51926 - DNA, 405 bp, Gossypium hirsutum
  Clone ID: LIB3083-054-Q1-L1-A6
gacaggtaaagcgcaagcttcctcgggcccaacttgctatacacaggagtagaaggttgaaagttccagattggtggcagcggaggcgataacttcagagccttgttttgacactgtacatcgcaatacttatttttttctcatttatggtggcatctgatgtgcaatggtacgtaaagagcaaaggagttcggttatcacaacccaacatcatgtgccagctttaccatgctcatgatttacggtgcgtagtttcaattttttttccctcattattttcaagcgttataattaggaggcaatcaattaagatttaaccccagttaatcttggttttcatcatttgatagtgggggtgtggggatgttggttatagacaatttaattgcacaggatttacactta

SEQ ID NO: 51927 - DNA, 333 bp, Gossypium hirsutum
  Clone ID: LIB3083-054-Q1-L1-B5
caagggagttggagtaaacctgacttacgagccttctaacactactatcttataaagcttcatatttacagcatccggacccggcggatgaatgtcctgagtcataaaacccaacggcaccggaatggccgcatccaaagcactagtcgtttacaacaactccaccacaggggatgccggattgcatacttttgacatcagaacacattcactaacagtgccggaagagctgtcgcccgaagcttcagatcagacggcggacactgaaaacgacgggagccttgccattttcgcttcaccgatggttcaagatactttaacggccaacgggac

SEQ ID NO: 51928 - DNA, 410 bp, Gossypium hirsutum
  Clone ID: LIB3083-054-Q1-L1-B7
gtttaaggtactaaccaactgagccgcagagagcccttttatcagtgttggcggaatatgacctgttggtggttcaaagggcattacattaggatatggaataaatactactttggtttcagatatagcgatttggcttagtgaatatagaactatagagaacgggttcaacttatcccaatcctagctctggaccaaggtgcgtactcttttaacattctctttctctctttctggcttagcctaccatggaaatggctccttcttattgatagcacaggtgagaacacccttaatgggcaagcttcactaatatcccaggaatggggaatgaaagaacttctgctatctactcactcttgccactgagaggggacgaatgaatacctggaagatcaagttcttttatt

SEQ ID NO: 51929 - DNA, 366 bp, Gossypium hirsutum
  unsure (1)..(366): unsure at all n locations
  Clone ID: LIB3083-054-Q1-L1-C2
cagcagccaacttctttgggttctcagttatatccggttgccgccggtcctacttatcctgctccccctggggctggttcatttgcacctgtcccatcccaaatgggagcagcttctggtcccagaatgccacaagttgtagctcccgcgccagcacctaggggatttatgccagttactaacacatctgttcaaagacctggtatgggcccaatgcaaccacccagcactacacagtcagcaccagtacagccagctgcagcacctgctgctcctccaccaacagtgcagactgctgatacttcaaatgtacctgcccaccaaaaacctgtaatcactaccttaactagactttntaatgagaca

SEQ ID NO: 51930 - DNA, 359 bp, Gossypium hirsutum
  Clone ID: LIB3083-054-Q1-L1-D2
ggtgggtcatatgcatggactaccccagattgttgagagctgcaatagaccagaataagctgacccacagcccagtcgatgtgatagggctgttactaacgaaggcgggtccctccgacgagctttatctcgtgcattggatgaagctaacgctcaagcactatgcacgcacgttggcggaatcttgcatgcacaaatttgagatgcattctgacgcttagagatcagcactaccgaggctaaagatcgactgtaccgagatgttacacacattattggatgcattcgatcattgccttatgataattctaatagctgtggtaccccaaactggcagcaactggatgaggtcttatcgc

SEQ ID NO: 51931 - DNA, 393 bp, Gossypium hirsutum
  Clone ID: LIB3083-054-Q1-L1-E7
gaaaaatgattagctggggcgtaaactgcggatgcggctccggttgcaagtgccgtagcggctgcaccagttgcgagatgtaccctgagatgaacttcgctgagctaaccacaacctgtacactcggtcttggcgtggcacctctgaaagtgcactgtgatggagctaaactggaaactggggctgataatgtgtgcaaatgcacgagataactgtacttgcaatccttgtaattgtaaatgatatgaaaaggctgcgcatcttatggaagctgatctatataatatgtgatgtatatgggttcttactattagaataaagcagctctggttcattacgtgatacgctacgtgcattcatggatgctagacctgactatgtctgtgtgtatat

SEQ ID NO: 51932 - DNA, 273 bp, Gossypium hirsutum
  Clone ID: LIB3083-054-Q1-L1-F5
cttacattaaagtgaaatgttactacaatacaatacggggatagtcaacatatgagctcaagaccagagatgcgcctatagatgtatatacctgttaacagattttagctcataatggaaactgacaatccgagcataatattgcatacatattgctttacgctgaaatttgaaggcaagaatcgaaccttgatcccacaatcatttaccgtataatggtctgcaatccgctgcttaagaaaaacatcctgatggaagccgtaacagcaatat

SEQ ID NO: 51933 - DNA, 358 bp, Gossypium hirsutum
  Clone ID: LIB3083-054-Q1-L1-G2
gcttttccaaaaatatcgaagattatgagaatttattaacccagggttttgttttctttttttttctcatggtcaaatcatcataataataacattagattgaggtggccatcaaaagtgaggaactatgacccagttttgccccagaatggctagacacaactttaggcacagagttcagcgtcgcgttttggttttgcgacgctgcttttgttgtttctgggacagacttctcatttgttcccccgggaaacctattaggtatcgtatgttatcgcgtgctcccacccccgccgttccttctgccgccgctgacggcagtattatagcttcttccaagaacctaatgcccttccct

SEQ ID NO: 51934 - DNA, 153 bp, Gossypium hirsutum
  Clone ID: LIB3083-054-Q1-L1-G6
ctcggctgctgagttttataagaacgatctggccagggacaggccaacaatggactacgaataacaccttcagtgaagtaaccactccctcatacattgagactacccacgataaggcattccaacccgcaaaaacctataactggtggaccc

SEQ ID NO: 51935 - DNA, 295 bp, Gossypium hirsutum
  Clone ID: LIB3083-054-Q1-L1-H2
gttaagtttgctggcggagcttgtgtggcagattcatactgaacgtgctgaacacgctggtgggggagatcttagcaggaagcgtagaccagggaagtttcccgtgaagacacatacgcgagtgctcacgattacgccgttttgggccacgacatttacatgtgcaaaggatggctttgctaacacggaggcttcagtcgttcccgtggatggaaagtacgcttgaggatcatttctattattccataccgttctttgtgaatactcaattgaaattctcacacatgaatgcaag

SEQ ID NO: 51936 - DNA, 325 bp, Gossypium hirsutum
  Clone ID: LIB3083-054-Q1-L1-H7
tttcattccaatccaaacctgattaatattccggcaatacttaccgcaccgaccatggacccacacctaactatgcactcatacgcaagacgactctgtcgcctgctcttaccgaaactacattaaagagaaacgcagactatcaggaatgctaacgtgccgaatccatttatttgtgctgccgaccagctccattacggccatgttgacaaacaggcgagggaagtggctcttcagagaaaccttcatcattgacatgcaccatccaggaactacacacaggggctcttgtcatgcgttccaaccaatgctaaagctgacgatg

SEQ ID NO: 51937 - DNA, 284 bp, Gossypium hirsutum
  Clone ID: LIB3083-054-Q1-L1-H8
cttctcttggggcaaagcgtgaggcatgtcgaatatgaacgtgctggctgagttataaagggaatggtaacattgcttgcataaagcaagcttgaagaagatgtgctcatcaacgaccacacaagtgtttggggttcatggaggaaggttcgccaatggggctacaaatgatgtatgcataccgttcgaaatcgctactgctctgttgcagacgggattgaagctgcagaatcaggaactgatttgacgaatgctaatattgcacgtgaagcaacatctgaaga

SEQ ID NO: 51938 - DNA, 343 bp, Gossypium hirsutum
  Clone ID: LIB3083-057-Q1-L1-D4
acatactacgagccatctcgacttatacattatcccgtataatctttgggcgcgatttcatctcattcgagaccatgtgccagaatgatgaccagctactcaaaatccgctagctactgtctttacaaaaggctaatgaagctagttcagagctagcgtggcacatcataccaactgcaagccgactctctggaaactgtgaactaccattgtaggctgaagacctttatgcactacacatatgctgattataagaggaacatatcctgcaactatgacctggtctacacttgctgcatgacattcaagacttcattgacgctcaatggaccgatgactagta

SEQ ID NO: 51939 - DNA, 366 bp, Gossypium hirsutum
  Clone ID: LIB3083-057-Q1-L1-F6
ttttctatttttttctttatatatgattaatggttttggtctgaaatatgctcttccacagtgtatttttctttacatattatatttgcataaaatagcattatgataccttgataccgacatctttgattatctgagtgctgatgtaagaagggtcactaatgatctcagttttcggctccaaaccctgcctgcttccttcaataactaccctaaccttcatttctcgtcgataacatctggattcactgatccgagcttctcttctcttatgtcaacaacataatccaggatctcaatggcatcattcaacctctccattgcatcataggtaccagctagattgctatacacccctaatgtatc

SEQ ID NO: 51940 - DNA, 468 bp, Gossypium hirsutum
  unsure (1)..(468): unsure at all n locations
  Clone ID: LIB3083-057-Q1-L1-F8
ctactttatagcccggaggtcattacctccccttaatgaagttggacgcacgtgtttccgtgaattggtctaccaagagctaaatgcaaaagtgagggatgcagtaatttctcttattgatcaagaacgtgagggtgagcagattgatcgagctttgttgaagaatgttttggatatttttgtggaaattgggatgggacaaatggattactatgagaatgactttgaggccactatgctgaaagctacggctgcctattattctaggaaggcttcaaattggattctagatgattcttgtccggattatatgttgaaagcagaggagtgtttaaaacgagagaaagatagggtctcgcattacatgcattctagtagtgaaccaaagttacttgagaaagntcaacatgagttgctggctggatgtgcaacccgactgcttgataaagagcactctggatgccacgc

SEQ ID NO: 51941 - DNA, 347 bp, Gossypium hirsutum
  Clone ID: LIB3083-057-Q1-L1-H4
tccatcctcaatacttatccaatcatgttgacagtgactgtgaaatagctaagagtactcttaaaagctgtgcaaattgacaccactcaacctccatatgttttcaaatgccatttgtaccatctgactggagtacctactgaaaagcagaaaattatcgttaaaggtgccttgatgaaggattactcatattgctcaacacttggactgaaacacattcaaaagttgatcattatggtaacttcttatgatgctcttaaatccccacaaaatagccctgcttttatagaatatctctcgcaacaacaacacatcgtatctatacctcataatgctattctatttaa

SEQ ID NO: 51942 - DNA, 318 bp, Gossypium hirsutum
  unsure (1)..(318): unsure at all n locations
  Clone ID: LIB3083-058-Q1-L1-B11
ggattcnnncacgagttatttttccacctctatattcgatcccggnctactcttggcgtaacttttgaagaattattcaatcaaaggccgaacacttctaaataaatgcacgctttaaaaccttgtaattcacagatagtggcttatctgttaatgcatcagttcctggaacacttcgagttgctactacattacatccacgtaatgcagaagagtcagtaacacatgcttattttgctgattgtctagaacttcaaccagagcttaaaatgttaaaacttttcanaaacaactcgcacacagacacctattattttt

SEQ ID NO: 51943 - DNA, 304 bp, Gossypium hirsutum
  unsure (1)..(304): unsure at all n locations
  Clone ID: LIB3083-058-Q1-L1-B4
ttttctgcaccttccgaataattttaacaatccaaatcccctccccntaataaaaagaataatttttaaagatgtcataggaaataacataaaagttgcaggcctcctcaaaggcatagaangggacagttttcgtcatatttgcttattgaatattactctcgatgtaaccaccaagtctccatggaactgctcgaacattcanggatactccacattggtttcccccgaaacttgcgaacctcttaaggaaagtatttaccccaagcattattcagattgttacctactaccgaaccatctt

SEQ ID NO: 51944 - DNA, 145 bp, Gossypium hirsutum
  Clone ID: LIB3083-058-Q1-L1-C11
cctttctaaggcttttcctaccaccaccccttctccgcccatcatcgccgcattctcataattgaggtatcactcgaccaattttcagtctgaggaattgatttaatcggttagcactttgaataattctcatactctgtatcaa

SEQ ID NO: 51945 - DNA, 351 bp, Gossypium hirsutum
  unsure (1)..(351): unsure at all n locations
  Clone ID: LIB3083-058-Q1-L1-D10
aaaatatcgcctttttcnncnnnnngcnnanctctctgccccatttgcaacatttcatataccctataccccaaacaatcnacaaatgtcacctccgccacatccaacccttcttttccggccactaaagcacaacaatacggatccacccttcctgtctaccgaccacaacccaaacgccaccactaccgcctctctttctaatcctgctgcctcaagaccaccataaatatactttttctcatcctcataacccccgtaacttcttctatattttacgttctatacctccctcaccttcctactttcactgtttcctccctcaaaatctccgcacttaacctaaccctc

SEQ ID NO: 51946 - DNA, 327 bp, Gossypium hirsutum
  unsure (1)..(327): unsure at all n locations
  Clone ID: LIB3083-058-Q1-L1-E4
catnatcctntggatacggatcataacggcccgnccattccctaccggggtggttggtttcctacagtgcaaattcataaccctattctcccgattgcgcaacgtacatcaccaccggatccggatccattgggccttcaagttgctgcacgtgccgggggattatagtcgactgccctccaagtagatatggcttcccgcaactagagtaccatcgtatatactctaatgatggttgcaggtcggtagccggatccatctgaggttttcggcgcaatcngtcgttccatagtgcaacaaatttctggtgtttaattccccaatcca

SEQ ID NO: 51947 - DNA, 378 bp, Gossypium hirsutum
  Clone ID: LIB3083-058-Q1-L1-E5
ttatggtattaggttaaaaaagtatgtctttacggttaaaggttctgactcaagagcagcttttctggcttccgaggcctctcaccaagactctagtggatatcaaaggaggcctcgacgagctcgaacagagtttaggattagggaaaattctgaaaagaagcactcttctggaatggtttcttcagaccaccctaatcaagtgttgccaaactcaagtaccaatggaaggtgtactggattttctgcaagaaataggatgaggaaagttgtggtgaataagtcaaaacagacaattgaatttgaatgctcaaattcagctccaagcagttcccaggagatagattctggaaacaggaatgaaaagggattgggaaa

SEQ ID NO: 51948 - DNA, 321 bp, Gossypium hirsutum
  unsure (1)..(321): unsure at all n locations
  Clone ID: LIB3083-058-Q1-L1-F10
ttcacaagcatattttttccatttagagctaactttcaaacactgcgacacaaagcggtttcatattgtacccaaacaacctatnatattaatcaaattacaaatcctattaaaattaacaccacttcaagggtaaaatcaattttatcgctttcaaataattactgtaccatgaaagaatatgataccgagagatttcaacttttaaaaccatctccttttcccttgcccagtaaatcatacataacccacccttaaccaaaggcttattactttttttgcagatatcttgcatggattgcttgtcaatttacaaaacct

SEQ ID NO: 51949 - DNA, 308 bp, Gossypium hirsutum
  unsure (1)..(308): unsure at all n locations
  Clone ID: LIB3083-058-Q1-L1-G12
aacggcactgagcgttattgagaatctgtaaaaacacaattctaagatggtagatccgccgattgctaatgccaatcgctctctcctccattaatctatggaacagccgccggtggagccgtttatacttaccagattcttggctgaagctgaatcttatatgattccactcacgcttgctaagaacaaaactgaactcgttgatgaagagactcttttcgcatagaataatacgttgcgaatctcctactatgaaccagtctttttcattgatgagaccaaaaacagacttgattctctngcatttt

SEQ ID NO: 51950 - DNA, 343 bp, Gossypium hirsutum
  Clone ID: LIB3083-058-Q1-L1-H11
gcgatttcttccgttatgtctggaagctcgaacccggtttcgagcggaacggtatggtgtaccttgcggcgatagggtcttcgcacccttacgtgatccgcctgcgccaggatgaggtccgcaagaccgatctgatcggctattcggcgtcgagccgcgccgatgtcgatgccctgtttgcccaggtacaaggttcgggcgcgaagatcatcagcgagcccgccgaactggacggcccagcggggggctacggcttccgggccttcgatccggacggtcacgccttcgaagtcgtcaccggcagcgcacagcgcacggtgggcgacctgccgcccgcgctggc

SEQ ID NO: 51951 - DNA, 415 bp, Gossypium hirsutum
  unsure (1)..(415): unsure at all n locations
  Clone ID: LIB3083-061-Q1-L1-A2
ctcccttccaagactcggaaagtctgatcaccatcaaagtcaatgcaaccatctctcatctttcgccgnccactgcagacatatcttcggtggttcctatcagtacatgtcccacacataaactcctatattcccagcctacatgatgcaagtttggatcaccaacgtcttctagagaggcttcatgtttatggtctatatgaagtgaaggtctctggtgatgggaactgtcagtttcgtgcactttcagatcagatgtacaggtcccctgagtatcacaagcatgtccggaaagatattgttaaacagcttaaagacaaccgtaacttgtatgaaggatatgttccaatgaaatacaagcgatattgcaagaaaatggcaaaatctggagagtggggggaccatgttaccttac

SEQ ID NO: 51952 - DNA, 384 bp, Gossypium hirsutum
  Clone ID: LIB3083-061-Q1-L1-A3
ctgatgctacaattatgcattaagcggagaacgggtatgatctgtggagtttcaccaagatgtgtatgctaatgaaccccatgtatgaatggagacaccaggaggttgtatctccctttctattctgactcgacacttctgcgaccaccagtcgacctttcaaacctatcgtatatccttctccttctccttcatcctcacccacacatgtccacatagaccgatctaaacctttggtgcgacagtaggctccattcggagagtcttgtctccagcgtgggggtttccaagctgcttggcggcctttcttcggaagtagactcgtttgcccagtttccagagttcggtcgtgacgaggtagaccaagatcataccaaagacaat

SEQ ID NO: 51953 - DNA, 377 bp, Gossypium hirsutum
  unsure (1)..(377): unsure at all n locations
  Clone ID: LIB3083-061-Q1-L1-C1
ggataaaaaacttgctcaattttgtcgaacttcctccgagtggaagttatcttccgaagattgttcctatttgccttcatgggtggctggagtataatgaattcttccgagggtggacctgcctttcaggtagctgtatctttagcggcctgcatatatttccttaatgaaaaaacaaagagcttgggtcgggctttcgttatcggactcggtgctcttgcgactgggtggatatgtgattcaatcttcgttccaatgattccgacagttctaattcacccaacatggacactgggaattgtgacttcactggtggcgtatgctttcctggttcttgcatgtacttttctgaaatgaanaataaaaagctggtatgt

SEQ ID NO: 51954 - DNA, 393 bp, Gossypium hirsutum
  Clone ID: LIB3083-061-Q1-L1-C5
aagcccaaatcactgaaatgaaaggacatataaatcatacaatggtctatcaataccaaacaatgttttagaagtaagagcactgcagtaaaattttgctgcaaaagtatcgaaccccgaacttaactcacttgatacatgtataggctcagagttccaatcccatcatctgcagttctttctctataatcccagactagactaagacctctatagtaccaaaacatgaaaaacataaatcatggaccttattttaagactactgctaaatttacaatccgtacaaggctctatgtactttatttttttttttcaaaagctcccttgaattcaagtatggttagcatccacaacaacatccaacagttatgtaatagcttaaatttattgaac

SEQ ID NO: 51955 - DNA, 373 bp, Gossypium hirsutum
  Clone ID: LIB3083-061-Q1-L1-D2
gttagctttttctttaagcggacaattaaattacattgagtaacgcacagataatgaagatgcatggcaatcacatgaaagaatgttggcatgccatgccaagctgtccttaactaccatatgtgatcattacagagtccagtgacactatgagaagataggggggaaaccaaccaaagaggaaaggggaaaaatcaatcttgttaaatcatcatatgatcaatcttgaatactaataggaactacattcatcaagaaagccgaatgctaaaagcttgacatgggaatccagaaatcatatttcaacgaaacaacaaagttttggcagaatcaaagatcaaatgaatgacaggatgctagttgaatggagatg

SEQ ID NO: 51956 - DNA, 210 bp, Gossypium hirsutum
  Clone ID: LIB3083-061-Q1-L1-D6
caatatattgttatgcaaagtaagcattaataagcatagatacgttcccaaaaagctctgctctctgctacgagctatgcggtccttctactccaatgtcgcctccccctacagtagtcgtcacgtcaccaactaccgattttataagaagtgtcaactcatcacccgaactttcatttattcgagacaccttatcacccaacaattcaa

SEQ ID NO: 51957 - DNA, 330 bp, Gossypium hirsutum
  Clone ID: LIB3083-061-Q1-L1-D7
tgttttttttttttttttttttttttttattatactttattttttttggtaatgtaattttttaaaatttccttgcctttccccaaatttattctcccttttattaacctaaaccatttttaaaacctaatttccataaatttatacaaaaattaatttatacaaccattcttaacaaaacatttcccaaatactataaaaccaattactttctttaaaaattttatcttaccttcaattaccacccttactttttctactccatatccaaatttaaccaattaaaaaataaatccccttttttcaaattcacctttaaaaatttgtttt

SEQ ID NO: 51958 - DNA, 361 bp, Gossypium hirsutum
  unsure (1)..(361): unsure at all n locations
  Clone ID: LIB3083-061-Q1-L1-E2
tttagattaagatctcaggtggagaatcttacacgtagagcacagcttcaagaagttgagctggagaaaacaacgaaacagctgaaggaggctatagcaattgcagatgaggagactgcaaaatgcaaagcagcaaaggaagtaatcaagtcacttactgcccaattaaaggatatggctgaaagattgcctatgggggctgcacggagcatcaaatcaccttcatttacttcgtttggctccaacccttgttncggtgatgtctctagtggttcaattgacagattgaatggtcaactagtgggccaagaacaagattcaaatgtattgaacagccagttgctttctaatggatctagca

SEQ ID NO: 51959 - DNA, 343 bp, Gossypium hirsutum
  Clone ID: LIB3083-061-Q1-L1-E3
aataaatttttacttttttttaaaatcaaataatgaagggccatgacagataaaaggtacaagtaacaagaaaaccataactctatgatatgcatacaaagaccatttagacttaagatttaccgattaacatttcacgtgtatgtattatactacatgcaactatataacaccgtgtccgatactacttacttggagatccacactatccaaattacgaaaattttgtaaaaattcttgaagaccatacattcctttatttccattacttaaggagctaatacaatgatttagaaactccctatctgactaaagtgctaaaagtctctgataaacatgatcc

SEQ ID NO: 51960 - DNA, 408 bp, Gossypium hirsutum
  Clone ID: LIB3083-061-Q1-L1-E4
ggaagatgtatgattggtggaagaaaggatgcgactcgggcaggtctaattgaaagttggctgggcaaaacaacgaaacaactgattgaggctatagcaattgcagatgaggaaactgcaaaatgcatatcaacaagagtggaagtctaatcactttctgaccaaataaaggatattgatgaaagatcgcctatgaagactgctcctaatgacacagaacctacatctgcttctttttcacaatgccatattcacggacagtgacatagtgtgtcaattgacagattgattggtcaactagcgtgccaagaacaagattcaaatgcattgaacagtcagatgctttctaatggatctagcattgctagtactcgcagttctggccataacagacaaaatcatattgaa

SEQ ID NO: 51961 - DNA, 423 bp, Gossypium hirsutum
  Clone ID: LIB3083-061-Q1-L1-F1
atccaaatgaatatattcgtggcgtgaccttgaggtttggttgtggcttgaatgagacagagattattgagccactgatcccttcagttttgcaaaacctggagcatcggcacccatttattaggaggaatgctatattagctgtcatgtcgatatacaagcttccacagggtgagcagctcttggttgatgcacctgaaatgatcgagaaggtcctttcaacggagcaggatgcatctgccaagcggaatgcattccttatgctatttacttgtgcacaagatcgagctgttaattacctcttgacccatgttgatagggtttctgaatggggtgaattgcttcagatggttgtgttagagctgatccgaaaggtttgcagaacaaatcgtgccgagaaagggaagtatattaagattatta

SEQ ID NO: 51962 - DNA, 420 bp, Gossypium hirsutum
  Clone ID: LIB3083-061-Q1-L1-F6
aaaaaaaggtgcattgaaaggaaaacagataagcgtggagcagcctcaaaataaaaaagagattcccatttgtcttttattatattgcatgtgttttttctgcaacttggaattttccttttcccttcctatgtaactctttatttttaattttctcctccatgagtcttatttaatatttaataatatatattacatataaatatacattcctatataattacgtgaacaagccttgctggttctcctatctttctctctcacattttatcttctctttttcccattttctgttgactacccccatttgcctttcattaacccagcttttcaattatcttctctgatatttttctcatcatggcagaggcaaaagtgttggaagctaaagaaggaaccatttcccgtgcctctgctttt

SEQ ID NO: 51963 - DNA, 258 bp, Gossypium hirsutum
  Clone ID: LIB3083-061-Q1-L1-F7
tccagctgtacgaatctagcacaaacactacgaatttttaaactattactttcaaaattgatacggttccatcaacatgcttttaagctaaacaatacacttttcaaatccttagccaagcattgcattaaaggttttaaccacatggaataaagcttcaaaagatcgaaatctgaaacttaacaaataaactaagtacataaaaatattaagcaatggcaaaagcaatttaactaaaaactctgaaacatcgaatcc

SEQ ID NO: 51964 - DNA, 377 bp, Gossypium hirsutum
  Clone ID: LIB3083-061-Q1-L1-F8
gaagcgttagcaaaacgtaatagtgagctacaggcttcaaggagtctgtgtgctaagacgtcgagcaagcttcagagtttagaagcacaacttgcccgaagtccctcaaaagcagaagtttactcgagtcaaaatgctagtactccgccgagtgttacttccgtatccgaagatggtaatgatgatgacagaagctgtgccgaatcatgggcgacagctttagtttccgagctctctcaattcaaaaaggaaaagggtaccgatacgccgaacaaaaatcaaaattcaaagcacttggaccttatggacgactttctcgagatggagaagtttgcttgctcttcaaatgattcaactacaaacggtgcaatcaacat

SEQ ID NO: 51965 - DNA, 199 bp, Gossypium hirsutum
  Clone ID: LIB3083-061-Q1-L1-G6
ttatagattttagaatcactatcagaacatttgggattgatgatttccaattaacctaagctcaacgactttcactgaattaccgaaacacctcttaactaaagaaatcctaacagctcaattaacattaatcgcaacattcttaatatactccgctttacctaaacatcatatgtactcaacactaatttcaaaaaca

SEQ ID NO: 51966 - DNA, 157 bp, Gossypium hirsutum
  Clone ID: LIB3083-061-Q1-L1-H2
gtatcctagtggggaaatggagtatgagaaaattagtgggtggaagagtttcgttgttaagttaaagatgcttattgctttcccttggcaaaaggttcgaaaaggcagtgttttgactatgaaactgcgtggccagatatctgatcagctcaagagc

SEQ ID NO: 51967 - DNA, 312 bp, Gossypium hirsutum
  Clone ID: LIB3083-061-Q1-L1-H3
ctagagatctctaaatatactacatcgaaaaaccctagggcatggatcccatagagcctgaaaacttcttccacactaaacactatctaacggaataccactatccaagacaaccacgataagagcactaaacatctacatgacaatcgccagtactcacaccaatctaaagaacccgcttagaacgatccagacaaactcctgaatccaacacgggactagcctaacgatcactagatacatctagccgaatatccgacaatacctgactgcagagctaagatccatgaggataatgaacatttgcatgac

SEQ ID NO: 51968 - DNA, 189 bp, Gossypium hirsutum
  unsure (1)..(189): unsure at all n locations
  Clone ID: LIB3083-061-Q1-L1-H8
ctcgtgccgtttgttcctcttcctcatccttgggctttggttcttcctctccgaatccacctcccttctccccctccctcccgatctcttcttcgcctttgcctccgctatcttcttcctccactactccgtctccgacggggccgnctncgtccagacctctgatctccaagccaaatgtgattcttt

SEQ ID NO: 51969 - DNA, 335 bp, Gossypium hirsutum
  Clone ID: LIB3083-062-Q1-L1-A3
gatctagagctatcggatgcctgcacgtgacggatactctctgctgggagttgatgtcacaacatgaggaaactgtgttgtgtaaaagtacggtgtcaaaaaattgttacgattccagcacacctgattctggtcctcctatttgtagcacatgacaatacgttgaatctccatattatcgacctctgcagaactgtataggtcgtacgcatagccggcgatggcttgctattgaagagagacccacctggccttctaggtctaacttgtactagaatgaactttctctttatggattacactcgcaagaactcaatgaggataccacatactct

SEQ ID NO: 51970 - DNA, 457 bp, Gossypium hirsutum
  unsure (1)..(457): unsure at all n locations
  Clone ID: LIB3083-062-Q1-L1-A6
caaactctgcatccagcatttcaaccgggatgggacctagaagatnagcgcttgtccttattcaaatgcacccgatggcaagtagaagaaactctggatccaatcaactgccccttccattacttttgtgacagcgtttatcccggccattacccgcaagtcgtcgacattctcgttcttctcctcgccactgcttcgtaccttgcaacactggtcatcatgttgatagatatatcgagaagagggcggccttgcttgagtcaatccaagaggttgtttctgccatcaggtccactgtcactccccttaatcctattggcattagccaagggcttgcgtatcaacatcttataccctttctcctgcattgctccggcaattcttcaactggttcaaatttcgtctcttgcgttcgacaatggagtggataaggaccctangtacgcattcttggaag

SEQ ID NO: 51971 - DNA, 394 bp, Gossypium hirsutum
  Clone ID: LIB3083-062-Q1-L1-B1
gcctcccctcgttcagccgcgccgcttcgacatcggagcccccaacggtccggttccgatcggaaccaacgagggattcggctgcgggcttaaccaggcacgggttctctcttttcttttttattatttcacatatgtatacaacaatgaagaacagatcggagaaaataaaaatcaaaagccaacgaaaacaactttgagattcaccttataaaaaaccgatctttgatttcttttctttttgtatttcaatatgtgtgtctgtaaccttacaaacgctaaagaatggctttatatagccgaaaataaaatgaaaattacaaaagaaaatgtattttgctctcttttcttattttcccttttttatactggcgatttctgcttcttccttttg

SEQ ID NO: 51972 - DNA, 103 bp, Gossypium hirsutum
  Clone ID: LIB3083-062-Q1-L1-B7
gtctcaagctctctttgcctatctttctaccattcgctccaggatcgaattcaaaatctctctgcgactttctccaaagctatcagcaattatcgaagataaa

SEQ ID NO: 51973 - DNA, 296 bp, Gossypium hirsutum
  Clone ID: LIB3083-062-Q1-L1-C5
atctgggaagaaaatagctcagttgctggctcaagcccaagggatggagtaagcactcatgatttaccgagaagttaatgcaagccgtggggtggaaggctttctttaagattgcaccacaccccactctttctgcaccacgaaagccacaattatccatcaaggcttaaaacctcattgactttaacctaatttcccttcataattccttttaataaattaccaactttcttttaaaacaataattttctttcttcagccacctgtaacaaatggccctttaataatttttttcc

SEQ ID NO: 51974 - DNA, 364 bp, Gossypium hirsutum
  unsure (1)..(364): unsure at all n locations
  Clone ID: LIB3083-062-Q1-L1-D4
tctgtatccagaatttcatctttacaaaatgctaattgcaaaaaccgtagtggttantcaatcatacacagaacccgggggatgttaattccagaacaaaatctgatggaccttcaaatgaagcanaagaacctgtattccttgatgatattgcctcttccgtggatgaaggtcctggcaaggaggatgagttgttggatgattgtggtattcttccaagtaattgtttaccttgtcttgcatctactgttccatcaattgaaaagagatcacttagctctagcccgccgagtgcgagaaaaaagcctgccttaaaactttcatttaaatggaaagaagagaatgccaatgccactttactttc

SEQ ID NO: 51975 - DNA, 289 bp, Gossypium hirsutum
  Clone ID: LIB3083-062-Q1-L1-E8
gattgggtctactgatacaacaaagaataaagtacagctatgggagaaggctattgttcacttctctttatgccatgtcatggagctcttcacaggctttgctccaactggtgaggattccattacttctagccttgctgatgctacacacaattaatcacatatttcacaaccggctgttaaccaatcagtaacaccaaccgtacatatcaattacgttaaccggtgtttgagagccctaacttcgggttcggttccaattcccggaaactctaatgaacttaaaaat

SEQ ID NO: 51976 - DNA, 409 bp, Gossypium hirsutum
  Clone ID: LIB3083-062-Q1-L1-F4
ttattatcaacaggtagaaacataacgcatacctccaaaaggaacttgagatatatcccacaaacgttcataatcatgataccaaatacagaatgatcatgctaagaacaatgaaagatgacatcattctaagtgcaagttctgcatcttgcagtaatgctgaggacactcaattactatcatttgatttcaatcatcaatcatacgaataagatatcttctataaccatcaaatcctagaagatcttaaccacaatacccctgctgatacagttttgtatttacaccaatcattttctaacttcgactaacagacgctatccattctttatcaacttaaggtcttctaagatcaatttatttcatttaatgatgaacaataacaacaacatttttaccatataaaatc

SEQ ID NO: 51977 - DNA, 434 bp, Gossypium hirsutum
  Clone ID: LIB3083-062-Q1-L1-F7
atttttaattttttttattttctgtttgtttttaaggaaaaaggaccgaaacccataaatttttttcatgaaattcgattcaattttgatatagaagtcttccccatatatatatttgcttgaacttttttcaattttgatttccctttgatattctaacgaaggtcgaaaattgggaatttcagtagcaccgacgtgaactatcgacggaggaacgccatccggcagatctacacctcgcagcctcaacacccgccacatccctccgctcaaccgcaaccggtgtacaacgccgacccttacgcctactccgcatcgacgccgtacccggcgcaatattaccaataccctcgtggctattacccgcctcataacccggtgccgatgcagtatcaagcaccgtacgatcatcgaggtgggtcatatatggggaa

SEQ ID NO: 51978 - DNA, 404 bp, Gossypium hirsutum
  Clone ID: LIB3083-062-Q1-L1-G2
tatagagaaaaccattcatgtcgaattcgttgattgaaacgcctccagagggggtttttatctccgatctttctagaagataccacatgctttcaaagaaatgtgttcatccaccttcatttcataaaacgcttaccactattgatcccttgatcttacagctatctgtaactttcgaagcatacactatatcaactgaaagacctatagtttgcgataccaattgtgagacacttcattacatggtcccaaacatttactgatgatgcgctataactacttctgacacaaaagcagtacactgacatgaccatttcacagattcacttacaccaatatcatactgatcgagactccattgttgtgacagcatttacccttctcacgagacaccttttcaacta

SEQ ID NO: 51979 - DNA, 498 bp, Gossypium hirsutum
  unsure (1)..(498): unsure at all n locations
  Clone ID: LIB3083-062-Q1-L1-G6
atggacatttgtcatagactttgcgtagacctgcagagataagataggttcttttgatggtattaaggttttgctggagcagcaagacagagatggtgttgataagctaggaactaggcttctgcttgccacactttcgaagatatatggttcactgcagacagcttatggaggtcaaattgttggagttattgtctttaatggggtacctcagccagaatcaaaaacattgatgaatgtgatctatacctctcgctcatctccacgttggttagcagacacaaaaagctccgctaataccacccttgctgcacatgtgttggttagaacgacccttgcttggataactggagttgntcttcttattgcaactctcttgggggtttacttccttctgaatatgccattgacaagggacacacttttgtattcaaatgtcaagctagactaagctggaacattagagctatnggaagcggacaatgattnttaatattt

SEQ ID NO: 51980 - DNA, 287 bp, Gossypium hirsutum
  Clone ID: LIB3083-062-Q1-L1-H1
gttattttgaggttgcgttccttagcagaaacaaccattgttcataagtgtgaggctgtcatctcatcgggtgttgatctttttgatctgcactgtttactattttactcccttttgaaagagtatgtgaagtgagaactgaaagcaatgtttgaaactacattgattgctcggatattctaacttttgtatccccaaaagttggaaagcattgattacattgcagttaaagcagttttgtgtaacttgtacgtgtaatcaagtgaaaccagcttatttgctttttt

SEQ ID NO: 51981 - DNA, 390 bp, Gossypium hirsutum
  Clone ID: LIB3083-062-Q1-L1-H3
cttcttcagaaagcttccagaagaagatatagcagccgttcccctttggttccttttttgctttgttttggtgttttttttgaaaatcgatatgtcaaacacgaatatttcagaaacggttccgtttttaccggagatgtatgataacaacgacgaatatgggaggtggtggaagaatgttttggatttggaagaggcgaagaaacaagtgttgttttcacttccaatgattgtgacgaatgttgtgtattattccataactttggtgtctgtcatgtttgccggtcaccttggggagcttcagcttgctggtgccacgcttgctaattcttgggccaccgtcactggttttgctttcatggattaagtggagcactggaaacactttgt

SEQ ID NO: 51982 - DNA, 309 bp, Gossypium hirsutum
  Clone ID: LIB3083-062-Q1-L1-H6
aaggaattggtattgttggaatgagtgaagaaactgatgttctgaacggccctagttcttcttatgaaacggctcttatgctgggttcttgttgaccctttgcaaaaacatggcttttgcagtcgggcggattttagtaaggaacctgcttttagctggatgaatacactttctgaagaagtaaagagggcaattaaacgctcgagaatcctgttttgtaatggttatgactttgatgagctttcccctcatatgataatctcagcttgggagtatgcagtcgaagtttgcacatcggtgtttttcgat

SEQ ID NO: 51983 - DNA, 384 bp, Gossypium hirsutum
  unsure (1)..(384): unsure at all n locations
  Clone ID: LIB3083-062-Q1-L1-H7
cggcacgaggtatgtcgtccatcaatgagcgaggtgttggagcttctgatgactggacatgactccgatgttgcaaagagctggagaatgccaaagtttgcgtctgatgagttggatgattattcaatggttttcggatacgaggttccaacgggcatttccctagaggaattcttatgttgagtttctcctttgtaactttccatacatttaaacatttgctaggtttcaaaatatcattccgttctacaattgtgtttggatctttacattagagaaatttagaatcttcattcttcactgctcaaaacaacaacctttccctatatttatacaaattagaccaaaaatgaacccatatttcaatgaatgggaantgtcagg

SEQ ID NO: 51984 - DNA, 422 bp, Gossypium hirsutum
  Clone ID: LIB3083-064-Q1-L1-E12
tggacatctagagatagtaaagtccctattgtctaaagagacctgggagtgcaacaaggattgataagaagggccagacagctttgcatatggctgttaaaggacataatgttgaagtggcggatgtcctactaaagtcagatccttctttgataaatatggttgatgccaagggcaacactactttgcatataggatctcaaaagggtcgtcttcagatagctgaaaagctgctaaatgacagtggacttaacaaactagtcatcaacaagtctcgacaaacagctctagactctgcatagaataataaattatctgatattgcatcgtatttaaaagagcatggaatccaatctgccaaatccatcaagccacatcctgcaaattcagcacgagaactaatacaaactgtaagtgatata

SEQ ID NO: 51985 - DNA, 358 bp, Gossypium hirsutum
  Clone ID: LIB3083-068-Q1-L1-A3
tctttgcattgtgctgttctttattctgtggttcccccttatcatcctaagttcaggactgccgggctccagccccaatccagtgattaatgtcgatttgacccttggcgtagttgggtgggatccattatatcacatcaaccaagattatggtggaagcttggtgaactctagtacatgttctgctcttcgtagaaatgcctttgttacttcagatgactccagtaacacacaaatcttggtcatgccaaatgcttctgaatctacgtggaatatagcaccaccaagcaggatcagtctcatcaattcagtaataccctgcttaaccccctagactggtcggtcaatttacattcac

SEQ ID NO: 51986 - DNA, 400 bp, Gossypium hirsutum
  Clone ID: LIB3083-068-Q1-L1-A4
ctctctcccattcgccattgttacatatagattgaaacatggggctaaactatggcaattgaagttttggcagatatttcaagcccaagaatctcgttttctgacgatctcgaccaagaagatggggttgattccattgaagaatgtcatcatcagagattagacacatcactcttaaatccaacatcggatttcgatttcggttttgtcaataatagtttcgttcaagaactcccttcagctgatgagctcttttccaatggcaagattcgaccaattgagataaaggataaagctgtggttgcgaatcgggttcgtcgtcaacttcaacctgttgctgttgttcgttcttcacccccacaaatcaatacagattacccagagaagaaaagattgaaag

SEQ ID NO: 51987 - DNA, 394 bp, Gossypium hirsutum
  Clone ID: LIB3083-068-Q1-L1-B5
ggaacatgaaaaagaatcactatagatatattatatactcacagcgtcctctctttctttttttccttatgagatcgttaaattaacttaaatacaacaaaaccaaaaacatgctctttttttgtgcaggcactaaaggagatgacacagaggaaccaaatcaaaagcagcttaacccaagagcccgaaatatcggtttaggtttcgctgccttaaaatacacgaccatttccggagcagactgatttttttttatgggagacacataacttaaaaaaacctattctttctttatacagacataatacgagtgtgccccaccggtcttgtcccggcccaatttacttacttgcattcaagccctttaaaataagagcagagagaaatttggaag

SEQ ID NO: 51988 - DNA, 248 bp, Gossypium hirsutum
  Clone ID: LIB3083-068-Q1-L1-B6
ttttgtttctgtttgaagacagattttatcattaccatcatcgtcatcatcatcgtgacccaattttgccccaaaatggttaaactcaaccttagacgcagatttcagcgtcacgttttgattttgcgacgctgcattcgttgcttttgggaccgctttctcatgtgctccctagggaagcccattaatactcggtatcgaatgttatactgcacctccttcttcgtgcattcaccggctttcgcctt

SEQ ID NO: 51989 - DNA, 401 bp, Gossypium hirsutum
  Clone ID: LIB3083-068-Q1-L1-B7
gttcaacaacttctatccttctactatcaacaatccacttggagatgatgttccgagatgccaagatgaaagggacagtgttggcggttgtttcttgttcctcttcatcttatgatgtccttattcaccagcattcattttgtcagggcggatattctttttgttcatactctcttatattttatgttttttttcttacataattctctaatttttttttttgttttttttgtttttcttttttattatattttttttcttttatttttatgttttttttttcctttttctttttatttttgtttttctttttttttatacgtttatttttttttttttcttatttttttatttttttattttttcttttttcattttctttttaattttctttttatttt

SEQ ID NO: 51990 - DNA, 271 bp, Gossypium hirsutum
  Clone ID: LIB3083-068-Q1-L1-C2
ctttaatatgcttcatttggcttgcactagggataggtcatgggcgaaaacctaagcgtgcttatcccccaactgtattttattacctgcccctttgtataactgcgtcaggcatctcatacaatagtttgccaacttttgtatacactcttcctgcaacttggtttgtttgcctctagttgatctatgaacattcaaactttagcacctatacgaatggtgttagcaagcgcttcctcttgaaaataattggcttgcatttcaaatgaat

SEQ ID NO: 51991 - DNA, 152 bp, Gossypium hirsutum
  Clone ID: LIB3083-068-Q1-L1-D6
gaaaaaccctttctttatttctgcacacgttaatacgcttacatgcatgagaaccataatccggctttgctgccatatcaaaaagtaaggccatcaatgccgcccaagttcgacccaacacacgttgtagatgtgttcagccgagtaaccgg

SEQ ID NO: 51992 - DNA, 199 bp, Gossypium hirsutum
  Clone ID: LIB3083-068-Q1-L1-D8
atcaattcaaacccagattctttcaatagtttaatcaacaaaatctacggcgttttctcaaacagtgcgcccgattttcgttcccgatttcgtcttccaggactaccgaaatggagttggttcgaggcgttgttcgaatgttgcaaggcttctcgggttccttgttttcttgggacgaaaaggggcggcgtttttgcgc

SEQ ID NO: 51993 - DNA, 396 bp, Gossypium hirsutum
  Clone ID: LIB3083-068-Q1-L1-E1
cccttaaatactttgcttagcacacaagggtttttgtagatgactctctgaaagatgtaagagagtgttctgttcatgttcgttgagtggatatagtagatgtcggaatgaaaaagttgtggcttttcggttcgacctttgcactaaacgctttttggtaaacccgagtctgtctactcagatcttttgaaggtatattttgatccttctttatatcggatatgttatcttgcacatggatccatgatgcgggttagctgtaaattggtttcccgatgctctgtatgtgctcacgtgtcctaactagtccattagagtttgggttccttctttttctatttggatagaccacgaactgtgttttttactgtcatggtgaatagcctatcccttttt

SEQ ID NO: 51994 - DNA, 135 bp, Gossypium hirsutum
  Clone ID: LIB3083-068-Q1-L1-E6
agagtttagggttatttctcttttttttctgaggtcatcaaactcgtgttatgggttcgatattttaggagcccacccctatcctaaactctcaattatattccttcaagcaagtgtttcttatatatctctttt

SEQ ID NO: 51995 - DNA, 402 bp, Gossypium hirsutum
  Clone ID: LIB3083-068-Q1-L1-E7
gaaaaagccaatgccaaggtaagaaacagagaagggctgtgggtggagaagaaacaagaaagaaatgccggctcataagccttcttccgaagccgtcttcacaccagaaggcagcgatctcctgcttctcgatcagagtattaacaaccatgaacaacaccccgtagaaaccgaagatgctgctgatgaatctgatcgctgcccttctccttgtaacgagaattaacaagattatgttatagtaaaattatctgacgtacgtaaggaagtacagtgccctatctgcctggggatcattcgcaaaactagaactgtaatggaatgcttacatcgcttctgtagagaatgcattgacaaatctatgcgcatggggaacaatgaatgccctgcttgccgcaccca

SEQ ID NO: 51996 - DNA, 288 bp, Gossypium hirsutum
  Clone ID: LIB3083-068-Q1-L1-E8
tgcaggcggactatatgatttcattgtggaacatgatgtcaaggaacttggagctcatacgctggtttgcactgcattgtacaatgataatgatggagaaagaaaatatcttccacagtttttcaagttcgttgttgcgaaccctttatcagttaggacaaaggaaactacctatttagaagcttgcatagagaatcatacaatatcaaacctttatatggaccaagttgagtttgaaccagctcctcattggagtgctacagtacttaaagctgatgaacttcattc

SEQ ID NO: 51997 - DNA, 334 bp, Gossypium hirsutum
  Clone ID: LIB3083-068-Q1-L1-F2
agctcgcccatctaaagagttcaaagaggactaataactagattgtgagcataacagtacttctttcttttattcatcatcaatgaaactacagtcaccattttattcttgtgctctgcacttctaatatatttttgtctatagaagtaataacgagaaccattaattagttagatcagataattttttcatttatgtcgtgtattgtactttttttttatctgtcgtgtaatatacatatcatatagattattgtactaaaagttcaagtatgaatgtaatactctcatctttaccgttccaaaaaaaattaaataaataacccgggggtggc

SEQ ID NO: 51998 - DNA, 379 bp, Gossypium hirsutum
  Clone ID: LIB3083-068-Q1-L1-F7
gagagagagagagagagagagtagatctttgggtggtcatatgaggtctcatatgaacaacatcatcatcaacaacaacaactcagttgaaacagatgagaagctgtgtaagaaaaagcttgtgactctcaacaatgtcggccatgattcaaacactgatgaaactggtgttgatggtggatatatcctgagagagaaccccaagaagacatggagactgacagatttaagtgaagacagttcagttcatgacaaggtctgcaaagagtgtggcaaaggtttccaatcatggaaggctttgtttggtcacatgaagtgtcattcagacaaagaaaaaagtcccgttaacagcttggaagaacaagattcttggagtcat

SEQ ID NO: 51999 - DNA, 386 bp, Gossypium hirsutum
  Clone ID: LIB3083-068-Q1-L1-G5
tcgagttttttttttttttttttttttaaaaataaaaaaataaatgcaattgaagaataggtatagaggtcaatactcaatacacatattgtcaatcattctctactaatcctaaaataatcacatcacacgtataatggacggaggccctgcaaatcacaataactaagccacttcttgatctgatgaaggccggttctcagagtcagatgatcggatttcttcaatcgtcctggttacttcctccatgctaggcctcacgtccggcaaccttgccacacatgccattgctatctgaagcatctgcaccagctcttcttcaatgtcgttgtatttcatcagctctatgtcgaacacttcggcagtccattcctttctcacaactg

SEQ ID NO: 52000 - DNA, 285 bp, Gossypium hirsutum
  Clone ID: LIB3083-068-Q1-L1-G6
agctttgctgcatattctcctaattttttcagattatctaactcaagggaaaaaatgagagagatccttcatgttcaagtgagacaatgtgtgaaccaaatcagttccaagatttgagaggctgtttgcgatgagctcagcattgatccatctggaaggtacatggcctattcagatctgcagttatagcgcgttaatgtttactcatacacgtcttcatgtgtgccctctgttcctcgtactgtgctcatttactcgaagcctgtttcaacgagcaaggttcga

SEQ ID NO: 52001 - DNA, 396 bp, Gossypium hirsutum
  unsure (1)..(396): unsure at all n locations
  Clone ID: LIB3083-068-Q1-L1-H3
cccacttcccatctcttctaacaatcaggttagcagtagtccttcggcgactacaccaccggttccgtcgttaaatcagcaccaccgtgctcaagggcaaccattggtacaagaaaacacctccccggtggagaagacaacggcttcgacggcgacggtagggactaccacatcggcaccgacgtccaccgttgaaacagtccaagcatgcatcggtagagacaggaaagaggagctacggcaacagaagagagacgaagatgggttgcacctcttgactntactcctgcagtgcgccgaggcggtttcagctaataacttcgaggatgcaaataggatgctggtagagttgtcccaactgtcgacgccgttcggaacttttggtcaacgcgtggc

SEQ ID NO: 52002 - DNA, 399 bp, Gossypium hirsutum
  Clone ID: LIB3083-068-Q1-L1-H5
aacaagggaatttaccctaaacgatgcccctcccttatccgccgccttgaaagcctgggctctcctctctctcattccgattcggatagagtagaagatggctccaacggcacacaaaggtaaaattcctctcaaactcgcagaagaacggagagcacagccttcagcttcccttcttctgccgcttcaccttcacctctgcccgtttaactccgttttgctcggagggagggcttcattggtgccccccgatggtaagttttccttctcctctcttattcctccccttttttacataattgctgaataaataaatagaaaaggataaaccagagaaaaaaaggaacattgcaatcacctttggaggttttgctttttttgcttctttgaaactttttt

SEQ ID NO: 52003 - DNA, 217 bp, Gossypium hirsutum
  Clone ID: LIB3083-069-Q1-L1-A10
cattagctcgcaacattaccgagccttatcgattcgggagctggactatcatatgtggtatgctataaacttgatgtgcgctgttgatccctcgacacggaaggttcttgacggagtcagctttttttagaggctatatgttcacttatgatgtcgatgaacaaatgattaaatgtactcaacaggatctcatcttatttaataagtggatcatcaa

SEQ ID NO: 52004 - DNA, 347 bp, Gossypium hirsutum
  Clone ID: LIB3083-069-Q1-L1-A5
gaaactcacttacaccttattatccgatgcaaaagcataagctcgctcaagcaagaaagcaaaatcagtctttgctccgggaaatcaaattccttgcttcttgagctggtacaagaactaaagcaaaaaggagttcacctgattaagacgatagggctatgctggaaatgaaccccctcgctctcagttactccctctgctccgtccctttcaccgaaggaaggtgcttttctagcgtgaagtgagacagcaatgcccgggaaaagcatgaatagaaggagaaagagcaagaatagcaagagcaattcgtactcttacagtttacccttagccggagcacttgctaa

SEQ ID NO: 52005 - DNA, 341 bp, Gossypium hirsutum
  Clone ID: LIB3083-069-Q1-L1-A8
caaactcaagcttacccacagtttttcaaaaatgtctttgattccaagcttcttcggcaacagacgcagcaacaacgtgttcgacccattctctctcgacctctgggacccactcaaggacttccccgtctcaacggtcaccggaaacctctgccttcgtcgacgctcggattgactggagggaaacgccggaagctcacgtgttcaaagccgatgtgccggggcttaagaaagaagaagtgaaagtacaggtagaagatgatagggtgttacagataagtggagaaaggaacgtggagaaagaagataagaacgatacgtggcaccgccttgaacggagc

SEQ ID NO: 52006 - DNA, 345 bp, Gossypium hirsutum
  Clone ID: LIB3083-069-Q1-L1-B5
cttttcatggggctggattgtcggtggcaccaaaaatctgcccttccgaaattgctgttgctaggaaaatgtctgaagaggctaaagatacatatgcacaagctctgtataagtctgtgactgagcaatacaatgtcctcaaatgtgccatacatgggaaacaagggtttgcggcatcaagcataggcatctctttatcgcagccatggaactagtcaaaaccttactatgatctcaacatccggtcatttccattgcatatatttttgactcgttaacaggaagccatcagatatgtagataaaagaatgccccgcaagacgaacaatatatgttactcgatac

SEQ ID NO: 52007 - DNA, 342 bp, Gossypium hirsutum
  Clone ID: LIB3083-069-Q1-L1-B8
gtgagaaaaagttagctctggttttggtacaagaatccaccaataaaattttattcttattcaatcacggagaattcaacatgtttttccttgtttcaaataaaggctgtttagtgcggttttaggagagcaaaagccatataaaatcattaggtaatttggcaaattttccatgatccttttctacctcacaacatatatcctacatccttagaatcagagaattgggttttctttgttggaaaaagatggtagggagtatagacacattgcaccggagtttgaactcaaatggatctttttacaactttaatggtttggaggaaaaacttgatgagcttc

SEQ ID NO: 52008 - DNA, 339 bp, Gossypium hirsutum
  Clone ID: LIB3083-069-Q1-L1-C10
ttcgtcttcttcttcttactatgtcttctcgatccagttcatacccgactcggttcgtttcattactggacctatcccgttccgtttcggatcataccgccggttgttttcttctacttcggcgactataaaaagaaaggttcgaaggaaaaccgttttgttgcttatttctcgtttttttcttcttttgttccaagaaaagaaaaccgggttcggtcttttttattccgatttgattattggatggaggaaaatgataaccaacggcgaagaacggttccgtttaccggtattttcgacgtcgtattggcctgtgttttaccggtcattcaatacgca

SEQ ID NO: 52009 - DNA, 340 bp, Gossypium hirsutum
  Clone ID: LIB3083-069-Q1-L1-C11
gtatctacttcctgatgttaaaaatgccgaggttgccttattttgtgcatgcatgggagggatcatgtactacctagaatatgagccagataccatggcccctttccttcggggattaatccgtcgcttcctggcaagcagaataagcaatcctggcccgtcagttaatcagacaacttcctatacctacttacagactcctgatgccgttaagaagccaaaaatacaggaaaacccagagatagaaacttcaactccaaaacaatacaaccttgaatctataccagggctctaagcaggtttttgttgataaccactgaaatttcaatgaaccacaccc

SEQ ID NO: 52010 - DNA, 240 bp, Gossypium hirsutum
  Clone ID: LIB3083-069-Q1-L1-C5
aaatatttaacacggcgctctgatacagtaatttgaccctatggacatggcgaatccacagttaatggaacaccttagcactagggaatggctctaaacctgttcatgattaacttccagctatgggtcctctaacaattactactgactattttgtcacggtgattttttcatgttgaatgagctcacatactacatctgtgatattcaatgactcatcttgctggtgttgtatgctta

SEQ ID NO: 52011 - DNA, 334 bp, Gossypium hirsutum
  Clone ID: LIB3083-069-Q1-L1-D11
ggttagactcatgcagcagcagccatagcacgactgctccattcaaggcgagttgattatgccattactgattgtgtgaaccgtgctgggtcagttcttgcattagtttcttttctagaatcttccagaggtggatctgctgccattggagaggcactagatgctcttgctattctgtcaagatcagaatcagccagtggacaaataaaacctacatgggcagttttagctgaatttccagaaaacatatctccaatagtttcatccattgctgatgcaacacccttgttacaggataaagctattgagatattgtcacgactttgccatgatc

SEQ ID NO: 52012 - DNA, 344 bp, Gossypium hirsutum
  Clone ID: LIB3083-069-Q1-L1-D4
cggaaagctattgaggaagctcctccagttattaaggagactcctgttattgttgaggacacagaaaaggttaattccttggctgctgaagtagagaatttgaaggcttcgttgctatctgaaacaaaggcagcagaagaggctcgtaatgcttgtacagatgctgaaaccagaaatgcagagctggtgaagaaacttgaagagtctgagcgaaaagtggaccaacttcaggaatcagtgcagaggctggaagagaagcttgccaattcggaatccgagattcaagtacttcgccagcagtcactggcaatatctccaaccgggaaatctttgactgcaagaca

SEQ ID NO: 52013 - DNA, 333 bp, Gossypium hirsutum
  Clone ID: LIB3083-069-Q1-L1-E10
ggaatcttcagtctttcggatgcttgccgaactggggctgcagaagcagtaaatgagctcaagtcaatggggatcaagactgctatgcttacaggagacaatcaagcagccgccataaatgtacaagaacagctggggaatcgtctagatgtgatccatgcagaccttcttccccaagacaaggcaagaatagttgaagagtttaagaaagaggggccaacagcgatgattggagacggcatcaatgatgcacctgcacttgctacagctgatattggcatctcaatgggcatttcaggttcagcacttgcaacagagacaggtcatgtaatt

SEQ ID NO: 52014 - DNA, 344 bp, Gossypium hirsutum
  Clone ID: LIB3083-069-Q1-L1-E2
cgatgattttactagagctgtaggagaagtgatcaaatgcttagctgaaaatgaattgattccaggtataaggaatgagttgttccctgtgacatcatcgtatggtgccccggtttttttctcccttgagcgtgccgctgcaccttatttcggaataaaggcttatggtgttcacatgaacggatatgttgaaaaagacgagcaaaaatttttatggctaggaaagaggagtctcgtgaagtctacttttcctggaatgcttgatcatctagttgctggaggactgcctcatggaattgcttgtggggagaatcttatcaaggaatgtgaagaggaagccggaa

SEQ ID NO: 52015 - DNA, 341 bp, Gossypium hirsutum
  Clone ID: LIB3083-069-Q1-L1-E4
gtaagtccagcatttttaatccaacttgcaacaccgactagtgttttagttcgggaaatggcttctggattggttcgaattgccttagagtgtgaaaagaagatggggaagaaaggggtgaagttgctgaatgagcctgtttggaggacttactgcaatggaaagaaatgtgggttcgcaatgaggcgcgagtgcggagccgaagagtggaaagtgttaaaggcggtggagccaatttcaatgggtgcgggtgtgctaccaggaaactgcaatgacaatggagctgggtccgaaggtgagctgatgtacatgagagccaagttcgagagggttgtagggtc

SEQ ID NO: 52016 - DNA, 334 bp, Gossypium hirsutum
  Clone ID: LIB3083-069-Q1-L1-E7
agcataataattatcaaatccataaaacaaaattgtattcttttgttttatggatttgataattattatgctaaataattattttagcctcccttatttttgtttcattcagcaaaagatgttattcaacagttaataatattagtatgttaacttccttttattcattcatgcctaatgtagaacaacctggttcagatttccacaatatccgagtatgaccttggaggagaaggtgatctgttcaaagctccagagccaatcattgaagaaccaaatctggggcttgatcccatgactgctgccatctcattaatctcatgtggtgaagatg

SEQ ID NO: 52017 - DNA, 275 bp, Gossypium hirsutum
  Clone ID: LIB3083-069-Q1-L1-E9
gagagagagagaggaatacattacacacttacaggataaagctaaagaaaaggagcgtaaacgagaggaggaaaaggctaaaaaggagaaagatagagaagagaaagataaacggaaagagaaggagaaggagagaaaggagaaggaaagagaacgggagagggaaaaaggtaaagaccgaactaaaaaagatgaaacagatagggagaatttaaatatatctgacagctacggccttaaggaggaaaaaaaaagggagagggaaaaggacggga

SEQ ID NO: 52018 - DNA, 306 bp, Gossypium hirsutum
  Clone ID: LIB3083-069-Q1-L1-G12
ctcatattacagatgaaatccaagagtggatagaacgtgcggcaatgataccagtcgatggaaaggaaggtcctgctgatgtttgtgtcattgaattgggtggaactataggggatattgaatctatgccatttattgaagcccttggtcaattctcataccgtgtaggcactggaaatttttgtttggttcatgtcagccttgtgcctgttctcagtgttgtcggtgagcttaaaacaaagcctacccagcatagttgttggtgacttataggacttggcttgaccccatattttctttgtttgc

SEQ ID NO: 52019 - DNA, 344 bp, Gossypium hirsutum
  Clone ID: LIB3083-069-Q1-L1-H2
gaatttggcccataacatctatgttagcttttctgtctgaatgcattcaaaacaattcgctttctagatgatccttctagaagaatgggattagaatagaacaatttttctagttacttcgttctctatttctatttgagaaaatccttaggaaaagcattttgtttccgccgagctaaaacaagatgtaaatgtctctagtaaaccaaagttatcgtttaatagctattttgcttcaatctatcccatcaaaaaaattgaagatttagttacgattagaaatacacttttatatctttatccatggatcttttcctcatacttattcaattggaagtattgat

SEQ ID NO: 52020 - DNA, 231 bp, Gossypium hirsutum
  unsure (1)..(231): unsure at all n locations
  Clone ID: LIB3083-069-Q1-L1-H6
aataggggancccccggctggaatgaatcacgagcgtgtctttttctggctagagcagtggtagcgctcggagggtttgcactacgcggaggcatattattctgacttttttatgtgcggcccttatttacctctggatgagcaagtatatgtgtgtgacttcagtaattagtaaagcgtgttcattcaacagaatatgttgatcacccgcactgtgctaagctatgctgt

SEQ ID NO: 52021 - DNA, 344 bp, Gossypium hirsutum
  Clone ID: LIB3083-069-Q1-L1-H9
aggacttcttcagggctcttgatgatcgttttgtgttactttcgggaagaaagagttcatccagtcaagatcaagatttaactggagcacacggcgaaaaagttcttgctggtcttgtcctggtgttggctcaactttccgttttcattgaacaaactgctgtcccaagaataaccgaggaaatagctgcttccttttctggtggtggtggtcgaggctatgaaaatggacctgcttttgttcctggggagatatgtcgaatatttcggtcagctggtgaaaagcttttgcttcattatacaaaaatgagaactcagaaggtatctactctgctaagaaagcgg

SEQ ID NO: 52022 - DNA, 408 bp, Gossypium hirsutum
  Clone ID: LIB3083-070-Q1-L1-A2
gcaaaaaatgggatgatccattttctatcactcaacacccttgccttgacatttttgctcacacttgtcaacgggtatcttatcaactcaagtttcctataaagctttctcatttggagtccgcctcaagattaagctaaagaacccacgatacgtgaagattcaagctaaaaaccaccgctattattaggaaataggaccaaaaagaagctgggaggtccgaaaacagaaccaaaaccaaaaccgccttcttaaatgtatgacaaacatttaatctgatgccaaattcttttcaaaacaaaacatgggttccaagcaaaaagaacattattttgtcactaacgtgagaactatgaataggaaccctcttcaaccccaaaaaaggaatgatatgaaagtgaaaagaaa

SEQ ID NO: 52023 - DNA, 334 bp, Gossypium hirsutum
  Clone ID: LIB3083-070-Q1-L1-A6
gcaggttaaatttattcaccattggttcaacacgcagggtggtgataaaaattagcttctatcagccttgctatgcattgctcctgcacgagtttcgggtcaatctgctatatatccttctacctttacgccggcgccaccaacaccaccgtattctactcttcttcactcttctgaagcgcacgctccacctacctgcactcacactgtggattgtacttgtactaccactttatgacccgcacagtgacggttttctccacccacgatttcaactcctgcaccgactgatgctgatgctgctacttcaccacctgattttcctgctactgca

SEQ ID NO: 52024 - DNA, 273 bp, Gossypium hirsutum
  unsure (1)..(273): unsure at all n locations
  Clone ID: LIB3083-070-Q1-L1-B6
ntgccacgcctgcactttgtgtgatctctttcacttttcttcttcttcttcttactttatatcgccgtctcttgacacaattcgttcgatgtttggaattgaaattggaaacacagacactgtcgatttcactttccacagttctcgcggttttgtgtttttcttgtgtcgtacactaaaccacataatgaataccgttaaatcacagacaaccaacgaaactataaactctcattgcgtgatagcggcccattttgattgtnngttttaatg

SEQ ID NO: 52025 - DNA, 311 bp, Gossypium hirsutum
  Clone ID: LIB3083-070-Q1-L1-B7
atgagttggtgttgagggtcagagatgaaggtgccggagctggaaaccaattggtggaaaagcatatgggtaccgtaccaaaaagagatgagggaatggtcagattggtggctaagactgccaatgcattggttgaagagaaggaaaagaacaagagaagtgatgataggaagttaaatgtgcaaggaatcagggacgagacaagatcatctggaaatgctatggttcagaatattgttggagcagttaatgctagggttgaagggatcccgagacaagtggggagtaataatgagaggcgggatgaaggg

SEQ ID NO: 52026 - DNA, 398 bp, Gossypium hirsutum
  Clone ID: LIB3083-070-Q1-L1-C8
gtggttatggctctagtgatttagctgctagtgatgactatggaagttatggtggtctccagattggtagtaccaccggtgcttatggagcttattcttcaggacgtggtggtccttctgggttatcaagccatacctctgtttcccggcgctaaaactatggttactaaaattccatgattgctgagacttatgaagcctgaatctagcctactgcctactttgatgaagcctgcttaaacctgaagaccagatgaaccagggttactcatggcccaccctgatgctactacctagaaggaccaaatatacgtggagattttatttttctctttgaaatttgccatttccatgccaccaaaaacaccaagctctgttatgtgtgctcccaagaacct

SEQ ID NO: 52027 - DNA, 337 bp, Gossypium hirsutum
  Clone ID: LIB3083-070-Q1-L1-D2
ccgccccaaaaaaaaaattgttttggggtttttctctaatttgacgatcaaatcattttcactttgattgattgatttcatctactctaggttcatcaattatcatgagcttttttcttctatttttgtccttcaaacatttttctttatatttctggctttgcttaggataggtgaggtaacagagcttacctttgtaaaacttctgtgctaagatgatcatctaaaatcacttttgattttgctgcggtggggagttatcaagctttaaactgtttggtagatatctttgaattctacagcattcaaacaattgctttgatctgttctttgatcc

SEQ ID NO: 52028 - DNA, 398 bp, Gossypium hirsutum
  Clone ID: LIB3083-070-Q1-L1-D7
ctgttttatttttgttaatggaaggattttgaaaagaaaatccatgggagaagatctattttgggccattcgcggtggtggaggagggagcttctgactcatcctttcatggaaagtaaagctggtttctgttccatcaacagtgacggttttcaccattagaaagaccctataagaaaatgcgacgaatctggttcatcaatggctatcagtagcccacaagcttcctggtgatatattctcagctgttacaatgagaaaggtgaatcgaaatggtaaaccaacgattctagttgctttcaactgcttttttcttggggacactaatgcattgattccattgatgaaagctcgattcccagaactgggactaaagaaggaacattgcactgaaatga

SEQ ID NO: 52029 - DNA, 393 bp, Gossypium hirsutum
  Clone ID: LIB3083-070-Q1-L1-D8
ataaactcaaaatatgtgtgtttctactgtcaaactttaatggaaccacctggacagttgaacctttaaaaggaaaaatgatacaacatacaacaaaacagactaaagaataggactcacctctaacaaagcgccttcgtcacaactagcctaaataggaggatgtgataaacatagtattcctatttttaaaacagccaaaatgatgctattgaaaacaatatttgtgcatccaacagtacagttcgcatatgtgatcgatgaagcagcaaacagaaatacccgggaaacaaatttcttttaactctgtcaaatcctgaggtaaccgcctctttcttgaaatccgatggttctcttgaagaatgatctccggttatgtgaccaagttctttt

SEQ ID NO: 52030 - DNA, 375 bp, Gossypium hirsutum
  Clone ID: LIB3083-070-Q1-L1-E8
gacaaaagcattacaacatttgatcccctggcctcaagcacatgggaacaggttccacctgccaagacattgatcacgcctgttcagtgcaaatctttgtggcggcaattcagggctgagacagagtacagtgtcactcaggccatttctgctcaggaagccagtaggcgtaacaacaactggatgccacctccatgggcaattgttgccttggtcgtcttgggatttaatgaatttatgactctcctaagaaatcctttatatctgggtgtcctctttgtgggttaccttactgtgaaggctctatgggtgcaactcaacatttccggtgaattccaacatggcgttcttcctgggcttctttccatatctacc

SEQ ID NO: 52031 - DNA, 402 bp, Gossypium hirsutum
  Clone ID: LIB3083-070-Q1-L1-F1
ccttaaccccccttttcttctatttttcacattggccgaccttaacctttcccctgaacgctgatccatctccataacgacgacaagcctttcgattgcttagccttaggttccctctacgccttgacttcggcaaagcaaaaggaaaccatggcatttggttcgattgtacggaggagaacgctcgtggggatgacgtggaggaggctcggaggctctgcggaaccgctcgtgggagcccgactccctggcgctgttctggcatgttccagaagcttccggtatcaggatagaccaaatacagagttagaacgaggaaaagaaaaagcataagattagtagattacaaatccatgaaacacttgtcgagtaccctgaagctcgtaaaggttgaaagctggt

SEQ ID NO: 52032 - DNA, 390 bp, Gossypium hirsutum
  Clone ID: LIB3083-070-Q1-L1-F3
agaacatccgtttatggtaagatttgaaggaattttcaggttttaaaactaaaagtggattggttaaagccattattgtattgggtggtaaggtattcaccggtcaccaagacggtaaaatccgtgtgtggaaagtctcatcgacgacgagtcctagcgtacacaaaagattaggcagtttgccgacgttcaaagatataataaaaagctctgttaaaccgaagaactatgttgaagttcggaggaaccgaaatgttcttcggatcaaacacttctatgccgtttcttgcatgagtgtgaacgaagaggtcgggttgttatattcagggtcttgggataaaaccctgaaagtttggcgattagccgattcgaaatgcttggaatccatcg

SEQ ID NO: 52033 - DNA, 245 bp, Gossypium hirsutum
  Clone ID: LIB3083-070-Q1-L1-F7
ctcttttttattccaagacggagaaactcgaagggaaagtcggaatctaaattggctgagctgacgaacaaacactttgctggaagttgcattccgaaaggcttatacagtctgtttctgggtttaactgatgaatattttttcaatgctcatgcacacacacaactggcttatgcggagctccaccctgtgctggccaacaacgtttaccaccactatatcctgtcaacggacaacatattggc

SEQ ID NO: 52034 - DNA, 372 bp, Gossypium hirsutum
  Clone ID: LIB3083-070-Q1-L1-G5
agatcaaattggaaacgattactttcaaaagaaaatggggattactgttggagtttcccagtaacaaattgggcacattggctttgaatttaaattatttttggaccaacaaccgccttttacaaaccgaaccaaacagaagctatcttacaaggtttttaatacaaaactacctttccttcagttggttcaaaataatcaggtaacacttaacaagcttggattttttaaaaaaggaaaaaaactgttttttgacacctggattaaccaaatgaaatgaattccatataaaaaaaagaaaccttattcattgacacaaatatatatacataaatatatagtatgtatatgatatgcaataagcattcttca

SEQ ID NO: 52035 - DNA, 304 bp, Gossypium hirsutum
  unsure (1)..(304): unsure at all n locations
  Clone ID: LIB3083-070-Q1-L1-H4
ttttttttttttttctgaaattatcaatcaaatgtttaattgataagattaaacgaaaacctaatgaaacaagaaaaatataatattacatgcctctggttcatagattatctcgattgcattgtaaaactcctcaataggccgctctttccgcctcaccataatagcagctgctatagccgaagaaacgatttgaaggcctctctattttctctctattttgncaaagggagaacaggttggtgaggatagaagcatgaaaaagagggagataaggttgggaggaaatgggaagaagaatgag

SEQ ID NO: 52036 - DNA, 376 bp, Gossypium hirsutum
  Clone ID: LIB3083-070-Q1-L1-H6
gtcagccgccatggtttttacgtatcttggcaacgtgctggtggctgatttgaaatgccttttccaaaacaacttcgggaatgggtggattggacacgaaagcggcccttgaagctatttgtgtgcctgggttttggctgctgagcccacagatagctaaagcaggcttctttggctccatgttatacagaaaatggatgagtcctctggggaaaacgaatgagtcaccgggctcaagtttttgagtgaataagcgggtagaggtatccacaaagcccacaatgataacaccctgaacacaaatggtgacttcggaagcccgacggtgggaatggcgtggaacaaggccgtcagctgctatatcgacacgggccat

SEQ ID NO: 52037 - DNA, 339 bp, Gossypium hirsutum
  unsure (1)..(339): unsure at all n locations
  Clone ID: LIB3083-070-Q1-L1-H7
gaaaaaaatacgcccttcacggggatgatggnttctgagtatgtgtttaatcaatcactctttgaccatctacatatacaaaaaactgagcacttgaactgtcgaatgcgcgtaaggatagccattggaatagcgtacttttttgagcatatacattaggttactgtcgatatagcccatataaacttgcaggcttgctatgagtatctgactgaagactatgctttaaatatatgtgatttcagctttttgaataatgctaccgcagtcaatgtgggatcggctaccatgggcctcttaaaatgtccatcatcatatgcaaagaacaatgattacagg

SEQ ID NO: 52038 - DNA, 287 bp, Gossypium hirsutum
  Clone ID: LIB3083-075-Q1-L1-A10
caaggctgggtgtgcacctggaaagatgccagtatagaagacaattccatcactggaggatgttctttgcttgctaatgagcaatccaccattctctctatctgctattgcctcattcttcgctagccttgcgaaggccgggatgatatatgattaaatgtactattcaaaggctggtctacactttaacactaataatttagcctatcttatgactactgatgaaactgcactgaccattgttcacttgtcctcatgccccgactggtatcttcaataagagatag

SEQ ID NO: 52039 - DNA, 483 bp, Gossypium hirsutum
  unsure (1)..(483): unsure at all n locations
  Clone ID: LIB3083-075-Q1-L1-A2
ggggggcgttntagaactagactagtcgcatcgcgctgcactgaattcggcaccgagcattcatacctcatctctcnncaaaccacaaagggtagattggggataaggattgaagtctcaagtaaaggaaggaggagaaaagatgaaaagcttggatgtgtgatgcggcttttgaaccaaatttttgccgggacaatttataatgggatgcggatgatagacacaatgatagggccatgcacaaaatcttttgtnggagtctaatagggnnacagtgctatcaacaaattggaaaagaagtctggtgccaaagaagggtggaagggaagtccttcctgatggtatgtgaaatgaagaagctgggaatacctgaggacgatttgtaacgtggacaagtaatttttggtattgtgaatgtcatcttatttaacttcaatcctaatgaacgtgtntgcttgaatgttgaaaaaggatttcctgtcg

SEQ ID NO: 52040 - DNA, 285 bp, Gossypium hirsutum
  Clone ID: LIB3083-075-Q1-L1-B10
gggaagcgttagttgagagatttattgaagaggatcaaacgaataacttcgttctcattatcaagagacaacagattcttactggtaaatcttctaaaccaggaaatccatttatggagcatagaagatgatctgaagcttgtttctaaatatagaggccacaaacgcacccgcttcatcattaggtcttgttttggtggacttgagcaagcttttgtagctagtggtagtgaggactcactggtctatatttggcataggggcacaggagagcttatagaggca

SEQ ID NO: 52041 - DNA, 322 bp, Gossypium hirsutum
  Clone ID: LIB3083-075-Q1-L1-B2
ggcatggctgttgttgatgcattaggtaatgggcgcagccgatctacaaggtacattgttgtcggagaggcatcggtggactactaatgtaatacactgctgtctcgaggaaagcacttctactattcgactggcttttttgtatatgatcggaaccagataatgtgctggagtgacaagacatactacgagtcatgcaatgctgatattcttttacaacttgacaaccggctggaagggatggtgttcctaatggactcgcactactattcatcatggcaaagatctgcacggctgcatgtactagactgctgttgagaac

SEQ ID NO: 52042 - DNA, 384 bp, Gossypium hirsutum
  Clone ID: LIB3083-075-Q1-L1-B3
cctgtctggctagaggttgagagaacaagcttcctatcaggagatggacaagacatacttaattcactgaatggacatggaaaagctgaatattccagtgacgattctgaggctgaattctttggtagacttcacagtggagcaagtgcttcttcatctgcttcttctgtcgctgtttcagaaacttataatttgactgctaattccttgcaaagttcgttggctgtgggttctttttttaaattgagatgtgaggttttaggtgcaaacattgtgaagagtggttctaaaacatttgctgtttactccatatctgttacagatgtaaataacaagcatagttggtctatcaagagaaggtttcgacattttgaagagctgcat

SEQ ID NO: 52043 - DNA, 260 bp, Gossypium hirsutum
  Clone ID: LIB3083-075-Q1-L1-C11
gggggaaggactattgcttttatcaaatattattattatcataatttgttttgtaattgaatagtattaatttgtagatggtagggatgatttgttgtgtatgaaattggtgttttgtgagacttttgaagtgagaccaaatataaggtttagtgatgggggtggtggggatttgtttcattgttttaggtgtacggactaggattagctctttttgaaatttggtttgctttaacctcaactgaaatgttcttattttt

SEQ ID NO: 52044 - DNA, 288 bp, Gossypium hirsutum
  unsure (1)..(288): unsure at all n locations
  Clone ID: LIB3083-075-Q1-L1-D1-R2
ggggggggttcgtgactcattatagagagtacttacattattattttacagtgaacaaaaggcaagctaaagcctttgttttcttattcattattattattattatttattggntgctagcactattgccntaaagacaaaagtggggtagcacatacaaaaagggctctaagccacagctctcttctgagactcctgaggtggaaccaggaacttgaaagggttgttgttctttatctgcctggcctgctggctttttaggttgaaagtgggctgaatcacttcctt

SEQ ID NO: 52045 - DNA, 261 bp, Gossypium hirsutum
  Clone ID: LIB3083-075-Q1-L1-D10
gtactccgtgccaggtgctgtgaatatgcattgttgatgcttgaacattggcctgatgtgcctgaaatacagcgatcggctgatttatatgaggatctgattagatgttgtgttgctgatgcaatgagtgaggtaagatcaactgctagaatgtgctatagaatgttcaacaaaacttggccagatcgttctcgtcgcttgttctcctcctttgatcctgccattcaaaggataattaatgaagaagatggagggatgcat

SEQ ID NO: 52046 - DNA, 311 bp, Gossypium hirsutum
  Clone ID: LIB3083-075-Q1-L1-E10
gacacctgatcggcatgtgagaacacgcctttactgtgcatcagaatcccatatccattccctcatgaacgtgcttcgttactgtaacctggatgaatctcttcagggagaagatagtcttatttgccagactgccttgaaacgtttgtataaaaccaaggagcttgactacatgagttacattgcgataaggatgtttgagaatacagaggtagcgttagaagacccaaaaaggttccgcatcgagttgacatttagccgtggtgcagatttatccccattggagatgaatgacaacaaggctgcttcac

SEQ ID NO: 52047 - DNA, 329 bp, Gossypium hirsutum
  Clone ID: LIB3083-075-Q1-L1-F10
aagcaaacaaatttctgtctcccaaagatatttttttgctctctccgcttcagaaaaatggctcaagttagcatcttgaaggctcttttggtcgctttattcatggcattcttaaccgccgccacggcacaagttagtgaggcaccttctccttctccggacgccggtgccggtttctccgtgggcgtttccaccgctgctgttgggttttctttggttgtgtctcttcttgctttgttgaaagcttaaatttatgggatttttttttgggggggttttttgtaccattgatttattattgggttttggttttaaattcattccttggt

SEQ ID NO: 52048 - DNA, 220 bp, Gossypium hirsutum
  Clone ID: LIB3083-075-Q1-L1-F11
tagaatttttctttttttacaccaaactctaacttatccggcgattttattttccataaagctcaaaaccaaccccacttatgtctttgcccatctctttgaactctccctcattataatacctccaaatacaaaccctacttcattccaaacaaacttcttcaccaaaattccaacttaaaccctcaaaatagctctaacccaaaaaaaggaaattttt

SEQ ID NO: 52049 - DNA, 241 bp, Gossypium hirsutum
  Clone ID: LIB3083-075-Q1-L1-F5
tcagtttttttttttttttgtcaatatgagattaaaattaagaggatggaaatacattacgcatgttcgacaggaccaaaactgtgctctctttagtgtatattttaattttacccaaaacaaaacagatggaaacaaaaaaatttatgcaaattacactaaaacacttatggttctaacaagggaaagggatttgcttgaagtttttgagggaagggggggactctgacttaaataatac

SEQ ID NO: 52050 - DNA, 300 bp, Gossypium hirsutum
  Clone ID: LIB3083-075-Q1-L1-F8
gggggtgcgttaaactgggatcccccggctgagaattcggccgagctggattttcggtgctcatgacataagaaatgaacgtccgctggtactttaaaaaaaccgctccaacacccaaaggctgggctgaaaatgcttggtggggttgcgttacaaatgctccttatctaattgattggaccacttgtacaatgcaggattgggggaatgtctttgatgacccacagtcgcgagagttgttgcagttctaagattgatggctaatgatgacattccatcgacaagtttttgagtaataaa

SEQ ID NO: 52051 - DNA, 326 bp, Gossypium hirsutum
  Clone ID: LIB3083-075-Q1-L1-G2
caagaaggctccttgatgtgttactggtaagaagaccaatggggccttgtattataggtatctatgacgaaccaatgactcccggccaatgcaacatgatcggctagaggctcggcgattatctgctccaacagggtttacgatatctttcagtgtgtgtcctaatctgaatgcattttttctcagggtcttttttctatatgaaaaaaagaaacatgcatcgccagcgtctacgaattactcggaatcacattgaaaaaatacataatggccatgctttatgaactctttgctctgattttatggattttgcaaaatggatacta

SEQ ID NO: 52052 - DNA, 371 bp, Gossypium hirsutum
  Clone ID: LIB3083-075-Q1-L1-G5
tagacatggctttttttttttctctcccttataatctatagagcagcattcattgttatggtttacatccaacttccaagcgcctgtgtccattaaaaggtcaatgcttttcacatttctacttttaatccttaaccaacgttcaaatttctgatgcatcattctaataagacccgaaagcctcacactactctcaaattctattcatctgtatctaccaatttatcacgtaccacttttaaagtcattctaacgcataacaacttttctattgcgtcgttcattaccttaacgaccttacacaacaaatattccattaatttcatattgaaaaacttcaactgttctttttctcatggaattaattaaaa

SEQ ID NO: 52053 - DNA, 186 bp, Gossypium hirsutum
  Clone ID: LIB3083-075-Q1-L1-G8
taaactgggatcccgggctgaggttcatgccactgctatgctggaacggcgcaaaaggtcatttgagattgcgaggttaagctacgtatggttaggtttgtggcttattttctttgggctgcagaagggtttgccctcttaggtggaaatatgtacaagacaattgggggggcataaataaaatta

SEQ ID NO: 52054 - DNA, 280 bp, Gossypium hirsutum
  Clone ID: LIB3083-075-Q1-L1-H1
ctggaattgtctgattatggggtttgcaatctatggtctgggtaaagaggtggtctcactctttgagcagatgcttggggcatacataattccagatgccataacattcacagctgtactctctggttgtaagaattcaggtttagttaatgaaggatggaaatattttgatagtatgagctctgactatgggataataccaacaattgaacattattcttgcatggtagatcttcttggaagagctggataccttgatgaagcttgggatttaatgcaa

SEQ ID NO: 52055 - DNA, 215 bp, Gossypium hirsutum
  Clone ID: LIB3083-075-Q1-L1-H10
gactaattcaacacgacacaaatgcttcccttttaaatccaactcatgccgcccttggcgagggtgtttataccacttcttttccaacttatacctacatcgtattcaaaactatttattatcatattcaagacatctcaacaaacctacattctcataaattgctaccttcatcacctaccaaattctacaaaaattactcgattacactctcc

SEQ ID NO: 52056 - DNA, 413 bp, Gossypium hirsutum
  Clone ID: LIB3083-075-Q1-L1-H11
cgagtattgtgtctctcttccctctctcttttcattctgctccatgtgctgcgaaaacaatagcaacgatcgcttgctgtctctgtttaccttttagatattgttgtattattgtaactttcgttttctctttctcacaaatgctctaatgcttaagtattcacaccaccacttcattagttcaaagtctcataaactccaaacatcccattttgtgattagtatcacacacaagaaaaggggttccttttattgtttgcaatgatcttttcttctttttagtgggaccacacggaaaaaaatacccttttttttttttgtgagaaaatggggaaagtgacagtttgtgtggcggttgtatgtgtggtggccgtgacagcggcagcagcggtggtgattcatcggaaaatgaa

SEQ ID NO: 52057 - DNA, 381 bp, Gossypium hirsutum
  Clone ID: LIB3083-075-Q1-L1-H4
gtacatgttgcgcataaaccagaatcccatgcgtcattgtcgggtcggaaaatgaagctgctgaacctctctctacttattcacttgtgttcactgctgctcgtctcaactcagcccaccgatcagcctccattctcctgcgactcaactgacccactaaccaaatcctacaaattttgcaaaactacactccccatcaaccgaagagttgaagacctcgtctccaggctgacgttagatgagaaaatatctcaactcgttaacacagctgccgccattccacgactcggtatccctggctatgagtggtggtctgaagccttgcatggggtggccttcgtggccaacataagccaaggtatccgcttcaatgggacaatt

SEQ ID NO: 52058 - DNA, 133 bp, Gossypium hirsutum
  Clone ID: LIB3083-085-Q1-L1-A3
ctaaaactctactcctctgccactccattctccatgagggggtcctttttattacggcggttttcatcataaaacgacccgatagttattaaaataaactactctaactcatcggcttccgccattaacaaat

SEQ ID NO: 52059 - DNA, 139 bp, Gossypium hirsutum
  Clone ID: LIB3083-085-Q1-L1-A8
ataaaaagccaaactcttgatccaacatttcaaccgggatgggaccctaaaaatatccgcttggccctctttaaatgcacccgatgggcagtttaagaaactcttgatccaatcaactggccctttcattacttttgtg

SEQ ID NO: 52060 - DNA, 232 bp, Gossypium hirsutum
  Clone ID: LIB3083-085-Q1-L1-B12
aagaacctttccaggtcatttgtcgtggtaacaaggagggggcttatctcagcaaggagagtgcatgcatttatggctcttttacacaagatattgtgactgacactaatatgaatgctcccacccatatatcaatctattgaactccttctcacacatcatttaaactatccactcatatcaatctatttgatcgacaaaaccaaatatcttctatagtccatgtatctta

SEQ ID NO: 52061 - DNA, 285 bp, Gossypium hirsutum
  Clone ID: LIB3083-085-Q1-L1-B2
ctaaaaccaaggggtccccccggcctgaagaattccggaccaaggacttctttctccaagcaggcttttcccttacaggggggttttcctgggaataaacggtatggcttgctcaatgtcccttaagcttgcatgtgtggcggtgttgtgcacatggtggggtgcgcacccctgtcaaagggggccaatccctgtggaaattacacaagccctctcgcaccctgtttggtactcttcacagaaaagggctctggtggttcccccacgatgcggtgggggggtaaa

SEQ ID NO: 52062 - DNA, 258 bp, Gossypium hirsutum
  unsure (1)..(258): unsure at all n locations
  Clone ID: LIB3083-085-Q1-L1-B8
gatctagctgtactgaaaggcgtgctatatgcagaactggtgaactttgttccatggaagggaatggatctagaacttaaacacgttcatgctgatggtgtctatgggttgtgcattgattcgtgaaacaatttatagcggagngggctggaagatatttttcaaattcacattcataaagctttgggcggctttactaccgtccaatctttggttgctcgttgttctgtttgttcaaaacattttttccttgcctct

SEQ ID NO: 52063 - DNA, 221 bp, Gossypium hirsutum
  Clone ID: LIB3083-085-Q1-L1-C12
caatattcatatatactaaggtgccacttactggggggggtgcatcaatagtcagtcaggggatcactctctgcatgttgtcccaaattccccatgtatttcaatccagcttatcccgaaaacagacgcttcctttgatcaaatttacacttgctgcttgcattgctatactacattttcaataaaaaaaactattttatttcctttccacactctttatc

SEQ ID NO: 52064 - DNA, 204 bp, Gossypium hirsutum
  Clone ID: LIB3083-085-Q1-L1-C9
gtgttgggcaaaaagaagaaagataatttatgccttccattttcttgttttaaactactaagacaaatggggacagaaatgtttttcctgtttggtgcaaggtttaaccatttacatgatgctcactgaaccaagtttttcacattaacagccaccaatgtgaataatcacacaaacttggtttgtttaaaacctttattcctt

SEQ ID NO: 52065 - DNA, 270 bp, Gossypium hirsutum
  Clone ID: LIB3083-085-Q1-L1-D1
ggtggtggcaaaaagaaaaaagataatttatgccttccattttcttgattgaaactactaagacaaaaggggacagaaatgtatttcctgtatggagcaaggattaaccagtttcaagaatgctactgaaccaaaatttttcactgaacatcctccaatgtgaataattacacaaacttgtgttgtataaaaccttgaatccttttgatatttaataaatttaatttcaacataaacttattttgccttaaatttttcccttattaacct

SEQ ID NO: 52066 - DNA, 385 bp, Gossypium hirsutum
  Clone ID: LIB3083-085-Q1-L1-D11
gacaagtcctatcttactggcctgggcattgtctggtcaactatcaggaatgtgatggacatgaaagccacctatggaggatttgctgctgcacttttacaacagaaaatttgggtgatgaacgtggtccctgtccatgcaccggatacacttcccttcatttttgaacgcggactcgttggcatctaccacgattggtgtgagcctttcgggacttaccccagatcgtatgatctgttgcacgctgatcattttttctccaggctaaaaaacaggtgtaagcaccctgtttcgattgttgttgagatggatcgtattctacgtcctggtggttgggtggttgtgcgtgataaggtcgagatacttgatcccctagaggcaattt

SEQ ID NO: 52067 - DNA, 120 bp, Gossypium hirsutum
  Clone ID: LIB3083-085-Q1-L1-D2
gtgatttgtaaaatctgactttaatcaattttgaagcggagaaacaggacttgtaggaaagatcgaatgaatcgaacccttatttacagtccgaaaattagagattccaaacacttgaat

SEQ ID NO: 52068 - DNA, 320 bp, Gossypium hirsutum
  Clone ID: LIB3083-085-Q1-L1-D7
cctgtttgctaagctcagttgttgggagtctcataggagcccggggatgcactgaactggggagggccccaggttaaagcctatgacgagaaaggcattcccaattatctacaaaccagttgcttgtggctgactgacagtctttcacctcctgaaccaagaatgcattgctctggcattatgaagagcacctgaactttacattaacaaaagggttgcttttcaactcttgcccattatttcaatgcaccaaactgtgggagaaataccaactatcacttatccatccatacagataccacatctgctaatgcaaaggg

SEQ ID NO: 52069 - DNA, 388 bp, Gossypium hirsutum
  Clone ID: LIB3083-085-Q1-L1-D8
gacaatcccaagtccctcccggattccgatttcatcccaccgaagaggagctcttacaatactatctccgaaagaaggtttcttatgagaagatcgatttagatgtgattcgagaggttgatcttaacaagctcgagccatgggatattcaagagaggtgcaagattggaactacgccgcagaatgattggtatttttttagccacaaagacaagaagtacccgaccgggactcggactaaccgtgccacggcggcgggtttttggaaagccaccggccgtgacaaggtcatatatagcaactgccggcggattggaatgaggaagacgttggtgttttacaaagggagagcccctcatggtcaaaaatcttattggatcatgcatga

SEQ ID NO: 52070 - DNA, 350 bp, Gossypium hirsutum
  Clone ID: LIB3083-085-Q1-L1-F5
tgttcatcctaccgtgaagtacataggtgatggtaccttggggatgcaacccttgcgcatcgattgattccacctcgaagcggtgatgaaaaacttcatgatgcgtcctactgctatggatgccgttaaccattccataattatacacacttccgttcctatcgtgcatatatctatccttaataatgtcctgtatttacaatctgattcaataatctactggaccaaattgtatcactctgaataagcttgattaactgtcggttctttttgctatatatgcatgccaatgtatcattcgaatatgattttgtttatggcgtgtctttatgtatagtatgtgttcatat

SEQ ID NO: 52071 - DNA, 186 bp, Gossypium hirsutum
  Clone ID: LIB3083-085-Q1-L1-F7
ctcaggctaaagaagccctgaccacccaaagaagtcggggtcacatatgaagtgtctggatctgaaggaaaatgcttataagctggagatggaaaccagtggacaggcaaaaagctcttgttgagcatggaaacgcagaacacttgaacaactaaaaatgggaacatggaagaaaagcgatacgcc

SEQ ID NO: 52072 - DNA, 374 bp, Gossypium hirsutum
  Clone ID: LIB3083-085-Q1-L1-G8
gctagttcttttttcttattttgtgccgcatttgctggcgggtaaaaccattcttttataattacacgaaactgccacttttacattcattgtcccattttcacacaattacccattgttgttcaatccaacatttaaatcaaattccgttcaaatttacttaccaacatattaaaccacccttttctttttaataccaaaaagacttttatatgtgtatggatttaaacctctaaaaagaacaggcatccttgcaaaaaaaaaaaccgtcattttttcgcacacaattaacaagtttcatcttctatcgcccatgaaaaaatagaacccttgccaacatgagcgggtcccccatttttacattaataatttct

SEQ ID NO: 52073 - DNA, 273 bp, Gossypium hirsutum
  Clone ID: LIB3083-085-Q1-L1-G9
tcagaatgtatttatgaagccttttgttattgttatgcgcaagagcagtgctgttgaaatccgacaattaatcatcagatgtgtttcacagatggtattatctcgtgtcaataatgtcaaatcagggtggaagagcatgttcatggtttttgctactgcagcttatgacatccacaaatactttgttctgttggcctttgaaataatggaaaagatcattcgagactatttcccatacataatcgtttctgattcatcttatcttttcatatt

SEQ ID NO: 52074 - DNA, 321 bp, Gossypium hirsutum
  Clone ID: LIB3083-085-Q1-L1-H12
gaagtgcatcgacgacgacacgattgtagaccttaagaaggtggtcgcggcccatactggatctctagcatacaagatccgaatccataagtggtacacggcttacaaggatcatttttccctcaaagattactaattccacgacggcgtgggactcgaactttactactattaaaaaaaatctttttatgtaatccgagtgggctttgctcgaacaagctctaaatcttatatatgaatgtaacatattcgtggatgatggcatttacttttctaaggattatcaatagatgaaaatatttttatatatccgcatgatca

SEQ ID NO: 52075 - DNA, 302 bp, Gossypium hirsutum
  Clone ID: LIB3083-086-Q1-L1-A6
gtcgaaagcatagttattggaatgcctcatagaggaagagggaatgtgctaggtaatgttgtccgaaagccacttcgtcaaatatttagtgagttcagtggtggtacaaggcctgtggatgaagttgggctttacacaggaactggtgatgtcaaatatcacttgggaacttcctatgatcgaccaacaagaggtggaaagagaattcatttatctttagttgccaaccccagtcacttggaggctgtggacccagttgttgtccggaaaactagagctaaagcaatttactccaatgatga

SEQ ID NO: 52076 - DNA, 312 bp, Gossypium hirsutum
  Clone ID: LIB3083-086-Q1-L1-B2
tggaggttttttggacattgcatttgatttcatcaacaaggagggtgggatcacttcagagattcattatccttacgccgctaaacaaggcacttgcgacgtttccaaggagaattctccggtggtgtcgatcgatgggcacgagaacgtgccggttaatgatgaggaggctctgcgtaaagcagttgcaaatcagcctgtatcagtggccattgatgctggtggtacggatttccaattctactcggagggggtatacactggacaatgtggaatagagcagaaccatggggttgcatcagtgggctatgg

SEQ ID NO: 52077 - DNA, 324 bp, Gossypium hirsutum
  Clone ID: LIB3083-086-Q1-L1-B6
cgcgagcctttaagaaagattgaattggactggggggggggaatggctgaaaaggaagggttccaagatgagcattggaagataaatattacagacccaaggcgaaattttttgatcaataaaaatttgtgatcgggggtttttttgtctttcttttctgatgaatatttttgttaattaggatttgtaggaacattatagagatgttttccttataataaaaaccttcatagcttgaccatattattagtatgagcagacattgattacagcggttaagctctttgtataatacatgcatcatgagaagtaaaaaataaaaat

SEQ ID NO: 52078 - DNA, 319 bp, Gossypium hirsutum
  Clone ID: LIB3083-086-Q1-L1-B7
cagagtgatatagagacagagggggcggggcttggttgttgtttctttcactcaaaaaactcttctatggctcaaaaaagcacgggtttgatcataggatgaactggatacctgcgaaaggtcattttggtagcccgaccacaagaaggtcctcccccttttttttttttgaaggagaacacccttttccaccctgttaagggaaaacttttcgaccacattaagaacttacgggtccatttgttgttaggggatgtgttccaacattaaagtttggccaaaacaataaaacaaggcgatttggtgatttcaggtgtgg

SEQ ID NO: 52079 - DNA, 301 bp, Gossypium hirsutum
  Clone ID: LIB3083-086-Q1-L1-C7
ctgcacagaagaaagaaaagaaagggaggaataatcgaaagaaaattgctgagaaaaaccggcagcttggtgttaaaaggttgaaagtgcatacagttctgaaaccaaaaactgtaacatattgtcgccattatctgaaaggaaggtgtcatgagggtgagaagtgcaaattctcacatgatacactacctttgacaaaatctcagccttgcagtcattttgcacgtcagtcatgcatgaagggaaacgattgtccatttgatcaccaactctccaagtattcctgtatcaattataccac

SEQ ID NO: 52080 - DNA, 420 bp, Gossypium hirsutum
  unsure (1)..(420): unsure at all n locations
  Clone ID: LIB3083-086-Q1-L1-D1
aagaaccagaggagccgagggccggacgaaancagcacgagctgggaagatttcttctatttacgaggagctgttgatgagggaggttaaagatgctagctgtggggcatcatatagtgtcattccctttaggaaacaaggatttaggaggtatcgacaattatgtacagagatgaaatggctaactcaagaccttgttcaacagtgcagtaaatacaggcaattccgtcacatggaaccaagcgcaaatcttggaatggatgccggcgtctttttgcaagataacattttcctgcaagagattaatggccgtcataatgtaagagatgaattttgtggcaatattatgagcttgctggttcatggaagcttaacaacacgaggttttgataaaaatatgttgatgaggcttgttacaca

SEQ ID NO: 52081 - DNA, 163 bp, Gossypium hirsutum
  Clone ID: LIB3083-086-Q1-L1-D5
gatcgccttaacagggggggttctcaaaacatgctttactcccttattaagctgcgactgactgccgctgttgttgacaaaaccactttctgtatgtttcaactacagaatgagcacgatctgcatgctaatatatatatcgtccctatcaaaaactcttcaa

SEQ ID NO: 52082 - DNA, 183 bp, Gossypium hirsutum
  Clone ID: LIB3083-086-Q1-L1-F3
ctgagctattttctctttttgcttcctataatttcgatcggagccaaggttgataatcgagttcttataaccggatgatcctggcattccaaaatttgaattgcgtggctgaatgacctatcgagactaatggcgggaaaaagaagtctagcaagcgatagtaattattctacgaagcttctc

SEQ ID NO: 52083 - DNA, 348 bp, Gossypium hirsutum
  Clone ID: LIB3083-086-Q1-L1-F5
gccgagaaaatgtctataacggcaatggatggagatgcacgcgtgctggtgcaccgctctcgagaagatttcacctgacactttctgcgtcatcggtatcgcaatcgccatgggggtcgtactactgagacctgcggggggaatatacataactgggagtagatgaatcggtgctgctattaaagctcctcgaatcacttccaagaatctaattcaagcaatcttttgagaagctgatgatatatatggtgctaaagttgcaattattacacaaacaaagttagagagtgatgcatcatcacatatacacgcgcctgagtctctaagagcaggatatgcaatctttgc

SEQ ID NO: 52084 - DNA, 286 bp, Gossypium hirsutum
  Clone ID: LIB3083-086-Q1-L1-G2
atattataataataatggtaatgataataataataataataatattacttgttaagctatgtcttcaagaccaatataaaacttatataacgttctaagattgaccacttcaaactattaccttcatgcttcaacattattacatcaaaaatttgcttctaacaaattcaataaccaatttgttacttaatgctattatatacacaatttcacacagaaattcattcccacagaacaatgggtaatgctttcaccatattaaaactcaaaacaaacatatttttta

SEQ ID NO: 52085 - DNA, 219 bp, Gossypium hirsutum
  unsure (1)..(219): unsure at all n locations
  Clone ID: LIB3083-086-Q1-L1-G4
cactagatcaaaccttttctttttctttgagaaaatatatctaatggggnggttcaaaattaaataatggttttgcaataacaaagaacaagcgatcctgtctgtttatcatgccgccccagatgacaattctttgaactataacaaaaagttttttttttttctaaaacacccctttatttttttttgccccaccttttttttcaaaaaaccccccat

SEQ ID NO: 52086 - DNA, 214 bp, Gossypium hirsutum
  Clone ID: LIB3083-086-Q1-L1-G5
atctttttatttttgtctagaaaaatgaatcatacgaggaggtactaatctacagtgtgctgctccccaagagaagacgcataacttgtctaatacgccatgtcgaaccaaagcttctttataccttaaaaatcctgcataaaaggtgccaaaacgttcaaccgcatattaccaaagagcaaacactcttatttgttcactagataaaaccttt

SEQ ID NO: 52087 - DNA, 236 bp, Gossypium hirsutum
  Clone ID: LIB3083-086-Q1-L1-H3
caaagcttcaatgaaaagcttgccgaagctgaaaatctgggggtaatcttgcgaagtgatttaaatctcacacaacacaaactggaaagcattgataatgatcttacggctgttggtttgcgagaaagcgagggtatggaaaagctcaaatctgctgaacagcaactagaggaacacgttagagtattagaggaagcttaggcgagaaactcagagctccagtcattgcatgaaac

SEQ ID NO: 52088 - DNA, 409 bp, Gossypium hirsutum
  Clone ID: LIB3083-088-Q1-L1-A3
ctgcatcaactagtagcccaataagtgaaccagttgccgcgtaagcttctcgacgcctccgtatataattttttgaacaactttgtattagggagtatcaaggaacctcatttccctcgttggcgatagacatcgactcagcagccaaagtgggagaggaaatttttcatgttaatcatggttgtgcttatagtgttttagcagctgtgtctttgtttgtgaagctgttgtgttgtgatgatgaattatatgttgtaagttgctattccttgtcccttgtaggtagagagagaggctttggaggcgttaaaagtaggataaggaacatccttgttgtccttttggaactagataatcacatttgcattataaaaatattgtataaaaggataggaaagtcttgtgggag

SEQ ID NO: 52089 - DNA, 346 bp, Gossypium hirsutum
  Clone ID: LIB3083-088-Q1-L1-B1
cgcttaggcgtgttttccagtcaggggacaagggtctcggactatcttcaaatggtatatttgaggtaaactgttcaaaggacttaaaaattcagggtgttcttgggccctgtgcatctcttgaaaagagaagtcctatgtgctctgacaccatcatcgggcagggaaacaccagtgcatggaaaatgtgtggccttgatcaagctacaactttgtgtttagtatttgatattgttaggaaggacatccctgatgctactgttcagtcctcgagcagtcaattttatttccaatttctaacattttaccagcatagctccggcgaaatgagacttcgtgttacaac

SEQ ID NO: 52090 - DNA, 251 bp, Gossypium hirsutum
  Clone ID: LIB3083-088-Q1-L1-B5
ggaacacgttctttcctttcccaaaagaaccgggctaaggttcattttacaaggaccttttggaccccatataccgccggaacctaaaaatgaaggttggaatttgccccttttttaccaatagaagaggtattctcttcgcccccacccccaaattaaagcccccccccccccagcgaaatttccgtttttcacaaaaaacaccccaaaggtttcctttcaatttttttttttatacccaaacattttta

SEQ ID NO: 52091 - DNA, 226 bp, Gossypium hirsutum
  Clone ID: LIB3083-088-Q1-L1-B7
cgctcatgctttccctaaatcactgcatgctgggctatgggtggaatttaaacaggactaatctactcacccttgtgtactgttggagtgcttattcttggtatgcccctctatattcactccagagaatgccctcttagcgccttgctgaaatgatcgtggaagttttcatcctaaccctgcatctataatggatcctatgcaccttgaataattgatataagct

SEQ ID NO: 52092 - DNA, 415 bp, Gossypium hirsutum
  unsure (1)..(415): unsure at all n locations
  Clone ID: LIB3083-088-Q1-L1-C1
aaaaggtttaagaaaatttgtgaagaagacagagcttcaaagagaaatagaagatgaagacaacgaaagggggcaaagttatgaaccctacggatgcctaccgtaaggagcttcgtaagaaagaacttaaacggaacaagaaggaaagaaagaaggtgagggaggtggggattttgaagaaggatcctcaggcaatcatggagcagattgagaagttagaagtgatgaaggctgaaggtgcattagacaaagcaagaaaacacaggaagagacaactcgaagacacacttaatcttgtcttaaagaagaggaaggaattcgaagacaaaatgaaggagaagggtgagacccctgttatgttcagtcacttggggcctnctcgcagaaggacaactgcagaagaggaagacagagc

SEQ ID NO: 52093 - DNA, 192 bp, Gossypium hirsutum
  unsure (1)..(192): unsure at all n locations
  Clone ID: LIB3083-088-Q1-L1-C5
cttacccttttcactgtcgaaacctcacactttgagccagattccaatacaagatgagcaccacacaactanctttacaaatctccaatgcccaaacctagagctcttcctactaaagaacttaaaccccacacaacgggaaataaatagtctgcgacatcccacatttataacaatgaatctcatccacct

SEQ ID NO: 52094 - DNA, 316 bp, Gossypium hirsutum
  Clone ID: LIB3083-088-Q1-L1-D1
ccgagtcttttttttttttttttttataggatacctggtgggtcacatactgtacactcgttttatatgcatactattcaactccatctttctctactgcccatattcaacttatctcccgttatggaaatacagatatgcaaagaaaataacgctatttgagtaaggcaaagatcgaatgcaaataaatgaccattctctattataaatgaaactgcaactccaacatcatattgcatgagggctcttcccacagaccagatgtatgtaacatcaaagacatgacattcctaaaaccactcaaaaaccatgaatc

SEQ ID NO: 52095 - DNA, 408 bp, Gossypium hirsutum
  Clone ID: LIB3083-088-Q1-L1-D5
attttgtgagaggtatcccagtttatgcaataagtcagaggcttcacaacataatatctggtggcaatggaccgcatcttctcataaacggtgtcaaaaggccaatgccgctcattaggattttagaggttgaactttatcgtactctgctttcaaaggccagaagctttggacttagcgatgattggatccaagctctaatcaagaaagatccagttcgtcgtcaagttttacgtgttaatggttgtttggcaggatcaaaagctgaaaacttactagaacaaggtgatatggttttagcagtaaataaagagccagttacttgctttcgggacatagaaaatgtttgtcatgcattggacattggtgaaagtggtggggagcttaacatgaccatttttcggcagg

SEQ ID NO: 52096 - DNA, 107 bp, Gossypium hirsutum
  Clone ID: LIB3083-088-Q1-L1-D7
tagactttatttttatttaaaccaacctattacaaagggtaaggctaatattcaggcaaaatggcaacaacacaaagatacaatttgcaaatcgtcggaactggcaa

SEQ ID NO: 52097 - DNA, 137 bp, Gossypium hirsutum
  Clone ID: LIB3083-088-Q1-L1-E7
acaaaaagttaaggtggatagtactttattgtgatgaaaggaaaatgcctatttgacgaattgctgtcgggtcttctggcgaagccgcccaagcacatgcactcaaggcggctttagccgtgttcatttgaatcctt

SEQ ID NO: 52098 - DNA, 378 bp, Gossypium hirsutum
  Clone ID: LIB3083-088-Q1-L1-F5
cagctatacgaatccagcaccagcatacatactttagtacaaataaattcactcctgggatgcgggaaattgattatgcctatggcgtcccaaatcttcaaaaagcaaatccacctgtatacactattgttacatttcctttcctttacgctgccatgtttcctgattgttggcatggaatatactcatcacttgcaacattatattttattgtccgggaaaacaaactttttattcaaaagctaggatatatcacataacatgactttcggtcagtctttatgtgattatgatgacatcactctactctatcaataccgtttttgtttataataaattcttctctgagccctttcaatcattttgtcgctcatctta

SEQ ID NO: 52099 - DNA, 301 bp, Gossypium hirsutum
  Clone ID: LIB3083-089-Q1-L1-B1
gaaaaggaagcctctccaaaattatctaatgcagaaaatagctggagcgatgattgggatgaaggatgggagagctttcatgaaattgaacctttggagagagaaaagaaaggggattcgcttttgatccatcctttacacgagtcttggacagagattttcaagctccttattaaagcatctcgagtgaaagatgtcttaaagctgattgaccaatccatatcaaaacccgggggagtattacttgatgaaggcgatgcaaggaacttgaatgacatcgtcctcgggatggattgttcat

SEQ ID NO: 52100 - DNA, 392 bp, Gossypium hirsutum
  Clone ID: LIB3083-089-Q1-L1-B4
caaaaataaacccaagtcttagttagttcttaaattttcatctcttaggagattttttattattttacatgatgaggaagcctaacaatggtagcactattactactactaacaataagcttaggaaagggttatggtcacccgaagaagatgataagctcatcaactatatgttaaccaatggccaaggttgttggagtgacgtagctcggaacgctggcttgcaacggtgcggcaagagttgccgtctccgttggatcaattacttgagacccgatctcaaacgaggtgccatttcgccagaagaagaagaactaatcgtccatttacattctattctcggcaataggtggtctcaaattgcggctcgcttgcctgggcgtaccgacaat

SEQ ID NO: 52101 - DNA, 241 bp, Gossypium hirsutum
  Clone ID: LIB3083-089-Q1-L1-C3
caagggaaggttttaagcctaaggcggcggttttgggggcaaggggcattgtattcgatccgcttgggccattaacttggggccttggattgttaaagccatgattgcgcgcctgccttgggtcctgaattatcaaggttgggccaccaaaaaagagcgcatccaaggccctgggaaggttagggttgtttaaaaaaaattaattgtttctcttaaaaacagttttcttgaaatcctccaa

SEQ ID NO: 52102 - DNA, 301 bp, Gossypium hirsutum
  Clone ID: LIB3083-089-Q1-L1-F3
gcaaatcgcctatttttgaagatttcactgaaaaccacggggagggtgttctcagttgacgatttctcccaccctttttgggtagcttcttctacaagctctgcggcgaagatgaacctaaacctatccgagtgggcgttagagaagtttctagaataattttctgatactcgtgcggcaatccaggggtcacgtgcgggtgaaaatgtcattggtacatctctggctgtacctcaagcgcctgtttctaaatctgtaaatggtaaccgtgatagtgaccccgtgtaagtaaaaaaaccta

SEQ ID NO: 52103 - DNA, 310 bp, Gossypium hirsutum
  Clone ID: LIB3083-089-Q1-L1-F7
gcaaatcgccgaggaaagaagatttcactgaaaacgatgaatagcgtgttctcagttgacgatttctccgaccctttttgggtggcttctgctacaggcgctgcggcggggatgagccgaagccaatcggagtgggcgttagagaagtttctagaagaattttctggtgctggtgcggcgatccaggggtcacgtgcgggtgagaatgtgattggtacgtctttggcggcacctcaagcgccggtttcgaaatctgaaaatggtgaccgggatggtggcgcggtggaggtaaaaaagcctaataatctta

SEQ ID NO: 52104 - DNA, 322 bp, Gossypium hirsutum
  Clone ID: LIB3083-089-Q1-L1-G1
gtgttgttttttcattcagaatcccatgaacctcgagcgggagctctaaattgaacttgagtcacaccattttaccttttcacctttaaatttccccatcaggcttaatcaaatcacaactcattatgtttctgctatggctaaccacctacataatttccatgtcctcgattaccatagactacattactagcttataactattacattgaaacctcatcatgcctaactatacccgctgatccaaaacttaagaacgttgactgtgacagctcgccagtattagataaaagggctcatttgaaaactttatccctatcct

SEQ ID NO: 52105 - DNA, 240 bp, Gossypium hirsutum
  Clone ID: LIB3083-089-Q1-L1-H3
gcagagcataacaaggcattgcaaatgatccgagatatagggatgtacatggataggacctttatcccaaacacccacaaaaccccagttcatgagcttgggttaaatttatggagggatgtcatcatccattcccatgcaatccagtctaggcttcaggctatacttcttgaaaatgtaaggagagaacggagcggtgaagtcatagacaggggtttaatgagaagtatcacaaaaatg

SEQ ID NO: 52106 - DNA, 269 bp, Gossypium hirsutum
  Clone ID: LIB3083-091-Q1-L1-A2
tgcgagctctcgccgaatcttttcaagaagtgtacggttgctggtgctctagctggagagcataggaaacacacactttctgatgtatgagctcaagtggcagatgccaccactctcattcgaaagatggacctataggcaagaagtttgcactcaaatgttaaggctgggcttattgctcaggtaacggaatattaatcacatctacacaatgtgagaagtgaagctaaaagaatcatgtctggtgatctgaatgcggctgatctaga

SEQ ID NO: 52107 - DNA, 224 bp, Gossypium hirsutum
  Clone ID: LIB3083-091-Q1-L1-A4
gttaaactggatcccccgctgcagaatgccagacaattacatgcattagctggaaaccgtcatgtataagaaaggatcaccccaagaatattgcgagtctctaaacaacaagtccagggatgcttaaatccgggcacgtacatgctgaggaaggacagtgggaggataaaaactcaagcgcgtgtaatgcaaatctgagtaactccacagaccggctgtggtgt

SEQ ID NO: 52108 - DNA, 293 bp, Gossypium hirsutum
  Clone ID: LIB3083-091-Q1-L1-A6
aaattggctaaaccgaacttttattgtattttgcttgggttctttgaaaatatctgtctcctctacattcctctatcatagacgacttacgtctagccgattccagtctcccgggcgttcatgcaaagaagctgtttaagggcttgactttgttctctaatggggaagtctatgtcacatgacaaacatcgtgattcgttgccggagggaaccaaactgggggagatgaaggccacggatccaaattaggaggtgccgggtggagtcgccgatacggatacgggttaatatgc

SEQ ID NO: 52109 - DNA, 365 bp, Gossypium hirsutum
  Clone ID: LIB3083-091-Q1-L1-B6
ctggtgtttgggggctgttgattctggggtttcatctccgagattcgacagcacccttgtgattttattcgaagggaattgtccatagagtttggttttaaatggagcacttcaggcagattggtgaggttttgggaagtttgggtgctctcatggttttacaagatgattctcaaatcaatcgaccccagtgctgtttattgtttgatatcttcggttcggctttcaatacaatcgactgggagataaagctgaacctgcaactatacgagaagaacactaaatggaacgccctcgaacaaccattcaaagagcttcaaaggatcttcatagagggtgaactttttgtccgacaaagcatggac

SEQ ID NO: 52110 - DNA, 260 bp, Gossypium hirsutum
  Clone ID: LIB3083-091-Q1-L1-B8
catctgtatataaaaaaatggctccttccaactgggggagtggtattagcctgctggaggtcgcttttaatataaagcttgggggctagcctaccaactgtgcaatgttcagcaatgggcaaaatccattatgaccaatgccatttacgacgctcatcagtcatcaataccattgtcagcagaacaatcgatacctacattagagcttatatcatggccacctgcatatttaccagccccatagccatctgcatatggac

SEQ ID NO: 52111 - DNA, 329 bp, Gossypium hirsutum
  Clone ID: LIB3083-091-Q1-L1-C2
ctgaatcagaggagagctcaggtgaaaacggatctgagtctgctgagagtgggaagaattatggggtagatggaactgcagataaattaaaacatgttggtaaagaggcaaatttgaccgaggagaagaatggtaaaaatcaagatgaacatttggagctaagtgctgatcacaatattgtggaaagcaaggaaaacaatcaagcttcaaatgagattctccctgctggtgctcagtcagaaattttgaccgaaactactactcaaaatggagcttggtctactcaagcagtagaaatcccagaatgaaaaagaaatcacaacagtctt

SEQ ID NO: 52112 - DNA, 355 bp, Gossypium hirsutum
  Clone ID: LIB3083-091-Q1-L1-C4
aatgataacagtgaaaacacaagtttagattcaaaagttgatgagaattcaggtgttgtagctagttctcaaaatggtagtgaagaaaattcaagtggattgggaagtagagggatgaggatcaaagagaagctagagagggagcttagtcctattgagttggaagtagaggatgtttcttatcaacatgctggacatgctggtgtgaggggcagtgatggggaaacacattttaatctcagaattgtgtccaaagaatttgaagggaagagcttggttaaaaggcataggttagtttatagtttgttggatgaggagttgcaaagtggattgcacgccttgtctatagtggcaa

SEQ ID NO: 52113 - DNA, 166 bp, Gossypium hirsutum
  Clone ID: LIB3083-091-Q1-L1-D2
cgttaaactgggaccgctgagttcggccgagcccccgatcacgggtgctaaaagcacatgcatgggaagcttggctcagaaataaaaactattcagaagagggggaatagcaaccagatctgaagtcaaggcgtaaggaggtcaaccaccaactgggctcgtataa

SEQ ID NO: 52114 - DNA, 281 bp, Gossypium hirsutum
  Clone ID: LIB3083-091-Q1-L1-D8
ctattttattattgtatgactaaaataataacacgggatcaatttactttaaggaagaggaattaatagatcatgataatgataagcaattcaaaccttacaaggttcaaagcaagaccaagaattacaagccctatggctccaaaaattcttcttcagctttaatgaagaaaaatcaatattcgaataactgcataagtcaagctgacagcattaaatggcagatctgtgctacaaattcacatttgaaacagcctattaaaaatatatcatttaattaa

SEQ ID NO: 52115 - DNA, 335 bp, Gossypium hirsutum
  Clone ID: LIB3083-091-Q1-L1-F8
taggattaatccataggttttagtgattattgccttagggctggcaaaactgaccggatggaatacaatatactaaggtttcaaaaccagcaccagaatggttattcatgaccagagaaactgtttacaggggtaaggcaaatgcatttttttaaatgggtggctgaaataatgttgaccaacaatcgaactctggtttagttaggaactttcgacacagtataagcatccgacatggcatataacacagaaattcacatatttcgtcgtgaatatgcacattttaattttccggaccataaggatcaagtattggccaattcttttaatgggaa

SEQ ID NO: 52116 - DNA, 405 bp, Gossypium hirsutum
  Clone ID: LIB3083-091-Q1-L1-G7
tttcagtcaagaaggatccattgatcctttctctgacagcattaatatgattgggtcagtcgaagatacaggagaaggaatccctatagaagcacagtctcgtgttttcacaccttttatgcaagtgggcccttctatttcccgaacacatggaggcacgggcatcggactaagcataagcaagtgtttggttaatctaatgaagggagaaattggttttgttagcattcctaagattggttctacctttacatttactgctgttttcaccagtggctcttctagttcgaaggagtacaagagccagcaaatcaacaaccagactaactcagtttcctcagagttccgtgggaagagagcattagttgtggatcctagatctgtccgggccaaagtgtcaagata

SEQ ID NO: 52117 - DNA, 312 bp, Gossypium hirsutum
  Clone ID: LIB3083-091-Q1-L1-H6
ccaaaatttaaaatgctagggttcttaacatctgggggagtcaccatttagtgtggcgatcgatagtataccaccatgaatagatccatgccacgtccatgaaaatgtgaggaggcgtgtggaggaggccgtgcaaggagccactcgttggagtcccaattctctggcctattctggcacgttttagaatcttctactgctgcttagataattatgggtgtattgagcctcgagttatatggcttataacgacatgggttattttggtaattgggtaggttgtgtattttatgtaatctgactaatggacct

SEQ ID NO: 52118 - DNA, 253 bp, Gossypium hirsutum
  Clone ID: LIB3083-091-Q1-L1-H7
aagaaccagaacgagccgacccgctgcactaattcaactctacacaaacttttttcttaagagtacagccactgattataactggtcggtttcaaaagaaacagtgatcgaccctatcaagatcaacttgccggacagtcctcctcctcctttctaaagacaggcttctcagcttatagatgaccatccaatatcaattcaagacttattcctcacctaacgcaattttaatcactcttaccaaatctaaaag

SEQ ID NO: 52119 - DNA, 394 bp, Gossypium hirsutum
  Clone ID: LIB3083-094-Q1-L1-C12
gctgttccggcggacccttcgagccgccaggcagcataccgtcgatgttcattccaaggttgtgttagcagcttggttgaggtatgagaggagggaagatgagcttagaggcacaaattcaatgaattgttgcggaagaaacattgagtgccctaaggctactttggtacctggttacaacccggaatttatttatgatccttgtgtttgttctaagaatcctcaaggtgaaagtgtggatgattattcgattgaagacgtggaatgttctacttcggatgaatataaggatatgtcattttgtatcggagataacgagattaggtgtatacggtattgtattgcttcattatcaacaccttttatgacaatgctgtatggtggtttcagggaa

SEQ ID NO: 52120 - DNA, 104 bp, Gossypium hirsutum
  Clone ID: LIB3083-094-Q1-L1-D10
gccatcgctaacccaacaaattacgcacgtcagcgcttcggggtggtgttaacaccttggatgtgggagcgcttttatcaatctttctgcatattgcactaaac

SEQ ID NO: 52121 - DNA, 181 bp, Gossypium hirsutum
  Clone ID: LIB3083-094-Q1-L1-E10
acggattttgggctctctgtatttttcaagccaagaaatatttttaaggatctggtcggaagtgcttattatgtagctccaaaagtattgtcgcgacgctatggacatgaagcttatatttggagtgctggggtgattctctacattcttctcaatggaatcccaccattctattgaaaaa

SEQ ID NO: 52122 - DNA, 250 bp, Gossypium hirsutum
  Clone ID: LIB3083-094-Q1-L1-E12
catgtaccaagtgtgtcacggtcggtgatggagcttgagggtaagcttgaatgcccattccatatacctgctatactttaacaacagatcatgtaccaacagtatacgataactatagtgccaatgtggaggatgatggccacacatcgaaccttgtcctatgggacactgcctggcacgaagactataatacgctaaagccactgagctatcgaagagctgatgtgttgctgcagggatgaattctcat

SEQ ID NO: 52123 - DNA, 326 bp, Gossypium hirsutum
  Clone ID: LIB3083-095-Q1-L1-F10
ccataattatggttggagaccatgggatggttggtacatgtgataaaaagctgattttccttgatgatttggctccttggattaacattccaggggattgggtccagtattatagtccggtgctttcaattcgaccacctcccggttatgcaccatctgatgttgttgcaaagatgaaagaaggattggaatctgggagagttgataatgggaagcatttgagggtttatcttaaggaggagctacctagtcgactgcattacgcagaaagtgatcggattcctcccataatagggctggttgacgagggttttacagtagagaag

SEQ ID NO: 52124 - DNA, 301 bp, Gossypium hirsutum
  Clone ID: LIB3083-095-Q1-L1-H12
ccctcaaaaaagttaaaaacttttcttcattggatcgagtctaaaagggagaaatggaggaggagaagaagaagaagaggaacaagaagaagaaaaacaagcagggcaaagccaccgaagaagacgtagatcagattcagaataataacgttagcaatggccaaagcagtggaaatgctctggatctggatactcatcaacctaatggcgctcttcccagctctgcggaagagatgattaaagaactacaaaaggagaatgagttacatgtacagaaagaggctactttgcaagagagaat

SEQ ID NO: 52125 - DNA, 323 bp, Gossypium hirsutum
  Clone ID: LIB3083-102-Q1-L1-A10
ggcagtcttctaaagaggaactagaggcagatgagtgcaagatgcagattggggtgatctcacggaatctcagctagaagaacttgtttaagcaattcggatacaatattcaagagtgcaataaagaaaatcgttgcttacggttacacagaagaaattgctactaaggcagtcttgagatcaggcctctgatatggttagtaaagacatggtctcaaatatagtggataataccttagcatgtctaagtaggggccaagattataatccttcaagagaccactatttcgaggatctccagcagatggagaagtatatattaa

SEQ ID NO: 52126 - DNA, 383 bp, Gossypium hirsutum
  Clone ID: LIB3083-102-Q1-L1-B12
taggttttttttttttttttttttctttcaacaaccatcccggccagatataattccaaggcagggcaaggcagcaatttaatatatgccaactataattttctttacaaaaggaggaaatgaaaaaggaacatagcgcaattaaaggagggggagggaggctatagctaaactcacttagtcctcaacccctccaactaagcacttctattacaagtaatgacacttaaaccctcaatgccacctgatcttgccatgagatctttcttttcccaactctgttcggtccgttcccggtgttcctgcaggctgatattttgatatcattgtgctgctcatcacttgccattcggattgaaactttcttgaattcctctattctc

SEQ ID NO: 52127 - DNA, 369 bp, Gossypium hirsutum
  Clone ID: LIB3083-102-Q1-L1-E12
ggaacttactgtcccaatgcaaatttgatcaagggcgtgggtagactcgggggccaaagcggttatatgccctgcatctgagcctcatgatgtgtcaggtaatatatcatgagagtgtaacgtcctggaaaatgggaagtttgagattggtgaataagatgcggaagatgaaaaggtagaggtggaaactatcagtccggtaagcgactgtgatatttacatggagaagaatggggagcatcttacaggtgctggcgataaaaaaaaagaactatcgaagttctggtgtgaggcgtatcactaagggatctggggatggctccagagttaactttgcactaaacacagcagttgcctcttatataaatc

SEQ ID NO: 52128 - DNA, 351 bp, Gossypium hirsutum
  Clone ID: LIB3083-102-Q1-L1-E9
gttggtttgttacaatccatcataaattccatcactgtgggtaagtacaaaaagggtgacggattgattgaagggacggaatgttcggtgtgtttgaatgagttccaagaagatgagacggtgaggttgttgcctaaatgcaaccacgctttccatatttcgtgtatcgacacttggctgagggctcacactaattgtcccttgtgccgagcacatatcgtctttgatgctctttgtagcactccaacttcagcggatcaaaaccccgataacatggatgcaattattgattataatcaaacaaaaacttctgagattggaggtatgaattcttatgaaaacaaggcttaa

SEQ ID NO: 52129 - DNA, 395 bp, Gossypium hirsutum
  Clone ID: LIB3083-102-Q1-L1-F9
gcacgccaccctgcgacctcagaccctatctgcccgctacggatgcttgctatgcgctagcctatcccgcatatgagacggattgctcctttcttctagcctcacctcccctatcgcttaccgttaactgctactgctgctctcgttgatactattaagagataactggcacagattgattccttctcagatccaaacactcaaccttcgcctgcctttcactccttttttttctctaaatagaaaaaattctagctacctttctctagcttctggaggaggagctagagaaagggtcccttgctcagtagtttcgaggtcgtccaagttttgaaaaaagctgtggctagcagttggactattcaatgttgactccgggttctcaacaactccta

SEQ ID NO: 52130 - DNA, 387 bp, Gossypium hirsutum
  Clone ID: LIB3083-106-Q1-L1-A4
gtgcttttttgggtcaagattcattaaatgttgcaaaggtggttgctgtatttgtcagcatggctggtgttgtcatgaccactctaggaaaaacttgggctgctgacgattctataggttctgccaatgggaaacgctctcttgttggcgatctttttggccttctatcagccatgtcatatgggttatttacagttctgcttaagaagtttgcaggcgaggaaggagaaagggttgatgttcaaaaattgtttggatacatcggactctttacacttgtagcactatggtggcttgtttggcctttgacagccttgggaattgaacccaaatttacaattccacactctgctaaattggatgaagtagtcctcgcaaacggttttg

SEQ ID NO: 52131 - DNA, 361 bp, Gossypium hirsutum
  Clone ID: LIB3083-106-Q1-L1-B1
caaagatcaacaggaagttgtgctttcatcagaacaagatgctttcttcaaagctaacatgtatgaaaactttggagatatcggaatgaatatcaagcggatggtggatgattttcagcaagttgctaaaagcaaccaaaatatacagactatagaagacatggccaaatttgtagacaattacccggagtacagaaaaatgcatgggaatgtttcaaagcatgtcacattggtaacagaaatgagcaagatagttgaggagagaaaacttatgttggtttcagaaactgagcaggatttggcttgcaatggggggcaggttgctgcttttgaggcagtgacaaatcttttaaataatgaa

SEQ ID NO: 52132 - DNA, 294 bp, Gossypium hirsutum
  Clone ID: LIB3083-106-Q1-L1-C6
tggcctttttttgtagaggatacaagccttgcttatggtcggtaaccgcatgatcgtataagtcataaatcattttataggagaaagaaaaaatctctacaaagtatgggagatgcatccactgagtctaatgattctagctctgagagtgaaccagatgaggaagcacataagacatagcacgaaaagaactcatcaccatctagaggggttgacacccggagtagtaattacatttcttccaatacgaaaggggataagggcagtgattacgaagataattctgatgaggat

SEQ ID NO: 52133 - DNA, 385 bp, Gossypium hirsutum
  Clone ID: LIB3083-106-Q1-L1-D3
ctcaaccttagttggcacaatcacatgtgaaggatccgatctatatcaacataacatggataaataaaacacgtcgtgaatcttttccaactctaagggcaaagccaatcggtaggcaacaggccctactctctcggttttctcataatgtcctatgaaacgagtactcaacttgcctcttttaccgaatttgaggactttcctccacggggacactttcagaaacaccctctcaccaacttgaaactcaatctcttttcatttcaaatccgcgtaggatttctgtctatccgtagtggccttcaaatagttgcaaatcaccttaactttctcttcggtttctttgactaagtcaaacccatgagtctgattttctttaagtttg

SEQ ID NO: 52134 - DNA, 357 bp, Gossypium hirsutum
  Clone ID: LIB3083-106-Q1-L1-E3
aaaagtgaggaaggtaaagtaattgaagtggaactcacgctacaagctatattcttcgatgaaacattgaatgctaaatctcatcaagacaagagacaactattatatcattaacaatgatgccaagtcaaacaaaccccaatttctcacattttatatgataatgtcgacaagcactagaaaaacactttctaacatatcgccatcatttgctaacaatagtttaagagtaatgtataattacatgtcaggaagagctgaaaggatcaggcgattttccccagcattgctgtacaaaaattttcacctgtatctgctttcttctgatcatcattatcaacatcattatataatgaa

SEQ ID NO: 52135 - DNA, 383 bp, Gossypium hirsutum
  Clone ID: LIB3083-106-Q1-L1-E5
tggaatcgggccggtctgctatcttccattacggttcagggagaaagattgaaagagcatataatggagctcctgcttcagccagttttcggtttagcggtggtccagaagagagggcattgatgtgttcatcatcggagaattcaggcatcaagaaaaatattgggcagaggttgattaaagggttaaaatgcgcattgcaaccaaaaatggcactaatcacaagaaaagtttaacattaccagaaaatcgtatatcttttttaatacaaaagaactaactagctgaatggtatattacatactgattcccattttagtcttacccatgcagtccattagaaacgaagggattctgattatgcataattagtgttcaaatct

SEQ ID NO: 52136 - DNA, 356 bp, Gossypium hirsutum
  Clone ID: LIB3083-106-Q1-L1-E7
agccatgccatcaaagagtctgtactaaaaaatgttggaaaggaatcctgtttacaagcactcctacaaacagaaggattgtgaaaaactcagacgccacgactcaatggaacagtcggccaccttccagacgagcaataaaggacactgaattagaaaggctccgactgtaatgacactttacatgattaaaatatctcgaggttctttcaaccgacactgacagcatcagcaatgtaaatccatcttcattcaaagaaaaaaccaagatattttgcaaacagaaattgcggaaaggcacatacctctagttagtcactgaaatcggagctacgagaactgctagcattacgact

SEQ ID NO: 52137 - DNA, 256 bp, Gossypium hirsutum
  Clone ID: LIB3083-106-Q1-L1-F7
tcgaactagcaacctcggtttgacaatcactgttgtggttaacagcggcgacaccatgtatagagataaagccaatatccaagacaatcaaggaatttgaatggaccaacaactgttaaaatgctctgaataacaaatggtagattggcgggcattgcctgaggacatcctctaaaaaaaataaacactgcatcttgtactaaggaagagaggcagaatcattgaaccatcttttatgcctaagactcagtgatac

SEQ ID NO: 52138 - DNA, 308 bp, Gossypium hirsutum
  Clone ID: LIB3083-106-Q1-L1-H2
ccttcatcaagtggctccagaatgccgagtctgagacagaagagtagtgattctgaagcgcttggtatagtcgtttattgtgccttttatggcagacgttctatttatagtacaataattttctctaccgtggcctaatagttcagtgtgtgggacttggtcgtgttctttaaataaaacacagtgagctacgcccgccctacgtgcccgctgctgtgttgtgctttctatggtttttgttgtctgtattgagtctggtttccggagttgaaattttttctggttgtgcttaacgatgatttgaattc

SEQ ID NO: 52139 - DNA, 398 bp, Gossypium hirsutum
  Clone ID: LIB3083-110-Q1-L1-A6
aagctgttttaagaaggcgagaggaagagattaataaagggttgaaagagatgcaagatgaaaaagaaggtttagaacaacaattacaggttgttttgatgaatacagatgtgttggatagttggattagagataatgaagggaaaataaagaacttagggaagaagaataataatgtagctgttgatgaagcgattcattgcgtcgatgttctttctaaacaagtcttggattccacagctgctgatttagctatcgaagatgtggtatattccttggataaggcagtgcaagatggggttgtgccgtttgatcagtatttgaggaatgtgaggttgttgtcaagggagcagttcttccatagggctactgcctccaaagttaaggaagctcaaatg

SEQ ID NO: 52140 - DNA, 324 bp, Gossypium hirsutum
  Clone ID: LIB3083-110-Q1-L1-A7
ttctagtgcgagtaacgaatttcttgaaggaaatgatgttgctgcatagggggatgccatgaagacagcatttatgcttttgttgaatggccagaccctcccccagctttttatcaccattgtctgatatgctttgacttcaaaggatcacactgtcccaaaactttttgttctatactaggagatgatcgccaaaactgatgcaatggggagggtattacctgaaatgaaactgatcttgcaatatttgaggaacaattttcaacatgcaaatgagtatattggcggtgcgacctctgcgcttctctgccgcttgaatgatac

SEQ ID NO: 52141 - DNA, 319 bp, Gossypium hirsutum
  Clone ID: LIB3083-110-Q1-L1-B2
cttcatctgctatccgtgtgactaagagaaggcgcctagatcgaaagaagcaacaatcagaaagaaatgttttccagtgctttgttttcggtccagctaatgctgggaaatctgtgttaataaattctttccttggcaggccctattctgatacatattctccaactattgatgaccgatatgctgtgaatgttgcggaactgcctgggggcataaagaaaactctagtcttgcgagaaatccctgaagatggagttgcaaaactactgtctagtaaagattctttggctgtctgtgacataccagtatttgttcatga

SEQ ID NO: 52142 - DNA, 395 bp, Gossypium hirsutum
  Clone ID: LIB3083-110-Q1-L1-B3
atgatacgcagaaaatgacgaactccttctggtggggttcggaacgtggccgtcgaaggactcattgggcttcttgggaacggctctatgtcctaaagaagtatggtgatatggggtttcgtaagctctattgctttaatttggcacaacttgggaaccaaggatggagattccttacttcgcctaagtctgtttcgtggaagattttcaaagctagatatttttcgaagagctattttcttgactcttcggagggttcaactccctattttatttggaagagtattcgtaaggctaaagcggtgcttttgaaatgtactagatggcgaattggtagatgaagtttgataagcattttcaatgatccatggattaatgatggtagtaaatgtttt

SEQ ID NO: 52143 - DNA, 248 bp, Gossypium hirsutum
  Clone ID: LIB3083-110-Q1-L1-B4
ggaactcgcgactgctaacagcatcttatttgttgagaagaactcttagttcgccgaacgacaaattattcttattgggaccggtaaaattccctaaccaggaatgcttatacaggcctttttaatctgtattgaaacattttggatccattaaaccacctaccactgtaatatttaacttggactaggttttaagaaggaactattcccaaagcttgatgttcatcgaggatctatccatttgactt

SEQ ID NO: 52144 - DNA, 384 bp, Gossypium hirsutum
  Clone ID: LIB3083-110-Q1-L1-C6
gttacagtgtaattttacttactttctactcagcttcagtttctggatactgggcttttggaaacaaatcaaattcaaacattctcaagagtctaatgcctgatgatggaccatcattggccccgacaatagttattggccttgcagttatatttgttcttttacagctacttgccattggcctggtttattctcaagttgcttacgagatcatggagaagcaatcagctgatgtaaaccaagggatgttttcaaaaaggaaccttatccctaggctaattcttcgaaccctgtacgtcatattctgtgggtttatggcagcaatgcttcccttttttggtgacatcaatggtgtgataggtgctattggctttatccctttag

SEQ ID NO: 52145 - DNA, 362 bp, Gossypium hirsutum
  Clone ID: LIB3083-110-Q1-L1-D6
gaataatcgtttttaagcaaagagattgtgcattagaaacttcaataccttgctgctaggagtctaagtagtggcatttctggttcaagaattgggatatatcagttatgaagagtttccaaataaagtttgttttctatttttgagcaagccacccttgctggcattaaacattttcaatatctagtccaggtagtacctgtagtgaaatatctgcttcagggattgggataagtagtggtctatcaatctatggagagttgccaattaaactttgctttccagttttgtgacagaaagtaagaaacttcacggtattataaatttagatatatcaggtagtctgcaaaatttgtttctag

SEQ ID NO: 52146 - DNA, 400 bp, Gossypium hirsutum
  Clone ID: LIB3083-110-Q1-L1-E2
tggactcagggtttctaagtatatagtatttcatctggtatgggggtttgggatgagagtttgtatttttcttgtttttactgttatttgattgagatctttcacaccatttgaatatggtggatgatgattggtgttgtgggggaatgttttgtgtacaaaatgttttcttatgtagaaaaaatagggggaaacatgttgcatatcataaatgccaatgggacctatatacggtagaaatcttcatttcaagaaactttaacaactttgaagaagaattgtaagaattgtcatatcaggtgaggcggctgagaacatcttcagcttagaaactggaaaatcttggcaatgcaatctggcgtgggacatgggtaaacaaaacgtgttttagaatatggac

SEQ ID NO: 52147 - DNA, 315 bp, Gossypium hirsutum
  Clone ID: LIB3083-110-Q1-L1-F6
atttaaacccagagccgcctgcattgatgcgatgatgatcatagtactgtggatgaaatcacttgctccgcctctgaatggaagaatattcaaaaaagacacactgatgagcttgaggatcagagcattccctattgtgtgaatgaacatgagcaaaacccatactctcaataaccttctgagaaatccggagaatcggactctctcatgctacctttgaagcgagtcattgcgaggagcggtgcttctaaagaagcagataaaacagcctacggcctgcagtggcgcctgctgtgactctctatgtgcaaaatg

SEQ ID NO: 52148 - DNA, 288 bp, Gossypium hirsutum
  Clone ID: LIB3083-110-Q1-L1-G2
gactgtcctatcataagtaaggtttttataccaacgcgcgcaaatctggagagtgcattgttgctcggccttatacatcacattgttgataccgatgctctcatgctcctctggagaggtgtcagcatcgaggactgaagacgtgtctagcattacagggtcatcggtggttttttactacatcttttatcacacttttaggtttgctttgatgaaagaaccattgacacctacggtactgtgactgacaaggcaatttttgatgcagattttgaagagctatacata

SEQ ID NO: 52149 - DNA, 394 bp, Gossypium hirsutum
  Clone ID: LIB3083-110-Q1-L1-G3
taagattgtgaagccgattaaaagacgttttgtgcgattagagaatgagtggtgtcgttaggaatcaacgaagctgcgttgcgatccgctctctctccccttcctcttccattaaccgttgctcatcacgcctatgcttattcagatggtgcttcgtgtggaaggccagcttggattggttagcgattaacatgtgtttgtttcacgcgaaagggagacttatgaagggatctcctttaacatcacaccccaacaggatgaaaggttatataggttgaggcaccctatgaaggtgtactacgatggtttcaggctctgtcaccacgaagctctaagaagcctatggtgtgattcataccctgtaaggaactccattgcttgatatccgatcagt

SEQ ID NO: 52150 - DNA, 406 bp, Gossypium hirsutum
  Clone ID: LIB3083-110-Q1-L1-G4
ggtcaaccaactatgggactttttatttttgagtcacccaaatatgaaaaattataaaatgattacttaattatttaaaatttttttttatagtcactaactagccaacggaaaaatggaaacacttaaagtccgagatagttggataaccaaaaaagataaaattgaataattgaatgaccacttttataactttttatagctaggtgactaaaaaagaaaataatccataattggtgattgctaatgtagtttactcattaacatattactctatagtttatgataaacaaggctttaccggtttcttttgattgagtcatgagtagctttctttcatccattgtcctcacttcaggctttaatttgtcttcaaacacaatttgcatgctttatccaaatcctt

SEQ ID NO: 52151 - DNA, 208 bp, Gossypium hirsutum
  Clone ID: LIB3083-110-Q1-L1-H7
aaactgtggtaaggaagcgagaggaacagaattgaagagagggtttgttgacaccctggctatataaatatgttttgagcaagcattaccggcggtcatgttgaatacatatctatagtgttgcaggactagcgataatgctgggaaaatctataacttctgcgagtagaacaataaagcatcccttgctgaagcgagacattttctt

SEQ ID NO: 52152 - DNA, 394 bp, Gossypium hirsutum
  Clone ID: LIB3083-111-Q1-L1-A11
accgagtggcaccgccgctttaaacttaaaagaaaccaaattggtacaaaatcgtttctagcatcagcggtatcttctgtttcgcgacactgaaatttgattaatggaagtctctgaaaaacatgaagaaacccactcaaatagaaccgaaagattagctggaactgtaaactggggcacagccactgtcattggagtgtttgcaggcatgttatatggaggtagtaaggaagctgctgcttcagttagcaaagatgcagaagtaatgttgaagcttggcagcactccagataaacgagagcagtatcggttgatgcgcgatgcaatggaaaaaaggtttatccgagtcactcgtggctcaattgtagggtgaattcgactaggaatgttcact

SEQ ID NO: 52153 - DNA, 277 bp, Gossypium hirsutum
  Clone ID: LIB3083-111-Q1-L1-A12
aggaagggcttacataagcgttctttcacacctgaagagtccggggctggcccgcattagaggtagaaatagagttcccgcaagccttatactttggatgaaacagtcgctggtggactcacgatgagtcaaatgagcttaccacggccttctaattcatgcgacaaggatcacaggcgtgatttgtaaagcaaatacaggcattcttattcatccgcaaactcaaactgctgtaggcatgagcctatgcaatagactctgcataagccttacaact

SEQ ID NO: 52154 - DNA, 281 bp, Gossypium hirsutum
  unsure (1)..(281): unsure at all n locations
  Clone ID: LIB3083-111-Q1-L1-C12
ggcntgcttttttttttttcttttttacatttttttttgggaggggttgtttttttttgttcccttccttcttttgcgccaaataaatttgccatcaactcccgcgggatatattttggcaaaaagattggggggcctcaaagaaataaaagcctgccctttttaaccccccgtaacatttaacaaggggccattttccaagaaactttaaaaaaataataaaacgtgtaccccaactttttgttgtgtttaaccccaccaaacaagggctctttgcgttt

SEQ ID NO: 52155 - DNA, 357 bp, Gossypium hirsutum
  unsure (1)..(357): unsure at all n locations
  Clone ID: LIB3083-111-Q1-L1-D11
agagagagaatcagtggattagattagaagcttctgatagcataaatggcagatcattctgatgatttagaccaactacttgacagtgctttggatgattttcagaatctcaaccttacctctgcttctcaaagggcaggaggagatggtgaagaaaagaagcaagaatctgggtctttaccaagtggggttgttggattagagaatgggattacctgactcgtagagcaagaaatagggaatgcaaatggtgtcaagtgaatcccatgtcacagaggctcttgttnagatgagagaacaaccatacagactataaaggattggtataatgtcgcacctgaagaatgtttggagaga

SEQ ID NO: 52156 - DNA, 349 bp, Gossypium hirsutum
  Clone ID: LIB3083-111-Q1-L1-E10
cttatcccttcttctcttttcctctgctactgcttgtgatcgttgcctgtaccaatccaaggctgcttatttctccaaagccaatgcactttcatctggagcttgtggatatggttccttggcattaggcttaagtggtggccaccttgcggctggtgtttcctctctttacaaagatggagctggttgtggtgcctgctttcagataaggtgcaataattcaacactatgtagtagtaaagggacaaacgtgacaataactgatatcaatcacaataatcaaacaggttttgtgcttagcacaagagctttcgtggccatggctaaccatggtatgggccaacacata

SEQ ID NO: 52157 - DNA, 352 bp, Gossypium hirsutum
  Clone ID: LIB3083-111-Q1-L1-F12
gtcggtgatgcggggcctgatcaatggccgaagttattgcagtagcagcatctgcatcggcaacgggcaagtctacaggtccgccatagttggaagaagcttgcagttgagcggccaacgtaacggtgtggcgtttggtggatttgaatggaggaggatgatgagctcttctcctgcttctgtggaaaaagcgacatctgagaaggaagacaaaacggagaactcggtgaaggaagagacgaaggaaaatgaggttatggctgtaagttattggggaatttcaaggcctaagatcaccagagaggatggcaccgactggccttggaattgtttcatgccatgggaaacttac

SEQ ID NO: 52158 - DNA, 403 bp, Gossypium hirsutum
  Clone ID: LIB3083-111-Q1-L1-G12
cacctcgtgatccgcggaaagcgacctcccccaccatctgcggggaccccaggcaacctctacgtctgcaatcaccgcacagctcttgacccgattgtgatcgccatcgcacttggacgcaaagtctcgtgtgtcacatacagcgtaagccgtctctcgaggttcctatctccaatcccagccattgctttaactcgtgatcgtgcggccgatgctgcccgaatttcagaactgttgcaaaaaggtgatctagtagtttgtccggaggggaccacgtgtcgtgagcaattcttgttgaggttcagtgctttgttcgcagaaatgagcgataggatcgtccccgttgccgtcaattgcaagcagagcatgttctacgggacgaccgtgagaggggtcaaattct

SEQ ID NO: 52159 - DNA, 216 bp, Gossypium hirsutum
  Clone ID: LIB3083-111-Q1-L1-H11
tcgagtttttttttttttttttttgagtgttagaccactgggtgggtcggacatcaaactttgatcaataccgtcacttaagatgtggttcactgaccattttagcaccacaaaacactggggtcattccacaccccaagcctcttaagggtttcggcacttaaaacacccaccggtgccttggaatgaaaattatgaaaaccagcgccagacacc

SEQ ID NO: 52160 - DNA, 402 bp, Gossypium hirsutum
  Clone ID: LIB3083-112-Q1-L1-E9
ttttaattttttttctttttctatattcatagataaaaaatttgtcaattcatagagttttggttacttcatttctgtatttcattaaaggtcaaaagctggttttttatttatttatttttaactcaaatattttttcccatcacttttccaggaaaaataaatcttaagccgattggaattttttagcttgatttgagattctcaagtttcatgttttttgtattttcccccttgaaaattgaatttgcaatttatggttttctttatggtgtcaaaaacaaagggttgacttttttcttcggattttatcaaattgaaagattccactttccaaccagaataaaataaaaattttgaattttgggggttagggtttgatcattcatctccttttgcttt

SEQ ID NO: 52161 - DNA, 277 bp, Gossypium hirsutum
  Clone ID: LIB3083-112-Q1-L1-H11
cattctttgtgtttctagtgcggataagacaacgcttagagacatccctatagattgagttgatgcgatctctgaaaagatgcgttgactgcccattgaacctccacataagcctgagtttcttctccaggccattctggtaatggctttagggtctcaaaacacggacaagttcttagtaatgcaaattctggaaacaagcacatgacacccgactggaaaccacctcggtagcgaacgacaagatgcagattggattccttctggatattgtacc

SEQ ID NO: 52162 - DNA, 519 bp, Gossypium hirsutum
  Clone ID: LIB3083-117-Q1-L1-A6
acaggacccgcgagatcgacggtattgcctgttttgtatctatgctgtttatatgattttactaagagctacgtacttaccatatatgatcgtgagacggatattttactttgaggacttgtggtgattaagaattatgttattgtgaattttggtgattatcatcaattatattaaagaattttataaataaaaaaaaataataatttgggtgttgttctatttctattaattgtacattatgctgtttaaatcattttgtaattggtatttttatgttttgatttctttttagtgttatatctaagtatctattattttatatttattattatagtatttggttgtgtgggtgtgggagttttttttttttttagttttttttttatattttatactttttttttttttatttttatataatttttaattttttattttatttttttttatatttaattattttatattatttttatatatttttcttttttatttatattgtttttaatatttttt

SEQ ID NO: 52163 - DNA, 171 bp, Gossypium hirsutum
  Clone ID: LIB3083-117-Q1-L1-C10
acaggatcccgctgagatcgcacggcaccaaacatggggtatatgagtaatgcatgcaaggcagatctaacagtcagagacagggtactgatacatgctcagtgcgttggcgtttcaatatggcatgtcttaagtagctacgactatcaacagctgtggttgtgtgaatgt

SEQ ID NO: 52164 - DNA, 155 bp, Gossypium hirsutum
  Clone ID: LIB3083-117-Q1-L1-D2
gacaggatcccgcgagatcgcacgagagtttttttacgccagttcagctggttcttatagaagtctctgacaggcaccaaacagacttattgccccggtgcatcactaccaaagtgccgaattaaatttaaataaaaaaaaaaactccccggggg

SEQ ID NO: 52165 - DNA, 279 bp, Gossypium hirsutum
  unsure (1)..(279): unsure at all n locations
  Clone ID: LIB3083-117-Q1-L1-E12
gagagagatatnaattatntatnntagaaagtaatagtnttccgatagatataatntcatgtatnggttaaaatgagtgaaatgtnttcttgctcgatgttaccagtgcagtaatgtttcagtcgttgaccagtaactgtggacgttctctccttatttgtttggagttcaacaactctctatgtgaaaactngattaatcgaaaagggttctgaccatcangatttaagtttacttggataaaacttcaatctcgaattgaagagaatgacttgttgt

SEQ ID NO: 52166 - DNA, 184 bp, Gossypium hirsutum
  Clone ID: LIB3083-117-Q1-L1-E2
tataaagactctactgttctatgtctgcatatccatgcttgataatgctaactatgctggcggtatgaagtacctattcttaatactatgcaagacagaagagtatataaaaaaaaaaactcggggcgcgccatcgcaagggcgatacatatgcggttacacctgctgaaactgctccactatt

SEQ ID NO: 52167 - DNA, 489 bp, Gossypium hirsutum
  unsure (1)..(489): unsure at all n locations
  Clone ID: LIB3083-117-Q1-L1-H1
canacgagaccgattcctctntctctgccaagggagagagtattgagactatgactgattatttaaganatagatcgctccgtttcttactgtttttctgggtggcggggtggtaacatatatttaaaaantgggtggatangtggttgtattactaaacatattctttattacatttttattactttttaatatatataaacattgtatgttatatattttcttatgcactaatatattatttatttctattattttttatatatattttatttttattatttatttttttattttttttataaaatattttttatttttaaatattattaaatttattaattttttaattttttataatatttttataattctttctttttatttaattggggggggttaatttttaatttttttaaatttttttttttataattttttttttttttattttttttattttttttattatattatttttctatttta

SEQ ID NO: 52168 - DNA, 171 bp, Gossypium hirsutum
  Clone ID: LIB3083-117-Q1-L1-H10
cggcgcagaatcgccgagaatttgtgtttgctctcgatctctccccatcttgttccaaagacccaacaataatttggatccttttcttctagatcctcaagcatctctctctctctcatctttaataataattctatcaaaggacgcaccttacatcacctaactattctt

SEQ ID NO: 52169 - DNA, 401 bp, Gossypium hirsutum
  Clone ID: LIB3083-118-Q1-L1-A5
aaaaagcaaagctaaacaaagcaaagagagagaattttcgaaagctttaagctaagctaagatgctaagatttactctcttatggcttctcgttttcctttttgcatctatttcttcatcttcagcacggcctgcaccttatgctatgcgtataagctgtggagctcgtcaaaatatccgcaccccaccaacctatacacgttggtataaagattttgcatataccgggggaattccagctaatgcaacggcaccaagtcatatcactcctccactaaaaacacttcgctatttccctctgtctgaaggaccagaaaattgttacataattaatagagtaccaaaggtgcactattctgtgaggatcttctttggattagtcgagcatgagattgataatg

SEQ ID NO: 52170 - DNA, 286 bp, Gossypium hirsutum
  Clone ID: LIB3083-118-Q1-L1-B7
tgcaaaaaataattataaaaacctctcgacttcaacaagagagagaagatctgtagaacgaagagaagagaagggaaaaaaaagtgaaagaaaagagacgaaaagatgatgtccggaggttataccagcattgataaccacaaagtttctggatccttacccaccggtagtgatgtcggccgtgtccacaaggatatgagaggcccatatgcattgtgtaaggcatagtcaggttatgacatgaacaatccacaattgcttttaatacaactttcgatgttctttt

SEQ ID NO: 52171 - DNA, 287 bp, Gossypium hirsutum
  Clone ID: LIB3083-118-Q1-L1-C7
ttttaacattcaaatctagaccccaccctacttccaagagtggcgggcaatctatttcaagaccagagagatgttccttataatctataacattatattatatctttttcaatgaattcaatattattcttaaagaatgtaggtttttatatacttatatttataaaagtcctatattatacattatcccattaaaatcttttaaaacatagttcttaataatcttatttatattttacattaatttatctatttgtatcaattttttatgctcacctttttttttt

SEQ ID NO: 52172 - DNA, 384 bp, Gossypium hirsutum
  Clone ID: LIB3083-118-Q1-L1-D6
ctgagcggtgctagtagtttgctgaataatgaatactatgaagctttgcaactaaaattaagagaaccaaatcttggggcaaagctgttcttgggtggtcatggtgttcaaaagactgggaccgagatagctacagcactgaataatatagatcttagcagtgagtatgtcctgaaactaaaacatgaaattgaagagcagtgtgccgaggtgtttcctgcaccggctgaaagagaaaaggtgaaatcttgtttgtctgagctggctgacttaagcaacactttcagacaagccttgaatgctggtatggaacaacttgtggcaactgtgacaccttgaatccgcccagtattagacagtgtagcaaccatctgctatgaacta

SEQ ID NO: 52173 - DNA, 287 bp, Gossypium hirsutum
  Clone ID: LIB3083-118-Q1-L1-D7
tttgaaccttcattaatgatggccaaaagtgacccaccacacggggagtacatctctagctgactgatgtacctaagagatcaagaattaaaaagaatggtgtcgatgattaccatttttgtgttcacttggtctcttgagagaatgaaaatgtctctagtgaagcttttgaatctactctaatttcttgcatcaagtatatgtcctattatgcttggaaggatgcctttcacctactaatccgtgtttacccattccatgtacttcgtatcaacaaaattctttta

SEQ ID NO: 52174 - DNA, 246 bp, Gossypium hirsutum
  Clone ID: LIB3083-118-Q1-L1-F5
tcccaagccagaatgagagagggcgggttgatttacattggggaggggggtatccaggtcggaaactcctgcttggagctttactgtcttgagcatgtaatctcatcctatggtcagatgtcaagtgacaaaactgtttgaggtagtttgatacttttatcacctttttcagtttaaccgttgctgttaagcacgctctttatgtattttttttttacttagacttctattttttatattataata

SEQ ID NO: 52175 - DNA, 114 bp, Gossypium hirsutum
  Clone ID: LIB3083-118-Q1-L1-G5
caaatactgatttatccgccaaatacgtattggaacgagcagggaaactatcttcacctgtgttggtggtctacgaggatatctatgatgccaaatctgctgtttattatttat

SEQ ID NO: 52176 - DNA, 106 bp, Gossypium hirsutum
  Clone ID: LIB3083-118-Q1-L1-H4
attgtttcagcaaagtgtaagaaagaaaccaaattgcatcactcaaggagcttaaaattgagccatgaagatagaattccttcaatagggaatgctcccaagtttt

SEQ ID NO: 52177 - DNA, 378 bp, Gossypium hirsutum
  Clone ID: LIB3083-118-Q1-L1-H5
tgaataatttagctaagtctccaaggaaagccatattgcgtgtagggaggatcttaaaattgagccatgaatatagaattccttcaatatgtaatgctcccaagtttttcagaatgatatcctctttatatgaacttgaatctttttgctctctattatttgaggttttttttatagtttctaatcaattatattctttattatgatggcatactagttaaccttattatatttttactttttttaatttattctttttaatattatgttagattttttcctgtttaagctgatatatatatcttatttctgtatgtaactatataattatcatataatttttattttttattcttttttatttttttatattttttt

SEQ ID NO: 52178 - DNA, 270 bp, Gossypium hirsutum
  Clone ID: LIB3272-056-P1-N1-A5
tctatttactatacgtgccgtaggggcataaaggtcgttatggttgattggtataggagcaactgacaccttcgtccttagtagacatgaaagagactaacaggcaattattacttatatagcgtaacttaaatatgaacccatggtttaaaccaaacacaagttgaccaaacgcgcgaattaatagacccttttttactaggacaacttactatcataacacgggcattaaaacgacaaaactattctgtattattagagactaaaata

SEQ ID NO: 52179 - DNA, 316 bp, Gossypium hirsutum
  Clone ID: LIB3272-056-P1-N1-A6
ggaaaaaaaaataaattcattggggtcaataaataaatagttcccgaatccccaaaaaaaaaaaaaacaggggggggatttcccccattgccctatattggaaaatccttatgtcatccaagctttttttgccacttgaacaaaagagaagaacctgttgaaaagccccaacacaaccccaagttagggcccactactttttagctattgtggaaccagcttgaacacaaaaactgttagcaagatcgagattaccgtctttgggccctttcgattaccgctgtttgttggcagcattgaagggagggcccactcc

SEQ ID NO: 52180 - DNA, 369 bp, Gossypium hirsutum
  Clone ID: LIB3272-056-P1-N1-C1
aaaagataaaagctggtcaaaggcattaagtaattcatatgaggtacatcatacctaacttaaaatctaatatatttaaagaagctaccatacaaatacttaaatacgaccatttacttggttatcactaccagcttcaaggatattcttttttcaaagttgaagttgccatggttttgacttgcaacttgaaactaacaatctactactctatcaacagatcacataactgatcatcggccttccggatttctaatctcggaaaatactgccttagacaagagtctctcggaattcttgctggcaaaactttgatcatcacttgtcgtcaaactgaaagtgctagtgcttttggagttgaggacatga

SEQ ID NO: 52181 - DNA, 367 bp, Gossypium hirsutum
  Clone ID: LIB3272-056-P1-N1-C11
agaaaacaaaacattctaaacatcattaaaacaaaatcttaaaagtcaattacaagcatgtcaaaagagattataaagtgccatcaagtttccatttccaaatacctagttgacctctacaagtacataaaaaggaagagcaacattaaatttgaaatccatcaaaatatattcacaaacttattctatgaacatcatagctcatataccaactttcatgaaatggattgcaaatcatagatttgttgttttgaaaccccaaacttccatgccaccacaacttcttctcttgaaacataagaaaatgcaccctcttttaaatgtcaacttcaaatatgaacagcaggatcaaatggtgccttttctt

SEQ ID NO: 52182 - DNA, 385 bp, Gossypium hirsutum
  Clone ID: LIB3272-056-P1-N1-C12
ggagaaagaaactaatgtttatatacaaaatactttattcacatattatttacagtcaatcatacagcataaaatctggttcgatttttagttagtacaaaaaaccatatttacactaaagaattcaatgcgcacacacacacacaactttcatgctccaagtgaagtcccccaacgaatcacacacacgcataaatgaacaaacaccgatcttcagctcccgaaagaaacagcagaaaaggacatgtctggtctgatattcacatcgtgtttgtctcttagctacccttttttgctgctcgttagttgataatagctcagatttcagttttacagtatatacagcacctttatacaatatttatatcgacgatgaaacacgaga

SEQ ID NO: 52183 - DNA, 384 bp, Gossypium hirsutum
  Clone ID: LIB3272-056-P1-N1-C2
gatggaaataacgattacacaatttatttattttacaataagtatcggtatgttctaatctaaacaaattagttcaccttaagacattcaattaaaaaacactactgatagaaacacacaatcacattcacttttcttaaatataatttcattgtatgtacatatgatcttaaaacaaaatgatatttacaactagtttaccttattttgtcccctagaagcagagcagcaagtatatggaggtctctattccccaaaactaccatctaaacaagaggctttttctcgattctacatatgtctttcggatatgcccataatctggaaacgggctcttcatccgactcgctatcgctatctgaagaggatatcactgatgtataa

SEQ ID NO: 52184 - DNA, 135 bp, Gossypium hirsutum
  Clone ID: LIB3146-011-Q1-K1-A12F2
ctattgaattcatttatttatttgcataacaactaatacaagatagcgcaattcaaagatgcattgaatattatatgggaattcatatacatactaacgttactactatacctcaatgaaaataaaaacccgcaa

SEQ ID NO: 52185 - DNA, 405 bp, Gossypium hirsutum
  Clone ID: LIB3584-039-P1-K1-B7
gggacgcgtggggcgctcaaaggccctcgatcgtagccacaggaaaaccctaacctgggctctcaactccaccaggctgctcagtctcgagccttgcagaccttctcgctccccgatcttccgggcgatatggccactcgacccgcatagtggagagatcatgcactcatcaccagaagcataccaacttacatcactaactatacaggcttggagcagctcatgacgctatcagaagggattcttcaccgcgtagttgcaagcgcctcagttcaacggcgagtatatcaaccactcaattttggagaattgccctattcggaagagagggagcctccaggtcttgggtgggcatgaaccacttggtcatgaatatgattaaaaataatgctaggtctgtttgca

SEQ ID NO: 52186 - DNA, 466 bp, Gossypium hirsutum
  Clone ID: LIB3584-039-P1-K1-D1
cccacgcgtccgcccacgcgtccgcccacgcgtccggattttccgcgaggaaatccagttggtttcctctacctttgcccatagcatagttcatgcgtttcgaactcttgaacaagtgtgggaagagctttgtgttgatattagagaagggatcctcacaagccgcatcactttcccatccgtccggtcagctatggctaaattactgaagcccaatcctgagttggcagacttaattcgtaggaaaatttcagggttgagtaattggtatggattgataccggagcttttccctaatgtcaaatacatctatgggatcatgactgggtccatggagcattatctgaagaaattaagacattatgcgggggatgtgcctcttataagtgctgattatggttcttctgaggggtggattggggcaaatatcaacccaaatgtgcctacagagtctactacttatgct

SEQ ID NO: 52187 - DNA, 452 bp, Gossypium hirsutum
  Clone ID: LIB3584-039-P1-K1-D7
tacacgcttacagagaattaaaggtagatgatgcaatgtccactcttacagtgcccatgacggttccttcaaagtctgacgagtgtgaacaactcacaaaagccttttcaggatgactgaactaatgagggcttaatcatagatatatagagtcacagaaacacgaaacaacgaaacttgatctgaaaaacctactctggaacctatggaaagtatctcctaaccgtactagacaaggaactctccaatgactatgagaggctcgatctgatttacgctcttgatcctgcttaacatgatgcccttttggctaatgtagcccccaaaaggtggactgcaagcaatctagtgcttattgaaattgactgcacatggtctgccaaccaactgcttcacgccaaggacgcttatcatgcttgttataagaagttgcttgaagaggacgttgatca

SEQ ID NO: 52188 - DNA, 424 bp, Gossypium hirsutum
  Clone ID: LIB3584-039-P1-K1-D9
cggacgcgggagcggactcgcgggggtggaacgatagcctaaatagatgcaggtctagatgaagactataaccggcaagacgatcactctggaggcaaagagctccgacacgagcgccaacgtgaagaccataaaccaagataaggaacgcatacatgcagacgcaccaagtgtagatctaactcggaaaacagttgcgagcgacgagtcggaccttggccgattacaacatcgaaaatgaggcaactgtacacatcgaactccggaggcacgtgggcatgcatatcttattgatatccttgaccggcaagacaatcactctcgaggtcgagagctccggcacgatcgacaacggtaacgcgatgatccacgacaaggtacgcatccatacagaccagatacggctaattttagtcggaaaaca

SEQ ID NO: 52189 - DNA, 433 bp, Gossypium hirsutum
  Clone ID: LIB3584-039-P1-K1-E1
gtacatcccttctattagtcccagtgtatgcctaattgtttttgggagaaaatgggcagccattgcaagcgccattatgatattacaatgtccaagagaaccaggaagccattgaatctccaagaagctaatcgtcaaagtcaaaatcattcctctgaatgggatataatccctctcaaaagtattgctcatattttggatcaaagctccccaggaaaaggtgagcatgaaggtggtgatcgtaaaagcttgaagcaactcatcaaaggggacgaaaacgcaaactcgaaggagatgatgggcagatcagcaaagagtagcacttctctgacactaggtcaccactttacggaagaagagaaacagcttcagctggttacgaagcaccaacatgataatggactgaagctcaaagaaattatgagtcgctatg

SEQ ID NO: 52190 - DNA, 443 bp, Gossypium hirsutum
  Clone ID: LIB3584-039-P1-K1-E2
cccacgcgtccgcgacgatgatgatccaatattttgttcagcttggccacatttgcaaattgtgtatgatttgctgctcaagttcatcacttcttcgtgtctcgatgctaaagtagctaaaaagtacatagatcatgcctttattttgagattgctcgacttgttcgattctgaggatccgagagaaagggagtgtttgaagactatattgcatagggtttatgggaagtttatggttcataggccacttattcgaaaggatataagcaatatattttatcgattcgttttcgaagaggagagacataatggaatcactgagttgttggacattttcgggagtataatcagcggattcgctctgcctttaaaggaggagcataagatcttcttgcagagggttttgattccgctgcacaagccaaaaactttgggagtttact

SEQ ID NO: 52191 - DNA, 508 bp, Gossypium hirsutum
  Clone ID: LIB3584-039-P1-K1-E7
gaaaaatatctcttcatcttttgttagaaattctttttctataaccaaatcattatctgtatcattcaaacttattctttctttttctgctcctgctgcgtatacaaaaagagatcaacttctggttccgctttaggataggtcccgtagcagtttatagtctcggcaaagattgagaagtggtgcattcatgttgaatctgttcagtttgcggggactgccttggactggtgctgatggtcagcaaaaggttcagttaacggctgcagagttggaatcacttagatcggaactcgctgatatagaagagagagaagctcacatgaaagctcggttggaacatatcgatgggattttgcgatcggctcgactttctggctatttgtacattcgaaccagatggacagctttacccggagaacctgctcctatcgatgataccaaaatcaacgattggcttcctcgattcattgttcttcacggccaatgtatattcttctatttactc

SEQ ID NO: 52192 - DNA, 437 bp, Gossypium hirsutum
  Clone ID: LIB3584-039-P1-K1-G8
cccacgcgtccgcccacgcgtccgcccacgcgtccgagaaagtagaatgggatatattgcaccaaatctttctactattgttggaagtgctgttgctgctaaacttatgggtactgctggcggtctttcagcattagctaagatgcctgcttgtaatgttcagctgcttggtgcgaagaaaaagacccttgcagggttttccactgcaacgtcacagtttcgtgttgggtatattgaacagacagagatttttcaaactacaccccctgctttgaggagtcgtgcttgtcgtctcttggcttctaaagcaactcttgcagcacgtatagactctactagaggggatcctttagggaatgctggaaaaaccttaaaagaagaaattcataaaaaaattgaaaaatggcaagaaccacctcctgcaaaagcagctaaac

SEQ ID NO: 52193 - DNA, 227 bp, Gossypium hirsutum
  Clone ID: LIB3146-001-P1-K2-E4
gcgacactcttaccagaactagtgcaatgattttaagtcctttaacatcatgctgaactgtgggtaattagggtagttcatcgaaacatcatagctaattactaacacacacctagtcttaaagattccttattcattaattagcttgaaattaacttcatctaatgaaatgacatacatagactgtattccaagatgttagattcatgtacagaatactctgatca

SEQ ID NO: 52194 - DNA, 440 bp, Gossypium hirsutum
  Clone ID: LIB3146-001-P1-K2-F11
ggtatacccaatacgttaaatgtcattttttatttccccttcttagttatcggtgttataagccttgtattgtgtttttataagaattatttcaagttcagtttgcaaggtgaactatggggttggacttgttttttcattggtgtggctgctgttggggttggttcctcatactatcatctcgacccaaatgatgcccggcttgtgtgggatagattgccgatgacaattgcattcacatcaattatggcaatatttatcattgaaagaattgatttgcagaatggaactatttccatcataccgctgctgctggctggcttaatcagtattttgtactggaggttttttgatgacctccgacccttcgccaatgttcagtttgttccttgcattgtcatccccctcatggcaatcttgttgccttcgatttacacaca

SEQ ID NO: 52195 - DNA, 182 bp, Gossypium hirsutum
  unsure (1)..(182): unsure at all n locations
  Clone ID: LIB3146-001-P1-K2-H9
attcacaactgtaataattttacatacatcctttcagttacgctctttccatatttaccacgatttattttactaaacatatcggcacgcncaaacctgaaccaaataatttataattatcacattttatcatcttcatcatcttcacaaaatccctatctaaaattccctctcttataatc

SEQ ID NO: 52196 - DNA, 483 bp, Gossypium hirsutum
  unsure (1)..(483): unsure at all n locations
  Clone ID: LIB3146-003-P1-K1-B6
tcggaccggattcatatggggaaagggactgttaatgtgtaaagcactttgattatcctagggacacggtgcaagagcaagaactcatgatcgcctaaaacttccagggtagagggcttagaaaactattaacgatccaataactctactttgttttactgtattatgcttatagacattgactaggattaaaaaggcacagtcgtttgatatcttggcgtttcactcaaaaaatattttgcttagagactttcctctctttttaaaggttctgttcgtttaggattagttgggataaacttattgatggaatggtttaggacctgtactattacaagtttactagactaaaactttgcttgtggtgttcatataaatggagattactgttataaaggggatgtctttttacagttacctactgtaaagggggtcgttganntattttcaattggatataataataattaatttaattaagtt

SEQ ID NO: 52197 - DNA, 484 bp, Gossypium hirsutum
  unsure (1)..(484): unsure at all n locations
  Clone ID: LIB3146-003-P1-K1-C7
tcgtctcgattatttaataataaatcctctttagttatgctgttatataaaatcttctctgtcactttcatgtggttacaggtctacatattgttattatgtaacgttctttggattaaaaaaatattatctgtgtcgtggatgttcgttgaattaatcagtcaattctgtattcttagcttaanagagtaacattggtcactttttattaaaagatttcactccatttgtacgttaaaacattggtatgcattgatgaaataatcagatagtgatacgtggcttaccacatgtaccccatgctgatatacaatgaccaatttttagctgtagaaataaatgaaatttttaatagaaggatcaatttgttaatatacaatggctaagggtctgtttgtttaaatgaaaaaagttttacggaaaatgttttttgcatttttctatgtttgtttcacagaaaacaacttggtcaatggaaaatgac

SEQ ID NO: 52198 - DNA, 342 bp, Gossypium hirsutum
  Clone ID: LIB3146-003-P1-K1-F1
cccacgcgtccgcccacgcgtccgcccacgcgtccgcaaagaacaaatttcttgttagagatgcatgctgtacttatacaaaccgatatgttaactgctaaaggagcccaaagtcaactacagcagcttagaggtagaaactggaccatttaagatgagtttggatcaagttagttgtagtattgtttcgggttaaattggattagtatactatggtgtaagttaaatatcatttcatagttggtaaagatcattatgcttattgttatcattaatttgtaatacttggaaacttttatcggtgtaatcatatactcattatttgtggaagtcatctttagc

SEQ ID NO: 52199 - DNA, 337 bp, Gossypium hirsutum
  Clone ID: LIB3146-004-P1-K1-A10
cccacgcgtccgtactttttgacaggtacctgttggtggaacactttgaccaactaaatgatttatccaaatagttcggtgtctaccaaacaagctcctaaagactatgttccatgctaccatattattttctttggagttaggcctttgtttctttatataatatatatatattctgtttcttgtgtgcaaatggcatccaattttaaaggcaaacagatacttggtgaagggctaaaattatatttctacaaacttcatttggtagacatttttgtaatattcaagctcaacaatccgaggttaagccctttcaaaaaaaaaaaaaaaataaaat

SEQ ID NO: 52200 - DNA, 245 bp, Gossypium hirsutum
  unsure (1)..(245): unsure at all n locations
  Clone ID: LIB3146-004-P1-K1-A4
cccacgcgtntcgccacgcgtncgctcagaaattttgaatcggaatcaccttcgaatgctcgttgctttttttgtatttcaaaatgcatcgattgtgcctgtatagcctattgtgcctttatgttgcgtaaaaaactcacctaggctattacatggcctttatagccgaaaagaaagaaaaatctaaaaatgaaaatgctatttctcttttttcctattcgctgctgctctgtgtgtctttttcg

SEQ ID NO: 52201 - DNA, 431 bp, Gossypium hirsutum
  unsure (1)..(431): unsure at all n locations
  Clone ID: LIB3146-004-P1-K1-A6
nncgnccacgccgttcgtccacgccgttcgtgattttgaggttgatggttatcttcacaatgaggaggagaggcgtttcaaaaagatcatttgggaagaaataaaccgggaatatcttgaggaacaagcagccaaggaagcagctttagcagctgctaaggaggcttgcatggccaactatgataaatgtccagaggacctccaagctgcacaggagcttgccgcagctgctgcagaagtagtggcaaaatctaaaaaggagaggctacaaaagcgagctgctgaagctaaaaatgcacgtcctgctaagactgctgctgaggcaacccgacaaatgctggttaagaagagactaagctcaaaaatcaactatgatgcgttggagaaactttttgatgaaccggtggctacagagaaatgcaagaaacaaa

SEQ ID NO: 52202 - DNA, 369 bp, Gossypium hirsutum
  Clone ID: LIB3146-004-P1-K1-B11
gagatgcgtttcgctggaaataatgatcactctcttctatacagtggacgctcacaaaccttactgaggcgaggagtttttcaagctagcaacgagatatgttcggatgatgctttctgatcaactcttaataatcaacaatctctctcgcaacttttaaacaatctattcgctaagaattatgatgtgcattattagctactacgttttagcatttattctggccatgtgttgatacaccaacttatgtaccccttttttttttcttgtataacttcggaatacatgcccatgaccaatgtaataacctataatgtcttttggatgtttttatttaaatgtgattttttttgtcgttttattatttat

SEQ ID NO: 52203 - DNA, 261 bp, Gossypium hirsutum
  unsure (1)..(261): unsure at all n locations
  Clone ID: LIB3146-004-P1-K1-H12
cccacgcgtncgcggacgcgtggggtaagacattgcaagatgttttgagactgttgtaggagactgcatatgttccatgcatctttgtacagcattaaaggtcctcattatggcaagagttgtttggtttccatcaaataccaaatatagatgtccattcaactactcttaaatggctttggaaacaataatcaattctgacaagattacttcctttgntgtttatttatagctggtgtagtcatacaaggtaattatatg

SEQ ID NO: 52204 - DNA, 258 bp, Gossypium hirsutum
  unsure (1)..(258): unsure at all n locations
  Clone ID: LIB3146-005-Q1-K1-H1
tcgcccagcgtncggtttnttttctcgatataaagggcggtcgggtagaatttggattcgagcctcgagaagcacatcaagagtacaggctggcttagtttcgggggcgattgctcgtcttaagctggaaaatgctgacggtcgactggactcggttactcgcgcgtctgatatttgcgtgagtctgactaccgaatgcgcaggacacagaaaccgatctgccctacatcacttgcgaagacgacaaactgacagctg

SEQ ID NO: 52205 - DNA, 474 bp, Gossypium hirsutum
  unsure (1)..(474): unsure at all n locations
  Clone ID: LIB3146-061-Q1-K1-H7
tcgtctcgtcccatcgcccgtccggtagagtttcaaccgnncttttcagtatatcttttaannntaaagtgcnnctttcnntttggagctnnngtttcccnnatcttanctacttggctgtttntngtcccttctgcnnattgcattcnngctgttgtttggggccagtgtattcgacccgtatctnncctttgccttggaaataggtcaagaatattcnnttggtattgcgcccttataatnncacggtccttcagaaattgttcgtataccccaaatctcaagggttggaacccggttctnntttgggttgtgcctttcttagtatagaatattnnttctgggtcttcgctttccannaatggttgtttcaatgagagttngtgatgatagtggtaagctttcgtggcgatccggagtgggagaaggatggcatttaccaatgctactaaaaaattccgcggatgtttgatc

SEQ ID NO: 52206 - DNA, 421 bp, Gossypium hirsutum
  Clone ID: LIB3149-001-P1-K1-H11
gcgacgaatgctacataacaaaatgatcctcaggttggacgaacactcgttacctacatatgcaggggtgggctcacgcatcatgtggcagggcttgctatatcaattaaaattgatacagtatagacacttgaagttgaaacgttaacgaaaccaccatagtcggctcatatttacccacttattgcataatgaaaactctattgcacgatggccaaaatgacttatttactggttacatctatagtcaatctcttggcatgctctaataatgctttaaagaattgatagattataaaccgttttatgaaacatatacggagtataaacgtaagcctgatgcaaatgttatctggactctctttaatgtacttacatggtgtcttgtgaaatagaatattaaaacatggtttgtcgctct

SEQ ID NO: 52207 - DNA, 220 bp, Gossypium hirsutum
  unsure (1)..(220): unsure at all n locations
  Clone ID: LIB3149-002-P1-K2-A10
cgggnccgacccacgccgtccgtgaggggcnntttctttttcttttaatggcgttgggtttttctggctttgggcgtnnttgatattnntagtattgagagcttcgcgtttnntgggtccannggcggtgcaacatgnnctgatggaaannnactatagcgttttccaatttttgaagtggggtatggatggtnnatgtatgcatnnngtgtgcatgcnn

SEQ ID NO: 52208 - DNA, 452 bp, Gossypium hirsutum
  Clone ID: LIB3149-002-P1-K2-B5
aaaatctaccattactacatatacctaatatttcaccgcgaataactcaaatctccaggagcgttcctatttcatctaagccccgacaatcaacaactaactaaattcaactaaaataaatacacaattccctaagctcactgtgattaaagattctcttactaactattgtatttcaaccttataataatacttatagagctttatcagttactttgtctgttaaaaatattgccttctaatgtttatctattttttcttattttagcctaataattttatattttatatttatttattttttttttcttaattttatttacttgatatttttatttatatttattttattttatatattttccaaatattttttattctctttatattatactctcttatttcttacttctacttcttttactttatcttcctttttaattttaaatttt

SEQ ID NO: 52209 - DNA, 115 bp, Gossypium hirsutum
  Clone ID: LIB3149-002-P1-K2-E6
gattacacgtgtacagtaaaatcatgaattctgcttgttcttaacgattgattaagacttggatgaataataataatggatggtaaaaatgttgagaggaaattgacctgacatc

SEQ ID NO: 52210 - DNA, 274 bp, Gossypium hirsutum
  Clone ID: LIB3149-002-P1-K2-H3
gcggaagcccttggagatgccatgcaagcacaggtaatatccccggagtggcccgcagcgttctagctccaagcagctgctctgtttagccttgggatggacaatgatgccaacgaaaccctaaaagatggtacaaacttggaagccaaaaatcatagaaactgaaactgtataaaatatccttatatcttcctgtcttatgtcactcttttgcatttttttttgccgatttggttaaagattggagcaatgtaattgagattatttgcttgtt

SEQ ID NO: 52211 - DNA, 197 bp, Gossypium hirsutum
  Clone ID: LIB3149-003-P1-K1-G9
aaaaaaagaaagaaaggaaacagaaaaagaaaactgtaacccgctcttaacttcttcgcatgcagtcggagctccggctcccttaacggagccctgtttgattgtccaattttcaaactcttttagatctctgtccttttatctttttagatctcaactaaacccaacaataaaatattcaacgaataatataaaat

SEQ ID NO: 52212 - DNA, 241 bp, Gossypium hirsutum
  Clone ID: LIB3149-004-P1-K1-C11
taacttacacctgcattatagtgtaaactaaatttattgcattacccaaagttaaacaactgggcgactgttaacaccgtggcgactgccaacataatggcgtggcataacataatcgtcttgcaagatatcggattatcgaaaagtgccgtactgatcgacatgtccaaaaatagcgcactctgaatcacgaatgcaacgtgcactgtaaatgcgaattaagctctttcggtgcattaag

SEQ ID NO: 52213 - DNA, 404 bp, Gossypium hirsutum
  Clone ID: LIB3149-004-P1-K1-D1
gaatccatccatcaaccggcagacgccgccaactacgtgcaacccaatggcacgtggtgccgccgacggagcgcagatagccctgctggaagctctgaccattacgaccgctcacggcgacgaagttgtcattcgggaaatacagcggggccggagcattatgcgcctgcggatagagcgcctggaagtcctagcctacgcaagtgacaaacggcatgctgcgccagctctcgaccgactgcccgcgctcgatgcgcatgccggattcgaggatcagcaccgaatggacctggctgaccaactggtcggagatcaagccgccaactacgccggaccctacgatcacgacgtcggtagacacgtagccggtggattcaaatacgggagatctcatgggaatcaga

SEQ ID NO: 52214 - DNA, 378 bp, Gossypium hirsutum
  Clone ID: LIB3149-004-P1-K1-D9
catgttgatggggataacaaagtcaaatggcagacatcttggttttattttagacccttagtctacagattgctgtgggaacctaagagcatcgacagtgaagcaaagggagtgagtgcattatgagaaatccagtaaggtctagattgaccagggccctaagagaacagttcagagggaagttggatctctcttcgccgctctaggttgccattggagcccaatgtagaaaggtatgggtgaagtcgcagaggagtgaaccaatggtcatgcggttatgggactttgatatattctttattccctctttaaggggctcattgaagtgcatgattccagtaattttctggtaaaaaaaaaaaaaaaaaaaaccaaaaa

SEQ ID NO: 52215 - DNA, 254 bp, Gossypium hirsutum
  Clone ID: LIB3149-004-P1-K1-F3
gcgcttaatgcagacatgactacctcacggtgcgtggatgaatcaagttacttgcagtcaggtgaaatggcgcaccacggaaccccttcgactggaccctttggtacggatcacaagtgggagtacctacgggcgctcattggatattgccaaggatagcagctataatgagctgcgtcgtgagcttgctcgaatgtttggtctggaaggccacctagaggaccctaaaagatcaggctggcaactagtatttg

SEQ ID NO: 52216 - DNA, 239 bp, Gossypium hirsutum
  Clone ID: LIB3149-005-Q1-K2-F6
agcgctccggactctatcaaaattcaaacatccctgctccaaatgatgtccccattggcctttcatcacgcgagcgagggcatacgtcatacaaagggcccacacatatcacccttcccattgtctattttctcttcatttcataagacatatgtatgctattccctctaaagaatgatagaagatataacaaagtcctcttatttctcaatcccctataaaagcccctccattttttc

SEQ ID NO: 52217 - DNA, 273 bp, Gossypium hirsutum
  unsure (1)..(273): unsure at all n locations
  Clone ID: LIB3149-006-Q1-K1-B11
gaaaaaccgggccgacccacgcgaccgggaaaacnaggcaccccgggggacacgggtgccgaagccccccacccggcaaccgaagacgcgaggcanaacaccggagaaacgcgcgagacggcngggggagcccccacaagactggaggaagacccgaaaggcgaaaaccacacgaacagcaacaacggaaaaggccagcaaaagaaccgcacgaggcccgacaaaaaaccaaacggaacgcaagacgcggggcaaaaggaaccgacaccggcc

SEQ ID NO: 52218 - DNA, 131 bp, Gossypium hirsutum
  unsure (1)..(131): unsure at all n locations
  Clone ID: LIB3149-006-Q1-K1-C1
antcactngnctgctctttcttgaaattttctttgtgaattggatgcttgatgtatttgcagatgagttgcattttctatcattattaaaactagttacgtgattgcctcatncnaaaaaaaaaaataaaa

SEQ ID NO: 52219 - DNA, 197 bp, Gossypium hirsutum
  unsure (1)..(197): unsure at all n locations
  Clone ID: LIB3149-006-Q1-K1-E10
ggccgacccacgcgaccgctgatccctagcncctagggctagnaaacttgactgaaacaagtaatgctaggagtggatggagggatattacagcgatggggggacaattttgaaatttaacacttatgattggattgctatggtatgttgatagaggtggtgagtcgtttaaaaaaaaaaaaaaaaaacagaacgag

SEQ ID NO: 52220 - DNA, 278 bp, Gossypium hirsutum
  unsure (1)..(278): unsure at all n locations
  Clone ID: LIB3149-006-Q1-K1-F7
gcgggaaaaacactggctangatgnccatttttttatattgaaggtcagcttttatgacaggaggttttcttcgttgaatgtaaagcacgagcattcgatccgggacaaatactcggatcaggaagataacacgcgagcttcgtgaggttcagacgcctgaaacaggtggtgaaaggaaaagaacaacgggggaactgcaccattgtcctgatgccacaagaagcgcgcgatgccaacggcgatgatcggcagtggaccgagacagagggaagggtta

SEQ ID NO: 52221 - DNA, 230 bp, Gossypium hirsutum
  Clone ID: LIB3149-006-Q1-K1-G10
tcgaagagctcaccatttctattattcaggcttttatttattttaatctcataaactctcagggtaaggggtagagtaacatttattggttgcgagtatttcgtaacatctgttgagaggaatgatggactttgctttgttaatggggctggctaattattgtggagttctgatatttcatgtaatacgaacatatactgatttcttgtgtggatgaacggtttacaacc

SEQ ID NO: 52222 - DNA, 378 bp, Gossypium hirsutum
  Clone ID: LIB3149-007-Q1-K1-D1
acgtgatgatgttggacaagcaaggcaattgatttggtataagttcagggacttttggattataaggagaattagacatgtggttgctccttcagaagtgaaaaagtgtgctttagatgctagaaaagaaaatttacgatgaggaatgtctgaagattgattacagcgaaaagtatactttgaataagcagttattcgaatcaatatcaaagtctctcaatgaagctgaaacgaataaagagattgatgacatggatgcaaagtatactctgaataagctgttatctaggttcaacataatctgcaccatctacaatttatgttttttggattcattcggttggaggtgttgagtagtatatgtatgatgcatttagt

SEQ ID NO: 52223 - DNA, 344 bp, Gossypium hirsutum
  Clone ID: LIB3149-007-Q1-K1-E6
acggcataacatgcacctgaaggctagaacaaaatttatctgttctactcgtagtgaatgggcaacaattaggggggagtgtagcatacgtgaataatgcaaatgcactggacaatctacattgtataaaatgtgatcgtttacaagatattggagattgtactagattgagttactcacatgaaggaaacctgtagatattgcacaaccatcaggacaggaaaaccttgttactagggcgaggtcaatcctaagagacacggatcggcgtggaagagctttctgaaccagggctcggaggggaggacccgaaagaagatttcatacgagtttgcacaattgct

SEQ ID NO: 52224 - DNA, 323 bp, Gossypium hirsutum
  Clone ID: LIB3149-007-Q1-K1-F8
accaggcaagaccagcgagagaacctgcagagctccaaggggacaaaaggagcaaaacaatgacggggctacatgaagcatgtgagaaatggggctaccttcagggggatagccagggaggagataagaagtaaatggagaaagcgaaggagaaggtgaatggagactatgacgagaaccagaaggaaaaggggtatgaaccagagaggaccaaaaggaggaacaagaaggagaaaagctacgacatggagagggaaaggacattcgtcattaggcaccggccaaaagcgaacaaaaagcaaaacccaaacgaaacgaagcaa

SEQ ID NO: 52225 - DNA, 236 bp, Gossypium hirsutum
  Clone ID: LIB3149-007-Q1-K1-F9
caaatatgaaaaaatggaaaccaggcatagcctaaagaaacgggaggggagataagaaggggggatgccagagggggggcagagctggaacgaaccatgggaggagatacaacagatgagggtgaggagaacaaatatgcaagggaagaggttggcaggaacaacaaaggaatgctgaccaaaaagggacgggacacatgaggacgaaaggcgcaattgaacgcactaacaaaggc

SEQ ID NO: 52226 - DNA, 423 bp, Gossypium hirsutum
  Clone ID: LIB3149-008-Q1-K1-F4
aacgtccaagcgaccggacattagatgggagacataatatatacatagtactcttcagtggagcgggagaggataccaattctaggatgggtaatccagcaaccatacatcagatcgtaattggagcggtaaataagcaggagggtgcctgtctaaccatgccatatatcagagaaatggaaataggggggggtcttatgaacaaacaggcacaggtcacagcgatggaacgaatggcgggaattatataaaaaacaggctatgcaaaggggggaaacatgctcgcaagaaatgaagttatgtagtactacgccaaatctgataaacaaacttttgatactgggaaaataaggttggtcgagggaacatgagaaatgatgaaatgaaaacgaatgggagaaactggggaggccaagggaaaaa

SEQ ID NO: 52227 - DNA, 395 bp, Gossypium hirsutum
  Clone ID: LIB3149-013-Q1-K1-A7
gacgccaggcagaaatacacactggtcaaaaggacccaccgaggctatggtgaccaacgtgtgtgccatgctacttcatggattccggggtatagtccctcagctgcaatatctgaaatacaaccttccccatgtacaacatcctccgaagaaattacaacatcgcgatttccagatatgagtgcacttgttggagcacaaaagccagcatccatgtccattccgcagacagatataagtatgcctgaggcttctgaaatgccggaaatggtccaagaaagcattgttgatataccagcagaaaattacgtggaatctgaaactgggaatggtggatttattgatccctctacattagttgtaaatggttcaattcccttccaacttgatgacct

SEQ ID NO: 52228 - DNA, 292 bp, Gossypium hirsutum
  Clone ID: LIB3149-013-Q1-K1-D2
aatcgccatttaactgctgccgaacgaggttatggcatttcgattgactcacctactggtgcattccgaagacctgctggagctgcggatggatcggatcaaaccatatccaacgcactggcactcctagctggctgaacatctcctggacttactccagaccgtggcctccaagtaaaagttagtaattctacaatgctttctgtttacagactcagggatctcagccatatatcggcccatctacctgctgatgtacaacgtatctacctcacagatggaagctttcgaa

SEQ ID NO: 52229 - DNA, 165 bp, Gossypium hirsutum
  Clone ID: LIB3582-002-P1-K1-H6
ccgtgcatgccacgcgataggtgttctatagtgtagcgtaaattaaattcactggacggcgctttacaacacaacgactggaaagacaatgccgtgacctaacttaactgaattgcattacatcacattttcgtctggtgacgtagtacagaagaggacaggacc

SEQ ID NO: 52230 - DNA, 212 bp, Gossypium hirsutum
  Clone ID: LIB3582-008-P1-K1-C7
ggacacgccctgtatgcggcacattaagcgcagaggatgggcagtacgcgagcgcgcctatcactagacaggccttagcgctcgttgctttcgcttgcttacggtactatctagacacgtacgacggctctccatgtcaagctctagagcgggggctgactttagggttgcgagtgagtgctgtacggaacctggagcctaaaaaacttgat

SEQ ID NO: 52231 - DNA, 334 bp, Gossypium hirsutum
  Clone ID: LIB3582-010-P1-K1-G3
gtgcatgcgacgtattgggtctcgtatagtgacaccaatggccaatgcactgcacggcgttgaacacgaaaacgattgcgaaacccatgtcaatacccaagttaatcatcttgctgtacatagctgttgtgacagctgacaggctagcacagagggccgtaccgaacgcccgtgcaaacagaagggcaaacggaacgcgcaatgggacgcgccatgaagcgccgcattaatcgcggctactctcatggttacccgcacagtgaccagtacactagcgagcgctctatcggctgtttcttctgcttttttcgctacgtttgtcggcacgttcggc

SEQ ID NO: 52232 - DNA, 111 bp, Gossypium hirsutum
  Clone ID: LIB3582-012-P1-K1-A3
tcgtgcatgctacatcatacttcttttattgtgtcagctaattgcaacccactgatcgcttcaacacaacgctttgactgttacaatcctgtcgtagcgaaactgaatcta

SEQ ID NO: 52233 - DNA, 296 bp, Gossypium hirsutum
  Clone ID: LIB3582-020-P1-K1-A3
acgcctacgcgtgacgctggtgttcacatgctattccataaaaacatatgagcatgcttaccagtaagggtcacttttgcttggtataagtttacactaccccaatgtgataaacggaataattagagctatacatacacatatatgtgtatgtatcgatctatgtatgtaaatgtgtattgcagtaaacgccatttatatctgaaacgaccctttcactttattttttggaaaagagatcaatatgattaattctgacatcatggacaagcatttgaaaactgatgcttgaggtg

SEQ ID NO: 52234 - DNA, 206 bp, Gossypium hirsutum
  Clone ID: LIB3582-029-P1-K1-E7
gcaggctaggaagcttcttgttttccagcgttagttttttgagcttttgcttgttttaatgtgttattttcaacctttttcttcttcttcttcttctcttatcatggaataaaatcaataaccatgttcattcacatactacaaaacaaaaaaatacctaaaagtggcaaccctgagacaccacctgacaaaggaagatcgagaaa

SEQ ID NO: 52235 - DNA, 264 bp, Gossypium hirsutum
  Clone ID: LIB3582-029-P1-K1-G12
cccacgcgtccgcccacgcgtccggttctagatcgagagcgggcagtacataggatccaagcggacctacacgtgcatgctacatggtatcttattcttaggggcatctaagagcaacgcactggtatctgagaaacaacccccagcattgtaaaactctgacaccaccgcagactcatgagaaattgcaccacatccaccatactgaagaggtgacgcttatcgctattgagacatgaaaacatagagctttacaacagttga

SEQ ID NO: 52236 - DNA, 164 bp, Gossypium hirsutum
  Clone ID: LIB3582-045-P1-K1-F11
gtccatgcaagcgcatagctgggctatagcgtcacctagattcactggactgcccgtatttctacaacatgtggactgtggaaaccctggcggcacgcatgttaatcggcttggaacacatcctctatgggccagctggcgatgtagcgctgaggcccgtaccg

SEQ ID NO: 52237 - DNA, 503 bp, Gossypium hirsutum
  unsure (1)..(503): unsure at all n locations
  Clone ID: LIB3582-052-P1-K1-A9
atgcatcctactacatatcttatatatacacctaaataaaatcaactcactggccttctacaaacaacttactgactaaacaaaccctttacccacctaacttaatttgcttcaaatacatctggggggagccagcttaataactaacaaacacgcacccaccgatcttcctaacaaacactcacccagactgaataatgaaacgcaccctccatctacccattcatcaagcccggtgtgtgtggtactcacacccagaccgacacatacaccagccacctacctaccgctccttcctttctcttcctttcctttctttctacccacgtccgctttcttccccaagcaataaataaatggctccctccatttagccgacctattgattgacttaccccacccccaacaaaaaaaacttaaggagagggatcacncaagtagccagccatctnacagaaagacngnnnncctccctcngacganggaacccacctaataaagaa

SEQ ID NO: 52238 - DNA, 508 bp, Gossypium hirsutum
  unsure (1)..(508): unsure at all n locations
  Clone ID: LIB3582-055-P1-K1-D3
gcgttcgcccagcgtccggttggttatttgggttaaattttggggtatggaatgggtttaaacccgggcaaaatttgggctatacagtagngaaaaccaaattgtttaaacaatctttttgtcccctatttttttttcatgttattgcagtgtatgaatgagtgccacttccttagccactcctttcaagcacctcacttgtttctcaacaagtgttttgatctaaaaaaaaaaaaaaaaaaaaaaaaaaaaaaaaaaaaaaaaaaaaaaaaaaaaaaaaaaaaaaaaaaaaaaaaaaaaaaaaaaaaaaaaaaaaaaaaaaaaaaaaaaaaaaaaaaaaagggggggccgcttttaaaggatcaaagtttacttccccgtgcttgcaacgtaatagtttttttttagggccaccaaaattaaattaattggccgggtttttaaaacgtggggattggaaaaaccttgggtttcccaaattaaatcgctttgaaaaaaatcccctttt

SEQ ID NO: 52239 - DNA, 631 bp, Gossypium hirsutum
  unsure (1)..(631): unsure at all n locations
  Clone ID: LIB3582-059-P1-K1-H7
ccgganccggcattcccgggntcgcccagcgtccggttttgtaagacggtgatattgtgagtgggccatgggcttggtggtttaactgataatgttgacgttaatggtgctattgttggttcacctcagtagaaatggcatttccttttatcatctaacattgagtgaaattatgagagtgagagctgctgctgctcatcaaaaatggctgctgctcaggtgatgggtggtgcttcttctcccttgccttgatgaaaaaaccacgaatgttcttctgcaacaccaaactgatgctcagagagctgctgcattgatgtatggtgaagaaacttgcaagttttcccagggccgagctgagaggaatgattatttctcaatgggattggaagagaaggctaactcagcttctaaacagatttaccttacttttccagctgatagtacctttaaggatgaagatgttttaaactacttcagcatgtttggaccagtgcaagatgtgaggatcccataccagcagaagcgaatgtttggttttgttacttttgtgcatccggaaactgtgaagctcattttgtccagaggaaatacccatttcatttgtgattnacgcgtgcttgttaagccctac

SEQ ID NO: 52240 - DNA, 482 bp, Gossypium hirsutum
  Clone ID: LIB3582-060-P1-K1-G2
ccggaaccggcaatcccggtgtcgcccagcgtccgccccgcgtccgccccgcgtccgctaggctattacatggcctttatagccgaaaagaagaaaatcaaaaaagaaaagctatttttcttcttccctattcgctgctgctctgtgtgtctttttcgcaggtacggagtccgctggcatcgtacggaggtgcgggcgtggcgtacgagggctgtgcgctggtgctgttggaggcgttgtctggcgcgatgtggttaggccgctagtgagggctgcggcgcaaggagacccttgccttagggtttgcaaaaattgggctcagtttctgggctgtttggggtattgggctatgtcattttgtaaatggacttgtaatttgggtcttggatcattggggttaatttggtttgattttggattgtaactggacagaaaatggactattgatatctagatttttataatatttattgtttttattt

SEQ ID NO: 52241 - DNA, 387 bp, Gossypium hirsutum
  Clone ID: LIB3582-062-P1-K1-H12
gagcatgctacccaataggtctgttataatataacctacattcaattcactccatgaacatctacaactttaacacgtgctaaaactctttcgtatcccaacttaattgcttggattaacatgcctatctctcaacgtgacctaattccgactatgcctggaaccatcactcttcctaactattacccaggctgtattgccaattgcactcgccctttacatgcctcataaccgcttcttgtgttgcggttactctcagtttgaccgattcacttgccatctctatatatctaactcctttagatatgttacctgcctttgatcaaatgtacgccgacttttcccataaggtatacatcatatgctccctttagtgttacaaaatac

SEQ ID NO: 52242 - DNA, 169 bp, Gossypium hirsutum
  Clone ID: LIB3582-062-P1-K1-H7
gcgcacgcagcgaaagcgataggctacagcgtcatctacaatgaagataccaacgccggaatcaaacactccacggctggcaaaaacctggcctccaccaaccacatcctctattataacagacccgttgcgtcagctgctgtacaataatacaagtccgcatcgatcg

SEQ ID NO: 52243 - DNA, 145 bp, Gossypium hirsutum
  Clone ID: LIB3196-010-P1-M1-G3
cgcctggtgccggattttcttcttacccatttgggccggattttaaaacggattttgggcaattttaagaccattttgttttgaggccgattagttaagcaggcccgacaaccggcaacaaccggttgaccggcctggccggctt

SEQ ID NO: 52244 - DNA, 202 bp, Gossypium hirsutum
  Clone ID: LIB3196-028-P1-M1-A1
acaagagcttgcacaaaatcaggctgctgccgctgcataatttcctcgatgcccgcctgcgcgggaacattcggccccggaagctccgcgggctcgcgctcccgctaatcttattgctgcttttataggccccgacgaaaccttgcacaaatcgacgcgcttgcacatcaactgggagtgccccgacaccctgcaaatattc

SEQ ID NO: 52245 - DNA, 154 bp, Gossypium hirsutum
  Clone ID: LIB3196-032-P1-M1-F5
tttacgcgtccgcacaagtagccactgggagagacagagagaaggatcgtcctgaccccgattatgacaggaattatcaaaggcacgtcagaagcaatccatgtaaccagagtggtggagaggctcctcacaatatgcaaaagaggcaacatcc

SEQ ID NO: 52246 - DNA, 236 bp, Gossypium hirsutum
  Clone ID: LIB3196-034-P1-M1-G5
cccccggtactttttgtgtgcccctcgccaacaaaaccaagcttgtggagtaatgttttagattccacctggcgggcacagacgtgacccttctcctgtgcttcgtcccctttacggcgctgctgtacccgctgcctgccttggtgctctgggactttatgtgccagttcgtcaactacattcaacaggtctcggtgcagggcacgtgcgccactctgaccgccattagcgtggac

SEQ ID NO: 52247 - DNA, 314 bp, Gossypium hirsutum
  Clone ID: LIB3272-058-P1-K1-A1
gttctagatcgcgagtggccgccctttttttttttttttttttaaaaacccaaaattaattaatgagttggcgttgcaatcacatactaacgcagcatgattcatacaataccgcttccctttatttaatgatgatggaatatagcaagagctgccgccgatcacggccgtgatcttgaatgacataagggcattgactaccctgcgctgccgcttactttgttaaacatatgactgactactactacttagtcgacccattgaagagcgttgaaaacggacgatgctatatatgtacatgcccatcctgctcc

SEQ ID NO: 52248 - DNA, 445 bp, Gossypium hirsutum
  unsure (1)..(445): unsure at all n locations
  Clone ID: LIB3272-019-P1-K1-D9
ccgtccgacagttcattagtatattgnngcgttgaatttcaatttgtgttgtatacatcttgaagaagaaagagtggcgtggttcttgcaaaacgaaagcatgaggttagtacatcancttcccccagccaaggctatttaagggcatttgctgaagatctggacactcctattgcccaaggttgccccacaagcaatcaagagtgtggaacgccttgaaggagatggtggccctggaactataaagaagatcacctttgctgaagggtatggattcagttatgcgaaacacagagttgatgtgttagacaaagacaacttgttgtacacttacgttgtgatcgaaagcgacttttttaacaacatggtggagaaaatcagctacgagacaaagtttgtagcagcagcagatggaggaacaagtattaaggtaaataccaccttt

SEQ ID NO: 52249 - DNA, 321 bp, Gossypium hirsutum
  Clone ID: LIB3272-026-P1-K1-A3
tgcaggtgccggtccggatttctgggcggagcacccgcccgttatttataccacacaaaatagggatccgcttgcttttatgtaggaaaaaattctaaactggtgggtacgttcgctggatactatcgctcattttttccttaaaacccttaatggttaccggagccctttaatcatttttgggcgtgttcccaaaaaatctgattacacttaggtttaccaagttcttggggttcccaaaagggcaaggcagggtgaattaaaaaaggcctattagaaaggctgcatttaaaaataatccgggtaagggtggaacccccg

SEQ ID NO: 52250 - DNA, 122 bp, Gossypium hirsutum
  Clone ID: LIB3272-031-P1-K1-C7
cacgttccggtccggaactcccgagctccacccatcgcgttcgtttccatactattccaattattctaaatccttcacccagtttttttacggcggccaccctccttggttatactgcgaac

SEQ ID NO: 52251 - DNA, 226 bp, Gossypium hirsutum
  Clone ID: LIB3272-044-P1-K1-H1
cggaatacccgggggcgcccactcgttcggcttgaaccaaaaagcacgataccagttcacagttgtctgccacttcatagcaaagcgtcccaactttccctcttcattcaaccaatgagaaagcttttccccttctaagttttggcacagcccaataccctttcggtgcttcaatgataccatgaaacaaccattttcgaagctaattaaagtaggttccggcact

SEQ ID NO: 52252 - DNA, 305 bp, Gossypium hirsutum
  Clone ID: LIB3272-054-P1-K1-H10
aacatgcgcgtgcatgccacgacatacaattgatatagtgtcacctaaggggaagtgaagggtgcgcaacaactcgcactctttcttacagtcgcactctaattctaatattagagggtataaattaggataaggtctaaggtgggtgagtgagtgagaccagatccaaacctatcgtcatttcgaacggatgctacttctttattgcctcagggcgctgctcttatactattttcttggttggatggatgggttgatttatacacagtggccggttcaaaagtcagaaacctaactgcaactgc

SEQ ID NO: 52253 - DNA, 163 bp, Gossypium hirsutum
  Clone ID: uC-gsronu33B002a02b1
catatgacataagaaggtagcatttgtcaggaatggtctgtatggattacaaaatctcaaaagtacatacttccccatgtccatcttcttgtacctcaaagtcgcatttgcatagaaatttctgcaatctatcaagaatagtaaagcaattcaagtttttatt

SEQ ID NO: 52254 - DNA, 249 bp, Gossypium hirsutum
  Clone ID: uC-gsronu33B002a07b1
gtttcggcttaaagaggccggatctgctccacggggacggtgtaaattacaaagctctaaaaggccatacagagaccagggcatctgcctgcagcacatgagggggagacagcatatgaaatgggctgacctctatcagagcggggaaggtacaccaagggagccattcaaagtaacaagcactggcaccaccagcagggaagttcctcagaagcagattgaggttgtgaaggaaaccgagctaaaacc

SEQ ID NO: 52255 - DNA, 393 bp, Gossypium hirsutum
  Clone ID: uC-gsronu33B002b01b1
gttgtcggtttcagttcccgaccatcataaggacccctgatgaacatgaggtgcccagagtgccatcgcgtcatggagagatacacatcattcatctgttgccatgatgaccaaggcattccaggctcgctattttaagctgggatcaggtttcatcactgtttttccatctactgttctcactaaataaagatgttcctatgggactcaaattaaaaaaatttcttctaaattcactttggctgctaaggatttgtggttgacatgtattgccggtgggcgctttgaggcctaagttggagtagtttaatagttaaacgtaaaataatgatgtttggtttcaacattattgtcaagtatattatgttacaaactgaaaacttcatttgacta

SEQ ID NO: 52256 - DNA, 358 bp, Gossypium hirsutum
  Clone ID: uC-gsronu33B002c04b1
tttatgatttctcggaccccatgcacgaagagggacactgtttaattgaaaaacgttatcgtctccgaacacgccaagggagatgcacatcaaattaaactttacagagatggggatcgagctgaagcttaaggctgatgattaactccatccccttggggctgacttcactgggcatagagcctgcagggcaggccgatcggcggagtcaaaaacttgtgggcaatcggcaacttcaaatcgtgtgcatgctctgcgtccacagtgttgaacacaaagatggctgccgcttggagacaacaccatgggtccctactcacccaacctacattgaacattaccaagctctgctctggcc

SEQ ID NO: 52257 - DNA, 335 bp, Gossypium hirsutum
  Clone ID: uC-gsronu33B002e02b1
gttcgcgttcctgagagagcgagagagccaggcgcctttttcttaacgcaacactttcatcctggaccaaggagggtgctgaggaggctttagcagcggagtcccacaagggtgcactcgccgagggggagagccacgtcgatcgcaaggggatcgaaaagttgctaaagacatactgctgcatagtcacaactgtgaagagcggggcaagagctctccagaaactcgagatggaggaagaaaaaggctgtcggaaaaccactgggaagaacgtgaaccgtataatgacggtggactcgaggccacgaatgactggatataaacaccctgatgag

SEQ ID NO: 52258 - DNA, 419 bp, Gossypium hirsutum
  Clone ID: uC-gsronu33B002f09b1
ggttgcttctgtttctacacactatcaccccagggggcgagtgacattgtgccagccccttacacctcctccgagcccgctaaagagcagcctctggtgtcgaagcaccacattgggccactcttgaaggggaagatcaccgataaactcacaatggacgggacagactccccaacccaacgctccataatcggggattacatcaacatgttagagctctgccgaccaacccaagatcccggcggcgcccacctcggtggaaaacgacggagaaacacaagtccggctcctccactttggccgtggccaaacaaatgcttctcgaaaattacccgctcggtaaaacacctaaaaacccacacttgccagtgggggccggaaaattcaacgtacaacccccggttagcgccatcctcacg

SEQ ID NO: 52259 - DNA, 591 bp, Gossypium hirsutum
  Clone ID: uC-gsronu33B002g04b1
ccttcgcgtttttttaaggagaaaattaatgttatttaccgggccatatagtcgacggaagataattctgagaagctgcagagggcagcgagggagagagttgagcggtcaaatgcaactccgataaataatgaagatcagcacagtgctattgagctggaggaaaacccaaggtccataacattccaggagaagaagatggaggaattcgaggcagagagggagaagctaatgaaaagccatcaagaccgaaggttggcaatcacacagcggtactgggaagagctgattgagcttgaggaagggtttgaaaaagaattgaccctgcttatgggaaagtacaaccccgatcgcctcgaggaagagactactgacagccttgaaggacgagacaagagagaagcacgagataatgaaacagaatagacaacactgaccctatttgtcgagggttagaagcagcatattttgttttgggtcaaggtatacaccagttttattaccaaagatacttcagctttggttatacagggcaaaaggtgaagcctttctggatcgtaccaacattggaaactgaaaccttcggagctt

SEQ ID NO: 52260 - DNA, 410 bp, Gossypium hirsutum
  Clone ID: uC-gsronu33B002g09b1
tttcgcctactcgtccgcccacgcgtccgcccacgcgtccgctcaatttgattctttgctgatttgaggattttatttcagatatggaaatttaaagctctaatcttttaattttctgtttcgtttcggatccgattgtttagggttttcgtaggagtttctcgtgacttggcaactcaatcttggtccgcgcgcaaccccgtatcttttggtatcagattttgggcattttgggtgttcttggttgatttctaaactgatctcaatattttaaagcaaaaacagctgctttacccagaataatatttcaaaaaaaatttatttgagtgggtaaacgttgtcaaattgatctgaaattttacatacatatttttgacactgtgattgaatataaaaaaattattcccccc

SEQ ID NO: 52261 - DNA, 472 bp, Gossypium hirsutum
  unsure (1)..(472): unsure at all n locations
  Clone ID: uC-gsronu33B002g11b1
attttcatcaatcttggtgatcatcttgagatactgtccattgggaagtacaagagtcatatacatcaagtgatcctagataacaacgaagtgaatagaatttctatggctacacttcatggcccttcattagacacatttgtagccccagcatcaaggttcatcgatgagtctcacccaccagcctaccgagggatgacctacaaggaatccttggagtttaatggttctgatgaaattgatgtgcagtcatccctttctctgcttcgaattccattctctctctaatttcatgagctcagatactattggtagttcatcctccatgtgtcgtatattactatacactctccgtgttaacgaaataaaaataaataaagcgccatgattattgttgttgtctaggtgtttgtgggatggaattactttgtatgtgcttttcccaattaattntaataatttgttgggtcgg

SEQ ID NO: 52262 - DNA, 401 bp, Gossypium hirsutum
  Clone ID: uC-gsronu33B002h08b1
tttcggttttacttgctagcttcttgaactccgttttcgaccaaactagctccaaaatgaggaaatcaaagtccaccacacagtccatgaaagatgaagaagagagccctggtggaagaaggaaaaggaggatcagcattagccatttccgtagctccatcacggccgataccaagtcggtttattcgtcttcgaattcgggttccaggacgcccccggcttatgcacacacgcctgccaaaagctacaaggattttagaagctatttagaccataaacagcatctggcagcatcatctcaaacatagaacaatattggacaaacaaaatcaacagctttacaacatgatacaacaaaagactattcttggttggatgagaaactcaagttccttgatgac

SEQ ID NO: 52263 - DNA, 436 bp, Gossypium hirsutum
  Clone ID: uC-gsronu33B002h09b1
tcgtttttaacctggcatatgtagagttagaactgggaaatcctttgaaggcgctctctgcagcacgagctctcttagaactgccaggttgttcaagaatttactcctgtctaggccatgtctatttggcggaggctttatgtttgctgaacaaacctaaggaagctgcagagcacttgtccatttatttatctggggaaagtaacattgaattaccgtttggtctagaggactgtgagcagtggcgagtgaaaaagcatattgattgtgaagaagcaaatgttggagcagcagctgccaagaactcttcccccgagggcttagaggatttcatgcttctcaagcctgatgaggcacgtggaacactttacgcaaaccttgctgcagtgtctgcaatacaagggtgaccttgagcgagctcaccatttcgtgacac

SEQ ID NO: 52264 - DNA, 214 bp, Gossypium hirsutum
  Clone ID: uC-gsronu33B002h12b1
catacttattaagctttatgtgaacttgtttatgaaggtatttgaagggggtaattttcagtttttcccctctgaatatcatatttgactgatttgaatggttcttgttctgcaatcaattataaccaagaaattagaaagctggaaaaaaaaaaaaaaaaaaaaacaaaaaaaaaaaaaaaaaaaaaaaaaaaaaaaaaaaaaaaaaacaccg

SEQ ID NO: 52265 - DNA, 570 bp, Gossypium hirsutum
  unsure (1)..(570): unsure at all n locations
  Clone ID: uC-gsronu33B004a08b1
gattttatttataacattgcatcagctaataggcctaaaatgggtcatattagaagggtttttgatttttgggataagaacaatatgagttgagctaatttgactgacctccatttctccattaaggaggtgtaggcagaaagcaaccacctcatctcctataaagtgctaacatttctggtaaaaaagagcaggaaatccatcttcgccaggtgccttcgtgggatgcatttcaaataaggtctctctcacttcttttgtataatgcgctcttgcttatccaattcctccttctcatttgcgttgcttgactgtgaaaaagctaggttggaatcatccctttcggcttcaatcaatgctgatagtttggctaaattctccagacgccatcccccataaatgtttagcttcatcgaaaaatgagtcttccatgatccactaggcttcaaatttgaattgatttgctnttttccgttggtcttcctattttgtgtgacgaaaatgggacaatgatcagaatangagactaccaagtgttcaactcttgctttaagaaacatggaaatccac

SEQ ID NO: 52266 - DNA, 570 bp, Gossypium hirsutum
  Clone ID: uC-gsronu33B004c11b1
tggttcttcgggaggttgttggatatctccaaatttgacagctacaatgagctgcgcagtgaactcgcacgcatgtttggccttgaaggccagttggaggaccctttgagatcaggctggcagcttgtatttgttgatcgggagaatgacgttcttctccttggtgatgatccttggccggagtttgtgaacagtgtgtggtgcatcaagatactttcaccgcaagaagtgcagcaaatgggcaaacgaggcctggagcttctaaactctgttccagttcagaggctctcgaatggcagttgtgatgactatgcgagccagcaggactccagaaatttgagctctggtattgcctctgtggggtcattggactactgaataatctttacctgttaagatgttatttttctccctgtaatgttagtgtgccttttgcaatccttatatggaaaagagctgcctaactctagctggaactttataatatagcatatatttacaccataagttaaatctcgaactatatgagatccttcgctcctttggtatggaatatgaccaatcattttt

SEQ ID NO: 52267 - DNA, 512 bp, Gossypium hirsutum
  Clone ID: uC-gsronu33B004d10b1
tccctcgcgtccgcccacgcgtccgcccacgcgtccgctatccttctcatttttcactttcacttttagtttctccaaaaacattcctttttttgtttatttatcccctaaaagcttgtcttctaatcttcccccttaattgaaaccataaaaacatttttttgggtttagggtttggaggagagatgggcaattggagacatcgacgaccccgacgatttgaccgccaagatatagctcctaaatatcctccttcctaccatgtccctgaatcttctttttctgagttttctaatgatggtgtgcctttgtgggaaaagaaattctgcactctagttggtaaagtttcgtggcggaagatagtggatgccaagaacttcactagccacaacaataatgtgctcaactgggatgattcagctggagaagaagcatttcgtaatgcaaaaagccagttttgggcaaaaatcaatggcttctcatgtgacatttctgctcctgatccgaatgct

SEQ ID NO: 52268 - DNA, 183 bp, Gossypium hirsutum
  Clone ID: uC-gsronu33B004e11b1
aaagccttaggggggctttaataaactgaggttgggttactcaaggctctcttaaactttcaccactcctgcatatttacattctcctacaacttaccctatttgacttgctctcgattcacggccgacctctcttgggctgatgccggtcctgaggttgctgaacccctagtgactaggttt

SEQ ID NO: 52269 - DNA, 506 bp, Gossypium hirsutum
  Clone ID: uC-gsronu33B004e12b1
tttcatttttagctagcacttccaagccaaaggatattccatacaaactggagagtccacccctgatcccctttaccagtaacaccacatcaacggctcctgttgcaattgttggtgcgaccaatattaatgtctatcatgtaggaagcttggaaagtcagagctctgctcctgggacttctccagggtccattgatgttggggatgctctggaacagccatcatctcattgcatcacaaggataaagtcgttacagcagtgcgcatctgcaattacagagttagtgcatgagaagactgaggcaggtaagcatcttgaagcgttctcaatccagcttgtgattcttgcaatttggaagcaagcattgcatatatgtcatacacaggctgcatcagctatggaaggaagtccgagccaagagacaagcagactaaggagtagtaccagcaagaagcttggaacgtctgatacaagagagtcttcagaagatatatcctcggagata

SEQ ID NO: 52270 - DNA, 102 bp, Gossypium hirsutum
  Clone ID: uC-gsronu33B004h10b1
agacatagtcctaggacaggaggatctctcagggtttaggggatggtcttaaagcggatctgtgaaggaacacaaggatctcccagaaagatccctcctacc

SEQ ID NO: 52271 - DNA, 246 bp, Gossypium hirsutum
  Clone ID: uC-gsronu33B005a04b1
ccctctcgttcgtccacgcgtgcgcccacgcgtgggaggactcgtgggctttgccgctttactaactaaaaagaaaaaccttcctacggttaacgctgaagatacgttgaacaacaatggctccctctatggctactctaaggcgtgatctcatcgctgtatgcgctctcacggactgcgccattgccgacgacgctccgtgttcgagccgcacctctggtgccagatctatcttgccgccatttg

SEQ ID NO: 52272 - DNA, 465 bp, Gossypium hirsutum
  Clone ID: uC-gsronu33B005c05b1
tcctctcgtccgcccacgcgtccggattcatggctttctggtgaggatggcggtttgagcttacgaacgttggacaggcagcaaaacggacacgtgtttaagtcaccaaagatgattcttcttgcgacaaatattactaatgctgaactcgagaaagcaagggcagcaggttttgcagatactactattatgaaacctttgagggcaagtatggtggctgcatgtcttcagcaggtgcttgggacagggaagaagaggcagcctggaagaggcatgctgtatggatcgtctgtccttgggagtcttctttgtggaaagaaaatattagtagttgatgacaatatggtaaaccggagagttgctgctggcgcattgaaaaaggtttggagctgccgtagaatgtgctgaaagtggaaaagctgcacttaaattgcttaacttccaacagttttgacgctgctttat

SEQ ID NO: 52273 - DNA, 257 bp, Gossypium hirsutum
  Clone ID: uC-gsronu33B005e08b1
cccatgcgtccgtctcccctgctcttcacgcctagggtcccctttcaatcttcgattcagacgaagcatagtaagggcatcgacggcgcgccagcactggtaagaacctcttctcttcctctttacttttgttttgcgcacccagaaaaacaaaaaacaaataaataaccaagaaagcgataaaaaaaatgaagaaaatcaccttcaaaatcaaactgctatatttttattcccttttgtacttcggtctacacttg

SEQ ID NO: 52274 - DNA, 237 bp, Gossypium hirsutum
  Clone ID: uC-gsronu33B005f09b1
aagtaaatgtgaatccgaatcaaaccaccgtcttcttcaacagcatgtctcctcttcatatcaagagcttggattggaacaatccaaatgggatcaaatgtgccttagagactaccccaattctcaaccagtcaatgtacctagatgtgggcacagaccgtcgactacttgtcattgccaacaacattactcaaaatatgaatgttaaggttcattttgttaacatcacaagcctgt

SEQ ID NO: 52275 - DNA, 207 bp, Gossypium hirsutum
  Clone ID: uC-gsronu33B005f11b1
ccctctcgtccgattagctgattgggcaattgactgctttccaaatattttggttcctttggacaactacatatccaggggaactgcacattttcttactagcacggcccctgactaccagcagagcctttggaatatgatttcttctattatggcagataaaaatttagaggactatgattctgctccagacctaaagctgatgga

SEQ ID NO: 52276 - DNA, 411 bp, Gossypium hirsutum
  Clone ID: uC-gsronu33B007b10b1
aaataatattcctctgtttatatccatctgcagctaatcaataagtgccaaaactggcacattcacggtgcctgacaatgtaacccttgaccagtacattgacttagccaagatagcggatcaagccgaacgctactaggagatggttcattccatgcataagcttgatctaggctctactcctgcctgctagctcaccgtctaggaactgaaccttctctcgtccgcttacaaaaacgtgatcggatctctacgagccgtgcggatgatgcgtgctcccatcgagcacaatgaagatggtatgaagaacgagtaacatgctgggctcgcttaggagtatagatcgaaggttgaatctgagtggccggctgtctgcactagtctcttgactgtgctggactctaatctgat

SEQ ID NO: 52277 - DNA, 279 bp, Gossypium hirsutum
  Clone ID: uC-gsronu33B007b11b1
tttataaaagcatactagctccttatgcagctcatattgattagcgatgttagaaaattggtcaaatttataaaaagtccctgtactatgtttattcggtggatttagtacccctactataatttgatcttttctagtttgtctacttcaaggaatgtgtgttttaagtcccgatgtcaacctttcagcattagttctgtcaaataatttgacttgtctttcatttttgataaaatacatggtgatgggcatatacaacttcccatttttttgaacagt

SEQ ID NO: 52278 - DNA, 216 bp, Gossypium hirsutum
  Clone ID: uC-gsronu33B007e06b1
ccacgcgtcctcgcttccggaaaaatcttgagagacctaacgattatgcaatctatggacagctctcgcataagcccctggcaaaagagggcgcaactgtcatccctcctcaaggtcagacacaaggcactcccacagctcatcgacttcttgataatcaactgtcccagtcagtgaaccgagctctgaaacgggcaacgaaggtgacatggacac

SEQ ID NO: 52279 - DNA, 153 bp, Gossypium hirsutum
  Clone ID: uC-gsronu33B007g09b1
tcctcgcgtccgcaaaatcgcgccgcagcaggtgggcttttacgaaccaggggggggccataacccaccagataacgactaaacgaggacgctctccaacaactctggcaacggaacatggaagacagacctgctcgtcttgtaaggagaact

SEQ ID NO: 52280 - DNA, 275 bp, Gossypium hirsutum
  Clone ID: uC-gsronu33B007g10b1
caattactgattagattatgagaccggtatcaatggaacttgtggttccctgcaattcctgcacttcactccaccggaaaccacctcttcaccagcgagtctcatctctgaaacgcagtgctttttccttgaaatgccgacgcacaactacatcagagctccagtctccggtgagcgttaccagcctggacggtagtctttccccttccattccttctcataaagtcaccgtccacgacagatttcgaggtgtcgtcctcgattttgctgttcct

SEQ ID NO: 52281 - DNA, 325 bp, Gossypium hirsutum
  Clone ID: uC-gsronu33B007h06b1
gttttcgttagttgaatgtgacttgtgcaggccgtagatgctgctatacaacattatgaggcaagcatacacaagagaatcgcacagagcggacagagaccaaacctttatcagttgagaaccaatctaagtttgccaagaaaagattgtcatgaatttccagctcttgagaataaatctttgatgttttggcattttgatccaaactcttttgttttctctgctcttttatgtgtattatgcctttgttcatgtcttgcgcattgtttcaacaatctggccgttgagctccatcaattatagtaaagtaaaacatggcaacttt

SEQ ID NO: 52282 - DNA, 273 bp, Gossypium hirsutum
  Clone ID: uC-gsronu33B007h09b1
tttttgaagccacttgctctgcatataccatctgagcagattaataacgggttaggagtcgtgggccaagatgcgggttacacactataagaatcactgcctcattgataagtaacaccacactctagacttactttgagtgtgttaaattggagttaacttggtctgagcactgattgtgctaccggagttagtctccgttatagttatcgacttagcaaccatattctttcttttccttatgccgaaaacattcctatgtttcaataaaac

SEQ ID NO: 52283 - DNA, 465 bp, Gossypium hirsutum
  Clone ID: uC-gsronu33B008a04b1
cccactcgttttagtttttcttcttctttttttacccaccttggtttttgatgtcttctggttgaaagaaagctgatgagtcgagttgggtatggaaggtggtggatttagggttttgagagggtgcattttgcaaatagtacaataagtcctgctcacttataacaagagaattctttagggtctttctaaggttgatggaatagggaaaagatttgattgggggctattttgtctgtgcagtgggaagatgatgatgatggaaagaagcagcttttagggttattttcctccttttccttccttttttttcctttcaagaaggctcaatcaatgttacaggcaaaaatatcttattgatggtttttggtcaatcgcatggaaaggaaaaagaagggtaatcaaaaatagttccatttttagtttaatgcacattacaggattactaccctggctttgcttaca

SEQ ID NO: 52284 - DNA, 390 bp, Gossypium hirsutum
  Clone ID: uC-gsronu33B008a07b1
ttcttactgggtctctctggattgtcttgtcgatggcattcgtctctcagaacctttcctgttagatcatcgaatccattgcttttgctcgccataacatgagggcaatgagaagcatgcatatacgtcaagctggcattcaagtgggtaactcatgttgggagccatactgtctagaacatgaaagccaacccgagggactgatgcccagtgacacgcgcgaaggtgtagcaaatgatggtagcaacactgtggttagtgcgactgtttcacggatacaatgtgcctgggctgtgtgagcagagccagcacctactgtggcccaggcggtcaggactggagatcagagacctgctgttttggccagtcaggtgctggtagccactgggc

SEQ ID NO: 52285 - DNA, 289 bp, Gossypium hirsutum
  Clone ID: uC-gsronu33B008b02b1
gattcaaggttcagtgctaggaacactgactgagaaggggatcaaagctgttcaactaactaccgatttgaagcctggtttacccagtgaagcagaaagaatcaggaattgcaaggatagggtccttgctttaaaggaagaaccacatatccctcgagagtggctgtcccatgaagattcaccaggcttagccatgtctcgagcctttggagactttgtgctcatggaccatggcctcattgcggaacccgatgtcttttatcaccgcctatacccagaggaacacttc

SEQ ID NO: 52286 - DNA, 504 bp, Gossypium hirsutum
  Clone ID: uC-gsronu33B008b06b1
cccttgtaatttcatcggatctcccattgtctattctcatagttggtgttggaggagccgacttcaaagaaatggagattttggatgcagacaagggggaaagactagaaagttcaaccggacgtgttgcttcccgtgatatcgttcaatttgttccatttagggatgtacaaaacgggccttctgttgttcaagaacttctagcagagttaccatcacaatttttagcctacatgcgaagtatagagattaaaccatgcagttagatttttatacagaatgtacatatcaaaattattgttcgagtttgcctcttataagttggaaatgctacggtggcatagcaatgcttaaacttgccttgaaagagccaacagaatctattggcattatgacggtagattgaagattaatcagtcgaccaaaaatcacagggctgacggtacattgcttgtcatatccatcgtccacaatgggttgtacagagacggatttacaatgact

SEQ ID NO: 52287 - DNA, 306 bp, Gossypium hirsutum
  unsure (1)..(306): unsure at all n locations
  Clone ID: uC-gsronu33B008d05b1
gtctttgtgatgtttaggaacaaacggaatcggagggggggtttattaaaacatggcagacgtgccacaaggggaagctaaacagggaccaacacaacaacagatgctgattgcaagccatagtgcgggaaagaccggaagacatgggataacaagccaaaaagcgagagggnntntagtgcggggaccacgcacggactaggagggtgagcaatatacttccaggaattctgttgacgagaagcaaaaatagcgctgagagcagtgcacggccagcgctcccttttgtggacccgaacactataa

SEQ ID NO: 52288 - DNA, 381 bp, Gossypium hirsutum
  Clone ID: uC-gsronu33B008f06b1
gaccggaactcccagttccgggtcaggccaccgggttttcttcgcttaaggatccaaaaaaatatggggggggtgtcaaacgaacagtcgtgtgcgggcccacgcaccatccattcagaaagcacgaaggccgaaaagccaagagcaaagtcaaaccctacactacgggcaaaaaagccaccacaaaacacaaacgtgcgagttgtcacatgaggacacgcagatcttgaacgccggagccgacaatgctggctgcaaccacccccagaccgaaaggaagggacaccgaggcgactcagaagcttgaagggcgcagaacaagaggacgaaaaggtctgcgaggatgcatgcagaggagactggcaaccaaaaaacccataa

SEQ ID NO: 52289 - DNA, 336 bp, Gossypium hirsutum
  Clone ID: uC-gsronu33B008g06b1
gccattcggtcgtttatatagttcaggactacaagggggggtttatttaaactttcactggtggccccccccggtatgattcgcgattaaaatcaatctcgggatcaggatcgcagctccacagacataaaagcgtactccaaggctactagacgaggctaacacctgaggaggctgaagcgctgagagaacacgctggaatttggtttcgattacctgaggcgatatacgtactgctcacaactataacgacagagttccatgcgacctgaaagagcactactctatagcccggctctgttttaatgggagaagtgattgttggcatatcggaca

SEQ ID NO: 52290 - DNA, 341 bp, Gossypium hirsutum
  Clone ID: uC-gsronu33B008h01b1
cactttctttttaaaaaaacaaagaaaaaaaaagggggggtggttttggaaaaaaaggtggataaaatagaaaaggaacgcttaaagagggaggtctggctggtcgggtttccgagttcttacttctttgacccaagccatgggggggtgcctcctggggggtcttgtctcctgccccctttatcgtgctcactgtttcttttctttttgtctccctggtgtacttttgtggcggggctttcctctcgtgcttcctttgagacccccgggcttgctgactttttggtggtgcgcctcccccgcccttttttcgcctggtgggtttgtgtttaaggccctcc

SEQ ID NO: 52291 - DNA, 534 bp, Gossypium hirsutum
  Clone ID: uC-gsronu33B008h11b1
atttttaagcacttcttgtcatctcccatctgattttcttaatcatggcttatcatcgtttgcctttttttgtgttaccctttttattaatcactttgtcattgatgagtagcaacacagtcttggttggtgctcggcgtcttttggagacatctgtgccggagattcctaaacctgagttgcctgagatgccgtccttcccaaaggttgaacttccaaagcctgaaatgccagaaatcccaaaacctgaaatacctaaaatgcctgagttgccaaaacctgaattgcctaaagttccagagttgccaaagcctgaattgcctaaggttctcgagttttcgaaagttccagagttgccaaaaccggaattacccaaggttcctgagttttcgaaagtgccagagttgccaaagcctgaatttcctaagattcccgagttgaaaaaacctgaagaagtcaaagttccagagatgcccaatgctcctaaatgtcaaaatctgaagcaccaaaagttccgagttaccaaatctagaa

SEQ ID NO: 52292 - DNA, 434 bp, Gossypium hirsutum
  Clone ID: uC-gsronu33B009a06b1
attgaggcaagatgggggtgtttttgttgttttgagcactgaacaatctagaagcgatgaggaacttttggaaatgtcacgttcctgggacattgtgggaattgatttaataagtggcgttacttgtaatgccccttatgagtgggttgataaaacaaaatcagattgggacttcaactccaatggaagagatcaggagacttacagagtcgttgcctatgattttgggatcaagcataatatacttcggcgcttagcatcttatggctgtaaaatcactgttgtcccgtccacttggccagctgctgaaacccttaaagtgaagccagatggagttcttttcagcaacggtctgggagatccatctgcagttccttatgctgtagaaacagtaaaggaaatactgggtaaagctcctgtttttggaatttgca

SEQ ID NO: 52293 - DNA, 112 bp, Gossypium hirsutum
  Clone ID: uC-gsronu33B009a10b1
tctgaagcatcatctttgttgccgtaggatagagcccgcataacacccaaagggcacgcaaggtttgagcgacggcgaaggactcataatcaaaggatgcaatgggataggg

SEQ ID NO: 52294 - DNA, 257 bp, Gossypium hirsutum
  Clone ID: uC-gsronu33B009d04b1
ccggcactgaacactgtagaccttgcgctgaacaaatacctgtatattatgttccgagcccagctcaatacggtattccttaggttcatccagtccaatcacgtggccagcctgctcatcagtctgctctgcaatcgcatcaatggcctgaccggttttgacccaacggtcgatgctgttgtgcaggcttacattgtccacattgaacgtactcaccgatgaacacaaagtgcgagtggttcttagtgacattattc

SEQ ID NO: 52295 - DNA, 266 bp, Gossypium hirsutum
  Clone ID: uC-gsronu33B009e05b1
cagggccgacgacagcttctcctttcccaacagaattaccacattggacatatccagtgccacagcgccaccttccatgccaccgcggaatccgacctttttctccgaatccgaaaacatttcccagctgttatcccatattaaactcctcattcgccgtcgtaccgctgccattgctgccttagatgctggctttttcttcgaagccatttcgcatttctctaaaatcgctgacagtctactccctgtaccttaaagtttttctt

SEQ ID NO: 52296 - DNA, 282 bp, Gossypium hirsutum
  Clone ID: uC-gsronu33B009e09b1
aaaaaaaaaaactttgaccaataagaggaaaaaggcgcgccaccaccacaaaaagggaaagactagcgtgtgggggtgcgcttttaagaaaccaggataccggcccactgttgcgcagttttagacgctcctgtgggccccccttaatctattccagggccgcggcttccacaccctgggaccgggaaaacccctggtctagccaagcttaactgcttttcacctcccccccttttcccaggtgtggttttatcaaaaagggcccgaccctgtttccctttc

SEQ ID NO: 52297 - DNA, 107 bp, Gossypium hirsutum
  Clone ID: uC-gsronu33B009g05b1
caagatattacacctcttctgaattcactgtggttgtgggatactgtagtttccttggcacggctttatgatctggcgtttggattgaacgacatagcttcctgtgg

SEQ ID NO: 52298 - DNA, 194 bp, Gossypium hirsutum
  Clone ID: uC-gsronu33B009g11b1
cggaaagcatttgcaacatgcctagcttatggttgaaggcatgcacaccatcagtgaccccttccaaccctccgtcgcccacgttaacttgctgctcctccctatcccacgctgtcatgctttgactttgcttatataagaactccaagctctagccttcccttgttattgacccacaccttgccatgaaattg

SEQ ID NO: 52299 - DNA, 417 bp, Gossypium hirsutum
  Clone ID: uC-gsronu33B009g12b1
atttctggcaaggagtgtttttcaaggatcgcgtggtactcacttcatgaaggtagaggaaggaccttgaaaggaagagatctgagaagggtccgaaatgcaattttcgaaaaaaccgggttccaagactaaagttacaccaaaaaagagtgagaattttgatttctcgttagaaaaattttcctcgagttttgttttaattttaatttactcctccttttgcaactctgattcgattcaagagatcattttcttttcgtgtaattctaacttcgagatctttaagtgatttagcggagaaaatttcgattcaggtttaattttctttgagatttgattttttttagagtataatttgtttttctttttttcgggtattttggtaagaaaatgggaaaaaatgggctcgttggcttt

SEQ ID NO: 52300 - DNA, 175 bp, Gossypium hirsutum
  unsure (1)..(175): unsure at all n locations
  Clone ID: uC-gsronu33B009h07b1
acagacancnncttaggtggggggtggctgatttcattcatggctctatgcaccaagcgcgctagccggcttggcaagaagataaagcctaaacaaaacattttatcttccaggactcccccattccaccagccgaaatcacctatgaagtctcctttgagatcccctattcccc

SEQ ID NO: 52301 - DNA, 435 bp, Gossypium hirsutum
  Clone ID: uC-gsronu33B011a04b1
ctcttgctttcgctgtacttgacatggtccaagccatgcgcaactactttgatgcgtctattggatgcaccaacctaaccggagatttccgacatgtctgtatctattattagagcaagaagcataactgcacgagagctatgtttaccatcatggagaccaactgttgcgctatttaaactctaataggaacccttctttcggtctgccttaatgctgctttcaaaactggataaattctcgttgctaagcgtatctcgctggatattctagagggcgaactggcgaaccataagtctcacgccgaatatctgtttcaacagctatttatggctaagaagatacattgaacggaggaggaaactgttaagggagtagtggaaaatgatgagccttttgaagagcccttagatgagcaaattgatgggctctatc

SEQ ID NO: 52302 - DNA, 410 bp, Gossypium hirsutum
  Clone ID: uC-gsronu33B011a12b1
gctgcatgtcgacgccggatctagggtttcttttaaaggcttctgatgatgaactgggtttgccacctagttattcgtctgttgagcagggcgtggatataaagggaagtgctctaataggacctccatggaatacaggaaatgattggatatgagctcccaactcccctgtaccgatcgctagacttctgcatttgctgtgactaacattccgacaacaaaaatcatagacatagccgtgattttgtggcgttaggaggcttggtcgaacccatggacgaaatatcagagcttacctgatgacctgaatccatctgcgcactacatgtgccattggattatagcttcttagacgaggtacaagagaatcgtgtgcgtaaccaatagaatacccttacctactaaaatgg

SEQ ID NO: 52303 - DNA, 121 bp, Gossypium hirsutum
  Clone ID: uC-gsronu33B011b05b1
cgttttttgagatcttctttgtgggtagttagtttgcattactgtctctgcgccatagacgacagatgacatcttgttttctataacagggataatagcatatttggaactgtattttatc

SEQ ID NO: 52304 - DNA, 333 bp, Gossypium hirsutum
  Clone ID: uC-gsronu33B011c09b1
ctcttctgaacacgcatgtgcctgaactattcgctgaaacaaagtactgcaactcatacagattctaagattgcaccaccgacggtagatctaactgaacttaacccatgtacaaatcagaggatatacaggtgatgataaaccgagggctgatgcgaggaaaggaggggaggccgcgctccggctttagcaaccgctatctccacaccaaccctagagcttggccgttgatacctaataggtagaccaaactaaacacatgcactgcccgtggttttccactttcaagacctacgccatgcactctccactggatctcctatatgattacta

SEQ ID NO: 52305 - DNA, 324 bp, Gossypium hirsutum
  Clone ID: uC-gsronu33B011d02b1
ggaccgggcctgaattccgggttaccacgcgccttatttctagaaacgcccattgtaggcacgggcagggtcatgcacgtagcgggtaaacctgaaagtctacattaagtgataaaacctcactagacctaagcgttggagaggaacctttagaacatgaacaaaccatgagcccacccaagttaactggttcaaaacatcattcttcctagtttgaaaagagcatagatagaagaactcctatggtgcgtgcctgaatgatgaaagacccggccgtattgtgtaagggacccggcccggaacagtaaataaaacaccaaaaat

SEQ ID NO: 52306 - DNA, 525 bp, Gossypium hirsutum
  Clone ID: uC-gsronu33B011d06b1
cctatatatatcaaaccttggttttctgtaaatctataaaactggtttgattcttcttcgggttatcagacttttggtgggtttgggttttcttttttcgtttgatgaacaaagatgaccgtggaattgaagatggtatacggcggtgatggtggtggtagttttgcaagaaaagtggcggaaactgctttgaaagaagctgcaaattctgggattcagggtgttgaagaattgataacgttgatgtctaaaaatcaagagcttttcaatccagatgtttctattaaaactgctgctccatcaggttcagcagagtcagccatggatatccaagctgttacagataagactgttaactctttaaagaggttatttctttattggatcgaccgagaatcggccatgctcgatttagacgagcccctgttcttgacccaaaccaagatacagaacaggcttcgaagaagattcaagagccagagacaggcgtcttcttcttttcaagtaaccaaagatcaagtgtct

SEQ ID NO: 52307 - DNA, 553 bp, Gossypium hirsutum
  Clone ID: uC-gsronu33B011e08b1
tcggtctcgtgggctatatgcggcaaaacgatgatgggaagactgtagcagcgatggatatgttggtgcctcgggttggtgagctcattggtggaagccgaagagaagaacggcttgattatctggaaaatcgtttagatgagttgaagcttagtaaggagagctactggtggtatcttgatttgcgtcgatacggttcagttcctcatgcgggtttcggactcggcttcgaaagactggtacagttcgccactggaatcgagaatataagagatgcaatacctttcccaagagcacctggttctgctgaattttagcggtgcaaacataaacgagttttccatattttcttaagcagttttttagctttcgtctttttctttttcctttctcaaattcatattttatactaagatatcccatctattctttttagggcactgaagactttagccacctttttgccttttgtatttttttttaaaattatattgaagtttataatatgtaaaaactgaaactagttctgttgtaaaatgaatttatatattat

SEQ ID NO: 52308 - DNA, 457 bp, Gossypium hirsutum
  Clone ID: uC-gsronu33B011f01b1
tactatggtaagttggacgcccgccggaccgacccggaactgatggctggaccgacgcacgcgaagagctttaacattaacgccctacctaaaaccggtggcgtcaaatacaggaatctggccatacactgaacgttagggttatggtttactgtatctactctctggggcaatggaggccccatgggcgacgctggctccaagcttctcaaggcgggacatgccgtcccagatcaggctccatccttgataatgcctactcaaatgaaacgcatgctggaagatggatcatctgctgataattcattgttggaagatgttaccatcgatcctgttgtgcgaggatgcgttaaagactgggatgccatggaagatttgttgcaccatgttctatacacaggccctgaatggaaggtggaaatgaaggacaaattttgtttactgcaccgttttgtac

SEQ ID NO: 52309 - DNA, 419 bp, Gossypium hirsutum
  Clone ID: uC-gsronu33B011f05b1
gcgtcctcttcttgcgtccacgcgtgcgaccacgcgtccgctgatgttcactgcagtgggtcacctctaatgacttattaaactgcaaccaactaaaagacttctcaagacctgcttgacaatacagtattgtcaaatatcttagccgtatattttgcaattctatctgttgtttctatagtccaaccaagggtgtctaggaatgtttaggacatgacatgatataatccttcatccgaatttgtttgcattgtctaattggatcatgttgtgcactaggaagatgtaagaataacatgctactctatgcatatccattctgctttagttcatttgtagctagacaccttcctttattagatgtttctttgttatggaattatataggctttcaaattttaaatacaagtgtgatatat

SEQ ID NO: 52310 - DNA, 527 bp, Gossypium hirsutum
  unsure (1)..(527): unsure at all n locations
  Clone ID: uC-gsronu33B011f07b1
tgttgtttaagtggaaatggacttcgagtggctactggttcctacagcaatctgtttcgggtgtttggttgttctgaaggtagtacggaagcaacaacactggaagccagcaaaaaccccatgaggagacaaggtcaggcgacatcaaggccttcaagatctcttggtaatctctctggtgttgtccgacgaggtttgtgtttcacatccttactgattcgtaatttgaaatgatctgtaactcatttaattgcatattttcatgatttcgcttgattattagtgaattagtattatagccatttcctgagcacctagttttcaaataatcgactcaaaaagcattatatataatatcttttgaggtaaacatctatttaactacatgcatttctcgtcgccattttagtgaaaggagcagataactcgggagttgatgcnaatggaaatgcntttgatttcacttcgaagctgctacacttagcatggcatgcaccgagaactctatgcctgtgctgcatgcacag

SEQ ID NO: 52311 - DNA, 390 bp, Gossypium hirsutum
  Clone ID: uC-gsronu33B011h11b1
tgtcctctcgggcgaccacgcgttcgtcaaagctgaggcatatgcaaagttactttcggccgatggatactcgcacacggatcagaagacttggataggcgtataaagtctgtcaacatgctctgctcaataaaggtatcttatatactttcactttagctggcctatagaggcattacgcttgccccttacacatgacattctttctaactgcatcccctctaataccactgtggtatagtgctgtcttgatccaatgaattcacagaaaagaatagccttctttaccaggagagagctgacatttgactatatatatgaacctggtactaatatcatatacatgatcgcgacttgcctcgagatgcatgaccatgctgagcgtgcact

SEQ ID NO: 52312 - DNA, 249 bp, Gossypium hirsutum
  Clone ID: uC-gsronu33B012a06b1
ccttgcttaatttccattctggtgtctacaaacagggaagggggtcatcggagcagattcccctttttggctcaaattgaattcatcattgaattcatcatttttacacgaattgtatgcgtggacaaacctttgaaggtgtagttttacttgtaaactctttatcagcaaagctatttaaaacaaatgattgattcaaaaaaaaaaaaagaagttcaaaagatgtagataacattaaagccaaagtag

SEQ ID NO: 52313 - DNA, 496 bp, Gossypium hirsutum
  Clone ID: uC-gsronu33B012a07b1
ctgcaactaccattccaagcttgcttgaaaatagaaaaatttggcgatctgattcttaaggctacagaaccacaaatggttttgtttaacatctatgatgactggttgaagagtatctcatcatacactgcattctcccgacttattctgatccttcgtgcacttcatgtgaacaatgagaaggctaagatgttactgaaacctgacaagacaattgttactgagccacatcatatctggccttctctaactgatgatcagtggatgaaggttgtagttgctttaagagatctcatactctctgactatgccaaaaagaacaatgtgaacacatcagccttaacacagtccgagattcgtgacattattcttggagctgagattactccaccctctcaacagaggcaacatatagcagagattgagaaacaggctaaagatgcaagtcagctgacagctgtgacaactaggactacaaatgtgcatggggatgagc

SEQ ID NO: 52314 - DNA, 419 bp, Gossypium hirsutum
  Clone ID: uC-gsronu33B012b02b1
tccacgcgtccgatcttaagtcacaacttcaaatcagactgaagacataattgtactttattgttattttcatgaccttactaacttgagaatatatataacacaaataatttggtattgcgctttccctgtgaaataaaatgatatgaaccgggcgggcgccacactgatgtattcaacgagtctaaaacgaaatacgagctgcttttcatacattaggaatctgactgacttgcttacatgaaatatgaaatagtgacaatatatgcggagatagcagaaaggctgacactggacagaaaaacaagtaaatatttgcactttactctatctattggcaagtaccaagtaaccgagggggcaacaggctgaacctaccacaggccatggctactttattcttaaagcacattaacgag

SEQ ID NO: 52315 - DNA, 561 bp, Gossypium hirsutum
  Clone ID: uC-gsronu33B012b04b1
tccacgcgtccgattttagatcaggcaattggggtgtgggaggagaatcactcagaatacctttttttctttttcttttttaaaagttatttttgcaatttgaggttatggatgtctgttaaaaatggccatagttttgctgtccttttctgaatggtcctagcatgaattttccttgtgcttggcatcaaataagccaaattaaggcctctgtaatgggttttgagatttctatatattaatctcctagaacagtgacaatcatactcctgctcttgtctctccgtattcaaggtcaagggcctgtttttttttttttttttttgaaacttcctatataagttttttgtacgctgtctattcctcgaattctgactatgaaaactaggaggggattagcgttctgaggccttttggccatccattgtgatgaagaaatggtctgatataaagcccaaggtgtatgattttagtgaagatgaagtcgacactgaaactgagaagtgagatgatgattcagattgcatggtagcgaggatcacacccgtaggacattggaga

SEQ ID NO: 52316 - DNA, 494 bp, Gossypium hirsutum
  Clone ID: uC-gsronu33B012b10b1
tttgacgcgtgggaaaaaaaaacaaaaaaccaaaggattttaaaaacaaatacaaaagagactagattaaaaaaaaaaaaaaaagggggttaaaatctaaaaaaaacaaaactcgcacagcagctattggaaaatagggggccccccttttgaggccccaaatttcccgcccccgcccggggacccccatcttttttttcttgggggccccctaatttcatttccctgtcggggcttttcaacaccattccccgggggaaacccttggcttcccccactcgggtcccctcccgggccctccccccttttttccgggtggggtataggcccattggccccccccggtgggcctttccaaaaggcgcccccccttgttttttaatgggccccccccccgttggggctcttttgggccccccccctcgggggttccccccccccggatgggtttttttttcccgccccctaacccccccctcttcccatggcccctg

SEQ ID NO: 52317 - DNA, 481 bp, Gossypium hirsutum
  Clone ID: uC-gsronu33B012e12b1
gcgttcgatcacacggaacaggcttccagagccatgcctatcttgaccttcaggaacctgggaaggcataccttgtgcgcttgcaggaaggctcttgctggcagtcaacccaggatccgcggtgggtttgcatagactgaagacatctgacaactccaagaggcagtaattgttgcctacttactttgcaaaacaggaatgaagttgcttgaccctggaggtgctggagaatatatatatgcatatatatctcactagtgtcaacttggcgcgcacacacatatatctatatatatacacctttgagggaatcttatacagagttgctgctgaataaaccagatcgtaaatgctgagaaataattctatcttatttgctgttataaccttctctcctatccaagtaggatgtacatagtggttgttcaataaaatgatggcatagcagaaaattgcacttgttcaagttgaaattgtcaag

SEQ ID NO: 52318 - DNA, 411 bp, Gossypium hirsutum
  Clone ID: uC-gsronu33B012f01b1
cccacgcgttcgctctctcctgcgcctcaacagcaactgggcaatagagaggggtgacttagggtttgccgaaacttgactcaatttttggggccgtttgggtctgttccagctattgggccgttgtatttgggctatggggcattgggtatcaatattggttgtaatatttgggcctttatgatagattattagtttggtttcattctttggacttttggtttaataattcggtatttattttgggttttggttctaagtgggccccggctaaattggcccattacatatacgtatttctaaaagtattgatcaattgtatattcttctagtttgaggcgcaaccgaataatctgttacattaattgcataaccaatgttccaattgaataaattgttataaataatcgt

SEQ ID NO: 52319 - DNA, 553 bp, Gossypium hirsutum
  unsure (1)..(553): unsure at all n locations
  Clone ID: uC-gsronu33B012f06b1
tccacgcgtccggaggccaggccttaggcaaaagttttgaagtgttgatcaggttggccttggtccatgggtatctctgctaacaggtgggtatggtgagaattctcaagtttcaggtaaagtaacttttataagcatactagaggagccctctatttgtcataagctgactggactatgtagccttatgttccatgatgctcttgtagtcaactgtgaagctttgttgcacggagttatatttgataaatatgacagttccatcattttcgtttcttctagattcaaacaaattagcaaggccagtatacatgttcattttgtaattgtgatcaccattatcgtcatcattgtcatttaattactagctgggcatccgtgttcagataatttatttcattatgtgtagtgtcaacttttctttttgttgtgagttatacgttaagatgtcaatttatggctttttgcaggaagatatttggtgtttttggttgcagaacagtggagtgcaatctaaagatggcaaagatatgattcttttgngaggtatatc

SEQ ID NO: 52320 - DNA, 343 bp, Gossypium hirsutum
  Clone ID: uC-gsronu33B012f09b1
tgttgattaattgattggatcaccaaagatactagctctaggaagctgtccatgttcttctctgacaccacgcactgttcatactattcgatcttcagatccggattctcactattcatccgggtctcactccatcgaggctgttttcttctgcaaggtggttgattccacagaccatttattggaccatgctgattcgcatctagtcaatatataagcccatattacatgtatagtgtatgtgccgtactgagaacaactacagcaattaatggagcagtcgattaatcttgaagtttacttcaaacgccatagctcagatacatgtaattgaattggggat

SEQ ID NO: 52321 - DNA, 652 bp, Gossypium hirsutum
  unsure (1)..(652): unsure at all n locations
  Clone ID: uC-gsronu33B012g07b1
gtgatatcctctgaattggatcctgatgtcctaactaaagacaatgatgaagtgcaaaagcagaatctaaatatggaaactgtggacaaggatgaaactgagttttgaaaaaaagataggtgcggcttatatggccttccatcgaattgattagccaagccattacaattgaattgttgagttcccaagtggcataagtaggatcagccatggttggtcgtgggatttctccattgatgtaccctaatttgccacgaccacgaatcaccataagaaccgattgagaccattgcaagaagttcttcccatttagccgatgattggtgattataagggaggaattaatttcaccttgagtgattccctgattgatattctgagttatttgtgatgtctcagtttcagagaaattctcattgatatcacccattggaggactaaaccacagaaatttttagttagggaatctagagaaaaaattaggattcgatgaatnctataaccctgatgccatgtaaaaacactcagaggaaaattctggtatattgctactgcttagttacagcttataagagaaaatatcatttaaaggaattaatctaatcctagaatcagtatgatatctaattctaagatagtactgagatagtct

SEQ ID NO: 52322 - DNA, 408 bp, Gossypium hirsutum
  Clone ID: uC-gsronu33B012g09b1
tttcgtccgttagtaaaaaccctgattctattccctttgttttcatcggagctaatacaattctaaggactagattctctaggtggaagagacgcgatgtgcaatttgactgttccaatttacttttcaatgttcaattaaaaccctagcctcttacttttgcttctattaatcctgaggcactttgatatttttattgtctttttttccttttgccatctcttttgcttattatttattcttcaattctccttcggttggtatcctaatgtagaaatatgatttccattttgttgaggggtcgttcgttattttgcccttttttgttcttctacaccgcaaattcgaacgctcttcccttttatttatttaattccctttggaaaaataaaatttttaactttgttt

SEQ ID NO: 52323 - DNA, 397 bp, Gossypium hirsutum
  Clone ID: uC-gsronu33B012h08b1
tcgttcacgcgtccgcccacgcgtccgggagcatgcagtgactgtactttggagcgtttgttgtttgtttagagaggagaaagcgcaagaagcagtggtgggttgtagtaacgggctgaccaagtttttgttgctgatgcaaagcgattgttcttcagccactaggcaaatgtcggcggatttgctaaagctttctcggttaaattccaactcttgtttgtcaagttacgatactaagactacccatattatgccctgttgatgaattttgcttcagctttctctgttctttttttttccttcgaaggggggaaattacccaaatgttgtaaatcgttagaaaattttgttagatcaaattacccaagaatattgaatgaatcaatttggttttcgt

SEQ ID NO: 52324 - DNA, 241 bp, Gossypium hirsutum
  Clone ID: uC-gsronu33B014a06b1
ctcgctttgctaggatgacgtgagggaataacctaagctttgcttcaacaggacctggctgctctgtggcgcctctatcgtggcctctacgcccgttttggtgggaggcatggtgaaagccgcgaaggcgtgaggccatttgaaggccgtgttataaacaccgaatatttcagtaggggtgctgactattagtgcgaggcaaggaagagatactccagctaatgggacgtccaccactgga

SEQ ID NO: 52325 - DNA, 336 bp, Gossypium hirsutum
  Clone ID: uC-gsronu33B014a12b1
acgcgtccgcccacgcgtgttttaatttccaatgactcagacccaaaaattttagaaccttgaaggactcgacctgaaatttttagggcactgcccccaaatttagaagttaaattgttgtgggtactgaattttgtagagattgtaagttaggcttaaataaatgctaagattttgaatttttattttattttatttagagataaatatcgaatttatgtttaatatgtaatttgacatttaaactttaatttggtacaattatatgctttgaaacttaaattatggtttatatatggaaatgaaaatttgattttgattcagttgtagatattt

SEQ ID NO: 52326 - DNA, 282 bp, Gossypium hirsutum
  Clone ID: uC-gsronu33B014b11b1
gttctcttttcagtgccggcaatgctggtggcactggccaactgccaggaatcgttgaagccattggtgaagatggtaaagggcatgaagctgtttgacaaagggtggcagtgctatggcatgcatgtgatgcttcactgctgctggacttcacaagaaggagcttgtctgactatggatacagactggagcttttggcctaaggaattttctggtacacttgagactcatctaagaagcttgttgaaagggattgtcctggagtttgtttttgtgctgata

SEQ ID NO: 52327 - DNA, 159 bp, Gossypium hirsutum
  unsure (1)..(159): unsure at all n locations
  Clone ID: uC-gsronu33B014c09b1
cgaggaacttgctggctgggatgaatagaccagacccgcggtgcactcgaaaaagatgctncctatcaatcgattgtctctaaattatcatatggagacagtcaaaagcttgacaaagcatgttacgaggaggaagtgaaaaggccttgcttagctttc

SEQ ID NO: 52328 - DNA, 134 bp, Gossypium hirsutum
  unsure (1)..(134): unsure at all n locations
  Clone ID: uC-gsronu33B014d09b1
tcttcgaaggatcttcgannaactcgggtcggaaacggtcggggacttaccacagggagatgctgacgtgggtgtctgtttggaggccatggagacaacggtttcagatgatttccttacccggaggaaccgtg

SEQ ID NO: 52329 - DNA, 245 bp, Gossypium hirsutum
  Clone ID: uC-gsronu33B014e05b1
ctccccctcaggccagcaagacactagaggatgaaacgcacggtgacatcataaaaaggggaaacttggttcgcaataaggaacgatctgttaaaagaaggcagcgccttgtggggccaaattcttcgactttgaaggcacttgaaatattgacaagctgctacattcttgttcagggaaacactgttgctgctatgggttcatttaaaggtttgaaacaagtcaggaggattgttgaggacctg

SEQ ID NO: 52330 - DNA, 402 bp, Gossypium hirsutum
  unsure (1)..(402): unsure at all n locations
  Clone ID: uC-gsronu33B014f12b1
taatcaagttcagttggnggaaggtaagatggagaacaagcgttgcatgccaangaaaggaagtatgaatccttggattgatatgaaggcaatgtcaatgagcacctgatgatgcacatgggttattgcggacggcccaagcccatgggctacgattcgtgggacgtcgacctggaaaggagggatatgatggtcttctagaacctctcttcctccgattgatcccttcttagttttcttcttggaaactcggtcgatgtttgtgcgagaccatttttgtagggctctatgatactctgcaatgccgaggatgactaaagagcagatgaactccgagtgttttcctttttcatggaaatggtaagcatgaacttttgaaatgttgctctttttgacacactt

SEQ ID NO: 52331 - DNA, 172 bp, Gossypium hirsutum
  Clone ID: uC-gsronu33B015a04b1
gttctagatcgcgagcgccgccctttcctttttatcatttttctctatttataaatattcaatccttcggtgttagcttatgcttattatcaggatgcactgatttttcacattgcgtgcagtgtaaatctctttaagaatttagataattgattccttagtgtcgtttctt

SEQ ID NO: 52332 - DNA, 485 bp, Gossypium hirsutum
  Clone ID: uC-gsronu33B015b06b1
ggaagagcaattgctgtcaagcaattgtctgcagtatcccggcaaggcaagagccagtttgttacagaaattgccactatatctgctgtgcaacaccgtaaccttgtcaaactatatggttgctgcattgaggctgaacaacgtctcctcgtttatgaatttctggaaaacaagagtctagatcaaatattgtttggaaaaagtttggatctcaactggacaacacgctatgatatatgcttgggagtagcacgcggtttagcttatcttcatgaagaatcaagggttcgcattgtgcacagagatgtcaagtccagtaatattttgcttgattctgatctcaccccaaaaatctccgattttcggtctagccaaactttacgatgataagaagacccacataagtacccgtgttgcagggacaattggatatcttgcaccagagtatgccatgcgtgggcaccttacagagaaagactgatgtg

SEQ ID NO: 52333 - DNA, 417 bp, Gossypium hirsutum
  Clone ID: uC-gsronu33B015c06b1
cccacgcgttcgcccacgcgtccgaactgctccatcctctcctctgtttttcaagccgaactccccccttccaacttcgatttagacgaagagaattaaagatgtcgacggcgcgcctcttttggatgaacatgcatgatggatgcgaggaatcgctgaacgtggggtgatggggccgttgctgcagatggagaacgtgcgagcggcgcgatctgcagtttatgcttccattgctgttgaaaacatgttgtgggctagggttaactttgggccattagggccaaatgtatttggtttattgggctgtgcaaatggttttgggccccgggcaacaattgggtatcacatatcatacacgtggattttcacgtagcatttaattattttttaatttaaaaataattttatatttttaaa

SEQ ID NO: 52334 - DNA, 107 bp, Gossypium hirsutum
  Clone ID: uC-gsronu33B015c09b1
atattgatcagaggcgtgactacaccaccaaccaccatgacccctcccccagccatgactccaatgtcagcacccgcaccgtcaattcccatggcttctaccccttc

SEQ ID NO: 52335 - DNA, 583 bp, Gossypium hirsutum
  unsure (1)..(583): unsure at all n locations
  Clone ID: uC-gsronu33B015d04b1
gacatcatgctatctttgctgaacattcttcttctgctactcatccatgccaatatatagcttactttgggccaacgattcatccctcttcctcaaattccagtggaagtatttcagatagttctagcttcaacggtcactggaatggtccatctgtgcctagtgagatacctccatcttatgcttttcctgcaatgaatctccattatcaaggttgggagcaccattcccctccattctctacatctaaccgtcgaattggtggttccggtcaaccttcaattccacctgtcagtcaaaggtctgccaggaacagttcagatatgccaagtctgggaacttttatgcatccatttgttgctagccacagttctggtactagaatagcaagtgcagttgcttcctcatttatccctccttaccctggtagcaatgcccgggctcgtgatagagttcaagctctccaggcatattatcaacaccaccaccctagcaccttgccagcattacggacacccatngtttctggctcccgaggctgggcagccatagaagtcatggtcatggtcatggacatggtcat

SEQ ID NO: 52336 - DNA, 388 bp, Gossypium hirsutum
  Clone ID: uC-gsronu33B015e06b1
cccattcgttcgctcttcatatggggcttcaataaaaacaaaaaaaaaaaaacacggaaagccgcataggatcttgctactgatttacataggatattactgtctcataaataagttagatgtgttgtctgtatggggtttttgttttctttattaccttctgtcttaaaacttttttatcagtttactaccatgatgatgtttggtaggcatctgattgtgagtgttttgttgggtacatatggtttgtattgaaatgggaactcatttgtcagttaatgcatcttgttggttatacccatgtgaggtatagacccacagtagttaatggatgatgatgatgatgtttaaaaaaaaaaaaaaagcccataaaaattctaataagttg

SEQ ID NO: 52337 - DNA, 505 bp, Gossypium hirsutum
  unsure (1)..(505): unsure at all n locations
  Clone ID: uC-gsronu33B015e07b1
tccactcgtccgcccacgcgtccgagatgttgaaggcactgatggtggtgatggtagtagtggagaaggtgtcatagattttcatttgcctcttgatgatgacgtagaacaaaacaactccggtggcggcgaagagtgggattgtaactttcagaacttggaaccgccgcctgctaatgttctcgccggcatgtcttccggattttctggtgattttttcaatgatagttcgccgaaatgccttacgggttcttgtgatggatcttctcagctaaaccagtggtcgagcgttacagaagcatcctccggcagaagtgttaccctacacagtgagtccaccggtgtcaaaggttcaatccggttccagacctccagtcctgtatctgtgcttgaagcagtagtacttgctctgctgcaaacccggtacctattaaccctnaactcggtttcctggtgaaacgaggtcgaagcaagcgcagacgagcatctgcctttaatgtgcact

SEQ ID NO: 52338 - DNA, 565 bp, Gossypium hirsutum
  Clone ID: uC-gsronu33B015f02b1
gttcactgttgcatcctcaaagtaattatagacagattcactgttgagctgacttctcgatcttctgatttgattgatcatcataatcgttataaaaagccgaaagatttacattatgacaacgaagccgagcttaaagatattcgcaaagaagaggatgccaaaaagagaaactctcgtcagagaacatacatgaaacgaattatcgttcatccttctttccataacattgatttccgcaaagcagaaaagattctttctgatggtgaacaaggcgaagccattataagaccttcttcgaaaggcaacgatcatcttactctgtcctggaaggtctatgatggtattcatcagcatgtggacattcgggaagaaggcaaaaacaacgtcttttcacttggacagcaattatttattggcaatgaaacttttgaagatcttgatgaaataattgctcgatacgtgcagccgatggctggattcgctcgtgatatgactagctttcagtattttcgcgatctaaatggtgaccgttcagcggcttgaaggttattaatgatgaaaa

SEQ ID NO: 52339 - DNA, 198 bp, Gossypium hirsutum
  Clone ID: uC-gsronu33B015g01b1
gttaatgcttgagtgaagagttacatttccatattgacccaaataatcagaagtttagaggtgttgtatttgaatatttagttttctgtgcagcataaataggaaatagttaaatgtaacaaggtgttttactagaagtacacgcttacagctttgagtactgattatttttgcaatttttatacgcttttctcagat

SEQ ID NO: 52340 - DNA, 523 bp, Gossypium hirsutum
  unsure (1)..(523): unsure at all n locations
  Clone ID: uC-gsronu33B015g11b1
tgaatgcacaatcagggggttcttgcattgatgaactgacagcaatagctaaacttcacagtgctgaacttctcaaaaccctggttaagttacagagccagcttgaagggttcaaatatgcttattacaatttgtatcagtcttttactgaaaggttgaacaacccttcaaaatatggtttcaaagatgcaacgacagcatgttgcggctctggtccgtacggaggagtttatagctgtggagggaagagaggatagaggtgtatgaactatgtgataaacctggtgatcatttcttctttgattcatatcatccctcggaaaaggcctaccggcaatttgcggagttaatgtgggctggcaatactgatatcgtttggccttacaatcttaaaatgctatttcaagacaatgcattttacccgtagaataacttttttttttatttcgtattaattccaaaaataagatatcgngtattcgtataattatattatataaaatgtcttacttcaatattttaa

SEQ ID NO: 52341 - DNA, 151 bp, Gossypium hirsutum
  Clone ID: uC-gsronu33B016a06b1
gcagtatctacattctcttttgctttgagccttgctattctctcaatctgggccggtgatgctggtcaccaccatgcgacagggccatccccttcttcttcttaaaaccccccttcctccaccgcggactggtcgactctgatactgaaca

SEQ ID NO: 52342 - DNA, 507 bp, Gossypium hirsutum
  Clone ID: uC-gsronu33B016b02b1
gggattagccctgaattttgttagttccattttgatcttgtattcatagtgtagtcctgttaataatatttccagggtttgttttgtaaattgacttgtactcggttttgggatgtcctgtggattggttggtttctccaatgtggttcccaacactgatacaacatgatttgagctttgtaagcttcgatgcagtttgcaaagacaaatccttggcctgcaatacaacagatgaagggttaggtttagttccagtctgatttgctattagaattgaggccccatattatcctgtcctcacctccatgcatagatcaaccagcaagattaagcataggtctatgtgagacattaaccacattgtttgagttgtcaacttgacaattaacacgtttgccactggtagagaacttcctaacccagcgaggtatttcagcttcagaaaaaaggaatcatattgttttcattctagcagtttgaccactccaaaactgccgtttatacctt

SEQ ID NO: 52343 - DNA, 198 bp, Gossypium hirsutum
  Clone ID: uC-gsronu33B016d02b1
gaaagggcctggtaacactgcagtttggtgaagcgttagattcttggaagaacttgaccactaatagagagatagaacgggactcactggaaaagtcgaaagaactttgtagtcactctccaagcttttccctaaaaacaaagggcgggggacaccaattgcactggtctgcggaacaccagaaaccgcacccccgga

SEQ ID NO: 52344 - DNA, 155 bp, Gossypium hirsutum
  Clone ID: uC-gsronu33B016d04b1
cccacgcgttcgtgtgaaggagctttgtgtctgtaaacagaatagaatgttgttttccagtttatctcatcatgtttgtgattggattgatgctattgggatggtttatttaatgtaataaatatttcaccatgaaatcctagttatttttactt

SEQ ID NO: 52345 - DNA, 425 bp, Gossypium hirsutum
  Clone ID: uC-gsronu33B016d12b1
tagggtttcaagctgatatagctgtatttaatcagatgggggaaatattgtgtgaaacttatcatactgagaaagcaaagatgcttatgaacataatgattaaaaggggtatatgcccgaagatggtaagcttcacatctgcaatcagctaatagtgcaggagtggggatgctgcgtcatgagactcataatgttactcagtgacttggaacttatttgatttggctgagcatttttgtatcagatgcatctaagtgctccaacgccaatatatacaatgttaacgtatgattcgcgtcttgaattgacatcctagatgatgtagttcacccgcctaattgtttatgcaataagatttgaatttcaatttcctcctaatataatggacaagcagaattcaccaatttattgcgtttaagtgcttg

SEQ ID NO: 52346 - DNA, 538 bp, Gossypium hirsutum
  Clone ID: uC-gsronu33B016e02b1
ggcgtagatcttaggactttggtcattaaagaggctgttcgtgttactgaagcttttactctatgcacatttgttgatacatacaactccgtaccttcttttatgcgtagtctaatattcaatggaaatggagcgctggcgatgagcagtgctgaattgcaaagcatgatggagctccgggaccaagtctttcgaatctgggggcttctacggtcgtcagaaaactttgatccagcacttttgcagcctattttacaaatccttcaacaacccgaggcacgcagtctaggtggccgtgtagttggtgggatcactcagcgtctggcagctcgcttactgcaacaagttcttcgaatgccaatggctcctacttcaagtttatcagcattggacactcggtgagcaaacctgaaaatagacaaccattctttttttctcctgttagttattcaactaaaaggaataacattagagagattatagcaaaaagaatacccctttggggagtgtatcatctcatcgaatgaaaacagaagct

SEQ ID NO: 52347 - DNA, 270 bp, Gossypium hirsutum
  unsure (1)..(270): unsure at all n locations
  Clone ID: uC-gsronu33B016f08b1
ttaattttaaataaaaaaaaacaaaaaaaaaaaaggacgaccagatatagagagtaacaagattaacgttacggtgcgggcgggcttgcggttctcttgtctagtgccccctactttccgnttggctgggccgccatttgccctctcccttggctggttaccccctggttggtccccgcgttctggcctgggagtaccttcccctttccccagttggcgtcatagtggtttggcccgttccgctcgccctccctatcggttgctcggcct

SEQ ID NO: 52348 - DNA, 502 bp, Gossypium hirsutum
  Clone ID: uC-gsronu33B016g01b1
gtgagtatatcttctaatctgttaagctcttgttttgcatctacattaattctgttacactagtgaaggaaccattgaattgtgtaattctttttgacataactaatctataacagctaaatttacaaggaaaaagacctttgaggaaatataaatctcccactgctgagttgtttttggttttggtgtgtcttattgttgtcattcttgcaattgtctgtcctaactcttaggtctttcaccatcacaacagagaatgactttctaagaaggttttgttaagtgaatttagggaatatcactgctattttcaccttgctcccccaatgtgtactatacaatcgaatatgatgatgtggtttgatttactagtgaagttacttgtgcatgtgtcttgttacaggataatcattcctaggcactgtaatgaatattttacttaataagttccctctttttcttatatataaaaaatacaaatttaactatttaattatagaat

SEQ ID NO: 52349 - DNA, 499 bp, Gossypium hirsutum
  Clone ID: uC-gsronu33B016g07b1
ttccactcgtccgcccacgcgtccgcggacgcgtggggaagtatttcaaggacccggcttcgtggacgagaaagaatagaagaaagggcatgcccgacccgagctactaggccagggcctgaggagaggaactatttcaagcaaggatgctatgacctcagacttgagaccgattcaaagatataggaatgaatgaatccaatgtcatctataccgtgtttttgggctgtcataatgtgacagtttcgacttctgtcgcctctgtctattccgtttagggaatgggcttattcattccgatttctgtaaatacttctgtgtaaatatctcccccagcctcggtctaaaaagctcatgccttcttgcttgctgagcccggtgcgaagcccgttcgttcctttctttctttgtcgggtcaaggagaatcgcttggttggtttcttagcttgcttattccacttttttagtgggaggactttcatcagtgcagcatgtgggc

SEQ ID NO: 52350 - DNA, 461 bp, Gossypium hirsutum
  Clone ID: uC-gsronu33B016h10b1
ttcatttgaaatcgcagggcttttttaacctctgcatctctatttagaaccctgagtattctttcataatgtctgataatatggcatctgaagccagacttctccttcaaacacagatcaaagatcatcgtaagaatccgggggatgggttctcggacgaatcgatggacgaaaacaacaactctgaatggagtgttacagaaataggaccacctgatactgtgtatgaaaggcgattgttcaatgacatgatgagcatgacgcccaaacatccaaacaggcatccaacagagagaatgacatcagaaaatttggcatcctaatagatatactgacggacgtggacgcatatcaattcttgatactccaggtgatgatccaaatggccaccagcttgcatgggagcgctggatgccagtccatacagtcaaaaggatagcattgagtttcatatcaatgct

SEQ ID NO: 52351 - DNA, 271 bp, Gossypium hirsutum
  unsure (1)..(271): unsure at all n locations
  Clone ID: uC-gsronu33B017b05b1
ngtgctccttgtacgttggacgaagactgcctacgtattgattatagcacaggcatgcgcacatcttcaagcaataccacgtttgggaaagagggtaacaaattctagctagtgcagcatgagactcaaagctccacgtgagatattatgtgcagagaggactataatgagtgcgctccattgctcaggggcctgaggaaaacaaaggatatataggaggtggaagtcagcaggcgtccgcctcgaagagggtcgggacactgaggtccca

SEQ ID NO: 52352 - DNA, 261 bp, Gossypium hirsutum
  Clone ID: uC-gsronu33B017b09b1
ttctcaagctgtagtggattgacaaaaagaaaaggttgtaattacttggttaagtatcagagacatgatggaagtacaaatgatttacaccatttgatcatctaatttatcattttctattcatgatttctgttggtaactggatttaggttagttttcatgattgtagttgatccctcatttgggttttagacaatatatatataggttgtcaaaagcacattgattcagtgattgagtttccatctattggattcaaaa

SEQ ID NO: 52353 - DNA, 360 bp, Gossypium hirsutum
  Clone ID: uC-gsronu33B017c05b1
gtttttcctaacctaagactaccaacttgacactcattctaatatgacaacccgcttaagaagaaccgcaagaagcgcggccactacagcgctggtcacggacgtatcggtaagcatattgaagcatcctggaggtcgcggaaacgccggaggcatgcaccaccacaggatcctatttgacaaatatgaccctgggtatttcggtaaagtcggtatgaggtactttcacaagctccgtaacacgttttactgacccattgtcaacattggcatgctctggccgtttgtgccacatgacgcgaatgcaaaagccaaccaggacgctgtgcctatgatcgacgtgacccattttgggtactt

SEQ ID NO: 52354 - DNA, 408 bp, Gossypium hirsutum
  Clone ID: uC-gsronu33B017c08b1
ttcttctctccatactaacttgtacattaggcgagatggcttcaaaaagaacagcatcgattgccctcttctctgccctgaacggtctctgttttactctagccaagtgctagcggttcttgcccttcccccaacccaaaaccaaagcctactccttaccgatgccccttcaggcaaacgcccccaagatacccttaagttaggtgcccgcgctgaggagctcggcccagccaaagtaaccggtggctacgcccccagtgcaaccatgctgttcccttttccaaggccttgctgatcttgaagctgaaggtcgtctttgcacagtactcatagctaacgtttcgagcatgacccttaatattccagggttcccctcagcttgtttctaaacgtctgctcaaagaaaga

SEQ ID NO: 52355 - DNA, 267 bp, Gossypium hirsutum
  Clone ID: uC-gsronu33B017d05b1
gatggtcctgtgacaacgcactgcggatctgccggacgagtatttcatggatgaggcgggggatataataacggaggaagccttgccaacgtaccagaccattgatcaatacactttattggggtgagggatgacactggggctagctacaaaccctgggtaatttgtactctggctagtactgttgaggaaaacaaacatggggattttttgaagactttcttgtatttatcagagagggttgatatgcttatgatcgagaggact

SEQ ID NO: 52356 - DNA, 311 bp, Gossypium hirsutum
  Clone ID: uC-gsronu33B017d06b1
gccctggtctgatcaaatttcatattagaggaggtgtttggtaagaaagcatgtccggagctcccgccagggttggtcccactgacgggaactttgcaggaaccaagcctacccccaatgtaatggtggctcaagaaggggttggaatgtcttgaccattaatgacgcggtgcacatggtaggaaataaagaatgaatcaagggtcgttatatatgagaaaaaaggcacgcatgttgagaatgtgactcttgataaacacatgaggaatgggatgatttacggtgactggcaaacaaatactttaattccc

SEQ ID NO: 52357 - DNA, 531 bp, Gossypium hirsutum
  Clone ID: uC-gsronu33B017d11b1
gttttatagtaaaagttttaagagctaagatctttaggaaaagaaggaaagcgtccaaatggcaaagcattcagctgaagttgttgttgaaggattaaagaagattctcctcaatgtccaagaagagctggatgagaaggttcaaagcaaagttgagaagcttatcgccgagctccaaggcagagagcatcatcatcgtcatcatcccccttgtgaccatgatgctcaaaggcttgacgatggctttcacttcttcaagacccacatatttgacaaacaccgagaatgtttcaatgaacttgcaaaagctcagcatccaaagttcttggtgtttgcatgctcggattcacgagtaagcccttcagtcgttttgaatttcaaaccgggagaagccttcgtcggccgcaatattgctaatatggttcctcattttgatcgggtgagacacacttgaattggtttaatcatcgagtatgcagttaaagtcttgaggtggacacatatcgatatgggacatatcgttgggtggca

SEQ ID NO: 52358 - DNA, 276 bp, Gossypium hirsutum
  Clone ID: uC-gsronu33B017e04b1
aatagtcctgcggcaacttatcgaaagaggggaaatgagatatgtttcaccgacaaaggatcttgctaacaggcccatttgtatattctctgctgaatatgtgatagttatacgacacctctatactttttttttgttgacttgaattgcacgaaactataaaatgaacagagtgcagtgtgatgtatagcaattaaatcatggatttccattgtaaattgaataggggcataatcttcttattgcttttgttaaggatccatatattaaacccat

SEQ ID NO: 52359 - DNA, 222 bp, Gossypium hirsutum
  Clone ID: uC-gsronu33B017e05b1
ctttgttccgcgagatacagttgccttgggagaagaaggtggcctggtgcaccacaacgtgagctgctaacacccttcttgtgagattgttaatgccttattgctcaagaaattgaagctacgcattgctatcattggtcgaacaatatatacacggtgtggaaagagaaattcagtgtccttgccgggacagtcttcgtacccaacaacaacatgtgacat

SEQ ID NO: 52360 - DNA, 177 bp, Gossypium hirsutum
  Clone ID: uC-gsronu33B017e07b1
ttctctcttactgtagatgtagtagccagttgatggattggataaaggaacaagggccaacgtagttttttgggtaagtgcaccgtggagattagaataggtaagaaccttccagtggctctaaacgcttaaagaatgaatactgtgaatagatgtttgtttagatagagaaataca

SEQ ID NO: 52361 - DNA, 329 bp, Gossypium hirsutum
  Clone ID: uC-gsronu33B017g08b1
cttcatgaggaaagatgttatggccaagtgtgctcatttggcccaatttgatgaggaactttacaaggtgaccggtgaaggtgatgacaagtatcttattgcaactgctgaacagccactctgttcttaccacgtggatgattggatccaatcgtctgagctacctataagatatgctgtatattcatattgttcacgcaaagaagctggttcacatggtattgatgctcctggaaggtttcgggctcatcaatttgagaaagtggagtaattgtgcattaacagtccaaatggtaatgagttctgggacatgcttgaggaagtgatta

SEQ ID NO: 52362 - DNA, 452 bp, Gossypium hirsutum
  Clone ID: uC-gsronu33B018b02b1
gcccgtgcgtgccccgccgcggaattcggggggagccacacgcgcgcgcactcgcgcgcccacaggtgcggctgaaatgatggatgtttgatagagagagacatatgggatccacaggttaccgacccgtggcaacagctcgagcgattcaaagctgcattcattagagaagattccgattcatgctccactctcattgatgagactaaggttttgatgacacagtgaaggagctcttctacggtattagaaaacacccgtggatggggtcacgaaatgctcttagaatgggaacatgacgaacatgctgcatgcctcagtgttaagatcgaagatcaagatgcctttgagagggactttctccagttgaagcccttttataccgatgctggcagccgcatttcaccatccgaggaagagtacctgtttctaggccttaatcttttgagact

SEQ ID NO: 52363 - DNA, 450 bp, Gossypium hirsutum
  Clone ID: uC-gsronu33B018c08b1
atctcaagtaaaaaggtagaagatgcaaagctggctagagattttcagaacacgctccaagagttccagaaagttcagcaactggcctctgaacgcgagtctacttactctcctgcaccccctccaccctccttgcccgcaacgtatcagtctttcacatttaacaccatctatgtatatgtatgtatgtatgtatttgaggtcttttatagattggatgctttcgatgcagcagctctggctccgatgagtcgttgcctcaagagaaacaacgtttacttatggaacagagaaggtgagttcagttcatcgtttccttttctcccccaaacccttttgtcacttttcctttttcctcacctgtcatgcatagaacatcaatagctttaaacccatccttgaaatgattgtacttgattaaccattagttatatttttggcttactcttt

SEQ ID NO: 52364 - DNA, 150 bp, Gossypium hirsutum
  Clone ID: uC-gsronu33B018c10b1
cgcgtttttatcagctgagaccagaggaacccagatgacactaatgaataaccctgttcttttgccccacatgaacctgcatgatgccaaattgggtggatattatatccctgctgatagcaaaaatctaggtgaaagcatggaggcttg

SEQ ID NO: 52365 - DNA, 482 bp, Gossypium hirsutum
  Clone ID: uC-gsronu33B018d07b1
cccacgcgtccgcccacgcgtccgattcgcaagagtcttccctcctcttttggctactccatacctgccgcctcctacaattctatctccttttccataaagattcaatattgaagcctgcgccatcttggatcttacatttactttgtcggtggcggatcaaaaaccccaaaatttgcttaaagatctagctgtagctgttagatctttgaaatccctgtgttctcttttttttttttctgaatctgggtctttctctgatctgtaatgggtttgagatataaggctggcttgttcttgataggtaccgttgttgttatttgggtaacttctgcagaagtaacccaggatatctttgctgactataagcagccatttgcggttacatatcttggagcttctcttatggtaatttaccttccaatagcctttaaaaggattgggtatgtaacttgctaagacgtcgttcttctaaactgtta

SEQ ID NO: 52366 - DNA, 529 bp, Gossypium hirsutum
  unsure (1)..(529): unsure at all n locations
  Clone ID: uC-gsronu33B018d11b1
tgtattttctggatctaaggaaaaaatatggatctgtactagctatcgatcttgtcaacacgactggaggtgagggacgcttaagtgaaaagtttgcaagtgcagtgcaacctatacttagtgacgatttaagatatattcactttgatttccataagatctgaggacatgttcattttgagcgcctttcgatcctgtatgatcaaattgcagattttcttgacaaaaatgggtacctcttgttgaacgacaagggtgagaaaatgaaagagcaacttggagttgtaaggactaattgtattgattgcttagaccgcaccaatgttacacagagcatgataggtaggaaaatgttggaactccagcttaggagaattggtgtttttgctgctgaagaaaccattagctcacacacaaatcttgatgaaaagtataaaatattgtgggctaatcatgnggatgacgtaagcatacaatattctggcacttctgcactgaaaggagaatttgtcccgtatggaagcgaact

SEQ ID NO: 52367 - DNA, 556 bp, Gossypium hirsutum
  Clone ID: uC-gsronu33B018f01b1
gggttttacaacctagtgataaatttctcatttttgcatcggatggactttgggaacatttgacgaatcagcaggccgtcgagattgtttccaactctccacgagcaggaattgcaagaaggcttattaaaacagctttaaacgaggcggctaggaaaagggagatgagatatgatgacctgaagaaggtagataaagggataaggcggtttttccatgatgatattacggttgttgtcatctttatagaccaggagtcgctgagtacgaagatgcctgttccggagcagtccgtaaaggggttcgctgactccattggaccatcaaacttcaacattctttaagtcttgagatgtaaatcaggaaatgcaagcacatgtggtctatcatcatctgaattaatagcttgccacttcaaataaacagtggggtttctgtatggattttacttcctttttttctttctccttaccaagcaagaaaagtttgaactaattttgattttactagtatcactttgattcccaactttatgatgataaccccctttttagag

SEQ ID NO: 52368 - DNA, 216 bp, Gossypium hirsutum
  Clone ID: uC-gsronu33B018g09b1
cgttcagactttattatgaaatctagggtacttaacatgaagtgctgagagaccttgctcttcatttgaacagatcaggggatgggaacctacgagagcggctgcttatatctagtaaagatactgaattatctagacaatgagaatgatacacactccgatccttcagtggatacataggctcaggacatacaggctaaatccggggaatgcact

SEQ ID NO: 52369 - DNA, 277 bp, Gossypium hirsutum
  Clone ID: uC-gsronu33B018h04b1
gtgtctggcggaacagtcaacttggacatcaagtacgacggcttcatcactgttgttaagaagactgaggacatctgctccatcggaaatggtgtgacctgccccatcccctctggctcctactctgagcaaatcaccgagatgatcccatcttccgtcccctctggctcctactccggccaagtgaccctcatggaccagaacaaccaagagatcacctgcatcaacctcgccttcaagctgtaattgttgtgtttctattctattgtgccactat

SEQ ID NO: 52370 - DNA, 367 bp, Gossypium hirsutum
  Clone ID: uC-gsronu33B018h06b1
cgcgcatattaacacctacaagaaagcaaaccacaaaggagggctttttaaagagacccacattcaaagacaaaagaagaaagagaagaaagacagggtacggggggctatgtttaccggtccaccgtttcctttcattgacatgccagaacttaagttatgtattgtgtacccaaacctcatagctggggccatagtcactcaactctggctctgtgaaacccctggtgctgccaaagttaacaggatacaacaagatgcccgttatggcggtgggcttttgggcaaagggggcgctaccggtggccttttccaaaagctgggaaactggactggcgaaagggacggcccctgcattgacccttta

SEQ ID NO: 52371 - DNA, 381 bp, Gossypium hirsutum
  Clone ID: uC-gsronu33B018h12b1
tctacgcgtccgaaagttaggaaaaggtattcgcatgttgacaaataaatgtcttttcttttttgcaccttttaatcaaataatttcgcataaaaaaaaaaaaaaaaaaaaaaaaaaaaataaaaaaaaaaaaaaaaaaaaaaaaaaaaaaaaaaaaaaaaaaaaaaaaaaaaaaaaaaaaaaaaaaaaaaaaaaaaaaaaaggggcggccgttataagggatcaaagttatctaacccgggaatgcaaaagaaaattttttttaaggggcccccaaaataaaaaaaatggcccccgttttaaaaaccccagaattggaaaaacccgggcttaaccaaaaaaaattcttttgaagaaaaaccccttttcccaagttgggcg

SEQ ID NO: 52372 - DNA, 500 bp, Gossypium hirsutum
  Clone ID: uC-gsronu33B019a04b1
ccctcgcgtccgaaatgggatgaagctatgtattatgtgctgggagatccaactatgaagccaaaagggtatgacccaatgacggaagctgtgttgctgtgggaaagagacaaatctgctactaagacaagatacaatcttaccccttttgcaatatccttaaatgaattaactcctgatttattggaaaaattgcctccaacggactcaagactgaggccagaccagagacacttggagaacggagaatatgaaatggcaaatgcggagaagctgcggttggaacagttacagagacaggcaaggaaattacaagaaagaggatggcagccaagatggtttaacaaggatgaagatggttgttatcgatacattggaggatactgggaagcaagagagaaaaggaaatgggatggaatccctgatatattcggccagtgtagcggtagtagtcataattcaccttcatgtttgatcgaagagtgagtaagctatatttt

SEQ ID NO: 52373 - DNA, 174 bp, Gossypium hirsutum
  Clone ID: uC-gsronu33B019a08b1
ccctcgcgtccgttctaattctttttcgtggaggggtttttttgtacttacaaatttatccaatgtaaaatctgtgtattcaaggtgcaaaagatcttaaagccaaaatgcaccgacatttgtaagatacaatattttaatcaaattaatgctaattgagcagctttcattttc

SEQ ID NO: 52374 - DNA, 616 bp, Gossypium hirsutum
  Clone ID: uC-gsronu33B019b11b1
ttcacgcgtccgcccacgcgtccgaacttttgccatgttgtttccaagcatgatatcatgccaaggctacttttagcagagattgtaaaccacattcctcatatacaagccctgctgcagttctggcactgctgcatggcttctcctcacctccctgttgcaggcctttcttctcaagtgcccagtgatctaaaacgtttactttttcttagtgttttaaaggacttggaattgttaacccaagctgacgatccatcagagagcctgttttggcctttcgggagctatgttttctgctgccaagagggtgccatttgtgtagagaatgttgcatcagttatgaagatgttgcatttgatgatggccactggctcaccgaaccaaagcattgaggatcatctcaagtatggagattatgttgccaaagtttctagacagtttttgcaggctagaaactttgaagaggggatacctgattctagctatgaagctggtgtcgccttggcattgcaatcatcagacctaaccgacaaggaaccagttgtggttatgggcaaggagtgcctgcaaaggctcacacagtgatagccaaacctgatgctgcaacctgcaataa

SEQ ID NO: 52375 - DNA, 425 bp, Gossypium hirsutum
  Clone ID: uC-gsronu33B019c02b1
ctttctttcatcggcttctcaggggaggaaagatcaacagaggtggaaaacgaggccgagatggagaaaatggttctcctagaggacgtcctaatgaagctaaaagagctcgagcagcgtgagccagccatgagggtgatcgataaacttgaaataggttttgagatcatttttgtgccatagcttgaggaatgaactgtggctcttgtttatttataggtttaggttaaccataagtagtagtacatttcatgggtaaattaagcttgtgctgcttttgattcccttggattttgatgaggggggacaattaaaaagatgcaattgctctcaagcaatggaacattttcttggggatataagtgtgttaatttccacgtggatttattggtttatggatattaaaattgaaaattttacgtggc

SEQ ID NO: 52376 - DNA, 523 bp, Gossypium hirsutum
  unsure (1)..(523): unsure at all n locations
  Clone ID: uC-gsronu33B019d03b1
ccctctcgtccgcccacgcgtccggttcaaccttgaaaccaatgtctcttcttcctcaaacactaacccttttagccttttcacatatagtaataatcctatcaaatgcggaaaccacttccgattatagtacctttatattcaaaaactgcaccaccaacacatttacagattcaaccaagttccattccgaaaccctttcgacctttttcgaagaacttgtatccaaatcttcccaagagaagttctacaaaactaccacgggagatgataacaatggcatttcaggcttctttcaatgcagggngtgatctaaacaacaatgactgctacaaatgcataacatctcttcctgaaatgttgaacattttgtgtaaaaagctgtttcggctcggattcagctccatggctgcaatgttcactatgaagctgatgagttcattgggaaaggtctaaatcgagttgcttacaaggtttgcgaagagaaaaggcggtggttgtggagttcgagaggtgagggatg

SEQ ID NO: 52377 - DNA, 311 bp, Gossypium hirsutum
  Clone ID: uC-gsronu33B019f02b1
caattattatattataaaagaatgaaaagaaaaaagagggaattcagaaaaaaaagtgcttcactacacacctaacgctgcgttctacccaaggagcattttagcatgtcgccggatttcattaactgtccgagagtggtcccatgtgctggactgcttaatgccttggcggggccctcctctggctacattgccttttcggcccccttttgcctgcgggtcgtatcgttcttgggccctcttttgccattccttcttccgggtcgcctttcctaaggggcgtttgggacgcgccctgggccggcccgttt

SEQ ID NO: 52378 - DNA, 346 bp, Gossypium hirsutum
  Clone ID: uC-gsronu33B019g05b1
ccctctcgtccgcccacgcgtccgcccacgcgtccgggtgatttagataaacgtcgttcaactacggggtatctgtttactcttgcgaaagccccagtgagttggaagtctaccttacagtctacagtagctgtgtctactacagaggcagaatatatgacagttacagaagctgttaaggaggctatttagcttaatggattattgaaagacttgggagttgttcaaagtcacattagtctatattgtgacagtcagagtgctattcatttagcgaaaaatcaagtctatcattcaagaaccaagcatatcgacgtaagatatcactttgtgcgggaagtctttg

SEQ ID NO: 52379 - DNA, 438 bp, Gossypium hirsutum
  Clone ID: uC-gsronu33B019h06b1
cccattcgtccgaaaagatcggtgatgactgtgaaagcatcttctgcaagtactgatggcgaggaacaggttccggcggaaagcaagaaggaagatttaccagtaggacaacttcctttagaatcaaagatgcagcagatggcggagcagaagatgaagatgaagatggcgaagaagataaggcttcgtagaaagcgacttgtccgcaagagaaagttgaggaagaagggacgatggccgccttctaagatgaaaaaattgaagaatgtatgaccttttgcttagtcgtttcaactttcttattcctactttgtagatcttatatactgttatgcagtgatgaccttaaagaactgaatctgctgttatccaatttcattatgaaaactgaaagattaatgcctaatgtgcttgcctgtttttggcatctcttatgcg

SEQ ID NO: 52380 - DNA, 267 bp, Gossypium hirsutum
  Clone ID: uC-gsronu33B021c02b1
tttgtttcgtgggcggacgcgtgggcggacgcgtgggtgtttgaagaatgctaccagtagttggcgaagaccattggaaagttcaaaatatagcaaatgtccatgtctacatcatcaacactgaacaacaatatttagccaacaagcttggtgattctaccttgttagacagcttaaattagaagtagaggtacaactttacagattacatttttaaatattattttaatagtgaattatattgctacgtgtatgtattttacatgc

SEQ ID NO: 52381 - DNA, 177 bp, Gossypium hirsutum
  Clone ID: uC-gsronu33B021e09b1
ctagtattttgtaaaatctgttgagaggaaggatgggctttgctttgttaatgtggttggctaattatcgtggacttctggtatttcatgtaatacggacatatactgattccttgtgtgttttacttcgtccagatgtgacttcatgcactcaacctatataaagaggaggcttag

SEQ ID NO: 52382 - DNA, 405 bp, Gossypium hirsutum
  Clone ID: uC-gsronu33B021g03b1
tccatgcgtccgcccacgcgtccggagaaagtgcttgaaaactgtgcatcaaagcttcaaccatacctaacccaagctgtagagaacttgggaatttcttttgatgattatagtagtatagttgcttctatatgtggggcgacagctggtgctgtagagcgggatgatgctgctgttggaaaacttgcggatgatgagaaaataccagcagaggcacctttggagaacgcagcccagggggataaaaagattcctaaagaagcagtttcaattgaacaagtggcccttgtaaatgaaaagactcccgtgccagttgcttgcaatggcattatgcgaactgctgattcaatctctgtaaagaagcaagaggatgatcacattgctgataagtccgagaatgaaaca

SEQ ID NO: 52383 - DNA, 358 bp, Gossypium hirsutum
  Clone ID: uC-gsronu33B021g08b1
tccacgcgtccgatcaactttaattttttatggcgtgggattatgttttgggtgtttgacaaagaaatttgtactcgatagttcacttaactagtgagctcattataagcaaatgctcatccagaccatgctcattcgttgtgcttttcataaatataattcatggtgattgttttgcttgtctaaaaaaaaaaaaaaaaaaaataaaaacatcacaaacaaaaaaaacaaaaataatgaaaaaaaaaacaaaaaaacaaacaaacttaaaataaacaaaaggaccccttaaaaaagggggggccccttttaaaggttccaggttttcttccgcgtgtttggaagcataaattttttt

SEQ ID NO: 52384 - DNA, 155 bp, Gossypium hirsutum
  unsure (1)..(155): unsure at all n locations
  Clone ID: uC-gsronu33B021g11b1
tacccacccgtccttaacaccccaacctcctgacaaaaagggacggtttaataaacccaaccgcctattaacaccccnaaaaaagaaaatggccgaccaacttacccaacagcacaaccctcaaaccaaggaggcctttagcctctttgacaaag

SEQ ID NO: 52385 - DNA, 316 bp, Gossypium hirsutum
  Clone ID: uC-gsronu33B021h03b1
tttattcgtcccatgtagcctaccgatacggggagttatatttagctagcgctggtttatcatggccgtacagacggtataaagatctttgaagaaactgacactgactatgagctccactaatggtgggaaagaggcgaggccgccaaagggtgggactcgcttgtggaaatgcattggattgcgctacatgacttgcaatgacgctattgactgaacctacatgtagtataaatggccatttactggctctgctacaatccgggggaatatggtagccgggtcttgtcacacagccaagatggtcacgacaatc

SEQ ID NO: 52386 - DNA, 567 bp, Gossypium hirsutum
  Clone ID: uC-gsronu33B021h11b1
tcgtgccatgattactcgactgcaggaagagagggcatcgtttcaaatggaagccttgcagcacctgagaatgatggaagaacaagctgagtacgatatggaagcactgcaaaacacaaacgaccttcttgctgagaaagagaaagagattcaagatctagaagccgagctagagttttacaggatgaagttccccaatgaattcatgccggagggcatagtgaagtcagcatacaatttgcaaataacacgggacacaatggatcatttagaagctaatagtattgaagaaaaggcaatcttacatacagatacagttaccggaaaaccgaacatcggctccacagttgaagaaacatatcaatcatttgaggacacaaacaaagtcaccatgaagaatccattgtctgaacatgaacatgggtaccaagaagaactcattccttgaggctttatctacaaacactacgaagatgccctgaagagatgctactggccatgaattgtataggtatttcagagattggtttcttcttagaaaataatataggacatgattttaaaaca

SEQ ID NO: 52387 - DNA, 125 bp, Gossypium hirsutum
  Clone ID: uC-gsronu33B027c05b1
atacttagtaagcgcgagtcatcagctcgcgttgactacgttcctgtcctaaggacacaccgcccgtcgttactacctattgaagaagcggaggaagcttttttataatttaaattgccgggaca

SEQ ID NO: 52388 - DNA, 312 bp, Gossypium hirsutum
  Clone ID: uC-gsronu33B027c11b1
tcgtggtcatagggggacacgctggtatcaccattttaccgctgctgtcaaagacgaaacccactgttagatttactgatgaagaagtggagcaactactgtcagaattcaaaatgccgggacagaggttgtggaggcaaaagcaggtgcagggtctgccaccctgtccatggcctatgcagccgcgagatttgtcgaatcatcccttcgcgctttggatggagatggagacgtctacgagtgctctttcgtacaattcgatctgaccaatctttcattctttgcatctaggatcaagcttggaaggaatgt

SEQ ID NO: 52389 - DNA, 178 bp, Gossypium hirsutum
  Clone ID: uC-gsronu33B027d05b1
ctcttgcaaatggttgaccctcccaactcacctctctataaccccttccctcggccgtaaaataaccggaactctctttggccatcgccgcggtcacgtcagcttcgccgtccaggacgatcctcgctccgaaccggttatgctcctcgaactagccctgtcaacggttagcatggtg

SEQ ID NO: 52390 - DNA, 357 bp, Gossypium hirsutum
  Clone ID: uC-gsronu33B027e04b1
gcgctgtgtcaaaatttcaaagagccaggcgtgtcggagttcctatcagccatggctgccggctggaactcgaagctgatagtggaatcgtggtcgtacgggagtcccatagcaaccagcgtaggcctcgccgtagcggcgcgtcacacgtgcggaagacacatgtgcgtagtcccggatgaacggtcaagattgggctacatcaaggccatggaggaatccgggaccttgtcatcgacggcggtgatcgtcggagaagcggaggaagtgatggtaggggctccacgagtgggatttctgggtcgtggacttaaagcgataaggatctcgctacggttttaaaggtgtgctaaattg

SEQ ID NO: 52391 - DNA, 341 bp, Gossypium hirsutum
  Clone ID: uC-gsronu33B027e05b1
gcgttgacttagaagtggatctatttatgctgcgacggtgactggtgttatcggtagaaaccgttcgaggtaacagagatttagtgttctgaaattgaaagcgaaatgtgtccaaaggacagatatggttattggtcggttggttcccggatgttggaaacaacacgttaccggtatattcttgaagaagcaactgattatattgccgcgcttgagatgcttgctacggccatgagcgctcttgctgatttgatttctgggtcctgttgcatcaactgtagctaaccggcgaccagccagtgacaccttttttttgcttaattcacaagcatcatcctctt

SEQ ID NO: 52392 - DNA, 259 bp, Gossypium hirsutum
  Clone ID: uC-gsronu33B027e12b1
acactatgttacctaccactatgagaaatgctcttcgtgttaaactgaagccgtttgcaaagtctttaactgcatcaatatacgatgcttcccttgcagcggagtggagcttggcactagtgcggattttggaatggttggctcctcttgctcacaatacgattaggtggcaatccgagcataaccttgaagagcagcatataatttctgggtcaaatatacttttggtacagacactacactttgcggatcaagcaaa

SEQ ID NO: 52393 - DNA, 479 bp, Gossypium hirsutum
  Clone ID: uC-gsronu33B027f08b1
tttgatcaattttttggtctcggttccgagacacgaagaactaagactcatatccctgatccttatgggatagaaatcggtagccctactaagattccatcagggtttgtagaaacatgggggttgaacgtccatgctatcgatacaaggggagtggaagataggatgggatgtaccgaatgtcggtgcaatttgtataatgttaccaaggaggaaaatggaacacctttgagcccaaattatgatgggggactattatgttgctatgatggcacaaaatgtaggttgaaagatgggtttattggcatcgaaagaaccctttaccttcaatacaccgtgaagtgggtcgatatgaatagcttaattgtaccggtgaatgtttataatttcgcagtttctgatacttggaagagatctcgtaattcaactgggatagattcagagcacacttgccaggtggagtatcatgttgaatcttg

SEQ ID NO: 52394 - DNA, 303 bp, Gossypium hirsutum
  Clone ID: uC-gsronu33B027g09b1
ataggatgacacgcgacgcaataacacgtttatagggggagcggattataattgactgtcaatccgtgtatggccgtgacactgagagaaaggtaaaggttacttggaagatcggcgtgcggcatataacatggtacccatattgtgtgacagcattgctggcaaaaactacactattgtatgagccaaacacttgaagctgaagcatttgctggtcaaaagattgctttgaatgtctaaaataaagtcagtttagcctttattcatagagatggttttttattttaattttcaattaggcct

SEQ ID NO: 52395 - DNA, 477 bp, Gossypium hirsutum
  Clone ID: uC-gsronu33B028c12b1
gtgatgaagaacaacataggcttttggtctatgagtttatgggaaatggttcattgtcgaacttccttttcggagtgttacggcctagttggcaaaaaaggttacaaattgcatcaggaattgcaaaaggcctcgcatacttgcatgaagaatgcagcacacagatcatccattgtgacattaaaccacaaaacatactcttggatgattgtttaacggccaagatatctgatttcggattagcaaagctgttgatcaacagcaaaactcaaacgctgactggcgtacgagggacgaaagggtacgtggcaccggaatggttcagaaactccccggtcacagtcaaggtagacgtttacagtttcggagtgatgctgttggagatcatatgttgcagaaaatgtgttgaagtggagatggatgaagaagcaatattaacagaatgggcattcgattgctacaatgaagggatgatgg

SEQ ID NO: 52396 - DNA, 285 bp, Gossypium hirsutum
  Clone ID: uC-gsronu33B028d03b1
cccattcttccgataaacggtgcgagcagacacaggaatgcacatgaggatagacaccgtggacacctctggatatgaacaagagagctcgctctttgcaacaggatcagacgtcaagtgatgtaaagcttgtccgcgaagcggacaatgccaaagaggagagcactcactacaggtttgaccacggacacagctaatgttggagcagtggttcaagaattcactggaaatcctgcaccaccatttttgggttcatcatcatatttctcgaaggcttgacctttt

SEQ ID NO: 52397 - DNA, 174 bp, Gossypium hirsutum
  Clone ID: uC-gsronu33B028d04b1
ccctctcttccgaccactcgtccgggcagtggagggcctgctatcgacttcatacaccgcaaccaccccagagcctgcgttggagatctcgctgtgtacataagcttactgctggacttcgttatgtccctgtcctacgacgttaaccgcctattatgtgggactggacctaac

SEQ ID NO: 52398 - DNA, 151 bp, Gossypium hirsutum
  Clone ID: uC-gsronu33B028e03b1
ccctctcttccgcccactcgttctcagacactagggcgtgcaatctacttcaaggaccgtaggcaccctagagcctgcttaacagacctagctcgttccttcacctgattgattgacttcgttaataccgtgtccgctgacagtgctggcc

SEQ ID NO: 52399 - DNA, 135 bp, Gossypium hirsutum
  Clone ID: uC-gsronu33B028e04b1
gcctctcgtccgaccacgcgtgcgcgcagacttgggcatgctctctagttcagggaccgtaacggccccacagccttcataacggacttagctcgttccgtaagctttataatttacatcgtgatgagcctgtct

SEQ ID NO: 52400 - DNA, 174 bp, Gossypium hirsutum
  Clone ID: uC-gsronu33B028e09b1
ttctctcgtccgaccacacgtccaatgacacttgggcatgcaaactactttaaagaccgtaacgaccttagagcctgctaaacagacctagctatttccatacactttatgattgacttcatgaagtccctgtccaatgatagaactgaccaaagccgtgcgatagggcctaac

SEQ ID NO: 52401 - DNA, 442 bp, Gossypium hirsutum
  Clone ID: uC-gsronu33B028e12b1
tttttgcgttcgctaccactataaaaaatgctcttagtgttaaactgaagccgtctgcaaagtctgtaacttcattagtatgctatgcttaccttgcccaagatcggagcttggcactagagcggatttcggaatggatgggtcctcctgataacaatactattaggtgacactcacagcataaccttgaaaagcagcatataattcccgagacaaatatactttcgggacagacactacactctggggatcaagcaaaaactgaggcaggtatcaaggatcttcttgatgaacttaataacctgtatagcactggcggcgcccacaatgacaaagctttaacagaatctgatgtcaatggtagctcccaatataagatcaaaagggatgacaagagatgacactcatcttagggaaagattcatgaatgccaccccgagac

SEQ ID NO: 52402 - DNA, 256 bp, Gossypium hirsutum
  Clone ID: uC-gsronu33B028f02b1
caaattggcagtcacgaacatggcattggttcagccactgtaactaattatatttatagaaggtgtttcttaacgtaaaaccactgcccagctctatactacataccatacatacactcgaccgcgggctaaacctatagagaaggccgaagttgccgatggtatatagaacgaggctcgcatggaagcttcactgctttaattacagagccacaactggttcgataacgagtgtgatggagcaggactttgggac

SEQ ID NO: 52403 - DNA, 207 bp, Gossypium hirsutum
  Clone ID: uC-gsronu33B028f03b1
gcctttcttccgaccacgggttcgcggagaccagggcgtgatcactagtacaaagaccgcagcggcccccgagcatgcaaaagagacgtagctagatgcctaagccgtgcgaaggacttcaagaataacgctgtccgccgatggtaacgacctgagcggggcgcaagagacacaagatgtgcaagtatacaacaagagcctgagtca

SEQ ID NO: 52404 - DNA, 118 bp, Gossypium hirsutum
  Clone ID: uC-gsronu33B028f08b1
ttctctcgtccgatcactggtgcgtgcagacgggggcgtgctcacaagtacaagcacggtatcgatcttatagccttcgttaccgatgtagtgagttccataacctttgtaatgtact

SEQ ID NO: 52405 - DNA, 169 bp, Gossypium hirsutum
  Clone ID: uC-gsronu33B028f09b1
ttctctcgtccgatcactagtgctcacagacgtggtcttgatcacgactttaaagtccgtaacctgcttttgccctgacaaacggacgtgggtggatacaggaaccttcttattgacttcgagaggtgcgtgcctcatgatctctgtaacctcagagcggctgtaggac

SEQ ID NO: 52406 - DNA, 216 bp, Gossypium hirsutum
  Clone ID: uC-gsronu33B028g01b1
ctttgctgataattggatctattgggttggtccattggttggtggtgggttagctgggttgatttatggtgatgttttcattgggtcatattctgccgccccagcttcagaagattatgctcaaaagtttgaaactctgaaactgcttgtttatggcttttgtgtcaaatgctttgaatgcttttgatcatggggatttgatgttcgtgggcgttt

SEQ ID NO: 52407 - DNA, 128 bp, Gossypium hirsutum
  Clone ID: uC-gsronu33B028g05b1
gccatgcttccgagcacgcgtgaggggagagatgggcgtgcatgatactacagacaccgccgaggccccaatcccagccattagagtttgtgtgatgaaaataaagccttgtttgtacatgtttattt

SEQ ID NO: 52408 - DNA, 191 bp, Gossypium hirsutum
  Clone ID: uC-gsronu33B028g07b1
tctctctcgtccgaccacacgtccgcgcacacgtgggcgtgaaaactactatagagaccgtagccaccctagagcctgcgagacagtcctagctagatgcataaactttatgatttacttcgtgatgaacctatccgacgatgtgactgacctatgaggggcgatagggctcaacgatacgcaggtttaca

SEQ ID NO: 52409 - DNA, 173 bp, Gossypium hirsutum
  Clone ID: uC-gsronu33B029a04b1
cgtgtgtatttgcttcatgtatcaggtacggtagcgatcgccataactgatgctccaagcattggcagcatgccagcttcaggattgatggcatgcaaaccagcagtgacccctcccaaccctccgccggccacgtcaacttgctgctccgccctctcccacgctgacatgcg

SEQ ID NO: 52410 - DNA, 228 bp, Gossypium hirsutum
  Clone ID: uC-gsronu33B029a11b1
tgtcttcgcaaataatatcgggttgatgttatcctggttgctacttttcaatcaaatggcgctatccttaaccatcagcaatggcatcagtagcaagtagcaatgccaaaggggggcccaatctttccaaaaaccagttacctttttgggcttccttaatagtcggaacggtcctttttccaaatcttccccaaaaccttccacttgacctccgctgccaaaaagttc

SEQ ID NO: 52411 - DNA, 166 bp, Gossypium hirsutum
  Clone ID: uC-gsronu33B029b12b1
ccgaccggaatcgaattccggcccagaccacgcgtctgtttttctaacctactttctcgaaaaagtatatgttttaggtgaacgcggatccactgacctgctggacaactgttcagcagcagaaccttaaccaggaattcggagaagacaaccagactcagaccat

SEQ ID NO: 52412 - DNA, 180 bp, Gossypium hirsutum
  Clone ID: uC-gsronu33B029d08b1
tcggataattgggtgctgtgccgtatattcttgaagaaaagaagtgctaaaaacgatgaagaaggcctgcaatcttgcaaccaaagaattggtaaattaaggacaagcaagcctgtctttatgatttcccgactaaagacaggactgacttaaacctagccctttcttccttgtcatttg

SEQ ID NO: 52413 - DNA, 252 bp, Gossypium hirsutum
  Clone ID: uC-gsronu33B029f02b1
catcgactccgtcttatggacaacacaacagtgctacagtgaatccttcatacaggatgaatatgtccgcaatgcagcgatatgctcctcgtcttgatgagtcgttctacatatgtatgggtgtctcttatttttctttaactctccttttttatcttttattcttttatctttttatatactctctttatccctttttttcttatcttttttttttctttctttttttattataatttttttttcttttct

SEQ ID NO: 52414 - DNA, 799 bp, Gossypium hirsutum
  Clone ID: uC-gsronu33B029f04b1
atgtcgtcattatactaaaggaacaagagcagaaaaccaggctgagagggatcaaagctcaaaaagccaacatttccgccgaaaaagttatcgtccggtttctccgcacctttctcggacctaatggcatggttttgatgcttcaaagtctcgtcttcattgttactatcacaaattatgctccatcaatttttaattattttttttttcttcttttctttatcttctttccttttcttatcttttctctttactttatcatctttatttttttatcttttttttctttctctttccatctctttttctttttttttttcctctttttttattctatttttttcttattcctttataatatctatctctctctctctttatatactctctcttcttcttttcttttcttcttcttccttcttttatattcttcctctcttttcttttttcctcttatttttttctttcttttttatttttatatcttttttatcaatcttttttacttttttcttttcttcttttttcttttcttttttttattctcttattttctaccctatctcttctttttcttttccttttcactttcttttcttcttttcttctctttattttcatttttctatttctcctcttttttctttcctttatttttctccttttacttttttcttttattcatttcttcttttttatcttttttttttaattgtattccttttttatatttcattttattttttacctcttctttttatctttctttcttatcttctatcttttttttttatttttt

SEQ ID NO: 52415 - DNA, 440 bp, Gossypium hirsutum
  Clone ID: uC-gsronu33B029g12b1
gttaaagcaaagctaattcaatctcgaaccatcccggagttaaagatccttttatccgaaccgaacatgaccccctcgataatcgagaaatcattaaaactgctggaaactttatcatcttgcaaagaagggagggtggagatatggcatgatacgatactgttacaagcgattgtgcagaaagtgttgaaagcatcgagcaaagcgacagagcatgcagtgacgatactctggattgtttgctatttatttagagacgagaaagcgctagaagcggtgggttagtggcaatggaatgaccaagattttgttgctcatccaaagcaattgttctcctgcggttagacaaatgtctgccgatttgctcaagattctttggggttaattccaagccttggttatcaagttatgatactaagactacccatattatgcccttt

SEQ ID NO: 52416 - DNA, 289 bp, Gossypium hirsutum
  Clone ID: uC-gsronu33B031a02b1
tccattcgttcggttgagatggtgctgcaagcaacccagatggggactgatggaagaactcaatccatttgcactaagctagacggtattgactgaggacaggatgcggcaaacatagacaacaagacagacccaaagacttataacctggctgctgcaccactcattaacattgtccatatacctagaggaagacagatggccaccaggatgttagctacccaagccggagttacgattttccataagttatttttcaggggagaagttaaaaaagggagaaggattc

SEQ ID NO: 52417 - DNA, 337 bp, Gossypium hirsutum
  Clone ID: uC-gsronu33B031b11b1
tttatttaccaaaaagaaactagaaaaacacatacgagagggacttattgaaaattggtgttgttaaagaaaaacaatcgcataaaggcaatgattatagagctcggtagacgcaacgccctccgccgttgggctactgtctaatagattggacgtctaagctcacacgttgttcccccaaaccttattcttgaccagcaatgctcgctactgtcagaaggtttctatcatcactttactgttgaacctgcttacttttacatgggtagaacgaaaaggtgaacaaagggatgctttttctgcacagaggtttctatgactttgtcaactgttcttt

SEQ ID NO: 52418 - DNA, 226 bp, Gossypium hirsutum
  Clone ID: uC-gsronu33B031c06b1
cccattcgttcgcccacgcgtccgcaccacagtcaggacagaggggtgttaccgagttagtcgaagctgccctgctacccacaaatttatgtacaatggatccaacatggtattcctggtttggattagtgttatcaattactctaaaagtccaaccctgttgttgataatgtataaattgtagactcttctcagatgggatttcatttaccaaaaattggtaatg

SEQ ID NO: 52419 - DNA, 220 bp, Gossypium hirsutum
  Clone ID: uC-gsronu33B031c07b1
cttattcgtgcggagcagttttgggtcatcggtggggattcatctcatctataagtcgttttcaaagggatactaagggtacgggagggcatagacaccaagtttactgttactgccaaagtaggtgatgatgcaatattgagaggagagttacattgtgaaatggactacacttctgatgcctccaacatcactccttatcgacaacatggttggtgtt

SEQ ID NO: 52420 - DNA, 365 bp, Gossypium hirsutum
  Clone ID: uC-gsronu33B031c09b1
cttcgtaacactaactatattgcatcctatcctttttttccacagtaaacttgacatgaacaccatatatgacggacagaactcaacccgacagcacgactgctatcgaaattgtgaaactataaggtgattgaaacatcaccttttattgaaatcaaagaagcatatcaactagtgaacacaatattatggtggatgcatgtacatcaaatacaagttcatatctcaaactcaaatctctttacttggttctcaagcaacccctagttgcttctcttggagtacttgtctgtttgtttgtttttgcagtttgtactgcacttacttataggttttgtatatgctataatgatttttgagtggat

SEQ ID NO: 52421 - DNA, 138 bp, Gossypium hirsutum
  Clone ID: uC-gsronu33B031d03b1
gtccttgtcacagtagtgatgggtgatggcagaggtccacttgatgttcaaattcgaacaaaggagatgcatttgcaagctgagtatggctttttcaatcattgtagatttcttgagttcttttgctagtttttttta

SEQ ID NO: 52422 - DNA, 166 bp, Gossypium hirsutum
  unsure (1)..(166): unsure at all n locations
  Clone ID: uC-gsronu33B031e05b1
gaagttggtgatgggacaacgtctgttgttgttttggctggtgtacttttaagggaggctgaccagcaagagccgngtgaagacatattccgtgacatatatgcaagggtttcctctatgagatacgaaagaatttccaccatgttctgttttgaaaaattacaag

SEQ ID NO: 52423 - DNA, 104 bp, Gossypium hirsutum
  Clone ID: uC-gsronu33B031e08b1
ttaatagaaggattagagttgccattaatggttgctgcattttagctattataacttttggattcttccggcatgtcttttcaacaactaaagagatgttttca

SEQ ID NO: 52424 - DNA, 395 bp, Gossypium hirsutum
  Clone ID: uC-gsronu33B031g08b1
cccattcgttcgcccacgcgtccgaagaaggtttgtgccctttgacacccgaagaaactgctctagtattaagagcgctcggtattgaccgcaatgttcaaatttacattgccgctggagaaatatatggtggagagagacggatggctccgttggcagaagcatttcctaatttggtcagtaagatgtatgttcggcatctacaatgcatgttatatgtgatctaacagtcggcttttcttgcacaacaggttagaagggagactctgctagttcgatcggacttgaagttctttccaaaaccactcatcccaaatggcagtgtcggattatttagttttcttagaaagtgatttattcgttccttcatatgacggaaacatggccaaggttgt

SEQ ID NO: 52425 - DNA, 488 bp, Gossypium hirsutum
  Clone ID: uC-gsronu33B031g09b1
cccactcgttcgcggatgagtggtggtgtgaaccaggacatggggattggtgtacttgccttgagaaatatacactttgtagggacggaatataccataagcaagaccaattcgaacgtcttttgccgacctttgttcaagtgattgatttgactgctcaagaagaatctgaatattggactgttatgtctgctgtatttgagggcaaaccagttgaatctattgaattaaggcccaacctagattatgttgcttccaattcaattgaagctagcatcaaccgcaaggtacgattgttaaggaccatgcttcaatgggaagagaaactacggtcggaatcaagttttggaagacaagatggtggcgcaaaatcaagaaaccacgcagattcgggttgttcttgtggaagtagttattatatgttggccttatggtgcataatgagactgagaactggcaggactgttgccaatgctgcaagaagagca

SEQ ID NO: 52426 - DNA, 162 bp, Gossypium hirsutum
  Clone ID: uC-gsronu33B031h01b1
gccaattctgttagggtttctgccttggctcttgttgtagacattgggcctattgggcctgtatttgggtcctgggttttaaaaataggtctaggttatgtaattgggtttgggctatgtaattggactttaaacatttaatggactgttataattttattt

SEQ ID NO: 52427 - DNA, 104 bp, Gossypium hirsutum
  Clone ID: uC-gsronu33B031h02b1
cccattcgataggcgacgactactcgagctctataacaccggaagctttaaactatggcggatgtagagaccgcggtcgcgacggacggtgtgcccaagatgag

SEQ ID NO: 52428 - DNA, 425 bp, Gossypium hirsutum
  Clone ID: uC-gsronu33B032a06b1
cggtccggatattgccctggatcccacgcagtccgtgactccatcaattcttgatacaggtaatatcgttaggtagttttcagcatactcgttttgagtttagtggttgtggataaagaaaaaatggctgaggagcataccaaggttggtggtagaggaagcattgcagagcatggtgcgagggatgcttgagttctaggggaagaaagattatgtgaagcctcaagctctagtggagttggtctccatccatgttgcgaaagtcatgatcgaagaggaacatcgggcagatgtggagaaacacagtctcctgtacaagcttcacctatccaatagcaactccagctcttctagtgacatggaagaaggtgataggcggagtgactatgaagaagatgaaattggagaagggtaagaaagtacag

SEQ ID NO: 52429 - DNA, 310 bp, Gossypium hirsutum
  Clone ID: uC-gsronu33B032b02b1
tcctgtattctctcaattttgagctaaacaaacgttcttaattgtacccaactttggcggtgaggtacttgaattactaataatgcaattattttcggtttttgttaaaaaaaataatttttttgtttattaaaatttaatcagatataattttataattaataaaatattttaattattaattattataaataaagggggtggtcattttaaagtttccaaggttattttctttttacatgaaacttaatacttttctttttgtgcctcctaaattaaattcatttggtgtgattttataaatttattt

SEQ ID NO: 52430 - DNA, 603 bp, Gossypium hirsutum
  Clone ID: uC-gsronu33B032b06b1
ccctcgtgtccggtcatgtttaataatgaaaaaacagacgacacattttatattatgaacatgatcaacttcttggcgagacgtttttaattatctatgagctcctactgcttgctgttacagactccttgcatacataacgagttgtatccaaaacagatagagactggcgggacatttaagcacagatctgtgccttggaaattaatcctgtaccaactgaatcctttacctagtttagactcactttaactgtcatcgttggcgtttgagtgtgtccgaaagcctgggtcattcagcctttcatcacatctttacatttatgtccacacattatagctcaatggaatcaaacacttgatgaagtgttacttaataattattacagtttaaatcagaagagtttacattatgttattttctacttcaataatttcacacatattattcgatgtaaaaatatgatggtagctaataatacatctatataatttcatgttttcacgtgctcgattccacaatacttttacatgtttttgacatactatttgttattcaatggaattttgatgaggtttatcagattaatgtcttgattttgta

SEQ ID NO: 52431 - DNA, 879 bp, Gossypium hirsutum
  Clone ID: uC-gsronu33B032b07b1
gtcgtctacggccgccggttatatccggtgggtgattttgaagacccggaagtgaacccgcatagaccgacgaggagttgcatgagtagcacggtggaatcttttattgggtcttgaccggtttaactaccggtacattagtttactgttttcgtggcggtttttttcttcattattttttttttttcatcttttttttttttttgtttttttattatatttttttttatcagtatctttatttttatctctttttgtcctttttcatattatttcttttctttttttttatatttattttttttactttttttccttttttattctttttttataatttgaattttgttttctatttttacccttttatatttttcttttttagattatatttttttgttggttttttccttatttttttgttctcctttatttaactttttttattttttgtcttttataatttttttttttttcttctaattccatctaatttatttttatattattttttttctttactattctcttagtttttttttttttcttcttactcttatttttctttatgttgtttttctttgttctctttttatatttcccgttttatctttatttttttcctttttcttaatttatattatcatctttctttctgtattatagtaataattatttttttttctttatttttcttctctttattaatttttttaaatatgtttttctttcctattttcttttttgatttaaatatttttttattttttaatgtttttttttacatatttttttttatttctattattttctataataattaaatctctttatttgtttctcttcttctttcctctctttcttttatttttttttcta

SEQ ID NO: 52432 - DNA, 493 bp, Gossypium hirsutum
  Clone ID: uC-gsronu33B032c02b1
cacattgcttcggttttcctcgaggaactcaggccttttcttccggttaaaaaagaggttcttgagattttattggaaccatttgttggaataatgggtagagtgagtgataaaattttggttgggaagattagaattaatgtgtttgatgagtttgttaaaatgggaaggagattgttagaacttaagacctccattgaggaggttgatcaaggtgatgatgtagttgtgttggggactatcagtttggtgatgggattctctaaaaaattttatgaattgggttcttcagtggattgctgtcagggtaatagaaagattctgttaggagtacatgaagaattcttgaagttagagaaggatttaacatcattgggtattgatatttcgatccccgagtgtaatgaagggggtgaagaagatgaggtttctgaattggtacccattgctagcgagatgggattgaatatctttgatggtgcttcagaactgt

SEQ ID NO: 52433 - DNA, 536 bp, Gossypium hirsutum
  Clone ID: uC-gsronu33B032d10b1
atgtttcaacagctaagacatccctttgcagctctgggtcaaaatctccacaatgctaaaaatgtcatggttcaatctcaagtcaacaatgttaaggaggcttcgagcgacggtcatataccttgagctgattattctcgccttcgaaacctatgtaactgatgacacacctgtagagagaatgctgggatccaagaccatccagaaaaaaatgtggatgttttcttggtaacccttacatttgatttaactattttccctacctcttttgagtaatggaagctattattataaccggcattgcaccgatcattagaaaccaccagaagaaagttgttaacccaacacaactttttttggaaaagcctcttcttctggtttgcttccacccacacgttcacccgggtctactctttttcaacctccggttccctaaatttataaaaccgaaagggaaaaataaaacaaagaatttctgtttttgttcttgtgcttttgtatggctgctacttttttaacaacaactttcattccgg

SEQ ID NO: 52434 - DNA, 284 bp, Gossypium hirsutum
  Clone ID: uC-gsronu33B032e03b1
aaaaaatgtatataaagaaagaaaaccccaaaaatgctagagcttaggctagttcaaggttcgcttctgaagaaagtattggaagcgattaaggacttggtcaacgatgctaactccgacggctcggcgaccggtttcatactgcttgccatgtttacaagccacgtggctctggtcactgttctttctgtaaaagcttgttttttttttctattgcccacaaagtatgtcccccttttttattgaacacacggcccccccccttttgttcccataatcttttt

SEQ ID NO: 52435 - DNA, 613 bp, Gossypium hirsutum
  Clone ID: uC-gsronu33B032e06b1
cccactgtgtctcggcttcccaaaaattcaattagattttgaaattccagcgaagggggaggtgactctcacacacacacacagatctttaaatttcattaatggatcatttaaatggttcaagagattgttttgaatcaggtattgaccgtggcttttgccttcgaggtccagatcgtcgaagtagattgcggttttagatcgacttgtccatgactttttgtgttgctattagtgagcgttggttgcttgttatttttttgttattttttttttcttttctttttttttttttttcttttatttaattttcttttttatattttttctttttatttttttttttttttttttattttttttttatttttctcttttttttctttatttttatcttattattttttttattcctttttttttttttttatttatttcttctttttttttatttttttttaattttttttctttttctttattctttattttcttttcttatttcttatatatttactattatttttatttttttttttttcttatttctttcttttttttttttaatttatttttcttttttcttttttattactttttctttatatttttt

SEQ ID NO: 52436 - DNA, 432 bp, Gossypium hirsutum
  Clone ID: uC-gsronu33B032g04b1
ccctttctttgcatctgatgaggtatattagcatttgcgtgcctagtaatgtcagttagcataaaccatgaaaacagtagcttatttggatgagcctaagatatgacaataccagttgatctttactatatgtaccagttttgttcaagaatattagggtttattaactcagatttgtgctaatataaattgtgcggtttctactattgatgcatggttcatactgaagggtacggtgttgtttatgagggacttgggcccacgaatataagcatggcaccctctggtgcaggctgctatggcgtatatggtatagttcacacggtctctgttcatgctcctcaaacacgatacaaaattagatactttgcctttgtacttttacaccttatgggggcaaaaccctttgatatggttaccttccttaacatt

SEQ ID NO: 52437 - DNA, 352 bp, Gossypium hirsutum
  Clone ID: uC-gsronu33B032g08b1
aaatggcagcaaaggatataatggcgggggtttttgaaccatttgccattgtttatctatctgatccgcttggtctgatcgcagatttttgtagtgggatgcttccttgcaggagccatatagggaaggcggagtgcattccaaaccaatatgcttgtaacccggaaccaagcccttcattcgggaggaatccccacagccgtcagattttcatcgtgaagtctgggtctgaatcttgaagacctaagacttgcatttggttttgtcaatgatttcagttttaatagctactccctgagaatcaatccagacacccggctcccatgggtctgactttgcattcggaagcaac

SEQ ID NO: 52438 - DNA, 322 bp, Gossypium hirsutum
  Clone ID: uC-gsronu33B032h05b1
cgcgcgatttatttcggcttactagccaaaaaaaaaaaaaaggagcctgtttactggatctggagaatgtaccaggcaatcatgggttgcttcattagcaaacatgctgatgagttggctaataacgctgcttacgttgcaacccctggaaagggtatccttgctgctgatgaatccactggcaccatcggcaagcgtgtttcaagtattaatgtaaagaaggctgaagacaacaggcctgctccccaaaagctgctattcacagctgctgaagcacttgaggacctcattgctgttactctgtttgaggaaaccctttatg

SEQ ID NO: 52439 - DNA, 570 bp, Gossypium hirsutum
  Clone ID: uC-gsronu33B036b01b1
gctgtccttatcgctcgattccatacccgacgcccatgtagccgttcaactcctcttcatctctgttgatccttatcttcgtaccagaatgagcggccaagaagacggcttatattttccgcagttcagccttaaccaggtgataactgcttttggagttggaagagtgatgagatccaaggacgaaaagtacagtgagggtgatattgtgttgaatgctttctttcctgtagctgagtactgtgtggtgccatctagtgtcctcataagaaagattgacccagaggctggaattcccttgccagaatatctcagttgtcttggggttcccgggtttgcagcgtgggtggggatagaagtgctgggagaggcgaagccggggtcaaacgcattcatatcagcggcggcaggtggtgtaggaatggttgcggggcaattggctaagctcaagggttgtagagtcattggaagcaccggatctgatgccaaggtgagactcataaaggaggaattcgggtacgacgatgtattcaactacaacaaagagttgattttgatgcgactttgagc

SEQ ID NO: 52440 - DNA, 435 bp, Gossypium hirsutum
  Clone ID: uC-gsronu33B036b07b1
tccatgcgtccggtaaatatgcagcataatgttatgattgaggcagttgagaaccatatgccagaaaccatcataatcgatgagattggtacagagctcgaagcattagctgccagcactattgctcaacgaggagttcagctggttggcacggcccatggaatgaccattgacaacataatcaagaacccttctctacagatccttgttggtggcatcgagagtgtaactcttggtgatgaggaagcaaggaaaagaaaagtgcaaaagactattctcgaaaggaagggcccatcgacttttacatgtgctgttgagatgatatctaggactgaatgtcgtgttcatcatagacttgatgcaacggtggatgctatactggctgggaaatcttctttatttgaaatccgccagatggagccctgagctaatgtt

SEQ ID NO: 52441 - DNA, 400 bp, Gossypium hirsutum
  Clone ID: uC-gsronu33B036c04b1
tgattattgtggtaggtttgttctttatttcatcagtttgtttatggaaagtgctcctaaaaacttcagtaccactggtggatatccttactttatgaaggaagactggtttgctcctcaagactttgattgcttttgcaagagatttaaactctgcagctagtgaaatgaactctttttaactttgacttttacatatggactatattacttggattcggagttgactattttacttaaattatgagtgcgattgtcaagtataggtatataatcgacacgaatatgttcaacttttaattttttaatgtatagcttgccttacatattgaccatggttctggcattgggtattgacaatgttacttaaaactcatttggttaaaaccatacataattc

SEQ ID NO: 52442 - DNA, 516 bp, Gossypium hirsutum
  Clone ID: uC-gsronu33B036c10b1
ttctacgcgtccgggactttacagagctgtcgacgtataccttaaggcgcatccatggatacctgaatcggagcgggaaaagatatgcggagtattagactgtcaaaagcttacactcgaagcatgcactcacgcggcacaaaatgagcgtttaccattacgtgcggtggtccaagtcttgttcttcgagcagttgcagctacgtcacgcgatcgccggtacattgttagcggcggaaacggcgccgatgaatgcggggagattgtcggggacgagaagagacgacgacgaagaagaagaagaacaacaagatgaggaggaggaaagggtggcgatgtcacgtggtgaacaaggaagcaccacgtggagagcagccgtgagggaaaatcaagtgttacgactagacatggattcaatgaggacgcgggtacatcaactagagagggaatgtttcacattgaagaaagtaatccaaaaaatcgaaaagggaaatccacgtggcagcggatggagagg

SEQ ID NO: 52443 - DNA, 424 bp, Gossypium hirsutum
  Clone ID: uC-gsronu33B036e03b1
gaaaaataaggagagagaaagggttagtttctctgaagaaggcctgggaccggccaagggatccggccattcccccgccgtggctccgccgtgccggccaccgtacacggtggcccaaaatcccctgaaggtacacggcggtggatgtgacaatggcggtgctgcaggtgttggctggtcaaaggtccctaggtgcggtgcacctagggtttgtttattatttttctgattttgggtagtgggctaactgggctagggttaggcattaggtcttgattgggttctggggttatttgggcctgttttaggttgggctttagttgggttagttgggcctgcaaattggacttgtacaaagctaaaacatatataaacttttattttgtatgcctgcttacaaaaaaaataaaaattacaataattg

SEQ ID NO: 52444 - DNA, 473 bp, Gossypium hirsutum
  Clone ID: uC-gsronu33B036f02b1
gtaattttctttgagagaaataaccccatcttttccctttatacaagtttcaatttattcactctttcaaattcagtaattgacatagttctctaattttttagcctgtcattctgatccgaagcttgttaaaaagaccctctgttttcagttgtacttattttcacttatgtcatccaattttctcactaattcacgttgctctagctcttcctggacacctaaacaaaacaaaacgttcgagaaggctctggctaaatattacccggacacttctggcccgttgcaccatggtggccaaggttggggggggaaagtctgttgaggaagtcaagctgaactatgatgccctagtcagggatctcaaagacattgagtctggccgctacccttatccatatccaagtggaagcaacagctaaagcggttcccaaagagttaaatcctaaaatgaacaagaacatgatactcgc

SEQ ID NO: 52445 - DNA, 332 bp, Gossypium hirsutum
  Clone ID: uC-gsronu33B036f05b1
cccacgcgtccggccatgcaaaacaaagtttgaagctggtttgggaagaaaagaaaggagtcctgcaaatccatcttcattatgtaacttccgagatgagtctaagaaaagatgaagttccacaacttttataagagcgagctgacatgtatgttctgcatctatagctgcttctcttcatggaatgttctggctggtagcttgctccagtttttcaaaatttttccaaagtttttcagctttcatggtctggaattttgacaatttgtcaaaaagtttgttttaaagtgtagaaataaattgcaacaccccctataagcagttctctgttt

SEQ ID NO: 52446 - DNA, 245 bp, Gossypium hirsutum
  Clone ID: uC-gsronu33B036g12b1
tttttgcgtccggagaatgttgaagctggcccgaagggtcttttgggggcgggcaagggaaactctttggcttaacttggaaaatacttttcccagggtggaagggaaaaaaccaaaaaagggatggttggtaagggctataccttttaagggcgtagacactggaatatctggtttttgggcatttaagggtttttgtgccaaggataataacttgttgtaggaaaggtttttaccaattattg

SEQ ID NO: 52447 - DNA, 463 bp, Gossypium hirsutum
  unsure (1)..(463): unsure at all n locations
  Clone ID: uC-gsronu33B036h01b1
cccattcgttcgctgaaaacggcggctcaacccttgtgcatgaacatgccggcggccactctcaccatgtgcccatcttgtgaaagaatcggcggcgttgccggcgatgggaattccaagaatccattttcgatgccgacaaagcctcgtttctataaacccgtcactaatccttctgcagcatgttaatcaattaagttttatatagaatttagtaacaaaataatgggagagaacagaaaaaaacccacatcctctctatttttgggttaaaaagggtttgcagtggattaaaaggtagtgtaactgtaattaattaattaatttctagacaagaaaagaacagtagaattactgatcaatctcctctcttttttttaattttatattttgaaatgatcattagaaagatacagnatctatatgtattatttttattccatgctactatccctttggtcca

SEQ ID NO: 52448 - DNA, 391 bp, Gossypium hirsutum
  Clone ID: uC-gsronu33B036h06b1
gtctaatcgaagagaaccggacgtgggtgtttagttcaagactgggccattgcggagtttgacaaaaatgctagaggaattttggaggatggtctctcttatgcaatagggagctctccgctgtgaacaacatggatactaataactgcatgtctactcctaccagaggagagtcgaccatgatcacaggtgattgaggaacccagatggtgacaaggtcacgaccgagaatccttaataacggaagggcaacactgaagaggaacggtacattttctggacaagagggttaaaatgaactgatgaaaatatttcccacgtttgaggaaaagaattttactgcgcccaacagccagattgattacctaaagagaatatctttgaagatgct

SEQ ID NO: 52449 - DNA, 502 bp, Gossypium hirsutum
  Clone ID: uC-gsronu33B037b06b1
gacataagcaagtgaaaggcagtgaaaaccccagaagttactacaagtgcacgtacccaaactgcccaacaaagaagaaagttgagagatccttagacgggcagataactgagatagtttacaagggcagccataaccatcctaagcctcaatccactaggagatcatcatcttcttcttcctcttccattgctattcaggcttccagtgctgccacctctgagatccccgatcattcgtttataagccatggcagtggccacatggactcagctgcaacaccggaaaactcctctatatcagttggggatgatgatttcgatcgtggttcccaaaagagtaaatagggggagatgagtttgatgaagacgagcccgacgccaaaagatgaggggagaaggtgaaactgaaggaatttcagcactgggagtaaaccgtgagggaacaagagttgttgttcaacaccagtgacattgatatttgatgagggatagatgagaaa

SEQ ID NO: 52450 - DNA, 275 bp, Gossypium hirsutum
  Clone ID: uC-gsronu33B037b08b1
attttcaaattcaatagaaaacatttttttgttgaaaaaaaaagaaaaaacacagatgaatttgaaagaaccattatggagcaagagaacagagtcaaacgaacctccatctccatcatcgtcattgccaagagacccagaaacagaggctgccgcggctgctgcaacgagtgcggttgaagaacttgttaactctctcaacaagcaacgaatctacagagaagtcaccctcgctctatgcactggcttgcgcgacgtccgcgccgagttctctt

SEQ ID NO: 52451 - DNA, 445 bp, Gossypium hirsutum
  Clone ID: uC-gsronu33B037c02b1
gcttactattcctgcctcccctcgccgaataccaattcagcattaaaagttttcatctttacccttctcatttctttctcatctgagcatcttcttttttttctcacctctgcttcccatttccttccaacagtcctcgtagcctccacaaattcatcctcaagctcaacagtttcaatttcctcttagttttctcgagaaaatccgacttcggtgtgagaggaaagggctatcgatccaacacccagatgttaaattggtgctgcatcgagtgaagcagttcgctgacaagggagaatcgactgcagtttgcaatgaggaaatttgataaggatgcccttactagccttctgatggttctttgatagttataggaagcaagaaacttggagattgtgcaagcaaatactacgatttctcaggatgctttcatttgtgctcaagc

SEQ ID NO: 52452 - DNA, 274 bp, Gossypium hirsutum
  Clone ID: uC-gsronu33B037c07b1
gattcacccacgtattgtattatttgaactcgaagacgtaggtgataggagattcttgggatagggcattgagacatgtctagataactgcggaggaagctgttactggcttcgcatggactatactgcaggatcggccattggataatgcactggtgccctatacgcaggactctgtatagcggtggaagataattgtagctgtggaagcctcgaaaacattagctgagatgaaggagtactatgcgcatatatgagggtgacatatacgagg

SEQ ID NO: 52453 - DNA, 443 bp, Gossypium hirsutum
  Clone ID: uC-gsronu33B037c12b1
gtataaagcaatgttcttcatgtgatttcatttcattggatcactacttatacacagtttaatgcttgtttttactctaatgcatgcagatttaagcacattttgatcttgtttcgaatccctgctgttatcggtatcgagaaaagttcaatttttgtcataaattcggtgtagctttggagatgaaaagttttcaggtaagctgcgattgatggacagtttatcgccgagaagcagtgataagaagacattgaagaggtggtttttcatagataaaagggttggctaaataagtgtacttcgataaaaaaggtgatttgaagctaatggatttgaagcctaatcattcatctcctgttcttactgatccgattccgataaacaagtcaaggttaggcattcattcaaatctgctttcgtatccacatctgggggatctttgt

SEQ ID NO: 52454 - DNA, 211 bp, Gossypium hirsutum
  Clone ID: uC-gsronu33B037f02b1
atcgcgtgcggcgcccttttttatttttttttttgtgtgtatttattttctatgatatgtattcttctatttggtcatagtcgcattcttagcccaagtcgtagtcaaacctttattcgcagccgtaggccaagtcgaagttcaacccctattcgcagttgtagtcaagtagattctccaagggctggaaggcgaagggcccctttacaga

SEQ ID NO: 52455 - DNA, 429 bp, Gossypium hirsutum
  Clone ID: uC-gsronu33B037g12b1
tccacgcgtccgcttgatttctcacacaataggaaattccaagactgcccttttcgagggagcgagaggttaataatgtttggagggtattctagagtttttcttttctttgattttttttcctttttaaatttgggttatatagtttatttccaattaccttattttttctttttttttttgtaaaatcatttagttgtccatattgttgttcattattttacgaggaacttaaatataatgtgaagagaatcccgtgtgttagtctgatagtcaagatgtttactatcccagttgtggtctaggtttgagttgtgccagtctcgttgctgttagagctttaagactgtgagggtgttaaaagggattgtatttacgaacttacatttttttaatgatttttcttttttcataatacatttttttgga

SEQ ID NO: 52456 - DNA, 233 bp, Gossypium hirsutum
  Clone ID: uC-gsronu33B037h09b1
ataatttcttccgttgatctttgatagagattagcgtgtgaatttttcattatgggcaagaacaataccataatggctggggacacatgggttgcacacagcattcttgttcacaaatctaacgaagacaagatcatgatcctcgatttttacaaactctatcatcgccagtggagaatccggcgacagattgcagttcacggagtatattcagaaaaacgtggccttgtatc

SEQ ID NO: 52457 - DNA, 388 bp, Gossypium hirsutum
  Clone ID: uC-gsronu33B038a08b1
cgcgcttgtatgctgccactcgcccgagtcaagcgcgcgctagctctgtgggactcacggatagacatgatggaaccggataggacacctcaagactaccaaggagcctgcacattcatggtcttgaggtgcgggaaaacataggacgctagagtactagcgtagcgcgaatgaggcagagttttgtgagcactgtggaagctattctacagagaacggtaacgcctgagatactcgaggtgagcattccaaaaaaataagatacatggtgggtgctgccttaagaagtctagctggggcagagcttggtacacaggcgcattccgtttatcaagaattgagtgccacaggggagcttgttgatcgccagctttttgctggaataacc

SEQ ID NO: 52458 - DNA, 382 bp, Gossypium hirsutum
  unsure (1)..(382): unsure at all n locations
  Clone ID: uC-gsronu33B038a10b1
cccactcgtccgtgtaaagcataagcactagggtcattttcgaagctctgtaatagttcataggcacttcttactgtgaattctcttgaagactctccccgccagaccaggaagtcatcgtgaggctcttttgcaagtgggatacagaagattttctaagatatctccgcaggaaaggattcagtgagttacaacctgagagtctgtgccttagcttcccacatccgaagcaaaaagtcggcaatttttcatatttaaaggaaatccaccatttattcttattattcactgagacaaaaatacctctttaaaggggtttctgcacatagagatttatttttagacganntaaaaaacaanaaagaacagaaaccttaaaaag

SEQ ID NO: 52459 - DNA, 459 bp, Gossypium hirsutum
  unsure (1)..(459): unsure at all n locations
  Clone ID: uC-gsronu33B038b06b1
ccctttcgtccggccgataataatattcaatttattacccaagatgaaaattgaagaatccaggcattgatcaacaccaaatttaatcttttccattgacttttggaggttagtgtttctcatggattccttcgttttcatcctgcccaaggcctctttagatgctactatattttctccggaaaaatctagagctggggaaagaagagggtggattttgaaactgcagttcttttgcattgttgatgaacccagtttaatggaattatcattcagtgaaaataagacactggattaatgaatcctcaatttgcttctatatttcagaaatgaagatgaaacttatattattgggcatacttcaattttatccaatgtactttaaagttgttttgaatcaagattaaaattttatgttcttaaaaaaaaaaaatnaatataaaaaaaaaaatatatttt

SEQ ID NO: 52460 - DNA, 478 bp, Gossypium hirsutum
  Clone ID: uC-gsronu33B038c01b1
gcgcccattattagacagatactcatgacgcccacacggagaactgaggtgatccggacccgctggtggacccgatctaaacggcatgtgcacgtgaccaccgaaagtcaagcgcgtggtaggcatggactctgacgtggaggcgcgagtagtgcgggggtggaggtggaagccgtgtgtggcgagggcagttgagggttacagcgcaaggctggttggtagggttctgtcaaaaatgttgttttagttagggcttaaaagttgggctagagtttaaatgtttgtattgcgctgtttgtattttgggctatggtttaaaatttgggtttgaattggtaaacaaaaatgaactatttattttggttttattcaagggcccaggctgaattgagccatatcaacgatattttaataaaaatataaaagacagtttattaataaaccatattataattatggtcatttgttctccttacaa

SEQ ID NO: 52461 - DNA, 489 bp, Gossypium hirsutum
  Clone ID: uC-gsronu33B038c03b1
gaagtttatggcgagaaggcaatcctagtcactgaagtaaaagagcttgaaaatcgcttgctcagcttgtcagacgaaagagacaaatctcttgctattcttgatgagatgcgtcaaaccctcgaagctcgacaatctgccgcacaggagttgatgaaagcagcagagcaggaaaagctggaaaaagaagaatctgctcgtaacgctcttgctgaacaagaagccattatggtgaaagtggtcgaagagtccaagattctaaggcaggaggcagaagaaaattccaagttacgtgagtttcttatggaccgtggccagattattgactcactacaaggagaaatatctgttatttgcgaggatataaggttgcttaaacagaagttcgatgaccgtattccattaagcaaatcaatatcctcaagccaaaccagctgcatcctggcctcatccggttcatctctgaaagcagatcaacagatcttggtt

SEQ ID NO: 52462 - DNA, 668 bp, Gossypium hirsutum
  Clone ID: uC-gsronu33B038e10b1
gtttgcaagtttttaaatcaatgtggttttaaaagcaatttttttaatgttctgcatatactttggagattggatacctcaaactttaatatgtctgcttcatgtttcgactatcctaccttttttttgaagaaaatgaaaaaagaaagattcattttctcaagggaaaaaaatgtcaatttttttttgaaaataattagtcttttaaaaacgtctatttgcccttcttaattggcattgagcttgcctcatatgaagcttttttgagctaatttgttgatgatataaccagaaggttagttaatcttttcttttccttcttttttttcgtttttaaaatttttctatctttgtagtttggattattttatttaggaatttagatattatttatcataaattttaatattatttaattgtcataaagataaattttatttattttaatatttaaatttgttattttatttttggattaggtagttttggttgctgttagctcactaggaagctcatcttttttactcatgaaccttagattaggtattaatagatactttatttaatattaattacttaacagatggttgtaaaagttggatggtgcttcaagattagcaccatacctactggatagaagattttatcattgcattgaaatcattttt

SEQ ID NO: 52463 - DNA, 597 bp, Gossypium hirsutum
  unsure (1)..(597): unsure at all n locations
  Clone ID: uC-gsronu33B038f07b1
attttattattattgttataaattacattatatagtaaaaatagcataatataaaacattacaaacttgaaaaacgggccaggtcgggtttgggcttgagcttggccgttgaatgctctagctcgagcctagtgtttttgcctaaacccttacaaatttcaggcaggcttttgggccgcctaggacaatgaataggtctcagtggtaccatgtaccccaacaagtgacctatatggaataggttagggggtcaaacccagtaagggcgagacactcaggttgccacttgttgtgtggtcgtacacccacttacgatcgaggcgctcctggctttgtgaactaggcccttagggcagccgctcgtggcatactggctctcagcagagcacgggagacaataccttctcccggaggacaataccttatgttgttaagggaccggatcgactgcttggtggacgacactttgaagacttctccctaagatttcttttagtttagccctggaaatatttctgttttctctgaatatgattttggatcaatttgggttagttttggatagtcaaacatatattatttgggattgtacttgng

SEQ ID NO: 52464 - DNA, 225 bp, Gossypium hirsutum
  Clone ID: uC-gsronu33B038g05b1
cccacttgtccggctagtaataagtttgggctagggcattggtttgggtattgggttagggtatagttattgggccatgtaatggggacattttaatggcccattcaattaatttatatttggtttatttttatttattttggtttttttgggtgttgggcccaggcaaatttggcccattacaatatgatttacaaaataagttatataaaattacttttttat

SEQ ID NO: 52465 - DNA, 504 bp, Gossypium hirsutum
  Clone ID: uC-gsronu33B038g07b1
cccattcgtccgagacgtggttcatgtcagagctagaagaggtgaagctactgatagtcacagtttagcagaaagggttagaagagggaaaattaatgagagactaagatgcttgcaagatattgtcccaggatgctataagacaatgggcatggcagtcatgttagatgagatcatcaattatgtccagtccttgcagaatcaagttgagtttctttcaatgaagctaacagcagcaagcacttattatgacttcaactcagacacggatgccgtggaaagaatgcagagggaaaaagcacagggggcaaaagatgaaatggacaaatttatgagagaaggagatactgaaagactagcttgcttccactcatcaacatggtcctctttgacttaatttctacatccatgcctatacttaattgccttacaaaacatatgatcatggagatgctatatttttcaactctttttttttctttctatttaaatgtattatgatca

SEQ ID NO: 52466 - DNA, 228 bp, Gossypium hirsutum
  Clone ID: uC-gsronu33B038h01b1
gttctcatccttgtcgttctgcacatcctgctcgtttctctcctgatgataaatttagtaaagaacgtgttacatgtaaaaaacgatttggtatcttacccacacaacaaccagctgtacgatattaagcaacagcaatcacacacattcaatcacatgtcatacatagaatagaaaaacgcagcacttggataggtggaaaaaagcaacaaacacgcatcgtcttgg

SEQ ID NO: 52467 - DNA, 247 bp, Gossypium hirsutum
  Clone ID: uC-gsronu33B038h08b1
attattttttggttccccttttctttcttcttccccctttaacgtgcttgtgcattattagtcatcgctgagataatctccttagtttgaatatgcaagcaaaaaccctattgatgcagcagaaaggaaaattttaatacccaacaaattcaaaagaaaattaaggatcgtgaaagttacccagattatttgaccattttaatcttgtaccaagatgaagttgggaatgatgttttgcaagtaactg

SEQ ID NO: 52468 - DNA, 542 bp, Gossypium hirsutum
  Clone ID: uC-gsronu33B038h10b1
cgagtttagttgttggctgcaagaaagtgtatgtcaccgtgtacaagaagaagtaagctctgtgaacgattcaggttacttggaacacttattctttctcttgactgggcgacaacttgatgcagctgtggagctggcagcttctaaaggagatgttagattggcttgtttactaagccaggctggtggaccaacagttaatcgttctgatgtttcaagacagcttgatatttggagaattaatggtctggacttcaatttcatcgagaaggacaggattcggctttatgagttgcttgctggcaatattcatggtgctttgcatggtattaagattgactggaagagattcctaggattgttaatgtggtatcacctaccttcagatactgctttgcctgttgtgtttcgaacttatcagcaccttcttgatgatggaaaagctccgtttcctgttccaatttatattgatgaaggaccagttgaagagaatgcaaatttgagcagagtggaaagatttgatctttcatactaatctatgc

SEQ ID NO: 52469 - DNA, 198 bp, Gossypium hirsutum
  Clone ID: uC-gsronu33B039a01b1
gcctgctctcttccactacccccccccccaagcggagcggcgctcaaagagtatcagcaccttcaaagaaaccacaactcaaagcaatggcggacaaggctgttaccataagaactcggaagtgcatgaccaacaggctcctttcaaggaagcaatttatcatagatgttcttcataccggacgaccatttgtttcat

SEQ ID NO: 52470 - DNA, 161 bp, Gossypium hirsutum
  Clone ID: uC-gsronu33B039a04b1
caatactttgatgtactttgggttcataatcccgtatttcttcatgaaattggttctttaagcagtttgtaagattttacttcgcaataatcgagttttatgttggataactccaatatggtctcaatacaacagacaacattgtagttgattgatttaga

SEQ ID NO: 52471 - DNA, 105 bp, Gossypium hirsutum
  Clone ID: uC-gsronu33B039c06b1
ccctctcgtccgcccgacttttacgtttccaattctgaaaagaaaacgttggttagggattttgaggatgagttccaccggaggatcagcgaaaggagggagagg

SEQ ID NO: 52472 - DNA, 303 bp, Gossypium hirsutum
  Clone ID: uC-gsronu33B040a07b1
aattttcaaaaatcttaaaaaaaaaaaaaaaaaaagaaaaaaatttaaggtcggccaaaaaagagcgcacgaagcctccatactcgtgcctgcctcgttttgggcccctcctttagtgtctcccacgctcactgccccggccgtcgttgttcaaccccctgactgggccacccctggcgtcacccatcttaatcggcttgcaacacatgccggctgcgccagctgggcgtctcccgaggtggcccccaccgttggccccccccactgttgcgctggcccgatcgccttacgggcccccccctt

SEQ ID NO: 52473 - DNA, 498 bp, Gossypium hirsutum
  Clone ID: uC-gsronu33B040b01b1
ccgaaaccaaatcctttgaaagttcaaacctccgcaacttttttcttggccatgacaacctacggcacgatcccagcttccacactcccttcggccaaccttgaatacctatctcgagccaaagaacgtatcaaagatggcctcggagctcgacatccatggaaactcatgttcaacatccactccctcaactgccctcgaaccttctctgaagccatttccaggtttagagctaacttagcttacttccgcatgaattatgccataatcgtgcttctaatccttttcctcagcctattatggcaccccatctccctcgtagtcctcattatcatgatggccctttgggttgttcttgtacttcctacgggatgagccattggctattttcaaccgcacgatcgatgaccgtgtagtgctggtcgtgttgggcgtttcgacttttgtgtcttgctgttgactgatgccaccagcaatatcttagtgtcagttatgatt

SEQ ID NO: 52474 - DNA, 104 bp, Gossypium hirsutum
  Clone ID: uC-gsronu33B040c07b1
ccctcgcgtccgtccgacaagaattatactaaggcagatgcacttcagaagaaaattactatttcaggatacagggtgttgaatgttctgaacccgtatattct

SEQ ID NO: 52475 - DNA, 169 bp, Gossypium hirsutum
  Clone ID: uC-gsronu33B040c12b1
tttttagaagttcatcacaccagatatgacaagggtggcattttgagttactcaaatgacacccacccaagcctcagacgaggaagccaacttattcgctatgcaacttgccagtgcatcagtattcgccatggtgctgaaatcagacatagaacttgacttgctgtag

SEQ ID NO: 52476 - DNA, 117 bp, Gossypium hirsutum
  Clone ID: uC-gsronu33B040d03b1
atgttcaatggctcactggaggcaagggaagctgagaaaaatggatccgtttcctcgggaaaaggattggctccgagggctgagcacggagtgatttttagatttgagtgagaactt

SEQ ID NO: 52477 - DNA, 239 bp, Gossypium hirsutum
  unsure (1)..(239): unsure at all n locations
  Clone ID: uC-gsronu33B040d12b1
gaggggccggtccggaatgaccctcgcggcccgggttttgagcctgggcggccgcgaaagaggcacgaagactggtttggttatggacgctggagcgattaccacccaagcccacgtagactatgagaagattgntggcggtaccagccgccccacaggattagaacctgatgatgacggtctcgatgctgacaattgacaggatttggttaacatagagcagcagagccctgatattg

SEQ ID NO: 52478 - DNA, 335 bp, Gossypium hirsutum
  Clone ID: uC-gsronu33B040e08b1
tgtcttccgtctcaccgtcagcgtgaccatacaccttctctagcagaaaatgaaggggtcaagggagaggtccagggacgagcccctgacggacgatcagacggtcgagctgatggaggctttcagggtggctgacagggttggcgacgggggcgtcactacctgggtgcctgcgactgtgctgcgatctgttgttcagacccttactgaggccgctcttcaggatatgctccatgatgtggacgctgatggaaatgggaccagtgatggtaccgtagatcttaacgtaatggctaggctgatgacggggactgtgtccgatgcagatcccaaag

SEQ ID NO: 52479 - DNA, 780 bp, Gossypium hirsutum
  Clone ID: uC-gsronu33B040e10b1
ggaaactccagtctccatttaatcttcttcgatgaactgaagcatggcctcgaatgaaaaaatcaggccagtccaaacgaacccaagccgaatcagtcatttgtttgggaagtatctctcgtctcctctgcaatcaccatgtctctcaccgccatcgagatgtcctccatccaaaagaatccaaatatgctcgatcaaaaccttcatggttgattttctcaattaccgtcctagagtccccttctaccttcactttggtttacccgttctttttagcaaaaagttgcccttgattgctgttctttagcttttgccaagatcgtatcattagattttgttctgttttcattctattttttttttaccctccactctttgttttgtcttatctttccttcttctatctcttttcttttctattccttctctttttttatctttttttttttctctcttttttcatttctttttttttattttttcttttttttactttcatatttttcatattttctttttttattacttctttttcctctcttttttttttctttatttttcttctttcttttttatttattcttcttttttttttttttttttttttatttactttaattttttatatttttttctttttttttctcttttttttattttcttgttttttttctttttttaatcttttatattttttcattatattatttttcttttcttccttgtattctctttcttcttttttctttctttttcccttatttattttcttttattttt

SEQ ID NO: 52480 - DNA, 267 bp, Gossypium hirsutum
  Clone ID: uC-gsronu33B040f07b1
cgaccgattcgacccacgctgccgggctgattacaacatccaaaaggagtgaactctccacctcgtcctccgtctgcgcggtgggatgcaaatcttcgtgaaaaccttgactggcaagacaatcactttcgaggtcgagagctaagacacgatcgacaacgttaaagcgatgatccatgacaaggaaggcatccccccagacgagtaacgaattatcttaaccggataacaactcctagacaggggaaccttggtctacttcaacat

SEQ ID NO: 52481 - DNA, 134 bp, Gossypium hirsutum
  unsure (1)..(134): unsure at all n locations
  Clone ID: uC-gsronu33B040g02b1
gcaggacaggtccggaataaccttttaaaacaattttcaagttttgtaacanaagagaaacaacgaaaccctgtttttttttaaacacaaaaaccgaggacgagccttctgacaccatcgacaatgtcaaagcc

SEQ ID NO: 52482 - DNA, 420 bp, Gossypium hirsutum
  unsure (1)..(420): unsure at all n locations
  Clone ID: uC-gsronu33B040g04b1
cggtcgcgtgggcgaagatattagcaaattctatttgttaacaaatcctgatttaattatgtgtttctgggtttttntaaggttgagggggtaaggtggataaggttagggtggaaacatagctacggtgatggacaaggactccctttggatgtcccgaaaggtcattttgtggtttatgttggtttattttaattcttgtgatatttgtgtatattcttatctgttttcatttttttttaattttttttattcatttttattatttaatgtaattctttttattttctttcttgttatggttttttctttatattttatttttttactgttcttttattttttttttttctattttttttgtatactttttttttttcttttcgtctttatttttatatttattgttattttcatttt

SEQ ID NO: 52483 - DNA, 179 bp, Gossypium hirsutum
  Clone ID: uC-gsronu33B040g08b1
tgcccgctctcttattgggacacagggggaaacactaaaggtgaagaaacagagggacaagcaggcacgccggacgacaaaagcagtgccaggggccaaaagacacccaatcacaccaaggggctgaagaacgaccaacacgcaacactgctaaggaaaggccacccccaagagacaaa

SEQ ID NO: 52484 - DNA, 289 bp, Gossypium hirsutum
  Clone ID: uC-gsronu33B041a06b1
gcatggataggttcgggagcccggaccgaagcaaggaagtgtgttcttcggttgtggaaactggactgtcaaccgaggtgcccgctgccactactttgagtgagccttcgtcctgaaactgaatttgcaacatcatattcatctctcatgatggcatcttaaacccttaatgtataaaaaaaaaaaaggttaaaaaaagatgaagaaaacggtagtgggttgtcttctcattgatgcacacactacttgttgaggatttctgcatcttgtataaacatttgtatcatac

SEQ ID NO: 52485 - DNA, 235 bp, Gossypium hirsutum
  Clone ID: uC-gsronu33B041b02b1
cctttctttgatccaaccttaccataatgaaagcactgagaatatcagcagtgcttgaattcattgttacagtttgcagttcttgagttaaaaatgtcttacctgctttgttttaggccattggagaagacaatcagcgacttccagatgcatataatgatgctgggatttcatcatggctatatttattatatctacaattcatcatatacatcaactgggaaactggtattgt

SEQ ID NO: 52486 - DNA, 379 bp, Gossypium hirsutum
  unsure (1)..(379): unsure at all n locations
  Clone ID: uC-gsronu33B041e10b1
tcggtctcgtgggcagttttgagagcttcgtcgacatcaggtaactatcattgttgcctccttggagaaattagaaactgtcttattagtgagtcctgtttgtatgtgacttgcatgaatattccaatgcatctctttatcagatatttgttaatgcagaaaccaagcctgaaacattcatttagaggatacttgtatacttgtatgacccttttgttccgctctttttgttttctatactattaattgagatgaatatgagtattctaatnaataataaaaaaaaataaaataaaaattaaataaaaaacataaaaacaacataatgataatttgaactttttaaattggtccggcctttcttaaggttccaagtttt

SEQ ID NO: 52487 - DNA, 570 bp, Gossypium hirsutum
  Clone ID: uC-gsronu33B041f05b1
ccctctcgtccgtaaaattaggagttttctcacaaagttcccttcatccttttgattttctaagcatccaaatacctttttcttttccattttgttaaaatattcatcctttctccttcaattttcttttattacttagctcgtttttgctcaaattgatttaatttcatggagatcttcaaataaaagcctctaatcacgagggagcatccacgagaaaagaaaatggcaattagaagatggtgtaggttcaacagtatcaatgaatcaacagggcattgtggctcaaatatagcgttggagaataagggaatgtcgagtatagctccattcaccgtagatagtgtggcgtgtctgaagagtgtgagcacttgtgctacacttattggagataacgcaagactctttgggttatttggagtgttttggagatccatttcttcaatgcatacaaattatgaattatgtttcacattcacaaattgccaatatgtcactacgatgtatatgaatattgattttgacgaactattatagcaaggctaatttctagcaaaaataattatcttt

SEQ ID NO: 52488 - DNA, 443 bp, Gossypium hirsutum
  Clone ID: uC-gsronu33B041f12b1
ccctcgcgtccggtgaattccgaacaggaaagattgtcgattccgttattcttcttcccttcccactatgtcaaagtggcgcctctagatgagctagtgaatgagcaaaacccagcgaagtataaagaatatagctggggaaagtattacattaatcgaaccggcagcaactacaagaaactcgaggctgaaaaccttcaaatcgaccatttcaagacgccagaatccgaataattgctgcactctatcatctctgattctaaaccattacctgttttttagtttcagcttcaagttgtcatcatatgatataatgaacatagtttgcatcatatagaaaaatatgcttttagtatgtttcagctacgtgattatatgcttttagtatgttttggctacgtgattatatgtaagattttaagttgaacaaaaagattgttttc

SEQ ID NO: 52489 - DNA, 222 bp, Gossypium hirsutum
  Clone ID: uC-gsronu33B041g12b1
cccatgcgtccgcggacgcgtgggttcagttcccgcagtactaaatttcctttcaaacctcttaaattttactttttattcaaacccctccatggcctccctttccgatcactctaattcggaagttgtttataggtggcagaacactggaccccctttcaagttcctagtgccttttagtctatgcccctgttctttcctttatattcgactctctttgag

SEQ ID NO: 52490 - DNA, 530 bp, Gossypium hirsutum
  Clone ID: uC-gsronu33B041h11b1
tttcttcatctataaacaagactgctggagaagaccatctcaaagcttctagtgttttggccgagaaccgtttcagggccgcaactatggtgggtgtcgaaggtggtcagcattgggcttcagctgccttcccagctaatgattccaaaacacggtcagggtcgaaattgcagtccttggggaagcacaaactgcctgcatcagacacagcctgacctaaatcaaaactgaagaaggcctcaacggagcatagcgatgtacctaacttacatgctgtgcaagtatttcaaccagtatcaacaattgcattaaaagaccccaacttatgatgtgacccaacattggtcactaatgttggcagttggaccaatggtgttggcagcattttctgttcgagcatggacgaagcctttccatcggaagtagagagccttgtatagtcccgcacattattcccctggctttatttatgactcgacgattgttaatgctcccgactttactgacttggataaactgctgagattctt

SEQ ID NO: 52491 - DNA, 144 bp, Gossypium hirsutum
  Clone ID: uC-gsronu33B042b07b1
cttttattccttatctacagggatcgaaaaattggtgtattttcggtttttctgcatgcaacttgtccctgtgagtccatgaactttgttagtgatcttttgcaggttggtcaattcttcgtttgatccttttctgcactttac

SEQ ID NO: 52492 - DNA, 421 bp, Gossypium hirsutum
  unsure (1)..(421): unsure at all n locations
  Clone ID: uC-gsronu33B042c01b1
gagtcatcaaatttttatatatccaattaattaaataaaaaattattatcaaaatcttaaaaaaataaatcatttcatgtttagtaaagtttttgattcactaataaattttttttctgaggaaattatttgcaatggaacaggcacaagtgcatcggatagccaacattcaagactaaggaagagccatggaatactgaatatgctaagttggggcatattgatgataatcggagccatggctggtcgctacttcaagcaatgggatcccatgntggttttattcccacgccgctattcagtcatgcgccttcctgctgggccttgccggtatcatttctggtttcgtcctagaagatcgtctcgtccccgaagtcgacacccacaaagctctaggcatcctcattctcgtgctcggatg

SEQ ID NO: 52493 - DNA, 512 bp, Gossypium hirsutum
  Clone ID: uC-gsronu33B042d02b1
cccacgcgtccgcccacgcgtccgctttggtctttgaaaatatttccatggattttatcaccgggcctccaccttcaaagggtaaaatcttggttatggtggtcgttgatcgactttcaaaatatgggcattttgtgggtctgccaactcatttttccagtcaaatagttgcttctgcctttgtgcaagaagtagtgcgattacacggcattcctacggagattgtctcggaccgtgatcctcgtttcctcagtagcttctggaaagaagtatataggctccaaggcacgacactgagtatgagcaccgcataccacctacaaactgacggccaaacggaggccctcaaccgatgcttggaaatgtatttgagttgctatgcctcggaccaccctacctcttggatgttatttttaccttgggccgaatattggtataacacctcataccaaacggctgcgcaaatgacaccttttgaagtgttgtatggtcgcccccacctacaatagcac

SEQ ID NO: 52494 - DNA, 171 bp, Gossypium hirsutum
  Clone ID: uC-gsronu33B042e06b1
caatattaaaattttagggaagttaaataaagtaaaattagcataaattgcttagatattagaaagaaaaagtgaaaaaataattgttaaaattaatcagattaatttagttcataattgttaaatttgcacattacttttaaattaatggatcaaagaacttttggtggt

SEQ ID NO: 52495 - DNA, 416 bp, Gossypium hirsutum
  Clone ID: uC-gsronu33B042f02b1
gctgggccgcctgcccgtgccggtccggtcctcccgggtcgtccctcgcgtccgattcttattttcttaccggagatgcatttctaaaaaaaaaaaaaagccaaaacataaagagaaaggctcgccccctctagcgggcccaggctttccttcccccttctttgcgcccccctctccctttctcttgcggcccctttttttttttcactgcccgcgggtttcccccgctgggcccctcattgtcccgggcttgccgccgcctttttcttccttgccgcgtccttccccctttcccccgcctcgccgtcttaccgcacctggcctcccccccgttcctccttgggtctttgtcttctgcccccttgagttggggtattggtttccccccccttttgggttttcttttcaccccccct

SEQ ID NO: 52496 - DNA, 199 bp, Gossypium hirsutum
  Clone ID: uC-gsronu33B044a02b1
cccattcgtccggaaaaacaaagacagttagtttggcccctacgatacaaaataattaaagggattgctcgagggcttttataccttcactcagattcgcgtctcaaaatcatacaccgtgatcttaaagctggtaatattctattagacaaggacatgaccccaaagatttctgattttggtatggtaaagatagttt

SEQ ID NO: 52497 - DNA, 370 bp, Gossypium hirsutum
  Clone ID: uC-gsronu33B044b09b1
ctcattcgtccgcccacgcgtccgcccacgcgtccgtttactcttcacttttaccttttagtctatgtttcttgactcttcaattttttttttaagtgcttatgtgcaacacttacgtcaataaatgggtatgatggatatgatctccaataatcctccaaatacatggaaaaactaagaaagatctgaccatagccatgtcagacacttacccgcatcacacacacacccaagtccgagtaacatagcttttagtaactttaggaagcaagaagcaagaagcaagaagcaagtggctttcattaatccccatagttgctcgactcttgaggagtatatgttttttagcatgtgggaatagttgatgttt

SEQ ID NO: 52498 - DNA, 208 bp, Gossypium hirsutum
  Clone ID: uC-gsronu33B044c02b1
cccactctttcgcccacgcgtccgatgctggatactctcaggtgtgaaggtcttcaaacatgtttgtagaaaattttggtagtagaaaagggaaatacagttttcttgttgctattaaataaagttgaggaaggaaaacagacttttatgtatatatatacaatatacatgtaatgctattctgtcaattgattctcatatttattgt

SEQ ID NO: 52499 - DNA, 373 bp, Gossypium hirsutum
  unsure (1)..(373): unsure at all n locations
  Clone ID: uC-gsronu33B044c08b1
gtattgnttaatcaaaggccgttgaaggaggacgatttaatggcggcggcgacggcgcaagggatggacccagcggttctagactatataattagactgttgactgatgttcgttcagacagtctagttaattaagttcattctatttttattttttttcatacagtttttttgttttttaaattagatgatatacattttttttactctcacttatattttttttttctattttatttcttttaatttttattttatttattcttttatttttttattatttatattatttattttttcttttttatccattttttatttatcctttttatttttaaattttctattcttttttttattttttcatttcttt

SEQ ID NO: 52500 - DNA, 285 bp, Gossypium hirsutum
  Clone ID: uC-gsronu33B044d03b1
gctgtctatcttcttcaaataaactcagacgagcaaacatgactctcagtttagtaatcgatttacggctaaggacatcagctactacattaaccttactaggatgatactctattgtacaatcataatccttaagcaactcaacacacctacgctgcataagatttaactctttttgagttaacagatacttgaggctcttgtgatcagtgtaaatgatacacctctcaccatacagataatgcctccaaatttttagagcatacaagactatagtcaggttaa

SEQ ID NO: 52501 - DNA, 268 bp, Gossypium hirsutum
  Clone ID: uC-gsronu33B044e08b1
ttaataaaaaaaaaaaaaaaaaaaaaaaaaaaaaaaaaaaaaaaaaaaaaaaaaaaaaaaaaaaaaaaaaaaaaaaagaaaaaaaaaaaaaaaaaaaaataaaagaagaaaagaggagaaagaagatgcaaaaaaagggtcttttttgtaaagatacacattatgctttcaaaacttgaggaacataaagccttttagatggtcaacaacattaatgatatgctgggggaactatcttttaagatgactatacatatatgtttgtcac

SEQ ID NO: 52502 - DNA, 482 bp, Gossypium hirsutum
  unsure (1)..(482): unsure at all n locations
  Clone ID: uC-gsronu33B044f03b1
tccggcgcgtcgtgtgtcctccacggcggtctcgaactcgaggctgacaagatccgcgccgtcccaccttcccaacgcctccaaatcgtcgaagcttactcgcccgacgccatcgctcccgcaccctcgtcctacggcacctctaagaaccacttcgccgctactcctgctctctccgtctcgtcgtctcctctcgactcccccgtctcttctgcccgctcgtccccaccacctcaaaccccacccatgcttgcttctccaagcaggccggcggcggttgctggtaagagcacggatgagatcgaagtcttgaagttggatgcttctgagaagctgtaaaaggcaatcgggataacttggttcttgacgtttgtgtgtgttgggtgtagaanagacgctggtgttttatatacagtgcttgttcaaccccttccctttcatttccttgggcccattattggagaacggcacacttaacccct

SEQ ID NO: 52503 - DNA, 256 bp, Gossypium hirsutum
  Clone ID: uC-gsronu33B044f04b1
atagatgattaagagggagatctaaatccttcataatctatgtggtggcccgaatattgttaaacttctggatgtggtctgacatcagcactcacaaacaccaagctagatattcgagtatgataacagctcagatttgatggatctataccgaactgtgactgactatgacattcgctactatatatatgaactgctgaagggcttagattactgccatctacacgggataacgcatagagatgatacgcctgac

SEQ ID NO: 52504 - DNA, 298 bp, Gossypium hirsutum
  Clone ID: uC-gsronu33B044h03b1
acggtgtttctgccctgggaaaagatggcaataatggacctaatatcagagaagtagggaagtctatacttaaccttctttactcggagcctggaaatggtctgtggcaagcgaaagccgactccaattttatgcattgacggacaccgaaaccccttattggaggaaacacttgtggtgatacctgattcaatatgggatgcacctattgctggtggagttccatggtggacgcgaagatctttttgccaatgtacatgatttattgccaccctgattataacgcgcgagatgagga

SEQ ID NO: 52505 - DNA, 390 bp, Gossypium hirsutum
  Clone ID: uC-gsronu33B046d01b1
atctatattctattattatttttcttaattttagtaatgtaaagttcgttcctttttcttaactggcttggttagacttggcaatccatgtatgagtgtatatatgtgtgtcctgtttcatattttttaacataaacctaaacgattaaatttgtcaaaatcctaaacatgaatactattatactcgtcatgtttatttcattgttttcgtgcttatcaatcacgtctaggtgtcattttgtgctcaaaattgtcagaggtttatggtgacttgaagtaacaatttactcagtgatatgattttctcgtaaaagccggcttgatgtttctcttacataagattttggtctttagtttgtatcttagtgcccgtttttttgctataggttc

SEQ ID NO: 52506 - DNA, 218 bp, Gossypium hirsutum
  Clone ID: uC-gsronu33B046d11b1
tggtattggatgttccttttgagatgatagagtattttgatccctgtcatcccattttggttggaggaattggtctcggtgaggaaaatattggatacatgcagacaaggttaaatcgacacaaatggtacatgaaagtgctgaagactagagatccaataattgttaaaattggatggaggctttaccagaccatccctgtttaataccattgagga

SEQ ID NO: 52507 - DNA, 139 bp, Gossypium hirsutum
  unsure (1)..(139): unsure at all n locations
  Clone ID: uC-gsronu33B046f01b1
acgttgcgttcgaaaagggatcgactgaggtcggtgtggaggcttcaggcttactgacacaagcgtgcgacctcatagnggagacatagcggaaccttaatacaactcagcgtccccatggttacaacggaccatccga

SEQ ID NO: 52508 - DNA, 272 bp, Gossypium hirsutum
  Clone ID: uC-gsronu33B046h09b1
tttccctcgcgtccgccaaaacaaaatacaaagattaagccaattttcagtattatgttaactatggcttcaaatcccaaggcattttttgacatgacagatcggaggtcatccggccgggcgaatcgtgatggagcttttcgcagacgttacttcttgtactgccgagaacttgcggctgctatgtaccggtgagaaaggagatgggcggtccggtaaactacttcactacaatggctttgagttccaccgcgtgatccctgattttatgt

SEQ ID NO: 52509 - DNA, 228 bp, Gossypium hirsutum
  Clone ID: uC-gsronu33B046h11b1
tcttgattacaagaactgactgcgttgataaaaactgatattaccaccttgaatatggcactttctgatttacaaacacttcaaaacatggagattgccgatgggaattactccgaggatcgaattgttcattcgaccactgtttgtgatgacttgaagaacaagttaatgggtgctacatagcatttttaagatgcgttgactgcaagaactgttaatcctaaagct

SEQ ID NO: 52510 - DNA, 447 bp, Gossypium hirsutum
  unsure (1)..(447): unsure at all n locations
  Clone ID: uC-gsronu33B047b03b1
atgttatctcattaactgtcagtctaaccttaaaacctgttattttcctgtttcctttcttctttcgtttgtccgggaatctgagtgacaatttcttttcttttgaacggnggagcgtaatttaatttttgttataagcgtttccttattatggtgtagtggtaagtataataggcgaatataagttgaaataatacaggagatgagcaaagaacacctgcctgagccactcgatttcttcatttggaccgttgaggatgctgtatgtgtgggggaagatataaatcttggcagctaccgccagattttcaaagaacatggcgtaaatggggaatacctggaaggcatgtctatgttcacaactgaacagattcttagatttataaggcaatgccatatgaagggnggagacttcatcactctatgcaaggaactcaggcgaataaa

SEQ ID NO: 52511 - DNA, 195 bp, Gossypium hirsutum
  Clone ID: uC-gsronu33B047b05b1
ccctctctttcgcaagcttcgagggtttacacgttgcacttgaaacatctagcaagccaagcgaaaatggttctccaaaacgatatcgatttgttgaatcctccagcaaaacttgagaagaagaagcacatgcctcaagcgtcttggtcagtctcccaattctttcttcactgatgtcatattcccttgctgtct

SEQ ID NO: 52512 - DNA, 289 bp, Gossypium hirsutum
  Clone ID: uC-gsronu33B047c03b1
tccatacatccggccacgcctccgtgtgttatacgcacacgctgactggctctcaccagctatcttttattacattgtgtatggtgttgtcaagtcagtagccaaagatgtacaaatatcttatatgatcactacaattatttccgaaaatacccagccatgtgcatcttctgaaatgtcatggaatctattcgaattaactgccagtacgacactgacgtattggattgagctcagccggatatatgaaataatgctcaacatgtatattttcgttttcacagcggaa

SEQ ID NO: 52513 - DNA, 284 bp, Gossypium hirsutum
  unsure (1)..(284): unsure at all n locations
  Clone ID: uC-gsronu33B047c06b1
ctgttttttaggttcccgnnaaaaanaanaaccatagcagatatttttggaggtttatcttctttttctacacgctatataaatagcttctataaaaccagtacacactatggttttctctctgataaaccctaggtagggatactatcatgtgtagtgaacaaaatgatttttctagcacatttaaatggtgctgacgattcggaacttatattcaaaaagatgtgacgtggaaaaaaaaaaaaaagaatctaagaaaacaaatattgaacaaaaaaacataa

SEQ ID NO: 52514 - DNA, 230 bp, Gossypium hirsutum
  Clone ID: uC-gsronu33B047d12b1
tcctcgcgtccgattagtgggatggaccagtgaggatgtcactgtggatgaaggttctgaccacatgcaagataaagactgttagatagccattgcagactaggatctgaatgtgactaacttcggagaggaccaccctggtggagatgatgccatgattgttcccgcagagacggatgcaactgatgattctggagatgttgcccataaaagctgaggtcgagcatgga

SEQ ID NO: 52515 - DNA, 192 bp, Gossypium hirsutum
  Clone ID: uC-gsronu33B047e11b1
ccctctcgtccgaccactcggacgtaaagaaaggacgactgattgggttttaaaacggcttcactcatagcagtactgatccttatttctgctagtgtatgcacttaaaattaccagactattgttttagtttgaatcattatgagaaaacctgtcctgattttgaatcacatagaaacaaatgttgtctag

SEQ ID NO: 52516 - DNA, 229 bp, Gossypium hirsutum
  Clone ID: uC-gsronu33B047f12b1
ctctctcgtccgataagagggagggaccagagaggacgacactgaggatgaaggttctgaacacatccatgataaagactgttaaatagccattgaagacaaggattcggatgtgactaacttcgtagaggaccaccctggtggagatgacgccatgatagcttccacagataaggatgcaactgatgattctgaagatgtcggtcaaaaaagcagtgttcgagcaatg

SEQ ID NO: 52517 - DNA, 200 bp, Gossypium hirsutum
  unsure (1)..(200): unsure at all n locations
  Clone ID: uC-gsronu33B047g01b1
cggtttcgtgtgtagtngagcgagtaacctgccaggggtgactgttgtcatttcatgagaagggagatgacgcaatgcactgtgtgcaactgaaattaggaatgctgttggaggccagacatattattgttgtgagcacttcaccatcggacgtgctcccgaatgatgcctcaaaccaaatagaaactgctgggaaaacc

SEQ ID NO: 52518 - DNA, 143 bp, Gossypium hirsutum
  Clone ID: uC-gsronu33B047g02b1
cccacgcgttcgcttttgagaggctgtgtagaatgtgtaagcaagcagtttgactgatctttgactcttgaaaatttatgtacagcaaactgtgtttcatgttgttcttagctaattcaaatatggattaatgggtttgattt

SEQ ID NO: 52519 - DNA, 342 bp, Gossypium hirsutum
  Clone ID: uC-gsronu33B047h09b1
tcccattcgtccggaaaaaaatgcttcccattcctctgctagggtttcgaccttgctttagggagccacataggagggtcatcggtgcttcagcaccttcgcctctgacgcagatccatgaagcgaacacaggtaagccctttctctttcagtttttatttagaatccgtttgtaaaaaaaacgaaaagaaggaataaaggaaacgtgaatttgaaaagaaaatcccagaaaaagaatgaaaaacaaccttttaaaccttggatctgatttttttattgctattgattttttttattcagtatccataaaaactttgcaccgattctctggctttttatagc

SEQ ID NO: 52520 - DNA, 135 bp, Gossypium hirsutum
  Clone ID: uC-gsronu33B048c04b1
tcatcccttttcttgaacctcaacatgtttgctcttagttctgtattcaatggcttccaattctttgttcaaaacttttaaacacaatagaaagattatggggaagagtggttgacatttgttttcattatattt

SEQ ID NO: 52521 - DNA, 146 bp, Gossypium hirsutum
  Clone ID: uC-gsronu33B048d01b1
ccctcgcgtctgtccacgcgtccgcagcttttggaacatactcagcactctccaagattgttgagaatttgagattttaaaagccctattccattccaatgttcttgtattacttaatttttctatttggctatcttaatttaatt

SEQ ID NO: 52522 - DNA, 192 bp, Gossypium hirsutum
  Clone ID: uC-gsronu33B048d06b1
ccctcgcgccttccacgcgtccgcccacgcgttcgtttttttttgcataaaacaagaaccaccatctttaaataagtcccaatatgatagttcataatattaattccacaagtgccacattaaaaatatatcactgagattattgcctcacattattaactaatcttgcttctttcaaacatcttactttta

SEQ ID NO: 52523 - DNA, 513 bp, Gossypium hirsutum
  Clone ID: uC-gsronu33B048e01b1
gctgctgtatatatgtatgtatatatgtgtatatataacacttgccttctattatgtgtatgggaaatttttccttaatcaatcaataagtcatttgtgttttgcatatgaaaagagcaagaggtgttttcggattgattatgatggtactatttttcaattggagtttcatgataatgagtccaataaatgttgattataaagggtcaaattttaccaaaagtctggatgacgcttgattcgttgtcaaatgcgatataatttcagtatcgtgttaacggatcttcgatctgcaagtaaggaaacaaaaaagagttaactggttttggtcctgaaatgatagaagataattagtgcatgagcttgacattatcatcatatgtatactggagatcatggctactaccttgaatgtatggttgattatagtgtgatgatttaaagtgatccgatgtcctatgttcatatctaatgtcttgtagggttagtatatatactttctttgttcaaggt

SEQ ID NO: 52524 - DNA, 272 bp, Gossypium hirsutum
  Clone ID: uC-gsronu33B048e06b1
gcctcgcacttatcccttactgtgcattacggggaagagatgagctaccgattttacttacactgtgacaaacagcctcacttggagatgcatggttggcctaaacagatcggttcctattaagcccgtagtcttagttcgcattccttaattctttatcttgtttttttgttttccctaccatgcctgcttttagctctaatctggttttatcttctagcttgtcctctatatatacccacccttacaggggctccttgtttgttaatgtg

SEQ ID NO: 52525 - DNA, 300 bp, Gossypium hirsutum
  Clone ID: uC-gsronu33B048f01b1
cggacgcgtgggtgatgatggccatcgcatcgctcgtcgctgctgtttggaccaaattctaaattcatctccaccaccatgatgatccacccatgtattgatcacatcatctcacactctcttcctatcctcacttcctcctccttccctttctcccctccttttggttatttttttggttcaatttaataattgtttcacctcctaacgatagtatccctctcctccaacctttgcctgcctgtcctcattatcattgtctcgatctcttttggttggtacatcccctcctttcctttc

SEQ ID NO: 52526 - DNA, 408 bp, Gossypium hirsutum
  unsure (1)..(408): unsure at all n locations
  Clone ID: uC-gsronu33B049c04b1
ttcattgacctgtccttcatcttcaacaccaatctgaacatgaagaccaccttaccggtggcggaagcggcggtggatcagccgatgacttgatgaacacaggtcataatgaccttgttgctcgtagaccaaggggtcgtccacctggttccaaaaacaagcctaaaccaccagttattatcaccagagaaagtgcaaacgccctaagagctcacattcttgaaattggcaacggctgtgatgtattcgattgtatagccaactatgctcggagacgacanaggggtatctgtatattatcgggcagtggtacggtcaccaacgtcaccattagacaaccatcagcaactggttcttgtgtttacccttcatgggagattcgggattttatcactttccggttcggtt

SEQ ID NO: 52527 - DNA, 251 bp, Gossypium hirsutum
  Clone ID: uC-gsronu33B049e08b1
tcgcccacgcgttcgaccacgcgtacgcccactcgttcgggcacgcgaccgctctatcggtctgttgagagtgcaaaatcaagggattgccggcggagaccactcgctcgctgagggccaaggaaggatggaagatgagagagagagagatacagaggagaatttgcttgaaagtttcaaactctgaccgtctcataggtagtcgccaatttagcatcttctgctctaggaacagtcctgtgatcttagga

SEQ ID NO: 52528 - DNA, 158 bp, Gossypium hirsutum
  Clone ID: uC-gsronu33B049f07b1
tcggccacgcgttcgaacacgaactcgttagctaactaggtcacggtacttgttcatgggttatggaaatctaaaagacggagcgagcgagatcgaagccccttgcctgactgacgtactaaaacacatgtatgatgaatcttagaccgaagctgacc

SEQ ID NO: 52529 - DNA, 372 bp, Gossypium hirsutum
  Clone ID: uC-gsronu33B049f08b1
tcgccctttcgtccgaattataattctttagcatataatattatatcattataatttttcataagttatatatttctacaatattttagagattttttttttaacctctggccgtcctgtctggcggttttaggtttcccctcttttctttcccgtgctttcgcttttttttcttttttcttgggtcccctgaattgtcttccttttccctggtttttgccttgcttgcctgtgaaatctctggttttcttcgctttgtttccctttccctttttccccttttcctcagttgcgcttttgcctatggggcctcgccttttttgccttttccatcattttgattttttgattgccgtttggtttccccctttt

SEQ ID NO: 52530 - DNA, 484 bp, Gossypium hirsutum
  Clone ID: uC-gsronu33B049g10b1
tcgtattttaaaaaaaaaaaaaaaaaaaagggcggacagaataagagagttacaaagataacatacacatacatgcaacaaaatatatagggtctggcgttttcgaggttccaggcttttttcggcgtccttcgtcctttttactttttttttagtgtcccttaatttaatttatctggtctgttgtttttcaacttttcgtcgggttaaaccccttgtcttttcgtcactttattggtcttcgctctctttctccttttttttatccgcttgtcgtctttttctcttttggtcctctctctcgttcctctctttccatctctttttttttctttcttttcctcctcttttcgcctttctccttttttccgtattctttttcttctggttgtctttttttttttctttcattttcccttttctttactcctcttttttcctttttttccttctttctttcttttcttctttcttcctttcttct

SEQ ID NO: 52531 - DNA, 274 bp, Gossypium hirsutum
  Clone ID: uC-gsronu33B049h05b1
ctaatatccagttcatcgacacttaggaactgcctagtcgagttcacgcgattaggcttagatcaatgcaataccagaccaaagttgcataacaccgaagacatcaaacccgaaaatcccgattccccagaacaaccttcggtaagaagcaatgctaaagacagaataacaaacgaacccaaatctctccaaggtttacggatactcctagcggaagatacaccagttctccaaagagtagcaaccatcatgctcgaaaaaatgggagctgtag

SEQ ID NO: 52532 - DNA, 464 bp, Gossypium hirsutum
  Clone ID: uC-gsronu33B050b06b1
tctcacgcgtccgcccacgcgtccgctagatatgaaaatgttagttaaaccaggcaagctttctttacggcaaaaaaaaaaaaaaaaaaaaaaaaaaaaaaaataaaaaaaaaaaaaaaaaaaaaaaaaaaaaaaaaaaaaaaaaaaaaaaaaaaaaaaaaaaaaaaaaaaaaaaaaaaaaaaaaaaaaaaaaaaaaaaaaaaaaaaaaaaaaaaagggggggcccttttaaaagaaccaaatttaactaccctaagaaaagcaactgaaaagttttttattggggacacaaaaataaaattaagggacgagatttcaaaaccttgtggatggaaaaaacccggggtaacccaaattaaatcctttggaaaaaaacccctttttccaaaggggggaaaaaaaaaaaaggccccaaccaattcccttttaaaaaagtttgccatttttaaggggtaagggccccc

SEQ ID NO: 52533 - DNA, 332 bp, Gossypium hirsutum
  Clone ID: uC-gsronu33B050b12b1
atttgtaacgccctaaaaataggtctactagttttgagtaagtttatcgggttccgggtgaaagctaggagttaatcgggtgcactagctaattttttaaaaaaaaattaaaaaaaaaaaaaaaaaaaaaaaaaaaaaaaaaaaaaaaaaaaaaaaaaaaaaaaaaaaaaaaaaaaaaaaaaaaaaaaaaaaaaaaaaaaaaaaaaaaagatttataaaaaaaaaaaaaggggggggcccttttaaaggaccaaagtttacttccgggggaatgaaaaaaaaaattttttttaaggggcccccaaaataaaataaacgggccgggtttaaaa

SEQ ID NO: 52534 - DNA, 488 bp, Gossypium hirsutum
  Clone ID: uC-gsronu33B050d01b1
gtcctgtttgtctattagggactgaattccggaaaaaggtctgctgggaaattttggtggcgggttctgaacaaggtattgaggctggacaagttggacttagattgattactaagggtgacagacagacaactgttgcaaaggagtggagcatcagtgcgacaagtattgctgatggaaggtggcatactgtgacaatgactattgatgctgatataggggaggcaacttgttatttagatggtggttttgatggctatcaaactagcttacctttgtttgtgggtactagcatttgggaacaagggactgaggtttgggttggtgttaggcctcctattgatatggatgcatttgggaggtctgacagtgaaggagcagagtctaagatgcatataatggatgttttcctctggggaaggtgcttaaatgaagatgaggttgcttctcttatacttctatttgctcaactgagtttacttgattga

SEQ ID NO: 52535 - DNA, 420 bp, Gossypium hirsutum
  Clone ID: uC-gsronu33B050d04b1
tccactcgtacggcaggaccgccgcacatagggagtaactcgacataactcacttctttagaaactagcaatcgaaaacgacggcgtatgctgcaatgacaccgaccaggcctggattggaggaattcgaacagcagattcacaaaatcaggatcactctctgctccatgagtgtgaatatcctcaagaaagtttgcgcttacttgcttcgggtggccaaggctaagagactgcgggttaaaggaccagagagaatgcccaccatggttcttcacatgaccacacggacagtttatctgaggggaacgaactaacacatgggatccgattgaactccgtgaacacaagacgaggatagacctgttcagttctctcgacgagactgacaaattacttgcatcaccatacgaacccgagttg

SEQ ID NO: 52536 - DNA, 238 bp, Gossypium hirsutum
  Clone ID: uC-gsronu33B050d05b1
tccacttgtacgacatgatttcctcagatacggagggaggcgatataactactttctttgggcaatagccattgatatacgctgaagaaacgacgacgacaccgtctggagctgtgctgccttgggatgaacaggattttggcaacttcaggatgttccactgatagatgctagtgtatatcgttgcaaggagggccgctcttagagactggagatgtactaacctgataagaatcgg

SEQ ID NO: 52537 - DNA, 265 bp, Gossypium hirsutum
  Clone ID: uC-gsronu33B050f03b1
tttttatcaaggtcaaattgcagttttagtccctaaattttggttaaatttgaaatttaatttttatactttaatttggcataatttgatggttatctcacgattttggcttctaaattatacatgttttctgatttcggtacttcaatttttttttgtctgactttattactttgaagtattgttttcgctaagtactaaaataggaaaacaaatacagttcagaggtgaaatcatgaataaaaccttcgctcatcccaacaac

SEQ ID NO: 52538 - DNA, 381 bp, Gossypium hirsutum
  Clone ID: uC-gsronu33B050f07b1
ttcaagtgtacgacttactatccgcggacatgaaggaaggcaaaataaatacaaaggacgtgcagtatcctttcataaatgccgaatacatgacttcttcaagctatcgagcgctcatgctgtacgatgatcaatcatgtgctcactaaatgcgagaccatggggagacgatgtcttctacgatctatggggcacgagacttggatacaagagttgatgagccatgttttggaacggtttataatgattcatgcgtcgcttgaattactgctgcgttcaacaggagaacgggagactcgaaatggatttcactgattggtgaacagatcatcaatgtgttgccatagtgaacgtgagcaggaaactgttgctacggttgag

SEQ ID NO: 52539 - DNA, 519 bp, Gossypium hirsutum
  unsure (1)..(519): unsure at all n locations
  Clone ID: uC-gsronu33B050g04b1
tccacgcgtccgtgtaaatgttatttataataagatagtatattagtaggaattattttttattattaaaaatttaaatcccaaattggaatctttggattaatttcttcatcttcttttttgatgaaatctttgaattgttttcttaatttattttattgttaaattttatgaaaattttcaattatttatattttattatttacatatatttttactgttaaatactaatttaaaataaactaatttaagttgattgagtattaattcgattggcatcgatattattgttagtgcaagaggatgtgagtttgagtgtgttgaagcacattatcctcctatttaagggttagggagggattatgagtagttctaggtgtaagaaaaatttgattcgattaaaaaaaccgaaaaaatatttaatttttgagttaattgaattgagctattcgaattattcaagtcaacttgaataaataattcgagttttgagttcgaatcgagttaaatnttacaatc

SEQ ID NO: 52540 - DNA, 491 bp, Gossypium hirsutum
  Clone ID: uC-gsronu33B050g08b1
tccacgcgtccgaaaaaaaaaaaaagaaaaaagataaaaaataaaaaaaaaaaaaaaaaaaaaaaaaaaaaaaaagggggggcgtttttggggttctcgggtttccgtcctcggggttcggcctttttaggggttcctttttttcccccggatccattttcctggcccgtttttttctggggccgcctttgtatatcccttggggtgccctttttaaatggccttggggggaaaccccttttcctctgcaggctttttggcgtttggggcccttcccctttggccttcctggccttttttccaagtggtttggcaagggggccgtcccttttgggggccctttccccccggtggtgggggcgttttcttgttggggggctctttttctttgggccgtttttttaccccccccttctttgacctttttccttgcctttttttgtacttttcgcctttttttttttttccctttttttttttggccctttttt

SEQ ID NO: 52541 - DNA, 201 bp, Gossypium hirsutum
  Clone ID: uC-gsronu33B050h02b1
gcgtgttgctacggacctgaccggaccttgaagcctttggtgtacgggagtatctatgactatcgacaactgcggcccctgtaggggcggaagcattgggctaaaaaaagtgtccctgttacggacatatggaagctaagataaaggtgcgccttaccctggattctccccaagctccagagtgagcactagaagattttg

SEQ ID NO: 52542 - DNA, 203 bp, Gossypium hirsutum
  Clone ID: uC-gsronu33B051b07b1
cccttgcgatcttcaacccccactgcaaccccagaggagagcttacaagtatgctctccttcttaaccctcagagaaacacatcacattcaaggaggccaatgtgggaaccaacatcaagcccaccctgaaacctggactctttgagaacagggcgatgatcacggttggccgtacagtgactctcaatgacatgttcttttt

SEQ ID NO: 52543 - DNA, 418 bp, Gossypium hirsutum
  unsure (1)..(418): unsure at all n locations
  Clone ID: uC-gsronu33B051f01b1
ctctaacattcctacttgcccacagacatcaataccacattgaaaacaaaatggctggagcttgggtgcttaacaatggcgtatatcggctggaaaactagtctccggaagaccgggtttttggtgcacttaccgtcgggtgaagttgtatcgtcctactcatccttggagcacattttgagaggtttagggtgggaaaggtactacgggggtgaccctgatctctaccaattccacaagcactcttccattgatctcatttcactccctaaggatttctccaagttctgctccgttcacatgtatgatattgtcgttaagaaccccaacgtcttccacgtaagagatatgtgacggtcacaccacccgccacaggtacctctcttttactgcttgnggtatccttttttttttcttt

SEQ ID NO: 52544 - DNA, 223 bp, Gossypium hirsutum
  Clone ID: uC-gsronu33B051g04b1
ccttctctttctaaacgctcggttatcgagagatctggttcattcctttttatcacacatcaattttgtttccccagatatggcgtaaggttaacactgctgcagcagccttctaatacccctcatttatctcctctggcggaactcagctatttgacctcaacaccttcgacccacttcttgactctgtgagtatggattaagctcgaaaccgctggcaacc

SEQ ID NO: 52545 - DNA, 386 bp, Gossypium hirsutum
  Clone ID: uC-gsronu33B051h08b1
tgtatttattacaggtgggtgaaatggttcggacgttgaagctcgaatacagcggtataaatggaaagtgaagatcgactacaagtcccctgattgttttaaggaactggtaatcaccatctatggcggaacaccaggttctaaatatcgagcagataatgatactatcattgttgagctcaccaacggtttgctaactgagaatgtgcatgtactgcttggaattaacagatcggaacaccctggtttgatggaactgaaagagagactcaatgtccgattataccaggaaccactctcaagaatcaggtttgtgacgacagagctggaacatacttgtatcatgcacattatgggatgcaaagagaagctgggttatatggatc

SEQ ID NO: 52546 - DNA, 199 bp, Gossypium hirsutum
  Clone ID: uC-gsronu33B055b01b1
acgcttaatttgtcttcattatttggtaattacggattcaaatagcgccgaaatagtggtatagtggccactatttagtggtagtgctgccggccgctacagctatcggaagaaaaactgttgagtttaaatcacaacaattgcggtgaatagtggccgcaataatcggtgtagcggtattaacgaccccttattccag

SEQ ID NO: 52547 - DNA, 367 bp, Gossypium hirsutum
  Clone ID: uC-gsronu33B055c04b1
ttgtgtcaaatttaaaaaaaaaaaaaaaaaaaaaaaaaaaaaaaaaaaaaaaaaaaaaaaaaaaaaaaaaaaaaaaaaaaaaaaaaaaaaaaaaaaaaaaaaaaaaaaaaaaaaaagggggggggcctttttagggatccaagttttacattcccgttgtttgcaaagtaatagtttttttttggggccaccaaaataaaattaattggccgggttttaaaaacgttggaattggaaaaaccttgggtttcccaaattaaatgcctttgaaaaaaatccccttttcgccggttggggaaataaaaaaaaggcccccccctttcgcctttccaaaaatttgcccaccttaattgtgaaatggaacccc

SEQ ID NO: 52548 - DNA, 160 bp, Gossypium hirsutum
  Clone ID: uC-gsronu33B055c10b1
gctttacagtcgggtacaagaactggaaccgtaaggcatggatcttaagctaatcaattccaggagaatactcacctgataactgtggagaagagatatggaggggacattattaagggatggaggttcgtgatgagtatagatattcatgggtgaggat

SEQ ID NO: 52549 - DNA, 300 bp, Gossypium hirsutum
  Clone ID: uC-gsronu33B055e12b1
tctctagctctccaccgttgacttgacgttgggatcgccgctctcaaagcccataaccaccttagactttgttgaactagtggtattcgcttttattactatatataccttattatttatattcattgcatctctagtcttggtttatgtcaaataagtagtttgttttgcaatatagttggtgccgatgtaaattacataatatgaccaaaatatttgggatgttctaattctagctaaaatttctttttaaaataaacaaaactcatacttcttacataaatttataatatatcaatt

SEQ ID NO: 52550 - DNA, 189 bp, Gossypium hirsutum
  Clone ID: uC-gsronu33B055f12b1
tgaatttgtgatgtaattgtcttttgctactctctcctctctgcttatagatattgttatcttcagtaaggctgcattctatctgtgtaagcagtatattccgaaagaactttaatgaaggattgaatggaagtcggtgacagtgtttgcttgttatcatgcattaaagaatacacaatctttcaggtt

SEQ ID NO: 52551 - DNA, 535 bp, Gossypium hirsutum
  unsure (1)..(535): unsure at all n locations
  Clone ID: uC-gsronu33B055g02b1
cattgttgctttaaatgatagaatttggttcgttcatctaggcaatttcccaacaaagtcggggtttttctctaggcaaattgtaactaatatttcgaaccaagtagaaatatccaaatcatcaatgaaacttgatctgtttgtcttatatttacaaaccgcggatttcatttggtgcaggtgctgaggttgccgttctttgcattacaaaatctggggaagtagtgaactatcaggcttttacaaactccaaggggatatacaccgtggccgaaacaatgcccgagagcgagcggcgggatgcatgcttggcacgacctatcagaagtttccatgagcactcgaaccatcttgaggacggaagcacaggaatcaagttcacctataatcatccctcggatcaattccacgttatccgaccgtttgtataatcgacccttaacagtcccaacctactgcatttgaactgttgggngatgtcttgggcagaagcaaatggacataattaataattttaaggttgcaaattatcttt

SEQ ID NO: 52552 - DNA, 106 bp, Gossypium hirsutum
  Clone ID: uC-gsronu33B055g07b1
tctaacatatgagctgccacagagagccgggctttttctataaatgtgggatccatgggaatataggagctgaaatgcatagcatatggatcagtattatgtgaat

SEQ ID NO: 52553 - DNA, 286 bp, Gossypium hirsutum
  Clone ID: uC-gsronu33B055g10b1
gcagttctcacctgttagagaaacacctgtgaaaatcgagcagccaacgcagattatgacgccaattaataatcaaacagggcttatgcagcagcctaattattcctctgcttcccagaatttttatcaaagccaacctccacagtatttgctaaatcagcaaccatcagcttcagctgtggattacaccactccaaatccaacggggatgaagatgggtggaagcaacatttccaaccttattagacacagtagctcacctgcagggttattctccaatattaac

SEQ ID NO: 52554 - DNA, 322 bp, Gossypium hirsutum
  Clone ID: uC-gsronu33B055h04b1
cttgttatatcttctacacatttctccctaacatggcttacttcgaattccttccagtaaagaatgaaggtgatggatctattgaaatgaagagcaacaatgaagatactgaacttgttgatcttgtaaatgtgaaggctggtcagtgttatgaactagttgtcacaacttgtgcaggattatatcgatataaagttggagatgttcttatggtgagtggtttttacattaatgtacctcaatttcaatttgtggagaggaaaaatgatattctcagtgtagctcatcgaaaacacatgtctaacataccttttcaaggttg

SEQ ID NO: 52555 - DNA, 533 bp, Gossypium hirsutum
  Clone ID: uC-gsronu33B057a03b1
cctttgcgttcgtgcataaccgatcttgtatcgaggctcgttttggaatgtgaaatcattattgatgaagtgttccctgtagaacaagaagacgaagattaaatcgtaaaggaacagagagaagctataacagttgcagggaaagggattttcaggaacacaggggcagctctattgagcatgcaagaaattagaagagggagttctacttacgggcatttttctctgactcctatggatttgccagactctgatctcatacactgctttcaactcaactgccggatccccattgtttgatcacacaacttaaatgaaatttacgtgtagtttgaagattcgttgcgtttattacggatgggaaccgccccaaaaatcgcaacattctgttctgattgctattgaaatcctaaagttagcatggggtttttagaacattaaaaccttatacttttattggtttaaatttttttttttagggaccaattttcatttttatgcatcggttactaagacattttttttggggtgga

SEQ ID NO: 52556 - DNA, 460 bp, Gossypium hirsutum
  Clone ID: uC-gsronu33B057b08b1
tttcttcgcgtccgcaaagggtgaagtcccgaggggggattcaatcgaggatgatgcatcaaatgatgaccgatcctcccttcgtactggtttgctgggttctgaagctgttcttgtcctagaacttaagagcattgctgatgtaggccttgtgggggatgcccaatgctggcaaaagtacacttttaggggcaatatctcgagctaagcctgcaataggccactatgcgttcacgactgtaaggcctaatttagggaatttgaactttgacgacttgtcaattacggtggctgatattccaggattaataaagggtgcttaccagaatcgtggactcggacatgctttcctccgccacatagaacgtacaaaggttttggcatacgttgtagacttggccgttcgattagatgggagggaaggaattccaccttgggaacaactgaaagatttagtctt

SEQ ID NO: 52557 - DNA, 407 bp, Gossypium hirsutum
  Clone ID: uC-gsronu33B057d05b1
ggttgtgttcgattcaaccatgaagaacataacagcgaggggctacttcaacaacaacggtcagaatctgaaccatcacttcgaaactgatagtgttgctcatgttggaactaatggctgctcttcttcttcctcttgatgctgctgtagatgatgatgatgatcagcttcattgttctttttttttttaatacctcatggggggtgggggagataataacctgtttagatatagagtaagggactttggttattagtttaaatttttgtttcctaattagtctaattaaggatcatcacggtggtgctaatatattaccctgggaattaagagctggtttgcaaatcaaaggggaatttgggttagaatcttaattcttttttgggatcataaacttccatgtttt

SEQ ID NO: 52558 - DNA, 374 bp, Gossypium hirsutum
  Clone ID: uC-gsronu33B057e05b1
tcttaccttgcttcgctgtcggaaaaccacataaaacctggcttggtgaaaggcaaaagacacaaggcagaagaatgttcggagtggtattccccaaccgaagcttcccaatggacatctctagcttcacccaaattgataccttccattgggtgctcgatatgaacactttcgttggcgaatcctaccatcaaattggtgatatgtgcatcttcctcttgaacaacttcactttgcccccagataaggctttggctgtctacgtccagtcccctggttctcccttcgtttattgcggcgccggcactctttaacgtccctccgccgtgctttccctgatttggcctgagcctggagggcagatgcaggtgact

SEQ ID NO: 52559 - DNA, 316 bp, Gossypium hirsutum
  Clone ID: uC-gsronu33B057g02b1
cctttgtttttcaaggcctttactgttgcagctacggggggttggaccacggctgcacctaatgtagccaagaggattgaggtcgaagccattcctagctctggaacgatcgtcatgataaactttgttgaagggctgccattttaatatatgaagcacgagataggaggacatgttgtaaattatattttcatacagctacccagtaattgaaggaggtcctttggggaactaactcgaaaaaataagctttgagaacaagtttgaggttgctgcatgtggaggaagtattcgcaagagttcaatgaaattctta

SEQ ID NO: 52560 - DNA, 259 bp, Gossypium hirsutum
  Clone ID: uC-gsronu33B057g07b1
gagaaacagaagcacggcctgaaccagggaggtttttttagggaggctgcgacctttactctggacgacgtttggaatcataacggctatgctaaacagtattctggttcgctatggaacaccgttgcgacctgtcaggctaatgactctgccattgttggccccgactacgagaaatatgagcgacgtctccgatcatcatctatgcttttcttgatatcaaggttacgacgaggctcctcagatatatgacccagct

SEQ ID NO: 52561 - DNA, 572 bp, Gossypium hirsutum
  Clone ID: uC-gsronu33B057g08b1
ttttcttgttagaggggagggaaaaaaagaaatgggtggagtgagatggtttgtcggggttttatttctaagcactttgctcctttgcagtgctgatgtacatcactatgaattctttgtgcgagagtcaaaatttaagaagatgtgcaacacatcgactttgctggtcgtaaataatagttatccagggcctgagattcgggttcacagaggtgacactgtcttcgttaatgtccccaaccagatgcttatgctatcaatggacatttaggagacacatatggatgcccaactgatacaatattccgcatggaagttgattataagaagacataccttctccgcataatcaatgctgctgcttcattttcactcccatttggatctgtgctatcatctttaaaaaaattttcgtatttaaatagcaagtacggaggagggacagaggatgagttcgttgtgtacgaattctcgaatataattgttgttatggtgattatgggatgttttattggtcatattctgactccagcttcaagattatgcttaaattggacctttaaacgttgctt

SEQ ID NO: 52562 - DNA, 101 bp, Gossypium hirsutum
  Clone ID: uC-gsronu33B057g09b1
ttgtatataaacttaagtaacaacttggaatggtgtgggtagtgttgcatttgcacccagaattattaacatgcgatgatgggtgttaaattgctgggtct

SEQ ID NO: 52563 - DNA, 268 bp, Gossypium hirsutum
  Clone ID: uC-gsronu33B057h11b1
atccaaaatataaagatccctcattcgggaggctttaaatgcatagcgcggctttttataacgactactgtaccctacttgctcatagtgcagatcatggagcaatggttgggtatacaggcttaactgtttggacctgaaatggcatacaaggctacattccattcaattgtattcccgagaatgcataacaaggttttgacttcagacaggattgggggcaaggttgctcttttttacttaatcagacaacttttttgaaccccaa

SEQ ID NO: 52564 - DNA, 398 bp, Gossypium hirsutum
  Clone ID: uC-gsronu33B058a02b1
ttcattcgtccgattatcgtgagggatcaaagccgggtttactataatagagatggcttttgctcttgcagggattactggtaaattgtaccctgaacacctgataagagcagattcaaaatgccgttaggaggatgatcgaacaattgcatgcctggtacctagtcacggctgctgcaaaattagcttcacgggtgatctggactttccatggagattgcatcatagctgaaaactattatccttaagagagctttatgaaattaccttgcctacaatttttctcaatttttaattttctttaccaccattattttattttattttcattaatccattcccaaaccatacaagagtaagaaggcagattaaatcaagaattatttatcatcttaaaa

SEQ ID NO: 52565 - DNA, 438 bp, Gossypium hirsutum
  Clone ID: uC-gsronu33B058a09b1
ttgttcgtccaaaaaggagtggcactttggctgaatattctgttgccgaagagaatctattggctctcaaaccaaaaaatctgggtttcattgaagctgctgccattcccttagccattggaactgcctatgaaggccttcaaaaaactgccttgtctcctggtaaatccatcctagttttaggcggtgctggtggggttggcaccatggttattcagctagctaagcatgtctttggagcatctaaagttgcagctacctcaagctcagccaaactggaattgctaaagagcttgggtgctgatttagccattgattacaccaaagacaactttgaagatttgccagagaaatttgatgtaatatatgatgcaattgggcaatctgaaagggcagtgaaggctatcaaagaaggtggaaaggttgtaacaatagaac

SEQ ID NO: 52566 - DNA, 449 bp, Gossypium hirsutum
  Clone ID: uC-gsronu33B058a10b1
ttcttgaattcttttattatagctactaagactggtagtgctgaggtttttgtgtttgattatagcaaacatccttcgaaaccgcctttggatggggcttgtagtcctgatttgagacttaggggtcatagtactgaaggttatggtttgtcttggagtaagtttaaagaaggtcatttgcttagtggttctgatgatgctcagatttgtttatgggatgttaatgctactcccaagaacaaagctcttgatgctatgcagatctttaaggttcatgaaggtgttgttgaagatgttgcctggcatctcaggcatgaatacttgtttgggtctgttggggatgaccaatatttacttatttgggacttgagaaccccttctgttaccaagcctatccaatctgtagttgcttaccagagtgaggtcaactgcttagctttcaatccctt

SEQ ID NO: 52567 - DNA, 165 bp, Gossypium hirsutum
  Clone ID: uC-gsronu33B058b04b1
ttgactaatgggtgggaggcaagattccccaaaaaggaatcattggagccaaggtagactacaagcaaattcttttatgtaactaagaaagtattatatatgctatgtatcctaaattgagatcctgcaaaagacttttttgtagtattatgtaacaagttcaag

SEQ ID NO: 52568 - DNA, 244 bp, Gossypium hirsutum
  Clone ID: uC-gsronu33B058b08b1
tccaaaaatccaccgacgaggacaggcccgagggaaaatttattgagccatcgaatatctaaagcaagcaactttgggtatgggaagccgaggtctagaaactgttcaaaggaactaaaagtacaacgacctggaaaagaaagtcaaatttcctttgcgtaatgatcagaacggcttctgaatctggaatgaataacgaagttcaaattttatgggcagaatgaacttgggtaacgcgagccac

SEQ ID NO: 52569 - DNA, 439 bp, Gossypium hirsutum
  Clone ID: uC-gsronu33B058c10b1
tcgttaaattcccaaagcgatacttaattgtgcttgtatcctttgtcagcacatgcgtatgttatatagaacgtgtgggtttttccatagcatacacagttgcagctgatgctgctgggattaaccaatcaagcaaagggacaatactatcaacattctattacggttatgcttgttctcaggtacctgggggatgggcggctcaaaagatcgggggaaggcaggatcttcttctctcattcgttttatggtcatcaacttgttttttggttccattagatcccaatagagtcactatgttggttgttgctcgcttgcttgttggtgtggcacaaggtttcatgttcccttctattcacactgtcctagcacagtgggtaccaccacatgaaaggtcaagatctgtttcgttacaacttcagtgatgtacctaggtgca

SEQ ID NO: 52570 - DNA, 413 bp, Gossypium hirsutum
  Clone ID: uC-gsronu33B058c12b1
tcgtttacgcgtccgcccacgcgtccggccatgctgataaattaaagaaaattagcgaattttactcttactttatttgacatcaggtccaaaaaaaaattgatacatgatacgccttataaattacgagaaaaaaattataaaaaaaattaaaactaaatatcggtaagggtgagaaaaaaaatctagaaaatcaatttaaattatagcatttgatttgatttctattggtatttattaaatttgattaagttttaatttagcttgtatttagaagtatttatttggtttaattttctgttcttaagtaaaaatataaatttttctgattgtatctttacaaggccttcttctttgttgatatttttgaatggctgagtcacatatctctctgccaatttggttgtcaattt

SEQ ID NO: 52571 - DNA, 440 bp, Gossypium hirsutum
  Clone ID: uC-gsronu33B058d04b1
atcgtttatggctaccgaagaggaatcgatagaacaagtcttttgcgtcacgtcgtgagttgcttaaagctcttaaagcagctcaggagctgttgaatgccccagatgaagattcttctcaagctgctgagaatcaaacggatgatactaatgaagaaaataaccccagtatgaagtttcgaaattatgtacctcatgataaacagcttcaggagggaaaggttgctcccccagtgctgccgaaatttgaagaccctgttgcagcagaacctccagcatctgaagaaaaagaggatccatttgtcaacattgctcccaagaaaccgaactgggatcttcgaagggatgtgcagaagaagctcgataagcttgaaaggcgcacacagaaggctattttcaaacttatggagcaacaagaacaagaaaaacagttagatgaa

SEQ ID NO: 52572 - DNA, 437 bp, Gossypium hirsutum
  Clone ID: uC-gsronu33B058e03b1
ctcttttgttcttatctcttggactgccgccttcggtctcatcgaacttgcctgagcctctttggtacattcttatgacaccaatattgtgtttggagcttaaaatctacggacagtggatgtcgggtggtcaaaggaggctttcgaaagtggctaacccttcgaaccatctcgcaatcgtcgggaactttgttggggcattgttgggtgcatcaatggggcttaaagaagggcctatatttttctttgctgttggactggctcattatttagtcctttttgtaacactttatcaaaggcttccaacaaatgaaacactcccaaaagagctccatcctgtattcttcctttttgttgcagcaccgagtgttgcttcgatggcatgggctaaaatccgaggctccttcgattacggatcacggatagcttacttcatt

SEQ ID NO: 52573 - DNA, 265 bp, Gossypium hirsutum
  Clone ID: uC-gsronu33B058f02b1
tttttcaagtggttcgatcactaaagaagagctcaactgagtcagctggagcttttgttagcagagtgacgcgagtcaagtctcctgttgtgctgtgctccgagggtcccatttccatgcttgttgaatgctttagcccttgaaataagtgtgtaacatgatcggatttttgttctttatgtccgattttctgtttatggatttcaagtatccattccttgttgtaaaatatatgacgtattaaaatctacggtacttttgattg

SEQ ID NO: 52574 - DNA, 121 bp, Gossypium hirsutum
  Clone ID: uC-gsronu33B058f06b1
gaaaagggacgcgcccctttatatgcgcaattaaacccaaaggttgcgttggtcacccccaagggaccccctacatattgccaatcccctaacccccggtcctttgggtttcttcccttcc

SEQ ID NO: 52575 - DNA, 360 bp, Gossypium hirsutum
  Clone ID: uC-gsronu33B058f07b1
ttgtcacgcgtccgcccacgcgtccgaaaacatagagcgttaagtccctataaccaagatcatttgattaggcactcgcttgatgcacctaggcatgctgttttgtaaggcaatattcataaaaaatgtctacatggttaaaaaaacgtgcttttttttttgcacttttggcatcttgcgccctttacaacattggttaagaaatttgttgttggataagcttgtagtgatttttgctttcccaatgcaattttcttttctaaattttaatgcttgctgtacaaacttggcatattttctatggcttctcctttgcaggtttcgcttttgactgataattatcagctgataatggatgct

SEQ ID NO: 52576 - DNA, 347 bp, Gossypium hirsutum
  Clone ID: uC-gsronu33B058f11b1
tttcacgcgtccggcggctcggcgcagcgcatggaggctcacgtgagagggcagagcctgattgcggcgcgatagcttgctgcaagctgctagggtttctaatcctctttgggtgttgggctgggtgtagtgggctaggctagtgtttgggtcactttggatttaggcctgctattgtaacaaaagaactgaacattttatttattttattttatattttggttttaaaaaaaaaaaaaaaaaaaaaaaataaaaaaaataaaaaaaaaaaaaataaaaaaaaaaaaaaaaaaaaaaaaaaaaataaaataaaaaaaataaaatgggggggcccttttaagggatcc

SEQ ID NO: 52577 - DNA, 294 bp, Gossypium hirsutum
  Clone ID: uC-gsronu33B058g01b1
gctggacgcccgcggaccgtttttattatccgggtcgcctacgcgaccgttatcctaactgtacatcgtctttggtccgggggttttttaaaagcatatgcctgttgcatccaaaggtgcctaagcaatgtttgggattatctttgacgcgtactttctttttctgggcgtgacaaatccaggcgattggacaagacaagggctcgatcaaacggtcacggactataaccttaaccaacactcaattttcatctatctattcaatttcctgtaatgccagcaagaaagaaggcg

SEQ ID NO: 52578 - DNA, 454 bp, Gossypium hirsutum
  Clone ID: uC-gsronu33B058g09b1
tctctcacgcgtccgcccacgcgtccggaatgatggctggttgtgtcactctttcggaggacaatgcttcaactacacagcttttcaacctgcaattgatgttttgaaagaggttcgagtgtttcttgaagcaaatccattggagattgttaccattatcatcgaagactatgtgacatctccaaggggattgagtaaagtattcgatgctgccggcttgaggaagttctggtttccggtatctcgaatgccgaaaaacggtgaaaattggccaacggtcgatgatatggttcaaaagaatcagcgccttgtggttttcacttcgaagtcggctaaagaggcctctgaaggtatagcttatcaatggagatacatggtggaaaaccaatatggagatggtgggaaggtagcttgttcgtggccgaacagagcggaatcacccgtgatgaaacac

SEQ ID NO: 52579 - DNA, 325 bp, Gossypium hirsutum
  Clone ID: uC-gsronu33B058h01b1
tttttgcgtccgcccacgcgtccgattgactatcaacgttcgatatcggaaccaccatacacggctcttgagctccatcttctttacttaatgaagtgggatcttcagttgcctctataccagctaactcatcaaataactgaatcggtgcatttcggttgcttcgagtcccacaataaacagctaccattgtctccacgtcttcatcggctatgagttccatttcagtgaattttatgggatctgtcgaaactggaaacttgtagaaaagtttcgacatacttcttccacaacgtctataaaatttttcactaattttttcctt

SEQ ID NO: 52580 - DNA, 330 bp, Gossypium hirsutum
  Clone ID: uC-gsronu33B060a01b1
tccttgctttcgtatcatctatctcctcggtctggggggcacaaatgctgaacaggtctgataccattgacccaggcttctaagggaaaatcactgctgaggaagcccttgtccagatgatgtgggctgtctaggaccatctacatgccaaaaactgcgtaggacaaatggagcggttcttagaatcacagatggatggcgttacatacatactgaaccttgtcaccacctgggagacgcttcagccagctgttctcataatagtcgctgtagagccccataaggatagcattgttcagtctgcacgaccctatggtgagagggctgtct

SEQ ID NO: 52581 - DNA, 220 bp, Gossypium hirsutum
  Clone ID: uC-gsronu33B060a04b1
atgttctttttctgggttagtaacgcaaaacggcaagacaggagatgagtcatgagacaacctggacacaactgatggtggttcgactgtcatatagaggagtcagagcagcatgtcaacattgttaacttggatatgaagtctattgggatttcgaggtatacagacagacggagggcatgcatgatattaatgaaggattatctgaaacacaccccta

SEQ ID NO: 52582 - DNA, 389 bp, Gossypium hirsutum
  Clone ID: uC-gsronu33B060a08b1
ttctatcgtccatcctaacgagcagccacacgttcgtgtccatttggcatgatatgacgcatgcatcagatatataatggccaagcttacagacacaagcgtgccttccacaatgctattctgaaaggtgagataacgagtatgcgctgacctaagtttctcatggccgaaaaagtgatacatctgacttatgcgacaccattgatatcgacacacatgcgatcgtcaacagctgacgagatagtctattgaatccttctgcttgttcttgctgacggatgtgtagtctgtacgcataatgtgtctggctcccgagcctatcgtgagtcacagacagagtgcggaaaggtcacagctttgacgattccatcgtacatgaccgagttgcc

SEQ ID NO: 52583 - DNA, 284 bp, Gossypium hirsutum
  Clone ID: uC-gsronu33B060a09b1
ttttatcgaacatgatattgatgcgctccatgctatttgttattctgacggacgctctttattaccgacaaacatatgtccgactctatactaggtcctagtgcttcccaggcccgcccgctatttggattgcaacggccgcagtggctgcacatatggtgagcaagactaccgtggtgtgctttgtcgttgcgattacagaagagcagaagcctctgtgagcaggtgctatagaccgaatctgaagaagtttatctcgacgatactgggggataggacaaagg

SEQ ID NO: 52584 - DNA, 113 bp, Gossypium hirsutum
  Clone ID: uC-gsronu33B060a11b1
cacgtttcaggactaatagcccaaacgcactcaccatgagggcaatatatggtgcgccggaggcaaaggccacccgtaagaatgagttgggtatccgggaaataggaaccatg

SEQ ID NO: 52585 - DNA, 455 bp, Gossypium hirsutum
  Clone ID: uC-gsronu33B060b04b1
ctcttagtcttattcccccagcaaaaccgaggggatggctcatagctatgacagctcatcgtcgccctcatgactgaaaggtgacgactcatccacagccctatcagtatccttaccaaaatatgctagcactctcttgggagtgtctgattccagaaggtaggacaagcgagcagagaacgttaggctagatgacgaaccatcactgcaaatcgaaggggaagccattagagtccctacatgcacatctataacgtgaatcaagtcggctttcgttaggcctaagcatactttcacccacagccatgatggctagacaatattccatccactagtggatgtggaaggacgtgtctacaatgctgattttgtgacatgctgtagatgatcaatgcgaggacgttaatagaggaagaccagtcttaaatcatgaacatgcaccaaaatggatatgt

SEQ ID NO: 52586 - DNA, 450 bp, Gossypium hirsutum
  unsure (1)..(450): unsure at all n locations
  Clone ID: uC-gsronu33B060b07b1
accgttctcatggtctgtagngtaccgacggacggtggcgagaattatatgtagagactcccacgcatccacgctacagactgctatgctggttttatagggtctttctataactgatactgaaatattcaattgataaggccagaggtttaatcatctaaaagaatgccataaaatctgtggatcacgactgagcttgcggtgttgttaggcctctttgatcaaactaaggtacatgtgtgaaggtgacgatcaaattcctactgcattagatgcctatgctgatgcaaatgctgaggactcacgtgcgggtgcaatggagcatgtgcattttcgtattcagcagaagaatggccgctaaagcctgacaactgttcaggggttgtagaaagaattcagctattacatgatacttaaagacctgagaaggagttgtgctgcaatgggacc

SEQ ID NO: 52587 - DNA, 406 bp, Gossypium hirsutum
  Clone ID: uC-gsronu33B060c01b1
acctctcttccgccaagacaaagctgcatattatctttgtttgttccgacagatgcaaacgaactagatagaggatgaaattcattcgctgtttttttgaagacggttttatgttttcggggtgaacataatgatgggaggctatagcagggcgattgtgtctttgtcggacgagctgactgaggtcgggtgccggacttcttcacctaggataacgggggacgccctggtgactcggactcttgagactaactcctgcagcctgtccatgcacatgggtgaccatgtgcaattggcttatgtctaccatacagaggattcttgacagcgcagatcattggctgtgaaggacgaaagcttttgctcgttggagggagcccttgactacttgtggagattagagcac

SEQ ID NO: 52588 - DNA, 482 bp, Gossypium hirsutum
  Clone ID: uC-gsronu33B060c04b1
gccgcccgcctgcaccgacccggaactgaccgtgccgacccacgcgtgcgcccttcttccactcttcgtcactctctcgaagaagaaagcgtgtctcggatggaatagctgatctaactgcagcggcggtgacaactggtcacgcaccccgaaccttagccttggatatactaagaagacgtccagcagtcagaccatgttctacggacttaaaccagcatagatgaccttggagggaccagataccagctctactgcatcacgacatggatggaaggggtgcacaatctgaatttgtgatccatgccactgatgtatagcatgattatggccgttagtgttgtgaaaatgaaagcctccggtggaacacgccgttagtcagacatattgtcaaggttggatgcctgcaagggctataattatgtcctatgtctgtggctggcgtaatagaagctttggctgtggtgaaaataacgtataag

SEQ ID NO: 52589 - DNA, 407 bp, Gossypium hirsutum
  Clone ID: uC-gsronu33B060c07b1
tattttcggttggagaagacgagagctcatctctctgctttaaagctcctgtccaggtagaaatctcttcttcctttgcgatgagttctttgttgttcagtcgccatggcttctaagccggattttaaaggaactcatggatttgcaagaaagatccacccacttcttgcagtgctggtccagtagctgaagacatgcttcattggcaagcaacactcatgggaccctgagatagcccttatgctggaggagcgtattttagttaccatccatttacctccagattatgcttataagccttctaaggccacgtttaggaccaaggtcttccattctaacattaacatgaatggaagcatttgtcttgatatccttacagaacaatggactcctgcactaaccatttc

SEQ ID NO: 52590 - DNA, 357 bp, Gossypium hirsutum
  Clone ID: uC-gsronu33B060c08b1
ctggcgcgcacgcgtacggaaaaaaactcgcttctggacgatagatggcccattataacttgaaggggaaggtgaagctcgctcacggggactgatattcagagaaattctttcatgagcaggtccaaggcgtagggatgtcctaccattttacaatttggtgcagacacagggggtccaatgctctacgagggagccagagctgcatcttgaattgaatcattggctctggagcagctccaaacaaatgtacgacctgctggagtgacggcggggactgtcccagatggtatgcaggacaaatgtgtgttggctgacatacgctttgctggtttctgaactgatatttcagactcc

SEQ ID NO: 52591 - DNA, 405 bp, Gossypium hirsutum
  Clone ID: uC-gsronu33B060c11b1
tattgtatatggggagctactgaaagacctagggctggtgtgatgaaagctggcacacttgatcaaccatggcagggaattgctgatccagaagcatgcgctgtgctaaggcaagcctggctagacgagacttactaccacatgctgatgccgatgatggcgagataagccagatacagaccaggacggagctctccgatagaacttgtgtacagagattggagagagcctggtgacgatccagcctatgctgcttttgggacaagtgacctacatgctaatatggcaccgagacagacatgatatgctcattggactcgacaaataaagagggtgatgctgctaatgaatggatgctccttcaggtgatggtcattcacattcaaagtcaactaagaaagacaa

SEQ ID NO: 52592 - DNA, 141 bp, Gossypium hirsutum
  Clone ID: uC-gsronu33B060d02b1
ccctctgtcttccgatttggatagatgggagatggtgctggtggtggcagtggtggaggcggagccagtgcaggtggtacttctgggtatggcaatggaggtggcgaaggaggtggaacttggtagtggttatggaggagc

SEQ ID NO: 52593 - DNA, 247 bp, Gossypium hirsutum
  Clone ID: uC-gsronu33B060d06b1
ccctctctttcgattgatggaaaaaggttgatgccgaggggtctaccattccgggactcgctattacacagtgaacgcgccctccctgcactgactcccaccatggctgtacattcttcctgcttaaaagctgcttgctgagtgagtcccctcaaatcggatcttgtgaagtacactagtgcttatcactacatcactagagtaaaagggagagaaacagggagagatgtatgttgggccgccaccc

SEQ ID NO: 52594 - DNA, 302 bp, Gossypium hirsutum
  Clone ID: uC-gsronu33B060d12b1
tgatttccaggcttgacctatctcttgactgtaatgatgggtccagaaagagagaattggttcaaatctgaacggcaagcaatggtgggaggtaccctgatatgtgcatatggtcctatattaatgatgctgtttcgatgaacatctttgattggacagaaagatgcacacttagctctcaatgacataagcaccaggggtcagccagacccttgtggatggctcgagtctactattctgagattgggactggaacattggcatattggaggcctatgcttgataggaaactgaatgagcat

SEQ ID NO: 52595 - DNA, 273 bp, Gossypium hirsutum
  Clone ID: uC-gsronu33B060e01b1
gattttcttttcggaagacattgtacgatggctagttgggacagaggactcacatatgcgaaatgatgacattggtgttccaggatgagccaagggatgacatatggtgcccggggaacaaaagcttaacggattgtcacataggttgcttcagtgcaagcacataccgcgacagcctggccattcgatgctttagaccataagaacttcggagctgaaggtggactgaaattaacgacaggggtaactggatggagctcaacactctgtgat

SEQ ID NO: 52596 - DNA, 265 bp, Gossypium hirsutum
  Clone ID: uC-gsronu33B060e08b1
agggtgtcttgtccgggatagcaaattgcaaagatgcataccgatcatggtcgaattggggacctctacatcgcccgggtatgcatggccactaacaatgaacattacctgtgaggctcatgctgccgagcattacactgtcggcaattgggattagccagccgcatacactggtacattgttcaccttaggtatctgcggctttgtccgttctcaggccgatgatgatagcactctagacaggctttgggtgaacaggaaagcc

SEQ ID NO: 52597 - DNA, 308 bp, Gossypium hirsutum
  Clone ID: uC-gsronu33B060e10b1
ttcatgcgatcggtacgttgaaattatctaccagcaaaaatatctgataaggcctattgtctgaacttggttcaagggactggtgcacgagacacttcttcgtgatttgagtataggaactgaacgctgaccgataggacataatgatccaagcgcacgcgctctgcccggccagtggactgggaggccaggctgggacgcacgacgcttgtgtacatatagatgctggcatcccgtaccggagcgtccaaggccccctgcgggtttgtgactgaaccaatacattaacgatgatgaggaaaccgggc

SEQ ID NO: 52598 - DNA, 264 bp, Gossypium hirsutum
  Clone ID: uC-gsronu33B060f10b1
ttatttcttccaggtgggatgcagatctttagaaagactattaccgataagaccattactttagaagtggagagctcggatacaattgctaacgtgaaagcgagaattcacgacagagaacgaattccaccagagcaggaaaggttgattatggctgggaaacagtaggaagatgcaaggactgtgggtgagtacaatattaaaaaggagtgcactattgaccttgaacttggtcttcggggaggccattaaaccttaaggtct

SEQ ID NO: 52599 - DNA, 107 bp, Gossypium hirsutum
  Clone ID: uC-gsronu33B060g03b1
accatcttttcgtttgactgtgcttgaacatgtgctgaaattgatacttgtagttggataccctgctttacaagaatagtatgcaggcatacgggtttataatcgtt

SEQ ID NO: 52600 - DNA, 182 bp, Gossypium hirsutum
  Clone ID: uC-gsronu33B060g04b1
accttgcttacgcacacccgtgctttttttcttacacttttctatcccggtatttgcatttcctgccttaaaaagctatgactcagactgatgggcttatggccgttatgaaatgtgagggctggatggcagccgtaacgagagacatgacgaaaatgcaaggggttgaaacatagcaagtg

SEQ ID NO: 52601 - DNA, 226 bp, Gossypium hirsutum
  Clone ID: uC-gsronu33B060g07b1
tttaatcctgcggactcatcagtgaagttcagcccgcgtgtgttctcctgtagccgcaagagccgaaaggcccatttaacaggcccttctaccggacgccgcgtgttattgagcgcaccccctctcattctatctgaagttcaagaacaacgttcggtctatgcctgtgcgcaagtgttgactggtccaagtgttttgggggacctacaatgaacggcaaggtaat

SEQ ID NO: 52602 - DNA, 334 bp, Gossypium hirsutum
  Clone ID: uC-gsronu33B060g11b1
tggctttcttgagggagtcaagagccttgtcatttaattagtgacacacatgaatggcttaacgagacaaccactgatcttgctgactatgcagcgacaccacatccagcggaacgaacctgacccatggagcgtggaaagaaaaacccggagcgcataccattatctccactgtttcaactgactagagaagcttaggagaaccagaagctatcactccaaattgaagacccgctacctagaacggttcaaaacgtactccgggtccatgcagctggacaatagctggatgaatgcccgctattttgataaaaagaaagcagccaaaataaca

SEQ ID NO: 52603 - DNA, 117 bp, Gossypium hirsutum
  Clone ID: uC-gsronu33B060h01b1
caattctcacaggtgaagcagccgctccttcttgcatctgctaaacatgaatggattcgcaaattaatgtgtgctgtggagctgaaaataatggcatggaccgggtaaagaggctaa

SEQ ID NO: 52604 - DNA, 329 bp, Gossypium hirsutum
  Clone ID: uC-gsronu33B060h08b1
gcgttgttaaaggctgcacagccaaagaaaactctgaaaaccaaggataaagcagaggatgaggagagcgacgaagacaaagacgatgaagataaagagaagaaaaataatgaaagaaggggaggaagatgataaaccaaaaggcccttcaacgctgtcgaagctaaccccagaagaagcggagcaccgcgcactgcaagcagctgtgctacaggaatggcacatgttgtgtaaagatcgaagcatgaaagtgggttaaggtggtgtccggcattagttagttgattggagttgcattttttaccctttggtggatggctggaattggg

SEQ ID NO: 52605 - DNA, 421 bp, Gossypium hirsutum
  Clone ID: uC-gsronu33B061a08b1
atctattgccgatactaagtagcagccaaaaggttgtattcatttttcatgaccttatgcatggatcagatatatcatggcgaattcttcagaaaaaattgtgtcttccacaatggaatctgataagtgagatttcgcgtcagtgcttacataattttcttctgtccgaagaaatgactcatcgaaataatgagtcaccattgatatcgacacatctgagatcgccaaatgttcaggagttcctctattcaatccttttccttcttcttgttgctggatatctcgttcgtacacatcttctctttgtttcccgagcctatagcgagttacagacagagttcgaaaaggtcaaatctttgatgattccatcatacatgattgagtggcgaaaacttctggataggtattctacatctgaact

SEQ ID NO: 52606 - DNA, 269 bp, Gossypium hirsutum
  Clone ID: uC-gsronu33B061a10b1
gtcattgcctgtgcctccttcggttgaccctgggacggcttgatacatcatgcggtagggtctgactgcccaggatctagtacaacgttgcttcaagggcgaatgcggacacacggaacctgtgcatgctggagctggaggggtcggatctttgtgatgccaacgggcaaacgcagtggatgccactgttatatgaactgacatttgcaacaaaacggtgtccaaagcaaagcacgacgggttttgccgtggtataaattataaggaag

SEQ ID NO: 52607 - DNA, 301 bp, Gossypium hirsutum
  Clone ID: uC-gsronu33B061a11b1
tcggtgacggttactctgacaccttcggatgattagcctgaataatatttggagcactggagaaaaaaactatccctgcgaatgcatggcgtatactagagagaggaaccacagacttaggagcctcttttgtacatatgggtcttcttatacatgtgcatatggattgtgtgttgatctacatgtcaagttttaatttgtcattttcagtgtctgtatatataatctaatgtacagtaactgggaaatgtggagctatcaagctatggaatggtcaaggaccacacaacatggttagata

SEQ ID NO: 52608 - DNA, 360 bp, Gossypium hirsutum
  Clone ID: uC-gsronu33B061b01b1
aaaaaaaaaaaaaaaaaaaaaaaaagggggaattaaaaaaaaaaaaaaaaaaattaaaaatttagggcggccgttttgggggttccttgtttctttcctcttctggggggggcccttttttgggttccagtgttccctccgtgcgcttgcctgttctttttttttttttgtggtgccttaattacctttggttggccccatttttctaccgttgtgtttggtccccctttggctttccccactttttgcgttttggacacttccccttttttttctgttgggttattccccatgggtgccgcccggttctccctttccacctgttgcttaccctgattggcgtttgggcccccccttttc

SEQ ID NO: 52609 - DNA, 300 bp, Gossypium hirsutum
  Clone ID: uC-gsronu33B061b10b1
cttcggcaggcttattatgaacatctaagggacggagtgcttttatcaacccctcaattcctagtccccattgtgactaatttaagtagatccagcggctgcaggaagatatctttttccaaaccgagaattcaaataaaatgatttctctatggacagaaggctagacagaaaagttctcctcgttatccggtgcttgaaaccatctgtggaaatcggacggcagggaaccacatctcctatttacactattatcatgactggttctaccaatctcttaggcctaaataaaagatacct

SEQ ID NO: 52610 - DNA, 399 bp, Gossypium hirsutum
  Clone ID: uC-gsronu33B061c01b1
accgttattgttcgagaacaaaagagtaggcagaagaagcataataggatgtgtacaaaggaactagctttagcattccttctattaacagctgcagctaggagtcttttatcagcacagggtatccattggtacttcttgctatttcaagggatatctctccttcttgctgggctagacttaattggtgagcagggtttataagaagagcggccgatgtaaatacaggcggactcgaactcggggggttaccaaatgaaaacttcgggcggagagggtcggctgagagcagaggccatcgaatgctatgctcgagaccacggttctaggggccacctgatacgaaggagaaagtgtgtgttaacatttgatagaacgatgggactcaatttggacata

SEQ ID NO: 52611 - DNA, 462 bp, Gossypium hirsutum
  Clone ID: uC-gsronu33B061c02b1
gtggtgttagggtcaagcttgacgatggagaaagtggctgctgctaaacagtttatcgagaatcattatagagctcagatgaagaatattcaagaacgcaaagaaagacgatgggtccttgagagaaagctagctgcttcagatgtgcccaaggaggaacagatcaatctgataaaggatttagagaggaaagagacagagtttatgagactcaaaaggcacaagatttgtgttgatgattttgatcttttaaccattattggcaggggagcctttggtgagggttcggttgcgccgggagaagaaatctggaaatatttttgcaatgaagaagttaaagaaatctgaaatgcttatgaggggacaggtagaacatgttagagctgagaggaacccgctggcccaagttgcaagccactgcatagtaaaactttattatttatttcaggatgccgagtactt

SEQ ID NO: 52612 - DNA, 353 bp, Gossypium hirsutum
  Clone ID: uC-gsronu33B061c04b1
aaacgcactcaatgcagtgtggtgctgaattggtgcaggcaaaaacttaaataaaaaacttttgctgtttttattgtatttcatatgttgaagccttcaccaagagcctgaattgtgattcatagttagtgtttagtaagccagtgaatgtatgaacgaataaaatgcccataaatttatttgtttagtatattttccaaatggcagagaagttcaatgtttagggtggcatccaaattcgaaatcgttgtttgttaatatatatgtatttcataattctcaatgttatgatgttgataattaaacactttgctgtaatccaatgtgaatcacccagattatttatcttaaaa

SEQ ID NO: 52613 - DNA, 226 bp, Gossypium hirsutum
  Clone ID: uC-gsronu33B061c08b1
ttttcacgcgtccgcccacgcgtccggtaaaagacttgctcctgagtggaagatggctgctaataacttgaaggggaaggtgaaactatttcacagcgaactgaaagaagaaaggtctttcatagacagctacatggttcaggggtgccctacgatgatcagatcaatctgatacaggattgagacaggtatgtgacagggtgcttgagacttaaatggcacagga

SEQ ID NO: 52614 - DNA, 216 bp, Gossypium hirsutum
  Clone ID: uC-gsronu33B061f05b1
atcgcatcagggaagaactcatgactcagaaaaggcatttgcaagcacagaggggacagttaccccatgaaagctttccactgacggaaggatggcagaactgtttctccccagcttggataaggacatcgtatttgactacaaatccaccgttgtacgttgctaagttacatgcatagtcttgccttatctgcttctcctgtacttgctcattgt

SEQ ID NO: 52615 - DNA, 466 bp, Gossypium hirsutum
  Clone ID: uC-gsronu33B061f11b1
tttttcaacccgtttgttaaaggtccacctgtcggtatcaatctttcaatggatttccgtcagtttttcgtggttgtttttgctcttttcaaccttatcaactttgccagcactactgatgttgccatcacgtttggtcaagtttctaatttgaatttgtgtaccaccgacctggccaacaacggtgttgattttcaagtcagcgatttgactatcacattcgaagtgtcctacaacttaaccttcagttgtttgtatttcactagtatcgaaatctccgaccaaacccaaacccctgtttatttgacttattacttcgcaagcaaccaagcaagaaacaattatttggttgaaatgtcttgtttgaccaacgttaatcttttgttgaaagacaatgcccttgttttctctccggttgtccttaacactccatcctgttcacccacttgcataattatggttacca

SEQ ID NO: 52616 - DNA, 268 bp, Gossypium hirsutum
  Clone ID: uC-gsronu33B061g08b1
tcggctactcgtgcgctcactcgtaggaaaagggggccgccaagaccaagatctgtgtccactgggtacgatcgagaggagtcgaaacgcaatctcttaaagatggatcgacggagattcgtaatcgacgccgtcggagccgagcaaatggccaatcaatcaggcaagacggtgctccaactccttccttctttggtcaaatgagcccagaccgttgcctgcccgacgatctcgaagaaccaagttggggcagtctggatttgtttca

SEQ ID NO: 52617 - DNA, 190 bp, Gossypium hirsutum
  Clone ID: uC-gsronu33B061h06b1
cgggacggaactgccgggaccgacccacgccggtcatcaatccagaccatactaatggtgacattgggtttgtattatgcacgtacggctgtctgactgccacggaatgtgacggccagggaacattctagcgtaatctgtgatcacatgagggctatctggtattggcaggtacccctcttgcctggcg

SEQ ID NO: 52618 - DNA, 239 bp, Gossypium hirsutum
  Clone ID: uC-gsronu33B061h10b1
tcggtaaatctttatcattggattctctgaacttggttaacgttgggactcaattgaatattagcagctaaaatgttagattttctgtactccaatggcaaaactggcagtggacactgaatttgcggttttgtccaaagaacacaacagttgagggggagaccactcacacactagatgaatggctgtaacatttcaccagcctcaaaggattaacagtaggcgattgcagggcggct

SEQ ID NO: 52619 - DNA, 400 bp, Gossypium hirsutum
  Clone ID: uC-gsronu33B062b03b1
cccacttcgtccggttgtttgctttctctcccgggggggttctcttagcctcccccatggccaaccatggaatcctcggcgattgtccgtgcccacgtcacgaacggcggtcagtattgggcgaaacggatccttttggtcctcctccgaacggggtcgaagacggagccttcacagcccaccatgatagaagagaaaagggaaggcccctttctgttcgtcgttcccttccacggcccttggctgaacccccaggggttcaacgaccttcaaatcggagagggaacgccggagcttccccaaacagtgaatcggaggtgtcgcgtgacgcgcggaagaggcgccgaccaggggtgtggtggccaaggcatgcggcggctgaagcttgtaaagggctaag

SEQ ID NO: 52620 - DNA, 214 bp, Gossypium hirsutum
  Clone ID: uC-gsronu33B062e08b1
tcttttacgcgtccgtccacgcgtccgcttatctggataatgcagttgtcttcattggttcatgttatggtgattcacagctgataaagttaaatctacaacctgacgcaaaaggttcttatgtggaagttttggaatggttcgccattctcaggtcctattgttgtctttttgcgtggtttcatccctattcttacgctttttctctttcttc

SEQ ID NO: 52621 - DNA, 129 bp, Gossypium hirsutum
  Clone ID: uC-gsronu33B062e09b1
atatggtgcattaatctggagcacacagggggggggagagtcccagaccagagcggtttcggttaggggtaataccaagaaacccaaattttacccaatagaatgggctcaaggaaccacccagggagg

SEQ ID NO: 52622 - DNA, 307 bp, Gossypium hirsutum
  Clone ID: uC-gsronu33B062f09b1
ttcacgctagccaacgaacgtttttctatctggtcctgcttggtatacctaccgtgtccaaccacaacggcctgagggccttagaaacaccttgaggatggctgatgtatcttaggcttaggatgcttgacaagctgtggtggtgcttttgcacacaaatcatgatgtggaccccagaaaggctggaatagctcgtcacttactttcattttgggatcatgatggtcttttgatcatccgctcaggaaagttataggtattgtcacgcataggcatatcatggaaagagggaaggtccatgccgaca

SEQ ID NO: 52623 - DNA, 440 bp, Gossypium hirsutum
  Clone ID: uC-gsronu33B062f12b1
tttacgcgtccggaaagtagcagaccttccttttcttcaataaccaaaactgctggttttcttgacaaggagcttgctgcaagtggatttacgagaaaagatgaggatgacattcagaaattcattgaaggtgatgttgaagaggatgatgtttctgatggtgaacatgattctgagttatgtcaaacaaatataaagggctttgattcattgcacttagatcaggaagagtcaacttcaagatgtaacgaggaaggtcaagtagttgaaaacctccaaagccctgaagtaggccagaggggtgatcctgaaagtcaaaacttgagcagcaatgagggtgacgaaaatgatgacactgaactcgtgaagagcttggcgaagcatagacgacgggcgatggcagcagcacgcaaagggcatcataagaatagcacatctag

SEQ ID NO: 52624 - DNA, 299 bp, Gossypium hirsutum
  Clone ID: uC-gsronu33B062h12b1
gtcccgttctgaattgcccgatccacccaaccgtttttttctttcggtcaggcaaccgttcctgcgggcgggagttctttgggaatttggggcccatatcctgttcaagagctttgcaatctcatcgagctacataaaagaaatatggctcttataaatatgggcttccgattttcagctccagaatactttccaacacatgatggatctttccgacaatacgtgagtagaccctgaacgcaccatcaacggtttacatgcggtatgccaaattcttggctgcaacatcagcggccatt

SEQ ID NO: 52625 - DNA, 130 bp, Gossypium hirsutum
  Clone ID: uC-gsronu33B072a05b1
actacgcttccggtctcactcaaaaggtgcttcactctggttctttggtgccctcttcgcagaaaaaaagcgagagatcctacagattcaaggtggccaatgcggtaaccaaatcggagccaggctctgg

SEQ ID NO: 52626 - DNA, 110 bp, Gossypium hirsutum
  Clone ID: uC-gsronu33B072a09b1
tgttcgatccattaccaattcccttcaatttctgcattttctctgaaatccaatggatccagtaagcacccggcgcaatatccttcctcgactccgttgaccccaatatc

SEQ ID NO: 52627 - DNA, 159 bp, Gossypium hirsutum
  Clone ID: uC-gsronu33B072b10b1
tcgatgatgatgatgagcagctcctcaagacataatgaaaaagaccaactttttcatattcttcataaagttcctcaaggtgatactccttatgttaaagccaaacatgctcagctggtagaaaaggaaccagaagcagcactagtactatttttggaa

SEQ ID NO: 52628 - DNA, 105 bp, Gossypium hirsutum
  Clone ID: uC-gsronu33B072d01b1
ctgtgtatgagtccgagttacagaatttaccggcagaagaattgttgtgtcgcctcttttaccgaggttgaaagccgataggttagttaatttaggggttgaggc

SEQ ID NO: 52629 - DNA, 193 bp, Gossypium hirsutum
  Clone ID: uC-gsronu33B072f08b1
atcggtacttttcgcagtctctctggtacttaaaagggaattcaaattccaaagagaaaagtgcgagaaatttcatatatttatctacacagcaaaaagaagagaaaaaagggaattcaaatttcgaaagagaagaaaaaaattgatggttatggatcattgttcttcttcttttatatattttccttttttt

SEQ ID NO: 52630 - DNA, 126 bp, Gossypium hirsutum
  Clone ID: uC-gsronu33B072h08b1
atcgctcacgcgtccgaaaagttcctcgagaaacatgggagattgaagctgtcatggcagggggaccatggacactcaacactgatgcttggtttagatgcactgccttggccaggaccctgacag

SEQ ID NO: 52631 - DNA, 180 bp, Gossypium hirsutum
  Clone ID: uC-gsronu33B073f01b1
tccacagcagtccgtctttctactctactacaatagatatcgtaaacgatccgtaatagttaacatttaaatgacacctgacatgattctcacctcttattttgtccttataatccttaatcggttaaatgatatgttgatgtgacataattcaaaatgaaaaaaaaaaaaaaatagaat

SEQ ID NO: 52632 - DNA, 211 bp, Gossypium hirsutum
  unsure (1)..(211): unsure at all n locations
  Clone ID: uC-gsronu33B074c06b1
attttgcaggcattcgcaaattcaagaaaaaaagtttgaaattctgatgcccggaagtgaaatcccagaatggtttagccaacaaagaagtgactcttcaattaagatacccgtctcgaaagatagtcaatggattggagttgcttgttgctgcatttttgtcaataatgatgcttcaagggatgacgagtctatcggttgnggagcattt

SEQ ID NO: 52633 - DNA, 602 bp, Gossypium hirsutum
  Clone ID: uC-gsronu33B074g10b1
gaggtcattgcttactgatagaactttatcatattgaaggaaggcagtagtcgctcaaattacccaatcctgacacggggaggtagtgacaataaataacaatactctttctctatgagtggtggtgattgtaattatgttcaatttatatcccttaatttggatttctttttttatttagttttttatctgttaatttttataattatttatatatttattttatatttaattatattcttattttttattcatctatttttttttattattttttttttattattattttattatttattttatttttttttttttttttttttatttttttattatttatatattatttcatattctacttattttcataattattatttattaattattattataatttctattaaattaatattctatatttttattttatatttttatttaccactttatacttattcaaactttatatttttatattattttttatttataattatctttaacttatttattattatctttatattatcttatatattattcttaattattaatatttattaattttttatttatcttattttttacttatataa

SEQ ID NO: 52634 - DNA, 509 bp, Gossypium hirsutum
  unsure (1)..(509): unsure at all n locations
  Clone ID: uC-gsronu33B076a02b1
gaaaatttagtttatgaaaatcaaactaacgaaatacacactctttctcagtctttaattaattcctcttccgcctgactcagatcagatccgttttctatccacaaacaaagaagcaaattcgtttctttgtttcaagaaaacaaagaaatgtcaaattcgcatagcgatacgatacctcttcacccctcgtcccaatcggacatcgacgagatcgagaatctaatcaatgccagcgtccaatccggtccagccactgtactcccggcccgccctccaagcccacctcgggcctccatcccggtctcttcttcccccttcatccagtccaaaatccctcctccgcctccgcagtcttcatcatcgtccaatcataaggtgccgtctgtccctgctgcccctcctnctnctccccccgtcggtaactctagcagcatcgtggccaccgggttcggtcctccgtctaacaccctaacggagcctgtttgggacaccgtgaaaagagatct

SEQ ID NO: 52635 - DNA, 209 bp, Gossypium hirsutum
  Clone ID: uC-gsronu33B076b05b1
acgatcaattttggttgcattgacaccgaagaagattacccttacactggtcatgtcggtacatgtgttccataccggaaaaatgctaaagttgattcgatctattgttttgaggatgtaatgccatgtacccacctggtggttcaagtcttggacagcaaatattctatgggcaagcaccttcgatttttcccccttagtctggattt

SEQ ID NO: 52636 - DNA, 282 bp, Gossypium hirsutum
  Clone ID: uC-gsronu33B076b09b1
atagagtcaagaacggagcttaaatcagaaacattgctgacaaatttgttgagagaaaagctgtattctaaagagcttgaagtcgaacagttgcaagccgaggtggcagcaggtgtgagaggtaacgatatcctactatgtgaatcacagaatgaactggaccaccttttctgcctcaaccacagattgaaggatctagtacatgcaccacgctccagaatgcactcctccttcgccgactccccccccagtagatgcccacacaccaagttcttctccccc

SEQ ID NO: 52637 - DNA, 402 bp, Gossypium hirsutum
  Clone ID: uC-gsronu33B076d08b1
tccacttgtccgcttcttcttcggtgggatgcctccggcgacgacccaatttcgaagtttcaattttgggcctggaatgggagctagaatgggggatcaaggctccactggattcaacatccgaatgttgattcagttgttgccggttcttttaatcctcttgtttagctttttaccatcatctgagcctgttttttcactgtccaggtcgtatccttatgagtacaagttcacaacaaagaatggtgtgaactattatgtgaggtccacaaaatttgagcaggattatccgactaatagtgtcgagcgtgtaaggatcgaggagcgtgttgagagagattattactctgttttggctcacaattgttagattgagcttaatcggtagcactggtgatttat

SEQ ID NO: 52638 - DNA, 308 bp, Gossypium hirsutum
  Clone ID: uC-gsronu33B076e04b1
aaacggcatattatcgcaattggaactaccaccttggcacattcctggcatggtccctcctagcgtaccaactctttgattgaaacctacatcataaacaaacacttgtaagttcaaccgaacttattgaatattacccagattaccttggcgtatttattgttgaatttcttaactttaagattcttaattacttttcagtcttcggtagattcttttctaatatcgacgcatacatataagccaattttcaatttttttaactatggcttcaaatcccaaggttttctttgacatgacgatcggag

SEQ ID NO: 52639 - DNA, 193 bp, Gossypium hirsutum
  Clone ID: uC-gsronu33B076e10b1
tttgatccccttatccctctttcattagctgttgatattttttatatcaatgatgatgttttccttacaactgtacattgtcatccagtattgacatagttgcttttgattgtttttgggttttttatcggctccttactttagcttcatgcttgtgctttgaactctatattgggttttaagaactgttgat

SEQ ID NO: 52640 - DNA, 408 bp, Gossypium hirsutum
  Clone ID: uC-gsronu33B076f09b1
tctcacttttccggttggacttgggtgggattgccaacccaatgtttagaggaaagggaccagaaatggttaaagacaattattcccctgcatttcctttgaaacatcagcagaaagatatgaggttggctcttgcccttggggatcaaaatgcagtatcaatgccagtagctgctgcagctaatgaggctttcaagaaggccagaagcatgggattgggagaccttgacttttcagctgtttacgagaccgtgaagcttcttaaacattcatcttgataccatatactacctttcatattgttaggctgatgaagccatattcagtgttggtttgaacctgaatttttatatatccattttgtagttcctactattttgaaagttgatactattatgtttttaagaa

SEQ ID NO: 52641 - DNA, 259 bp, Gossypium hirsutum
  Clone ID: uC-gsronu33B076g01b1
acggggttgtttagatatccactggctgcagtaatactcacgaatgcgagagcggtgtaagagcactatctatcttcgacggacatgaaccattcgccgtctgtaaatgtacaattgtcgctcgagtgtatcgtatcatctcccgatgtaatgactattcctactgttggtgctgatgaaaccaggcaggattacgaaacggtggagctcgaaaagatcgagttgcgggatccgaaaatagttaacgggaaccaaatga

SEQ ID NO: 52642 - DNA, 147 bp, Gossypium hirsutum
  Clone ID: uC-gsronu33B076h03b1
cgcgaccgatgaattatcaagactataggtatagaccctgggatgggggaatctgcatctatatatactgaatgcaacggtcccgcgtagaaagaacgcaactaaataaacgaaagacaataaacaaatgaaagaaggggcaaagga

SEQ ID NO: 52643 - DNA, 333 bp, Gossypium hirsutum
  Clone ID: uC-gsronu33B077a09b1
cccctcttccgagaggaacgggagaaaagggcttggggcatattctgagaaagtttccaaaggctatgcgaaacgtaaggataggcctcaaaatctcagtttcttggatcatattaggatcttcatttcgtctccttctgattaaatcaataaacataaacagttggagaaaaattttgaatgttgtaatgcttgtaaaatttttctcgagatttcaatgagaaacgagattgaattttctcaataaaaaaaaaaaacataaaaataaaaaaaactaataaaaaaaaaaataaaaaaaaataaaaaatttaacccaaaaaaaaaaattctaag

SEQ ID NO: 52644 - DNA, 158 bp, Gossypium hirsutum
  Clone ID: uC-gsronu33B077b10b1
tcttcatccaatcactaggcacaatatcccatcacataatatgggtaaacactcataatcttatggcatgtttattatatccaattattctaattaactttaaatttagagattaatgttattaactactatattaagtaaacttaccttttgactaa

SEQ ID NO: 52645 - DNA, 560 bp, Gossypium hirsutum
  Clone ID: uC-gsronu33B077c01b1
cccactcttccgcccacgcgtccgcccacgcgtccgcaaccttccctgatcagtctgcaatggttttcaatccttctggcttgtatttccttgttcagttggaccatttttgcagttagtccagacgctccattgacattggattactacaaatcaacatcccccactgtgtttgagattgcgaggaaagaaatggagtgtgaagtaaactctgatcctcgaaatgcagctttggttcttcggttgcatttccatgactgctttgttcagggttgtgatgggtcagttttgcttgatgatacaatcagtttacaaggagaaaagaaagcttcggcaaatgtgaattctttaaaaggtttcgaaatcattgacaggattaagaacaagcttgaatctgagtgtcctgggactgtttcctgtgctgatatcctcaccgttgctgctagagatgcagtgattctggtgggtggaccttactgggatgtaccagtgggaagaaaggattcaaaaacagccaactatgatctagttagggaaaacattccaacagcatatgaggg

SEQ ID NO: 52646 - DNA, 229 bp, Gossypium hirsutum
  Clone ID: uC-gsronu33B077c07b1
ggtctacactctcgcgcccggtcctaaaagaaaatttctcaacattctctaatctttggtttaccctgaactagggttgggtttccaccatccatccttaggttttgcgtgcatagctgtaccatttctgtattaagtcaagaacgtcgattgtgatacattctctactgacagccatgaaacagtgtgctggaactcgtgaggtaagaaatggagtgtgaagtactcc

SEQ ID NO: 52647 - DNA, 541 bp, Gossypium hirsutum
  unsure (1)..(541): unsure at all n locations
  Clone ID: uC-gsronu33B077c10b1
gtctgtttcttccttatcacactcatgttacaactgagcttgttggtactttgggttatattcctccagaatatgggcaagcatgggtagccactttgagaggggatgtatacagttttggggttgtcatgcttgagctgctcactggcaaaaggcctgttgatatgtctaggccaaaaacatcaagagagttggtgtcctgggtgcagagattgaggagcgagggcaagcaagatgaagtcttcgatccactcctgaaaggaaaaggttctgatgaagagatgctgcaggtgttggatgtggcctgcctgtgcatcaaccagaatcctttcaagaggccaactatccaggaagttgttgagtggctcacgggtgttggaacaatcaatagaaaccaaaataaagattcgtgaaaagtgctgttcattgctttttacgaaacagatacgtatacctgcacanaatgtctgaatcagtttatgcatacttttgctttttttatttntaattgggtaaataaaatntacccaatcataatact

SEQ ID NO: 52648 - DNA, 493 bp, Gossypium hirsutum
  Clone ID: uC-gsronu33B077d06b1
aatgttttcctgttaacacaaaggttaattaccgagatggtgttattgcttcctcaaagactctaaagagaggatgctactctcaggttgaagctcatgctgctgctggacagaagcttagagcagtggagagaaatgaaagattgtatcgactggttgctgcaaatccatcggttcttgaacaggtagatgccgttgctttaccaagagatatgttgggtgaaaaatacgtacattcttctcttaatgacaaaactggcttgtctgaagtgcatggagactggagaaaaccaaatggcgctgttggatgttattttgcagaaaccaatgatgctgatagtgttacgtgctctgttggtagttgtagcgtaagtagtaacaatttctgtaggttgcctcattgcgttcccacaggtcctattgaagttgctgatggtcaatgtagtgatgctgaatctttctgtccaaggggagacgagggaggaaattctct

SEQ ID NO: 52649 - DNA, 518 bp, Gossypium hirsutum
  unsure (1)..(518): unsure at all n locations
  Clone ID: uC-gsronu33B077e04b1
ggatcttataaccttttctcttgaggccaaacgtgcagcaacttgggatgaggaatttgaccatctgaggttctcttacaatgggaacgtaattgtcgtaccggaaggccatttatcatcatggaaatccccggaaagtgaccttacagtggagagaacatctgacaagaatagtgtcttagtgactttacctgatattgctgagatttcagtaaatgtggtgccggtgaccagggaagatgatcgtattcataactaccaaataccctctgacgactgttttgctcacttagagctgcaattcaagttctacggtttatcttcgaaagttgaaggagtacttggtaggacttatcagccggatttcatgaaccctgcaaaaccaggcacggcaatgccaatagttggaggagaagacaaatatcgaacgtcatcacttctcactgccgattgttatacctgtaaatttcctccagccagagcatcngaccaaagagattcatcgctgatggactaca

SEQ ID NO: 52650 - DNA, 136 bp, Gossypium hirsutum
  unsure (1)..(136): unsure at all n locations
  Clone ID: uC-gsronu33B077f01b1
aactactantctctggtttatttcttcaggcttgtttggtgatgtttccaagttgtttttgccattgccgctcatctaggctttgtaagatatacatatttggattaaaaaaaattagggcctgttagtttcccac

SEQ ID NO: 52651 - DNA, 489 bp, Gossypium hirsutum
  Clone ID: uC-gsronu33B077f08b1
ccgttctatcagccatgcaattgtaaaacttgggaggaaagaccttgatcctcaaggggaagggtcatcatctgcggatattaatgaagaaatggaagaagaggtggaggaaggcaaagtcgaggaaagtgaagatgatggaagaggaggtggggatgatgagatcgacggacatgatcaagagaaaacagaaggggaagaaagcgaggaagttgaggatttcattgatgaagaagataaagataaggaaaaccaacttgaagatttgagtttattggaagatcaatccatgagaagttgatgagcagcacacgattgaagaagatgatgagcaaagaggtgttattgagaaacttggtggcttaccatcttagctctctcactaacaccaagtgagaaactaggtgttagtaagaattgggcctttagattccttataggaactgtacaaagtgttttagcattaacccatcactggtaaagaaatat

SEQ ID NO: 52652 - DNA, 371 bp, Gossypium hirsutum
  Clone ID: uC-gsronu33B077g01b1
cccacttgttcgaacggggttgccgggcaaaacttcaacagattgtatttaatgaagtccttgcacgataattgacgacgaatttttaattcatgggtagctgtaatattcctttttatcaatgaacaagataattacttttggtttttcattaaatcactttttttgttgtcactattgtttttggggtcatttgtttagcttttacctactaatgtaggtgttcatggtcaggcttgttttgtctgtggcccaaaaatttttgttagcgaatttaatattatcgctcgtaatggttacatttcggcctataatattacattttaaaaaaaaaaaaaaaaaaaaaaaaaaaaaaaaaaaaaaaaggggcg

SEQ ID NO: 52653 - DNA, 282 bp, Gossypium hirsutum
  Clone ID: uC-gsronu33B077h01b1
agagatatcttcagcagattcagggaagcatcaaaaattgcgactgttaaagatgggtgggtcaagcaggccccacagggcctggaagggtcggctcaaggccttggttgcatggggatgtcagctttccacggcccaccaaagcctgaatccgccatgattgcgctcatacatcatgctatcgattctgggatcacccttcttgatacccccgatgttcatggccctcataccaatgaaatcctccctgggaaggcgctgaaagatggcgcccgagaaagg

SEQ ID NO: 52654 - DNA, 253 bp, Gossypium hirsutum
  Clone ID: uC-gsronu33B077h09b1
aatctccctttggttcctctcctagatcttgaatttgttgttattttttcctactgctacttgaagtttttgaccttctgtcctccaattattggtgcgtgatggaatattttcttggtttacctgcattgctgctagacctagaccttacaattttcatattcgtttgtgtttgtatatttttttagttataaccggttttttagggtcaaaaaaaaaaaaataaaataacctaataaaatataaatacctt

SEQ ID NO: 52655 - DNA, 381 bp, Gossypium hirsutum
  Clone ID: uC-gsronu33B077h12b1
cccctctgtccgcccacgcgtccgcccacgcgtccggggttgtttggctttgttttctctgtaggatccgaaaaaaaaaatgtcgtcaaatggaactgacaactcaacttctaagaagcctgcaagtccttctcctttgagattctccaagtgttttccagtccaacatgagaattcttgttactggcagagctgacatcatcggctcccatttaggggagaaatacatggagcatgactggactgaggagacaggtgatgctaacctgttgaccgactccacaggcaggcgcatgactgagatggagacagacagatgctatctcctaaggaatgtcaggtccatggcgaccatcatagaagctgatgaaagggaatgtc

SEQ ID NO: 52656 - DNA, 455 bp, Gossypium hirsutum
  Clone ID: uC-gsronu33B078a04b1
cagggaccttaaacgggaaccttccatatgcttttcctgaatgtcaacattcttctgcgcaatatccctaaacttccaccttggtttcctttctacatgcatccaaggcccataattcttgcccttctcttccggtctatccacgaccatactgtgatttttcggtagcaattcaggcggtgctggtttctttttcgcgttcagttcagaatttctaaaggtacaactctccttcacatggccataccttccatagtggaagcaaaccatcagtaataattcgtattccactctttgtgttttgccattgattaagatttgggacaccaatggcctctctaaattaacataaacaaccatctaggcaaaacgacctattgccttaaaaaaaaaaaaaaaaaaaaaaaaaaaaaaaaaaaaaaaaaaaaaaaaaaaaaaaaaaaaaaaaagggcgg

SEQ ID NO: 52657 - DNA, 278 bp, Gossypium hirsutum
  Clone ID: uC-gsronu33B078b04b1
cccacgcgtccgcccacgcgtccggttcattgatcggaaagggtagccgtaatattcagagtgactcccggcggaccgattgacagacagagactgtacaacatggcagccgagacaggcgcttgcttcctggcaactgcctactcagagtatgtgactctctataggggaagccagaagtgtgcggccgcgacggaaacaccatgccggctgatcatagatggaaccaacaagggctctgcggagataatataagaggctatgggcacagatttgca

SEQ ID NO: 52658 - DNA, 148 bp, Gossypium hirsutum
  Clone ID: uC-gsronu33B078b05b1
atcaaagatagcctctcctcctcatcggtgtgcttcttcttgttgggttatcaacagagatgtgcaaacagcggtagtagcaatttttgttttgatgcatgagaggtaaattgaattggtggattaatcatgattttacattcatatg

SEQ ID NO: 52659 - DNA, 436 bp, Gossypium hirsutum
  Clone ID: uC-gsronu33B078c01b1
acaaaatatataaaaaaaaaaaaaaaaaaaaaaaaaaagggggaaaataaaaaaaaaaattaagaaaaaaaaacccaaaaacaaaaaaaaaaacggggcggccaaaggggcggggccaacagcagccgcaggtgcagcaacaacaaaagaaaacgacggagaagagaaagctccgccccagaggcacgagatcagcccacaccagggaccaaaggccacaccgtagccgccaaggaatcggccacgaaaacaccccgcttaaaacccccgggccgcaagcgaaagggccgccaaacccgcccctccgagagccttgccggagacgagaccggcctggaacgccccggggccggccccaacagggggacttgagggagcccgacgacaccggaacccccccgaatgcgaagaatgattcctcccccccttctatgag

SEQ ID NO: 52660 - DNA, 443 bp, Gossypium hirsutum
  Clone ID: uC-gsronu33B078c03b1
ggagaagtgttatgaatgctgtgagttgataatggaatgggcaacaagagtagaaggcaaccaatcaaacaagcgcaggtttagttccatcccagggagcccaaatggggtaatggatgtctcgtttagttccgatagctcaaacgattcctgggctgtggcatcattcgcatcagtgtcttcatcacctgagcctatgtccaagaagaccagaactcaacaagaccagcttctggaaaggctatcccaccatgctccttcagattttctcaccattcctcactgaattccctcttttcaatttcagactacaaaaataattagtccttgtaataatattgctgttctttttccatgatgcaaagttaaattgcttaccatctctgcatcttgaatcgattggtgaggaaatctagaatcagagatggtttgcattttatccg

SEQ ID NO: 52661 - DNA, 423 bp, Gossypium hirsutum
  Clone ID: uC-gsronu33B078c05b1
cgaaataatattaaaaaaaaaaaaaaaaaaaaaaaaaaaaaagaaaaaatttaaaaaaaattttaaaaaaaaaaaaaggaagaacaatataaaaggacacaagattacgggggcggccgttttaggggttcccatgtttacttccgcgtgcttgcaacgttttagttcttttttggtggcccctaatttcatttcactgcccggggttttccaaccttttgcctgggaaacccctggcgttccccaccttattggctttgcgccacttccccttttccccgggtggtttattaccgaagggccccctcccggtcgcctttcccaccctttgcccagcctgattggccattgggcccccccctgttccggccctttaaccccggcggtttgggtgtttccccccagcgggccctttccctttgc

SEQ ID NO: 52662 - DNA, 316 bp, Gossypium hirsutum
  Clone ID: uC-gsronu33B078c06b1
cccacgctttcggcgtgtaattcgtacgtcggaacttgtgcttatatgagtccggagcggttcgatcccgacgctaacggtggtaactacgacggcttccttggtgatatatggagtttgggattaactttaatggaactttacgtgggtcacttcccgtttctacaggccggtcaaagacccgattgggctacacttatgtgcgccatatgtttcggcgatccaccgtctttgccgccgggtgcttccgatgagttcagaaatttcatggagtgttgtttgcaaaaggaatctagtaaaagatggacagcttctc

SEQ ID NO: 52663 - DNA, 445 bp, Gossypium hirsutum
  Clone ID: uC-gsronu33B078c12b1
ctaacttttctttatccttaacttttgctaaccgcaaaccctgttacttcaacaccggagttatggtaatcgaccttgatcgatggagagagggagactacaccacaaagattgaagaatggatggagcttcagaaaagaataaggatttacgaattgggttctttgccaccatttttgttagttttcgccggaaatatagtgccggttgatcatagatggaaccaacatgggctcgggggagataattttagaggtttgtgcagagatttgcatcctggaccggttagccttttgcattggagtggaaaagggaaaccttgggcgaggcttgatgctaacagaccctgccctttggacgctttgtgggcaccatatgatctcctgcaaactccattcgctttagattcttgattgaattgaaagaaacgggaaatgcttgttaa

SEQ ID NO: 52664 - DNA, 443 bp, Gossypium hirsutum
  unsure (1)..(443): unsure at all n locations
  Clone ID: uC-gsronu33B078d07b1
atttatttgaagtaattataatttgatttaattgtgggtgattttaaaacgagattggtgttccaatggatcaactatgaattcttaggattgtccgatttagaaaaacaattattaaaattttcataacanataaaaaatatcaaatttttattgattcatttgattctttctaatttagatcaactgattaaattatcttctcaaacttatatatcaatctattcccagtccacttttgcttaaaattcatttttctactactttaccaaacattaaaacttggtttaattttctcactaaattgttaatttatataaaaataattaccaaaattcagcaattaaaatatatatttatatataaaacaaattcataaaaatctaagtaaaaataattaacaaaaatttagtaattaaattcaaatactaactaacaactat

SEQ ID NO: 52665 - DNA, 419 bp, Gossypium hirsutum
  unsure (1)..(419): unsure at all n locations
  Clone ID: uC-gsronu33B078d08b1
ctgcatacaaaattgtgtttgtatagccagagaaccgcaaatgatccccagtgccctagatgcaatcaagctgttgaggatgtgaatcatgccttacgcttttgtgaaagacatgtgggtaactttgcaatatgtcaacccgataagcaacaaccaaatgggtttccatgagtggctttcatggatgtttgaaaactactctgtctaaatgaacagaaattgcaattacattgtgggctatctggtatgcccagaacaagttagtgcatgaggatacaaagcagggggtgggngagtnaggtagtcttcatccgtggctattgcgcagagctcgctattttggctactagtgctcttcgatcgattccatccactattgttcactggtccctctaccggtgaatgttgttaaggtcaat

SEQ ID NO: 52666 - DNA, 438 bp, Gossypium hirsutum
  Clone ID: uC-gsronu33B078e06b1
ccgacattgttactgatgagatcgagtgccagcacttgcttcgtctcgaagatgggtccgtggtcacgagagggaggacccagtggaggccaaagaatgccaaaatttctgggaatgtggggcaaaatccagctgatactgcctagaaatccaagtgttcttccgagttatatatgtttctatattttttcatgtatgtatttatcaatgtagtatatatgtatgtagcttcactgtatctctcttattttattctttctttatctctctcaaccttttattcattgaatcaagaaaactgtccaaggaaattaggagcagaccatgccagagaagcatatgtagttattctttattgttttattatgtagttatcatgtgatgtgcattttaattttttttattagattgccattttttttaaagttaataacagaa

SEQ ID NO: 52667 - DNA, 364 bp, Gossypium hirsutum
  Clone ID: uC-gsronu33B078f02b1
gtcatattgagaatccagatcctgagttgattccggtggcgcgatccatccagcaaacggttacaattaaagggaatataaagaatccagatcctaagtttatcactatagaatgatgatcagggatgagaccctaaaatctaatcgaagtagctgttaggaatagataggaagtttttcagcttttaatttaagaacatcagaaatcaacctctgctacatgaaaattgaattaaatatgaaatgaaaatcgattgcagagattttagataaacatctaatctaatctaatctaatgattgtagcttaagacttggattgaatattccaggtttcaattaataaataatcccagcactgtatc

SEQ ID NO: 52668 - DNA, 438 bp, Gossypium hirsutum
  Clone ID: uC-gsronu33B078f06b1
gtgtgatcttatagctagcatgtcaccactattcttccaaacaacaacttttatcagatagttttctttttcttcttctcttgtcttttattacagtcagacactccgtacaaaagcaaaaacatggcatcatcttcttcttctgaactaacccttgattgtaaacctcatggccattttgcggcgccgtccaagtgttacgcagaccagcagcagattgttgttgttaatcatacattgaagcttgaagactacctttctcgtctcgaggaagaacgccttaagatcgatgctttcaaacgtgaacttcccctttgcatgcaacttctcaccaatgctttggagtcatcaagacaacaactacaggcataccgagcgaatcaaggaccaaaaccagttcttgaagaattcatgcccctcaaaacctcagtgtcggag

SEQ ID NO: 52669 - DNA, 218 bp, Gossypium hirsutum
  Clone ID: uC-gsronu33B078g03b1
gatttattgtggaggttttcatttcttgtgtactttttgtgtagaggcgataacaatttttgatatagtaattagtttttagttctaaacttcaattttgtattctaatacatgatttaggtttagggtttaggaatactagaaaattttaaagtgtgctggattggattgttgttaaattttaattttttttattgaaaactagtgatttttattag

SEQ ID NO: 52670 - DNA, 411 bp, Gossypium hirsutum
  Clone ID: uC-gsronu33B078g06b1
gaaggattttttagggccgaggggggcctgaacaacgcagggggttattggactgattattttctaggtgagcaaacaaccccagctgtgaccttgggagaggcacagacagggaagctggacataacacgggacgcttccaacaagatcatgcaccacctggatgcaacctgtggagctattgtattgaaaggattcaactgagacagatagatgagatgatcaaggggggagggaatgttgtgaacgatgaatacaccaaaggggacaggcgggctgctgaagataatggcacttgcggaaaggcgacagtggcaaatctgctgctgatgccaataaaagatgcagatactccacacgagctgaagaagcaacgagacctataaaccctaaaaacaaaatgactgatgt

SEQ ID NO: 52671 - DNA, 461 bp, Gossypium hirsutum
  Clone ID: uC-gsronu33B079a04b1
ctcgattctattctcatccaagtgcacatgtgcgcgctctcaggccatttgtccgtcgcttttttgtgcatatagcctcaatcaattcaaaatccaaggtggaaataaacggcatctgtggtgcctcttaccaggtcttcaatataggtgccatcaactggcaaactgatatcgataagtgctcaacacgggaagtttatagtcagctagcaagaggaatgactatactgtggctcgacactgcagccaaagaattaggatcgtaatatttccatatcacatccattaactttcggattatcaggataaatacccttgctatttctcctattaaaactgacaatccaaagaagactcaagacttgcttcaatttgctggaaccacatgggtcgggcagaaaatgcagctcatcgagtagttctaggggatgaggatgaaggctctgaatgccatgaaactc

SEQ ID NO: 52672 - DNA, 343 bp, Gossypium hirsutum
  unsure (1)..(343): unsure at all n locations
  Clone ID: uC-gsronu33B079a10b1
cccacgcttccgaaagcttgttgttatgttatgatcacgatttacattgcgaagagggggttgggtcnnnaacgctccaaggntatcaagaaagcaattgaaaagcttgggctaaagcacaaaaaacacacagctgcctatggagaaggccaaaaagcgccgtctcaccggccggcacgagaccaccgccatcaacactttcttatggggtgttacaaaccgcggggcatcaattcgagtcgggcgaaacacctataaaagcccaaaaaggtatatccaaaacagtaggccaccatcaaacatggatccgcatgttgtcacgcccatgattgcacaaaccacc

SEQ ID NO: 52673 - DNA, 335 bp, Gossypium hirsutum
  Clone ID: uC-gsronu33B079b02b1
cacgatgtttccatcgatggtatcaaaatgaggggcaggaggcactatttgaacccgattgttgcgactcgagagaacttgaggaagggttaggaaactcacagacggaatgtcctgggcaatgcgacctgggcgatcgagcagactatttatggtcgccaaactacaccagaggtggctgcgaatggagacgaaagcgatagacggaatgatcattacctcggccacgcttgagggtgacactgtaacgaacccgggtaacagcacatatgttcaggggcccgccgacgcgccgatggaagacgtatcaggttgcacggtgaatttcgggacgg

SEQ ID NO: 52674 - DNA, 257 bp, Gossypium hirsutum
  Clone ID: uC-gsronu33B079b03b1
cacaattttaagtgcaagcgatgaaccgagagagcaaaatgataccttatgagggaagattatcagtgacgaccgcaagaagcgtaagcaagaaccgtcagctaataaaccactactgtttgaagatgagccatgtgtgcaatctaacagtcgacaacgactaaacaatatttgctaccacaaagggactgactgcgtacatgataggatgcatatcttcacgcactatatggctaacaatggcatcaacctgggat

SEQ ID NO: 52675 - DNA, 493 bp, Gossypium hirsutum
  Clone ID: uC-gsronu33B079b05b1
cccacgctttcggaaaacataggataacatgtatgcataaaagacgacaatggatgaatgaagataatatatcttacttaatcaactaacaaaacaattaaatatgattaatctaaaaatatgacctaattttcaagcatgtacggagaataattaatacaacaatacaaaacaatgaataaataatatgcaacgacaatgtatggcaccatacaaatcaatcaacaaaacatgtataaaacaaaatggaatttagaagtcaatgtggtataagacattttccaaaataatgatgaattaatgaacgcataatatatataagttgacaaatttacataaaaactggggatatagaattattgaaatagatattatagaataaaagtttgaatcaaattatatgcaaaatattttaaacacaagttcattcaaaaattgacaatgtacatgatagcttaaataatatataagatatgaaagaataataaaaata

SEQ ID NO: 52676 - DNA, 308 bp, Gossypium hirsutum
  Clone ID: uC-gsronu33B079d04b1
tactagatatcttatagagagagctaactacaatcaactgactggccgttgacaaacaacggactgactgaacaatggctggacccacctaaatcaattggcaggacatacatctttctttagctggctgaataactaacaggcaggcacggatcgatcgtcctaacaaacaggcacgcagaatggatggtgaaacgcacgctgtatggagccattaagtacgcgcggtgtggggggtactcacaggcagaccgatacattcgctagcgagctagctagcgctcgtttcgctcgcttaccttcctttc

SEQ ID NO: 52677 - DNA, 345 bp, Gossypium hirsutum
  Clone ID: uC-gsronu33B079d05b1
ccgatgttctggagcgactcgttgagaggcaggtggccgagcctagagaccgctatgaagctatgaatgttcgcccggcaaaccatgtgcaagcttacgctgtagacgactctgattgtgcgaccgaagcgaactgccctaagagatgagtattgctcattgactggaattctgaccagacacagtagaggcggagcgctagcggagctaggtgacaagaacaaaagggaattggatggcctgcatatagagttgcaagctaccgacccttgcgtgatagatcttgatgtcataatgaggcgagccaaatgaaatgtactgaccattgctttacagcaatgggac

SEQ ID NO: 52678 - DNA, 457 bp, Gossypium hirsutum
  unsure (1)..(457): unsure at all n locations
  Clone ID: uC-gsronu33B079e12b1
cccacgtgnccgaactacttgaaaaaaaaaaattaaatggggaaattttttaaaaatttttttggtttaataacaaaaataaaaatagggagggggcttttgatgttggggggcccggttttggggttctcgggctgcggcgctcttgcgttgccccggcttcctttcctttttctggggccgcaattcttttctttttgggcggcgtattcccatgcgttggccggtcttttcctggcgttgcccctgggattcccttggggtccccctcttttttcgcgggccggcctctccccttttggcccgtggccgttttcccttacgggcacttgcgcctcctctttgccaaggggtgccccccctgttggggcgttttatcccccccgggtgggggggataccgcccggggggctggtgctttttcctgagggtttccccccttttttttccggttttt

SEQ ID NO: 52679 - DNA, 407 bp, Gossypium hirsutum
  Clone ID: uC-gsronu33B079f03b1
cctattttgtctgccctgccttttccccttttgcccataggggccccttttcatgggccttccccgccttcacccttgctgtcagtcggccgctttatgatcttattttttgcctcggaaagaaacaagcccccttttgtatggcgcgcaccccaaccaggcgaaaaaccaaaagtcgcccgccaagctgaaggcggcccacaggggggagacccttgcgccccccccccccaagcacctttattagcccgtgggggaaaaaccccccgtgtagggccccccccaccttacccccctccggggggaccccccccccaacaagggcgcccccaacgaaaggcctttcaacaaaaaacaaaacacctccgggggccaaaaaacaaaagagggcccccctaaaaagcccc

SEQ ID NO: 52680 - DNA, 431 bp, Gossypium hirsutum
  unsure (1)..(431): unsure at all n locations
  Clone ID: uC-gsronu33B079f04b1
gttctagtgcgcgagcgccgcccttcaattctcacataaggggtgttttttaaaggcttttttgcgtttnccaccccagagcagcccacncatgagaggctccacagacgctgaacaacacaagaaggagcaagcctgaaaacgaaacagacaggagccccggcccaaggaacatcaggtacaacgagaccatcaaagaagccgcagaacgggaaagcgccggagccgaagcacgagccgagaacccaagcccagaccgcaagggaaggcatcgctcacgcagggaggccctaaaaccccccccaaaaccggaagaagagacggaagaaggagcagagcacaagcagcggaggaagatcccccggaccacaaaagagaccaacactggccgcccagacaggaaagccgccacgggcaatgaccaccccgga

SEQ ID NO: 52681 - DNA, 456 bp, Gossypium hirsutum
  Clone ID: uC-gsronu33B079f05b1
ccttcaatttctaggaaacaagacaggatctcatcaaagtgcctcgaataagcacgcaagttcttcggtactgacgaggatcttcttctgatatccgttgatgagagccgtaaacagaactatcccataatatgatttttgatacgagtagcacctgatattcttcattgagctgctctcatcattttctgcactgcacatatttttcaagttcgtgtatagtaagctttcggaacgagtattttatgtcaatgaagaatgattcagttttaatccacaaatcaggtacatttgtaaaataagttggttcattttgtatatgagctgtatattataatgtatttgttgtatatttctttgtccatgttggcaacttgtttgtaaactcaaatctatataataaatttcttcctttttaaaaaagaatgaaggccaaagggcttatatttatatgtt

SEQ ID NO: 52682 - DNA, 437 bp, Gossypium hirsutum
  Clone ID: uC-gsronu33B079f08b1
cacagaaaacagcttggtcaacggaaaatgacttacaggtcaatggaaaataagcatttttccttataaaatgacttacccttttcaaaagcgtcagtcattttccggtaaagaactctcaatagataattttattttttatataaaaattaacttaaatcaagtttaatattattatattgataataaattttatttttatttttaaaaatatttaaaattattaaaatattaatataaaatattatattttttaatattattaaacatacgtatttaattatttatatttagtcatataataaattattaatataattaacataatttggtggttttaataaattatttaatatttaaattttattttaatagtaaaatttaaaaaatattattcacatattattgaaaatatcaatattaatatttaatactaa

SEQ ID NO: 52683 - DNA, 336 bp, Gossypium hirsutum
  Clone ID: uC-gsronu33B079f11b1
aaaaaataaaaaaaaaaaaaaaaaaaaaaaaaaaagaaggggagaaatttaaaaaaaaaattatgggacccaagcccagcgacccaaaggggcggccgtagtggaggcccaaagcaacccaccgcccgcaggcacccaccgacgtgtccgtggacgccctcgaagaacacaacgctgtcccccgtgttacacatgcccgcactggaagcccccggaagaacccaagcggaccgcgccgggcgcccttcccccttgggccgcctcccgaatggccaacgggacccgcccctggccgcctccctaacggcggcccacctggaggggccacgcagccgc

SEQ ID NO: 52684 - DNA, 506 bp, Gossypium hirsutum
  Clone ID: uC-gsronu33B079g06b1
cccacgttttcgcccacgcgtccggcgaagcggccaagtaataagatgaaagggacattggggaagcactttcaagttcagttccaccaccaccaatcatcttccgccacctcatcctccatcttcacccggaaccttctagatttcggatctcaggatgacccttccacttccgttcccgacctcgacgccgccgatgacaaagatttcattctcagtcaagacttcttctgcactcctgattatatcacccctgataatcagaacctcatgaacggctttgattgcaacaaggaaaatattccttgccctaagtcgccggagaagccgaatactctcaaaagcaagagacctcgacaagatggtatcctggtaaatcccctcagccctacattatctggctctcaacagatagtggaacttgccagtgacaacttttgataatattgaggcaaccctagaaaaagcatcatacctggagtacagaagactttaaaatatgtttc

SEQ ID NO: 52685 - DNA, 167 bp, Gossypium hirsutum
  Clone ID: uC-gsronu33B079g10b1
gattttttattattctgatttgtggatggatataatgtaagctggtctgcagcgcatcaaaatgactgaacctactttgtcgccatagttgcatttgcttcaaaggattaggttctgtaagtttgtgctttgattgcatttagatcaatgtttacaataagaggggt

SEQ ID NO: 52686 - DNA, 356 bp, Gossypium hirsutum
  unsure (1)..(356): unsure at all n locations
  Clone ID: uC-gsronu33B080a06b1
gctattttttatcttcaatttccttagaccataaacaggcgtttggaataataacattggtcttctttttgtattatgatgcaagttaaattgcttaccatctctgcattttcctattccaattgagtctcatcttcagattctgatgcttaaaaccatctgcttagtctgaatggttttgaaatttgcaagcagagatggtttgcattttatccggaagaaatttcttttgttttttttcttttagaaaaaaaaaatgaacatagcaatgcagagtccttagcattnaaagaattacaaaaaaaaaaaaaaaataaaattaaaaaggaaacacccccttaaacagcccataaacg

SEQ ID NO: 52687 - DNA, 497 bp, Gossypium hirsutum
  unsure (1)..(497): unsure at all n locations
  Clone ID: uC-gsronu33B080a07b1
cttcttatacccagaaatgaaggcttctcagngctttggagtgtctctataacttcttatgggtgcttaacacatgcccttggctgatttcagcaaatccccatctcaataattttcttgcgcgcctcgattcgttttattccaatgacatctctaaggtaatctacacccaaaatcaagcctctcatgcatctgtattgaacgctaccactcaaaacccaagatggtcaacaccacccacaccatagccctgaggctgcgatgccacggttgaaacttctcatattcaagcaacaatccgaggttcaagaacaaatggcctgaatcttccaatacggagaggggaacatcgcttttctaaagcggcgataattatttcatggcccgtcatgttgttgggaacctttcaagacagtatggaatttttggttttctaatgtaacgttttccgagggatatggtggtcctttaagcacttaatagctaatggcctccct

SEQ ID NO: 52688 - DNA, 182 bp, Gossypium hirsutum
  Clone ID: uC-gsronu33B080a09b1
cccacgcttccggctctagatcgcgagcggccccctgtcgctgttttttagaacgctgtgcccgtcatccaagcgcttcccctcccctgcgtgctcatcggcgaccgtcggaaaccaggggctgttgcggatatctcggaagccccaggcgtgacaaagagggacttgctggagcgcacgtt

SEQ ID NO: 52689 - DNA, 187 bp, Gossypium hirsutum
  Clone ID: uC-gsronu33B080b02b1
gaattaaaacatgggcagaagctgtatggagtagccgtcttatagacactcactgatgtattggacatctcagagccttcaagtaaggtgccagttatagatgcacgaatcagccgagtgcttgagatcatcttgtgtttcttcaaacgccgcatttaatgatgctttgtttctgcacctgacaaat

SEQ ID NO: 52690 - DNA, 165 bp, Gossypium hirsutum
  unsure (1)..(165): unsure at all n locations
  Clone ID: uC-gsronu33B080b04b1
gccggactcacactctatagaaaaaaaaaaggccnatnncgtaacatatttaaacatgtatgtgctgcaccacacacnacgcaaaagaaggaattgatccgtgttcttaatggcatctagaaacatatcactgcccaagaaacatcacatatgacaacgctgatc

SEQ ID NO: 52691 - DNA, 237 bp, Gossypium hirsutum
  Clone ID: uC-gsronu33B080b07b1
cttttatttgcctctttggatgagatcaagtcatcgttgttaacttattaagcgatttgttctaataaagagagagtacaagtgatgcccgtaatagccagtgatcgtgaatcactaattgttcttggacttggaggcgagtatgtggggatgttttcgtctaacttgtgggattttaggacttgcgtttacggagattttagttgtggatgctgtccccagtgtggttcatcatgg

SEQ ID NO: 52692 - DNA, 319 bp, Gossypium hirsutum
  Clone ID: uC-gsronu33B080b10b1
aacttatcaatttctgttaaaattaaattattgatggtgcaataaaatattcatgttaaaattttcaaaaaaaaaaaaaaaaaaaaaaaaaaaaaaaaaaaaaaaaaaaaaaaaaaaaaaaaataaaaaagcaggaaacattacaaatgccaaggctgctatcacaagattacaagatggtctctcagatataagtgcccctaattataaatacagggttgaagcatataagccttaagaacaggaaatcgattaaacagaaagtgttaaaacaccttaaaaagatggcacattaaacctttgtcaacaaaagaaaaat

SEQ ID NO: 52693 - DNA, 290 bp, Gossypium hirsutum
  unsure (1)..(290): unsure at all n locations
  Clone ID: uC-gsronu33B080c07b1
cccacgctgccgcccacgcgtccgcccacgcgtccnggggctaattgatcgaaggtttgctcagaatccacagatagtggagaccttaagagaaaacaatctgaaatggattctgaaccacataaatcacgaaaaagagatcatggagaccaatcgtcaccaagcactagtaaagcctccaagaagcactcaaagcgtgagaagctggattgaaatgcactcaggcgaccaaagcctgctaggcgagcatagctgggaaatggttttaacatatatgaagggcgtaacat

SEQ ID NO: 52694 - DNA, 197 bp, Gossypium hirsutum
  Clone ID: uC-gsronu33B080c11b1
ccctgcttccgcccacgcgtccggggaatatgaagggaaattgttatggaacttgttctgattaccctgacgatcctcttacatacttcaagtctgccttaaaactcaggcttggcataaaaacaattgtgagatttggacgtcagacaagttggacggtgaagcaagatgcagagtatgtacttcatgtattaaaa

SEQ ID NO: 52695 - DNA, 352 bp, Gossypium hirsutum
  unsure (1)..(352): unsure at all n locations
  Clone ID: uC-gsronu33B080d10b1
gattacttcaactatatgatgtggaactgttgtagtgagagcactataacagtgtattagcatgaacagataaaggggaactctcttggcagtgtctaacaccanaaaaaaaaaaaaaaaaaaaaaaaaaaaaaaaaaaaaaaaaaaaaaaaaaaaaaaaaaataaaacaaaaaaaaaaataaaaaaaaaaaataaaaaaaaaaaaaaaaaaaaaaaaaaaaaaaataaaagggggggccgttttaaagaaaaaaagtttacaaaccggggaaagcaaagaaaaagtttttttatggggccccaaaaaagaaacacatggccgctaaaaaaaaacggcgtgacgggaaaaac

SEQ ID NO: 52696 - DNA, 432 bp, Gossypium hirsutum
  Clone ID: uC-gsronu33B080e02b1
gtaagtgcttaaccaagagcggaatgccacacgctcgggggatttgaaagacacttgtactgattcatcctgccaatgatgaccctcatcagacctccagcagcgcagacaaaacattggacctagagctgggagctgcgcacagacaaacatgcctgatatgcatgataactatagcagcccttgggatcagcttgtacggtgtcgaactgtatccaggatcaaatctgaaaataatggttaccattcttagacaaacgagtcaacttatgcttcagatcaggtgcagactatagaaagctctagtgagccttcattagcgggtcctgccctcataatgaatgagaagagagaaaagctacattaccagcaacaaaaactagccccactgaaaaagaaggtcaaacatgcaaaagtgggtagtaagatggc

SEQ ID NO: 52697 - DNA, 387 bp, Gossypium hirsutum
  Clone ID: uC-gsronu33B080e06b1
gcgtgggccgccctttttttttttttttttttgtggggtttttttataattttttgtggtttttccccctttttttttcaccaaaatcgagttgctggagggatggcaaataaaaaggaaaagggggggggagaggaagggaaggattcccgggaaagacccaaaccagtgtaagacaaagtccccccaattgaaccccaatgcggggaattaaagagagaaacctcattccttgttcagcaaaccgccaaaacccaaatcaaactggggcttatgttccccatattgaaagcaagggaaaccggtcccttggatgaagccgcccttttcactcaaatgcccccagaacctgtaagatttggggaggaggaaaaagaagggtgaggg

SEQ ID NO: 52698 - DNA, 332 bp, Gossypium hirsutum
  Clone ID: uC-gsronu33B080e08b1
atgaattgtagttcactgaagctgaaagcaacatgaaggaggcggtttagagtatcaacaataccaggatgctactgctgaagacgaagagtatgaagaatacgaggagtacgaggaagaagcttaaagcttgttccttgttcttttctttttatttataatggtaggatatatttggttggttttgttatgcttttgtgcatgtgaagcctgttggtgcaatgtcggcattgccgggtgcttcgatgaggatcactttagtgttaattttctgttgttctaccagactacttgtatcgctgcattgttttttatgaataatcttagcagcc

SEQ ID NO: 52699 - DNA, 168 bp, Gossypium hirsutum
  Clone ID: uC-gsronu33B080f05b1
ccctgcgtccgtttttttattaggatgtcttatattggtgattaatgcagtgacttaggttatttttccggaagaacctaccttgcaggccctaaatattgacaataaccgaatttaagggcttcatgataaaccttacaaagttaaatcagagccctttcgagttgg

SEQ ID NO: 52700 - DNA, 409 bp, Gossypium hirsutum
  Clone ID: uC-gsronu33B081a02b1
gaggaatgcacttaaaagagctccccttttaatccccatttttagtcactgctatattccatgtaacccgtctttagccggtaacccgattttcttcatcgacgaaacccggattttctgttgcggatttgatatatccagctttttcgacagggaatcctttttccggacctccgaatccgacccggaatcgttgaagaaacagagatcggttagcgaaaaattagccgggtcgtccaccgacgtatccaggcgtagtatggatgccggtttccttaccggcactcgaacccctagatgggtagagttctggagcgacgcggcggttgatcggcgccggagaaactcatcgtcttcaccctcggattcatcgcccgagacgtattttgatctgccgagaaccggaatt

SEQ ID NO: 52701 - DNA, 487 bp, Gossypium hirsutum
  Clone ID: uC-gsronu33B081b04b1
accacacttagggcgggcggtcgcgatctagaacctagatattatatttagccacacgagatgcaaatgtttgctacgactctaaccgacaagactaacactctcgaggacaggagctacgattcgagcgacaacgtgtaggccagaatccatgtgaaggatggcctccctccagaccagcagcgtctgatcttcggcggataacagctcgattactgtcggaccttggccgagtacaacaatcaaaaggagtcaactctccacctcgcactgcgaatgcgcagggggatgcaaatcttcgcgaaaaccctgactggccagacaatcactcctgaggtcgagagctccgacacgatcgacaacgttaaagcgaagatccaagacaaggaaggcattcccccagaccagcaacgtctcatctttgccgggaaacacttcgaagacggccggaccttggccgactacaacatccagaaggagtcaactc

SEQ ID NO: 52702 - DNA, 452 bp, Gossypium hirsutum
  Clone ID: uC-gsronu33B081b07b1
atcattttgtagtcaaaaaagtgaagctaggagacaggataacagcacttcaacaaattgtgtcgccatttggaaagactgatacggcctctgttttactagaagcaattggatacatcaactttctacaagaacaagtgcagttactgagtaatccttacatgaagcccaactctcataaggatccatggggcagcttggatataaaagagcagaaaggagatattaaggttgatctaaggagcagaggtttatgtttagttccaatatcttgtaccccaaaagtttaccatgaaaacactgcttcagattactggagcccaacatatagaggatgtttgtatagatgaagaattaaatctcatgctcgctttgacacgcacaaacacacgtacgtatatttatatgtatgtattacttttaaggaaagcaattggaatcattttgtagtc

SEQ ID NO: 52703 - DNA, 556 bp, Gossypium hirsutum
  Clone ID: uC-gsronu33B081b08b1
cgtttctcataatcaaagctttacaggtgtctatgtcaggcgccttaagtaaggccacaatgtgagaaacgaagagaaggtgatgcatgcggtgttggctgggtgcttgagtttgagtctgcttcttccttcttctatgtttcttcttttcggctatattgattaaaattttgttttaagctttgcttgtttgagttcttttcgctatcaaggcctatcaaagccaacaaagaagaaaaaaactgaggaaagtggtcttttttagatctgggtttctcaactttaagggaagagtgatgatgagattaaatttccagagccttggtattaagctcttaggaggaaaagcatggtgtggatctttgtggtgatttttccacttatttttccttggttatttactgcattcacccatgcttctccttctacattctcggtatgtttctatatcaaaatttttttctttgcttaattttctagggaaaaaaaatatgagttctggggtccttgtaatttcatggacagattaaatggaagttttgagtgtttgagagaa

SEQ ID NO: 52704 - DNA, 102 bp, Gossypium hirsutum
  Clone ID: uC-gsronu33B081b09b1
gccattcgtacgatcagtcttgggtaatgttagtgtagaaatgatccctaagtccacgggactgagaatactagagagtgatactccctctcctaaatcagt

SEQ ID NO: 52705 - DNA, 102 bp, Gossypium hirsutum
  Clone ID: uC-gsronu33B081b11b1
gccattcgtgcgatccgtgtgtggtaaatgtagggtagctttgatcccttggtcaaagggactgtgaatgagaaatagttaaatttcgtctcgtaaatcagt

SEQ ID NO: 52706 - DNA, 299 bp, Gossypium hirsutum
  Clone ID: uC-gsronu33B081c05b1
gtcattcttagggtccattggcggtcaatcgagccaggatgttatatcctactccacagggcggagacttctataaagagattctcttcctagtcaatcagtatgctggtcttaaggtcggttacttgtgacagatttctggactttcttcctattatgtcttggatgccacgcgacctcaatgggctgctcttagtctggaaacagacccaagaccttggttggtgcgtccatagctacatcccatttctgtggcctactcagatctatctgggaatgtgggggcattctctgggcat

SEQ ID NO: 52707 - DNA, 134 bp, Gossypium hirsutum
  Clone ID: uC-gsronu33B081c06b1
gccactcttaggatccatcgttggtaacgcgagccaagatgctatttcatgctccacagggctcagggtgctagaaagtgacacttcccctactaaatcagtaggctgcggatctgattgggtttccatcggag

SEQ ID NO: 52708 - DNA, 347 bp, Gossypium hirsutum
  Clone ID: uC-gsronu33B081c07b1
gtcacttttaggatacatcagaggtaacgcgagttattaagttatagcatgatccacatggctgagggtgctagaaagtgaatctcctcctactaaaacagtaggctgcggatctgaaagggtatctaggagagataacgtgactctccttctattgtctgtttgtgaccatatgacctgaattgggctacggcgatttcggaaagatacccaagcgttggcattcggagatcagatataagactcatttctgtggcgtaatcatggctatgtggaaacgcaggaaacttgtgttggcaggatgcctgccagctgtaatggggaagactattctttgtgctgttgaa

SEQ ID NO: 52709 - DNA, 262 bp, Gossypium hirsutum
  Clone ID: uC-gsronu33B081c08b1
catcacttcatctgcgttttcgttggaacggtctcaggaatggcttttaacaagctgaccgacatcggatcatcaaccccggccggtctcgtagccgacgctctagctcatggcttcagtcttttcctagctgtcttcgttggcacctacatctgatgtgttcacgtgaaccccggcgctacattgggtgcttccgttggcggaaacatcactatcttgcgcggtattctaaactggatcgcactactttttggattatccg

SEQ ID NO: 52710 - DNA, 128 bp, Gossypium hirsutum
  Clone ID: uC-gsronu33B081c09b1
gttattcgtgcgatcagtgtggggtaaatttagtgtagatattatttcttagtccaaaggactgagaatgagagaaagttctacttcatctcgtaaatcagttggatgttgaagataaactgtatcta

SEQ ID NO: 52711 - DNA, 113 bp, Gossypium hirsutum
  Clone ID: uC-gsronu33B081c10b1
gtcattcgtacgataagtgtgaggaaaagttagggtagatttgattgcttggtcgaggggactgagaatgagagaaagttcaactttttctcatagatgagtgggatgttgaa

SEQ ID NO: 52712 - DNA, 310 bp, Gossypium hirsutum
  Clone ID: uC-gsronu33B081c11b1
gtcattcgtacgatcagtggggggaaactctagggtagatttgattgcttagtccaagggactgtgaatgcgagaaggagctactttacctcgtaaatcagtgggctgttgaagaagaactgttcttatgcactgataattgcgatggcctatggatgaactctcgtggaccattcagatttgaaatgatacacgccgagcgtggaaagatgccagaggggttgaaattttagtggccagattggactgagttctttgacgtacgcgaatcggtgaggataaatgggatcgttcagtgggtaggtctcat

SEQ ID NO: 52713 - DNA, 564 bp, Gossypium hirsutum
  Clone ID: uC-gsronu33B081d02b1
caaaaagaaaagtaatcatttttttttcttattttgtagaaaatggttgaacttgattggaaagcaaagatggtttcttccgatattccaaagaaatctccaaagctctctaacaaactccaagtttccattccgacgccgtttcgtttctccaatatgtcttctccgctctcgacttcaccttcggcgtccaaagcttatgattattatctccggttaccggagctgaggaagttatgggagacacaagagtttcccgcttggaaaaacgaggtcgttttgaagccggctttgcacgctttggagattacgttccggttcatttcgatcgttttgtccgatcctagaccgtatttgaaccgtcgggagtggacgcgtcgactccagtcgcttaccacgagtcagatcgaactcatcgctatgttatgcgaagaagaaaacgaagctccgatccttgatcttacgtcgtcgaacggtgtattaacacgagagagcagctccgccgaggtgtggaagattcacggagaacgaccgtggtgacaggaccagcgaagccgcttattg

SEQ ID NO: 52714 - DNA, 443 bp, Gossypium hirsutum
  Clone ID: uC-gsronu33B081d05b1
cccattcttacggtcagtttgcggtcaaacttgtatgggagttatatttaatgcctgagtttggaaaataataaaaaaaaaataaaaaacttctgaaagtatatagagctacctaaatgaaattttctggcactagtattacaaccagctcactgtaaaataccatgagaaaggccaactcaattttagaggaaccaagttccggtatcgacccttgacctcctaaagttttttcttggtgccacgcaactttcataacatggccccacatttaactggagaatgagtggaacacccttggggtgcactaacctaaactggttggggggaaataccccctatggtgagcgtgcaaaatgaaaaaaaggtccctaccgataattttgcataaaaattacgattctaaaaaggatatggggacccccccgtttagggataataaa

SEQ ID NO: 52715 - DNA, 140 bp, Gossypium hirsutum
  Clone ID: uC-gsronu33B081d07b1
ttctctcgtacgatcactcggtggccaaagtattcgggcagatatagcttgtgccaggggagttggtataaaagacagaccaacttcctctggtaaagctgttacatgcccctctctgagtgtatctatcggagctaatt

SEQ ID NO: 52716 - DNA, 205 bp, Gossypium hirsutum
  Clone ID: uC-gsronu33B081d08b1
gttattcgtccgatcaatctttggtaaaggtagggtagattttatctcttggtccaaaggactgagaattataaatagttaaacttcatctcgtagatgagtagtatgtagaactcaaacagtatctatgagccttatttgcgatggaatatggatgaatgtgtgggatccttcaatctaaattgtatacgtcgattttggaatg

SEQ ID NO: 52717 - DNA, 137 bp, Gossypium hirsutum
  Clone ID: uC-gsronu33B081d09b1
gtttttcgtacgataaatatgaggtaaagttagggaagaaattatttcttagtcaaaaggactgagaatgagaaaaagttaaattttttcttatagatgagttggatgttgaactaaaacggtatctatgagtaata

SEQ ID NO: 52718 - DNA, 121 bp, Gossypium hirsutum
  Clone ID: uC-gsronu33B081d11b1
ttcattcgtgcgatgagtgtgggggaaagttagggaagctatgatcccttggtcaaagggactgagagtgctagaaagagcaacttcatctcataaatccgttggctgttgaagtaaaacg

SEQ ID NO: 52719 - DNA, 305 bp, Gossypium hirsutum
  Clone ID: uC-gsronu33B081d12b1
tccatgcgtccgatcagtttcagggaattttgtgctcgcggggagggcttagccacagtcactgagaaagatgactaggcacacttcctctctactatcagtggcatgttgaactccgacggtacttgaccagcttaatggggacacgcaataggtacatatggtcgatcgcatcggctcgaaccatcatccatgtccgtggaatgttgcgcactgagacggatagagagcggtcccaatgaaagtcggattgctatgtacgcgaaacttgcatcatgtattttcctgatcctgtggtagtaatc

SEQ ID NO: 52720 - DNA, 127 bp, Gossypium hirsutum
  Clone ID: uC-gsronu33B081e08b1
ttttctcgttcgatcaatcttaggtaaagctagtgtagaatttatctcttagtccaaagtacttagaataataaatagttctattttatctcattaaatcagttataatttgaactaaaacagtatc

SEQ ID NO: 52721 - DNA, 130 bp, Gossypium hirsutum
  Clone ID: uC-gsronu33B081e11b1
tttattcgtgcgattagtgtggggaaattttagggtagcgttgatctcttggtcaagggcactgggagagagaactagaaaaacattatctcataaatcagtggtatgttgaagacgaactgtacttatg

SEQ ID NO: 52722 - DNA, 302 bp, Gossypium hirsutum
  Clone ID: uC-gsronu33B081e12b1
cccatgcgtccgattagtgttagggaattttatggtcatgtcgagggcttagtaacagtcattgagaatgaggactatgctcacttcctctctacgatcagtggcatattgtacaccaacgttgactatacagattattggggacacgcatataggtacatctggtcgatcgcacagcttgaattaacctccatatccgtggaatgatgcgcacttcgatggatttagagaggtcccaatgaaagccggattgctatatacgcgaaaatagcatcatgtatattcctgatcctgaggtagta

SEQ ID NO: 52723 - DNA, 230 bp, Gossypium hirsutum
  Clone ID: uC-gsronu33B081f10b1
gcctatcgtgcgatagatgtggggaaattctaagctagctttgatcatttggtcacaggcacattatgagagaacttgatctaatttatatcaagattgactgtactctcaaggacaaacagtacttcagagacttaattgcgactgaatatcgataggtatgttagggtcgccggttgaaagaatactccaatacatgcttctattgagtattgtggcaacatgtttga

SEQ ID NO: 52724 - DNA, 294 bp, Gossypium hirsutum
  Clone ID: uC-gsronu33B081g10b1
cttattctttctttttctgtaagaatattttagggttccctcaaccctttgagcaccggccccccctttgcgccaaggctctgattgcgacggagatggccacgactcggcgggttcggcgtatggtccgtttttgcaggtgttcataaagagtacggcgcgcgtggagaggaggctggccccaagacgcgcggggcctgtaattctgctggaggcgcggaggctgcggcggctagggcgtatggtgctagggttgctgctatattttagataatgggctattggggtttgggc

SEQ ID NO: 52725 - DNA, 363 bp, Gossypium hirsutum
  Clone ID: uC-gsronu33B081h02b1
gcatcttattaatgaaatgagccgatttggagctgcagagctccatgccgatgctgccatcattggtggaactgcatctcaagaagtcattaagcttatgacaaaacaggtagttccaatgactggcacgtctgcattcaatgcgattgatcacaagtcccaattgttgaatctgtgttagagaacttgacgcaacgcagttgtttgaagcccaacggcactattcatctcatctggttcaaactacctcatttaatgtcgatttcaagtgaagaaatgttgcgagtggaaaattcggctgggagatgggatcacaaatcgattgcaggcttacctttggggcctcattaatcaaaagatgac

SEQ ID NO: 52726 - DNA, 478 bp, Gossypium hirsutum
  Clone ID: uC-gsronu33B081h08b1
tcctctcgtccgagagaaataagagaaagctaagatctttgataactatagtgaatcggttttctcaccggagataatcgccggagcttctttccggtgaattatggtatattgtgccgcctgactgacgagtgtcatgcaaccagactggtttctttaataattagtggtttatttaaattattatcagcaagacgagctaattttacagagatggatagaaccagagaagcgaggagagtcagtatggcgaccgccgccgcgaccaatggcctttcacggcggcgacataggactagctctctcagagactctccagaggaagacggaccggtggagacgcatgaaacggcgcgtttaagggatcgaaagaaggatgggataggcagcgatgtgaagaagatggtggcggaggttaacaatgaaccggagagtgcaggagataccgcgaaaacagaggctcacagtgggagtagtc

SEQ ID NO: 52727 - DNA, 160 bp, Gossypium hirsutum
  Clone ID: uC-gsronu33B081h09b1
ctctcgcgtccgtaagaaacaacaataagctaagagaacttataatccttaggaaatcgatactcttactgaaaatactaactaaccctcatctaactacgaatcatttcttagggaaccaagcgacttcggggtgctattcaaacacgtccatgtatcc

SEQ ID NO: 52728 - DNA, 210 bp, Gossypium hirsutum
  Clone ID: uC-gsronu33B081h12b1
gtgaatttatttagcgcctcaggcgagcttgcgctctcctggtgttcctccatagagtcattctctcttttaagaggccttttcacttaaaaacttgtacctctccaagcattggcccttctggcaacagcttttgtatctcctccagtcaaagcaagtttgtgttgatactcttgggtttattaccaccaatgaagagagtgtccctct

SEQ ID NO: 52729 - DNA, 266 bp, Gossypium hirsutum
  Clone ID: uC-gsronu33B082a04b1
gggatgacccttttcatatgagagagcagtagcttggaaagtgttgaacgaagaagagaatgctcattgtatctgctttatgtttgtcaactggtcttttgtctaaaactctcaccccaaaaaggggagacaaattatcctatcctgttttgttggcttgatgtttatctatctgtagtccgtaaaactttttatgctaaatcatcatgtctgttattcctctatacttttaagacgactgcttaatgttatgacaatcttatgct

SEQ ID NO: 52730 - DNA, 409 bp, Gossypium hirsutum
  Clone ID: uC-gsronu33B082a10b1
tattcttacaaaacaataatctgactgggcgaataccggatagtcttgtaggaaaacctggactggacttgaggacttctggaaatcagtttttatccccgtcaccttcttaagtagattgtacatgcgttcagaggtaacatcacacgattgcaatgatcaaaatactcgatttcactgaattctgtatcaaaaaggcatcatcttggtctgaaattttggcggaagctccaccattgctgtctgtttgattgcaaagttgtctcctattctgcatgttggagcatcctcagttttaattatactagaaatagttggccatgttcagctagtctgttctttatttactcaaatacgaaatcatttctggaaataatagccatttactccttttttttctttaccaatt

SEQ ID NO: 52731 - DNA, 219 bp, Gossypium hirsutum
  Clone ID: uC-gsronu33B082b05b1
cccactcgttcgtgacgttctgagcttaacatgttctcatgagattttcgccgctgctggtagtaccataggttgtagacacagttttgtaagttagagggacataaccaaagatggactttgttttatcgtttaaaaagtcttttagggtgattctaatcaaacagttataaatccttcttatatttcaattgcgatttatatttaaagtttgatttg

SEQ ID NO: 52732 - DNA, 239 bp, Gossypium hirsutum
  Clone ID: uC-gsronu33B082b06b1
cccactcgtttgatttgaggtttaattgaagttgggcagagggcagagcaagcaacctccgacaccgatcgagggtgagaacgagaggtaagaagatgggatggggaagcaaagcgggggattgggcgttcaaagggctcacagctggtctggggttggccaccatttacctaactgccactttctctgttaatgtttaccgaggcctcgcctggcacaactctcattccaaaattgag

SEQ ID NO: 52733 - DNA, 530 bp, Gossypium hirsutum
  Clone ID: uC-gsronu33B082b08b1
gctttggaactctaccagcgaaactgtaaccctgagtggcaagaaagtttggcaaggctctcatgacgcggatttcccggaaaccattgaagatggagatgtgggtgagtttacgcatgatgcagtgactgagcagaatgatgttccaggttccatggttggtcttgtgtacaagctacatgatggaactaggtggattgttgcttggagcaaccctcaaggtgaagacagcaaggtctatactaatatccacaaagaacctattcgttgggagcaaatcaaaaccgatcttgacacaagaggaagctcaaaatctaaagttagaaagtttgggtacgttgcatcaatggaaattgatcccaagaaacgttcgccgacactgaaggcatcatttgagtcagaggcataactgtgttttgcatgctgatcaaattggtgtggtaatgaaggctatctaaaataaataataatgtgcttcccgctgggtgcattgcctataccactactgtactaaatatgatacccagtag

SEQ ID NO: 52734 - DNA, 534 bp, Gossypium hirsutum
  unsure (1)..(534): unsure at all n locations
  Clone ID: uC-gsronu33B082c03b1
ccctcgcgttcgcccacgcgtccgactttggggagtctttgtggtcccaggtattgcaagttcaagaaaatctgggttttaacactctttatgatggttctgatagtctgaatatgcattggtctgaaataaggcgttgcattcctggttctattggttctgatttttctgcaataggaaatattggtagaggctcactggtgagtcctgatatttcccgtaataatgtaggctttggggaatctttccgattccgtaaggtcttgcaaggtcaagaaatttttgtgtcccctccatatagaaacggttcaactgcagatgaaaatgaagaaaatgacgcttttggtctccctgatgttggtcagttgtcgggaactagaagtggatggtcttncttgatgcataggtataatactcatcaccactatcttaatccatttcttatcagattttttcttgaaagaacctaacaattagttcttactgtccccacgcaacttatcatgtttttccctgtttttccctcttgggctc

SEQ ID NO: 52735 - DNA, 243 bp, Gossypium hirsutum
  Clone ID: uC-gsronu33B082c05b1
tttatcttttaaacaaaaatagatatttattatgcaggcagggtgttctacagtcatcacctcagtaccacacatcatcatatagagtctctacgcaaccaataccagacgtacggggacccatggttaggggaacttccgtttttctatgagctacaactcatgactcgaagcagatgcacagcattcatctgtccctgcgcggcacggccaccatctagatgggcaagaacaccacgatcc

SEQ ID NO: 52736 - DNA, 471 bp, Gossypium hirsutum
  Clone ID: uC-gsronu33B082d01b1
aaattttattaaaaaaaaaaaaaaaaaaaaaaaaaaaaaaaaaataaaaaaaaaaaaaaaaaaaaaaaaaaaaagggagaacgttttaaaggttacactgatatattgacgcaatcttcttttgtggggcgcccttttttggggcccctgttttccttcccctggcctgcgtgttcatactttttttttggggaccccttttttttttccactggcggggtttttacaccgtttggtctgtaaaacccttgggtttccccatttttttccctttgggacaatcccccttttcccatgttgtgtttttttggaatgggccccccccgttggcctttcccattttttgcgcccctttattggtttttggacccccccttttttgggttttttatgcccggggggtggggggttttcccccagtgtactcctttctttggccaggccctttggcccccctttttgctttttttc

SEQ ID NO: 52737 - DNA, 124 bp, Gossypium hirsutum
  Clone ID: uC-gsronu33B082d07b1
cggacgcgtgggtgccatcacttggaaaatcgggccagaccctcttggggttaaatctacagcagcgcaaggcaaccagcagtggggcagctgacctgctatgagagcacctatggtggtggga

SEQ ID NO: 52738 - DNA, 125 bp, Gossypium hirsutum
  Clone ID: uC-gsronu33B082e02b1
gaagattgttcaatggaattcatttgattggttggatatgattgtgagtgtaaatagtgacttataatgttgctttttggatgataattagcttagttaaaataaagttggctgtgaatgatgaa

SEQ ID NO: 52739 - DNA, 302 bp, Gossypium hirsutum
  Clone ID: uC-gsronu33B082f02b1
gaaattcggtgagttaacaatggaaaccaattgtctttcgaagctaaatcggaaacctctgcttcaacatcaatcccacatgcagtagctgaaacagcttcctcttctactgttccactgtgagattcttttggcttatgaaacagggagaagggaaaaggggttttgattatttaagttactgaattagtttagctagcctctgatatagctatgatcaaaggccaaaactttggctactgtatcatttaaacagtctggttttgctcactgaatgtcttattagatctcttctatccaaa

SEQ ID NO: 52740 - DNA, 126 bp, Gossypium hirsutum
  Clone ID: uC-gsronu33B082g08b1
aaccaccactacctcacccttgaagggtgggttttttttattacggcacctccatatccttcggagtagcaaaacatataggcctgtatccaagcacagctaatcaaaacttctaagaccacgata

SEQ ID NO: 52741 - DNA, 434 bp, Gossypium hirsutum
  Clone ID: uC-gsronu33B082g09b1
ttgtttccctttagaactagcaatattagagatgaaatgatacataatattcatacacagataaataacttaaacatgacaagaagatgtgttattcaaaatctgtaaattatgaattattatacgatgatgacatgactattagcagaacatggcatagatacacaaattactaggtaacattttttcttttctaggaaattgactcattatttgcatgatttggccatttgaacgagatgaaatatttgttctagtgttgcccatttcatatgttttgccaagatcaattgcttgacatagaatagttaagaaagcgataagatatatgctttaaggatcttttagtcttgtgtttctatgttatatttgctacattaattgcttgtgtgatgctttctccatttttgcacgagctggtggaaattgttatg

SEQ ID NO: 52742 - DNA, 400 bp, Gossypium hirsutum
  Clone ID: uC-gsronu33B082g11b1
ttcttccacacacttgctaatattgctacttggagtggtggctattgccactccctctcctggcaccttggagtcaacgtacatcgggaagcgcacctctgacggctaggatcgtaagcagatgcagccctggcttaatgaccacccaagagactacacctgggaaggccacagccacgaataatatacggaggatcgcgatttctaaccaactgaagaaggaggagactgtagcttgggtccgctcgaaatagcccttcatagctagagatgcctgaagcccatccaccaatgtattgaacctagcaagaaggaaaagcctgagcctaagcctccagttcttacaccaccaaagacagtgaagcctgcccccaaccaccattatatgatacccccacga

SEQ ID NO: 52743 - DNA, 365 bp, Gossypium hirsutum
  Clone ID: uC-gsronu33B082h07b1
aaaatagatagagagagaaagagagagacaaggaagctttactgtgtttggacaactgtgtcaactcggacgattccttgcctccttttacactccccccccactccctgattcgttctctttattgaactcgtccacttgagattttatttctgtctttttttcttcgaaattaaagttcaatcggcatttctttgttacttttccttcagatctcggattttggttttctgggcttcctttctgtttatgggtgctaaagatggctcatttaatgcagtgtagggatagatcttcattttcttctgcgatctgttgtctgggattttttttctttgctcttttctcttttctctttagcttct

SEQ ID NO: 52744 - DNA, 211 bp, Gossypium hirsutum
  Clone ID: uC-gsronu33B086a03b1
ccctcgcgtccgaagaattgctacttatgaaagagatggaaagctaaagagtctgctaaagaaaacatatttgagacgttgggttggtgcactagatactggaggaaatgaagctgaagctttgccaaatagcatggatttcgttaggtatcagtaaatatcatggacatttgaattgcactggatgtatcatctgatttttagatagatt

SEQ ID NO: 52745 - DNA, 355 bp, Gossypium hirsutum
  Clone ID: uC-gsronu33B086b08b1
tattagatacgagaaaattatctgtttactttaaaaaaaaaaaaaaaaaaaaaaaaaaaaaaaaaaaaaaaaaaaaaaaaaaaaaaaaaaaaaaaaaaaaaaaaaaaaaaaaaaaaaaaaaaaaaaaaaaaaaaaaaaaggggggggccgttttagagaaacaaagttaacgtccgcgggattgtaacataaaagtttttttatggggtcactaaaattaaataaatgggccggggttaaaaaacgcgagaaatggaaaaacctgggggtaaccaaaaaaaaattcctggaaaaaaaacccctttacaaaaagaggggaataataagaaaaaaggcccaaaacaaatccctcttt

SEQ ID NO: 52746 - DNA, 106 bp, Gossypium hirsutum
  Clone ID: uC-gsronu33B086c08b1
tattaacacttgtatgaatgaccagaaggataaactctggccaatgttgcaaaagcttggtgtcaccatgaaggctgatgagaaggacttgatggggaagccccta

SEQ ID NO: 52747 - DNA, 128 bp, Gossypium hirsutum
  Clone ID: uC-gsronu33B086e02b1
agctggtgtggcttttatcaaagcattcgtcctacacagatgggactatcgctgaatattgatatgtcttctacggctggcattgagcctttgcctgttattgattttgtaacacaattgctaaaccg

SEQ ID NO: 52748 - DNA, 114 bp, Gossypium hirsutum
  Clone ID: uC-gsronu33B086e11b1
tcctattcatgacagactaggaggtgaaaattatgctaataaaacagatgtgcactgagacttcttcttcaagttccagttattgaaggtaattaatgagaaatgattttaatt

SEQ ID NO: 52749 - DNA, 353 bp, Gossypium hirsutum
  Clone ID: uC-gsronu33B086g05b1
tcattattcaatcagatcacgacaatgggtattcacttgaacacaatcccgcaatccacaatcacaaaatcccattaccacacccacaaaatcttcctcttttgcaattatatcctcctttccgccgcttccagctgcatcttcctaaccctcgccctccgcctctgtccttccctctccggcttcttcttaatcctcctccacatcataaccatcgccggagcaatctcgggttgcgcagctgcttcttcgggtacaaacggatggtacgccacacacatggtggcaacggtgttgacggccatatttcaagggtcatgttcagtgttgattttcactaagacaagtgattt

SEQ ID NO: 52750 - DNA, 458 bp, Gossypium hirsutum
  Clone ID: uC-gsronu33B087a03b1
gtgtaacgtcatgaagaggagcggcggaggaactgtaaggatgacagttaccttgtccctttaagttcatggaatagggaattttctgaagctcgtgagaatgttgtagaaggcagtgttagcgacagcggtttggcagccaccgggaagagaaataataatatccaagctcggaacagaagtgctagatagtatgtgcaagtagctgttcattgcaattggagttaacaaaaaagtatttgaacatggtaattttagtggacaatatcaaagatgctttggaaattcgaatcttggcagatattgttttctcccacttgcccccccccttttctttttttaaatgcttggttggaatgatgggccctgtatcggttttccttcatcaatttcttataaaatttggaacaaaattatgtattatagggttggcattaaaaatttaaacttttttgggc

SEQ ID NO: 52751 - DNA, 241 bp, Gossypium hirsutum
  Clone ID: uC-gsronu33B087a04b1
ccctcgctttcgcccacgcgtccgcccacgcgtacgaccgcgcttccgggatttccgcatgatgtttcggcgaatatggggtccacgtcgctgattcatcatcatctaacactggttaaaatggacaaaccatcggcacttgtgcctatcaatgccaaatcttaggcagatcttgttccataactgggccttggaacaagagttctatgtgacaaggcttaagcgttggtagtgcagactg

SEQ ID NO: 52752 - DNA, 284 bp, Gossypium hirsutum
  Clone ID: uC-gsronu33B087a07b1
tttgtttctcccgacaatgtgttagtagctgaattaaaagccaaaccattattgattcaccaaattcgtgaagctcagaaagtcgatgatgaattggttgcaaaacgggctgagtgtgttccgaacaaggaatcagagtttcaaattgatgatgatgattgtttgaggactcgtgagcatgcgaaagctcataggttagctagatacgctaagtttgatgattgggatcattggaacatgtaagggcacgatttgctgcatcacggctagttggggaaaagagc

SEQ ID NO: 52753 - DNA, 382 bp, Gossypium hirsutum
  Clone ID: uC-gsronu33B087a09b1
ctttatttcccagctatataacacttggttttttgtccctacttggatcacacaaataatcttctcccaactctctaaacgaaacccttcccttgagtttttttttttccattctcaatattaaacatgttggttaactcttcttcatgctgccgaaaacgtcagtccaagctaagacataacgttcgtgttccaaggctcaacaggttgagaagattaaggacaaagaagatgggggccgtcgggattaaaacagatatggaaataaaaaacttgaaactgtacatggagaattagattatcataccagagaacaagaagcctgggaagaaaggccctctttttcaccagggagaaccaaacccctgtgggctcagctcag

SEQ ID NO: 52754 - DNA, 155 bp, Gossypium hirsutum
  Clone ID: uC-gsronu33B087b02b1
ccctcgctttcgatggtggtggaggggcacatgcaggtggatatggcaatggagaaggagctggaggaggttttggtggtgcaggctgtcatggtggtgtgctctttgttttttggtttttttctttttttcatcttttttgctatatccacttt

SEQ ID NO: 52755 - DNA, 276 bp, Gossypium hirsutum
  Clone ID: uC-gsronu33B087c12b1
tcggttctcaagaatggaggatcagagaaaaatgtaacggcatttgggcttttaatgtaaaatttgtatgattttgtgaacaaactcgaaaaaaaaaaaccagtgttgtacaacatgtgtttcattgtttgacaaagttgaaactcaaacatttgttttgctttatatatttgttttctatagtttaaaaaaaaaaaaaaaaaaaaaaaaaaaaaaaaaaaataaaaaaaaaaaaaaaaaaaaaaaataaaaaaaaaaaaaaattaaaataaatag

SEQ ID NO: 52756 - DNA, 250 bp, Gossypium hirsutum
  Clone ID: uC-gsronu33B087d04b1
aatatacttaaaatagatagcaatataaagtatcaaatatggggggaaagtgaagatgtagccatttgtaattgtaattgtaatgcaatataatgcattgaaagaataatagggtcttagattagaatatcatagggtaggaaagctttgtgacttgtgattttgagtgcaagagatatgctattgctaaagccctttttgtttgtatgtatgtttttagtggtctaagaaccagtatccggctatcaca

SEQ ID NO: 52757 - DNA, 393 bp, Gossypium hirsutum
  Clone ID: uC-gsronu33B087e04b1
ggataacgaaggagacagtatgcttgttggggatgtcccatggcacatgtttgtgtcgactgtgaagaggctgcgtgcgttgaagagctccgagttatctgcccttagccttggaagcaataagcaaggaaagctacaggcttgaagctctctaaagatcctgatcacatttcaaagaaagagactttgaattatgtttcgcgttttcacaattttctcccctattttggaatgcaacttattgcactcaacagtataaatatatatattttaagcggcttattgggaaggttctgatgtcttttcccttaaatgcttaatagcaactatctcgagtttgttatgtaaattttatacttttaactttgcattgaagtatccatcttgaatgct

SEQ ID NO: 52758 - DNA, 237 bp, Gossypium hirsutum
  Clone ID: uC-gsronu33B087f05b1
cccacgcgtgcgctgaaatttgtctctgactgaatattcctctgtcatagtgtgtattaggaattgtctcccctttcaaatgtcctataagtatataccttctgaggatgtccttatccctgtgagaatctcccaatttttaactgtttggaatttgtttgaggccgctcattgaacgactacgatctggagttggaatgctggggtttcctcgtccgttgcctccgatgtggtgcc

SEQ ID NO: 52759 - DNA, 356 bp, Gossypium hirsutum
  Clone ID: uC-gsronu33B087f07b1
ccctcgcgtccgcccacgcgtccgcccacgcgtccggcctcgaatgaaggatcaaaagccgaaaagaatgaatggaaattactcagaagaaactccaatccctctcaggcagaggttttcaaagccttcgtcactcccaaacaacaagagaacactttcggtgaggagtggtcaatccagtccaattgcaaagaagaaacttgcttcagggataatccatggcgttatgcaagccatgccacagataaccattcctcgaaggtctcgtttgagtttggtttccaagtcatctgtttcttctccgagctcaatggataaacaaaaagggatattcattgaaggtgatataactggac

SEQ ID NO: 52760 - DNA, 429 bp, Gossypium hirsutum
  Clone ID: uC-gsronu33B087f08b1
aatattagttgctctactctaccatcttcccaatggagacttcaaaatattttccgagcgtagagacactagatgaaggttaccaaaagacattcaaaaactgcgatgaactgctgccaactctccctcaaaccaaaggttggtggttcggccagcttttccaataccatggcttttggatatcaggtttttgtataagaggaagcatgttgaaccatgaccacttcaagcctcgatccacagacatcgtcgtcgcaacatcccctaaatgtggcaccacctggctcagagccctcgttttctccattatcaacagagcttcctttgatttcagcgaccatcctttgcgcaaagcaaacccacaagacttagtcccattcttcgaaaaaattattcataaagatgggtcaacttccttcgtcgatggga

SEQ ID NO: 52761 - DNA, 272 bp, Gossypium hirsutum
  Clone ID: uC-gsronu33B087f09b1
tgtacccaaccctacatgagaagatgatgagggaggcgaaagtgctagggcgtttgcaagggtccatgtggctggaacaacagcaattggtgagctagcactttagagccatcgacttctaactgtattgtccttgaagtgggaacaacataaaagcaggatgaggtgtctatgtatgggactaatggaaatgtttgcgtactgtttgtttttctctgttaaaaccctgcatcaatgtggtttgttggtaatagcttcattgaagatttatt

SEQ ID NO: 52762 - DNA, 313 bp, Gossypium hirsutum
  Clone ID: uC-gsronu33B087g02b1
ccctcgctgtttgctcctaaaccttaacatcttcattccccttgctcttcaagctttaataacttgtgggaaaaaccctccacctggtttcatttgtcctcctctttaagcgccacattcattacttattaggctatccgtcacactttctctcccgacgcacaagtaaaaagacagtcagatagtcagttcagcttttaggcagggttgccaacttggtcacctattcttaactgttccattaactaccaaaaaacccgttgaaattgtgaaaagaaaatctgtacttttccgtcattaggtttggagttgg

SEQ ID NO: 52763 - DNA, 239 bp, Gossypium hirsutum
  Clone ID: uC-gsronu33B087g06b1
tggtaaggttttcaaactacaaaagttgttcccttaataggtaaaaatttatatctgacattcattgtgatgctttagtctgaaaatagctgtgctacaccattctttacagtttcaaacttactatcaatgacataatacatcttaacatctttggaatctggtcactgtttctgtttgagtcctcacatttttgcgggatcctatcactgtatagtcaagagtttgttgtcaatgtg

SEQ ID NO: 52764 - DNA, 296 bp, Gossypium hirsutum
  Clone ID: uC-gsronu33B087h02b1
aatttattatattaaaaaaaaaaaaaaaaaaaaaaaaaagggaaaattttaaaaaaaaatgggggatatcaaacaaaatttccaccttagaaataggggggccgcgtgttctgttccgaatgtatctttcccttatatgcaacgccatatctttttttttgtggcacctaacttaatttccttggccgggccttcccacccccaggactgggatacccctccctttccccaacttaatggttttgaggcacttccccttttcccgggctgggttcttggcaaaaaggcccggcccg

SEQ ID NO: 52765 - DNA, 277 bp, Gossypium hirsutum
  Clone ID: uC-gsronu33B087h07b1
ccttatccaaaatccacatctttcattctaatatgcaaaaaagaaaacatggttgtttgatatctgacaaattttccacctaggaatcagtgaagtgtgtgttctgttctgtctgtatctttttcttatactcattgtaactttggtctggtctcaaaaatgggaaggcaatcttgttgttacaagcaaaagcttaggaaaggtctttggtcccctgaagaagatgaaaagcttttaaggcatattacaaagtatggccatggttgctggagctcca

SEQ ID NO: 52766 - DNA, 125 bp, Gossypium hirsutum
  Clone ID: uC-gsronu33B089a11b1
ttgtctgtggatacctaggcacccagagactaggggggctttataaagaaaagtgtgattcttgatcggaagggataacaaagacatgcctaatcctataagtttagattcaaaaaacagaacag

SEQ ID NO: 52767 - DNA, 334 bp, Gossypium hirsutum
  Clone ID: uC-gsronu33B089a12b1
atcttagctaatacggctatatatggggcggtttataaaaaccttggtggtgtggtaaagcctagctaatgaccctgcaccagaagtgcggaaataggtttgtgcagcattttgttcagcttattgaagttcgtacatctgttatggagccacatatgaagaatgcaattgaatatatggcgcaagaaaataaggacactcatgattatgtggccacttgaagcatgcgaattttgggtgcacggaatagaattggaacaagacaacatagaccctatgatatatgcctagaaatatggactacaactccctggactgcttcagccaatgctga

SEQ ID NO: 52768 - DNA, 106 bp, Gossypium hirsutum
  Clone ID: uC-gsronu33B089b09b1
gtgttactcgccattttgtaaactatgatgggtggctaaagataaattcattaaatccatcctcaaattgcaataattttagattgttgctcctttatgctgtctt

SEQ ID NO: 52769 - DNA, 477 bp, Gossypium hirsutum
  Clone ID: uC-gsronu33B089b11b1
cccacgcgtccgcggacgcgtgggcgaaccagcctttgtcttctctctgtccttcactttctcttcatttcttccctcacaaacaagaaaattcaactcagtaaagtaagggtttcttctttcttctttttaatacctttggaaagtgggaatctgggaaacggctctagatccggacagaaaccatggcgggtcataggtttgacgtcacatggaccttctctctggtagctctcttcttccttcgagcccattggttctacctccctggtgttgctcctgaagatttcaaaaagggagatccattgttggtgaaagtgaataagctgacttcaactaaaactcaacttccttattcctattattccctacccttttgtcggcctgagcatatagttgacagtgcagagaatcttggggaagtcctccgtggtgatcgtatcgaaaactttccctatgtcgttaaaatgagagaac

SEQ ID NO: 52770 - DNA, 390 bp, Gossypium hirsutum
  Clone ID: uC-gsronu33B089b12b1
accaacaatggtggtaccactgtagggaggtgtaaaataaagattctgctgagtaatactcagctggacaatctcatcatgtgagtagagttaattcagacaaatcgacctatcagagtggttctgattctaagaaggaacctgcagtacctaaagatggaccaatggcaaatattgcagcacaaacatttactttcctagagcttgccaccgtcacaaagaactttaagccacaatgtctattacgagaaggtgggctcggacgtgtttacaagggccgttttgagagtaccggacaggtagttgctgtaaaacagctcgatccaaaaggtcttccatggaatccataatttcttcgttaagttcccatgcttagcctcttacaccacc

SEQ ID NO: 52771 - DNA, 413 bp, Gossypium hirsutum
  Clone ID: uC-gsronu33B089c03b1
gattttcttaatcatggcttatcatcgtttcccttggtttgtgttaccctatttattaatcactttgtcatcgatgagtagcaacatagtcttggttggtgctcggcatcttttggagacatctgtgccggagattcctaaacccgagttgcctgagatgtcgaccttcccaaaggctgaacttacaaagcctgaattgccggaaatcccgaaacctgaaatacctaaaatgcctgagttgccaaaacctgaattgcctaaagttccggagttgccaaagcccgaattgcctgaggtttccaagtttctgaaagttccagaattgccaaaaccagaattacccaaggttcctgagtttccgaaggttccagagttgccaaaccctgaattacttagaattcttgagtggaaaa

SEQ ID NO: 52772 - DNA, 346 bp, Gossypium hirsutum
  Clone ID: uC-gsronu33B089d05b1
caaaagagacgaaaacttgagtatcagaaggtgaagggtgagacgcgcaagatggcgatcgggactgggatgaaacgtaccccctgtatgaatctcgtgatagtagctatattgaagaagggaaaaggagcactgaaaatggacggacagataggtcctacactaaaaggagaaggcagcctaagcattgaaacctccccaaggtagatggaaaagtgaaggtagaggatgagcggaacaagcgattggatactgggggtgaatccaatggaagaaaccaaagggaatcactcctgtgcaagcttgctactgcaggggctaataaagacccaatatatgaagtgaa

SEQ ID NO: 52773 - DNA, 268 bp, Gossypium hirsutum
  Clone ID: uC-gsronu33B089d12b1
ttgtttttggtatgcgggtctaagaaatatgggtggggttaatacaacatgggggctgttcaagaaatggcatgaggtactggtgctaaggatctataggcggacggcttaaagtccattcccgtgtaaattggggccatgagcatgatggatttggtaccaagacgaatgaccacgtgtatacaacagaccttggtaaaaatttggccgcttttatagtgttcgaaagaagtctaatgtaatggcatactatttttgtgatcccact

SEQ ID NO: 52774 - DNA, 364 bp, Gossypium hirsutum
  Clone ID: uC-gsronu33B089e12b1
ttatttgttctacgcagtcccaacaaatataggcggagaaactacaacatgggcggtggtcttcaaaaagcatgatataaggatgctaaatatagcacaggcgaatgggggacagtccactccctaactcataggagtattgagcatcaatgatttgctaccaaggtgaacgattaatttccaccacaaaaccctggaaaaaatatgtccactataatagtgatcaaaagaaatctaatggaatagatatacatctttatgagcacactataagtacagaccaacggccaaagaactgggaccacaatagactgcactatagaataagctatgctgcaccgtcgaataaggagtactgcgactc

SEQ ID NO: 52775 - DNA, 315 bp, Gossypium hirsutum
  Clone ID: uC-gsronu33B089f02b1
gccaaatccaagaaggccacggtcaccaccatgatggtggtgtgttttttattgatgacttcccttttaatcttggaacagcccaataaagttgttgaatccaagacatagtctttctatgaataagacatagttttagtacatgtagccaaatctgtctagagaactcgcattcaataagatttcaacttctttctttcttatgcgcttttagattgtagatggttgaacaactgtgaccgatcttgatgtacttttattattttcaataaaagatctcgtttgatgactattgccaggaatcatctggcgacc

SEQ ID NO: 52776 - DNA, 445 bp, Gossypium hirsutum
  unsure (1)..(445): unsure at all n locations
  Clone ID: uC-gsronu33B089f05b1
aaataactcaaccatgaaaagcctctctgtttcaggtgggtttttgcttactttggggcttacttctggaaattgggttattacaaatgctgcacctattcgtgaaaaaccagatatgtgtgagaaagcatttcctgattgctgctgcctaaaagataattgcgatattcgttgtgtggatatatatggaaaaagtgcttttggatattgctccactttaaaagaagaagatgatgtttgtgtctgtcgctaccattgttagttttgtttattctttttaaaggctactaccttattccacctttagtaaattgatttctacataagggatcaattgaaaccctaaatcaaaaaatgaataaaagctaaacatcctctctcctctctcgttttcatatcatatcatatatatatataattaatataaattatggtcctnnnnana

SEQ ID NO: 52777 - DNA, 315 bp, Gossypium hirsutum
  Clone ID: uC-gsronu33B089g01b1
cccacttttcctaaagcccttcattactacaaagaagggtgggagattaaaaacaaaaggtgccgtatacatttaactcaattgtgcagtccaacaccttacaattggtcaaaattgcagaaacatcaagcaaagatggactcaccatcatttgttcgaaaagaggaggaaatttgttcttgcatggtcactccaactggctccagactgtacctgcgaaacctgagggaatcatgttcaacttcgttcccattacttctctatctgactgggattacaggaagcgggtatctcagtcatgcaatcaacttgtat

SEQ ID NO: 52778 - DNA, 559 bp, Gossypium hirsutum
  unsure (1)..(559): unsure at all n locations
  Clone ID: uC-gsronu33B089g08b1
cccacgcgtccgcccacgcgtccgccttactcgccgtggcggaaaacgattcctgggagtttctattatcctctttctctcaaaaccctaaaccgtcgccaatcataataatcagattcttaaaatttgatgtgatgaagagggcaatgccatgggatgatcatgatgaggcaaatgattcatcatcttctgacgaatcttcatcttcaaatccggactctgaagctgaagatggacctcccaacaccaagcttaagaactcatcacaagcaaaatctaggaaacaaaaaagtgctgctttggattttgaagcattgaagcgacatggctataatgagnggttgtctgtcctaaatgtacctcctccaaaagagaagccagactggtcttggtcaactggcagagaaagcagtgaaatcagggagattaaagaatctttcgaggacagacagaaaactagagccgcaatattggatgcagaggagctggttaatggacaaacctcgaaaggagaacagaatngttncttttcacagaatgagaagcggaaaagagaact

SEQ ID NO: 52779 - DNA, 391 bp, Gossypium hirsutum
  Clone ID: uC-gsronu33B089g11b1
ttctttgtgaatccaatcaaatagaagatgtggggagagttaacgaggcggatcactgcttgaacgtctgcgaggaggtctgaccaggccacctccgctatagactctagttcttccatagacggctacgatgcttctgattgtctcagatccaataactcctgctcctcattatccttctatttcgcttatcaaatcgttcatgccaccagaggttttgcttctgagtcactcaccccaaaaagtgaccacagggtgattactgatgttccaacaacagtggctgctattaaaaaccccagttctaaaatagtttatgatgaatacaaccatgaactggtgtcctcctggtgaccccaacaagctgggcattaggctattttgtgctgac

SEQ ID NO: 52780 - DNA, 312 bp, Gossypium hirsutum
  Clone ID: uC-gsronu33B089h03b1
tcgtcatttagaacgccaaaatcctccttcacaagggcgtgttatactaccctatcggaggggtcaaccatctccaaaagtgcccccatctcctacaccaaaaccttcacgacacccggggcattcactggacgcactgatagtcaacatccctccctccaccatccatatgttgaagagatcaattcataatgaatggctgcattttgacatgataggtgactgactattggcatcaaagtaaagagtgtggcatttgaataacttgacacctacattgtcactattgatgtttgtgttgaaagactctta

SEQ ID NO: 52781 - DNA, 323 bp, Gossypium hirsutum
  Clone ID: uC-gsronu33B089h04b1
gtcttcaaaagaactgagggcctagtgcaggcttaatataaactaactggggataaaataatcgacaaaagtgtttatggaacatataacaacaaatccagttcatcttccaaatacaaacaaacacgagccctcaaaataaataatgaatcaagctgcaaaattaaggggtatcatgggtatttggccacgtcttatcatacagcaatcatttctgggttttctctgatttcatcctatttggaaagtgtggcatcatcacggaatacggttaaagcacttctcataagtcttagttcaggattacttcctatgagtcttca

SEQ ID NO: 52782 - DNA, 305 bp, Gossypium hirsutum
  unsure (1)..(305): unsure at all n locations
  Clone ID: uC-gsronu33B089h10b1
tttattgcctaggcgaaaggctatagatgcagaggcgaggcaatttaaanaagggagggaaatattaacctgggcaatagcagtgcatggtggtgctggtgtccaccctaatcttccttaagaaagacaagaggaggcctaaagactactcactcggtaccttgatattggaatctctggtcttcggtttaacctacccgccattgacattttaaagcttggcctaagagaattggaaaccaatcctctggttaacttccggcgtggatctttcctcacagacaaaggaaccctggaaattgaaa

SEQ ID NO: 52783 - DNA, 560 bp, Gossypium hirsutum
  unsure (1)..(560): unsure at all n locations
  Clone ID: uC-gsronu33B090a05b1
ccttcttgtccgcagaactcaacactcccatcaaggcggctgtaagattcttttctgactaatattttctttctgatctttcattttcccgagaaaatatacttatgggttcaaaacaaagatgttggcatcgtcagaaaacctagcgaacatcgaaacgtcgacgtttcgttccctcttcgacgatccttggatctccgaatccttttctcgcgacacacaaactttgacgatagcgttacaaaagtcaatatccgattcctgcaccggctccatcgcttcgccggtgcctgaaccggcacccaaacagtaccgaaccgccggtccaccgcctaccgggaaagtttccaaacgtaagcctcgcgcctcgaagaagtctcgaactacctttatagcggcagatccagccaatttcaggcagatggtacaacaggtaaccggaattggatttggtgacngaaagatgacgactgtgagtccgatccttaaaccggagccttaaagacccngcaaccggttacctaacggtactgngcctggatatttacctacgttggaca

SEQ ID NO: 52784 - DNA, 275 bp, Gossypium hirsutum
  Clone ID: uC-gsronu33B090a11b1
tttgtttaccctttgcataacttaagtaagcctggatgattattttggatgtgttgttggctatttgtagttcatttgaagaattactgcttttgaaaagattttaatcttatcaatcattttaatttagtgctatacaacaaaagcttaaaaccctactaaaagtaccaaagattatacaaccatgtctacaaacaatacaaccaaccgaataaaagccaaaaaaaaacactcccacgtcttaagtccccgtatctttaccaaccttgctctta

SEQ ID NO: 52785 - DNA, 555 bp, Gossypium hirsutum
  unsure (1)..(555): unsure at all n locations
  Clone ID: uC-gsronu33B090b04b1
ggtgaaggcaatcactacttacgctaccgggtaatggcctcgtgctacagaattcactttcctgagcacttgaagagccatcgctctcatgacatagtcctactttgtgttgactgtcatgaagtcgctcatgctgctgctgagaaatacaagaaacagattgctggagaatttggaattccactttatgtccgtaaggtggttgattcaactcaagcgcctattgtatctgggtcatctgagtcaactaactttgctgattcaggtgtctcaccactacaattgcgaacagctgccaaggctcttttgcgtcatggacctgaaatgcctcccagccgccgtgatgaactgacccagattgttatgagatattatggaggacgggaaatctccaacgaagatttagaaagagccttggtagtgggcatgagtcctcatgagagaagaagactcgagaagaagaaaggcttatctttaaaacagtctacaagaatccctcnctgtaaagaacaagaaagtaatgatgcaactaggatcttatctaccacatcagat

SEQ ID NO: 52786 - DNA, 503 bp, Gossypium hirsutum
  unsure (1)..(503): unsure at all n locations
  Clone ID: uC-gsronu33B090b05b1
cccactcagtcgtccacgcgtacggacggataaaggataacagtagatatgctaaccaccactggcttactttttcactttatcaatggaggatcaagaaacttacagtgctcacatcatttgcatccattcattgcaaacagaaaaatacaactacaatttgcgtcacatatattatcgaatatcgagtctatctgaaggaaaatagatgtgaaaatcaacgaattggaactatctgggtacccaatctcttaaccttttgattaaaggctgatgattgaaaagatcttgtcgatcatgacttactgccattatggacactgctatcgtgggagatgccatcgtgcctcgtctactctacccattttagtcctgctgttcttggcgctgcattgatgttgcttgccttatcatctntaatcaaaattgagatagatatggaaagtactggcgacagtatgacatggctagttttgctccagcattggcaatactagtggttg

SEQ ID NO: 52787 - DNA, 226 bp, Gossypium hirsutum
  Clone ID: uC-gsronu33B090c06b1
accccctctgcggctcacatttcattggggggttttttgaaaccagtacggggttaaaaacctccattcacggctgcactaaagatcttttctttggaaaagattttcaacatgcgacaagcttatgatgacacttaggctgatctacaccatacctataattgattcccctacttctgcacaaattctcatacatcttcccaaggatcttcctggtactaaaatt

SEQ ID NO: 52788 - DNA, 556 bp, Gossypium hirsutum
  Clone ID: uC-gsronu33B090e07b1
cttacgcgtccgggctttgtcaaacggtgggttcgggagggaagccgccggattatccggcgtcataccggagggtttggttccagcttggtactggactgaccagttcgccatggaagttatttaccacaaccgtgtcttaagccacgagtgccggacgacggagccggattccgcgatggcgttttacatcccgttttatgccggactcgctgtcggaaaatacttgtggcttgggtatagttcgaaagatcgtgatcggtactgtgagatgatgttggaatggataaaggatcaaccgtactggaaccgttccgacggctgggatcatttcatgacgatgggtcgtatcacgtgggatttccggcggtctaaaaacgaagattggggttccagctgtatttacatgccgggtatgaggaacatcacacggcttttaattgaacggaacccttgggactatttcgacgtcgtcgtcccttacccaaccggattccacccaaggtccgattcagatatcgtccactggcaaaacttcgtccgtaaccgccgccgt

SEQ ID NO: 52789 - DNA, 448 bp, Gossypium hirsutum
  Clone ID: uC-gsronu33B090f10b1
agggctctacagcgctgaagaactaggagtttatatgtaagattctttggagcgagatacatgatttactttactggaaattgatcatgttagaattgtgttgcaccacaagcataatggtgatcgctcaattattgtgatcatgcttttatcattggatgcatactgtagctccttttaagagcaaaaagcaaatatcatatgtaacaaggcctagtaaatttttttagattgtagatgactgagaaagttctaattggatattacaatgtattgaaaatcagtaagaggaagagttcctggttaacattggtaagagccactcatgaaaagcatgcccatctatgtgtttacataacatatccatatatcattgacctctaaatgagtatcacagattcagagtagatgtgtctagtgcctcctttttttaatcagttgtcactag

SEQ ID NO: 52790 - DNA, 452 bp, Gossypium hirsutum
  Clone ID: uC-gsronu33B090g02b1
agctgcacgcctggcgtaccggtcactgaattcctcgacccacccacgcggtttcgtaaagcactgatccgaccaagaccgatgcttgctacctcttcaagcattggtgcgctatactaacttatcatgctcggggtcatcaatctcataggaatgctactcactctactggcgccagaatcaaagggcacatcacttgacgaactaacaggtgaaaatggagatgaaaatgatgaaaaacagattcaaatggatccttcaaggactgttcccgtctgaatctcaccactaatttgaagttcttaccaagtttcatgtcgcttcctagttactttcgtatttttttcttgctggttttatgttcaactacatgtatattgtgtgaatgtttgctttcactcgggtcgttggggaatgttcattttcttttaattttcatatagttgaatggt

SEQ ID NO: 52791 - DNA, 448 bp, Gossypium hirsutum
  Clone ID: uC-gsronu33B090g07b1
ttgatatagctatatcctctatgacaacaaaagctggtattaattctaacgtaaatgaagagaacaaggggaagaaagatggtgaggaggaaatgaatcaaagtactagttgtgaaactgatctcactgtacttttaaatgcatggtattctgccggcttctatacaggaaagtaccttgtggagcagagtattgctaagagaaggcagtgataagcaattcttattatgcaatgtggactgctacagggcgagatcccagatatcagtcgtcctgcacattgcatggaatccctacatttatttggtaggcaagaaaggaacgtgagaatgtatgaccaagatacgaagtgtattagacatgcttggattgtgcaacatattcaagaaattattcagattacggttgtatggtttaaggaacagctttgctgatgatcttgttaata

SEQ ID NO: 52792 - DNA, 563 bp, Gossypium hirsutum
  unsure (1)..(563): unsure at all n locations
  Clone ID: uC-gsronu33B090g10b1
cttaatttccgggaaactttttcttttcccgttggtaaattctcttctcagggaactcttttttcccccgagaaaatcagtagttcagtacccttttttttgcttaaaaaagcactgaaaaatggatgattcaatcggcagtagtggtacaactttgcacataagaaaaacacccaaaaaatccaaatccaagaagaacaataagccaatcaaagtagtgtacatatcaaaccccatgaaagtagagatcagtgcttcaaacttcatggccttagtgcaaaaactcaccggccaagacgctgctgaacttcccgaagatcccaccctattcaccgacgctgatgaatccgtagtcgtttccgccgaagacggaggcgatcaaagggtacccgacgctgcaaaaaccacaaacactgccgctgccgccgaccatgcccgggtggtcctccaacaacagtatcccgccattaccgatgataatattaatgctcaaggcgtncccttcgatatctacgacgacgacgtctttacaccccagatgatagagaatttactgggtaata

SEQ ID NO: 52793 - DNA, 312 bp, Gossypium hirsutum
  unsure (1)..(312): unsure at all n locations
  Clone ID: uC-gsronu33B090h02b1
aattctatataaaaataatccataaacctatatagggtggttttattaaaaaactgatgagaacaataaaaataaaatnaagatctattaccttctctattccaaacacaactaatattattctacccttccacttaaaaaatcataccttttatgacttggtacttttaacccaaccaatttctacaattataatatcttgaaaacttttccttgtcactaaaaacattgtaaattataacatactttataaaccctcacatatctcctgtttaattcttccccacttatcaaattcttttactcttctcc

SEQ ID NO: 52794 - DNA, 117 bp, Gossypium hirsutum
  Clone ID: uC-gsronu33B096d06b1
ctcacctgctatacacgcctaaatgccccctttcaatcatgggattcattacgaaggatcgaacggcgcattgacgccgcgccagcactggtaagaacccatatttttcctctatac

SEQ ID NO: 52795 - DNA, 277 bp, Gossypium hirsutum
  Clone ID: uC-gsronu33B096d08b1
cccactcgtccgcccacgcgtccgcaatctttgccatctccaccgttcaccagaaatcatgacagaagaatactgcccccaccaccaggacggacaccaactagtgaagcgcatagcgatagccattgtcgggttattgatagtttgtgccatagaagtcctcctggtatgggcatttcttcaccctttcatgcccagattcctcttccaagacgtcaccatatttgctttcaaccttagtactgtcccacactagcttactttaatttcttttata

SEQ ID NO: 52796 - DNA, 104 bp, Gossypium hirsutum
  Clone ID: uC-gsronu33B096f01b1
ccccaaacacatgtattactgggaggatgctcaaaatgtcgagttcgcattcttgcacaaacaatcacccggaacaagccccaacacatacggcatacacattc

SEQ ID NO: 52797 - DNA, 110 bp, Gossypium hirsutum
  Clone ID: uC-gsronu33B096f09b1
ggtactacacaaatgactcgagacatgattgagagagaggcaatatattatgaaactgattctctctgttttcttcttgaggtcattcatgtgtatttatatccagtttt

SEQ ID NO: 52798 - DNA, 114 bp, Gossypium hirsutum
  Clone ID: uC-gsronu33B096g07b1
cttgataacttcaaagaactgagacaaatagaggaagggggtatttggccaacaaaaacgaagcattttctccccaaaagacgaaggaagccaggtggttaattccacgaaaat

SEQ ID NO: 52799 - DNA, 270 bp, Gossypium hirsutum
  Clone ID: uC-gsronu33B096g12b1
gccaatgcttcttttaagctgtgcaccgcttcctgtttttcctaacttggtcaaattgaagatacactgttctaatgatctacgcccatactatgatcaatgggaaaagggacttgaaactttactctcaagtttgcctgaactagaaaaacttgagtttaatcaggaagctctcatctctctgcctgagaaagctccttcttgcttgttgtctaaactcaagtccataaaaatttcagactttacagattaaagagattgtattgttaa

SEQ ID NO: 52800 - DNA, 108 bp, Gossypium hirsutum
  unsure (1)..(108): unsure at all n locations
  Clone ID: uC-gsronu33B096h08b1
gtagtgacacacgatttactaagactgttctcaccggaactgcagtgtggcattacgccaactttaacgctccagngnctggaccggttacagttgatcctgcaaatg

SEQ ID NO: 52801 - DNA, 129 bp, Gossypium hirsutum
  Clone ID: uC-gsronu33B096h11b1
gcggcgtgtcacagctggcgaatgaagctcatggtgaggaagcgtttgaaggactgttgcactatcataacaccagcccggctggagcatatagatcatgagcctcataaagccgaaccaactaaatca

SEQ ID NO: 52802 - DNA, 357 bp, Gossypium hirsutum
  Clone ID: uC-gsronu33B098a04b1
ggccaatgggaccgaaaaccctttgcaatgcatgcggagtgcggtatatatctggcaggctctttcccgagtaccgaccggcggcgagtccgacgtttatcccgtcggtgcactcgaattctcataagaaagtgctggaaatgaggaccaaatgtgggacagctgatgcaccagaaatgatcccaaataaaagcaacccagcactagattacatatgaagggagggctttggagaattttggaaccctaatgttgattgggttaaaactttcacaatgttttccccatcccaatctcttttaatcttatttttatgtgtttatttttgaaattgttatttttaaaataaataataat

SEQ ID NO: 52803 - DNA, 319 bp, Gossypium hirsutum
  unsure (1)..(319): unsure at all n locations
  Clone ID: uC-gsronu33B098b05b1
cctacttctctgtcgatcgcgagcggctgcccccctaggtgacgtttttcaagaagcttagtcgacccactggtcatcgcatgtacatgctcagaacaatggtttcccaggtggtaaagcacgagcgcattgaaactactgttgccaaggcaaaggagattcagcgacttgctgataacatggtacaggttgggaaagagggcacactctgtgcggcaaggcatgctgctgcttttgtcccaggagatgatgtcattcacaagctatntacagaactggcatatcgatacaaagacagggcaggtggatatacaagact

SEQ ID NO: 52804 - DNA, 403 bp, Gossypium hirsutum
  Clone ID: uC-gsronu33B098b06b1
gatggttgttattaagcataaagcttattagaacactgatgataatacggtgaaaattaattttctgaagattcgacgttcgtaattattcctcttaacaatgtcgtgtctttgaggtttaaatttgagttctttttaagagtacaatgtatcttacaactgcaatccttattactgtataaatcatgtttatcaacttcttacttttaatcgctcgatgtgctttttaaaaaaaatacttttttgcctagattctttaacaccttttgtaatctaatcctctaatttgtaataatattttgatgttgaatgcgtgcttaacaaaaacaaaaaaaagaacaaaacaaatcaacaacttaacaaactagctaaaataactaataaaagctcaattcaatcaaac

SEQ ID NO: 52805 - DNA, 231 bp, Gossypium hirsutum
  Clone ID: uC-gsronu33B098c04b1
aaggatgacaaggtaccacctgctgcaccagtggcgtagcctgttttgttaacctaatggtgcttttacagggctcgcgttggctaattggttggcactctcttgcaagtgtacatcaccggtttaactgtaatgggtgctgctaaagcttcaaccaagtgttcaactggtgggattcagggcattgcttgggcttttggtggcatgatctttgctcttgtctactgcact

SEQ ID NO: 52806 - DNA, 465 bp, Gossypium hirsutum
  Clone ID: uC-gsronu33B098c07b1
gtacataggtcatgtcccaacctgtgtcctcaggggtgtatctatttgagttgccctacacgcccgtgtgttacgccatgtgttaggctatgtaactcactaacttgcctacaaaataactctcaaatggcacatgatcgtgtcaacaggccgtgtgggagtcagcgcacgtgtttcatgctatgtgaacccaaaatttacctaaaatcaagccatttcacaagaaaattcacacttaacaaatctaaccattcgaacatacatctaagagactgaaacaacattcaccactacataagcatgccatttaaccctaaaatcaaccaaccaatgtgccattcaaagacaccacaattataccaaaacatcaactatcaaaacatatcaatattggttcaattcatggtaagtaatctagttcaaacatattccaaaacataccacaacactcattgattcattcct

SEQ ID NO: 52807 - DNA, 212 bp, Gossypium hirsutum
  Clone ID: uC-gsronu33B098d05b1
aaccacccgatatcgatgatatcgacgggagtgatttttaaaatgaatgtgtgtttctaaaacaaccaggaacagcatctgaaagacagagctctgcgtatttgtgggagtcatctcttttgagcgaggatgtactgggagaccacgctgatggcaccgagccaccatcgcctgcatgaggaggtgatgcactgtatttgtggcacgctgtg

SEQ ID NO: 52808 - DNA, 548 bp, Gossypium hirsutum
  Clone ID: uC-gsronu33B098e05b1
gtctctatcaattaaggatgatgagattgatattggggtgggagcactacgtcctgacctgacatctttcatgaatgagtggaggaccatattctctcgatttcatctcataattgttaaagaccctgatttgaaagaggagctcaaaattccagagggctttaaccttgatgtctataaaaagcctgacatagatcgtgttgtgggtacttctacttcaaccattttctctggctattcatgccggtattttggctatctggtttctcggaagaagtacattatctctggggatgatgactgttacccagccaaggacaataaaggcattttggtggatgctggtgcccagcatattactaaccttacaaccccgggcacaccattcttttttaacactctgtatgaccctttcactgaatgtgcagattttgttcgtggctacccattcagtcttcggagtggggtacagtgtgctttggcatgggggctttggcttaaattaactgactatgaatgcacctacttaagccctcaagccagagaaa

SEQ ID NO: 52809 - DNA, 450 bp, Gossypium hirsutum
  Clone ID: uC-gsronu33B098e08b1
tctcacgcgtccgattctggtgtgtttgggtgggagagtccgcttatctgtcatagtccgagctttgttaatagggtaaataattgaaatgaaattttgaaaatgagattatttgttttagcactattgaaaagtacgagaaagaatgtatgaattaaattatgaattgagttagtatgagaaaaatgaattatgaatttaagatttatgaagtaaaataattatatataaaagtagtttaaataattacaaaatttatggttgatgtttgtaatttattaatgttaaatagtcttgatttatagtaataccactgagtatatccatactcagcgtacggttgcttccgtgcgcaggttagtagaagtcaagtgtcccggctcagcatccagaacaatcccgacctccacacaaatttggtgatgtatatttttcttttggtaaaggtgg

SEQ ID NO: 52810 - DNA, 543 bp, Gossypium hirsutum
  Clone ID: uC-gsronu33B098e09b1
attatatcagcaaagaatctctgatcgctttaaggctaacttctaattaaagagctccttacccccttgaccgagtctcgtaactcgagttcactcaaactccaactactcatcttcagatttctgagtacgttagatttccaagacttctcgtttttttttctgagaatttcataaacaacaatgctgacgtgcatagctcggtccaagcaagctggtgatgactcactggctcaaccagaggaaatcgactcgtccaataatccgaacactaagcacaaccaagccatgaaatccctcacatctcagttgaaggacatggcactgaaagcgtcgggggcgtacaagcactgcaacccctgcacagcacagactcggttaaagaatcctggcggttccgacgccgactcggatcgttacaagtggtcgtatcgtaggacagggagttcgaactcggcgacccaaggacttgtggaaaggagatggcagcccggtttacagtatatcttgtccaagctgacaactactcctctcttcatttgt

SEQ ID NO: 52811 - DNA, 484 bp, Gossypium hirsutum
  Clone ID: uC-gsronu33B098h10b1
cttacttcaaaagccaacaaaaccagagaaacagggcgggaattatttaccagacccatggctgaaaccagacatcattaacaaacccaacaaaaacccattccccaaatctatatttcaacactacccatttcattatttttcgcaaaaaatatgaagaaaattggagggttcaagcttcgacgcaagctggtaacagttttcaaatggatattccgacccagaaaaagcaaccgcttcagtagtttcttaacacgtccgatccgaacccgtaacccattatccagactttgttctttccttcgacggggtagaatcaaggggatatcaaattcggatcctggatatatccaattgggtgagcaagaagtgaagcgggttgaggtacccaagggacatcttgctgtgtacgtgggcgaatcagagagtgacacgaggagagtggtggcgcctgtgatttattttaatcacccactggttgggg

SEQ ID NO: 52812 - DNA, 490 bp, Gossypium hirsutum
  Clone ID: uC-gsronu33B098h11b1
caaataacccgcacgggcaacaccggggtggcttttgtactctgcgcgtgcgatatcattccgatctcttcctctcaggtcgccttctcccgccccaccgctcctgcttcggtccacccgattcctgcccgagttatcggttccgggcctgccttcaagatctcgacgggtcaaaccaaaacctataaacaaaactattgaatgaggaacaaaaggggcaagaccgagaagttggatgacctagaaggacctcaagggtcaacctctcagggtttgatggaagaaaagttaggtaaaggtccttaatttggttagctgcccctctagtttatttgaaacttgggtcccctcccactccctgaacttcagcgcaattaactatctggagatctgctcagaaatacctcaagttagtaatgactattagtagatacaggaagagaatgttctggttgggactagtctattcttaagttttaatctaataccc

SEQ ID NO: 52813 - DNA, 190 bp, Gossypium hirsutum
  Clone ID: uC-gsronu33B099a12b1
ttaggttttatgcaattgggttttaaaaaatgtatctgggctggactgtatatatatattttgggttaaataacttgtaaatggacattgacttaaaaaaaaaaaaaaaaaaaaaaaaaaaaaaaaaaaaaaaaaaaaagaaccccggactaaaaaataaaagggtccgtccatataaaaggaacaaaaa

SEQ ID NO: 52814 - DNA, 266 bp, Gossypium hirsutum
  unsure (1)..(266): unsure at all n locations
  Clone ID: uC-gsronu33B099b12b1
tttacttttgccatcacagggaatcgaacccaggtcttcccccaacacttacacgtcacccttatagctccctagtggcgtcacttagccactttaccagaggatctttttgtgttacattttacccacaaattttaataagaccacctatccaaagcccctaactgcttaagtccaaaattcaaaaattccaccgggttttggccagcacatgggccttccataagcttatttacctacccaaattatgaattccacaacccant

SEQ ID NO: 52815 - DNA, 438 bp, Gossypium hirsutum
  Clone ID: uC-gsronu33B099c11b1
ttcattcattctttgatgatagcatagttgattgggtctgtattctttatatctgtattagttcatttaatatatgtatataatctactcaatcattacatatttcccattttaagtgatttcttaatattaaaaaggcgatcttctattcttttcaaatgttggaaacaagaagtttaggtcccaccagaacatggacttgcaaatggccaattttctctaacaaactatacagcctttctaagatcctgaattattagtgcttgactggcatgggatggataacagatcttttttctgaattctaggcaaggcctttgctctcacaggctttggaacatgggaattttgatgcatttgtggattcaaggttacagaaggactatgattccgatgaaatgacccgaatggtggctcgtgctgcagcctgcgtgcgtc

SEQ ID NO: 52816 - DNA, 431 bp, Gossypium hirsutum
  Clone ID: uC-gsronu33B099d01b1
gctagttctcttcatcgcttatatcccctcacacgtactcaagtctcaacaagtccttgatatctccaaaatgcgtttctccctcgttgttctctttgctgcatcccttgcctccgccgcttccgtgttcaaacgctggaacgacgattatggggttccttcctgcgcaaagccctgtatcgccaacgtagacccctggccttgcaagcacgacgacaaggcctgcctttgcgcaaactccgattatcatgcgctcctcggggaatgcattcagggcgcttgcagccctgaggacgctaaaaaagccgtagagtccgggaaaaagtattgcaaggcagctggtgttgatcatgagaaacccattccgaagtgcggggttcactgcttggagaaagcgcccgttggcaaatgcaaacacgatgactacaaat

SEQ ID NO: 52817 - DNA, 535 bp, Gossypium hirsutum
  Clone ID: uC-gsronu33B099e08b1
tttattttatataaaaaaaaaaaaaaaaaaaaaaaaaaaaaaaaaaaatttaaaaagaaaaaaaaaaatttataataaagaaaaaaaaatttaagaaggcttgtttctgggggggggttttgttggttcttgttttttttttgggggcccgccctcttgttttctgtcttgggggccctccttttatctgggggggcgtcgtttggttccccccctttctggtggtccttggggggcccggttctttttttttttggggggcttcgccttttttgccgggggggtttttttttcagtggccggctcccgtttgccctttgggctccaccgtcttttttggtttgggaaccgcgcccccttgtgggggggtcgtttttggggggggccgggggggcttccttcctttttttttcggtgtttttcttctgggggttggggcccccccctgtggtcggttttcttactctttgcttgagcggtttccttctttctgggggtgcctttttttggggcttcctctttgggctcctttttt

SEQ ID NO: 52818 - DNA, 492 bp, Gossypium hirsutum
  Clone ID: uC-gsronu33B099g04b1
gcgaaataatagctaatacttaattaccttctcataagtattgtgtcctcccaagttctttcatttagtgtttggattggatgcagtatttatcttcagtaaatatggtcttatatgaataggtatccaacaaattctacttcacatttactgtccgccccgaggccatgaaagagggattgaagattcgaaatgttgttccagctactgaggaggaagcacggcgggtgcttgaacgtatggatgctgagaggtcccaatagtgctgttttgctctatattcatttgaaattttgaatctttctcgtatctaagagaaccccatggtcgatatgcaataagtgaacaagcccagtgtctgtaattcaacacattttttcattgtcaagatccaatgatggaaatttttccatctcaatctcccaaaaagaaaataaaggtcggacaaggggtcttggttttgggcatcatatcatatttaatttatctttg

SEQ ID NO: 52819 - DNA, 528 bp, Gossypium hirsutum
  Clone ID: uC-gsronu33B099g06b1
cccacgtttcctcccacgcgtccgattatattctctctcattttgcaatggcctcccatggaaacataacagtaataagcacctcccccaaaggatcagaagcagaagtggcacccaattcaggcaaaggagggcaatgtttgtgctcaccaacaactcaccagggctcgtttcgatgcaggtttcatcgatctaagtcatcagcctggatgatgaaacggtccaaatctatgcctgccaataattctcccaccgcttctttttctcccaagtctgttgaatctacgtaatccctgaaaaatatcaccaaatcctcactctcccctctatatgtgaactatataatatgcacatagaggtatgctggggtctctgtatttgcttgggatgtgattatctaaatatctgcaactgctttaaatcagacaccttatcaccaagagctttccttcccttcatttttctttttctggtaaagctctttctgtttcaagctactgcgattttcgtactattaatttaacacat

SEQ ID NO: 52820 - DNA, 321 bp, Gossypium hirsutum
  Clone ID: uC-gsronu33B100a05b1
cttcttcagaagtttatttaattaaacatttaagtttatacatcaagaaattcgtgcactaaattaaaaaaacttccccgacaaggattgaggttaggaagttagctttcttcacccagttttcaacctccttcaagttcaaaaaagtcctggaattcaaagcttttaccaatttcttcgccgtgaaaaccaccattaaaacgcaatcaatcacatttccctctcaaaacccccgtcaaaactcagctttcaaaagcctagggagagagctaaatcaaacgaaaacacactaaaatagaaaagagagagaaactgaagcag

SEQ ID NO: 52821 - DNA, 114 bp, Gossypium hirsutum
  Clone ID: uC-gsronu33B100b06b1
cccactcgtccgctcacatctctgggaataagctgaccaaggatgagcgataagacagggaatcccgctgctctgttctcccctgttgaaggtgccgccagaaaaccccagtgg

SEQ ID NO: 52822 - DNA, 125 bp, Gossypium hirsutum
  Clone ID: uC-gsronu33B100b12b1
tcgcaatttcatgcttccaccacatgaaattcttgcaaggaggcttgcaaggaatcagatttcgtcattctcagtttttgaaggtgttggtagaaaactaaaagggagggattcgaagaaagtga

SEQ ID NO: 52823 - DNA, 345 bp, Gossypium hirsutum
  Clone ID: uC-gsronu33B100c01b1
attgttagcgggttttcaggatttattcatgaacgtcctgctgtgcgtatacatgcatctcggcctgttaattccaattcactggccttctttgttacagttcttttgttattcatgattttaaactctcaccaaatgtctccaaattttctgctttggctagtagtaggcatctttttaatggctactagccttaggatgtatgcaacttgtcagcaacttcaagctcaggctcgagctcacgctgctgcagctagtggtttgcttggtcataccgagttgcgtttgctcatgccaccattaatagtttttgctacaagaggacgcttactaggactattatct

SEQ ID NO: 52824 - DNA, 116 bp, Gossypium hirsutum
  Clone ID: uC-gsronu33B100d02b1
acccatgcgtccgttgtcatgctaacaattaatgagtttgattatttgctgttggatcaagcggacagcatcttatactgctttaagatgcataatatgaccaagtgtttgacacg

SEQ ID NO: 52825 - DNA, 102 bp, Gossypium hirsutum
  Clone ID: uC-gsronu33B100d10b1
tcgcggactcgtggggaatactttattaccgaagataatgtcgggatgctcaagttggcaaaagaggctaactctatcctgcttgattatcgtatccctgct

SEQ ID NO: 52826 - DNA, 116 bp, Gossypium hirsutum
  Clone ID: uC-gsronu33B100e04b1
agaattaaaagataaaaccttctagaaacttcaaaagaaatggaaagtttttagtttccaactgagttggtttcctcttgaccgcttgagccgggtcttgtgtgcttatctcgttt

SEQ ID NO: 52827 - DNA, 224 bp, Gossypium hirsutum
  Clone ID: uC-gsronu33B100f09b1
tcgcccatgcgtccggcaaaacagaaaatcgaaccgactgaaagtgagactcagattcttcaagacttgcagaaatggaaaacagcggaaaacatgaagcagagagatatgccgtagtgaccggagcaaacaagggcatcgggtctgagatcgtatggcagctcgcttcaaatggcgtatcagtcgtattaacagcttgtaataaagtgtggggaaacgtggct

SEQ ID NO: 52828 - DNA, 181 bp, Gossypium hirsutum
  Clone ID: uC-gsronu33B100g03b1
cccactcgtacgttctctctggtctccattttttcccctttctcctcttttcctctaaacccagagttttttttccatagaaagcgaagaaactggaaaacgacgacgcagtgaaaaaaaaaaacatgtcttacgattatctttctaagtactttatcatcggtgacactggcgtgggaaa

SEQ ID NO: 52829 - DNA, 264 bp, Gossypium hirsutum
  Clone ID: uC-gsronu33B100g05b1
cttgcttaatacctactaccaaaccaaaacaccaatttcccctcaaaagtaaaaatcccaacctcattttccttcaaaccaaacacacccttttaccatcatggcccctaacatcaccactaccaaagctgccactatcactgccaaggctcccgagagggcttatgttacgttcttggctgggaacggagactacgtcaagggcgtggtgggtttagccaagggactgaggaaggtgaacagcaagtacccacttgtggtggc

SEQ ID NO: 52830 - DNA, 420 bp, Gossypium hirsutum
  Clone ID: uC-gsronu33B100g10b1
attccttcccagaatcaaatctttctagagccacagtctatgacaaaatctcgagttcatcgggcaatcaaaatcactgagcccggactctacctcttcatctatcctccataaccatcgtttcgtctctcttgattcaccaggttttccactgcaggcggtaccttctctatccagtatcgagggtgctaaaatcggattccttcctttgccatctcatgagtagcgttgttggcttcccttagagttcagtttccgtatattagtaagcgcatctcctttaacacaaacatactacaaacccagctcttttgccatgacaatagcttgtaatacatgcccgtgcctcattcataattggatctaatatcttatcccatggtacgtttcaggctgccatagtcaaacatctctttattc

SEQ ID NO: 52831 - DNA, 125 bp, Gossypium hirsutum
  Clone ID: uC-gsronu33B101a09b1
tcgtcacgcgtccgcctcattcttcggaactcgggcttcctttacgaccagcgacaactatcaccgcgatatcccaattctaccctaaccgaaccccccaaatactccgctagctcatagaaaac

SEQ ID NO: 52832 - DNA, 191 bp, Gossypium hirsutum
  Clone ID: uC-gsronu33B101b04b1
tgtcgatagggccttattacaatgtgaatgagatttttttccccctttgatatggtctgagtttcatacatcacatggctttcttaatttgtaatgttgctttgacttaatctccaaacccttatcgatcactttcttcgattctaagaattttctataccccataatttcactcccttactttcacatta

SEQ ID NO: 52833 - DNA, 119 bp, Gossypium hirsutum
  Clone ID: uC-gsronu33B101e05b1
ttgatacgacagtgggcacgtggagatatcggaatgtatagacgcggaaggagacagaaataactccttctaggagagttctcattacgaatagtgataccatgattctgcatagagat

SEQ ID NO: 52834 - DNA, 193 bp, Gossypium hirsutum
  Clone ID: uC-gsronu33B101f11b1
tcgtattgatgaaaatcaggatgtacttatgaatggatggaagcatttatatatacgaaagttttacttaacaggtttatatgccctacggcatgatgaaatcattgattatggccacgccaaaaaatgaaagaaaagaaaaaaagggggacttgaggcaagtacacaatggtggattgctgctgtaaaaact

SEQ ID NO: 52835 - DNA, 113 bp, Gossypium hirsutum
  Clone ID: uC-gsronu33B101g05b1
atcgttatcgacaatttaaatattgattgcaacgtgatattacgatcgttatttacgaattcgatacttctagttactaatgtttaacaaatatcactacattcgaaaacatt

SEQ ID NO: 52836 - DNA, 314 bp, Gossypium hirsutum
  Clone ID: uC-gsronu33B101h08b1
tcgttgacgcgtgggtaggaatcggaggcattcgggtacccatatccgaagacatttttcaacttaccgaattagggtacggtggagtcgttatggataccggcacggcggtcacaaggttcccgaccatagcttataacactttccgtgacgcttttatagagcaaacggctaacctccctcgagtttccggagtatccatattcgatacgtgttacaacttatcgagttttgtcacggatcggattccgtcagtttcgttttatttgacttttgtgccgattctgaccctacctgtaactatactttttttc

SEQ ID NO: 52837 - DNA, 227 bp, Gossypium hirsutum
  Clone ID: uC-gsronu33B101h10b1
tcgtccacgcgtccgcccacgcgtccggctgtctatactccatgaataagttatgtgatttgagctgcactcagcacgaaatcctgaggatcgtttttttgttgtcagtttgatattcatcaacgtgctttgaatcatttcaaaaattctagttacatctacatacaacaatggataatgtggcgtttgtttccctatcttcttttttttcttttttatctctcttt

SEQ ID NO: 52838 - DNA, 440 bp, Gossypium hirsutum
  Clone ID: uC-gsronu33B103e06b1
accagttcttgcctcaaccctctccgggtgaatccgacggcccataaagactccgacttatcaggccctatctttctctacttatccctctgcttattccaactcctcgctggcaagatccaattcggcgtcatccttggctggatcgtcgtctcctcgattttcctctatgtcgttttcaatatgttagcgggtcgcaacggcaacctagatcttcatacgtgtacgagcgtggttggttattgtatgttaccggtggtgatcttctctgcagcatcgctttttattccccaggggactagcgttgctaggcacgccgtggcggggattttcgttgcttgggccactagggcttgcaccaatttaatggtggcacttgctgatggaggtgaagaacatccgcggccttatatcgtacgcttgatctttcaatctacact

SEQ ID NO: 52839 - DNA, 350 bp, Gossypium hirsutum
  Clone ID: uC-gsronu33B103g01b1
gtgatgttttttatgcgtcgagcaacccgagggaagcgtttttcaattaccgagaccttgacgtcggtagcaacgaaagcggcgagacggattttgaggttgcgaaggaatacggggcagagtatttcaggaacaatttcatgaggctggcgggtgtgaaagccaagatagaccctgagaatttcttcaagaacgaacaaagcataccgcctttgtcaacgccgccatctgattaaaacaatatatgaaatatattctcaattatctttgtctactttttagttcttaatatcgagtgtttctttgatgtacaatagtgattattcttaagaccatttatgaactttaat

SEQ ID NO: 52840 - DNA, 270 bp, Gossypium hirsutum
  Clone ID: uC-gsronu33B103g03b1
atatctcacatgagtaactgtacagtgggtgagaatttcattccatcaaggtttgcctagaggctagaaaaattcagtcttgaagggtcgttagggattgtgggacataggaatggagatttgcttattaaaaagaaaaagaaaaaaaaagaaagggtcctactgtgcgtgctctgagtctgatgtatagtgtagctgttgtacatattttttttctaaacgttaacctgccaaagaaatgttgctcaaccaaaaaaaaacttatgtggt

SEQ ID NO: 52841 - DNA, 242 bp, Gossypium hirsutum
  Clone ID: uC-gsronu33B103g06b1
gaatgttattaactttcctttgattttgtataccaagataaagctaaggagatacatttttatcaaacaacacgaagtataaataaataaatatggccataaaaatattaaagttgtctcatgcatgcaaatatgcttccatgatttccattgataatttttcctgttttctctagatttagtgctcttgttttttgttttttttttacagtaatacgcaactagaaaggttttaatacagt

SEQ ID NO: 52842 - DNA, 429 bp, Gossypium hirsutum
  Clone ID: uC-gsronu33B103h06b1
cccactcgttcgaaaaaaaaaaaaaaaaaaaaaaaaaaaaaaaaaaaaaaaaaaaaaaaaaaaaaaaaaaaaaaaaaaaaaaaaaaaaaaaaaaaaaaaaaaaaaaaaaaaaaaaaaaaaaaaaaaaaaaaaaataaaggggggggccgttttaagggtcccaggtttacttccgggggcttggaactctttattttttttttggggcacctaaattacattttatgggccggggttttaaaagggtggtatgggaaaaaccttgggttacccaaattaaatgccttggaaaaaattccctttttgctggtggggattattgaaaaagggcccccccctatgcctttcccaaaaatttgccccccctatagggaaatgggaccccccctttaatgggcttattaagggggtgggttggggggttaaccc

SEQ ID NO: 52843 - DNA, 374 bp, Gossypium hirsutum
  Clone ID: uC-gsronu33B103h11b1
attgttgccttttgttagttttctttattatttttcccgatagcgaataagcggcggacctctaaatgaagggcaggttcatatagctgaccgtgaagacaataacacgtcgttcaggtataatctccgagttggtgagaggcatacatttgtgtttgatttttttgttccacggatttagtcacaggactggattctgtgaagtgctgtagcattgattggtttgaaaatgctatcctacactagtggcatggtcttatagatacttaataattttccttcttaatatgggtgcataacttttgcagcagtcaagagcatatatgctttggttacaattatacaactaaatgaaattgtaattagttgatgtt

SEQ ID NO: 52844 - DNA, 282 bp, Gossypium hirsutum
  Clone ID: uC-gsronu33B104a04b1
atttcctcaaggaatgagggttgatgtataggcattttatattaatacaattttgatacgtatatttgtgccgtattgtgttttagttattttataatttctctccttgaattttgcatcggtttctattaaatgatagtggacaataattagtaaatatacatttttatacttgaatttcgcttcatggttcatgttagtacttaaggtttttttttgtccaattaggtatttcaacttgacttttaaggttcaattttgtaccctaagtatcttttgggt

SEQ ID NO: 52845 - DNA, 506 bp, Gossypium hirsutum
  Clone ID: uC-gsronu33B104a10b1
ttctcgcgtccgcccacgcgtccgaaaaaataaaataaataaaaaaaaaaaaaaaaaaaaaaaaaaaaaaaaaataaaaaaaaaaatatattaaaaaaaaatatttaaatatgggggcggccgttttaggggatcggggtttccttttgggggcttccggtttcttaccttttttttggggtcccttaatttttttttcgtggccgttgttttccttcgttggcctgggtatacccctggggtgcccggatttattcgttttggtacactttttcttttttttggttgcattctttttttagaggttggctccttttgcctttgccccttttgttcgctttttttggcatttgggcccccccttgtgccgggggtttacgccctgtgggggggtttttttcccgcggtgtgttcgtttctcttgccggggtcctggcccccgttcctgggttttatcccttctttttttgttatgttccctgtttttccgcctttgtttttttttt

SEQ ID NO: 52846 - DNA, 307 bp, Gossypium hirsutum
  Clone ID: uC-gsronu33B104c04b1
gtctaattattgggtatgatgtttgagaggagtgtgcagctttcttcactataaaaatggacttacacattgtaggatattcccgcatgggacctaagagagagcttaagtttgtttttgtatattctatgggaaaagaagagcagtgtcgaggattcgcacaacagtgcagatggtttcaggtcatctacatgtaaactgatggctgatgctgggattaatttcatttctagctatactactctttaattatgatcaaagcagattgtcctttcagcaatgtttcggctgctgtaccacttaaata

SEQ ID NO: 52847 - DNA, 282 bp, Gossypium hirsutum
  Clone ID: uC-gsronu33B104c05b1
atttaaaatttcagcaaaaactagaagtaaaggaaaaagcacatcggctctttgctacgcttcgccagcttcgagtatgcatcgccggcgatttagctgaagagatgaatttgagccatgcctcaccccacccagtgcaagatctaccaaccacggacggaggcctccgcctaggcggcggccacaacaccacctaggtgcctacagcgcggctgacggatattcatggcacgcctgcaacggcaccaggtcccccgctgcggccctcccagttcgtctctc

SEQ ID NO: 52848 - DNA, 542 bp, Gossypium hirsutum
  Clone ID: uC-gsronu33B104c08b1
cttcttcatctctttcctttaatcacgaaaaagaccatgggagtttccaataacataacagcagttctcaacatagttgctctcctctgttccatccccatcatcgccgccggcatatggttagaccaaaagcccgacaacgcctgtgtccacctcatccggtggccggtcatcctcctcggcttcctcatcctccttgtctctctcgccggcttcgtcggcgcttaccgttacaaagaaaccctccttgctttctacctctgttgcatggccatcctcattgccctcctcctaattttgcttatcttcgctttcgtcgtcaccaggccggacggcagctatgacgtgcccggaaaaggttataaagagtacaggctcgatgggtactcggcttggcttcgagaacatgtggttgataacaagagttggagaaaaatcaaggcttgcttggctgataccggtgtttgtcctaagcttactcaaaaatttattaccgccgatcagttctttgctgctcatatctctcctcttcagttaggatg

SEQ ID NO: 52849 - DNA, 334 bp, Gossypium hirsutum
  Clone ID: uC-gsronu33B104d03b1
cccacgcgtccgcttattttcccttttcctcttcaatttttctcaatggatgatcttcccccatctcttgtcgttgatatcctcagtcgtctcactgattctgccgacgttgctcggcgccgagtcgcctccaaaacactcaactctctcactcgcgaggtccgttcccttaacctcctctgcaccttgtctcgctacctcaaatcccgctcgccggagaccaaggaccacgttactcctttcaaggcaatctttaataaccttgtcggccaggctccctgtcttaactcaatctcaattggagtcgataaatcgctcaggaatatctcgtatg

SEQ ID NO: 52850 - DNA, 329 bp, Gossypium hirsutum
  Clone ID: uC-gsronu33B104d07b1
ccctcgcgtccgaaaaaaaataaaaaaaaaaaaaaaaaaaaaaaaaaaaaaaaaaaaaaaaaaaaaaaaaaaaaaaaaaaataaaaagagaataaaaatacggtggtcgggggggccgcttttaaggttcccagcgttcttccgcggggttggcccgttttattttttttttaggggcccctagattgagtctccgggcccgcgttttccaccgggggtgaccgggaaaaccccggggtttcccagcttatttgccttgtggccttttccctttttgccagttggggaaatggccaaaaggcccgccctttcgcccttccaacatttgg

SEQ ID NO: 52851 - DNA, 445 bp, Gossypium hirsutum
  Clone ID: uC-gsronu33B104d10b1
tgatgatcccagcagacagttctggacgatctttccttgtgaaattgccagatggcaaagatttttactattggtgctcggaaagatcaaagctcttgggggttgaattgctctcaaagatgaaggatctaatcaaaagaaaaccatctatagctgaattaactggaatcagcgagtcacgattaggctgttttgcaactcagcttcatgcctatctcctaggatcatctgtgaatcctgaagctagttgttctagttcacctttacccagtaccacgcacgatgctattgttgtgcacaatgggcaatcttcatcagctacatcaaaatctttgcgatcccgacattctagcagttaagcattcaaggtgaatgcacttttataatggtgcttaagtccaaaatcaagcttcttcaaagagggtttgatccgaaacttatcttt

SEQ ID NO: 52852 - DNA, 484 bp, Gossypium hirsutum
  Clone ID: uC-gsronu33B104e02b1
gaaaaactaaaaatattgtcctttggctgggtcaggaatattattattttaaaatagaacaattaatttttgtaatggtttctgcatagctaagtcaagtgaagcactaaaaaaacaacaaaattttgttttaccctatcatttattattcattccaaggttctaaccattaattcctgctattggaaataccggcatattgaatctatgtatggattttgcttttctctggcctgtaaattaaaggactaaaaagtttatgaatggaagtgagaatcaatattatagatgttattgtccagccggcaatgccttgctgctgtttatatctaatattaaaggactagaaagtttacttggcactggtgaaggaactgcattggtcctctgatactgacctacgcatgaatatcctaatatattgctatttggacatgtgaaagctgagagattatgatgcaactctctggtcatatattttggt

SEQ ID NO: 52853 - DNA, 329 bp, Gossypium hirsutum
  Clone ID: uC-gsronu33B104e03b1
cccacgcgtccgaaaaaaaaaaaaaaaaaaaaaaaaaaaaaaaaaaaaaaaaaaaaaaaaaaaaaaaaaaaaaaaaaaagggcggggggtgtccggtttccaggatcccggcctccggccgccggcatgctacctcttatcttgtgtatcgtgacaccaaaatacaggccactggccgacaatttacaacctggggactgggtaacccctgccatttcccaacttattcggcttgtacccctttccccttttgccggttggggtaataggccagaggccctcgccgttcgcacttccaaacaattgctgcatgctgaatgggaaatggc

SEQ ID NO: 52854 - DNA, 324 bp, Gossypium hirsutum
  Clone ID: uC-gsronu33B104e05b1
gacgaatttggatcggttcttggagtttacgactcctgtggtttcggctcagtatttacctaagacaagcataagaggatgcagagggcaggagcgcggactggagtgtcctccatattttgcgcttaaggatttgagggagtcttttaaagaatggagtgcatatggagctggtgttcctcttttgttgaacgggagcgactctgtaatgcaatactatgtcccttatttgtctggcattcagctgtatgatgaccaatcaagaccctccccaaggcagaggatgcctggtgaggagagtgttactgagtcatcgagggaaac

SEQ ID NO: 52855 - DNA, 435 bp, Gossypium hirsutum
  Clone ID: uC-gsronu33B104e09b1
acatattccacctccagtcatgcctcctcctgcaatgcagtacaggccacctctgccaaacatgccaccacccccacccccacaatcagtatctggtctttcaaggcctccgccaccaatgggaatgggagcaccacatggttggccgcaacagcaaatgggtggaaggcctcctatgctccaaatgtcaatgccaccccctcccccaccaccttctgcaagttgaattatcccaactactgtttttcttcgttcagcaaatgtagtgcatttttatttctagcggtaatagaaatgataaatgtggatcgtactctattgatgtattaatatccgaaaattagactcctaaatttaatcgttcgttcaatgattggtaaaaaaaaaaaaaaaaaaatataaatttaaaataataaaaaaattaaaaaaaatatg

SEQ ID NO: 52856 - DNA, 383 bp, Gossypium hirsutum
  Clone ID: uC-gsronu33B104e12b1
taatttctatagagggactcgataactctgatctaagaatcaaagggatcagcgaacgtgactgaataaatgtgtctagcaggagctggatcgccaacatcagacatcagtgactctgtgtttgactcgactgtatatcgaccagtgtagaaaggatcaataaagtgcaggaacgtgtctacctcaacatcttgggactgggcactctatggctcaaacctagcctaaaaggaatagggtttcgacacacactgaatcagataagataagaaagagacatgacaacctgagacttgtggtaaccttgtttgtgcgattctctaccagaaaaggttcaggtccatacattctgccaacctgtaatgagatggattaggatgatg

SEQ ID NO: 52857 - DNA, 468 bp, Gossypium hirsutum
  Clone ID: uC-gsronu33B104f03b1
agcatatcttgttcactttctctctagaaactatactttctttcccggatggatgtactaggcgttcaccaaatgaaaaacaagaagaagcagtttaagaggagagattgtaagaaagttattaaagtggtttatatttcaagtcccatgaaggtcaagacatgtgcctcacaattccgagctttagtgcaagaactcaccgggaaagactctaatgccgccgtccgcttcatggacaatgacgacaacgtttctgatcattctcctgcctattccgattcaacgggggttgaacgtgttcttgaattgcctttagcaaataccaatcaccaatctatgtttgaatcatacgatgaggggagtttctgggcgatgtttacatctaatttgtttcatgatccttctcagcttgacacttttagaagctttggatcaacttaaatttttttttaaatatctatatgtata

SEQ ID NO: 52858 - DNA, 521 bp, Gossypium hirsutum
  Clone ID: uC-gsronu33B104f04b1
ggggttttcacagaatgctggcttagattaccaagacactttcagtccggtagttcgtgctactaccattcgcacggttcttgctatctcaatcatgaaaaattggtcgctaagactagctgatgtcaacaatgattttcttaacggggagctggctgaagatatctacatggaacaaccaccagggtttgaagaattcggtcctaatggagagaagattgtttgtaagctaaacaaacctctcttcgcgcatggttctaaacactcaaatagtatctcgttgatcaacttggttttcgtgctgctaaggcagatctgtcgctattcatacatgctgcatccgacagtattctgttgctcatgacctatgttgatgatattgttctcaaaagtagttctaattcaaagattgacagagttgtttaactacttcatacaaaatttgctctaaaaaatatgggacccttacttttttcttgggcatcactgttgaacaatcctctacaggactgtttcttagc

SEQ ID NO: 52859 - DNA, 396 bp, Gossypium hirsutum
  Clone ID: uC-gsronu33B104f06b1
attttacataagagaaacaccattagatgtgccacaagcggtgccgtgaggaccagacttggtgttaaaaggactgggatgttaattacatgaccgtgatctcgtaacgtacccattgatggctctggaagagatagagtgcatgaagtaggggcatgatactgcggaactggtgatgcatggactgggccatgagatgacggaagtggctttcaagctgctaggaggagatgagatggaggaatccaaaatctggacgggtacaggtcaaggtagagaaggagcacacggcataggcattgtagggcactgtactacggcttatgccaagcttatcgagggtcttgtacattctgagtactgtgttcaggctttgatcgagcggaccacaggcat

SEQ ID NO: 52860 - DNA, 400 bp, Gossypium hirsutum
  Clone ID: uC-gsronu33B104g02b1
attgggttttatcggaccccgatttcaaccacaccgatgaaacgctttcgtttttcgtcgattatttcggtcgaagaaaagatttcaaagctgcccacgatctccttgtcaatcacaagtctgttgccgggcctaaaactcttaactcctccattgataggctggttcgtgctggcaggccaactcaagttctggggtttttcgagagaatggagaaggattatggtttcaaaagaagataaagaatcactgaagttggcagtggagaaattgtgtgaaaatggctacgcgagttatgctgagaaattggtgaaagactcagccaacgagatattcccggacgagatgatatgtgacttattgatcaaaggttggtgtgttgatgggaagctggcagaag

SEQ ID NO: 52861 - DNA, 426 bp, Gossypium hirsutum
  Clone ID: uC-gsronu33B104g04b1
aaataattaaaaaaaaaaaaaaataaaagataaaaaaacaaaaaggaaaagatagaaaaaaaaaaaaaatacaaaaaaaaaaaaagaaacgaaataccttttttatggtgtctgctattctcctttgtctggccggtgtttttcatctggtgagttgggacaaccgtggtttatcccgacttatttgtcctgtgacggagcctcgttgtttgctgtggatgtttggtggagggccttgattcgatccttgttttaactgttgctcttcttgtctgttgcttggtacccccctcttctcgcgggtcattaaccgctgcgtgtgttcgaggtttctctccctttttttccgttttgttatcccgcgcttttagtggctccttcctttctttgtgtttcttttttttttcgcctcttttttcgtttttc

SEQ ID NO: 52862 - DNA, 545 bp, Gossypium hirsutum
  Clone ID: uC-gsronu33B104h12b1
gaaggaagcacgtttaaggtaaagacgatggtgtcgggatcagggatatgcgcaaagaaagtggtggtggatgcccgccaccacatgctgggacggttggcttcgatcgtggccaaggagctgctcaacggccaaaaggttgtcgttgtcagatgcgaggaaatctgcatgtcgggcggactcgttcgccagaagatgaagtacatgcggttccttcgcaaacgtacgaacaccaagccttctcatggtcccatccatttccgtgcccccgccaagatcttctggcgcaccgttcgtggaatgctaccccataagactaagcgtggagcggctgccctcgctcgtttgaaggcttatgagggtattcctgccccatttgacaagattaagaggatggtcatccctgatgcacttaaggtcttgaggcttcagaaagggcacacgcattgcttgttgggccgcttgtcatcagaggttggatggaaccactacgacaccatcagggagctggagaagaagaggaaggagagggctcaggttgcata

SEQ ID NO: 52863 - DNA, 372 bp, Gossypium hirsutum
  Clone ID: uC-gsronu33B106a03b2
ctcagatcgctgtctatccggaactgccgggggttgggcgatgctagctcggctgcgttggagaagatgcgccctcaactgcagaatgtggagttgagagggctccacggcataacacatgttgctttattgccattgctcgagagttgtgaggccggcttgacgaaagttaatctgaacgggtgtcccaatttgggtaacacagatgttagccagatggctgagtcgcatggccggtctttaaagatgctgagtctagacggatgcaggaacagtgatgctgacttgagtgccattgcagagaactgtgagtggctcattgatctcgatgagtacaagtgcacagtaaccgactcttgaattgcttctctt

SEQ ID NO: 52864 - DNA, 427 bp, Gossypium hirsutum
  Clone ID: uC-gsronu33B106a07b2
atgcttctgcgcggatgaaaacagcccggatgcgtgagactgcttcaagacaggaagtgcgtcttgctcagcagccagccaaatccactttgccttccccacctgcaggctcacctcttcacgagcgctttgattatgcttctagcaatcatgcagccaatcgcttcgggacgggagatcggatgcgtacgctcctagcacgagaaagttgtgtcaaacagggtggtcaaacgacactatcctctgaacgaggcattacctactgagatggcggtgacattctacgagtacgcttatactgggatttctcaagattcaggacctgtaaccagggccgatgatcaacccaggatggcaccaggaggcgaatcattacctacatatgttatcaggacgagtttgatggatctctcacgattcaatcaaa

SEQ ID NO: 52865 - DNA, 558 bp, Gossypium hirsutum
  unsure (1)..(558): unsure at all n locations
  Clone ID: uC-gsronu33B106a12b2
cagccataaggtgcatcatcatcatcatcaacaaggtgtgcttttgaatgaaggaagtggttataacattagttgtggagtgattcaagatgtttggtgtggacctggaattgggttttcagctgatgctgttggctctgtggatcgtgttgctacaaggagaaatgtgcctgctagagggaagattgatgttgaaaagccttcgtatatagcaaggctgactgtaaattccgaaacactctcatttcttgattctgattcagccttcatctcatcgcgtcctgaacctgatttcttcggatctagatactatcgccatgctcgacatccttctacagaggggcttgctgagatagtgatgctgcagaacatctttctagtgggcggaagattagattcacgtgatcgatttagcgactggaggctagatattgatagcatgtcatatgagcaattactggagctcggtgagaaaatcggtcatgttaacactggattgaaagaagatgagataagtagatgccttagaangatgaagggctcagttatgaatgatta

SEQ ID NO: 52866 - DNA, 353 bp, Gossypium hirsutum
  Clone ID: uC-gsronu33B106b02b2
cccacgcgtccgatttttaatgcccaaagcttggattattttcgtctttaaaaaaaatttttagttaaatacaacaatatactaattgcaaaaccttatatgaaaccttcgtcttggcttgtgtccttgagaggtctatctaagccctcttctatcgtgcatggtgactgtctcttattgcacccatctgggcgtgccttttttggggtcccaccttctcctcccctgggaggcccctttttttcttcttctttggggctcttccacctcatgatcctgccgctttttgtcctccctgccgcgtggatacccctggtcgtccccccctctattgtggcggggccgatgcccct

SEQ ID NO: 52867 - DNA, 507 bp, Gossypium hirsutum
  Clone ID: uC-gsronu33B106b08b2
gtccagggaaaactattccacatcaatgctgctatgcggagctagaggcgatgctaatgctccagccaagtcattgttttggcaaccaaggaaagggcactcttacgtattaacatttgaatcagagagagacagaaatgcagctatcatggttgcacgaaagcatgctctcgactgtagcgtgatgcttggaggaccagatgatgaaatgtagaagctaaaaatgaaaataaaaatactaacttcaagagagtgtctacaacttgtgataaaaaagccaagagtttaattgtgtgagtaaatttttaatattttgtatggcgtgtttgcagtgtgggagagaagaaaggatatgaaaaaaaatttgggttttttttttccactaatttggttggtaatggtggcattgttttaggcagcgtttttttggtttgcctaatattaattatcaccagttgtaacaaatttgtcccctttggtttactttttcttaattgattttatttg

SEQ ID NO: 52868 - DNA, 425 bp, Gossypium hirsutum
  Clone ID: uC-gsronu33B106c01b2
cccacgcgtccggaaacaatgaattacgcaccattgtgtaatgtgtgaacttaagcattgctaagaataaagagctaagaagaactttaaaagatcatagctatttaatttgagttccacaaaaggatttgataattttgcccttcaaaactaaaaaaaaaaaaaaagggggggccgtttggggggccctatatatgatccacgcttcatgccacgtgcatgctatttttttgggtctcctaaagtaaaacctaagtccaattttttacccgtcgttatacgacaaaaccactgggaaacccatttaattaccctactaaaacatcccgctttacatacctgtttaaacagctaaagggccagcactgagggcctttccaaacagttgttcaaacagatgggcaactggaacgccccctggaacg

SEQ ID NO: 52869 - DNA, 337 bp, Gossypium hirsutum
  Clone ID: uC-gsronu33B106c12b2
ccctctcgtccgcttcatcaacatggtctaccttctggtaaatattggggtttgcaacaagtccaagttttggaagtttacgtcaggtagaaggtattgctgctctcacagctcgtcgaagtgggctgcatcctagtacctcgatatttggctaggggcatcaattcctgttttagcacatgtggtggcagccaatgcaaatcatgtcttaaccactaggggcattaagaagactactagtgtgctattgggtttaggttgaagacagtgaacttgctgatgctgctactgttagtgctgggaacaacaatgaaatatgaaatatgatagctgtttc

SEQ ID NO: 52870 - DNA, 106 bp, Gossypium hirsutum
  Clone ID: uC-gsronu33B106d05b2
ggtctgatgaatatcccaattcctgtattatttgctgaattggtaactaagggcttgtaatgtttatattgctatctgtgaatcaaactttgaagatttcaacatc

SEQ ID NO: 52871 - DNA, 433 bp, Gossypium hirsutum
  Clone ID: uC-gsronu33B106d12b2
cttaatctacgtctatagctgcggatgctgacggaggggtaccttagttttggggtactgatgctaaaagccatcttgagcttgcagatgacaggtagactgtcatgaaaggctgatggaagacttttgatccattcccgaaagggcgctttttcacattctaagcagggttaaggacctatgagcatacccttaacgagtcgaaaccgaagccatgagtggacagagaaggacatgattgtggtgccactctcaaggtggatgcagagaccaagatggaatctactgttatgaaaaagggctgaagtgcctgatatcggatcgcacactactaaagatatatcagtgagcctatagatcctatacaccttagatggcgaatatgacttgactgaacttagttgttatatggaactaaaacaggatcttaagg

SEQ ID NO: 52872 - DNA, 419 bp, Gossypium hirsutum
  Clone ID: uC-gsronu33B106f05b2
gcattaaccattgttctgtgtgtgtgtatttctgtgtgtaattgtgtatataataccattaagtaaaaaattggttattgaatttgttagaagcaaaaaaaaaaaaaaaaaaaaaaaaaaaaaactaaaaaattaaaaaaaaaaaaaaaaaaaagggcaaaagaaataaaaaaaaacaaaaataagataataatgaatgaaaaaaaaaaaaaataatatggggggccctttttaaaaaaccaaagtttacttcccctgccatggaaatgaaaaacttttttttgggggcccaaaaataaaatcttggggccggtgttaataaagacgggaaggggaaaacccctggggtccccaaattaaaaccctttaaagaaaatcccctttctgaaagttgaattaaaagcaaaaaggcccgcccc

SEQ ID NO: 52873 - DNA, 249 bp, Gossypium hirsutum
  Clone ID: uC-gsronu33B106g02b2
cccactcgtactcgaactcgagggcagacgcgtaggtgggacgcttgttaaaggacttgttttttttattttcacaggccatcagtataccgacttgtctctaaagttgttactgtagacagataaagacttgcgcatgagcttccctgattggactaagggtgggccccgataacgggctgtgttcaaaggagatgtgatcagtaatgagttcaatgaccctttcatactgagtctcatgacacctat

SEQ ID NO: 52874 - DNA, 477 bp, Gossypium hirsutum
  Clone ID: uC-gsronu33B107a02b1
tcgctatcgcctgtggacgcgtgcgcccacgcgtggggccactcgtacggccacgtgttctgggacacctgggtgacaaggcaatgactacaggttagatctacatgattgtggaaaggcttgctgattatatcatagaccagtggtgtttgattactccgtgaggagccataccggttgtactatcttcctggctgtcttctatacagcagtggatctagcaccacctctaagatgttggtgtctgtaattatatcctagtattactagatttaatggaagcttgaacctgtttcagaaacaataggcttgtggttccgcatagtgataatgcttggtgatccttttgctttgtggctgtgcatgcttgatggatggtattgtcaagattgtggagtgaggtactttctctaaatttacaatagatagttctactcgttgtgtaggtctaccgtggtaggctttcaattgaaattt

SEQ ID NO: 52875 - DNA, 381 bp, Gossypium hirsutum
  Clone ID: uC-gsronu33B107a06b1
gtctttgcttcatccagaccagagagttgaatatgaacggggtacctttaacaatgacttgtgtggagaacgctgtgatgagcccactatcatgatccttaatctcaaaggccatgccccagatacttgaaaaggggggttacaccttgttcacaccacattacataacttggtattgtcctcaagcttttatattcagcagtcagtgcaagtctcagtgcataaaccatggaagatattgtgcccctgatccacaacaagattttggagaggggtatcaaggaaaggatgtggtgtttgagaacttgagacagctgtgcgcgcacagagttgccaatgagagcaacaggccttggattttgtgggactacgtcacagatt

SEQ ID NO: 52876 - DNA, 384 bp, Gossypium hirsutum
  unsure (1)..(384): unsure at all n locations
  Clone ID: uC-gsronu33B107a09b1
tttctctcgtccggatgtctgacctaatggtctggggtgtgttctgatacaggatgcaaaggtaactgcctatgcttatcgacaacttaaaccacacgagaagaactgttctacacatgatctataattggaagcaattatatatgccttgcagatttgtagactttacttatatggagagaaatgtcatattttcacatatctgacaacgtctaaaacacatgctgacacagaatgagttaaatctgaaacgtaaatggctcgaattgactaaatattatgatttggttattaactaacattcangtaaagctaacgtggtagctaacaccctgagtcagaaatctctgttaattttgaaagaaataaatactcatttgatcc

SEQ ID NO: 52877 - DNA, 271 bp, Gossypium hirsutum
  unsure (1)..(271): unsure at all n locations
  Clone ID: uC-gsronu33B107a10b1
aataagggaggctttggggttgaaggtacatggtttatgcttacaagtgctaacagaaatgaattgttctgcattttaatgcttgcttatatttaaagcctattattgtactacgagtagtgtaataaaaggtcatctcaagaagctattcaaacgaaatatggtttatttgaagagaaggattcactgtgtttatcaagtttgataatcatagaactgacatttaaacccngaaaataaaaggtgaactgacaggaaaggggaaccaatg

SEQ ID NO: 52878 - DNA, 417 bp, Gossypium hirsutum
  Clone ID: uC-gsronu33B107b02b1
gctggctcgcccgcctgtacgggcccggactgactgggtggaccgacgcacgcgccctcgcgtacgggatccgggggacgaactcctgcggcgagcgcatgcagatcggagaccatgtacactgggcttgttgtaaccatagagagcctcctttgcggaccagatcatatgctgcgaaggatgaaccattctgctcagacgagggagcccttgatacatgctggagccaaagcactagtatggtctgggctagcctgctaatgacgtgactatgagcattgctgattactaggcccatcagagaccgagcacctaatcctacagaccatgatgttagccatgtaaacgtgagctttgacttcatagtctttggcaaaaccaccttcactactggagtggatcctgatcaatttggtt

SEQ ID NO: 52879 - DNA, 448 bp, Gossypium hirsutum
  Clone ID: uC-gsronu33B107b09b1
tcctaagtcggaaaggggacttaagatgtgatgtgctatacagcttgcttatgctgtgactaggcatgggagaagaaagaagtaatgctcagaaagccaaacacactagtgagccaacgtatatccaagactacgaatccttgcactatcaaaagatggaaaactgctgattcgttagagacagaaaaacttgaataaggcatacaagattgtgtgatggagataattaagaaacgagaagacaaacttgtgggtggagaagctgacagctctggtgatgattatctgggattactggtgaatgcttatcatgattcgaacgataaacacaagctttcattagaagacttagttcgtgaatgcaaaacaatctactacgctggccaatcaactcttaattcattgcttagatggatagccctacattacgcaatccatggagattggc

SEQ ID NO: 52880 - DNA, 269 bp, Gossypium hirsutum
  Clone ID: uC-gsronu33B107c02b1
aggctgttcgcaacgcctgcttgcacgaacaatgccgattttcatattgctaagccaatgactagacctggtgggacggcagatcccatgaagtgtacaaggacgaaccctagattagcaggaactgatggggaagctgcaatactgtgccgatacgctccattagatgcaagacaatgcaaccatgccgttcacatgctataaatgtcacatgactctgttacacccagcagtgtatgcatacttgactggatgcctttactctctaa

SEQ ID NO: 52881 - DNA, 333 bp, Gossypium hirsutum
  Clone ID: uC-gsronu33B107c03b1
atgcgtcctgcctttcactacagcctgatcttagagaggtgctcgactcataactagtttagccggctgcccacgagagctggtgtccgcaccatcaacgtggaacagacgctgccctaaaaggccatacccttatgcccagctgtctacgagatgcatctctatgcaaccacgcagagactgctctcaacaacaaggcatccgaggccaatgacaggataccacacttggactgatccggagactccatacccaattaatggctgcctactgccagaccccagaatgccggaatgattgattaaaatgagggggatctggatcacgtccaag

SEQ ID NO: 52882 - DNA, 214 bp, Gossypium hirsutum
  Clone ID: uC-gsronu33B107c07b1
gctattcttgaggaatgcttgatttaaaaaactagggatacagacaactatattaaggcaatgcagaatataagaaggagaaccaatatggactccgaacaatggggcggacgatcatgaggatccaaggatacgagctctgcagaacactttgtagctggaatgtggtggcccctaaattgaatgtactcggccaaaattaaacaacgatctg

SEQ ID NO: 52883 - DNA, 362 bp, Gossypium hirsutum
  Clone ID: uC-gsronu33B107d01b1
acgcgattgtgattccgcgaccgcaagggacgggagccgggaaccttttaaaaccatcatcagtataagacacccacaccgcaggacacactgcccacaccggaaacagcacaatcatgggaagagatccacgccacagagagggactgactgatgaggccaaacagcaaaccggcgatagccctaagccccaaggaggagcgccagaatcagaagcacggtcaagcgggtccaggaactatgtggaccacactgtcctagagggatctgaaaatcaaggaactcatgggaagtctacaaaacggaaccgggaccaccaccaaaggaaacgaatatgagggctacagccggaggaaccaaaa

SEQ ID NO: 52884 - DNA, 532 bp, Gossypium hirsutum
  Clone ID: uC-gsronu33B107d04b1
gtaaagccttagagggtttgcatggggtgcaagtgtttgctcattcacaatctgcattagaggagattaaccaacaaggggatttccaatccagtcatgataaatcattcattacagcaaatcaaccactattgatgcaggtatggcaacagagaccagcttgtttaaggcctgtaagatgttgtatgcaagaatcttgtggagacagttgccaatgtgttgacatcactcccctttattgctcttgggatccaggcccctaggagaaattttaatactaagctgtatgctaattcacttattggagttggagttgcctctactttgtatcattcttctagaggaaagctgaggaaatacttaaggtgggcctactatacaatgatagccactgccctgtgtgtttatcaagagctattccgaatgagaacccaaagtactaatggcagctaccgctttacttctaccagttcagcctttaatggcttcggctattcacacttgaatgatgaggtagcatttgcgaaagagc

SEQ ID NO: 52885 - DNA, 540 bp, Gossypium hirsutum
  Clone ID: uC-gsronu33B107e01b1
gagtctttttataagcaagtccttgactgcaagcgagggttctgcatcaactccggctgccagtactatgggagaattgtccaatgatcataaaaatgggaagagacgcaattcttttagttcaacaagacctgagaacattgatgaggagccaagggatagtaacagtagcaatcctctttcgcgtgtcatgcaagccacagaagctgcaagagctaaagttaatacaaataactcaccaggatcaagtgcagatgtgcaagatagagacatttatatcaagaagagacattccttaccaggtgcaaatgggaggcagggttctgcaagaatccatcgatccttatctcgagcccagcagggtgcaaaaagaaatggtaccaatcctactcaggagagaagatggcaaaggtgaaggcttatctggagtaccacggcattgaaccctatagattgagatgcgcgttgaatgctgtgcttaatatctagttttatcccattgatttcatcacatcatttgagatatatagatatttatag

SEQ ID NO: 52886 - DNA, 344 bp, Gossypium hirsutum
  Clone ID: uC-gsronu33B107f02b1
acctcgcgttcgataggagcttacctaagtgctcatgaagggccacatatacttcgctctagaccacaggctcgtaatgcgccactgaaagcttctatgacagctacagatgaacctggatattacgaagatgggaccttagagataggactcgagaacgtactcgcagtcactgaggctgatactgaatacaatggagacgattagggatacttatcatttgagcatctcacttgggcaccatatcagatcaagatgcttgactcgcgcctgtagacacctgaggagattgcatggcagactacctgccattcaaaatgcacggcaattctggcaccatccat

SEQ ID NO: 52887 - DNA, 444 bp, Gossypium hirsutum
  Clone ID: uC-gsronu33B107f03b1
gatattgtttctaaccggttcatttacattcagtgagaatgggggtgtaaaaagcagaaccggtggtttgagtgtttcattggctggatcggatggtcgtgtaataggtggtgggcttgccggtgtactgttggccgctagccctatacagattgtggttggaagcttcatgctaaatggctacaaagtgcataaaaggaagccttaccgtgagcagcacacagttgcagcttctgcagtcgccaccgctccttcggccatggcgatggcagaagaaggaaggccaatcatctcacaagcaaaactagattgtgaaaacaacgtgaaaccaacatgtgctttccaagtggggagccttgaggaagcaagtaaaaacataactgatcataaaaacatagcaaatattgcagcagcctccattgattctggttggaacaatggctc

SEQ ID NO: 52888 - DNA, 377 bp, Gossypium hirsutum
  Clone ID: uC-gsronu33B107f09b1
tcttgtcatatgaccgcatgataagcattcagagagaatccgtaacctaaaagcaaggctcggctctgagggctgggcacgggtgtaccagacccgaacccaataggtggcgcgcactgctcgagctgctcccgcggtgagagcatacacgactcgtgccggacgctggacgcactgtgaacgcgatccctcatagagccatccccttacgacgaacagtcgactcagaactggtacggacaaggggaattccactgtgtaatgaaaacagaacatagcgatggccctgctgatgctcacccaagtgatttgtgaccaaagctctgatgtcaagtgttaaattaaccagcccggtaacagggagaacatactcttta

SEQ ID NO: 52889 - DNA, 478 bp, Gossypium hirsutum
  Clone ID: uC-gsronu33B107f10b1
atttttccttttctttctactcttaactccacagcggacaggtcgataccagtttcactctttagcagctcgcactctttcgttgtttattgtacagaatgtttctcaaggtgcagatgccctggaatgtcataattcctgctgacagcttggatgccaaaggcttgatgctcaaaaaggcaatagtgatccgccttatggatgaatttgcttgcaagaaggccaccaaggatcgcggatatttcatggctgtaacaaccctagagagcattggcgagggcagagttagaccagaacacagggatgtgcttttccctgttgtcttcagcggaattacattcaagatgtacagaggagagattctgaagggggttgacataagatactaaaactggagtgtttttgaggtgtggaccaatccaaaacatatatttgtctcacataaaaatgcctgactaccactatgtgccccgggaga

SEQ ID NO: 52890 - DNA, 467 bp, Gossypium hirsutum
  Clone ID: uC-gsronu33B107g02b1
aggaaatggcatctatctcttccaataatggctactttgcaccggcttgctggacagctgctttctgatttgattgaccgtaattatttctacttgtttgacatggagtcattcttcacagctaaagcattgaacatgtgcatacctggtggtcctaagtttgagcctctataccgtgatatggagaaaggggatgaggactggaatgaatttaatgacataaacaaactaattatccggtcacctcttaggacagaatacagaattgcttttcctcatctttataacaataggcccaggaaagtaaagttgtgtgtgtatcacactccgatggtcatgtacattaaaacagaagaccctgatttgccagcattctactatgatcctgtgatacaccccataactaccacaaacaaagaaccgcgtgagaagaaatttatgatgatgatgatgaagatgattttgtc

SEQ ID NO: 52891 - DNA, 288 bp, Gossypium hirsutum
  Clone ID: uC-gsronu33B107g07b1
gcttcctcgcgtacgtccacgcgtacgcccacgcgtgcgccgaaatatgctggacaggtgctttctgattagaaagacccaaattatcgctacttgtttgacatggggtggggcttgcagatagggcccaggccatgtgcctcccgggggggacctaagattgagcctatataccgcgatatggacaataggggatgccggactgtttacaacttgagtgacgtaaacacactgattatccggacatctattacgtcggaatacatacccgcttttcctcatgtttat

SEQ ID NO: 52892 - DNA, 344 bp, Gossypium hirsutum
  Clone ID: uC-gsronu33B107g09b1
tccatctgcgtacgtccacgcgtccgggtttatgtgtattttggtttgcgtgattaatttcaaaccccaaagctatgatctctttgtttccaattcaattttaccagattatctctgctagaaaaaaaaatcttaggacacccttttttctgggtttttttttcttatcaattctcatggaagccatgtatcttgcatttcatcatcatttcttgagttattcttgtcacctatatgcttgcaagcgaacgatgttcatcacttttcttattatcccccgatctttcaagaaaaacatagaagagtgacgtgaaaccctgcaaagagcatgaaaacacgaagct

SEQ ID NO: 52893 - DNA, 448 bp, Gossypium hirsutum
  Clone ID: uC-gsronu33B107g12b1
cccacgcgtccggaccctttttttttttcttaggggtatgctttaagcaatgcctctgaagcgtcaccatttccatcaactgctgtaaacaccctggcaggtctcaatgaaatcaaggctttttactgaaatgtttatagttgtttgcatgtgaatatcatcatcatcatcacaatggttttggtgaattgaaacatgggaaatgaaatggggaacaacaacacttctgggtttcaagaagaaaataacacagttgacgataaatctgtacaagaatttgatcatgcagatggtttgaaaggacaaaatcaagtagttcaagcaattctagatactgattctcaaacagcaaataaagaagaaggcgagaaaactcaggaagatgctgctcgaacagattacgaaaaggaacaaaatatgaaagtgtggtatctgaagatgtatatgt

SEQ ID NO: 52894 - DNA, 374 bp, Gossypium hirsutum
  Clone ID: uC-gsronu33B108a10b1
ctgatatatatcccgagatcaagttcaaaagaatgttggtcttcatataacgatcaccgcggaagatgtatatggtggacacttgaatagatgccccgagtccaaattggatatgttggcccaaaaaggttgtgtaacagacgagccttatgaaaatgatattggatatcatgaggatttctctggcttggagaagcaacattgtttctttgggggatgttctgatggtttgaactcttcccaaacagaagaggatatagatatggagttacaaagaagatcgaaagaagcagaggatagagttttgcttctttccgaagctcttgggcaggaaacctttcttcgtgatgttgggtttaatgtttcgtctctca

SEQ ID NO: 52895 - DNA, 417 bp, Gossypium hirsutum
  Clone ID: uC-gsronu33B108a11b1
gtatattaggagtatattggcctggttcaagattggtgctttctcacacaagtcattggggacttgatgtggcaaatcgattgtaaacctctgaggaaactctatttcattgggattacagcggtcagacttctccctcatttatacgactatataagagctccagttcccaatccttactttgcagaggagtacgagtttgtaaatccgacattggacttcttctcaaattttggggatgttgccattcccatcacagcaggtttgcttgcagcagtcatctattgtcagcaaaggtggaactatgatcagcttagccagattctgaccttcaagcaatgtaagcttgttgctgcacgatcaagagcttatgagaagttgtcttctaagccttttgaagctgagcttgcctctgat

SEQ ID NO: 52896 - DNA, 345 bp, Gossypium hirsutum
  Clone ID: uC-gsronu33B108b01b1
atcattttttccttcattctgaaattcgatgaagacgctgtcagtttcctgatgaaatccaagaatctgcaagtgtttgcggaggatgaagatttcctatctgctgcttttcctaatgaatagtgtttaaggtatgagctatagtatgaatcatagtatggtgttcagttgtgtgtattaaaacatagcttatgaaacatatgctggtgcgtgaactttaatattttgatgcatctgtaagaactggtttggatgaatgtctacatgcatgtatatgtatgaatggtttcttatgatctgtttttttaaaaaaaaaagaaaacaaaaaaaaaaaacaaccaatag

SEQ ID NO: 52897 - DNA, 460 bp, Gossypium hirsutum
  unsure (1)..(460): unsure at all n locations
  Clone ID: uC-gsronu33B108b10b1
ccttctcgtccgcccacgcgtccgcccacgcgtccgaaggagacatatctccttgtgtctagcttagatgtacatcccatttattgtcacggtataatatctctcactggttgtcttcagtgatcaggatacagtcttaacttttgggtgtctgtttattatccggaaaatgagaaatgaggttgtgtttcgagccggccaaccgtcatcaattaatttcattagagaggcacagaattactctgataccgtcagggaggccttggaagccatatcttacaatggtagatgatgaatattgaacaaaggatctatacccaattagttgacgagtaaaaattagttggtccacagcgtttcatctcttgcagcataaacttccctttgtagttttttttatttattttgtaaattttttggtattttaaatgtcccttttactgtttgtgttccatnnaat

SEQ ID NO: 52898 - DNA, 569 bp, Gossypium hirsutum
  Clone ID: uC-gsronu33B108d07b1
tcttattcccacggttccactgttaatctttcttcactttcatacctttcacattatcccctccaaaacgctttttacaaaggaaaccccaaaaatatacctatcaccaaaaagtgaaatccaattctcctccaaagcaaagcaaaaacagggacttagtgagtgagtgatgggttcccagaactttcttcaagttgttgccaagaactttgatgttcttgctctgtatgtctctctttttaacaaagattctttcatttgtgctactttgtgtgttcttttttcttcttaactgagctttgctttttttgttctggttttacaggcctttagtcactcttgtttaccctctgtaagtagggttttttccccctttcttttgaaccaccttaaaaccattgattatggtttacatgttctaaacgcttccaaggtttgtcgtgtttttttcgtttttggcagatacgcttcaatcaaggctatagaaacgaggtctaacaacgatgatcaacaatggctgacgtattgggtcctttactctttgattacacttttcgaacttacttttg

SEQ ID NO: 52899 - DNA, 261 bp, Gossypium hirsutum
  Clone ID: uC-gsronu33B108f04b1
caccgccccaaaattcccgtctcgacctacgcgcccgccttttagcagacataccaccttctcaaaaacaaagggccacttataaaaacatgagcggttacagacacgaaaactgctactagctcattacctcagactagacatgtcgcatgcatttgctactcaagatatcctgctatctataaactcatatactatctaaacacgcaaaatcctattatcttttactcaagtatatatattgtatactacctcttttcc

SEQ ID NO: 52900 - DNA, 566 bp, Gossypium hirsutum
  unsure (1)..(566): unsure at all n locations
  Clone ID: uC-gsronu33B108f05b1
ctacatttggaatttattccctcaatgatttaagcttagacaatattactcaatagaactgtgtcttaatttttataaattacaggaatgaaatttatagttaaatgtgtaataattacataatcaaaatgcttgaactatattaatattattctattaatattttttttggtgaagatattttattttaatgattggattatgatatttgtatatattggttgaatattgaaggttgtcatctttccggtatggtttggtaatttatttggaaagctttatacactaccttttcaatggccctcatttagcctcagacactcaaaacacacctccatgtatgtgttttttttttaaattttttaattaattaaaatttagggtttaaggtttatgttacatttttatgtacaaataattttttttatgacagcatcatacactacctcattgatggtaacaggtacattttggtttctaattgaattttaaatattaaaatgttaagtatcatttaaaaataatatatatattnttttgaaaggtggaagtttgataccaagaca

SEQ ID NO: 52901 - DNA, 393 bp, Gossypium hirsutum
  Clone ID: uC-gsronu33B108g06b1
aaaacatacacaaaatggatagccgattcaacttaaaagctaccttgtaaaactagatggaggtctacacaatgtcaatatcattgtcctcatcatcctcacaagccacaacaacatccatgtgcaattctggtctgccccaaaaagattccctcagccctttcagttctcagtcgctgatccaactcatctgcaatttaatgtatctgcttctatacatagggcctcaacattctgcattcctattcctgattgtattgaacatccgaagatcttgtctgatgctatcgagacactattagacccaaacttttatcctgataaagatatcaaaattgttactgatgagaaggctactacactctttcatgaatctatcaactatacagcact

SEQ ID NO: 52902 - DNA, 417 bp, Gossypium hirsutum
  Clone ID: uC-gsronu33B108h01b1
gccacttgtacggagacctaatctgcgagatgtggcgggagtcttatcaaccagattagggtgctccacctcgcccccagacggacgaaacagctttcggtaatggtggaggctggacaatctctggcacccctctggatcagcgtgattctcgccttttggccattgcagaggcagaacgccaattatcggaaactgggtctgacgaatatgctgcactcaaatgccactggagctgcatatcgccgctcagctgctgaaattgtaatggcactgctgctattgcatgatgcagtgactgatccagatgccgcatcagatgatgatgtctcttctttcttctatattatctagctacgagctgctgggtttctctagccatgctacatcatggcttgggccatcagtgtattacag

SEQ ID NO: 52903 - DNA, 514 bp, Gossypium hirsutum
  Clone ID: uC-gsronu33B108h11b1
ttcacataatgctctccattttagagtagtctttcttatacaagacatctggggggattcaacttcaacacaacaaagagaggaaagccatggcctcttcacatggtgtgtatggcgcggtgctgctgacatggcgaggccgctcgtgaggtgtgacgcgaaggcttccagaagtttcactgtttggggctgctgtggtgcttgcggcgcatggagactgcagaaacccttagggtttctgaaagaatttagacattgggcctttttaggttaattttgtttgggccaaaggtttatttttgggcttttattgggtgttgggttttgtactaggctattataatttggggttaatgagtttttgaaatttgggctgtaaatggactgctaaagtttggactttttatttttattttaatttattattgggttattctctgttaacgggcccgggcgaaatgggcctattacaatatttttacaggatcctcatttatttatccttcgggttttt

SEQ ID NO: 52904 - DNA, 321 bp, Gossypium hirsutum
  Clone ID: uC-gsronu33B109a02b1
ccatttataaaatacttaactaaataaaaaaaataaggggatctaataaaaatataatgggactacatatcgagggtaaaacaaatattacaacattgcatgaagctgcccttccttcttttgctgtcgcggatgttgatgtcagtcctccatttgtgtcacttacccttgtgtttagtctcttgtgtactgattctcacttcgactttcatagctgctccgtttgtaaggtggcagcttttcccggtgatcttagcgcaaagctgcttgttaatctggcccttccttgactcattattgaccactccgtgagacgggttt

SEQ ID NO: 52905 - DNA, 462 bp, Gossypium hirsutum
  Clone ID: uC-gsronu33B109b07b1
cttatgcgcgggttgctaagttgacaagatgatgagaggagagaacaatgaaggacctgattatgcttctacggaatgcgggcacactcacacttatttctgattctaagaacctgacattgaactctcatataatctgtgtggtactgtctattcaactgatagttaccatctgcgaggatgagttgggaataagtaagcagcaatcttgaccatatcaaaactgtcatgcctgtacaacatgctggtatggaaccatggaccttgagatcttatgggatgataacagacgatgaaatgctctaaccatgactggagcgtcctggaatcagacgggactgaaatagcacatggggtaatggcctagagatcttgcatgtacgataatcaggatggatggataccttgagaagactctgcctttgtggattcatgcagtagcattcaatttagctatgtgaa

SEQ ID NO: 52906 - DNA, 494 bp, Gossypium hirsutum
  Clone ID: uC-gsronu33B109d04b1
ctgtattcgaagggttcatgaacatgtttcttgaggaagaagctgactttgctataacgatgatagaggctttcggaggcagaatggatgaaatccgggaaaatgaattaccttacccacatagagcaggcatcttgttcgaatccacttacattgtccaatggacaaatgaagcagaagcgggaaggtacataagctggatccgaagactctacagttatatggccagttatgcttcgaaatctccgagagaagcatattataattacaaggatctagatcttggaactaacaacattgttggttacacaagttacgaacaagctagcgtttggggtcttaaatatttcaagaataactttaaaagattggtgcagataaagaccaaggttgatccaatgaatttctttagaaacgagcaaagtacccctcctctttgatctccatgaaagaagaaggtcgtcagggttgaagattgagtttttttcttaaac

SEQ ID NO: 52907 - DNA, 241 bp, Gossypium hirsutum
  Clone ID: uC-gsronu33B109d09b1
cttacgcgttcgcccacgcgtccgcccacgcgtccgcccacgcgtccggtccagtagctaatgatctttcagctgctaaagatcctatggtgataattagtattattttgtattttgtatttgggctatgactatttgaccaaaactgtcatggcctccatgttgttgctgaatttcaattttagttattttggttgggatttatcagtaataaattatgtgaatagatattgtggaattc

SEQ ID NO: 52908 - DNA, 497 bp, Gossypium hirsutum
  Clone ID: uC-gsronu33B109e08b1
tccacgcgtccgaaaccagttgcatgcagcaggggaatgtagaacccaaactctcttcttcgtaaaccaaacgtctccaagaaactcctctcccccaaaatggcgatttcttatattcatctcttcatactatcgttcgtttccatttctcgcttccttgaaatttcaaaagctggagcggaatcggagcttgtagccgatcttttaacccttcaatcgcaatcagaatcgggtgttatccacttagatgatcgaaccgtctcgaaattcatcacttccaccaaaacccctcgtccttactccctcctcatcttcttcgacgccatcccattacacgacaaatccgacctccgcctccctgtgctcgtccacgacttcgccctcgctgcctcttctttcatcgccaaccacaacagttccaacaccaagttgttcttctgtgacctcgagttccgtgaatcccaatcctcgttcaaactcttcgacgtcaatgccct

SEQ ID NO: 52909 - DNA, 415 bp, Gossypium hirsutum
  Clone ID: uC-gsronu33B109e11b1
ttttcgaggagcatagtaggagtgaaggatgttagggaccctaacactactaccgtgaagaagattaatggagaatatgaccacaagagtcaagcaaatgtttatgacgataatcatgataatgatgatggttctgttaagggaactgaattaccaactgattaatggcttttaagtttgtagttaagatgatgtgatcatggatagctttcattatataaaaaaattatgaaagaatgatgattagatttcgtagtataaataagcttagtttcctttcattttgcttgtaaaaaatattaatctctaggcatgtagttcgatgtataccatacttaatttagttgatgaaatctttataaataattgtctttcttttttccccttgtttggtgaaaaaagaaaagcattaagc

SEQ ID NO: 52910 - DNA, 397 bp, Gossypium hirsutum
  Clone ID: uC-gsronu33B109g09b1
ttcatgcgtgcggtagacacagttgttgatgtgggtgatgaagatgctgatgcaggtgctgtggcaacagctgctggaggcggtgaaggaaccgctgtcaagggctcctttaatgctgcggatctgagatcacacttgatgtcacagtacatgtcagcccaaatgtcaccgattcagcccttgcgtatgctagatcccacaagttatccaaatcgatcccacgtgctattagacaaggtcccagttgaagtcagcgaccagtacgaagacctttcagtaaaagcgaagatatagttgagtatattattgcaaactatgtcacaggctatgacacttggggcgatagcaaggacatggcatgccagtgcccgtgccattgtttatgagcatgcacaac

SEQ ID NO: 52911 - DNA, 278 bp, Gossypium hirsutum
  Clone ID: uC-gsronu33B109h01b1
gaagtcttgaaactaagattaataaattagcattggggaataataaataccacggcaaagctaagggtaaaaaaaaaaaaaaaaaaaaaaaaaaaaaaaaaaaaaaaaaaaaaaaaaaaaaaaaggggggaacggtctaaaaggaaaacaaaacttaaaaagcccaagcaagcaaaagaaaaaatactataaaaggaaaacggagggccatttaaggggcggcgatttaaaaagaggcgaatggaaaaaacctggcattaccaaagtgaatccaattg

SEQ ID NO: 52912 - DNA, 138 bp, Gossypium hirsutum
  Clone ID: uC-gsronu33B109h06b1
ctcatttattttgtctgtggaatgtgtctttgttgacaggatatactggtttgcatgattagcttgtttggaaggtaaaaaatacactgaaccaccaccaaaacccttgatagagcctaataaagctgacctaacggg

SEQ ID NO: 52913 - DNA, 400 bp, Gossypium hirsutum
  Clone ID: uC-gsronu33B109h08b1
gtgtgttgtgtcaggcccttaagcagctgatgctgggttcttgtcaccagttcagttcttgtacaaggtctttcataaaaccatatgatggcttgactatggggatagagagatggcttctgtattcacttcttgtatgctagctgcttactctactggattgcgcttgagcttagatgcgagggatatactcctattgatatgagtgtaggtggaggatacaatgctttctacatgttcgttagtggcacctgtgtccatgtgcagggacattgaggcatctctggtgatatggggcctacgggcatcgattatatgaggacatgtacatacactctggtgtttctaggctagcttcaccttattaacaacctagatgttgccctcaaaaaaggttgaa

SEQ ID NO: 52914 - DNA, 443 bp, Gossypium hirsutum
  Clone ID: uC-gsronu33B109h10b1
ctttctcgtacgaaactctactgtatgactatggatggattttcatcataataacaaagatgtatgaagaaaaataaactagtttgttgttaccttttggtagcttaatttttccattttgaaagtccgattgtcacagcaggtaatttaatggaattaatacaggttggaatggttggtgcgaaaatgctgcaattgctgctgcacctgaggtgctatcttattacattttccatgtcagctacacaaagttcccgatgcagatactgtacaaactaacaaccttcggtcaactcttgtttcttgtctttattttctgcctttcctgtagctgctagtactgctgacccattccgttgatagaattttcacaactgcataagacaaaaaaagaaaaaaaaacatttgtgacatgattcttcaaacatgtcattacttttgag

SEQ ID NO: 52915 - DNA, 418 bp, Gossypium hirsutum
  Clone ID: uC-gsronu33B109h12b1
gtcttttgactctgcagtttactgtcaccagactggggaacttatcacccttccatacaatgctgccatgccagtgtccctcaaggtccttgagcatgaaattttcacaatagcacctatcaagaatttggctccaggattcagttttgcacccttgggactcatcaacatgtacaactctggtggtgccattgtggatttaaagtatgaatttaaagatggtgccaaactatctgagcttgatattgaatatggaagtgaaagcagtggtcttaatgtgagggcggagaattctagcaatgaactggtgggaaaggtttgcatggaaataaaaggttgtggcaactttggtgcttattcatcagccaagccaagaaagtgcagcgttgggtacagtgaagttcagttcgactatgat

SEQ ID NO: 52916 - DNA, 331 bp, Gossypium hirsutum
  Clone ID: uC-gsronu33B110b02b1
ttttgtccatccgtatagagttaggcctttatgcttatggtggctcatggcccgcagcatatcaccacagtcctgtgcagtactcccgtgtaggtatcaaggacattaagaatggactgcacgttaactgtaaattctgactagaccaaagactcgcatgggcagaggatgagatcttacaaggactaaacaggccggggaaacacataaagtgcaactggctcaaatgtaactatgatcaatgtagatactataccagaacttatcactctaggtatatctaatggatctgaatcgactatgcaccttatggtgggaaccatactgacac

SEQ ID NO: 52917 - DNA, 619 bp, Gossypium hirsutum
  unsure (1)..(619): unsure at all n locations
  Clone ID: uC-gsronu33B110b10b1
tcttcacgcgtccgcccacgcgtccgcctcgtatgaaatttcaaattccctctcacgctcaccattttgttctctcaaaatttgaaaccctgtttctaaaattccaatcattcctttcgaaatatattattttccttcatggaatatgagatgaacagtgcggcagtggcgtcgacggtgtatgtgagcatctcttctccaatggcaccatttccaccctttccatattgtgcacatcttttcgtacttgtctagggatctgaacttcgttgagcaacaagtagcattggttggaaagagggttataacaactttctatgagagaattgaaggacttgaatcatttgaaagaaatcaagtattttgtttttttggctcaggtggtagatgacaattcaagggacgtgttttaatgattaaggttctaacaaagacatatctagtnttaagacaccttctttgtgtttctacanggtttgtcactttgtagtcaggaaatttataatgttttatgtaaactcatatacatatgaatataaatattgttccttcttattttaatttatagattttttatgatatatatttatattcatataaaaattatgctaagaattga

SEQ ID NO: 52918 - DNA, 478 bp, Gossypium hirsutum
  Clone ID: uC-gsronu33B110c07b1
gttaattatgtaagttggaaaagaaaattctaaataacagaaccacaaaggagacaaagaacaaatcttcaaaataataagataaattttccttactgaagaaaccaaaccaaatgataaaatatgcttctattaaagatccaacacatgaaagaagaatgccttaatattaggcagatttaaaaccaaatccatgagatatctacacttacacactacatgtattgtttgaaaattgctgaatgacaccagctgcagtccgagacatggacactttaagaactttcccatattggccaaaatattctagctgttggagaagctgcacacagagatgcatgtttaggtcatgatacaaggagaacaactagtttgagaacatgcgcaagaggaaagaatgagacagcacatcttcatctgccagaccaagtggcaacccgactatgtaaacaagattcctttggataactcgcacact

SEQ ID NO: 52919 - DNA, 318 bp, Gossypium hirsutum
  unsure (1)..(318): unsure at all n locations
  Clone ID: uC-gsronu33B110d03b1
ttttcacgtgcgaccagtctaacggaggtgaagcgtttttctaaacgcgtgctgatcgacaggggcgcttgcggcaagtatagtctggagcgaactcacatgcaccgacggaaagaaggctctctgagaacccgtgaatgcggacatatgacaaacagatacatataccctgatggaatctaggagacttgaattgatgaacatacaatattaggcctaaggtatggccggataaggagcgggtgattttagggtattgggtttattcgnggtttttctaggctgcttaggtatttcgggttttgtaatcggaaaagg

SEQ ID NO: 52920 - DNA, 411 bp, Gossypium hirsutum
  unsure (1)..(411): unsure at all n locations
  Clone ID: uC-gsronu33B110f09b1
tgctaattctcagactcactgagtcaatctcttctttctcctgttgtttcaaggttagagattccctcttcttcttccttttgtttatttcatctgattataaatcttactttaatttgttgaacacactattttgattcgtaaatatattgtgattcttctttctttcttttttttttcaagtaaatgacggatcgatgatgaaaaacgtgagcaaattgctgtttcatttaccttttttttggagtttttttttcagtgatgctaataaatttaagctaatccgtcatgatcttagattagaattagttctatgttcttctttgagtctgttatattttatttatcctttcatgcatttcttcaagataatgcctagttaagctctccaaattctgctctgngattctt

SEQ ID NO: 52921 - DNA, 261 bp, Gossypium hirsutum
  Clone ID: uC-gsronu33B110f10b1
ttcacgcgtccgcccacgcgtccgggcgatcgtggctgcggcgcaaagaaggcttctagtgcttagggtttgctgaaaaatgttttaggtttggggtattttggggctgtttgggttaattgtttttgtaattttggattttcttatgtggaattatttgggtcttatttattgggctggaattaagtagcccgagctaaaattgggtattacaaatataatggtgcataaatttacacaccaatgtttttagttttcttt

SEQ ID NO: 52922 - DNA, 200 bp, Gossypium hirsutum
  Clone ID: uC-gsronu33B110g02b1
ccttcgtttccgaggaggccatgtgaagaaccactcgtgggagccctagctctctggcctattctggcacgttccagaagcttccagtgctgctgagaattttttgggtgtttgggcctttgggttagggatcttgctttgggcttttatttttgtaaaaaacttggactttttaattaattgattttgcttttgttttt

SEQ ID NO: 52923 - DNA, 361 bp, Gossypium hirsutum
  Clone ID: uC-gsronu33B110h03b1
ccttttcgtccgatcaacaatggctcaactcaaaatcatcaacaatttccaaaattcatacatgggcatgatagtatatagagcaacgatcacaaaaacgtagaaattatcaaaaatcaagtcaaaaccataccttaattaagcttggaagtagccgaatatcaaaacacaagaaccctagcctttctttctttaattttggcaaaatgagatgaaaataatatgaactgatggcttttgttttattaatataaccttataatcaatttccaattttaaccatgctaaaccatttaaaaatcaacttaatggatggtcattaatggccattaaccttatcaatggtctaataacataataa

SEQ ID NO: 52924 - DNA, 338 bp, Gossypium hirsutum
  Clone ID: uC-gsronu33B110h05b1
aaacaagttttatatattttacatctttattttatggttgatattaaaaaaaaaaaaaaaaaaaaaaaaaaaaaaaaaaaaaaaaaaaaaaaaaaaaaaaaaaaaaaaaaaaaaaaaaaaaaaaaaaaaaaaaaaaaaaaaaaaaaaaaaaaaagggggggccgttttaaagaaccaaattttacgtccccttgcatgaaaggcaaaattttttttataggggcaccaaaataaaattaactggccaaggtttaaaaacgtggtaactggaaaaaccctggcttaccccaattaaatggccttaaataaaatccccttttcgcaagttgggttaatac

SEQ ID NO: 52925 - DNA, 453 bp, Gossypium hirsutum
  Clone ID: uC-gsronu33B111b03b1
ggttcattaaggatcggttatggcatattttggatagagcatccattgagaagaaatcagtggacttgcaggacttgttgcttcggttaacgtttgacaatatttgtggccttacctttggtaaggaccccaaaacactctctcctgagttacctgagaactcatttgctgttgctttcgatacagccacagaagcaactctctataggtttttataccctggtcttctatggagattggagaagattttggggattggagtggagaaaagattgaagcgtagcctccaaattgtcgagaactacatgaacgatgccgttgaagcaagaaaggaagctccatcagatgatctactgtcccgttttatgaagaagagagatgctgagggcaacctctgtacaagtgatgttctccaacacattgctctaaacttcgtcctggccggtagggaca

SEQ ID NO: 52926 - DNA, 483 bp, Gossypium hirsutum
  Clone ID: uC-gsronu33B111b10b1
tttatttacataccttgtagaccggaccaaagccacgatgaccgaggcgattaagttgggagaaataattagtagcaatctggagagcacggagttcgaagaaaaggccctgagtgtcggatccggcgtcggaatcgtcttctccggcggatccacctcgagcggctttgaagcgtttggcgatgcaagcagaaagtttagccaagaatcccatgaagaaatgggtgggcccaatggaatagccaaggtcgtagtccaggtagaggtgtacggcagagaaaagtgagcatgaagaagaagaagaagaagacagacgaaaagggaagtttgccccgtgcgaggtttgattatgaggactgacaggtaatttaaggaaagggtattcaagagggtattaagtacgacttttcattcattgaacaacgattttattatgaggcgtctgaattttctgttaataaaataaagttacttttgatgttt

SEQ ID NO: 52927 - DNA, 490 bp, Gossypium hirsutum
  Clone ID: uC-gsronu33B111b12b1
tatgtaatcctacattctaatccttcatccagacgcaatccttttgttttttttttgagttagaaaaagcaaaaacggaatgaccttttctgtcttgttttggagctttaatatgtgataggatttaatatttgattatttcaaaaggtaaaaatattttttatataaaatttcatagttacattattaattgatatatatatataatcgattttgatatacgagactcaagaaattgtattgtatttcatttaattcctttttacgtgttatgatgattttaattaattacacaaagatggggtttaacggggatgatgaattcagggtctagatccaaagacaacagccagtttatttgctaaagcccaatgcttaggcgagaaacgaataggcgacgaggattgcttcgtcctaaaagtatgcgccgaccgtgcaacggtgatggaaacgaacgaaggaccagcagaagtatgaggcatgtattata

SEQ ID NO: 52928 - DNA, 477 bp, Gossypium hirsutum
  Clone ID: uC-gsronu33B111c04b1
ggcggtggccagagacgcgttttgcttggtggacttagcaaaggaggcgtgggtgcactatgtgctatatatgtgtattggacggacgagggagatatagtggctggtgtgtcgatggttcctagtccgtatggtggaagccctatagcttcagatatcttgagagaaggtcaactcggtgattatgttaatatacggaaacttatggagattttgatttgtaaagtgattaaggtttggagttatgtgttatgcattttcttttctctttagtttctacaaataattgacagtatgatattatgcaattatgttcgctgcaatttctgagtttccatgggaggaactcagcacctgctttggtattttagtgattctcacctctttcctagggaagaagggtttatgagtctactttctagccaagtgcagtatccggatatgtaatcgggtataagactatgattctttagggat

SEQ ID NO: 52929 - DNA, 474 bp, Gossypium hirsutum
  Clone ID: uC-gsronu33B111c09b1
ttcattggtcttcatttaatcatttttagaaagaaaacccatttccctcccattatcatttgagtaattgaagaaaagtgtcgcgatggccaaaaccaagagaatcatcatcaccattctcctaaggcttctagcttttggtgctactctttctgcaaccgtagtcatggttacgagccatgagtctgccgaggttatgaacataaaattctcagcaaaatacagcaactcaccaacatttaagttttatgtgacagcggaggcaattgcaaccggatacggccttatagctctcttcctgtcttcgagaaggtcgtttgatcgcctgattgtgattctagatgtggtcatagcgttgacactaacttcgagcatctcagctgctttggcagtagctcagataggcaagaaaggggacactcatgcaggttggctgcccgtttgcaaccaaagttcaaaattctgcgaccatgt

SEQ ID NO: 52930 - DNA, 415 bp, Gossypium hirsutum
  Clone ID: uC-gsronu33B111c12b1
ttgtgctatgtctcgtcctcatgtttattgtccatcgagacgcatgtggcgggccaccaccaccaggcggaggctggtgtagctgccgatgcgcctcagttgaatctacaacaccttcccaaacgggaactacttgagattgatcactggcattgtagttgcttcagaaagcgatccatttaggagcgctgtataataaatgaaaaggatagcctctttttcctttcattttgagagtgtttgcttggttttttctgttcttttcgggtttatcaaatctggaataatttcattcaatccatgatgtttgattcgattttcaaaaaacaaagtcatgaaaaaaagcataaaatttataaaaccaatatccttggtggaaatctttataaagaaaaaaaaaaaaaaaagggggggc

SEQ ID NO: 52931 - DNA, 324 bp, Gossypium hirsutum
  Clone ID: uC-gsronu33B111d02b1
cccgcttctttctcgcccgggcacttccaacatacacgcgacgatttaaaagatgatgcggccagaaatctcacctaacaaaatctcaacgcccttgtaaaagtatctcccaggtcttgttggtggaagtgcaataatttgcttcttccaacatgacctttctaaacatgtttggggatttccagaagggcaccaacccaggaacgcaatgttcggttgggagttatgcttcacggaatgggagctatgtgcatactgattgctgagtcacagccctggcctgaatccatacagaaacgcctaccataccaatcactgactaca

SEQ ID NO: 52932 - DNA, 249 bp, Gossypium hirsutum
  unsure (1)..(249): unsure at all n locations
  Clone ID: uC-gsronu33B111e03b1
acgctcgcccacgcagtacgaaccatggggcangctttaagaaactttaatgggtatccacatattaaatggctatgggtcctattaaaacaaagccccaaggatggtttaattaacatttgcaaatggtgacaattctcatctaccagctgttcgtagcgggatgctctccaaattttcctagataacacattgcaccctaaggacagtgggattaggaaggacaggggttagcactggtgggacaag

SEQ ID NO: 52933 - DNA, 270 bp, Gossypium hirsutum
  Clone ID: uC-gsronu33B111e08b1
atttatattaggcttctctgtttttatgggcttgggtgtgccacataacttcaatgagtataccgtagttaatgggtatggtcctgttcacacaagctcatgatggttcaatgacattgtagaatgtaccattcttatcctaagctaccttagcgtgatgcttgacatattgactcgataacacattggaccgcatggacagtcggattaggaaggacaagggtcagcactggtggtacaagttccaatccttcaagggagattctagga

SEQ ID NO: 52934 - DNA, 421 bp, Gossypium hirsutum
  Clone ID: uC-gsronu33B111g07b1
cccttgtttacgagtgcataaactagagcttgctggagagcttgatttgcatgatgtcgtgtcttttgacgccgtatttggcaaaatgctgcaagaagtgcatttactggttcgtctaaagcaatagctagattcattgggtggtgacaatagtgatgcactttctgacttacagtcacttggagcctcaatataagatatctgtctggatttcacgctggaaggatatccggactacatactggagcttggggatgacactgtggatatcaacaacttagaggaatacgtatcttcggttgctgatgcagctgtgaagactggaatggtgcatcaaatggacgcatttagagacggttataatcaggtattagagatattatcactgcagaaagatacgccccaagagctggactatctt

SEQ ID NO: 52935 - DNA, 346 bp, Gossypium hirsutum
  Clone ID: uC-gsronu33B111g09b1
ccctcttgtccgccaccttctttaaaaaaaaatggggcatgtataaaaaaaaaaagtggggtgcatagcactctataggatccatatcttccttaggcgctgcctgcagacaatagacctattgtataagcgccacctaaatatcggttaactggccgacgttgaacaccgtcttgactccaaaaaccctgggggtacgccaagttataacaatggttgcacatcactcgttttgccatctgacgaaatatctaaaaggccccgaccacattgccttcgccataaccgggctgactgactgcggacgggtgctctctcggtatatgcgaaacaagtgcatcaacta

SEQ ID NO: 52936 - DNA, 481 bp, Gossypium hirsutum
  Clone ID: uC-gsronu33B111g10b1
gttttgttttgcatgtattgacaactggggggcaatcacaaacctttgcccagtttgccagagtgaatttcagttaatcacctgtgtcccagtatatgacaccataggaagcaacaaagttgaggatgagacattttccagagaggatgattggtccattgaagggaagagcaacactctttctttcccgtcatactatattgatgaaaatttatctgcttggatggagatggctgcaaagttcgaagtttatccacaaccattgagggagatcccgatctcgatacatcaattgcttgtgactcttgtgatatatggtaccatgcattttgtgtgggatttgatactgagggcacatcagaagacacttggttatgcccaagatgtgtagcaaatcaagcttcacaagaatctggtgtggttcttgagaaaaaaaacaccccgcttggtccagagattgctaatggtgaatatgtgacag

SEQ ID NO: 52937 - DNA, 178 bp, Gossypium hirsutum
  Clone ID: uC-gsronu33B111g12b1
tccttcgcgtccgattatgtttagtgttccaggagggtttatataaataaccttggtggaaggactgattggttcagttggtgaaagacgctatcttgtgaatggcatgaattgattgagactcacttatttctcatcaaatgaatcaaagatttgtatatgcaaaaaaaataactac

SEQ ID NO: 52938 - DNA, 186 bp, Gossypium hirsutum
  Clone ID: uC-gsronu33B111h02b1
ccctcactataataaagctcgtccgcctggacctacccatccttacttccccgatccacccacgcgtcctttctcacatactaccacacgcacgtcaaagcaggggcatattaaaactccttggcgtgctaatgacatcctatactcagatataatccatttataacccatttacctctcagctaa

SEQ ID NO: 52939 - DNA, 482 bp, Gossypium hirsutum
  Clone ID: uC-gsronu33B111h05b1
ctttgatggtcagaaaatggggcctttctgtttggtccggtgtgccgatcgtacggggaggttgattatagatgatgcattaagaacaacgaaacccgttattgccaaggtccgggaatttgtacaagagttaaatgcatccttagatatctcagaggatttcattcaattagcaacagcttataaagaaggtagttggcaatttccgcttgatgcttcagcacggtggagtggcagttaccaaatgcttgatattgttcagaaggccgggaagtcgatggatgccgttgtaaggaagaacgaagagatgttgggtaatcggatgttgctgaatactgcagagaagaatgttgtcaatattgttcacaattacttggagcctttctacaaagtcattagtgagatatgtgtaaacaccccacctacgatcgggatggttattgtctacatggatcacatttcggatacaatcacaacacgac

SEQ ID NO: 52940 - DNA, 484 bp, Gossypium hirsutum
  Clone ID: uC-gsronu33B111h06b1
attcaatggcttcagcaacatgcagtatcttctggtcgggctctctttattttgcggagggctcctctcactcttccgattacaaactcatcacttcccttccatttttctgttctttcagcccaatttccagcctgaaactttcacatcactcgcttccggtgctacccaagcgagcatttcgggttttggcttctgattctacaacggacccacatgaaattacggatagttccggcgctgaatcaactattgacacaaaattaccaagaagaagtttactagtccagttcacttgcggggaatgtggtgaaagaacagagagactcataaaccgcttggcctatgaacggggacttgtgtatgtacagtgtgcagggtgtcttcaatatcacaaattagctgacaatctcggccttggtgttgagtatgacttaagggatgaaatgtgaagacagatcaagttaaaccagcgacatatata

SEQ ID NO: 52941 - DNA, 323 bp, Gossypium hirsutum
  Clone ID: uC-gsronu33B111h11b1
tatttctcatacaataacacataacaaacaggggggggtttatataaaaaatgggggggaaacaaaaacaacttataaacaattttatacccacacatattgaatgggcccccccttctagatattccacaactccttccccatgctttcatcaaattaactattctttaaatttccctaaacttacttgattggccactttttcccatactgaatgctgattaatccctgctcttcccaaactaaatgcccttaccctacttccccttttagacagatgactaaatattaaaataccccaagcctttcacccttacaaataa

SEQ ID NO: 52942 - DNA, 192 bp, Gossypium hirsutum
  Clone ID: uC-gsronu33B113a06b1
ttttggcattggttgcaggtgaagaactggggggctacgtgtagagtttaatgggtttatccacacaatcccattggtcacctgatgattgatgatcagacagagaatgcatataggatctagttctagacaaatagctggcttgtatgcagtaactctattatcaatgggtaaatgagagctaccgatatg

SEQ ID NO: 52943 - DNA, 299 bp, Gossypium hirsutum
  Clone ID: uC-gsronu33B113a07b1
gtcatgcaacgcgagcgagcacgctagcggacgcgcgagaatttacacgcgcatgcgcacacacaccccacctatagggtcacctaaagtgacaccaatgggcagatgactgaaccaacgtgaccggcgaagccaccgggtaacccaactcgatccccaaccaagacatctcgcagtagacagccggcgcgacagccaacatgtccgcagcgaggcccgttacgaacacccttgcaggcagaagggcgaacggtacgcgcaactggacgggacatcaagcgcggcaaaactgcggttgc

SEQ ID NO: 52944 - DNA, 330 bp, Gossypium hirsutum
  Clone ID: uC-gsronu33B113c02b1
cccacgcgtccgccgacattaaatttatttaacaagttgaaatttggtgccccacttgtatgaaaggacacggtttgttctgctgcactgttagacatagacattccaagaagctgagccttgttttcatttcctaacgggggtaacaagtttgtttagttaaaatgattaaaacgatagtatctcgggtgaacatgctattcttttgtgttcattacttggcccttgtagttaaaggtagatagataatgattatgtaaagaagctgttgttctcagttgttgatggataaaggaattggaagaacttgactgccttgtggttttgaac

SEQ ID NO: 52945 - DNA, 401 bp, Gossypium hirsutum
  Clone ID: uC-gsronu33B113c06b1
aaatggattgttatattatgttttacttcctgagtaaagcttgttgagctatgtggttgccattgtatatgagaatgcctcgatgtcaatacaggaacatagctcaaatagcaaaggttaaggttatgaggaaacaaggccaatgggaagacctcaaaatacctagaagcattggatctatcgtctgcctcaacttgcctagtttctccggtggattcaatccttggggaacaccgtataggaagaaatttcttgatagaggcttgacttctccttttgtagatgatggcctaattgagatagtcggatttagaaatgtcctgcatggtcttgttttgcttgctccaaaaggacatgggactcgtttagcacaagccaatgcaatccgatttgagtttaaa

SEQ ID NO: 52946 - DNA, 440 bp, Gossypium hirsutum
  Clone ID: uC-gsronu33B113c12b1
gcgctttattatttgttaggaactgcgtgcgatttcagcaatggctaagcgagtgaatgagattatcatatttgcgttcgtagcgttattctcaaaagcaattggggcgaaaccatactggagaactagatggccaattgatagggtgtccactgagtgcttgacttggcaactagctgtggaggctaacaatgtccgtggatggcgcatcgtcccggctcattgcctcagccacatcgaagcttacatgaccggcggccaatatgagcaggatgttgactatattgtggagcaaatagagagttacgttagtgaacttgttgtaggtgaagatggcatggatgcttggatccttgatattgacgacacttgcctctcaaatgtcatttattacaagaaaaagaaatacgggtgcgagccttatgatccaatggcattca

SEQ ID NO: 52947 - DNA, 344 bp, Gossypium hirsutum
  Clone ID: uC-gsronu33B113d02b1
cgccgcggaccgttcgaattcccgttcgacccagcgtttgcctcacccacgggaacagaaaccagggcccagggttgactcaagatgccgtagcgcacacgaaaccattatgcgaaggggcgcatgcactaataagcaacggaagcagacggaaaagaccgcaaacgcaaaacggcaaggaccaatggaagcaaaaaaggtaatacaatcaaggctcattgcagtcgttgaggaatcagagggtggacacatacagaatggatgaccgcttcaattaggaaaaagccatctcataaaagtgcttgaaaaggactgaaatatagcaaataaagaagcagagaatg

SEQ ID NO: 52948 - DNA, 312 bp, Gossypium hirsutum
  Clone ID: uC-gsronu33B113d06b1
cccacgcgtccgggaactttgaaaaaagtgtggagccttttaaattacatggttgatcattaatttccataactttacctcttgttattgaatcaaactgtactttataatgattatggcaaaatcactttactttgaatttgttagggaatgtattgggtaacaaaatcccaaaatagttactatttaggatcaaaacataaaccccccactgtttaagtggtcaattgattatggtgtacaagaatataacatttccacttttttctttaaaaaaaaaaaaaaaataaaaaaaaaaaaaaaaaaacatat

SEQ ID NO: 52949 - DNA, 419 bp, Gossypium hirsutum
  Clone ID: uC-gsronu33B113e01b1
attttctcgactgaaaatatagaaagattggcaaagagaaatgtgaaaaaaggtgaatttggaatcgttcttcgctgatttgattttaagggaaaccagcatctgaaagacaaattttcaacctctcaggacctctacatctcacttcaattgactggaataactttcatcaccgaagatcggttgctgcaagcttggtccaaggagtgtacattcaagaacgcgatcgccaggagaatcgccgaggtgcccaagctcatgcgtcaccttggtgggatttcttcaatttttaactgatccgtcctctcgtagatgatgttgataactccatttttggtgccatttatgaaaacaagtcttttacttccaattccagccattcagcttaaaatgctccgagctatgttattgcaattcgg

SEQ ID NO: 52950 - DNA, 412 bp, Gossypium hirsutum
  Clone ID: uC-gsronu33B113f06b1
ctcaagctccggttgaaatcagggtcaacggtttcgatttcctctcaacaaaaacgaagcttcaaatccagatttctcagttttctcgagaaaatccgtcttcgccgtgagaggaaagggctaacgatccaacactcagatgttaaatcagtactgaatcgagtgaagcagttcgctgacagggtatttgaagtttttgctttgtcttatttttggtcaaactgtggttttaatcccattagtatactcaattttaagatttagtccctataatttgacataatttggctctactgattttcttttttatttggaaaaatgcgctattaataaaagccatagaataattgaaacaaaagggggaaaggaacatttgtttattgatgggctgataatactgtgaaatttttta

SEQ ID NO: 52951 - DNA, 134 bp, Gossypium hirsutum
  Clone ID: uC-gsronu33B113h02b1
tctatccttcggactgttaaaccttaccgaaggcccagggtcaatttaaaagctgaatcggtttcaaccgctggtgaaactcattgtccttaccctggatcccactctttatcatgatggaatgttccataacc

SEQ ID NO: 52952 - DNA, 251 bp, Gossypium hirsutum
  Clone ID: uC-gsronu33B113h03b1
tgtgcggtcttttggcatactaagcgtgatgaaagggcgaggaaggctttagcaggggtggcagcctgaaccccgttagaaccggtcctttaacagtgccgaaggtgatctatgagcaaggagtagaggctttgcccatagcattaaagacttgccccataacaagggtagagacctcgtagctcacgcatctaatgaatactactaacagttcgaagagagacttgataccgagacttaggatcgaaact

SEQ ID NO: 52953 - DNA, 124 bp, Gossypium hirsutum
  Clone ID: uC-gsronu33B113h07b1
gaattttgaacagcggccgctcaaagcttaccgatgccccaggtcttattttcatgctgactcgatttcaaccattgtctaactacattgacctaaccatgatccacctctcccccaagagaca

SEQ ID NO: 52954 - DNA, 462 bp, Gossypium hirsutum
  Clone ID: uC-gsronu33B114a07b1
tcattccgagttgagtcccggatttttaccatgcaggatgttttggatctgttttctttttcaggtctgaaaatgcgttaatcgaaccatcaatggtgatttctggggatggtagtagtaggtccaaatcgactatgtgggggtggttgttggtgggaattggatcacttgtattgctcggatttctcttcaccgctttcatctcccatcttcttccgccctcaaattatactctgattgctgccatccaaaatgacaggtattactgcttcttggtacccttaacacttcctgtacttgtggttgctgtatatttccattggcttagcatgaaattattcaggcatgcatgacttctgtagcatcaaccaatgtattcaataaacaaagaaatgatatttggaaatgagaggaaaactgaattagctgctttgtagtggctattttgaacatatgattaat

SEQ ID NO: 52955 - DNA, 458 bp, Gossypium hirsutum
  Clone ID: uC-gsronu33B114b08b1
tgtttccctgaaattttagaatggttccaagtgtgggaaaagcattatttttgtttttaacatgattgaagttaagaatcagagtacacctgttactctagagttatataatggaagtacaatttgcttatgatacagagtataaacatctatggacaaggttaaatcatgaattgatataatttcaattgatttttttccttctgtatgttcaagtttatgcaattaccgcttgtcaaatggtatcagttcccattcttttcaagcaatatgagtaattttaaggtttgatagtaataaattctgaggtatcagacttttttgtttgtggttaaagtggactgccaagttgttgatgccattcttctgttatactttgttgactcggtcaccatgttatataacattgttgcagctctgcagagacattatgcagtattgcaggctctagctttagc

SEQ ID NO: 52956 - DNA, 466 bp, Gossypium hirsutum
  Clone ID: uC-gsronu33B114b11b1
tgatatctgcagttgttaaagagttagaagacttgaagaaggttgttatgaaaggtgaaaatgaaggagaaataaaaaagggaacatttgatcccgaaaagcatattgatgcctacttgccggttcgagttaacgaacagagagtgagcaatcttttgcagtcactcctagttgctgcatcagtatgcgctatgcctgcaatcaagttgatacctacatcggttctttggggatatttctcgtacatggccattgatagtcttcccggtaatcagttctgggaaaggatgttacttctcttcatcacacctacccggcgatacaaggtgttggaacatgttcatgcttcattcgtggagtcagtaccgtaccgatttatggcaatgtttacactcttccagttcatatatctcctcatatgctttggtgtaacatggattcctatagctggaatcttgtttccatt

SEQ ID NO: 52957 - DNA, 261 bp, Gossypium hirsutum
  Clone ID: uC-gsronu33B114c01b1
ccctctcttccgcccacgcgtccggggaaagattggggtgtttggtcgagcaagggcctcgcggcgccgcggggttggggaccgggacggtggtggcggctgcggccgtgattgccgaggcccctttgtcggctcctgctgacccacctgcctctccctgcccctcctttgccttcttccatcccttttcacttgcttccccttttggcctattctatggcctgtccgacctttgctttttcagactccacttacccccca

SEQ ID NO: 52958 - DNA, 464 bp, Gossypium hirsutum
  Clone ID: uC-gsronu33B114c08b1
taattgagaaggctatggaagatcgattaatggggggctttattataacccttttggttttagcattaactgtggtcgttggctttctctttttccctcttggttttcagaaaacgcagacaccaaaaatagatagtaaaaaaaagtactttgcactttgaatttgataattgagagtcgtgaattctcctttttttacttgggttctttcactatcaaatcaaatcttaccctaaatgaggctaacacctgacacttaaaattacaaaactgtgttttttcttttcaaaagaaaaaacaatccaaattcaatgcatttgtacataaatgaaaactgagagacaagtggatgaataaacatcgttcaactttactctctttttaattcatgtttcccgcataaaatgacaaaaaagttaccgcttgaaatatgggcattatattgttgcaaatactaaggaaaa

SEQ ID NO: 52959 - DNA, 459 bp, Gossypium hirsutum
  Clone ID: uC-gsronu33B114d09b1
ttggtaatggacgggccgaatcggaaccacgggtgcgattaggtcttggaggagctgcaatcagatgcgaaggaaatggcagagaagattctagaatatagagctactattccagatcagcttaagacgactctcgattcaattctttccgctcaaagacccgatttgcccggcattgatgatgggtcggatcctggaccttcagcacaaaataatgcagattcaaaagagatgaaatcagatgacgaacaaagggcggaagagaagatacgatcacttaaaggcaaaatttcgagtaacatttcagcaatgccggttgttttgaaacggatgaaagtttgcatttccaggattgagaagctagagtcttgcaatggcattatacaccctgctttgaaaaagagaaaattagttgatccaatgaagctttattttcataattgacgaaatctagatttc

SEQ ID NO: 52960 - DNA, 467 bp, Gossypium hirsutum
  Clone ID: uC-gsronu33B114e08b1
ttcctcgcgtccggaagaagacaaggaatttgtcaagatctgcatgagttccataaagaaaggagacaaagggatggatctgctccaagaaatcctgcaacatctccgagatctgagagccgtcgaactccgaacaaggaccttgtgtggtgatgtgcaagggtgatcttaggcttgccatgcataaaaggaatcacctggacctagtaatttcatatatattcaagcgtctatagggaatatctccagattgatggggagattccttatcttccttccttttgggcttacaagaatgatgcaagttcccaaaataggaaggatctcctatttatctgccttatttacaaccaaaaaagaaagagtggaaaatgaaggaaaacataccatttacctgggttgttcatgtaaggtaagtacctagtaacatgtttttcttatttggttagatttcatttactcttttc

SEQ ID NO: 52961 - DNA, 320 bp, Gossypium hirsutum
  Clone ID: uC-gsronu33B114f11b1
tccctcgcgtccgcccacgcgtccacagacgggtgggtttactcagaagtttttctttgctttcaacgccgccaaacatatttttgatggacatgttgggatgaagagcaaccgcactaatactattccagagcaattattggagaacgtacctgttattggggatgcttaagaggctgaggaatctgcggaagtaggtacaaagcctttaagacaacattcatatgattaacccagacagaccttactggaaactgaaaagccagagggggacccagctggtggaaagtatccaaacatgctgagggtcattgtaaaag

SEQ ID NO: 52962 - DNA, 326 bp, Gossypium hirsutum
  Clone ID: uC-gsronu33B114f12b1
tccctctcgtccggccacgcgtccggaaagagaaggggtttaataaaaaatttcgcggcttacccaaccaaggaactgaagactgactagcgagcttgacgaataccaaacacccaagtgctccgggtacgattaaaaaaagattccttacccactccatttgcgcagcaaatgagggggggcccctctggacggccgcccggtgtaccgccgttgttagggccccagtggattactctctggacccccgaatgaaaggaggcggccaagagcatacccgccgaaaaccataatgcccgggaggaaccagggagcatactttagac

SEQ ID NO: 52963 - DNA, 479 bp, Gossypium hirsutum
  Clone ID: uC-gsronu33B114g01b1
cccacgcttccggccttcatgataattcaagattacgtgggttccctacgattactctagacctcaccggctcaccgtcctcctcctcgtcgttgaattatttcaacaggttccctaccaactgcccggcaacacccagatttccttcgacaaatctcaacttttcttcaccactagtatccaatgaatcattcacccaagaaaactacttttaccaacaatcattgacagacacgttaaccaaggcaatcacatcagaccctagtttcagatcattgatatctgctgccatttcatcattggttggccatagcagtgcaaagcatggagatggaaccgatcaaaaaggtgatagttttagtcagaatttgatgcaggcggccattaattctcaaagtttaaatgattcatcattacgtgggtcaagctacttcaaaggatttgaatcttcaagttctaggatcggaagttcaaatcag

SEQ ID NO: 52964 - DNA, 465 bp, Gossypium hirsutum
  Clone ID: uC-gsronu33B116a05b1
tctttctttacttccaaaaacatctctctctgccctttcgggctctcactcatctcttttctctccacaccccttcaaacaatgcctgctgattccggcgataggcgtcaggttgcagttccaggaactatggcgtcccacccaccacctaagctgacggagccacttccatgccctaggtgcgactccaccaacaccaagttctgctactacaacaactacaacctctctcagcctcgctacttctgcaaggcatgccgccgttactggactcaaggaggaactctccgtaacgtgccggtcggtggtgggacccgcaaggcttccaagcgctcacgttgttcttctggctcttctccttctgttgcagtttcttcttcctcgagcgtgacgcatgaagctgagtccgctcctatggttgttaaccctaccccccctatgcctggactcggaattaaacctgag

SEQ ID NO: 52965 - DNA, 467 bp, Gossypium hirsutum
  Clone ID: uC-gsronu33B116a06b1
cccactcgttcggcaatcgtgcaaggaatcaactgataactctaaggatgcatcttgtgttgcagaaagtcaggacactggttcatctacaacatcgtcgtcaagaatggtagcgcaagatctgaacgatggttaccaggtaactgaagctctacgagcacaaatggaagtgcaacgaagactgcatgaacagttggaggtacaacatcgccttcagcttcggattgaagcacaaagcaaatacctacagtcaatgctcgagaaagcctgcaaagctctgaccgatcaagatcaagctgcttccacaggtctggaagctgcaagagaagagctatcggaactggctattaaggtttccaatgattgtcaagggatgatccctcctcatgataaaataaaactgccttccttgtctgaacttgcagtagttttagagaacaacagaacttccaatatgccgggtcgga

SEQ ID NO: 52966 - DNA, 444 bp, Gossypium hirsutum
  Clone ID: uC-gsronu33B116a08b1
cccacgcgttcggtgagtgtatgtgtgtgtgaaagcttagtgaggtgaaagccgagctgtcattttgcatgttgtgagaaaaagggtatggcctgaagagctggagtgatccaacaaagattcctctgccagatgcataacattagtttattcagacaattagaactaggaagcccttttttttttgtcataatcaatggaaagaaagggtaaataaccctattttccttctggtcttttgcatcatattatcacctggtttgggtctactttttatttaggagggcaaagttgagttacatgtatactacatgcatccatctgtaagtatataaagtgattgttttgtattgctgtttatactgttttaagagctgtgctttactttgttgtatatacacgttctttgctctaaagtcttttaaaaagtataaaataagagtg

SEQ ID NO: 52967 - DNA, 303 bp, Gossypium hirsutum
  unsure (1)..(303): unsure at all n locations
  Clone ID: uC-gsronu33B116b02b1
aaatggggttttagaagggcacatagcgaattggaaagggaaacatgggaatactttcgtacacgaagaacagcaatgaaagaagaaggcactcaaataatcagtgtcattagcagccaattggatgctttaacgggctcatctttgggaaaacgtgtttttaagcttccaaaacctctgcattacaattctcaaaccccaacactttgacgttagatctggcgtcttttttttttttcttctgcttacagtttctggaaattttcaattaaacaacatggacgattggagactttcgggntt

SEQ ID NO: 52968 - DNA, 452 bp, Gossypium hirsutum
  Clone ID: uC-gsronu33B116c05b1
ccctttcgttcgcgacgttctttcgcttcaatttggggtggaggagatggaaatcagttgcagcttctgaaagttttaagctagcttgttcgaggattccgtcacgggaaccttggtttttcatggtggatcccaatcttaatcaatccgtagtcttcgactctgctgagagaagttggaagaaactcagtcatccgcctctcctctcgcagaactgtaactgcaactccattccggttgcagcagttggcggactcgtgtgtttccgcaatatgtccggcgattacttcgtatgcaatccggtaacaggatcatgtcgtgaactccctccggtgaatccggattctcaccatcgttcccttcatgctatagcaatgaatgcatattccaattatcatggctcctacaaactattcttagtctcgggtgatcttccgaagctttcatacaaa

SEQ ID NO: 52969 - DNA, 451 bp, Gossypium hirsutum
  Clone ID: uC-gsronu33B116d07b1
atcctgagtttcatgggaaaaaatagatgttagttttcagagcagtagacagagatttgctgctcatagtgttatacaggttctctctctttctggagttgataaaagtttatacgatcatatatgcagtcggaagttcttactaagcgaagttttgcaggttaaagatgaagttatgcatatagaaggtgcagatgtcatccaacatatgattgaccattttcttacgtgaaaccttatggtgtttgagatacacatcatacgagcaaagaagattaattcgctacctcaccgtatttgtcgactgctaagttattgctcgaattcccattggttaaagttgaatgatggatcagtactcacattggttggtaaagatggctatgacaagggcaattaagtcagcagttcattcattaattatctctagtttgcttcctaagaaggatga

SEQ ID NO: 52970 - DNA, 439 bp, Gossypium hirsutum
  Clone ID: uC-gsronu33B116e12b1
ggattttggaagcaaagacatgttggaatgtgtaggagaaaactatgtgatagggtgaggtggagctggcattgtgtacagaggaattatgccaaatggagagcaagtagcagtgaagaagctgttaggcatcagcaaagggtcttcgcatgataatggcctctcagcggaaatacagactttgggtaagattcgacacaggaatatcgtgcgcttgctgggattctgttccaataaagagatcaatttactaatatacgagtacatgccgaatggaagcttaggtgaggttcttcatggaaagggtggcggctacctcaggtgggatactaggctcaaaatagccatagaagctgccaaaggcctgtgctacctgcaccatgattgatcccctctcatactccatcgagatgtcaagtccaacaacattttactcaac

SEQ ID NO: 52971 - DNA, 376 bp, Gossypium hirsutum
  Clone ID: uC-gsronu33B116f11b1
gctcactccacccgccacgcgtgctgacacgcttgcactttgatggtctgtgtggggataaaactcctgtctgcagtatcggaggttgacgaccatccaaatctagggataagctgcagaacgatggatctagggtgattaagaaatgtctatcaaggagacagaatgtagcatctggctctagggatggtatatactatgtacttttagatgctaccaaacaacaatgatatgtaggtgcatgtgaaaagtctggatttaaatcggtcgattacatgctgtgggcatacaaacctctgaagggaaagcatgtagcgtttacaggctacatgaccattgaagaggctgacaaactcatacgctctgtgagtaatgg

SEQ ID NO: 52972 - DNA, 459 bp, Gossypium hirsutum
  Clone ID: uC-gsronu33B116g07b1
gcattcctcttgatctttcttcttccatggggaatccagtaaatttggaggactctagaggaaacatctcccaagtcagtctaaataataatgtcattcagaatattgattacacaacaaagcaacaatggggagatagcagacatgattacaacggcaatatgaataattcattcagccgaggagactccctggtccctgcaagtggacctatgatggaccaaagcaatctcatcagtgataaaatgaatgatgtttctttgttcagccaatttagtggtgacagtacttatgttgttccacaccttgatggtgagaaatcagctttcgacacaaaaccaagatccaatgaggactttctatttgagacaaagccacaaaacggcttcaatcaaaatagttttgaacctttggagaatataatgatgtccatgatcaaatcggatcaaaataatgaga

SEQ ID NO: 52973 - DNA, 246 bp, Gossypium hirsutum
  Clone ID: uC-gsronu33B116g12b1
tttaagatgtctcgagaccttagtgctcttcaagaggaggactattaattgatgatcgttgttcagattgaaagatccagaattgagaaagtgcaaaaagaggctgaagtcgtaagaaacgacttaagagatcttcatctggaaaataagaagttaagaggcacaataaaaaatagtgggctgggaaagtcgtcgacagactggaaagaagaaattagcaacattcaaggcgggatggaattttgg

SEQ ID NO: 52974 - DNA, 279 bp, Gossypium hirsutum
  unsure (1)..(279): unsure at all n locations
  Clone ID: uC-gsronu33B116h04b1
atttctgccaaaataatcccatggaacatcatcaacagcaaggtacatatagtggagatgaagacccaaataattctcaatgatgtggctagtaggcaaaaactgtaattcccatagttgagatgcttttgaatttttttttcccttcaagaaaatacatttagttttatggttnggacaaaattcaagttctggaacttattgaggaagctgaaaaaagttaagaagaacaaatggtcaagtacttgccatcaatgagatttttgagaagaaccctgg

SEQ ID NO: 52975 - DNA, 302 bp, Gossypium hirsutum
  Clone ID: uC-gsronu33B116h11b1
tctcttgctttctctggtgccctttattttcaggggaaggtgattgttaaccagggcatatgtgttccagacgaaattataatagatttactgtccaaacggtcttgaagcacgagaagctaatggtgaatcatggttcattcttgatggtctttctcgcacagtaagacaggcggaaatattaaagggggtgacagacattgacttactgattaacctgaaactatcggaagaagcattgtttgcataatggatagtaagaagaagctcccttgcgtgtggagggaactatgatgtgggct

SEQ ID NO: 52976 - DNA, 510 bp, Gossypium hirsutum
  Clone ID: uC-gsronu33B117a10b1
gttattgactctggtgatggtgtcactcatgtggttcctgttgttgatggcttttcatttccgcatctcactaaacggatgaatgtagcgggtcggcacataacatcctatcttgttgatttactctctcgtagggggtatgcaatgaatagaactgctgattttgagactgtcagggaaatcaaagagaaactctgctatataagttatgattacaaaagggaatatcaactgggacttgagaccaccatccttgttaagaattatactctgccagatggaagagttattaaagtaggcactgaaaggttccaggctcctgaggctcttttcactccggaacttattgatgttgaaggtgatggaatggctgacatggttttccgctgcattcaggagatggacatcgacaaccgcatgatgctctaccagcatatagttttaagtggagggagcaccatgtaccctggattacctagtcggctggagagggaaatcctagaacgatat

SEQ ID NO: 52977 - DNA, 480 bp, Gossypium hirsutum
  unsure (1)..(480): unsure at all n locations
  Clone ID: uC-gsronu33B117b06b1
aaacttaacccgtagacaacattcttgttacattgggactttttttcctgccaattcttacttgatctcaaagtttaggtactctcattagcaggaattggtctttagctgtaaaggtgatggtgttaatttccattttccatcatcattaattcactttgtaaagaaagaatttagacttaaaatgaaaaaaaaaattgtagactaatggtctgtgacataacagaggtaatgagttactcaaaaattacaaatcaagtactttgtctaacagatcatctgggaagaagggaagggaatgaaggcttagatttagagaatttaggaagtgtaggttcggtcaattgggtcagatgatgtggcatagaatgtctctttctttttttcttttgtactgtatttaccttgatgtgccatactntgagtgatggaactatgaaaagctttttggattaaacatgatcccttaccttctctttt

SEQ ID NO: 52978 - DNA, 337 bp, Gossypium hirsutum
  Clone ID: uC-gsronu33B117c05b1
cccattcgttcgggcggagaaacgcgccgttaacggcggagaatgctatgagagtgagggaagcgatgcgtggggttgcgttcgctggattgactcctgattgggccaatcaaattcccgaggaccggtggatcgatcagcttcggcggttgaggcaaccgcaacgcccttccagtacggtttaaaaccatctttcctagattttgggtcaatttcaatgcttttttttcctttttgaattttggacaaatctctggcaaattatagatctttatctgtccttttggcaaaacatcagcattaaagaacaattgctcagttggatcaattctgttcc

SEQ ID NO: 52979 - DNA, 355 bp, Gossypium hirsutum
  Clone ID: uC-gsronu33B117c11b1
ttttattacattttgctattctaggctttttagctaccaatcacctccaagttcctcactgaattttttttacctcgtgattttgatacacttgtgtttttcatgattgcattattgctataatcattttttttaaaaaaaaaaaaaaaaaaaagaaaaaaaaacataaacaaaaaaaaaaaaagaaaaaaaaaataaaaaaacaaaaactacctaaaaaaaaaaaaaaaaaaaatatatattataaaaggaaatcaataataaatacaaataaacggggggggcctctttatagaatcacataattcttccccggcctagcataatacaaacattttttttattgggccccaaa

SEQ ID NO: 52980 - DNA, 281 bp, Gossypium hirsutum
  Clone ID: uC-gsronu33B117d09b1
cccactcgtccgaggggagggtatgagcaaacaatctcttagtcagtagttatgtgttttgtatatggttgattatatcaagtgtggatagtgaggttttgaacactaagttctgtccatggatgctttgcctagcaacctaagtgatgtctattgatttagaacatcaaaaacaagttcatgcttttaaagaactgtctatgttatgtttcttattgtgactgcttttaagtgatttctggttaaatggtgaacttttaaatctttgtttatatattttt

SEQ ID NO: 52981 - DNA, 159 bp, Gossypium hirsutum
  Clone ID: uC-gsronu33B117e02b1
gttcatgctgtgattcttcttccacttcttttccaggcatggtgtttggggtttgttttgaagtcgcagccagagacgactctacccgtaccgtgctgtgctgtgctggtgactgtgtcaatggttaaacaatgaataatattatttgcaatgactgcg

SEQ ID NO: 52982 - DNA, 390 bp, Gossypium hirsutum
  Clone ID: uC-gsronu33B117f02b1
atgcattttatgtttgtaattgtattgatgagatgaaccgtaattttctttgagtttttttaattgcattttttttgcttaaaaaaaaaaaaaaaaaaaaaaaaaaaaaaaaaaaaaaaaaaaaaaaaaaaaaaaaaaaaaaaaaaaaaaaaaaagcaaaaaaaaaaaaaaaaaaaaaaaaaaaaaaagggggcggccgtttaaaagaaccaaagttaacgtccccgtgcatgcaacgtaaaagctttttaatagggccaccaaaattaaataaactggccgcggtttaaaaaagtcgaaactggaaaaaccctggtttaaccaaactaaatcgctttgaaaaaaaacccctttttccaaactgggaaaaaaccaaaaaggcccaaacca

SEQ ID NO: 52983 - DNA, 491 bp, Gossypium hirsutum
  Clone ID: uC-gsronu33B117f05b1
catttcttaattatggcttaccagttccagtgtgaaaatactagtggctcagtagaggcatcagagagaaatgttgcccacattggggctgataaactttgttaagcttggataggttggcaagttatctcgagatctgaaagcatcaaattgtcatggcttgctcacgactgcatgcttgattggcatgcacagttcaaattgactgtaaagaacgaggggttttctgttggtggtctgcaattgaatttgttcacaccaagtggctattgttctatggttgcaataagatcttttttggaatgagtgactaaggttggtttatctgaatatccaagatgattttatgtttggttgatttgttactcgaaatatttgtctgcctgccccgaaaaggattacacaagtcgagttaagagagacatttgagatcttatcatctataatggaggtgaggtgcctgtggtctgtgggtccttgcaaaccatcat

SEQ ID NO: 52984 - DNA, 382 bp, Gossypium hirsutum
  Clone ID: uC-gsronu33B117g12b1
accagccctacaagcgaggggccggatcgcgtggggggggactgagagatggagatggcttaaaagaagcatggttcccagctgatattatggattgaaaatatggccaagcttatgtgtgttacaacgagcttacatcagaggatggtgataagctaccggcctgggtcgaacttgaaggtgaagggtaaagactacccaggatccgtactggattgcctgccacagtgcatgcccttggacggaacaaggaagagatacaacacagctatagttgactataattcggactactgtggatagaggcgacacatggatacccgatagctgatgctaccgggttcacacttttgagcgccacacatcagaggcatcatggact

SEQ ID NO: 52985 - DNA, 165 bp, Gossypium hirsutum
  Clone ID: uC-gsronu33B121a06b1
agcagtccaggctttagattacccagaaacagagtggagaagagggggggggcagtttgaacttcgccgccgtttctttactgccaggaacaacaggactgtctccagcttgcaaggtcgtccagctagctccggaaagaacacgactgctcctaagcaaaattt

SEQ ID NO: 52986 - DNA, 188 bp, Gossypium hirsutum
  Clone ID: uC-gsronu33B121a08b1
tcgccctacgcgtccggtcaatggacaattaaaaaacaaatatggtagacgcatttattcgcgggaataacgtactttatataagcacatcaaagaggacattagctgatggtgcataatgtgttgagagttttaacttaaatttcaagaccaatgtgcccttttcctattctaagtttgtatgttga

SEQ ID NO: 52987 - DNA, 250 bp, Gossypium hirsutum
  Clone ID: uC-gsronu33B121a11b1
tttccggtatttcccttttcgtccctcagcagtctcggatgtctccaagctgcaggaaagaattgcaatggtgaagattagattatcagacagggttcatgagatccaggatttaaagatagctgtatttgttgctttgcagtagattttttttgttaatacgcttattacttttctaatttttatttattttatatgagttctttttctctccattttctgtctttttttttacttttatctttttatt

SEQ ID NO: 52988 - DNA, 222 bp, Gossypium hirsutum
  Clone ID: uC-gsronu33B121c01b1
atttttctgaaggaacggggtttgggaatagctaatactgtttctgcatctgcttcagcaacaactcttgcaagctcctcaaaatctgacccccatgggaagcgccccatgaagagttagttttttggacatttctgtatatttagatttatcttagatacaccgatattttatgaatatttccaatgacttctaaccaaattatgtcatctcattaaatgt

SEQ ID NO: 52989 - DNA, 168 bp, Gossypium hirsutum
  Clone ID: uC-gsronu33B121c03b1
gataattttaactttttcgccattgagaaagaattaaagctcgatgaagggtaccaaaagacatacaaaaacgtcgatgaactgctgcccactctccctcgaagtaaaggctggtggcttgaccagctttttcaataccaagggttctggttctcatcttacagtgtt

SEQ ID NO: 52990 - DNA, 157 bp, Gossypium hirsutum
  Clone ID: uC-gsronu33B121c06b1
agcagctcggtcttcgcaaactcagcacttagattagcatctatgctatctgatgatgagtctgcgaataccttcattacagaaagcaaagagctgctatcccatatacacaagtactccacttggatttttttttaagtccgattaagttgtttat

SEQ ID NO: 52991 - DNA, 266 bp, Gossypium hirsutum
  Clone ID: uC-gsronu33B121c09b1
tcgcagtccagcctacagcagtccagtagtttgggttagctagatggcaaaagctccttttttcctttcccccaaaactggtgagttaaaggctacacgttgattcttacacttttagaagcccctaatatccatagctacatgctattagtatcaaaatattatgaaatggttgccacagatccgtgaagaagcaactttgtgtttgatcctgttttagcgctgcattacttcttttttctacaatctcatcctcttatttctat

SEQ ID NO: 52992 - DNA, 174 bp, Gossypium hirsutum
  Clone ID: uC-gsronu33B121e08b1
tcggatcttcattcattgcagaagataatgcttggtgattcattctatttacattcaaccaaaaacccctaatgctacctactcagttcccgaccatgccaccaacacacccaccatttcatccttcatccaagccaccctacatcgagtcatgtggtattgctggtcgctgtc

SEQ ID NO: 52993 - DNA, 123 bp, Gossypium hirsutum
  Clone ID: uC-gsronu33B121f06b1
tcccatcagcagtccggctggtcttattattggtcatctagcgcctcttaggagggccacatccacctcacataagcttggctaacatggctgacaaatatggaagaatgttcgctatcaagt

SEQ ID NO: 52994 - DNA, 222 bp, Gossypium hirsutum
  Clone ID: uC-gsronu33B121g01b1
acctccttcaccaatccaccgatccatcgatccagtgtgtgttggtcacctccagctagcctcaagctcagctcaacttcttcatttttgtttcttcatttgcagtctcggtagcccattctcggtgctccccaaagtttggtccttactccttaggcctcactaaggctccccataggcctatgactgctggctggtgctgtcgaagactgctgctgtgcc

SEQ ID NO: 52995 - DNA, 198 bp, Gossypium hirsutum
  Clone ID: uC-gsronu33B121g03b1
cttaagctagctgctcttttggcctctcctcaatcaaagaaaaacaacaaatgaatccatttgcttctttcttgcttctcttatcttctctagcttttcttgcctccatcggtaatggccacgacagagcctccccttggcattgctcacgagaattcgtaggccctcctcccgtcggtcttcgatattttccacccc

SEQ ID NO: 52996 - DNA, 120 bp, Gossypium hirsutum
  Clone ID: uC-gsronu33B121h03b1
ctttatctgagcgacgaacactgcgccaagttttggaagatctgttatgaagctttgccagtcaactgcaaagcgatcgctgccgaatgcattcttcctgatttcccctatccttgtctt

SEQ ID NO: 52997 - DNA, 430 bp, Gossypium hirsutum
  unsure (1)..(430): unsure at all n locations
  Clone ID: uC-gsronu33B124a02b1
ctcattcactcatcataagggtgcttgttgaccgaggggaagttaaattcaagtcactgttgcactccgttgattctgtgctcacagaaggatatgctttgaaggtcgcgatggataaaatcaaaaaagatttgaaagatgttacggacaccatcccggatgtgcttcgacgggcggatgaccttgaccgtgaaacaatgatggattggcaagagattttgaagcggatgatggacacgctgtagcacatctgtggaattattttaaatattatttgacataaaaaatttagcggatttttttcaaccttagaaaaataacccataattcatttatgtattattttttacaagctttcagaaaatttggtggttatgtcttgagggattttatttcgggtttcagggtttagttttttcatnntcaaaaa

SEQ ID NO: 52998 - DNA, 499 bp, Gossypium hirsutum
  Clone ID: uC-gsronu33B124a04b1
gttattgtaaaatcttgaaaccgtagcggcaacagcactagcccagagatgtttggtggtattcaaagcacttgatcctttcttccctctgtcctcttccaccatttccaccgtttccaaattgttatccccgttttgcccccaatctgctcctgattccccaacatacccttcctccctcgacaaactcaccaataaaacccaaccccctttgccaccacctttcctcgacttcacaggacacagagtttgaccacccgaaaatcaagaaatcgaacacacattttcattttcatcaacaaaacatttctgggtctttactgaaatgaggacggaactgttttgttgctaagaaacaggccaccatgtcatgaggccctgatcaaccatttttgagcttccaaatgaagatatggaacttgagcttaaattcgagctttccaacgatgaagtcgcgccaaagaataatctgagatccatggctgccgctcaagctaga

SEQ ID NO: 52999 - DNA, 500 bp, Gossypium hirsutum
  Clone ID: uC-gsronu33B124b11b1
ttagccttcatttttatttttattttctccttctttcaccaaacaaaaacaacaatggcgatcagaaaatcatccaagctaccacaaaccgccgtcctcaaacaaatcctcaaacgatgttcgagtttaggcaagaaacaacacggcggtggctacgacgacgttggtctcacccctcccttagacgtacccaaaggtcacttcgccgtttacgtcggcgaaaacaggagcaggtacattgtacccatctcgttcttgactcaccccgagttccaatgcttactccgacgagccgaagaagagttcgggttcgatcacgatatgggactcactatcccttgtgaagaagtcgtttttcgatcacttacctccacgctccgatgaagttgaaaagtatagcacggcggcatcgtcattgtacggcgctaagcttttttttttacatcgatttttctggtttttttaatgatattctgaacccattaattgggtttttttta

SEQ ID NO: 53000 - DNA, 477 bp, Gossypium hirsutum
  Clone ID: uC-gsronu33B124c08b1
cccacgcgtccggaaaccgtttcacttgatggtcctatttcaactagaactgcccaaacatgtcaatctcctttagtacctcatgaatttgtctgcccaattatgttggaaatcatgacagatcctgttattgtagcaactggacagacttatgaaagagacagcattcggaagtggttaaattccaaccatcgaacctgtccaaagactggacaaactttagaacacttgtctctagcaccaaacttcgcactccgcaaccttattctgcaatggtgtgagaagaacaaccttgaactgcccaaaaaggataattatgcttcttcagttaattattctgcagaaatcatggaagaaatgtcttcattggttctaaacctatcttctagtcagccaaatgtgcgtagagatgccattgtgaagatccgtatgctttcgaaagagaatccggagaacagaattttcattgccaacgat

SEQ ID NO: 53001 - DNA, 459 bp, Gossypium hirsutum
  Clone ID: uC-gsronu33B124d04b1
catgagaaacaaacaaagccttagggtgggcttgaaccctctgattgttgatttttctccaattaaacggtggttttgataactgtgtactcgtttttccggttgcctcgttttagcaaaaataaattctaggtattggttccaattttcactccccccccggctcggattatagggataggacaattttcatctaggaatttttttgagaagaaaaagatgatgagaagacaacaacgaaatcagtgccaacaatcaaggtttttctacgagctgttggcgctggtcctaaatcttctacgattgcctacgatgccgcttcccttctctgaccaaccagccgccccggagaggattcctcttacgcgaacggcatctatgacgacgataccgacggcgggattcgcttggctgatgctaggaatatctatttcgttgatgctgtgtggatcagttact

SEQ ID NO: 53002 - DNA, 379 bp, Gossypium hirsutum
  Clone ID: uC-gsronu33B124d12b1
gtaatgaaggattttagatatccaaatgggactgtgtactggttttggggtcaaatctaaaattttgtttggtcgatcattatatatgttggcttatgaacccatttcatttattggtatcatatatgaacagaatattagttgctgattatcatgataatgggtcgattttaaacagatactatcaacatatatatgttacgatgtatggccccaagaatgccgttggtaccatcaagatggacatgaactttattaccttccaaatgctgactgccaaaaagctatctaggaagtaacactacacttaaatcctttttgctccttgtacggttatgggacacaatcatggattttcgattgtgatgatacactcatt

SEQ ID NO: 53003 - DNA, 499 bp, Gossypium hirsutum
  Clone ID: uC-gsronu33B124e03b1
ctttcctatttttcattttctgccctcaacttcatcttctcctacatttctttcttttccaaattgcagagattgaatgcaaaggaaccgatgggagaagaaaacaagaagattatgaaagaagaggtaattgcaaagctcaaggacgatggtgacttcgacaagctccgtctcaaaatcgtccgcaagcttaaggacaacgaacaaagtgatgggcaagatttcagatagtctctgggaaataataagattggaaggtagcacgagaattgaaattatagaaacagttgtttcccacagaaataataattagagtaaacttgcaagttgtttcccatagccattgtgatggtaatgctgcactataaatggattagtcgtgacccactgggacggtatacctctttctctgctctaatggcctttcctttctgttttcaattggggagggagccttttatctgctaattgtaataacccggtttcatattcctttttg

SEQ ID NO: 53004 - DNA, 250 bp, Gossypium hirsutum
  Clone ID: uC-gsronu33B124f02b1
tcccacttgtttcgccacacggtcgggaactaatgaatggctatgacaacgtagtataataaggagcgtatagtgatgaaattggagttggtcttgtatctacttgaacagtcatcctagatacaatgacaagcagctggtgctgccgttatctaaatcgtgtatatacgacactagtaggtatggatctctaaaggatccaatctaaaatgattcacggattcaattagaatctttcttactgtggaaa

SEQ ID NO: 53005 - DNA, 491 bp, Gossypium hirsutum
  Clone ID: uC-gsronu33B124f08b1
atttcattcgccccacggttgggaactaatgattggctctatatacaaagattttggatttgctcataatgatcaaattatatctggtcttgtttctacttttccagtcattctagatacaatttttaaatattggatctttcgttatttaaatcgtgtatctccgtcacttgtagttatttatcattcaatgaatgactgaaaaatgattcacggattcaattagaatctttcttactttcgagataagcaaagcatgcaaagtcgtacttactttactctttctacccatcaggagaatacaatttctcctctgtttcagtcattttttttttttttcagttttcagtaaaagtaaatagcagaatcgtggctagggaactatactagtgacctacctaattttattgtagaaattttcgggatcaatgattggaccatgcaaactagaaatactttttcttggataaaggaggagattactcgatcca

SEQ ID NO: 53006 - DNA, 477 bp, Gossypium hirsutum
  Clone ID: uC-gsronu33B124g12b1
tgtctaaatggctatgatcccgagtttatttgggggccgaaggagcagcgtcttggatcctttcgctcttgatgtatgggatcctttcaaggacttccctttcccttcttcactgacgacaggttccccagaaacctcggcttttgtcaatgcccgcatggactggaaggaaacccctgaagctcacgtctttaaggctgatcttccagggcttaagaaagaagaagttaaagtggaggttgaagatgacagggtgcttcaaatcagtggggagaggaaaatagaaaaggaagacaagaacgacacctggcaccgtgtggagcggagtagtgggaagttttcgaggaggtttaggttgcccgagaatgtgaagatggatcaagtcaaggcttcaatggaaaatggagttcttacggttaccgttcctaaggtggaagtgaagaaacctgacgtcaaagccattgagatatctggtta

SEQ ID NO: 53007 - DNA, 502 bp, Gossypium hirsutum
  Clone ID: uC-gsronu33B125a02b1
ctccgtttttttaaaaaaaaaaaaaagggagagaaaaacaggcgctcctttaaccgatctgcgacagaaagagcatagcaaagaagctaaagagtgaagcgaagaagacccaaaccggaccccaatgactcacctcttgggcattggctatgtttggctacatgttgggttgtttgctttttggtagaaaagtgtgatttaggctttgaaggatattttggtttcaagttggtgatttaggatgaataacactaacataccaaagagctttggggctccatcccagtttgggaatcccgggacggtgccaaaatcgcaatctattcccatgaacaatcaaccacagacacaaggtgggcctcagtttccgggccacttccaattgtctgagcctcaagcacaggtgcttgcgcgtgcacaatatgtgcaggctcaggctcctgctcattcccaattcccggcttaggtgcagtcacaaagcggtagtaatagtaatgctaca

SEQ ID NO: 53008 - DNA, 145 bp, Gossypium hirsutum
  Clone ID: uC-gsronu33B125a05b1
gtgactggtcgtctaagcttgagaagcaccgggtggaacagcaaaggcttctcgagcgagttcgggagctagcggcgcacaatgtttcactttagagagaagggtcttccttaaatgaaaaggacacagaaaacgaaagcatgat

SEQ ID NO: 53009 - DNA, 397 bp, Gossypium hirsutum
  Clone ID: uC-gsronu33B125b04b1
cccactcgtccgcccacgcgtccgtttggttttcagtatttgctcccatcaagaagaaatgggtttctggggaattgtaagaaaacctgcaaaaccacacccttatcattctgacaatgttcggggaaagcttaacattactcaggcaactttaggccttggatcatttaaagagaggtctgtacttcagtgatctgtcggacacaagagttcgatcatcctgtgttccttgttaccaactcagaatgagacttgcgccttatatcttaaatttgatgaagacgatgatttagctgatttctcagtacttggccctcaaagcatccacctctctggatactttgaggctggtcaccgagatcacctacgagatgaatgagcatgactcttatgggga

SEQ ID NO: 53010 - DNA, 422 bp, Gossypium hirsutum
  Clone ID: uC-gsronu33B125c05b1
cccacgtgttcgcccacgcgttcggcctgcacatttgatgtacgacggggaagacccaaggctgtttgagcacttctcggcggtggcgcagcggttgggagtgtacacggcggatgattatgcagatatattggaggcgttgataaaacggtgggggttggagaaaatggaggggttgacaggggaaggtaggagagcccacgattttgtatgtgggttagcgccgtggattaggaagttgcaggagagagctgaagacagggcttagaagaatggaccctaaggggtcaagtatacgttgatgtttaatagggagactatgttgtggctgttcatgtaccaaacatgtgcctggattgtttgattccccaaaccaacaggttatctttttttttttttggaaaattggaaatggtataccc

SEQ ID NO: 53011 - DNA, 366 bp, Gossypium hirsutum
  Clone ID: uC-gsronu33B125d12b1
cccacgcgtccgattatggggaaaagcatgagaagaagaagaagaactaatagatgactcaaacaccattaatggaagagtccctttgctacaaagccaacaaagttgaacaatgtagctgttttaccatggttcgatgcttcctcattcattgccatactaaaaaaagtttattgtgattctctaatcaaattcgatcaactttattcgataaactcatgtttaggctattaatatttatttcgggttttaaaaattattttgaagttacaaattaaacaaaatgccttaagttcaaaggattgattaaaaaaaaaaaatatttaaaaaaaaaaaaaaaaaaataaaatattttatatttttttt

SEQ ID NO: 53012 - DNA, 215 bp, Gossypium hirsutum
  Clone ID: uC-gsronu33B125e04b1
cccacgcgttcgtggacgcgtgggtcgcatggttggagtgtacggaggagaacactggtggggatgacgtggaggaggctcagaagctctgcggaagttgctggtgtctgttgcaggccaagagttgattcaattgcagcattcgagacctattctttatttctatattgatcagcttccccacttgccttagtagcctttactcccattcccca

SEQ ID NO: 53013 - DNA, 299 bp, Gossypium hirsutum
  Clone ID: uC-gsronu33B125f07b1
taatggaatgcttgataagtgtcaccattgtatgaaaatgaatgataatgaagacgtgtaattcatgccattgaaatgtgattataatgaaaacatgatcttttttgtatcttgtatgacataatgcatgtgcatggggtgggattgtggatgatggaggagtttcgtggagttatggtggcaggttaagactgcattaaaggtttctgcttcaatattcagttgtatttctttttggatttgaagaaatgtactttatggacaggttttccgatatatgagaagaaaatttttgttgg

SEQ ID NO: 53014 - DNA, 285 bp, Gossypium hirsutum
  Clone ID: uC-gsronu33B125f09b1
gcttgtaaaactcctccactggcgccaaacgagccagggtttgacagcataactggctgaatgcactatagagagccttggctggagtgcggcgaggccatctcatcatctgtagacatgggtctagaaaaccttgactgctacgcccaaaaccatgctggcgggtactacgccaactgagactacaaatcggctcgcgaaacagaggaagactgcgaactatgctactactgtatcaaaaagcacaaactgcacaagttactataggaagaagggctggacaag

SEQ ID NO: 53015 - DNA, 328 bp, Gossypium hirsutum
  Clone ID: uC-gsronu33B125g03b1
caaatgtataactgaagagagatttttcaatggaggatgtcaagcttctacgaattacttattgagatgatatgcgtaaatgcttttattttggatttatgttcaaatcatgttcatattcaagctgtttcataattgggccttttgaatgggagatcactttgagttagatcttttagggtttggaccgagctttcttttagattttgtgaaaaaaatataatccattccacatgtgtttcgggtttgagttatttggatttaggtttctgatttctttcaaaaaaaaataaaaaagaaataaaaaaaattggatacccttaatttg

SEQ ID NO: 53016 - DNA, 273 bp, Gossypium hirsutum
  Clone ID: uC-gsronu33B125g04b1
cccactcgttcgtggtcttttaggcttttttcgtttagtcattttcgtgaactgagatgtgggactttaggaaagaaagaacagatcgttgtctggttttttttttggggggttcaaggtttggaccttttatggtctggtaggggatactcggttctggtttaatcaaaaaaatgggggttggaatgagatgtgattaaaagaatctgtgaatgtgttactctatggggcatgaggttgtgacacaatttcatgataacagaaggcgaaatc

SEQ ID NO: 53017 - DNA, 317 bp, Gossypium hirsutum
  unsure (1)..(317): unsure at all n locations
  Clone ID: uC-gsronu33B125g05b1
ctattgaatatgctaagaagcataatgtgcctgggccagtgacaaagaaatcaatatacagcagagacaggaacttatggcacttgagccacgagggagatatcttggaggatccagcaaatgaaccgaaggaagatatgtacatgatgagtgttgacccgaaagatgctcccgataaacctcaatacgtgaaaattggaattgaatcacgcatccctgtttcacttgatggaaaaacttattcgccggctgaacttgttgctacactcaatgaaatnggggggaaacatgggatgggtcgtattgacatggttgaa

SEQ ID NO: 53018 - DNA, 516 bp, Gossypium hirsutum
  Clone ID: uC-gsronu33B125h03b1
gcgtttttggcaagctcaaccgtcttgttataccggggcaacatgccgagaagtgctggccactcgactcttcctcgatcgaaaaagggttgctattgaatttcgaagatcggaacggcaagacatggcggttccggcactcgtattggaatactagccagagttatgtgatgactcatgggtggagccgtttcctaaaggaaaaaaagctcggccacggcgatacggtatcgtttcaacgcggagtcggggagctggttaaagcacggttgtacatcgattggaaactacggcctaatgcgctcgatccgttaccgctcgcacatatggagctccgaaatcagttcaacttgcttcaaccgctccggagggaacccatatgtatgtcacgaaattatgaacctttacatgggttgaattacagcattgaccgttacaatcaccgtcatgaccatcactgtcaacaccagcaccagcagcaggcagttacttacagcagcttgtcacaccattatc

SEQ ID NO: 53019 - DNA, 261 bp, Gossypium hirsutum
  Clone ID: uC-gsronu33B125h04b1
ctcagccgtcgaacccgccacgctattcaccaaagactcgaacgctccgcttgaggccgccagtgacggcggagaagctatggccaggaaagaaggtttctctacatcaaggagccgcagctggaggtactgtcccggtaaggtatgtgaggccgcgaggtccggagagcttgacacgtcgatgctgatgtggaagagggactcggcggctgtctcgattgatgagatcggtgttggggtccagacggttctagatcgcga

SEQ ID NO: 53020 - DNA, 527 bp, Gossypium hirsutum
  Clone ID: uC-gsronu33B125h07b1
tttataagcctcccacaagctttcatcgaacgggggaccctcattttatcttgagggccgtctctctctctctctctctcagttctgctctctcgatcgagttatagttgtatatgtattctatggtgacggtctagcatgtccaacgatctggtatctcagcagttgtcgatgcctggtaaccaaatggctcggctagaatcaatttccaactaagatcaggcttgagctgaattggacagctcagcttactgatctccaggaaagtttacagattgcatggcgatggcaaaaggcacatcgtgatggatacgcagcagcctcttaggtgatggttacctctctagagtctactcacaactattttatttgttatggcaattggcatattgaagactacccctaggtggcttcaattttaagctgtttatggaggggagggaaaatggagatgaaaattcactttttcagtacttggctagtgatctatctctattttagagagcgagagagagagagagagagag

SEQ ID NO: 53021 - DNA, 353 bp, Gossypium hirsutum
  Clone ID: uC-gsronu33B125h12b1
gcgcaccaaggcacactgacaacataaaacagaccactgaatttatttcttgtaaaaagcagttaacaggaaaagaaaagaaaaaaggaccaggaagagaaggaaaaagctttttattgtaatatgtggtgcaacgaaaagagcatcagcacataagcttctcaacagatgtaacttacctgaagttcaaagatcaagggtaaccatcatgtgccctaacgttgcatcacaatttaaattacagacttcaataatctcccctatcgcaaccacctaaaataaaattaaaactggccccaaataaccatgacaaaaaaagaatgtattactggtacacacacacacatgggtag

SEQ ID NO: 53022 - DNA, 536 bp, Gossypium hirsutum
  unsure (1)..(536): unsure at all n locations
  Clone ID: uC-gsronu33B126a01b1
ctctttatgagagatccaggcatgcttcagatggggcggtgttgagtgatgaccgacttaaattttaatctgagaattgaaccttttttctctacgtaaagatttatgattttgctttatcagatgagctagggagctaaaaggcctcagccaagaccggagaggcccagtaccatacatggggtattggaaaagctcataaaccatacatggggtattggaaaagctcatacaccatacatgaatggtgtgactacttgatgctattgagctgtgtttgattgcagtcacagaaaaggtccaagcctccatgtgataatccaaaatcatcagaaaaaaaagttggctaccctgtatttatatcaaagagagcttgttagtgccgattataattgtgagcttcaacgctggtacgtcagtgcagactttacatgcgagaatcaagccaagtaaagattggttcaatacaatcaaaggtctcttaaaagaagattngatctttaaggaatttgatgacaaggagacgttttagtggg

SEQ ID NO: 53023 - DNA, 129 bp, Gossypium hirsutum
  Clone ID: uC-gsronu33B126a05b1
ttcacgtactgaacatattggcgatcaatagagtcacctaactttaatgactggccgttaatttacaacggggagattggaaaaaccccagacttccctaatttaatcagcttgcaaccatcccccttt

SEQ ID NO: 53024 - DNA, 243 bp, Gossypium hirsutum
  Clone ID: uC-gsronu33B126b04b1
tcggcctcgcgttcgccgtgatcggtaagggcgcacggaacaagcagggcagtcatgacgtgcatggcgcgccgctgggcgccgagaaagcgaggagaaataaaatagagaaaaaaagaatgacaagataaaaaaaaaaaaaaagaacgcctagaaaaatagatattaaagagggcagcacgaacaataggaataacactaacatacctggacactcaagcttacatgaattcaattttgata

SEQ ID NO: 53025 - DNA, 461 bp, Gossypium hirsutum
  unsure (1)..(461): unsure at all n locations
  Clone ID: uC-gsronu33B126c08b1
gtataagcgaagagaggaagtttgcagccaaagaaaaaattgcgattgaatcgacggcagagcacagcaacaacagcagaacatccggccatgttaagccatcccttaatcagccattacttcatcactccaccgaaaatgtgtgactccaaaagccctttttaactttttaacaacaaatgggccaggcactaccattatgtcaccaagtttgtgtgtttatgaatgtgtttcttttttgttaatggctgctttctttctccaagtagtagagagggcttaaaggagaagcttttctgaagtgatgatgatgatcccatatgcttttttgtatgtcgatttcttggtttgattttgagattttccttcttttaaatgcaaatgtatggagttaatggtgaaaatcattatgatgtatgatggcaaaagacatgctctctttttttctctattaaaanaaa

SEQ ID NO: 53026 - DNA, 261 bp, Gossypium hirsutum
  unsure (1)..(261): unsure at all n locations
  Clone ID: uC-gsronu33B126d02b1
atacaaaccaaaaaaggcacggcaacatangggagattttaagaaaattagggttttcccaccccaaagggaagcatttcttatcaccaaacgcataattaattgatgccacgctagtcctggtgagtgggtccggaactctacatatccgcctgggttcttcatggaaggagtttgcaccctctcgggctggcgaatagcctttatgaccccggtctttggattaccatcaacgaaaaaaggggaaggaccttggggttc

SEQ ID NO: 53027 - DNA, 576 bp, Gossypium hirsutum
  unsure (1)..(576): unsure at all n locations
  Clone ID: uC-gsronu33B126d08b1
gtggtagcactatttggtctggctttataccatgggaaccgtcaaagggtcattgatgctggcactatcccgttgctcctccatattatagcgtcttcgaataaagacgagctcattgtggattcgttagcgcttttggcaacgttagccgagtgtctcgacggaacgttagcgatcctccaggcctcctcgtttcctttaataacccgaatcttgcaatctacaacatctcaagcggggaaagagcattgtgtttcaatcttcttgtcttgttgcactaatggcggtgacgaggccgttgccgtattggctaaggatacttcggtgatgagctcgttgtactcggttacgacggacggtacggctcaggcaagtaaaaaggctcggtcgttgataaagatgcttcataaattccatgaaacaagctcgtctggacagggtgtcaagcatttacgaatgaacaatcagttcatgtttggtagtatagtaaaatttatttgctgcatgtaaatatatatacttaantaagattngaatttcgagacattagctcagttttggaggagctaatgacta

SEQ ID NO: 53028 - DNA, 210 bp, Gossypium hirsutum
  Clone ID: uC-gsronu33B126e02b1
cttttgcgtccgcagcagccgaggccaatatgtggggtgatccagatgctgcagatattgtgttcacaagtggagcagatgttttggctgtagggataaatgtaactcatcaagtaattttgacagattctgaccgagaaacattgttataatttttcagttttccttattcctggatttgatttcatttgattaacccagactttcctt

SEQ ID NO: 53029 - DNA, 399 bp, Gossypium hirsutum
  Clone ID: uC-gsronu33B126f10b1
cttccaggctttgcacctgttgtccctcaagagtgtagtgactgtgggaagaaatttaacatgggcggacctatatggtctgctcccatccatgatcaggattgggtaactagcatactagcagatgtaaaatcaatgaagaattgttatccggcctatgaacgcatctctgctgtattgactacaatttcggaggagttgcctgatgttcctctctttttgagtctgcacaacctctgtgctacactaaaatgcacttccccgtctgcagttattttccgctccgctgtcatcaatgcaggatatcaaatttgtggaactcatgtaaatccattgggactaaaatcagatgctcccatggatgtcatttgggacataatgcgctgctgggttaaaaat

SEQ ID NO: 53030 - DNA, 334 bp, Gossypium hirsutum
  Clone ID: uC-gsronu33B126g07b1
gtttggcacgcgcacttggtgatattgcggggggggagataaggacatgttactggataacaacctgttacgtccactacaatggttgcgttcaatatgggctcggtggggctggatatgcaccacgtaagactggaaggtggctacattggtggcaatgatctgtgcatggagaggtgggtcaggtcaacgcgataagagagtgggtacaactgagtcgagccggaaatgcccttatgctcttctaaggggagacagcctcgctactgtgagcgtgtgaagagcttatgtgcgaactacgtgaggttgccaggctatgtgtagatgggaaggg

SEQ ID NO: 53031 - DNA, 324 bp, Gossypium hirsutum
  Clone ID: uC-gsronu33B126g10b1
ttttcacgtacgccttatcttgagagttttaggtgatattactatcatgggtgtccatgctctgaattagctgccagtcattgaagtaccatcatctgctgtgacgcgagaaaccgattgatggctgcaatagagctaaaaggctgaagttgctcgtgagaacgccggttgatttgaggagcttgatgttacgatatactctaacgtgcgtgactatagtttcgggttgactaactaagtgtttgacgatcctgtgcttaggaatcaaacgatcactgatgccatgccttatcaagggtgagttgtcccatgcgagcaactttt

SEQ ID NO: 53032 - DNA, 334 bp, Gossypium hirsutum
  Clone ID: uC-gsronu33B126g11b1
tcttcgcgttcgtttaaagcttagagacatagggtatagtaacattagattcgtgggtgttgcgagttatgagtttgaggtaacctacccaattgctacagtcaggcgttttaacggcttgtgttcttgaggctgccaaaatttgtgccacggatgaccctcatgcagtcaagagtgttgagctcgtaggtgattctagttctggaagtcatggaaagatcacctgagtcgaaggcctcttatacgaatatatgaagcatcagattggaggtcacgacgaaaacaacttttattacacctacagtatgattgaaggtggaccttttgtggacaa

SEQ ID NO: 53033 - DNA, 445 bp, Gossypium hirsutum
  Clone ID: uC-gsronu33B126g12b1
tttacgcgtccgctttgagtttagagctttggggggctttatcacgggattgggggtcgagaagaagcggggactgaccttacttggaactctggtttctcttgttaccgctatggccgacctatctataactacctaaaatactctcacggagatattccttgggttcaagcgtattgatggcttcaaagcggattttgaaagaacttaaggattcgctgcaggatacaccaacttcctgtattgcaggtactggcgcgagagacatgcttcattggccagcaacaattatgagaccgtccgatagctttatcgcaggatgtgtgttttctgttgatattcattttcctccggaatatccattcaagacacctaaggttgcattttggaccgaggtgttccattcaaacacgagcagacatgggtgcatgggttttgagatcct

SEQ ID NO: 53034 - DNA, 338 bp, Gossypium hirsutum
  Clone ID: uC-gsronu33B126h09b1
gttagcggtctgcatgatcttcaactcaacgggggatactgaagtgtaggaggggattgatcataaatttgatctcatgaatgccaaacgagcatttgtgcactgacatgacgttgagggcatgcaggaaggagagtattccgatgcacgtgaagaactcggtgccctggaaaacagatcatgacgaacgtggcgctcagtctggtgaaagagacgaacgggacgaggaggagtattgagggatggaccgctatccagatggtactgcaatgtatcatgttgtcgagcttggatgtgacggttcagggctcggataccggggataatgaactagtata

SEQ ID NO: 53035 - DNA, 555 bp, Gossypium hirsutum
  Clone ID: uC-gsronu33B127a07b1
tctttttacgcgtccgcacaatttaattttcaggggagccctaactctgaatgtgggtgttatctaattttcttccttgcccatctctttgttttcccaaaaacacagtagtttttctccctttttttatttctgagttttcctgcaattttcccaaggagtttgattggtaactcaagagacatggttcaactcaaggaatttcgcattgtcatgcctatgtctttggaagagtatcaggtagctcaaatgtacatggcaatgaagatgcagcagcagagtacaaatggggatgaaggtgttgaagtcttggagaacaagcgttttcaagatgatgtatttggtaaaggtcaattcacatctaaagtatatcgtttacaaagcaaagcacctgcttggcttacaactattgcaccgaaagatgctcttgtaatgcaagatgaagcatggaatgcatacccaagatgtaaaacagtgatcaagtgcccatactttaccaagttctctctcacaattgagactgtccatagggcagacaatggcacatcggaaaat

SEQ ID NO: 53036 - DNA, 377 bp, Gossypium hirsutum
  Clone ID: uC-gsronu33B127b01b1
tttattctaaacgtcacaacaaaacgaataaagtgggggtctataaagggaaaggacggaggctgtcctcttaatcatcagttcaaactatgggatgttggcaaggggttcgatttgctgttcggcaaatgcaaactgatatgaatggccaacaccagacctgactcacgtcatgccgtgatctccacctactggtatctctacttgtcctatttacaaataccttgttacggatttgccgttgcaaagtcaaggctggacaatcatacttgtgtcacacccggtaggggctcatgtacaagaggtcccatgctggcgactcaaaatgatccagatgctattgggggcaccatacctccagcgtatcggactatgcc

SEQ ID NO: 53037 - DNA, 431 bp, Gossypium hirsutum
  Clone ID: uC-gsronu33B127d03b1
tttcattcgtccgcccacgcgtccgggagtatgtatgtatgtatgtatgtatgatatttgattcctgtttgactcaagttgagacggtcatgtaagagagacagagagcaagtgtagttttccaatctttcttgaggcatagagattgaggaagaacctgcctattgaaaaaaaaacaaaaaaaaaatttgataatataaaaaaaaaaaaaaataaaaataaataaaaaataaacaaaaactagccaataaaatagactagtttgtgcaagcttaaataaaaaaaaaataatggggggggcctttttaggggttcaaagttaattgccggggaaatgcagcctattattttttttttagtgcccataatattactgaccttggggtttttttataactttattgcggggaaaaacctgggggttccccaat

SEQ ID NO: 53038 - DNA, 412 bp, Gossypium hirsutum
  Clone ID: uC-gsronu33B127d12b1
cttacgcgtgggcggacgcgtgggcggacgcgtgggctgccttcttcagtgtctggaaacggtatggtttcactccggagggttttaatcttgctacacttagtgttcagcatgggcaaaagagttatcctttgcgtccagagttaatagaaagcacgtattggctctacaaagctaccagaaatcccagatatctggatgccggacgagacatagttgctagcttgcaatatggggcaaggtgtccatgcggttattgtcatatatcggatgtcgagtttcacaagagggaggatcacatggaaagctttttcctggcggaaacagtgaaatatttgtggctccttttcgatttggctgtgggtccggacaacctttgtgaaaatggaccatacaagtacatatttagcac

SEQ ID NO: 53039 - DNA, 367 bp, Gossypium hirsutum
  Clone ID: uC-gsronu33B127f01b1
ctttgtgtcagctcattgatcacagatttggagaaggacttttcatgagctgcagccactcttactcctattgaaggaattgagatttttgaaatcaaatgggaaagcttacagccaaatcccactatgaaagtctgaggaatgctcgcattgtagataacccagctctattagcctctctgggagtgcacaaaaccatgttcgacctaaggtccatgctttatttgaaaaacctaaggttcgcacatggcataacaaggatagcgtgctcacgtaccattcccggtatactcgtttcaaggcagccactctttcatcatgtctcggcagcggaggtttgtacagatacaaccggcttatgggaaaa

SEQ ID NO: 53040 - DNA, 467 bp, Gossypium hirsutum
  Clone ID: uC-gsronu33B127f02b1
cccattcgtccggaggaggtgttggtgattgagaagatcgaatttgaccgacatcaagtggtgaaatttgatgtgtacattaacgatgaagatgacacggtgatcggaccagacaacaccgaattcgcggggagtttcgtcaatgtgccgcataaacataagcatgggaagaaaatggcaacatttttgaggttagggttgacggatttgctggaggaattggatgctgaggatgatgatggtgttgtggtcactttggtgcctaaatttggtaagggtttagctaagattggtggcatcaaaattgagtttggtcgagattgatctactagtttcatgtttttttagacaaaattattaattgtctaatgttttgcttgtttattgagaagtactattactatcttttgttttagcaataaaaaacaatgagcattactttaaaaaaaaaaaaaaagggcgggcgg

SEQ ID NO: 53041 - DNA, 546 bp, Gossypium hirsutum
  Clone ID: uC-gsronu33B127f12b1
ctctatttcgccagtatcctggaccttggcaggggatgcttaagcaagcagatggttcttatgcttgtgtagctgagagttcaactcgtttcactctaggagaggtatttaccttggctcttggtcgttttgaattacattctttccaatgacttgtatgattcgatttggtctagaccaaggaagaattgctgcgggtcctcggattgcaagaggaacaaggaagtcaactagaatttcttcgtagaggctacaaggtttttatctattctattttctcttttacattaccatgtttcgtttgagattcttaaatcgaatgctcatagcaatatcctccattcctccctgaacaaagttccaacttttttcttccttccggttttacatgttctggccatacgataacatttcagcttggtattctcagaaaacatgttctggccatacgataacatttcagcttggtattctcagaaataggagggcattctgcattggatattctaaatacacataattcatgaaacttaaggaaaaagatga

SEQ ID NO: 53042 - DNA, 239 bp, Gossypium hirsutum
  Clone ID: uC-gsronu33B127g03b1
cctctatatactcagcaatcatggagttgatagggcgtgggggcttttacaatttgagggccttgaaaccttccaattggatgctccccaccatatctcacaatcattcatggttccgatatggccgattatgaacctttaactaggtgcttaacatggcttaaccaaagcctctatgggatagaacgaacaggttcaaaaaaaggtcagacccatgggatggcggagacgatgaaaga

SEQ ID NO: 53043 - DNA, 519 bp, Gossypium hirsutum
  Clone ID: uC-gsronu33B129b05b1
agaggatgcaattgtaaaagatcaagttgcttaaagaaatactgcgagtgttttcaggctggcgttggatgctccctcagttgtagatgtgaaggttgtaaaaatagttttggtcggaaagatggaggttgtgaatctgaatctgatggggacaacttagaggcgtgcgaaaaaaatgcatcagagaaaagctcacacgacactgtaatcagtaaaggtcaagagcatccaaacctttcagtgccttctcctgatatttcaaggctgccatttgcatacactgggaagcttgcagcattttttccccattccattaagtcatctcctcagttgtgcagtactcaagaacaaggttcatcagatacttcgtcatgtaagcccaagttggagtctaatcttgatggaattccagaaaatggaactcctgagattcccaaacataaatgcttcacacttgtttcaaatccaacatctcccaactgtaaaagagttttttcaactccaaatcatgattccact

SEQ ID NO: 53044 - DNA, 562 bp, Gossypium hirsutum
  Clone ID: uC-gsronu33B129c03b1
gcaaaacgtagaccccaaagctcacgtcctatcttccaattccaattcagtccaatgcttgctgttctttgcttcatcgtctctggtttcgttttagtaccccaattttgttaatcgatcaaggatgggctcatccaccgcatttccatcgtctcggttcatcgcatctgaacgcccctcctttcttccacgccgtagcagctgcttctcctccttcacatctccaacttcatttgtctcttatcgcagatcctccaactcccgaattctgcatatctctgcttctcttctgcactcaaacgttgacgtttcctggttccctcccgaccccaattctctacctaacaactatgggggttgggccgttgttcaagctcctctgactcccaaaacaaataaaaaaggattgtcttctatttttgttgggagtcttattgggtcttcacttgccattgcaatttccatttcataacttgtattctacaaaaaagggtttaagtttcagttcaggggttcattgaatactttttacgaggttcttagctggagagaaacacgagat

SEQ ID NO: 53045 - DNA, 566 bp, Gossypium hirsutum
  Clone ID: uC-gsronu33B129c09b1
cggatactagcaagtttgaagattttgtcgataaaaatctcaggggagagttttctgaatccatggcatctaagctggggaaaattgcacttaattgcaccaatgaagaacctaatgacagaccaagcatggaaacaattattaaagagctaaatgattacagtgtcagttcttgatgggggcattatcttttaccccaacttgagaaactgacgatgatgatgatggggtcaaagagattgctgaaacttgatttttgttggtggttgtagatctttttgtcgagtactatgatgatttgaagtatgaaaagatgacaatatcgtgtaaagtggagttgcagataggagtttcctcactgatgactagcaaacaaaagaagtacggagaaatattgggagaaataactttctaatcatacaatttgatacatagattttaattcgtacctccacatgcattgagccagcaaaacgagccaagctagttgacattaaggttaatagcatgtctcttggagaacatcatccccttaatgcttttattttctttagtgaggagaaaac

SEQ ID NO: 53046 - DNA, 549 bp, Gossypium hirsutum
  Clone ID: uC-gsronu33B129c12b1
ttttataataggaatgatattaacaggattttgggggctaaagcttcttgcatttgattcaaggattccgcttgtcgttgctttggttatatggtgtctaagaagaagtatattttcaccattgatgatgactgttttgttgctaatgacccatctggtaaagcaatcaatgcacttgagcaacacatcaagaacctattatccccatccacacccttcttcttcaacaccttatacgatcccttcagagacggtgctgattttgttcgtggctaccctttcagtctccgcgagggtgttcccactgccgtctctcatggcctatggctaaacatcccagattacgacgcaccaactcaacttgtcaagcctctcgagaggaacactaggtttgttgacgcagtcttgacaattccaaagggtactttgttccctatgtgcggaatgaacttggcatttgaccgtgagctcattggtcctgcaatgtactttggacttatgggagacggtcaacctaatcggccgttatgatgacatgtgggcttggtt

SEQ ID NO: 53047 - DNA, 507 bp, Gossypium hirsutum
  Clone ID: uC-gsronu33B129d03b1
aaaaaaaataaaaaaaaaaaaaaaaaaaaaaaaaaaaaaaaaaaaaggtggcgcgctctatagggtacaaaagttcacacacgcgcatgcgagacgatatatcttttatatagtgacacaaaaacaaaatacagtgcgcggttttacacaacgttgagtgtgaaaaaaccgtggtgacccaaaaaaaaaatcgttttggaacatatccctttttccaaagtttgtaaaaatagaaaaaggcccccccgtatccctttttaaaaaatgtgcaaaacttaaatggaaaagggaaccccccctttcgcggcatattaagccgcgggggtggggggtttccccccagtgagacctttacttgttagagcgccataaaaccccgcctctttgtatttttccccctctttttttcgccacgttgcggcggtttttccccctcaaaattttaaaaaaagggggcgcctttttgggggcccccatataaaaagttttttggcgccccttctcccc

SEQ ID NO: 53048 - DNA, 581 bp, Gossypium hirsutum
  unsure (1)..(581): unsure at all n locations
  Clone ID: uC-gsronu33B129f01b1
cccacgcgtccgagctactcgtttgaaatttatactagtactaccctttacaaagttccctgagaaaagacttgggaccaatttacaagatcattggagaaagacctaaatcaactcacgccctcaaaaactaggacacgtgatctaatacaaagccagttagttcatctataatatacctatagtagccgagcagatggctattgctgtacatctaaggaccactatgcatgtggatcttgcttcttgctttgctaattttggttttacagcactctacttaatagtactcaatcgtcagaagaatcgatactggataagaacaattatgattcaaatatcaaagtcactggcgatccacatcatagaatccacagttcctttttctatttcgcataatattatataactagtgctagaagaagaagaagaaaaaaactccattagtttcctttgtaggagcgtcaaaggaatgcctcgtcttcatgttttaaggtggtagaggagcaacgcttcaagcttcgcangacattagagatgttgggatataaggcttgacgaagtttattgtatttttcgat

SEQ ID NO: 53049 - DNA, 579 bp, Gossypium hirsutum
  Clone ID: uC-gsronu33B129f02b1
caaaattatacctagattttcatttcgcttccaatcacataaaggactttcttggcctgctacttcagataatgaaaatgaggtgtcaactaaggctggtgaaatgccagaaagattgaaggccagtgatcatggaaccttatagcattcaatagctgaggttcttgaagatttcaatggagaagaggaaaaccagttagagattgttcctgctgatgtagaagctcatggtcatggatttattgagcattcaatggctgagcttttagatgaccttcaagataataccagtctgctaagagggaattttaaaatgcatagcagggcaagaggaaaaagggtacaagctgctctcaaaagaagtatatgttcactcggtgatagaaccattgaaagtgaagacctcaatgagcccttcagtggtgggtcatcaagcaatgatgaggctgattaccaaaatctaaaacttgctacccctaagataaagaagccaactatttcagataagtttcaggaagccttgggtgccaccttcttgactgttgaagcatctttattcctagaccaggagcattcact

SEQ ID NO: 53050 - DNA, 356 bp, Gossypium hirsutum
  Clone ID: uC-gsronu33B129f03b1
gtatgtcttaaaaatatagtaacaataaatttttcctcatcagatttttggtcccaaaaccactgttctgactaggccctaaatataatgttacaagtgcaccttctaatggtctcctacacactcacaaagtgcgttagctcacccttaggcctcattcggcctctaaggtcaataaaagactcattttcacattttattgaatgtaaataaaactatgaaaacttaactttacataacgaaaatgcttatattcaagctccttaaatgtgaaaactagttgaatctgctaaaccaaattacgacatatcaaactcctccacacttaagttattgcttgtcctcaagcaacatat

SEQ ID NO: 53051 - DNA, 573 bp, Gossypium hirsutum
  unsure (1)..(573): unsure at all n locations
  Clone ID: uC-gsronu33B129f05b1
cccacgcgtccgattaactttagtaaaccgactgattcagacacgaagtcgaaagaatttagtaatcggaattccttctgaacttactttcttcagtgaaaggaataataagtgattagtgatgacataaatagttgaaggaataatatttgaaaggtaagacattgagtgtgacagttatggctgaacagattttgacagtctcttttgaggtattctatatgtgtaattgttcttgagattgttcctatgaccttcactcttctgataaaacctttgttttatggaaatattttctaatcatgatgtatagaaaaaagtattagtagttcaactagtatatataatctgtattgcttcattcccctctgacattctattgtgtttcatctattgaaactttatgaaaaagtacacatgatgatataactctgtttcttctagttgatgttctattcgatatgtatatatatgggaaggtatatcattctttntgcatttacttccagtgggttggatggatgtattctttcagacttcttttctctgaggaattatcgagatccttcatat

SEQ ID NO: 53052 - DNA, 532 bp, Gossypium hirsutum
  Clone ID: uC-gsronu33B129f07b1
cccacgcgtccggaaatttcgttaaacgctacgctccaaaaaatatcaccgccgcgccatggcggcgactgcatcatctccgtgggggaaacccggcgcatggtctgttgacgccgaagaaaatgaagcggaagtcgagcgacaacaaagcggcgccggttcctcaaccgaaaagctcggggatttcccttccttagccaccgctgtcaccaccaccaaggcgaataaaaagaagggtcaaaccctatctctctccgagtttgcttctaagcccagtgagccagcccgactcactcgcgaggatctcctcgcactccccactggccctcgacaacgttccgctgaggaactcgatcgcaaccgattaggtggtggttttaaatcttatggttcgaataggtatggttcggatggcgatgattcttcgagtaatagtagatggggattgaataaagatagagaaactgcttcctcacgcgccgatgagattgacgattgggcttcggctaagaaatcgacttccgccgcaaac

SEQ ID NO: 53053 - DNA, 427 bp, Gossypium hirsutum
  Clone ID: uC-gsronu33B129g05b1
cccactcgtccggaaaagtacaagtgggatgcatggaaggctgttgaagggaaatcaaacgaggtcttcctatagttctgaatgatttcattgctgggcaggaagtcggcaatgttccatttgtggtggaaaatggatgtgggaaattttcaaagtcaccaaaagaaatagccaatatcataagccagtggtttggtcccaaagcagatgaactcaagtccatgtctgaaaatgctttaaggctggctaggcctgaggcagtattcaagattgtccacgatctccatcagctggtcagacagagaaattttgtaccccaattttcttgtacaacttaggtccactagaaaaactaaacaaagaaatagattttctaacgattttcccctttttgatttcattatcaattaccttgttttcttatttc

SEQ ID NO: 53054 - DNA, 252 bp, Gossypium hirsutum
  unsure (1)..(252): unsure at all n locations
  Clone ID: uC-gsronu33B129g08b1
attttgcaaatctttgaattcctccatggccagaaaggcaaagttaagctcctctgactcagaacccccgaaaatagcgtcggaacctcaaccggtccaagaaaaacagcggcaacaacctgtatacatacccgaagatccgaacccgaatccaaacgtggacgaagaacagcaaatactanaagtggaagaggaaatcgaagaagaagtagaagtagaagaggaatttgaagaggaggaggaggaggagga

SEQ ID NO: 53055 - DNA, 362 bp, Gossypium hirsutum
  Clone ID: uC-gsronu33B134a09b1
tcgtctcacgcgtccgataaaatcacatgcaatgggggttgcttcttcgaacaacgaccacaccaaggtggaattggttgaaccaccaaagtcagtcaaggtcggagagcgagtgaccttttctggtttcacaggctagccggatgatgtgttaaacccaaagaaaaagggttgggagactctacaagtggatctccacagtggtgcatatctgggggcctgttataaagatattactttgaccacatctgctgtgatttgctaagattactccattaccaatgggtcaatgagatgaagatggtgacatcttgccttttatcccactgaagatatatgtagattgtgatatgaattgtaac

SEQ ID NO: 53056 - DNA, 408 bp, Gossypium hirsutum
  Clone ID: uC-gsronu33B134a12b1
ccagatctctttatcctttatcattattatttgtttttttcctttttctttttcatataaaaactgccattgaatcgaggcccagtggatcctttattctataaatcgccttctttgttttctttgtaagcgagacgaaaaatacaaactcaagaatttgtcggttttttggctcttgttatagagatcaagagtgtcctagtgggtaaatctgagtttgttcgaactgatccatggattctgagcaatattatgctcgggaatggaggacagtcccaggtgcttcaacacccgagactttgaatggtaacttcaactgcaatatctgcttagattttgcacatgagccgattgttacactctgcggtcacctttactgctggccttgcatctataaatggcttcatg

SEQ ID NO: 53057 - DNA, 463 bp, Gossypium hirsutum
  unsure (1)..(463): unsure at all n locations
  Clone ID: uC-gsronu33B134b05b1
cccacgcgtccgcccacgcgtccgcttatctccatcttaaaattatttacaaacaaaagagaacaaattttccagggaatgggaaggatattatgaggttgaactgcagtaattccttataactgtaaattttaacagaaaatgaaatgaaatgttgacagaaacaaacctgttcatgtacatcgtttaaaatctcctctcatcttcaagggggatgagctaatctcattcaagttcagtgtgcattgtacggggttaaccccaaaacactagagggattacaaaaattgttgtgtatgtgccattgccataggctatatgtttagcattcaatactcggcttctcggtttacaaaacttggtgataaccttgatacttaaaatggttaatacattgaggtggactcaaaacttgttcatggcggagacatctcttccatttctggttntaatgagcagagaa

SEQ ID NO: 53058 - DNA, 520 bp, Gossypium hirsutum
  Clone ID: uC-gsronu33B134b06b1
atttttcataattttaatacaaattgatattgccatcttctttgaaattcttaaccaaaattcggttacttatgatgtcacaagtggctgtacaggagaccttgatatgatcatctttttaataacattcttgtagcatgttgctgttctgacccgtgtcttaggcctactcccttgactcttgcttggtcggatgggattttttgcccatcataacccttttccactcaaaacatcaaaggacaataattttttttttatcaactacaagaagcatgacccataaaattgcaaatatgaaagtcgtttctaagctttaactactcattcctctgattggcatgatccaaagattacattctgctgctttctgaaatttaatatattagtccttgatttttttatctcatctgtaatgggtcaatgtcaccgggcacaaatttcaaataaataaaacaaatagattaaaccaaaaaatatataaaaaagttcatttacatagaaagcagcaggcccaatt

SEQ ID NO: 53059 - DNA, 423 bp, Gossypium hirsutum
  Clone ID: uC-gsronu33B134b10b1
agggaaagctgctcgcctgctgcaccggccgggacggactggccggaccgacccacgcgtctgtgcgttagtggacgctctcagaagatggccggttccatagcaataccgaccgtagaggaggctggtgggaaggctcataggcagcggcttgctcccagggacggccgttaatgtgacccaaccactggaggggtgaggaaaacacatttataccacacaggaactgtggctcttctaaaaactggacaggaccaaacaaggcctgaccggcctatgaggtaaaagactcaccagagcctaggtctagagagggcccagcattaaatgactgtggggacttatcagagccttgcgggtcctgctctgcaggaagctgcagacgcataccttgagggcctacctgaagacaccaacacgtgt

SEQ ID NO: 53060 - DNA, 258 bp, Gossypium hirsutum
  Clone ID: uC-gsronu33B134b12b1
ataagagaaagacatactgttctaggggggggctttctcattgtccacgtgggttattacacacaggctgccatatgtgctggtgctgaggatgatatgatcgtcgcaaataatgtaacatttgggccagtaatggcagtgatgacccgcaaaactatggtagaggggagtctgagggcagacaacacgacttatggtgtggctgctggcgttattacacacgactcgtatgtggccaacactgttttgagatcggtc

SEQ ID NO: 53061 - DNA, 539 bp, Gossypium hirsutum
  unsure (1)..(539): unsure at all n locations
  Clone ID: uC-gsronu33B134c01b1
ctcactcgtccgaaatagcagtcatcaggttttgtggagttcaaaaacggctctactatttgtagtattgaatgtccaaagaaatgaaaggaggtttgtgttttacccgttgctcgttagagaggatttgaagcagcggtagcgctgcccaggtcctgtcaatggacacatactcttctggggaagaactcgttcttaagactaggaagccttatactattaccaaacaacgtgaaagatggactgaggaggagcataataggttcctagaggctttgaagctctatggacgagcttggcaacgcattgaagaacacataggaacgaagactgctgtgcagatcaggagtcatgctcaaaaattcttttcaaagttggagaaggaggcacttgctaaaggtgtaccaataggtcaagctcttgacatagatatactggngtgatcctcgtgagaagttatgtgaggccattgatactatccctcttagctgcataatngtaggaaatagagggcttggcacgcttaagagggctataat

SEQ ID NO: 53062 - DNA, 373 bp, Gossypium hirsutum
  Clone ID: uC-gsronu33B134c02b1
tccactcgtccgacaaaatggatgaggcaaaaacctactttctgatgttacatatatatatacacacagatagggggctactgttttactatgtctagaaattcacatctaatgctttagggaatgagtaataatttactcttaaagtaggaagttagtatttgcctagataccagaaattgagtttggtgacccatggacgatcaaaataccatataaagaataggctacagcttgagaaatgaacacttgggtatagttgcattattaaatttttggacctgttttaggagtttactttgatgctcttcataattacccctctttgccatccccaacccaagaacaaaagtttctattatgttgttttcgg

SEQ ID NO: 53063 - DNA, 440 bp, Gossypium hirsutum
  unsure (1)..(440): unsure at all n locations
  Clone ID: uC-gsronu33B134c03b1
ggatgtcttgaaaaccatctttttagaaggacaatacctcttccatggtccaatagaattaagattgcacttggggcagcaaaaggtttggcctttctccatggtggtcccgaaccagtcatttatagagattttaaaacatccaacattttactcgattcggagtataatgcaaagttatcggattttggtttagcaaaagctggtcctcaaggagataaaacacatgtttctactagggttgttggaacctatggctatgctgcaccagagtatgttatgacaggacacttgacatctaagagcgatgtctacagctttggtgttgtgttacttgagattttgacaggccgaagatcaatggacaagaaacggcctagtggggagcagaatctggttacttgggctcgaccatatntagctgacaggagaaaacttta

SEQ ID NO: 53064 - DNA, 349 bp, Gossypium hirsutum
  Clone ID: uC-gsronu33B134e07b1
gtttttcccttttaaatgtggtgttgaatatctagactgatcgtattcctccaatataattgttcgtctggggtttggacatcggtgataattattgcttgataaaaaaaaattaaaaaaaaaaaaaaaaaaacaagaaaaaaaaagacaagaacataaatacaaaaatataactgaatgtaactgtgataaccgagaatggttacaaggaccaaaccgaccctgctaagaacactgttgaccccgattgcagaggcgttggcattcttggtatagcttgggctttcggtggcatgatctttattgttgtttactgcatcgctcgcatctctggaggacatatcaaccc

SEQ ID NO: 53065 - DNA, 192 bp, Gossypium hirsutum
  Clone ID: uC-gsronu33B134e12b1
tttgtttacgagcacgcatcattacacataaggagagatgctggcaacacaacttatgataagtggcggaacacccatcactatctaaggggcttgagctcatgtaggatccaagttgactcgtaacgcctgcccaccttctgggatcgagatcgagtttgattgtggcaagataagaaaatgactaataca

SEQ ID NO: 53066 - DNA, 384 bp, Gossypium hirsutum
  Clone ID: uC-gsronu33B134f07b1
tcgcttttatcctctctctcacaaaaagaggttttttttatcgatcaacaaaaaaaattgtttatttgcagggcgccacgatctgcatttctctcgaccgtagcgaataattcaattccccggcgtcgtaatctcctcctccatttgcaaatcaatcgatttctttgatctttgagtgtaatccatggagggttaagaggcattgtttttgaggtggaattttagctgctgacgtggttttttttggatttggaaaattcggaaacaatgtctacgagaggtgagcatcaaacggtaccgctgtcggttttattgaaacgagaattagctagcgaaaagattgaagacccggggattgtacacgggctagcaagtcacagcaag

SEQ ID NO: 53067 - DNA, 394 bp, Gossypium hirsutum
  Clone ID: uC-gsronu33B134g02b1
gttcatagtcgtttcgtgcgccccatacgaccttaatagatcaatacattatgcacagtcatctcgtgctacccgtgcgatcctatcagaacttcctccgtatcaatgtccaaccccatgcaatatgttgcgtatggcatgctcaatcatcacacgtgtatgcaaaaatggccatgctcaataacaatcatttaaacatatattaaaagcatatcagtcgtacaatcaccgtcaagtcaattaaaacacagtcatacgatcacagtcaattgatcaaattcatagtctaagtcggtcatttacccacaagggcaaaacaatcattttaccctacaagggtatttcggtaattttacactacaagggtatgtctgtaattttacaaattggggct

SEQ ID NO: 53068 - DNA, 366 bp, Gossypium hirsutum
  Clone ID: uC-gsronu33B134g08b1
tttcttgtccggtagggtgctcgatggctagctgcgataggaacagataggctattcatatgtcaagcgctgctacaagtcatttattgtaagagggcatgacaagagcaaccatccttcagtcaggttctcttggtctgcttttacccatggctgtaacgacgaaatgtagaacttctccttccaggcaatcttctctatccctctgttaactgtcagtggccagagaatgagcaagagtattcgctgatctaggcacatgcttaaaatagatcctttgaaagccttctttcatctgttgaattgttggactgatagctcatacttctgattagaggtggtgatctgctttacattgatttatta

SEQ ID NO: 53069 - DNA, 429 bp, Gossypium hirsutum
  Clone ID: uC-gsronu33B134h02b1
ccttttcgtccgcccacgcgtccggaagaccctcgggacaggcctattgacgtacgttacaactcttctcttcgctgcatcattgtaattatttccacctatggctttaagccttcatattgaacgctttgatttatggccttttgttatgtgttatatccctctgaatcatatttctgcaactgcaacctttttcatcttggaacaaggactcttaaaggcttacattctgtataccgtggagtactgccattgaagacgtagtatgggccaaaaacagagatgtaccggaatttcatatgcctgtatcttaagttccatgaaaataattgtgctcgatttatgctgctaggcacttttggttaatataaacagtttataacccggagaacacaagtgaatattacaatgaattatcgaggaaaatta

SEQ ID NO: 53070 - DNA, 203 bp, Gossypium hirsutum
  Clone ID: uC-gsronu33B134h04b1
tcgtttattcgtccgtaaaaaaaaaacaaatacaaaggggggtgtttttaaaaacaacgggggttccaaaaatggaattgggtgaaccaccggcggcacccatagtgggagagcgtgttacctttcctgggttcacactctatgccggatgatatgtgcaacccaaagaaaatggttggggagactctacaaatggatctgca

SEQ ID NO: 53071 - DNA, 103 bp, Gossypium hirsutum
  Clone ID: uC-gsronu33B136b04b1
ctttcgttttcgggcgggattacccgctgagtttaagcatatgaacaacaacaaggtggagaaacacatggaattaagttattaaacttgtctgtttgaagag

SEQ ID NO: 53072 - DNA, 381 bp, Gossypium hirsutum
  Clone ID: uC-gsronu33B136c03b1
tttgtttgtttattccattatttatgttagatgcaaatctttttgggttagtggttagtcatggcaagtctagcgggagatgtggctgaaattgtctggactgtaaggcaacatcttttcactgttcaatatatcctcctttgacagcggtctatgctctatatttgcggtattaaaagatctttttgagcatatgcttcctgccttgatggatcatcagtagtgcttagccttgatttaatggataagaaaaatttgcagattgtatagcctacgcagaaggctgcttgtctaacttgtcgggttgtatttgccgtaatttgtaactactgaatgataaatgctcttcgtgataactgtcatggtttattacctattata

SEQ ID NO: 53073 - DNA, 492 bp, Gossypium hirsutum
  Clone ID: uC-gsronu33B136c12b1
tcggtttcttccaatattcttctctctgacaacctggaacctctgatatccgatttcgggataagaaacattgggtgtagaaaagaaaaggataagaaggatgaaagcgacgctgaaattgatgtttattgtttcggtgttgttttgttggagcttttaacggggagcaagggacggaggagaatgtgaggcgggtgaggaggttagtgaaggaaaggaaaggagttgaggcgcttgactccaggttgagattcgccggtgaatcggaggctgaaatggtggagagcctccgagttggatacttgtgtacggcggagtcagctgagaaaaggcccacgatgcagcaagttctgggattactcaaagacatacatccgacagtagacgatttcaaccgatttcattggtaaaactataaagtaaaacgcacgctcatacagtttcggcggtgttattcacgcgctgaaaaatatttgataatgaaatcggaca

SEQ ID NO: 53074 - DNA, 390 bp, Gossypium hirsutum
  Clone ID: uC-gsronu33B136d06b1
gttcttttacgatctccggcgggttaatcctaccatcgtcgtgtttgttgataacgaggtatggatggagtccggtacgccatcgttccggaagaatttcgttaacggactggaattctacgctatgatgtttgagtctttggatgcggcggtcgtggggaacggggaatgggtgaggaaagtagagacgttgcttctccggccaaggatattagcggcagtggaaacggcggcgaggagcacggctcccccgtggagggagaggttccgtggggcggggatgagggctgtgcatttgagccagttggcggagttccaagcggagtgcttactggggaaagttcagggcatgggatttcacgtggcgaaacgacaaactgagttggtgct

SEQ ID NO: 53075 - DNA, 480 bp, Gossypium hirsutum
  unsure (1)..(480): unsure at all n locations
  Clone ID: uC-gsronu33B136d08b1
ttgattttccccagatacaaacagaacatgtctgttttgaacagatcatatagttattcaaaggtgaataaagaagacccagatgagataatccatagacgagctcagttcttgatttacaaagtgctagaacaagctgattctagaagaaaaccatcgttctttcgaatcaaattatgtaggctgaagctgaagattggtagaaaattgaagaaattgaagaaaactgcgatggtcagtatttctggtttaagagttgatgtttacagacaggtttttaatcagttgaaaacttggagacgattgtttaaccgtggtggtaatgatcatggaaccattgctgccgccattcatcgtcctttgctcacttaaaacattatatgtatgtatatacatgcatatacttatatatgtatatgcatatataagatntttatgatttgttttggttaaaaataggagagttctgctaaaagaaaa

SEQ ID NO: 53076 - DNA, 507 bp, Gossypium hirsutum
  unsure (1)..(507): unsure at all n locations
  Clone ID: uC-gsronu33B136e01b1
tttactcttccggtgtctttttcggttcggagaagaaaggtgggtaaaagatgcttgcttatgacctgcaaacggaaacacgcaaagatatcgggtcaccaacagcatgacgcctatgtgaacatgtgtacaaagtgagactaatctgcagcttctggtgaagagcatgtcttatttttcaccttcttcttgacatttatttaaggaggctcacccttaggtattgtgggttggcaaaagaaaaaaaaatgaggatgaaattctagccttattgggaaagagatttggagttctatgtaagatatcacttccatatagtatctaaattttttgctccattttattttggggcctgaggaaaaagaatatacatagagatattgttaatcatttttaggcaaccatttttgaggagggttgaatactgnctgatgacacttttctctttatgcattaatgcctcgatgttctcttcacaatcttggaatggaaaatgatcattctttt

SEQ ID NO: 53077 - DNA, 415 bp, Gossypium hirsutum
  Clone ID: uC-gsronu33B136e04b1
cttacgtttccgccggcatgcataatgataagcagaggtccacaattccagcttatcaagcaacagtaatttggagactgcaagagcaaaagattgaaatcccatcctttacttgtgcagacgttgatgaaagggttgcatgaaatccatggtttaaattctgcagctatgccagtaaagatggaaatatacctaaatgagcatctggaacttaaggagcaacgactgtgatcgaactttttatcgatctagttagttttaagtctcatgatgctttcgtttcttacttctgcaaatgtgaatactgaaaaacagtagtcttacatgtagtaatgccttgaaagatgctgttttgtgcaagattcaatgcacattccatcatgttttcatattttttaaagaatgtttgatttgc

SEQ ID NO: 53078 - DNA, 395 bp, Gossypium hirsutum
  Clone ID: uC-gsronu33B136f08b1
ttttgttatcgcgctgggtgtgaattattgtagaagcgtgcgggtgtacttacttaagataccggctaagcaagaaccagtgttaaagctgataataacgaacgcacggtgaatggtattattgaagctcagctgccatatatctcctaaacaaagcatttatcaactagtgcaaaagctagtcatactgataaagtatctatgaaaccaccggacccagataccaagtatttaagccaggtactatcagttgccgaaatgttagaatggcctgatttcaatgaccaagcatggctatttagcagcaatgaatatcaatcaaagaaaaaacccaaggtgggatttcctgagattgatgagaccccacgtgtatgggcagaggctttccaaattga

SEQ ID NO: 53079 - DNA, 317 bp, Gossypium hirsutum
  Clone ID: uC-gsronu33B136g08b1
ttgcttctaagtaatgtgtcatttttgttgaaactagggggttatttttttggtattactcctgactcatctaccatatggcatgaaaaagtaattggcaaataccgctgtttctggatttatgtaatttcctttttctttcttctggttactgcttcacctgtttttgggaggtgattgtgtaaaaattttagtgtgctttagttattgtaagaatatttttaacatttttaactttaacattattgtaagaatattttgaattatacttcagttagcaatttatatcatatatttttcattgaatttgaaggatc

SEQ ID NO: 53080 - DNA, 433 bp, Gossypium hirsutum
  unsure (1)..(433): unsure at all n locations
  Clone ID: uC-gsronu33B136g09b1
tttgttcatttatacatagaaatgagagaaatggttcatattcaaggtggtcaatgcggtaaccaaatcggtgccaagttctgggaagtcatctctgatgaacacggtattgatcctaccggtacctatcacggagactctgatcttcaactcgaaagaatcaatgtttacttcaacgaagccactggtggaagatacgtccccagagctatcttgatggatcttgaacccggtacaatggattccgtcagagctggccccttcggtcaactcttcagacctgataacttcgttntcggtcaaactggtgctggtaacaactgggccaagggtcactacactgaangtgctgaacttattgactccgtcctcgatgttgtcagaaaggaagccgatggatgtgactgtcttcaagattccaaattacccactc

SEQ ID NO: 53081 - DNA, 314 bp, Gossypium hirsutum
  Clone ID: uC-gsronu33B136h01b1
gcggttctttttgaggacccgggggataggcaacagaggtgctttattggattgcctcaccattggcggcttgggccatgcaagcaggtgtctgcgacgcttgagggctatggagcgagagatgcctacaaggctgactatgctaaaagctggggtcaacttatgtgacctaatggtgacccacgctctactgagaccatgcataccctatcaacgcacttggcggagctgtacaagctaataccgttaatgctgactgagtggtacagattacgggaggagtcactgaaaatgaactacacatcgttggtgcg

SEQ ID NO: 53082 - DNA, 528 bp, Gossypium hirsutum
  unsure (1)..(528): unsure at all n locations
  Clone ID: uC-gsronu33B136h05b1
tttactttcgggaaaacacncagagccacnccggaaggctcatatctcactgaaactctttccttctttcttttctgagcaaagccttaaggcaatgtgagaatgaatctctcatgagttgatgagtatactctgtgcttgtcaaactacggatcctgcacatcaaaaattaagcttagataaaatgatattaaatgttaaaagactcaggaagtattttgagtagagatttggtagctaagaggcagtgcccgtttatggcccgggaagacctcgttttggcatagcatacttgctatcatctctattattaatcctcttcctgcagctcttttcaactttttgagctgtactccatggaggagggtctttctttaacagctttctaaaggatttgtaaatttagatatttttgaaataaaatctaggataatttcttccttctacttaaaatattaacgtaagcaaacagtttatacattagtcccttatgtttaaaatagtaccgtttaggcacttacattacat

SEQ ID NO: 53083 - DNA, 468 bp, Gossypium hirsutum
  Clone ID: uC-gsronu33B137a02b1
cccacgctttcgcccacgcgtccgcccacgcgtccggagcttgattctcgattcctccgaacattcatcttgtttagccaaggtattgaaaaagattagtcctcatgaacatgaacaaatataaaaacagttgtaatatagaaaaacaaaaattcaattggaaggtcactatatttgtaaagaaacataatgtataattagttccagtttgaaataaatgtaggaattggcttgttctgaaaaaaaaaaaaaaaaaaaaaaaaaaaaaaaaaaaaaaaaaaaaaaaaaaaaaaaaaaaaaaaaataacctaaaggggggacgatataaaaggtccaagttttctaacgcgtgcatacaacttaataacttttgtaaagggtaacaaaagtccaattttttggcccccgtttgacaaccaaattattgggaaaaccctgggaacacctaatttaatgggcgtgcaaaac

SEQ ID NO: 53084 - DNA, 498 bp, Gossypium hirsutum
  unsure (1)..(498): unsure at all n locations
  Clone ID: uC-gsronu33B137b04b1
ctttcgcgtccgcccacgcgtccgcctgattggggtgatgacaaaaagccaagtcccgagaaaattgagctggacaattcaactcagttggataagcctgaagatgttaatgaaccccaggtgcaaggactaggctttgatgctttggataagggtttcgagaaggaagaaccgaaacagaaaggcaggaaaaaccgaaaaaagaccaacaggaagatgcaagaatggtggaaagatgatcatttgggtgaggtaggcaaaaaggatagtaagctgaagcagctcaagacgaagtggaagaaagggtttaaaatgccacattttgatctagggagacggttttatttttgcaggagcaagaagttcggggaaccgaatcaagatgactgtgatgcgaatggagaattcagttttagaaggggatggaggagaaagaacaacaattcgatcggaagtgacatgtggagcggngatcttttcagtcgtgagctaagcagc

SEQ ID NO: 53085 - DNA, 473 bp, Gossypium hirsutum
  Clone ID: uC-gsronu33B137c08b1
tcggtttagatacctgaaattgtggcagtagaaccagtgactgatgaagaaactggccttgagatgaatgaagagaacattgagaaggtacttgaagagattaggccctatctggttggtgcagcgggtggatctcttgaattagttgccattgaggagccgatcgtgaaagttagaatcacaggtcctgcagcgggggtcatgactgttagagtagccgtaacgcaaaaattgcgagagaaaattccggccattgcagccgttcaacttttatgattccaatgcaatgttttaagatttaacaaaatagttaccaaatatagcatttattgttgttaggcttgtatgaatagtgaaaatcctgctgtatagttcatagtttccatacttttctctctttggatgccattgccagtcctaagtatattgttttttcttttctaaattcaattcaacaatggcgttccgatttt

SEQ ID NO: 53086 - DNA, 476 bp, Gossypium hirsutum
  Clone ID: uC-gsronu33B137c10b1
gacttggaaaatatggatggtcttcacatgatatttaaaatagtcaaggggataagttagtacactttttcgcttaaatgctctttttctttattaagacgtgcttgaatttatgactgattcatggatccatgatttatgttattggttatcttacagttttgctcaatagtgctcaaatttttgagaaaatatttggagacgaattgagcatggatattattggttctcttgaatgtaagtatatcactatttatttacagatatattatcagggactgttggtggattgaattgaatgttcaatttgcaacttcatttgattgtttggatgcgggcttatagttataagattttgtacaattattttttatgataataaccttttaataacatttttttcgttttatcactctttgcacgtgtagttgctctataaaatagaataagagaaatgttatgtaaacatgccatag

SEQ ID NO: 53087 - DNA, 368 bp, Gossypium hirsutum
  Clone ID: uC-gsronu33B137c11b1
tttttttcctggagttgcaatgtggcagttcatgccgcctgcagcagtggatacttcacaggaccatgtcctccgccctccggttgcctaagttggcaaccaacaatgattggggttgcattttgatgcaatcaagggtataagttaatgttctgggctgtttagatttcactgaagtttttctaactggctttgttgggtgactgtcattgtactcctacgatttggtgctggtaatcacatgtaaatttctaataagttaatctggcaacctttgtttctctgtgttctaggttaaggctaggtactcatgtctgcaaaacaatttgttttgtgctcaatttttataattgattttactttgcttc

SEQ ID NO: 53088 - DNA, 437 bp, Gossypium hirsutum
  Clone ID: uC-gsronu33B137e05b1
agccgcccgcctgcacgtacccggacttaattccttgacccacccacgcgttttcgtattcgtatgctttggccaacagagcacggggagatacataatgtgcattttggttagccacagatatggaaatttgaaggcagcaaactatacaacggcagtgctgctaacctcattgcggtctcaacaaccacctcaagaacagaaatggtgttatcggattgtggagatctcaaaaaacagccgccagaactaccgttgccaaattcaccagatcacggaatcactggcttatttccaagaagctacaccacaacctgaaacgatgcctattaacataggcagccgttcgacaagaagaaaagcaacgacaggcttcagattttttagaccaagtccatggatattatgcatggacgcagaccagatttgtactacca

SEQ ID NO: 53089 - DNA, 413 bp, Gossypium hirsutum
  Clone ID: uC-gsronu33B137e08b1
tcgatttgaatgcccccattccaagtcccttgctccctctccttaatctctacatatgcgcttactgatttcttcaattcttatgacaagcatgcatgatctcaactggtgccactttttgtaaaagaattacatatatacactgtaatttacatgtatgaatagggagtgggaggatgattcatatccctatctcagcaccatgattttcaagttctatgatttgttttgcttctattttaatgtcgtcttaatgcatcagaagaaggaagaaggagaaagacataaaggttagcttccaagtttttcttgatgtcttttgatgtaaactagctagagacgatcagtttgctttaattattgtcactatttcaagtaatttaaatatatatatatattcttattcttgtgag

SEQ ID NO: 53090 - DNA, 404 bp, Gossypium hirsutum
  Clone ID: uC-gsronu33B137e12b1
tttttcacgcgtccgggaggtgaagaagaaagcgttgacatggatgtagaaagcgatgaagacgacgatgatcttcttattcccaacgtacatgtcgatgaagatttattcaagggattggaagaactggttggaagtggtagtaatggagtaggaatagtcccgacctttggtgataacttctcgtcttggagtaccggtaactccgctgccgccggagccgccgctagtggtggctgttagatattgattttcatttttaattattgtcgtcattttcttttcggtttgggtacaaagaaattaaaaatacttcgattttaattttttttcctttttattatttctccccagagagataaatatgtatgataaagtgcatataacatcacaaaatttattct

SEQ ID NO: 53091 - DNA, 318 bp, Gossypium hirsutum
  unsure (1)..(318): unsure at all n locations
  Clone ID: uC-gsronu33B137f03b1
atgaaaccaaggatccaaggagaggcacaccaattagaagcacctattgaccgaacaagtggattatcgtaagttcacataagaatttattcaaagattccttctatcatattctgataaatttgtagtaaaaacatctattataactttattattaactctcgataatatagttggatcacgttgtatcatatcttaataagatttttcatgactctacctattaaccccgtgtagtaagagatctagtgcatgaaacttcttatctatgtaagtcgtttccattaccagaagatataaggacaccacttttgcnna

SEQ ID NO: 53092 - DNA, 259 bp, Gossypium hirsutum
  Clone ID: uC-gsronu33B137f05b1
gcgtgttgtgttcctttggccactttttcagggttcccagacgaatgactaaggtgatgaacaggaggaggattcacctacattctgctcactcgccctttctaagacatgaactctaacacggtagttattacattcctacgtatggtaaagcccatcgctaatatggacctaaaaaaagagctttgagagatgtttagtttcttagagaaaaacgttttgcaagaagaaaatttgaaatttgttaggtcatttggca

SEQ ID NO: 53093 - DNA, 516 bp, Gossypium hirsutum
  Clone ID: uC-gsronu33B137g07b1
ttgtgttctgcttgtttttctagcaaaattctcaggatctatcagttcatcaaagtacaataataatctcagtgttcttgatgatgatgatgatgaagatgaagatattccccatacagttgagtcacttgtcttggaccagcccaaaacaccgctgtcgcagaaagatgaagcaatagaaaacagtgccttaatggaagaaacagcagcagcagaagttgaaatcgaaactcaaaactgcagcctgcaagaggaagaagacgaaggtgaaaaatggggtttggatcctttgatgaaaaatggtgtttttgttggagaaagcactgaaagtacagatgagctgaacaaaaggtttgatgaatttattagaaagatgaaggaagaattgagggtcgaagctcgacagcagttagttatggtttaatttaaggatcggtccttttcaatggattcaatcaccataataaactccttaattttacatgtttctatgatcaaattttagcatgttcttag

SEQ ID NO: 53094 - DNA, 456 bp, Gossypium hirsutum
  Clone ID: uC-gsronu33B137g08b1
tttttttcgcgtccgggtaactgcacggatttgaacgagagctgtgagagatgggctgctcttggtgagtgtaccaagaaccgagaatatatgatcggaactgcagaacttcctggctattgtaggagaagctgcaaagtatgttgaaggtaaactacaagcttcaatgatagtatatctgctgctgcattttctgttgtaagttttttattgctttttttttttagtttttggattcaaatttacattcttatgctacagttttcacaaacatagttgaaatccatgtattctaaaacttactttcagcttggttaacatatccccccggaagcttcagatttctcgtagtctttttagattgctagcgtttcactttcagctgaaatctggaaaataattttttcatatttgacttttgatttaaatagcagtatatggatgtaaacctttttt

SEQ ID NO: 53095 - DNA, 569 bp, Gossypium hirsutum
  unsure (1)..(569): unsure at all n locations
  Clone ID: uC-gsronu33B138a03b1
cttacattgacaaacctgatgttcatggttggacacccagggagctagctgagcaacatggacacgaagaaataaagacaatgtttgaatcaagaaaagagatgaaaactcaatctatcatgtcaatcccagagaaggctgagacacggtacctcgggaggtttacaagtgagccggtgatccgtcctgtggcaccggatggtacagatggatcatggagccaatcccggcagagacgtaggacaagtaacttccacaactcactgttcgggataatgtcagccgcaaacatggagaaagatttgctattgtcagtacataaacctaagggtgtgaaggattgtgttgtcaactctgctagagttgtaataagttgtccagaaaaggggcaaaccattgggaagctagtttcacttccagggaactctgaggaattgcttgagatgggtgctaaaaaatttgggatcattgggtgtaaagtggtgagcaaagaggagctgaaatgatggtatgaagtgatagagatgtgaccatctnngtttgtagtgatgtcaaatgcacatcaacac

SEQ ID NO: 53096 - DNA, 281 bp, Gossypium hirsutum
  Clone ID: uC-gsronu33B138b07b1
ctttatttgcctttcttactcttccatagttccattcactccttaattccgtatctcaaagcagctgcatttcattcatcaaaactgagctttttgacatttggtaatttatacatttcatggagtaatatttgttgtcattaaaggctgtttaatctctttgttgaaatggttttccctctcttttaagttgtttataggaagtaaatatatcatttcagtttcatgtcattttgggttaggattgtttcgagtttaacttgttttagatttggctgttt

SEQ ID NO: 53097 - DNA, 416 bp, Gossypium hirsutum
  Clone ID: uC-gsronu33B138c08b1
gttttgtttttctttatttgaatgctttttttgattttgcttgaatctctgctctttttattttaaaaaatatcgtctttgcattcgattgctctcaatattcgaaccttctgtattgatttcgtgtttttctgtaaaaaagagccccctatacaatgaagatattaacggctttatagccgaatcatattacaactgttaatatttcttgtttctattctcttgtctttgctttgcgtgtttctgctctttgtcttgctttttttttgctttgcaggtgatgggacgaggccagagggtgctatgctaaggcaacagaggcgccaggggtggtcatgcgttgaacgcgctaacaccacgtggtgagcggcgcggcgcgaaggggagggaatgaggctagggcttgctggctgaaa

SEQ ID NO: 53098 - DNA, 485 bp, Gossypium hirsutum
  unsure (1)..(485): unsure at all n locations
  Clone ID: uC-gsronu33B138c10b1
gttaattatatgagtttttatgtgatgtaatagtgtcctatttgataatagatgaatgttgtgtagtgtacaagttagtccttaaactatgattataaattgattgaacatgtagtaatgtacaagtgccgaatatgatttgatcaaattgaaatggttatgtgtatttggttttttgaattctattaatgtatatttttagttttctattgaagtgtaatgctgtttgcatgttttgcgcattctttaagttacaataaaattatattctactatgtggtattaataattaaatagattattgatattaaaaattggttggcttaaaagtttgtggaagtgtatgcttatgattgttcaaaatttgtgtcttgtctggtaataccccataaccccattccagcgacggatatgggttggggtgttacatntttagtacggtcaccacttggttgcaatgaaaatgtgtaccctaatcactaatg

SEQ ID NO: 53099 - DNA, 376 bp, Gossypium hirsutum
  Clone ID: uC-gsronu33B138e03b1
ttcttaagcacaagaaactgcaaatcttgtcctaccgctcaaaaaactgaggaacatcaccatggccggaaataccacgggcttctttgacatgaagataggaggtagcccgatcgctggcatgggatggaggtttattctgattggactcctcacactggctactacttgcccgccctacacaccggggagaaaggcgtccgacatgaaggtaaggccctacactacaaaaggtactgtttccatcgggagatccctaactgtatgcgccaacgaagtgactactcaggcggaaacggtaccggaggctaatgcatctactgatccacgtgcgctggcgagtacttcatggagaaacacactggccccgggattc

SEQ ID NO: 53100 - DNA, 399 bp, Gossypium hirsutum
  Clone ID: uC-gsronu33B138e08b1
cccaccccaccctttcttatcagtactggagttctgtatcgcatcatcctcaagaaaaagttaagagatattcaatgggcagcttttattcttctatgtgctggctgcaccacagcacaactgaattctcgttctgatcatgtacttctaacatctatgccatgttggatcatggcaattgtgatggcccttctgagcggatttgctggagtgtacaccgaggctataattactaagcgcccatcaaggaatataactgcgcggaatccctggctgtatattcccagaatgaccttcaatgctctagcaatactgatgcaggatattgatgctctcatgcacaagggcttcttacatggatactcgataattaccactctcatgatccctaatcatgca

SEQ ID NO: 53101 - DNA, 534 bp, Gossypium hirsutum
  unsure (1)..(534): unsure at all n locations
  Clone ID: uC-gsronu33B138f05b1
ttgaggtggacatgatgaagatgtggaaaagttgaggaaatttgcaaggaatattgggcttttatttcaagttgtggatgatattcttgatgtaacaaagtcatctaaagaattagggaagactgcagggaaagatttggtggctgataaagtgacttatcctaaatcgatggggataaacaaatcaaaggagtttgcagagaagttgaagagtgatgcattagagttgcttcaagggtttgatcctgagaaatctacccccttaattgctttagctaattatatagcttacaggcaaaattagcttcctcttgtgtttgataaaaagggcttcgagaaagaagcacgatagtagtaataatattgtgaatagtctactacaatgtttatgttctaaagctcccatcaatggtacgtggatgtaattgttaaattcagttcttcctcaatttgttggtcctatgtacgagtacttactcttgatctggaactttntatcaataagtcaatgattaatctggngatttcttcttt

SEQ ID NO: 53102 - DNA, 366 bp, Gossypium hirsutum
  Clone ID: uC-gsronu33B138f08b1
cccacgtcttccggtatatgatgattctgaatagcaatcaatcaactcaaccccattaacggtgcaggatgatggggtcaaaagcaagcctgcaccggcgctcgggctgtcgcggatactgctgctcacaatgccctcaaagtttccctcgcatgtaattaaggaccgaataatgagcagcagctaagatgggtcaaggcttagctgggaagatttacatgaaacttgctggagattccatgagagcttcctttatactttcttcgaccagggccttgcatatattaaaaactggcacttcactgatatgtggctgaatattgcctagggcacaaggcagcgggcgtatggagccattattatgtt

SEQ ID NO: 53103 - DNA, 320 bp, Gossypium hirsutum
  Clone ID: uC-gsronu33B138g09b1
ttaaacttgatgatgccttctctttatatgagcaagccattgctattgaaaaaggaaaagagcattctcaaacgttaccaatggtgtatgcacagtactctagattttcattcttggtttctggaaatgcagagaaggctagggaaattctgactaggtcacttgaccatgtgcaactatgtaaacaattccttgaggccttaatacattttgaaacaattttgccacctctaagacagactgattacttagaatcattgattgacaagctcttggccccgagtttggatggcagtactgcagacaaggaagatctatct

SEQ ID NO: 53104 - DNA, 518 bp, Gossypium hirsutum
  unsure (1)..(518): unsure at all n locations
  Clone ID: uC-gsronu33B138g11b1
tttacgcgtccggtttcttctatcttgttcattggaccaaacaataaaagtatgggtggcttctgagaatggaaacctggaagtaacatacactcacaacgaagaacatggcctgcttaatcttcgtgggatgcacgacttagaatccaagccagtcttgttgtgtgcatgcaatgacaattatgtccggctttatgatctgccgtcgttctccgagaggggtagaatttttgctaagcaggagattcgagccatcgaagtagggcctaggggcctctttttcactggcgacggaactggttttaaagtgtggaaatgggcggagccagttgctacaacttgattgccttgcaccatttcataacacattcatcctcctgcaattttttggtggtaattattttatattttttcatcctttcaggtaaagtctctcatggtgaaaacaactttgggttccaccttttatagcataatagatcaattaagagtaattggatgaactagntgccctaatt

SEQ ID NO: 53105 - DNA, 219 bp, Gossypium hirsutum
  Clone ID: uC-gsronu33B138h02b1
ttgttattatcaagtgagaaaacgggccattggaaaagggaagatacagttaggcttggacactaacaaaagcttgggagatggtcccccccatcgttatcaccggccttataaatggtgcgattgttacttccagcttaaatacccgccgacaaaaactcgctgctatgctgcgtcgcctacacccgatcaccccagatcttaaataaaagggggggg

SEQ ID NO: 53106 - DNA, 109 bp, Gossypium hirsutum
  Clone ID: uC-gsronu33B138h03b1
ttctttattttccatggaccgcagagaacctgtggtgaaacaaatagctctggaggcagataatctctcatggctgcttgagattttggctgacaggccatcagcagct

SEQ ID NO: 53107 - DNA, 423 bp, Gossypium hirsutum
  Clone ID: uC-gsronu33B138h11b1
ctcacgcgtccgcgttcacttactcaccaaaacaccacacaatcaccccatttcaccacaagaacatcactttaatctcccaacatgtctctttaatcataaaacaaatcgattcatctcaaaaaaagcttgctcgaattgaaaaccaactccttggttaccaaacacttaatgtttcaagacccaaccttgcaaatgaactcaaattgttcttacaacaccaccagcttccattagggaaagattcaaggacagggataactgaaatggtggcttcagtaggacattcatgtgagaaatcagctggtttgttgtctcaatacatgacatacaaggtttctggtccttgtcctgatgattggagtcttgcacagaagctaattttaagagggtgtgaaccattaccaagaagaagatgctttg

SEQ ID NO: 53108 - DNA, 500 bp, Gossypium hirsutum
  unsure (1)..(500): unsure at all n locations
  Clone ID: uC-gsronu33B138h12b1
tttatgggatgttcagtttagtcctgtaggacactattttgccagctcttcacatgatcgaacagcaaggatttggtcaatggatagaatacaacctttgagaataatggcaggacacttgtctgatgttgactgcgtgcaatggcatgccaactgcaactatattgctacaggctctagtgacagaacagtaagattgtgggatgtacaaagtggagaatgtgttcggattttcattggtcataggagtatgatattgtcactagcaatgtcacctgacggccgctatatggcttctggtgatgaagatggcacaatcatgatgtgggacctttcaagtggaccggtgtgttacgcctttgatgggtcacacctttgcgtgtggtcacttgctttcagntgtgaaggtaccgctctagcatctggatcagctgattgcactgtaaaattgtgggatgtcacaacaagcacaaaggcccccgaaaatgaagacaagagtg

SEQ ID NO: 53109 - DNA, 351 bp, Gossypium hirsutum
  Clone ID: uC-gsronu33B139a05b1
acggtttggttttgaatgcccacaaggtacgagaatgaccgatttaggtggttgactgcgtacttgcttcctaggattagaacgccctacaatgggggtgaccatgtgagtgggaaatataagattgtgtacagtaacctactaccgcatgagacgaggtaatggaggtagagaaaaaccatgagatatgaccagattcatgagagctggcttacgagctgttgatgctgtagaagggatccgcaaaagaatgtgatgctctggaatcagggaacaacagcgcatcggaaacagaggctagattaagatgggccactgagtgtgaagaagaccctaaaccggtaatatcaa

SEQ ID NO: 53110 - DNA, 439 bp, Gossypium hirsutum
  unsure (1)..(439): unsure at all n locations
  Clone ID: uC-gsronu33B139a08b1
tcgtttaaaacaaaaaaagggagatagagagttctctttgctctcccttcactccctatgtccggcgataggatttcccggtgtccattgcgcagccgttgtgggccagtggccggcgttgcgcgaatggatttcttccgacgccgaggaggccaacgaaggtcttcaaggaggtgatgggagcaggtggaggagaggcgatgcaagtgaaggcacctagggtttgctgcttccttattttttttctgctggtggtttgggctagggtagggttgttttaggtttagtgggccgggtaagattgggcttgtacattaacaatagttcataagatgtaattacaataatcacatgatttaatatcaatattagcantctatacattaaaattttatcctattattttattggtgtcttgtataaacttccatctgctctt

SEQ ID NO: 53111 - DNA, 190 bp, Gossypium hirsutum
  Clone ID: uC-gsronu33B139c01b1
tctttctatgtctgaggatttatggtgcatcaaaaagcttaattacggatcagacgaaaaatgtggactgtctgattggttgaactctcgaccttcttcaccattgatttttgtcgaccctcgtgatatttgacattttcctttttaaacttttgataatgattatcttaaatgatcatagtttcattat

SEQ ID NO: 53112 - DNA, 428 bp, Gossypium hirsutum
  Clone ID: uC-gsronu33B139c12b1
ttcaaccaaaacacatgccgagtccaagaccatgagccatggtgtccatgctcagcaacatgtggctcaaggcacggctgtgcccgcaatttgccatggaaagaaggaaaagaagatgaaagacaagaaggagaaagacaaggacaagaaggaaaagaaagaaaagaaggaaaagaaggaaaagaagaccgagagcaagaagaagcccgagaaggagaagagtaagcacaaaaaagagcaaagacgacagtcgcagtgacagtgacttaagagatggctggccctggcacgtatagtgtgctgcactacactaaataaaaccatgtgcagtctcaacagcagtctaatacagtgtctcgagcaatgtaagactataaattatcatatctcctattaaatataagggaaaatagatatatttttatgga

SEQ ID NO: 53113 - DNA, 518 bp, Gossypium hirsutum
  Clone ID: uC-gsronu33B139d05b1
tccacgcttccgcccacgcgtccgctctctttcacccttcaaagtccagcctaggtccggccgatctccggcatcgggccaccacccgtacgctgccgtatacggcggccggagttccaaaatagcctcccttttagtcgatttgaccttctcaacctagatccaagggtaaaatacccgaatcacccaccaaaaatcgaaaataaaagaaaaaagaaggaaaaaaataaaataaaataaagggacccctcggttccctatcaacgctggcgatatttccgacgaaccaaaaggctcggccactccgttgcctggagaaggaggctccaaccaccgcgttaaaggtgacgtgaatggccagacgcgtgcgaggaggcgtgcgacggtggtgcccgaggtggccaatagtgaggagcggcggctgcaaaaagggataaggtttcagctttgctgaaactagtttaggttttgggccaacgggcctattttgcatttgggttagggtttggtaataaaat

SEQ ID NO: 53114 - DNA, 189 bp, Gossypium hirsutum
  Clone ID: uC-gsronu33B139d07b1
ttctcgttaggcgtcagcccacgcgatcacgttgatggcttgaacgagggtggggaccttggcaaccgtgctgcgccagcccttgactgcgctaccgacgacacagcggatgacttgatcaaactggtgaccaagggagagaggaacgctgtaaaagagttagcgaaggttcaacagtcattgcagagg

SEQ ID NO: 53115 - DNA, 292 bp, Gossypium hirsutum
  Clone ID: uC-gsronu33B139f07b1
tgtgttaaattcaaatgaatcggatttgaattctaaagaatacaaaaaaaaaatagtgttggaaggattgttggaaaggaatcacagggttggataatgaaacttttgtatagagtattttttttttatttacgatgagcaagttagatgtaatcatacgtgttttgctaaagttagcctgttggtcattttgtgtaaaatagaattgaaaaaagggtcaatatattctagaatcatagttcagtttggtttaatttaaaaaaaataaaataacattttttatcttggggcg

SEQ ID NO: 53116 - DNA, 162 bp, Gossypium hirsutum
  Clone ID: uC-gsronu33B139f09b1
tttcgtgttaataaaattaaaaattattattattcaaaaaaaaaaagtgagatgaaaatgttgtggttggcttctttagagctcaaagtttatcaatatttgtctaatttcagtgaatatttgtgaagaatttcatatttgactaatgaattatcatgagtt

SEQ ID NO: 53117 - DNA, 282 bp, Gossypium hirsutum
  Clone ID: uC-gsronu33B139f10b1
gtaattttgggaagactatccttcagtcctctttcgaatgggttcggaaaataatcagtcatcatatctcataattaagttatttcatttttttttggggggttgttgtaaagattattcgcttggttcttcctatagaaatgtataattcgtagtacgaggaaccataatgatgagttgtctgaaataaatgagaatttgtttgatgcctattaaaaaaaaaaaaaaaaaaatatgaaaattaatatttatccaataaaaacaattggggcgtggggtctt

SEQ ID NO: 53118 - DNA, 521 bp, Gossypium hirsutum
  Clone ID: uC-gsronu33B139f12b1
tttatgcggcagcatatgagaggattgtggagttgcagggagaagccctgaaggttcttaaagctcttgaagaagtggtggggcacctgagaaaatttttggttgatcacagtgttcttcctctttttgaaaaaatggatcttcaagcagagacgcaggctgaaaagtcgtctctgcttacggcttctcaaagtggaattggtatcgatcttcctgttacagcaagaggggattctttgttccttgaacatgaaacacagttggagtcacgaattccatcttctggaatttctttctatacacaggatcccacgctttcggcaatatattcttcttctggacttgttcgatctgttgttcctattgtcacacagattgctcaaacaatgcaaataccattttcttatgccgaggacatcattgggataggaggagctaatattgcacatattcgctgcactagtggagctgtcataactgtgcaagagagtaggggcatgtctgatgaaataactgtggaa

SEQ ID NO: 53119 - DNA, 213 bp, Gossypium hirsutum
  Clone ID: uC-gsronu33B143a01b1
ggcgcaagaaacactagccaaggaccaagccagggcgcaaggacagaccagccacgcgcctaaaaaaacgacggcgccgagagccacaggcaggcagaacgagcaaaggccaactcacactgcgaaagccaaaccggaaccccaccacaaaccaggcgcaaagacagggatacaagcagcgacgctgccagggcgccaagcactggctgcaca

SEQ ID NO: 53120 - DNA, 393 bp, Gossypium hirsutum
  Clone ID: uC-gsronu33B143a04b1
agtagtatgcagcaagagcagcaactccccacggggggcgttacaaaaacaccttgggtcaacaaccaaccacagccccccccaaacaaccatcccactacaacaacttaaacccctctcccatcccatcaccccaaaaacccaaactgtaaccagaaaaaaagaacccactatcccccctccataatgttattaaactctccccctctaccaaagaacccaagagtatggatccaagtacgaaacccaaactctcaccctgggcttaacgaaaaagggcctatcagaacggatcccccattgatcaatgagtcatctctttcagcagccaatccctcagcttacagcctagctgagatatggcccaacctgaacaacccaggctctgaccca

SEQ ID NO: 53121 - DNA, 423 bp, Gossypium hirsutum
  Clone ID: uC-gsronu33B143a06b1
cggatcgcgtgggcccacgcgtccggtcagcggaggggggttttttcaatgtcgtggtgggagacccaaacgaacactatggactcggagtcaccaggaacggggaatgatgcgacggctatcacagggccaatcatgttggctaagatgtcagggagaccggagccaaaaagccactggggaaataagatcggaaaacctcatactgggccatgcaaggataccgggaaacgtgtagcccgacaccaacaggatggtgccggcatctacaggtgctggcattggggatgataggacaaccgaaaacctgctaaacaatggcttcaatggaagcatctatccttcatagaggaaatccagccaccctacagctatggatgtcaaggacaactcactatgacgtgagaaaacagatatcaattt

SEQ ID NO: 53122 - DNA, 125 bp, Gossypium hirsutum
  Clone ID: uC-gsronu33B143a11b1
ctgacgcgtgggttgattcaaaagctgctaggtgggctttcttaacaagattgcttaattatcgaccgcgccttttgattctttggagtaaattttatagtatgataattgattattagagctct

SEQ ID NO: 53123 - DNA, 271 bp, Gossypium hirsutum
  Clone ID: uC-gsronu33B143b05b1
ccgtgagtaaattgatcactctaatgttggtgggagggttcctactctgtttattacagccaatcctctagtggaaatgtaatcctcaaacttcagtttgattacagttgtggttttccaattgcatatttttatagtaaaagttatagaaatcaagttcggttctatatcattcatttttgtatttctcccaaaaatgaactctttcttggaaaagaaagggttctttcttaatctatcaaaatagtctcttcttttctttaaagaaaaa

SEQ ID NO: 53124 - DNA, 380 bp, Gossypium hirsutum
  unsure (1)..(380): unsure at all n locations
  Clone ID: uC-gsronu33B143b10b1
tggtaaaagaagcctaaactaggaggctcgggaggtttcaactagtgttgttgcagagcaaagcggattctgaaatttatttgagaaatgaactgccagtgacgagtggtagaaacattacgatgatagattgatgatgatcatgtatttttggcagtttatcaaaggataaaaagcatgtattaggggtttgccggctgaccttaacaatgctttggtgatacgatctggtgtggactgtaaattttgtaattgagccaagtctataacagatacttactgttgagtcaatctgaggttgtaacccaaccagacattgtatgagaattcaattttcagttttaataatttctctgaaaataaaccaacttactttccna

SEQ ID NO: 53125 - DNA, 482 bp, Gossypium hirsutum
  Clone ID: uC-gsronu33B143c03b1
caaataagtgtttaagttccatcaatttgattgggaggttataaaagatgccttggatggcaagttacctagcttgagtgtgattgaaccaaggtattttgatcttaaagggttacctgctaatgatgatcatccatcacatgatgtggctaatggtcaaaagttggtcaaagaagtgtatgagacattgagggcaagccctcaatggaacgaaacattgttggtgattacttatgatgaacatggtgggttttatgatcatgttaagacaccatttgttaatgttccaaaccctgatgggaacactggtcctgctccttctttcttcaagcttgatagacttggtgttcgtgttcctactattatggtctctccttggatcaagacaggcactgtgataagtggtccaaaaggaccaacaccaaactcaaaatttgagcactcatcaatccctgcaacataaagaaaatcttcaacctttc

SEQ ID NO: 53126 - DNA, 415 bp, Gossypium hirsutum
  unsure (1)..(415): unsure at all n locations
  Clone ID: uC-gsronu33B143c06b1
tgttgtatcaaacagnggaaaccccctnngcgnnataggtaaattgaaccaatactccgaacaaccccacaaagcaagngactctttcccctttaagtggataaacaaaaaatgggagagagggtttttatgtcacctcgatgacaactgctggaagccgatggggcgttgttatgtctcgcaatgcaggcttcagtgatcaggttgtggaacttgattttctctatccaagtgaaggaatccacagacgttgggatagtggttatagaatcacatcgacagctgcaactntggatcaagctgctctaatcttgagcatccctaagcgcaaacccggtgatgaaactcaagaaactttacgcacatctcagtttccagcattcatgtaagggaaaatgggcaaaaatctctatct

SEQ ID NO: 53127 - DNA, 512 bp, Gossypium hirsutum
  Clone ID: uC-gsronu33B143c07b1
gtcacaccaggatcagacacagctgctcgctgtaaacttaactcaacttgccatgtatgacatgaggaaaatggcgtgcataaagcagctggctctaggagaagcttcagcataaatctaccatgcaacattttcatgtgatagccagctagtgaacaccagtcacgcggatggaacagtgcgcatatttggcgcctcaaatcttcaattacaacgccagataaatcccgccgcttatctcccatccaatgccagctcaactgattatccgcttgtggttgctgcacatccccaagaacccaaccagtttgccataggcctaactgatggccgcgcttacgtgttggaaccacttgagtctgaaggagaaggggatgtgagtgccccaacctcaacgcattgagaatggatccacaagtaccatttctactcaagttgcagacttggatcaacccataccccaaccccagggctaatatttcaaaccaatgcagacttaggttatttagagc

SEQ ID NO: 53128 - DNA, 333 bp, Gossypium hirsutum
  Clone ID: uC-gsronu33B143e02b1
taatgctcccataagggtagggttaaaggcccatgctcgctcgaccgccgatactgcaccgcagatgatggccgaggcgtaaaccgacggttctcttagtcacggggagaccgcgagtagaggcctggtgctttgtctgagacaaccggacgactaaggaggacttgggtgcgatcagaccagccttaggctgctgcaagggcaccatcgccggagaaacatccgcaccgacagaggaggtgaggctcctcaggtacgtctagttctgccgccgataaagggaaagcaggattgctaggagcagagatcgaacacgaaagaggcacgaggcca

SEQ ID NO: 53129 - DNA, 426 bp, Gossypium hirsutum
  Clone ID: uC-gsronu33B143e07b1
tcacgcgtccgattgctttactccccctagggttaattttaaaggaatagcgtcgtttggatttttcatagtttttatcatttcatttccgagacaaaaaccgagtttctccttattcacagggttataacgagttgtatcgagttgcattgcctgagataaccgaggttctaagatccatctgtaagagatatgaactgcctttggctctaacatgggcaccatcccggcattccgataagaacttctattgttgcgtttcgacctcgggttcctcttgtttcgtagctgatgaaggccttacaggattcctagaagcgtgttccgaacaccagttgtttcgaggccaaggtattgttggtagagcttacgacgaacaaaccatgtttcgcaactgatataacgagcttcagcaagacaatttat

SEQ ID NO: 53130 - DNA, 440 bp, Gossypium hirsutum
  Clone ID: uC-gsronu33B143f03b1
acgtagaaaaaacgtgatctttctgtgaaagaggggcatgtttttcaaatggagtgctgtgaggagaggcccatacttgagagcaatgtggggatgggtgcgaacttgtgcacctaccatcagaaaaaatctcttggtgaccaaactagtggatcgatatgcaatggaaacgaaacctagggaaatgttctgcttctagagccagctgataaatcaccttttattggagatatcaaagctggctatagccagtcatctctagaaacaaacatgcacaaggctgacatattaacccacaaggtgccatcaactgacttactattggctaggacaccaaaaggaaagctgtccatacgacgtatggataggattgctggtgcaggacaacaggagcctctcatggaggtatctgctcctggatcaagaatatcagacatatc

SEQ ID NO: 53131 - DNA, 277 bp, Gossypium hirsutum
  Clone ID: uC-gsronu33B143f06b1
gcgtcacgatgccgaacggcttgtgattgactgggtggagtttcataatagccttttctgtgtgtttcgacaaacttattcaacatgttttgtgtttatttttggtttgcttaagatggtgtatgaaataagacaatcagcattttgtttacacatattttcttctctcaaggatttttacttaaatttgaagattttggataatcattcattttttgggaatctattgtcatctttggtctaaaaaaaaaaaaaaaaaaaataaaatggacatact

SEQ ID NO: 53132 - DNA, 478 bp, Gossypium hirsutum
  Clone ID: uC-gsronu33B143f10b1
tcgtcatttctgtccctgaacttattttcaggctgtgattttcaacgtgtccacttgtcaattgatccattccttttatttttaaaaatgttttttctagtcatatttgattctcaatatgtgtgcacattctgtctgctttcttcagttactttaattgtatttcttttttaaaaaatttggttacttccatatgattccttatggtttcccaaaggttgacaagtctcttactgctgtccactaatatgttccatttctcttcacaagctaactggattgagtattacgttgaatacctaattgctgacatcacttatattatccagaaatcactattgtaaacaatcttccatagaactttcgggttcaaaatagttctttcattcacatgattatatgtatgcattttgcaaatgttcatttctagtaagtgttaactgtaccattttatatgggaattgtttatgtagtcatg

SEQ ID NO: 53133 - DNA, 208 bp, Gossypium hirsutum
  Clone ID: uC-gsronu33B143g02b1
gcctaacgcgtgcgacacaagataggaatcgcaggggcaatgtttgacatgtttgtgggcacaccccctcaagggcttactactcagatcgtgacaacccaaatcgcttcagctaccctcaatcttcagacaggtgacagaggaaaaattggcatcacttccaatgcagcactcagaccccaaagctcgctcttccctgctgcactgt

SEQ ID NO: 53134 - DNA, 387 bp, Gossypium hirsutum
  Clone ID: uC-gsronu33B143g03b1
cagtgatggacaaacctctcacaggccctcgccgggggcattttaaactacggcagggggcatggcaccaaagaaagacaaagcccctgctacttcatacaagcctgcaaagactgcaggtgccacgcagaacaagaagaagaggggcaagggaaagctaaaggagcaggcgaagaccaaggagctggtcgatcaggctaccaatgacaagctgagctatgaagccccgaaatacaaggagaggactgactctatactaacagagcgtgagaggacaaatggaccacacgcacggcaggctatcacggaactgagggccagaggatagatcaggttcggaggatgaccgttcaagccagcagatctacactagggctacaaacacct

SEQ ID NO: 53135 - DNA, 534 bp, Gossypium hirsutum
  Clone ID: uC-gsronu33B143g09b1
atcatgctcgtgcaatttcattgtctttgaagagggcatattaagagaaagctgtgcgtatgccgaaggatcattacgaacaaatgggaacttatgattcaaatgataaaactacggaaacgactaataacagctcgaagataggaaactcttcacttagacaacgaccagtgactcatgaatctgtccatgatactcaaaatcatcttctgagtaaagattccttgaattctaatgagtgggttgatatttcacagaaagagcttgatgaagcaattatgctggagacccaactttttagccagattcctgaaggcagttcgtatatcctttctcatgagcaaggtggtccgggtagaagcattaatcctggtctagaggctgtatctggtccacaaccatcctctataatggaccaatgtttactgcggcaacagcaggatgaggagtatctgatatctctattagctgacaaagaaaaggagatgaatgctcttaagaaagctgaaatcatagtttgaaagagaatctctc

SEQ ID NO: 53136 - DNA, 422 bp, Gossypium hirsutum
  Clone ID: uC-gsronu33B144d04b1
ctttctcgtccggtcagcagcagacttctacaaaatcactagctgcaaatgatataacaggagtatcttctgcacctagcccgggagctactgaacctttagcatcagaaggctttattcgaggaaggtcttataatatcaggatggatgatcaagttctgctaagattctctcctaagaactctgagtccacttattacttcagtgatatgataggcgggactcttactttcttccatgaagaaggagctagaagatgccttgaggtttcagtcacgcttgaaacttctgagactataagtcggcgttttgttcatccttctaggaggaattcctcaacaattaccaaggttcagagtgatcatcatgaggttggtgctgatctggtacagacagggtttctcttttctgtccccatggat

SEQ ID NO: 53137 - DNA, 293 bp, Gossypium hirsutum
  Clone ID: uC-gsronu33B144e02b1
tataggtcgagagggaagcccaagtcaaccaagggggcatttagaacgcatatggctgggcttcagcttccggaggggaggatcgctaggttcttgaaagccgcgaaatatgctgagcgagtaggagccggagctcccgtctatctctccggcggatgagagtatcttgctgttgaggctatagagcttgctggaaacacggggagagacacttaaaagaaatcgcaacgtttcaaggcacagccaactagctgcaaggaaccatgaagagctgagctagcttttggggtcag

SEQ ID NO: 53138 - DNA, 162 bp, Gossypium hirsutum
  Clone ID: uC-gsronu33B144g03b1
cggggcaggcaaaactccataaggcaaaagggaccagcacgggtactggaggagcaagctgtattgaaagcggatggttgcccgaacactccgcaggtgagacaaatgcagggaacgagggggagaccccacagaccgggtccaaggacaggacaaaacagg

SEQ ID NO: 53139 - DNA, 269 bp, Gossypium hirsutum
  Clone ID: uC-gsronu33B145a01b1
acaataataatacaaacaaaaaaaaaaaaaaaaaaaaaagaagacacctttaaaaacccccttgtgggtaaaaaaacaaaaaaaaaaccaacaatcactcccactgcccactcttaatttcaattcccctgcctaaccccctctgggttccccaccttatcgccttgaacaacctaccccttccctcacctaacctaattgcaaaaaatcccactccccccacctttcccaacatttgagcatactgaaccgcccatatctcccaccct

SEQ ID NO: 53140 - DNA, 264 bp, Gossypium hirsutum
  Clone ID: uC-gsronu33B145a02b1
cctcctacggcaactacagccacccaactatggccaacaaccaaaacgcccagcaccgaagtcacacaagcctcctgtgcatgaacttccaaagaagcctccaacgtataaacctacgcatcaatccatgaacctccaaagaaccctccaatgtataaacctaaaccaccactccatgaacttccaaagaagccaccgattcatgaacctaaaccaccaaagccaccagttcacgaacctccaaagaaagagaaaccagaacac

SEQ ID NO: 53141 - DNA, 228 bp, Gossypium hirsutum
  Clone ID: uC-gsronu33B145b12b1
cggatgcgtgggttttttttttttttttttcttggttgctagtttctaaagttaatgttgtgcttaaaaacatatttgaccatttaatgatatggttcctgcacattttctagataaaaaaaaaaaaaaaaaaaaaaataaataaaaaaataaatgttacaaccgccccctatataaagaaagggtgggcgtcgaaaaaaaaatccaggactccgaaaagaaaattct

SEQ ID NO: 53142 - DNA, 408 bp, Gossypium hirsutum
  Clone ID: uC-gsronu33B145c06b1
ggggatatttctatgatggggaaactggatccattggagatgaggacaatgatgagtcttcttgagatggtggttcgttttcttggcgcggcggcgtgtgaggagacggacaactccgacaatcaacaatgactaccattccttgcagtggcggcatgtaaggcgacagtggtttgatttcttggctgcgccatgtaagggatcttttttatcgtccgaacatcagagtttcaatcgcaaagtgttttccatgttcatattaatctagatcttgtacttgtttgctttgtttgtcttcatggctgtaataatttgtttctcattcaacagcagttgagggataattgtttctagttcatttgagaactgttatgatattcacgtaaagattttcattgaaatgaacaa

SEQ ID NO: 53143 - DNA, 468 bp, Gossypium hirsutum
  unsure (1)..(468): unsure at all n locations
  Clone ID: uC-gsronu33B145c08b1
tgatttttctgttgataatagttgtaggagtttgagtggtgattctttacaaggtgtggagttgctggtgctacggcggaggagggaatggagtgacagttgttgagatgagtgtggaaagcggagacggggaagaccatcgaggaatcaagtgagaaccacgtcgtcatcggcgctaccgccaccgcctcaaaggaaggatgaggatgatgaagaagatgtttgttttatatgcttcgatggcggcagtctcgtgctttgtgatcgacgatgagtttggaaattttttaacattcacaatggaatgctaaaacttacagaaggtggcacttcttgaggttgaatgcacatctttaaatcaagaattgcaagacgtggaagctcgttttcgtcgtggacaaaagaagtccccagaagaagcaaatcaaatgcttcagatgcangcatggcangaggaaagtgagcgtg

SEQ ID NO: 53144 - DNA, 479 bp, Gossypium hirsutum
  Clone ID: uC-gsronu33B145d08b1
cttactcgtccgggcacaagtccatgaagcagcgggtgaatgttaccccgaaatcaagccttctgccgactactacaagtttcgacagtcaagctgacatcatgtctattttggctacaaaattatcatgtccatgtcaggttctgaagtttgaagcagtgaaagctaacatcatgtcatccatgtagtgtagaaaaatgggagtgatattttcatcttttgtccgatctgacctactgagtaccatttttgtagttaaaaagctctttgtgttgcagttgcagagtgaagagctgtaagtaggagacggcaaaaaaaagaagggtagtgatgctaatgtatttgtagcaactctttttgcctttagatctttcccaaaccagtagtgcttctcatttctttccccacttagatagctttattgtttttcatttattattggctaaatggtataaaagatcattaaacagtagcaatga

SEQ ID NO: 53145 - DNA, 396 bp, Gossypium hirsutum
  Clone ID: uC-gsronu33B145e06b1
tatctcgtccgccttgttagagcccacgggtctgattaccatcccttgtggtgtattttagattaggaatgggggtgggtccctcgatggtgaaaagtccttcatcatcatcatcatcatcaccatcacgtccgggcgttttaggggttcgatgaacaagaaaaagaaaaaagtctgttattaaccacctcaaatgatagaaagaaaaaagggtttttatggtttagcaagtgccaaacaatactaggccaacttaaccataaatgaaataggcttgattgctaatcattagtgtattagctcctgaaatttacgactgttttttataattcgagagtgagatccacttgcaaattgatgacttgattaatacgaatattttatcactccaccagt

SEQ ID NO: 53146 - DNA, 352 bp, Gossypium hirsutum
  Clone ID: uC-gsronu33B145e07b1
aaataatttcccctcaatccattttttcacgtagtgtgttaatatacgatccagattcaaaacaacgtcgtttaaagttcagatggatcaacggcgaagccagcgggtggtcgaagggaggagtgaagaagaaggcagtatctaagtcggtaaatagcggggctccaatttcccgcgggtcgtatggctcaggtcctcaagaaaggtccttatgcgcagcgatacggcggaggcgctcccgattatcttgccgacgaccttgagtatcatgccgctgatgctgaggaactggccgagaatgcagcacgtgacaacaaacagaacaggatcaacccctggcacgttctactag

SEQ ID NO: 53147 - DNA, 411 bp, Gossypium hirsutum
  Clone ID: uC-gsronu33B145f09b1
gatgtttaacgcgctgagcgtaagcggatcaatgcgggggggaaaagagactcaccaggatgcccctagtaacggcgcgcgagccggacatgcccagcgcgagaagctgacagctcggctggcgaagggcagcctggagaagcgttctcagagacggaccggacccaagtccgctgtaaaggggcgcctactagggtaagagcaccatggcgccctgaccctagaccaccaagaggcgctgactccgagtgatgttgtgtgtgaatgcagccataatctgtcgggacattgcgtccaaggctaagtactggcgagagacgaagagctaccaagacccgcgagggaaaggatctactggttgtatggttctttaaccatcggtgcttccatgagcttttcttttttatttct

SEQ ID NO: 53148 - DNA, 511 bp, Gossypium hirsutum
  unsure (1)..(511): unsure at all n locations
  Clone ID: uC-gsronu33B145g01b1
cccacttgttcgatttgattgtgcaacatatccgcactaaggtcggtcagcatgatctctgcagaatatatcccaatgtatatgtaattagtcaacatttcagattagaggaatgcatctctgattagagaccgggacatttctaaacatgattttgtcttctattctgatcggcttattcgtctggtgggagagcatggtcttggacatctgccgttcactgagaagcaagtagtaacaccgacagcaacggtatatactggggttgatttttgcaaaaagttgtgcggcgtttccattgtccgaagtggtgaaagcatggaaaacgcattacgtgcatgttgcaaaggaataaaaattggaaaaattttgattcatcgtgagggagatgatgggaaacagcttatatatgagaagcttcccacggatatttcagaacgccatgttcttcttctcgatccagntcttgctacagggaactcggctaaccaagccatcgaactactcatac

SEQ ID NO: 53149 - DNA, 121 bp, Gossypium hirsutum
  Clone ID: uC-gsronu33B146a12b1
ccggttccaaagtatgtatttgtagatatgctgcggtgtgatttgagtgacacattgaccccaatttcaagggctacttgcatcggcttgaagtgtggtatattgtcacttttaagcatat

SEQ ID NO: 53150 - DNA, 116 bp, Gossypium hirsutum
  Clone ID: uC-gsronu33B146b12b1
tcattcgtacgattgaccctgttgcgaccgaggaagttttatttactgatgttttgacttttgaaaccaatgccgagaggccatttgtggctgaccctgattatgtatttccgact

SEQ ID NO: 53151 - DNA, 343 bp, Gossypium hirsutum
  Clone ID: uC-gsronu33B146c01b1
cccttttatataagccaaaaaaaaaaacaaaaaaagggaaaaattaaaaaaaaaaaatggggaaaaaaaaaagccaaaaccaaagctaatacggccggcctcatcggaggacccagggttccccccgcgtccttgcgcggctccacctcatataccgggtcacgtaaccagacccccttggcctacgcgtgccgcctccgcacctggcccaacctgggagtcccccctcgtctccccctggctgtccttgcccgcttagccacttggcggatgctggtaaaggcccaaagaggtcgccctttccaaccttggccccccctgaaggggccttggtgccccccct

SEQ ID NO: 53152 - DNA, 482 bp, Gossypium hirsutum
  unsure (1)..(482): unsure at all n locations
  Clone ID: uC-gsronu33B146e04b1
atatttcttccacgtattggtgaatatgcgtttggagtcatcacttcatctgtaattctgcagagctactctggtgatgaagagctatgttgcgtctatgttcccacaaatcatctntacattggtgatattttcctcatcaataccaaggatgttattagaccgaatctatcagtccgtgaaggaattgaaatcgttgtttccgggggaatgtccatgccccagatcctgtcaacagtagacacacgtttgcctctagaaagtagatccgacagaagctaagatagtcgtagagttgtattttctctgctttcagattcgaatcaccggatcaccccacataatcaatgtgtcggctatccaggattcaatatttagattttgttactggtgtatgtttgattctggtggcatgcgtaacgtcgcttgtttgcgtagaaatgaaaactatttgctttttcaatatagtttgatcgaaaata

SEQ ID NO: 53153 - DNA, 358 bp, Gossypium hirsutum
  Clone ID: uC-gsronu33B146h01b1
cttgtttattgttatatcttgtttaatagtgaaatgagatgaattcatcatggagatacgtgtgattatttatctggtaactataatctgtagaaaatcgaagtaacatatagaattagcgcacaaattctatgttgctgacttgttttcatccataatattgattattacaggcaggcttcgacggcaaaaattgcattgcagatgagcattacctgccaacctttttcaatatgattgatcctgggggtattgccaactggtcggtaacacatgttgactggtctgagagaaagtggcaccctaaatcatataaggctcaagatgctactgaggatcttctgaacaacattacgtc

SEQ ID NO: 53154 - DNA, 275 bp, Gossypium hirsutum
  Clone ID: uC-gsronu33B147a08b1
tttatccctgtttttagctcctctgttttctctgttcatttcgcagcaatctttcttcggaatttaaggatatccattactttatttagttcttctccttgacaagccccaaaaaagaaaaaaaggtgttcttgttttttttttttgaaagaaaaatgtgtgggattttagctgttttgggttgttctgatgattctcaggccaaacgggtccgcgtgctgaaccttttcccaagcctgaaacaccatggtacacactgtagtgcgcctcattaa

SEQ ID NO: 53155 - DNA, 554 bp, Gossypium hirsutum
  Clone ID: uC-gsronu33B147c02b1
gggttctgtttatttaaaagctgaggacaatgttaaagccaccttcgaacagtctgtggaaaatctggagatgactttggataagtcccagaatagcagtgacattagcgatacgagggatgaagattcaaattcttttgctagggaagctaaccataacaaagaagtaacggtttcaccattgccaaatgtattgaaaccctttgagactaaccaggttgctttgagttcctacaggaatggaactgtggaggtaaatgggttccatgaaaatggtctaactgaagttaaaaagttgagtaaccggagaaagcataggttaggttgcttcggcttcaattccgggtaatgtatggtctgatgcctcaaccgagatggctaggactagataacttcatcagcaagcaccactttttgaaccgcagagaaaagggaagacttgagagtggattttctaacatcgtatattgaatcatccccatgaataatataatttaatataatgtataccataaagcttttattttcttctcttatctataatggaatataat

SEQ ID NO: 53156 - DNA, 435 bp, Gossypium hirsutum
  Clone ID: uC-gsronu33B147c06b1
cccactcgttcgccgttttgagggctcagatgactgaactaagccaaaggctagactctctaaacgacatcctccattatctaaacagagagggtattgaatacactcctgactgtttcaccaaccctttcaatgtgccttatcttaaccaacaaccacccatcatggcctctgcacacatctttcaatactaattgatgaagaaagtattcatgtcatttgttggtgggttttgttttgttttgatttttcaatgtgggaatcaatgagtgggtaagtgaattggcaattctgccatggttgctttctagggttaacaagtatggttttggttttttctaggagggcctttgagaaataaaatatggtgtggaggactgtgaatgtatgtggcgtttcaagttttatctaatggcctaaatacttatttgtttt

SEQ ID NO: 53157 - DNA, 292 bp, Gossypium hirsutum
  Clone ID: uC-gsronu33B147c07b1
ttggatatacatgcagacgcaggcatattaacagtgcttctacagaaccatatgggcggcctccaagtccttcacgacagtcaatggttcgacgtccaccccactcgaggtggtttggtcataaacgtcggcgatcttcttcaagttagcttcaattcacataaactctatatgaaactgtcctaatagactagctactgactctttttatgttgtttatggtaggttttatcaaatgataagttcaagagtgtgaaacatattgcagtttccagtcatgtcggacctagaa

SEQ ID NO: 53158 - DNA, 529 bp, Gossypium hirsutum
  unsure (1)..(529): unsure at all n locations
  Clone ID: uC-gsronu33B147c12b1
gtcgttatgagggtgaaggagcaattggacaggtcaaggcaaaggctttaccatgagcgaacgcagataattgctgctcgactgggcttaccagcttcctcctctagagcaatgccgccaccaaatgctgcaaatagagttgcaacaaactttgcaaactcggttgcaaggcctccaatgagcatgaaagccccaagaccaccattgtcgagacccatgggttctatgacccctaccccttccaacccatatgtatccaatacagttgcagggagttcaattcgacctggtagccaagacaatctttcctccgttggaaccaagtagtctctattcatattacttgtgaatagaatttttcaatccattcttatacaagggtcatccatcttgagatgcatctggttagtaccccctttttttattggtggcagttctgttcttaacgctgccagtcatcttgggtgcatttaagaactngagaatatactcaagctgaactcatgggcatatcatatctgatggtttc

SEQ ID NO: 53159 - DNA, 266 bp, Gossypium hirsutum
  Clone ID: uC-gsronu33B147e07b1
tccctcgtccggacccctggctgtttctataacccccatgcttatctggagatcattgtcttcacagggtggaagggtccgcattgtggtgttggagacaagagacagcagattgggacattcatgtcggaagtggaatctgaacggcggctaggaaagtcggagatcctgcaaaatgcctgcgttgacgtccgttaagtgcttagcagcagataccttttcgcctaaggaaagataattagcggagggaacctaaccgttgagac

SEQ ID NO: 53160 - DNA, 147 bp, Gossypium hirsutum
  Clone ID: uC-gsronu33B148a05b1
gcgcccacgcgttctttgtgattgctcaccaataatcatatatgtacggatgggttccaccatgcactacgcggcttcaattaactcttttagtgaaaatatgtccgacattcggcctgcccaccctggaaacggctcagccggagg

SEQ ID NO: 53161 - DNA, 444 bp, Gossypium hirsutum
  Clone ID: uC-gsronu33B148b05b1
atgctggcccgcctgcacgggcccggccggaatggctggaccgacgcacgcgaacgctcttttgtttcatgaaaccgagaagacaatggcagtctgagtgaatacaaagctagatctgcgcgcagttgacgcgctgacaccagacgtactggcagcggcagatagaaatgtggttaggatttgctactgtgcgaccatagttaggtgttgagcttaaggctagaattagattgagggctcagggactggcgctgagctagaagcactcaggtatgtgggggatggggccaagaggaacttgaccagttacatattgagtatcgggcaaaggaactcggcaatggcatgatttatggaatgcactatattgagagcgcgttattacaattggacaacacattggtgtggaatttagcaaccaaatattggcaacgatgttatacg

SEQ ID NO: 53162 - DNA, 279 bp, Gossypium hirsutum
  Clone ID: uC-gsronu33B148c03b1
cccacgcgtcctttagggctgaacgtgggcggttactgcgacgggtgtgttgtgcgactgctgattgctgtgatgtggggcgtgcacgacgttagggtagctgctgttaaccactgtttagggttagactgggatttggggtttggtttagtaatttgggccttattgggccaaatgtaattgggttagattgattaattagggccccgagaatcaattgggtattacaaatgcaaactagaattgttctccaaatccaacactttatgtaattcatac

SEQ ID NO: 53163 - DNA, 141 bp, Gossypium hirsutum
  Clone ID: uC-gsronu33B148c05b1
gccacgcttttcttttgatctatgaccaatcatgatatataaggaagggtttcaacatgcactacgtggctgcaaataacactctaaaacacaatatgtgctacatgtttgctcaaaattcttaaaatactctaatagacc

SEQ ID NO: 53164 - DNA, 394 bp, Gossypium hirsutum
  Clone ID: uC-gsronu33B148c07b1
gctgttgtttccttcacagctttgcctaaggctatagaatgcaatgtgatgtcgtctgtactctgttacatgaatcgcagcgctacttttatagttgagcacaaaccctacttaccccttccagatttcctatctttatttgttttattttagagagaaataattttgttaaaagaacaaagagccaaagacatagatagttactccagagattttgtaagagaagagcaaggagaaaatggcggcggtttttcccacctggattttgatagcggccttgctttttgaggctgcggtggttatgggcagttttcctgcacctttgaagctggagagaaaaattcctctggcgagccatgagttggggctgactcaactgagagaacgagataga

SEQ ID NO: 53165 - DNA, 224 bp, Gossypium hirsutum
  Clone ID: uC-gsronu33B148d07b1
ccgctttattaaaaaaaaaaaaaaaaaaaaaaaaaaaaggggggttaattaaaaaaaaagggggggaaaaaccgcccggccgccctggggaacaggctccgccgcggcatgggccgccagccctcccatgggcccctaagtacatccccgggccggggcctacaccgcctcgccggggaaacccctgccgttccccaactcaatcgcctggggcctcacccccc

SEQ ID NO: 53166 - DNA, 233 bp, Gossypium hirsutum
  Clone ID: uC-gsronu33B148d08b1
cctttgcttacgcccacgcgtccgacaaaatccagagggcgcggattcatatacctcttcggggttgaaacctggctccccacatatggaaacgcctgttccagccgagaacccgaagacctctacccatcattacccaaattgggagaacccgacgcataactagctcaaaggaaagaaacgttttacaagatacgctccgcatctagagttctaggccacgacatgaccct

SEQ ID NO: 53167 - DNA, 301 bp, Gossypium hirsutum
  unsure (1)..(301): unsure at all n locations
  Clone ID: uC-gsronu33B148e01b1
cttttttgttttttaccttttctctcttttgcaaagttttgcagggctgaaaaaaaactgaatggaaaatagattggcacggttaaatcgatctaaataacgagagcccactaacagaaaagtattaagtcccaaacatcanagagagagagagagagagagagagagctttatctttttaatatttgattttacttgagattgatgatggttttgggagtggcaaacatttataccatatttgcctgaaactctcagagactttagataggtactacttcttttgcagtaaacgaagggg

SEQ ID NO: 53168 - DNA, 179 bp, Gossypium hirsutum
  Clone ID: uC-gsronu33B148f04b1
tcgcccacgctttcgttataacaacatttgattcaacgatctgagataggcattacgacttacgagacgtaactcgcaacatgtcattgtaaaccctgtatatttcaactttgaagcaatgagtagtttgttcataaacctgatatgttcgttcccatctaatgaaccgtctttcaatc

SEQ ID NO: 53169 - DNA, 332 bp, Gossypium hirsutum
  Clone ID: uC-gsronu33B148f12b1
gctatacattgaagtcgaatgaagctgacatggacccgggggatggtaagaagcaaaagtcgggggcaagaaacaaagaaagagaatccccaggctgaagccaaagaagaccccaaaaggttgggtgcgaaatggaagacgaccacggccgcagaaaagaagccttaccaagaggtatatccagccaaaaaggaagtgtacttacaggccatcgccaaagaaaaaccccagaccgaagccctgaaaccccttgaagatgaacataaaccaaagacagccctggagtcattggaacaacacctgcagttcaaggaagaagctgagaaagaaac

SEQ ID NO: 53170 - DNA, 197 bp, Gossypium hirsutum
  Clone ID: uC-gsronu33B148g08b1
cctttgcgttcgagcagaggccttgattactacgctcctacggatttgctctcaggaagatcctcagaaattacatgtccaaaacccagcccaaagctaaaaactatgtttctagtcgagtggatctacggcatactggctttcctcggcctctggcatggggagactaagatctcatttgtcggcctagataatgc

SEQ ID NO: 53171 - DNA, 422 bp, Gossypium hirsutum
  Clone ID: uC-gsronu33B149a01b1
cggtcgcgtgggtggcgatagacataaaaacaagggccactaccagagcagtatttggggttctatctctcttatttggtgtaattgctgagaacaaaaagccggcatttggaaatccagaaattcagacatcaccccttcgagtaatttgcaactatccatcggatcccactgttggtcttgggttcttatccattgcatgactcactacttcaggtgcgctcggatattactctgtgtttcatccttacaattccacatatgtatcgtattatgtcttcttccgatccatccctttcttcgtcttgttcctcatcaccatgggactgtcgacgttgggagaggtatgttaacatggttaaccatcacagagctcagtcatttaactaacaagcgtcataaagacatggagaccacatgtg

SEQ ID NO: 53172 - DNA, 463 bp, Gossypium hirsutum
  Clone ID: uC-gsronu33B149a06b1
cctactcgtccgggaaccattgctcgtggtacagcaccggttaatgatgaacggctcaagttacaattgcagtatagtgaaaaggatcaggctgaaaatttaatgattgtcgatcttctgaggaatgaccttggtcgtgtctgtgaaccgggcaccgttcatgtgccacatctcatggaggtggaatcttacgcaactgttcatactatggtgagtacaatccgggggaaaaagcagtcaaatgttagcgctgttgattgcgttaaggcagcatttcctggcggttcaatgacgggggccccgaagttgagatcaatggaacttttagattccatcgagagctgctcccgtggtatatactcaggctccattggattcttttcctataatcagacatttgatcttaatatcgtgataagaacagttgtcatacatgaaaatgaagcaactataggtgcaggag

SEQ ID NO: 53173 - DNA, 481 bp, Gossypium hirsutum
  unsure (1)..(481): unsure at all n locations
  Clone ID: uC-gsronu33B149b03b1
gacgaaccagagccgtccgattcgactactgtggggtccaatgtacggaaggatctgagtgaatggcaagagaggcatgccactcttgttcttactactgtgaaggtatatatgtgtgtgtgcgtgtgttacatttcactatagattttgtaactctaaggctgcgtttggctttactctgtagttgtgtttaatcctaattgctgaacttggcattgagatgaactttccctgaagtcaattctttgtgtcattataattttgtattccaaaaggaaatttcaagctagacttaagtttagtaagaattgcatgaaacatttcagattttgtactttcaataattactttatgcanaacatattattcttatgcagganatcaagaaattgagatatgaattgtgtcctcgtttgatgaaagaaaggacttcttggaggatatatttcactcttgtaagcactcatgtngcaccttatga

SEQ ID NO: 53174 - DNA, 236 bp, Gossypium hirsutum
  Clone ID: uC-gsronu33B149b05b1
cctactcgtccggccacgcaagcgtgccataccaaaactatactcttcaatgtacgtgttatccccacgtgagacctgaatgggacttgtcatgcaaagccatcagaaaatagatcaaaacgaggcttgcaagaaactaggagcctcgaaagatggggcggatattgaagagaacctaagataacctaaagcatgatgctagtatgcaccagtcatatacagtaacatagaatgaa

SEQ ID NO: 53175 - DNA, 420 bp, Gossypium hirsutum
  Clone ID: uC-gsronu33B149b12b1
ttgttacgcgtccgacgcaacccacttagctactacaacgtttacccaaacttaccaaacctcaaataaacagtttacaggtaatttttctttcttcagatctgaccttctgttttttttcgttctttttttttggtgtcactttttctttcaattcttgtctttactatttttattttgcttttgttccttttcgttattttttttttgggtcgttaggtttcggtttccgtgtgcgttttatggaatatggtttttaattgatgggaactccaaattgggagtgttttaagatgggtttctagttttgtctcttttcctaactctaaaaatggaacaagggagggaataattgaattgcttcgatgtctcgctcttattttaaggtgttctgggtcgtttatggaatgttagatatat

SEQ ID NO: 53176 - DNA, 446 bp, Gossypium hirsutum
  Clone ID: uC-gsronu33B149c03b1
ccctctcgtccggacctcctgatcctaattttagtccttttctcaggcactttccttctatcctcttacttctcctacctgttccattccctttcccttctcctttcccctctcctctccacccaaagcgcttccttttctctccctttcgtttcctaccttttgggttgcacacttttctttgtcacaacccttatttccatcgagttctgctgcggttcacggtcccgtaaatgcgaaaagcctggttgcaaagggctgaacaaggctttggagtttgatttgcagctacaaacggaggattgtgtgaaaaatggatcacaggagattgatcgctcgccttggaaaggtgggagtgaagggaaccccgattatgagtgtttgagggctgaattaaggcagatggcaccgcctaatgggcgagctgttttgctttttcgggctcg

SEQ ID NO: 53177 - DNA, 200 bp, Gossypium hirsutum
  Clone ID: uC-gsronu33B149c07b1
ttttcttttaactttgatctgctctggtatttgccataggtcttatgttaatcttttttgtcctaatgcattgttgggttttcttgttttgatgaaatagaaattgggtttttgcttgtttgcgattttagttagatttgcatagtgaattgaggggttgagtggatgaagatctagggtttcttaggtggttgtgattt

SEQ ID NO: 53178 - DNA, 454 bp, Gossypium hirsutum
  Clone ID: uC-gsronu33B149c08b1
tttctgcccaaaacacagatgaaggcggccgagtggaacacaaagaatacaatgatactggaagaaggagacgcatatatatgttctgcttcaaaacatggaaaggttgatgatgagtgcgtagaaaggtttatggagcaacttaaagccaaagtgaagagtgacgtagattattgagacttccaaatcttagaagaggatttagggaaggatttgagaacggctgggagatttagtgttccgctacgcctggaacatattgcatagagaatgaaagatgggtctggagatattacttcacacagttcacactgtgactgtgcagctaaggctacctatcttgtcttctgtgctgcaatcagagagatgcatgatctcaaactagaccaggtcaacaggactaagttattgttgtggcgagatgcaggtaacactgccctcaagcttcaattca

SEQ ID NO: 53179 - DNA, 494 bp, Gossypium hirsutum
  Clone ID: uC-gsronu33B149d05b1
gatacattgattaaagggctggcactgctgccgctggtggtattcggaggaactaccatttcagaagcaagagaagtagaggtggggtcgtaccttccgccatcccccagcgacccttctttcgtcgtcttcaaggcctccacaaaagacaccccagctctacgcgcaggaaatgtgcagccataccagtttcttatcccacccacatggaagcaaagccgagtggccaacatcttgtcgggaaattactgccagcccaagtgtgcagaaccatgggtagaagtgaagtttgaagatgaaaaacaggggaaaatccaaggggtggcatctcctttgatacgtctaacaaacaagccgaatgcatcgatcgaagaaattgggaaccccgagaaagtgattgcatcacttggtccttttgtcactggaaattcctatgacccagatgaactccttgaaacatctgtcgaaaacgtgggcacagacgtactacaata

SEQ ID NO: 53180 - DNA, 331 bp, Gossypium hirsutum
  Clone ID: uC-gsronu33B149d10b1
tttacgcgtacgcttttttccttttgatacgattgtggttctgggtggctttttctcttcacatttgtttctcccgatgagcaaacgctcctttgtcgttacaattagaggctattgccactcaactcaccactattggatctgaccttggatatttctgcttcagatttttctgttataatctttctagtatcttctcgaagctgctttccaacggagaaatagatcgaagagagagggcagaacagacaagtgacaagaggaaatggctctccccacaagaagcatataaattttgccggcatgatcggatgagagatgctcttcaagt

SEQ ID NO: 53181 - DNA, 491 bp, Gossypium hirsutum
  unsure (1)..(491): unsure at all n locations
  Clone ID: uC-gsronu33B149e06b1
atttttatcaagccctgttgcagagccacaagtttctgactatgccttggaggaggacttcagtgagtacgtcaactctgttcacattgaagataatccagttgacaactatagtatcccagagcaaccagagcaagaagctgttgaagatgaggatccagtggaggaagctcctacagaggaggaaacccttgtttcacatcacagtgtagtgaatactgtgcaagaacctccatctatacctttggaggaacctgttggggagcctccgaggagaacttatgcttctattttgagtgttcccaagcagcaatctgcttcatctgctcaagttcaaccttcttataacaagattccctcgagtacttcagattgggaccagacaccagaatatactaatcagcagtcacattctgcttggtcagatgttcctgaatctgcngcagagacagcagtggaggaagctttagtctctgaagaaggtgatatac

SEQ ID NO: 53182 - DNA, 274 bp, Gossypium hirsutum
  Clone ID: uC-gsronu33B149e07b1
tttccatctaatctggggaaaagtcctcttaaccgaggatcgaattagtggggatctttgtcgaatattctgataaattctgttggtataatgtgttttttaaaatggtttttcatttcccagtcttttgttttgagtgtgttaattggcttggcttaacagaactgtaaaatgttccctcttccttcttatatcccattttcatatgtaacaaaagattccatttgcttttcttgccagaaatatataatacttaaaacatattttttgcttg

SEQ ID NO: 53183 - DNA, 362 bp, Gossypium hirsutum
  unsure (1)..(362): unsure at all n locations
  Clone ID: uC-gsronu33B149e09b1
ttctcagacaaaaccacagggtcatcagatgcagagccaagcatccaatgttcagtgtagctaactattggcctgccccatcattcagccgaataaaagccgcaaaggcccgctcaagaagtggaaggattacgacgaaaatatgaacccaacaaatgagcttggacaaaaaataaagttctttttttaaacgggttgagccttgtaagatattttccattactatttattgttgttttgttgctgtttgctgcaattttgattttgttttgatacaattttgctattatattggtactattttgctattatttggatattggaaaactcttgttttattattaattntgttactattttag

SEQ ID NO: 53184 - DNA, 460 bp, Gossypium hirsutum
  unsure (1)..(460): unsure at all n locations
  Clone ID: uC-gsronu33B149e10b1
tgttttcgattaccagaaggagaaaatggatggggaggatgaagatggatattggtcaactgctgttgaagacatcaggtgggatactatgtttcaggatttgaaaccaacttgaacgaattatttcatttttaaactcctgttgttttctgttcaaagttctccattatgtttgatttcagaggtgagagatgggatttttttagcagttcccaccggttttcttttttttggtgcttgtggtgggggaagattgataacttttatccttatcttcttgagtggtgtttcaatcattaggttgtctccccctgcttttttatctttgatagaaaaaaaaaagagaaagaaaaagtaggaatcagtcactttgggaaaaagaaagactgaaacagaggtatcgaaatatgcagagtaagaagcangcattgtattgtaaatctttaaatgattgctttat

SEQ ID NO: 53185 - DNA, 483 bp, Gossypium hirsutum
  Clone ID: uC-gsronu33B149e12b1
tctacgcgtccggaaagaagttgctgctactgagcatgattggggaagtttgtcgactcgtgaagaattacgttcttcatttaatgatttgaaaaaccaactttacggaaaagacaacaacaaagtttctgttaaagacttccatggcttacaacaagcattggataacactattgcctggggaaaacctccggactacctcgaacttattgcgatccgaatcgaaaaagctcgtggaaaagctgccgaagtttctcatatcggtattcaagttctggtttgcgctgcaatcaaagagatggaagattttcggattgaagatttagagtgggatacattgaaaaagtggggggcaactctcaatatggctaagcaacttggttttcaagtggtatttgctgataatctgttgaagaccaagttgcttgcctactttgctactcaaaaactattagatgcgacttgaaaagaagtataatttaa

SEQ ID NO: 53186 - DNA, 255 bp, Gossypium hirsutum
  Clone ID: uC-gsronu33B149f09b1
tctttttttctttttttgttgctatcaccatggggaagtttttaatacaatttgggcatctaacacacaagaacccccaactcacatgcacaggggagggataaagaaaaggaaccacaaacatggccggcgacaacttgacggattggaaccacgccggttatcaaaaatcaagcaaatgatcccaaagcggacgcgtattcacatgacaggatcctacatgagatgcatgaaggccgaccgtcagtccttaca

SEQ ID NO: 53187 - DNA, 509 bp, Gossypium hirsutum
  unsure (1)..(509): unsure at all n locations
  Clone ID: uC-gsronu33B149f10b1
tgtggagttcaatctctctggtttctcaaactaaagcaatatttggtgggtttttctcctattgtttgccatcaacacaatctggagcatcaggttcattagttttgggaggcaattcatcagtttacaatacttcaagccccatttcttataccagaatgatcccaaatcccaagctatcaactttttatttcctcaaccttactggtatcagtgttggtggggtgacactgcaagatttaagctttggcaaaagctcgatgcttattgattccgggacggttatcacaaggcttcctccaacaatgtacagggccttgaaggcagagtttcagaaacaattctccagttttcctactgcaccggctttctcgatcttggatacttgctttaaccttagtgcataccaagaagtggatgttcctacaataaaattgcagtttgagggtaatgctgagatgaggtggatatcaccggngtcttttactttgtaaagacagatgcatctc

SEQ ID NO: 53188 - DNA, 301 bp, Gossypium hirsutum
  Clone ID: uC-gsronu33B149g11b1
ttttaagaaggttggacaatgcaggatggaacaccatggcctggaaacaatgtcagagaccatcctggaatgatccaggtttttcttggtcatgatggtgttcgagatattgaagggaatgaattacctcgtctaatttatgtttctcgtgaaaagagaccagggtttgatcaccacaagaaagctggggccaacagtagctactttctaaaaattgtggaattttatggatccacgcttggtatgtagccaagcccaagaaaaaaggaacgaggggaagaatcgacaaggaatccataac

SEQ ID NO: 53189 - DNA, 366 bp, Gossypium hirsutum
  Clone ID: uC-gsronu33B149h12b1
gatatgttgatccaggtatacttataaggaagctccaaaagtcagggaaacatgcacagctatgggggtcagctcaaaagggttcaaacaatttcccaaaccaaatgaccaaccacttcatgaacatgcatatcgatggtggcaaaggagggaaagacaacagatctcaaaagggtggtaatggtggtggtcggtggctggaaagagtcatcagcaaaaaggtgggcagcaatttggaccaccaccacaccttatgcagcaaatgatgaaagggccctaggattctaagttaccaccttccaaagaccagaaatctgtcatgtttccagttgcctgatgatgatttatatgacagtgattgtgatt

SEQ ID NO: 53190 - DNA, 543 bp, Gossypium hirsutum
  Clone ID: uC-gsronu33B150a03b1
gaactttttcgcctggaccctgagagctctaccccttatgtgcttttagccaatatctattcatctttaggaagatgggatgatgtaagagttataagagctgatgagtgaaaagcagattgttaaggatcctggttatagttggaccgaagataaagagcaagatacatgtctacttgttgggtgatacatttatggatggtcaatgaggcttttgacgacattactctctatgttagaaatcagtcatttaggttttgtgggctgtgccgaagatgcaactaaaatcactcaatagaaggccaagagaatgacatgggaaaccaatgatctttgctaccaaaatgatttggccatagtttgcttattgtttaacttatttatttatgtaaaaaggtggagaatgttgcagagttttgaagtggaggttcagtggcgaatcacccaagaacccgcataagagtccatgttgcccatcccctgtcgtcacaggatggtagtgcctttcttaagtgtaataaatacctatatttccctagtcat

SEQ ID NO: 53191 - DNA, 441 bp, Gossypium hirsutum
  Clone ID: uC-gsronu33B150b01b1
cccacttgtccgctttagaaaagaatggcgaaccctagccacagcgccgttcagaaatcaggccgctctaaggcctttcgagcctcgccagaacttcgatcgcgacggagcgggctgagattcaacaacaccaggtgcatggaggcgtgatgacatggaggtgcaacacgcgcggaggcctaattcccaactgcggcgcagactattcaagaaaccctaggggtttctggagatttcaaattgggccacttcaaatcgggctagggtttaattcggtctaggattgtattgggtctaggattgggtcagattttgggtttaagttattaggctttggattttgggccatacgggcctattgtaactggactgttatgtttataggactttttatttgctttatatatttttttgtttgtgagggccgggcagagtttgagt

SEQ ID NO: 53192 - DNA, 441 bp, Gossypium hirsutum
  Clone ID: uC-gsronu33B150b05b1
ccttcttttccgcccacgcgtccgcccacgcgtccgcaatgacagctttcaaaaccagatgtagtttcagtagctgtatttatgctatgaagccttgaatgtgtactttgattggattttttttcttgctagttgtcttggtttatgcatacacatctaattgacatcatagggaatatcttcctgtgcccattctcaggaaatgtaggagggaacttcattttagtaggctcaagggtgaaccaacttttttcccctataggtcgtgtttgagaagcaattgacccaaacaattgtgatgagatgggtccaaacacagtgccgaccctatcccagcttctggaagaactgcccaggggaggaccaagacacgatgctgtgaatgaatgggatagaacctctcttggagagtcagtgacgttggtcagaacatcattttta

SEQ ID NO: 53193 - DNA, 343 bp, Gossypium hirsutum
  Clone ID: uC-gsronu33B150c11b1
ctttcgcgttcgtaatgatacattagtgtcagggcgtcatttgattgctcggtacctgaaactccaaaatactcaacccatggaactggatgaatgcgcggaattgttctatgaaggtataagttcgtatggtccttattgggaccatgtcttggggtactggaaagtgagcttggaacgaccagacaagctaatgtgcttgaaataccaatatggggctggagatactgttttgtgtcttcagagaccaccagagtacatgggttatgctttgtcgcatgcggaacaacatcaggggcggccatgagacattgatgctatgtgcaggttcgacaatcgaagt

SEQ ID NO: 53194 - DNA, 493 bp, Gossypium hirsutum
  Clone ID: uC-gsronu33B150d01b1
aaattttagcaaggaacaataagaaccctgcggctaaggaagtgtctataataactattattttgcctttgttctctttaagtttctggtaatgtttcaataaaattgcaagttttagaaaggccacattcgaaaacaaactactataatgtttatcattgtgattcaatttacaaacaaattaggtgttgatattgtgcatatttagttgagcttcgattttggctattctattcagcaatcgagttaatatagcaactaattggttattatggatgttccatttgctcagcgataaatttgtacggattttaagttgatttacatgaaattcaaggtccagtctctatatttgtaaatcctttcctcctttccccattgtagtgtacttattcacttgtgtaaaaaaaataattagttattatcgaagtaacatgatccttgtttagataaccgattgaaaatagttaaataatataaaattaatattttc

SEQ ID NO: 53195 - DNA, 473 bp, Gossypium hirsutum
  Clone ID: uC-gsronu33B150e01b1
ccctctcgtccgattttgtggtgttaaaatcttatgtgttcatagttttttgctgcaggcaacatgtcgctcacaattcctagccttctcagtggcccaagaaccgacatcttcgatccattttcagtatgggatctttcagatgaattcttcaactctgcattggcacacactatgacatcatcatcttcagtacgcgaagcttccgacattgccaacccaagggtagattggaaggaaacaccccaagctcgcgtgttcaaagcagaccttccagggctgaagaaagaggaggttcaagtggaggttgaagaagggagggttcttcagataagtggggagagaagcaaagagcatgatgagaagaacgataagtggcaccgcgttgagaggagcactgggaagttcttgaggaggtttaggttgcctgagaatgctaagatggaacatgctaaggctagcatggaaaatgg

SEQ ID NO: 53196 - DNA, 517 bp, Gossypium hirsutum
  Clone ID: uC-gsronu33B150f11b1
ttttgaacatggagcaccgtgaacggatcgggaacgggggttcaagcctctgccccatttcatctcctgatttgatcttgatggagttgaaagaagcaaaactgaaccttggggtgaaggtgaagccacagattgccaacaatgtgggtgctgccaatcatgggagttttgagaattgttccaacatcttaagatctccatttcacaacaactcgaagctcgagcagtttaagaaaacggttgatcctgcaaaaactgaagttccaagatcaacgccactaccagggaatgaagaaaataggccctgtcgcaggactgctcaaatgagatggattgcagccaagaagatggaggaagccgccagggcagctgaggcacttgctctaattgaaatgaatgcccttacgggaatgaagggtttgccaagcaatgccaactcatcaggattttccctgccggaaccagaacccgaaccgttgcttggaaccccgaatgttataagggcagaagaggtttc

SEQ ID NO: 53197 - DNA, 445 bp, Gossypium hirsutum
  Clone ID: uC-gsronu33B150g04b1
aaaaaaaaaaaaaaaaaaaaaaaaaaagagggaattattaaaaaaaaatttaaaaaaaaaacaaaaaaaaaaaaaaaaaaaaaaaggggcgggggttctagtttttccgggcccacggtcccgtcctggcgaagtcaaggttgtcttttggtgttgcggaaactcaatttaatggccggggttttacattttcatggctgggaatgccaaagccttgcccaccctaaacttcttggggccgatccccctttccctggcggccgttaacgcataggggcccgggccgaacgcgtttcccattggtaacggaggcttattggaaagggggacgggccctgtcctggaacatgatcttctgccggggggggggttgtgcacagcggtaccgtttcccttgcctgggccagagcccccgctcctgttgcttgggtttctctcctttttc

SEQ ID NO: 53198 - DNA, 394 bp, Gossypium hirsutum
  Clone ID: uC-gsronu33B150g05b1
ccctcttttccgcccacgcgtccggaacatccaggttttagggtatcctcttggaaagaattggcatcaggtgccacgtcggttatgttgcaaggtaaacaatactggtgatgaagcctttcagttgacggttgggcagtgtgaaaagggagctcttagttctttttctgattctctgtgaatgattgagtgatgctgttgagtatgtatattcaggcttcaagatgggacctcaagctatcttgtgcattatgccttttagctgcattgaagttttgggctgtgccttgagatcaaaatctggcttttttcttatttcttacctcctatatcaactattggagtggtttgttgtccacactacacagctgatagagttgaagattcaggttgc

SEQ ID NO: 53199 - DNA, 540 bp, Gossypium hirsutum
  Clone ID: uC-gsronu33B150g12b1
attatcaccaaatgaagcaactcatccgccgtctgtcccgcgtcgccgacgtttccgcccagtacaacctcctccgctccgactcttcctcctcttcttccggtagccgccatcgttcttccgccgctagggctgaatctttccgtgtggcggttaaaaagacggtgcctcaaggttacgttccggtttacgtaggggaagagatggagcggttcgttgtgagtgcggagttgctgaatcacccggttttcgtcggcttgcttaataaatcggctcaggaatacgggtatgaacaaaaaggggtacttcatattccgtgtcacgtactggtttttgaaagggttatggaagcgttaagacttggggttgagtcacgtgacttacaggatctactccggtcattctccgatgactggttaaatgatttttagaccggtgaaacgacaaaaaacgatgtccgcttttttcatgtaaatatattatattaaagggaaaaaaagggaagaaattgtaggggttttttttttttttttttaattt

SEQ ID NO: 53200 - DNA, 474 bp, Gossypium hirsutum
  Clone ID: uC-gsronu33B150h09b1
ttttataagatcatacaagtcacttcactcctatcgggccctctctcacagcacacaccgcccaccatgtcggagccaatcgccaagccgcagaagcacgccaactcgtacctccacatcaccgacggcgaggagcgcatccgcacgctcattaccgagttcgcccagcaggtcgacgacccagaagacagggaatggacaaagtacctctttccctacctgaccgtccactccgtctcgcccgacggcccccgcccctcggtgacctttgcctttaccgtccagccgcagcactgcaaccgcctgcgcaacctgcacggcggctgcacggcctccctcttcgacttctgcacctcgaccccgctggccctcgtctcgcggtccgggttctggtcctttctgggcgtgaggccgaccctcaacacgacctacctgcgcccggtcccgtgcggcaccgagctgctggtcgagtgc

SEQ ID NO: 53201 - DNA, 233 bp, Gossypium hirsutum
  Clone ID: uC-gsronu33B153a01b2
cattgttattggccttatatgcataagatgaacatgtaaagatcatttggccttccatgattgcaatatcttgaatgttggcatgtgtttcgctttattgagtattcctctatagaactttgaattatcctagaaggtagctgagaaacacaaaaaggcagtggtgtatttcatttgctataaaattcttttctctttctattgaaaattgctatatatatatatattggttc

SEQ ID NO: 53202 - DNA, 539 bp, Gossypium hirsutum
  unsure (1)..(539): unsure at all n locations
  Clone ID: uC-gsronu33B153a05b2
cccacgcgtccgaatgacatggaaaaaactggcagatgtggcagcggagagaggagacaatatgttaacagtgtaactgattaatgaagtaattcgttttgggatagtggctctgctgcagttcccttctccattttggtggtattctttttcttttgccccctaacttcatttctattttatttttgttgtcaatctgatcaatgaagacatttaaaattcatggagtttgttagttcatgctgaagattaagaaccatctgtgaggaacgacttgtattttttttccttgtcactctttgttcttcctacaaaagaagtatcagacttttagtttgtattcatagtattacatgaaatttcattctttgagataaaattaggatcaaattattgaaactcatgtggctggatatctcaacatgccttggtttggtntgtttattcattactgttgctaaaattggacagacagacattcccgttgcaagtgtgcaagtttgtaacttatgctactcggatttagatgtgtatggatg

SEQ ID NO: 53203 - DNA, 447 bp, Gossypium hirsutum
  Clone ID: uC-gsronu33B153b02b2
atttggtatccctgtgtttatagggaataaatcgaagatagcagatctgacattcctgtgcttacagcgaagcagatcaaagatttcagcatggcatccctgtttttatagggaacaagttgaagatagcagatttggcatccctgtgtttatagggaataaatcgaagatagcagatctgacattcctgtgcttatagcgaaacagatcaaagattttaacatggcatccctatgtttatagggaacaagttgaagatagtagatttggcatccctgtgtttatagggaataaatcgaagatagcagatctggcattcctgtgcttacagcgaagcaggtcgaagatttcagcatggcatccctgtgtttataaggaacaagttgaagatagcagatttggcatccctatgttatagggaacaaatcgaaaatagcagatctaaca

SEQ ID NO: 53204 - DNA, 386 bp, Gossypium hirsutum
  Clone ID: uC-gsronu33B153b12b2
tcgataatgattttattctatatgtcatgaattatgaagagatttttacggcttctgggcggacctacacccatttggcgccttagccacccacgagatatgcactatgacccagaagctcgccacgaacccggaaaatgatattggcgccctgagtattcccaatggcacggttagaattcaagaaggcatcaaaccgacacatgcttggatggttcagagtgcgggcagaatgattgaaaatttcttctgagcatttttctgacatggatttggctttaatctagatgatgaacctagagttatactgcccttgggaaaagataggttgaacttttgaacccatccgaaagcgcaacatctgccagctgttgacgatatttcag

SEQ ID NO: 53205 - DNA, 491 bp, Gossypium hirsutum
  unsure (1)..(491): unsure at all n locations
  Clone ID: uC-gsronu33B153c02b2
cccacgcgtccgcccacgcgtccgaccaaattgggggcttgcaagtgctttatgaagatcaatggctcgatgttcctccggtgcctggtgccttggtggttaatgttggagatcttttacagcttataacaaatgacaagttcaaaagcgtggagcacagagttttggcaaaccgtgaaggaccaagagtatcagtggcaagttttttcaccacaggcttattaccaacttcaagggtttatggacccattaaagagctgctctctcaacacaatcctccactttacaggcaaaccacagttaaagactatgtttcctacatttatcaacatggtcttgacggaacttctccccttcatctctttaggctctgaaaaaattttcgcccctaaacttgtgagttgcagaagacataatggtgttcttagttacttatcattgcagctattatcngtttttgacgtggctcattttcatccactcttctggtg

SEQ ID NO: 53206 - DNA, 167 bp, Gossypium hirsutum
  Clone ID: uC-gsronu33B153c06b2
gcccagcgcgggcagtagttcggccagcggcagctcgtccgtgccgtgcgcgcaggcggcgatctcgggcgcgaagtcgcgccggcccacccggcgcagcgcggccaggatgtcgtcctcgccgatggggccgccgtcgctggcgcgccacagtttgtgcattacct

SEQ ID NO: 53207 - DNA, 360 bp, Gossypium hirsutum
  Clone ID: uC-gsronu33B153d05b2
gtttcttacattgttgatctcaagaaaggagaggttaccaaaggttagccgcttatttaagacctatccttattttccaattcggttcaatcctgcttttcttcttcttttatcttggttgggtttgtttatcttggttctattaatataattacaactttttaaattctaatgatggaatagagtctgaagtttgtgtcttttgtaatcacacatcgaatgtagaaatttcttgtggaatttgtatgtgcctgagctcttcaattatagtagttagttcctgaggtgtggttctccacagttttacatgaattggggttagaaccatctcccatatctctagttgcaatggtgtcacca

SEQ ID NO: 53208 - DNA, 364 bp, Gossypium hirsutum
  Clone ID: uC-gsronu33B153d08b2
cccacgcgtccgctttaaatggctcataaattgtatgctgtagctagaattatcactgttcatgaattaggtggatttacttcgattctaaatctctcttttcttttttggctacacccacagttcgggtgaaaataaacaggtctgtgaaaagcttgctgtttgataatgcctgaatcttcgattgagaacttcataaattgcccatgccgctaaaatgagttctgaccagagattttgtaggatatcctgtaaaaaattttaatgtgcatgagattttcttgtggagcttataaaaaataaatttatactattttcaatttttatattttattatataataaattaattatttattaataag

SEQ ID NO: 53209 - DNA, 356 bp, Gossypium hirsutum
  Clone ID: uC-gsronu33B153d10b2
tttgccatagagccttgaataaatatgtttttgcggggatattgaagaagtattgtggggtgtgccctaagaattaatagagataataatttaaggtgggattatttttgacattattgttttttgttgggggtgggatggcgggttttatgttctggcatgtccttgctgctccgtcggttgtttcccgggggggggccgttcggggggtcctgtgtcgcccccgcggggtcggcggtgttttttcttttttggggggccgcttgttgtcctgcccgggcccgcgttgttcccgcgcggcgggggggggccccgggggttcccgccttttttggctggggggggccccccttttt

SEQ ID NO: 53210 - DNA, 190 bp, Gossypium hirsutum
  Clone ID: uC-gsronu33B153f12b2
cccacgcgtccgctagtcttagtaacttagaataagggttttttgttccttgtctgcgtcatgatgttagccaagactggtatggcccgactacggagtacatggctttgaaatggaatagatatactgatattagcactttcgttccagagtgcgcattttgtaattaagaatctgagcttgaagggtc

SEQ ID NO: 53211 - DNA, 287 bp, Gossypium hirsutum
  Clone ID: uC-gsronu33B153g04b2
cccacgcgtccggaactttgcatcggggactgggttagggttaggccatcaatttcagtcccgactcaccactggggagaggtaactcactcgagcatcggggtagtgcatcgaacggaaaatggggacttatgggtggcattctgctttatggaaaggctatggctttgtaaggcttgcgagatggaaagggtcaggccatttaaagttggcgacaaggtgcggattcgagaggggcttgtaacgccaaggtggggatggggaatggagactcatgcccgcaaagg

SEQ ID NO: 53212 - DNA, 465 bp, Gossypium hirsutum
  Clone ID: uC-gsronu33B153g07b2
tttttgaaaagtggaaaggagcattttctgttgatgctgaaggaaccacagagaacgaattgcaagatggaagtcaggatttgctttctaattttgtggaatacattaagaatcataaatgtattcctttggaagatcttgctggagaattcaaattgagaacccaggtatatgatcttaatagctaagtaaaaccctttcatatgtgtactttcggcctcttgatatattgtaaaacccatcaacggaatgtgtgttgctgtttttttttaaatcccatccccgtttgcttatatttttaaagtacattgattgtttgatgcaggaatgtatcaataggatcaccttccttgaaagtatgggtatgtaaactatatctattatcaatttgggtactgactttaggaaatggataatcaaaatgcttggcatatacaatgtaatgatttatgtgatccttttttg

SEQ ID NO: 53213 - DNA, 497 bp, Gossypium hirsutum
  Clone ID: uC-gsronu33B153h01b2
ccctcgcgtccgcccacgcgtccgaaaaaaaaaaatgggggggtttaataaaaataaggggggaaaaaaaaaaaaataaaaataaatatttttaattggttttagtgttgtgatgtttatgagtttttaagtttttttttaaaaggggggggccgttttgggggtcccaggtttccgtccgcgggctggcgaggtaatagtttttttatgggggcccctaagtaaatttcaggggccggggttttcacaccgcgggctggggaaaccccgggggttccccaatttaatggcttggagggaaatccctttttccccggggggggtaatagggaaagggccgcgcccgttggccttttccaaaatttgccccccctgatgggggaaggggaccccccctttaggggccctttaaggccgggggggggggggggttccccgcaggggcccttttctttgccggggccttgggcccggttctttgggtttttcccttcttt

SEQ ID NO: 53214 - DNA, 410 bp, Gossypium hirsutum
  Clone ID: uC-gsronu33B154a09b2
cccactcgtccgtccagtcgtcctctctctccaatgtgatcataaaccaaccctatctgagcacatgcacgtagcataattatgatacatgtctgacccgatcggcctacagtctttatgtgtagagctaactctggatcgagatgttgatggacactctgcaggagatgctatgaacacgtcgagaccaggagtgaccgatccagatcacataccagagagctgacagccgaaccttgtccatcctcagcattgaattgacatcacctgtaaccaaagtactcggagtgctcggggggatgcaggtaattctaacccgcttgcacgtaagacacctgcgctcgagaagctggggcatgagccgaacgtggagctttacgcaaatatgctccagggggccagcctaactg

SEQ ID NO: 53215 - DNA, 367 bp, Gossypium hirsutum
  Clone ID: uC-gsronu33B154b10b2
gtgaaatatagttgaagtgtctccttctctttcttatagatgtgatgtatgtctattaacaaaggatctttcggttgaaactcaaacatgggttgcaaatttttcacaaaattattgaaaatttttggttcagccatatccaatggatattgaaacttaataatcatttttgcaaaatccaagcgattccttttctgatcaaacattgagcttctttcatttgtggtagttgaatatatcaacttcctttcttgatttcgtatttttctttctagacatctttctcactgttttttcaagcgttccactcttgcttaaccctgttaacttcttatgactctggagataaacactagaggtgggattt

SEQ ID NO: 53216 - DNA, 572 bp, Gossypium hirsutum
  Clone ID: uC-gsronu33B154c08b2
aaaaaaaaaaaaaaaaaaaaaaaaaaaaaaaaaaaaataaaaaaaaaaaaaaaaaaataaaggggggccgcctttaatggttcctacttttccttccgggggcgtccgttcgtagatggtccctttgtttatgtggccccctcgctttgcgcctgatttggccttttttttttctcccccttttttgctttacctgcccgggttttccccccttttggccggggaaacccccgcctttccccaccttttttcttttggaggagttccccctttcgccggctgtcttattacagatggggcccctccctgtcggtttcccccccttttgcgcttcctttttggcctctggggcttgccttttttccgggtcttttagcctggtggtttgggtggtttccccccgtctgcccgttttctttgcctgggttttttgcccctctcttttgttttttttccttttttttttatctcgtttgccgttttttcccttattttttttttttggtctcctctgggttccctttttttttttctggtcccgccccacttcttttttgtgtgtgttttctctt

SEQ ID NO: 53217 - DNA, 485 bp, Gossypium hirsutum
  Clone ID: uC-gsronu33B154c10b2
agcatctctagctgcttgttcattgaaggatgtgctgggtatgctgagatcattgtatgccttgaattgtctggaagatggtgcgtatctccgatatgggtacctgtcagttgagaatgctgctacagtgaggagagaaataacaaaaatatgcagtgaacttcgaccgcatgcacttgctttggtcagttcctttggcattcctgatgctttccttagccctattgtttttaactggattgatgccaactcttggtcttcggctcaatattgatagggtgttgttaatctaccaactgcacctaacccaaagctttacacttttctaagcagtttataccccaacatactcaataaaaataaattctgttcatataatacatttatatttgttatttaggaagtgccccatgtatgtatacttttggtgcttgcttcttctattcatcataccgtatcatcaaaaggtttgaatgtataccata

SEQ ID NO: 53218 - DNA, 416 bp, Gossypium hirsutum
  Clone ID: uC-gsronu33B154d02b2
ttttgtttctggccaaaacaagaaaaaaaaattcccattttgccagaaacaaagagcttgtcaagaaagctccaagatatcaacaatggcagttgaaacaagctctgcaactccatctccagtcaaaacagtggttgttttggttcaagagaaccgttcctttgaccacatgttaggctggttcaaaactataaacccagaaatcgacggtgtcacaggctccgaatccaaccccattttcaccttcgaccccaacttcacccaaattaccttcaaggacaccgccggcttcgttgatcccgaccccgaccactttttccatgccatatacgaacaggtatccggcaaatcgtgggataccagcaacccggattcgaacccggggatataaatgaacggttttgtacatattgctt

SEQ ID NO: 53219 - DNA, 419 bp, Gossypium hirsutum
  Clone ID: uC-gsronu33B154d11b2
ctctttgcctgttgatatttctcattgagcaattatggtctcaagtcttaatccaagtgaccagtagaaggatagcttttctcattgaacttgtgttttcaaggatacccgtacaaatactctgagttccaaaagaagaaaagggttgctagctacaagatgtatcgtgttgaaggtaaggtcaaagggtcattgaggttgagctttaggtggctgaaagatacgttcacacaagctgtttatgggtggtggtgattgtagcagtttctgggctcttttgtttctagttgctcttataatttgtcttgcttgtatccaaggtatgtgtgaaaaagaaatttcaattttaaaaggaaggtttttgataaataatattaaaataatttacaaaattacttttcctaaacatacaataaccc

SEQ ID NO: 53220 - DNA, 348 bp, Gossypium hirsutum
  Clone ID: uC-gsronu33B154e05b2
ggcgattctaatttttggagggagatttagcacccaaatgtgcttgtaaaatcttgtatgattggtacttatagtgtcgttgatgttcgattcgacaagacagcggtaaccactgcataccgtatacataccagagttatctgtacaccacactgtagaggcccaatttagcctgggcccgaaacaaaactaaaaaataaaaaaatatatcagtctatgtaaaaaaaaaaaaaaaaaaaaaaaaaaaaaaaaaaaaaaaaaaaaaaaaaaaaaaaaaaaaaaaaattaaaaaaaaaagaaaaaaaaaaaaaaaaatatattataattggggcggccttttttttggtg

SEQ ID NO: 53221 - DNA, 192 bp, Gossypium hirsutum
  Clone ID: uC-gsronu33B154g07b2
aaaattaaaaataacaaggaaaagggacataaacaaatatctccactggaatgatggtactattactcttttctagtaatacggaaaagacaatatatacatgttaaactacatttacaattcggatttgatcttgttactttaaacaagaatattttggttatatttaatttttgatatgtttttattttt

SEQ ID NO: 53222 - DNA, 555 bp, Gossypium hirsutum
  Clone ID: uC-gsronu33B154h02b2
tgctggtacacctgccggggccgctccggaattcctgggggaatatggtactttgcctgttattgcaacatcctttgacggctttcctttccccgggctcaattcttttcccttttcgtgttttattctttatctcatctttttttcctttgatttttctttttcgattttgtacgacttttaagatcaaatctatcatctcaataccttagtttgagatggcgacgtactttcatggaggctcagacttccaggctgcttcagctgatgggttgcaaacgctttatctcatgaacccgagctgctttccctacgctgacacacaccaacaaccatgggctgccactaacatgttcttgttaaaccccacaagcttaccccaagcaccaccgtctaaccatcatcagcgtttccttggtgtgcctctgccaacaccatccacctgcatcaaaccggtcaatttcgacgatccccaccgttcattcccccttcaaggtgtagtccccggttttcactctaacttatggggttcatgtgttgatcatcagaattccc

SEQ ID NO: 53223 - DNA, 410 bp, Gossypium hirsutum
  Clone ID: uC-gsronu33B155a11b2
aatcccggatagtcctaatttgtgttgggatgtgaggtttcgggtggcggttggcactgcaaagggcatagcatatttgcacgaggaatgcagggattgcatcattcattgcgatatcaaacccgaaaacattctcttggatagtgattacattgcgaaagtatcggatttcggattagcaaagcttgttggaagggattttagtagggtattagctacaatgaggggtacttggggctatgttgctccggaatggatatccggtatggctattacaccaaaagctgacgtttatagctatgggatgacattggtggaaataatcggcggccgtagaaacgtgcaagcaccacaatccgtacaaaatggcaatgcatttaatgaaggaagggatggagagaaatgggttt

SEQ ID NO: 53224 - DNA, 291 bp, Gossypium hirsutum
  Clone ID: uC-gsronu33B155b06b2
gttattaaatacgagaccagaaagaattacaaacacggggttttttagaaaaaaacaggtcaagagagaagaccatggacgatcaacttacgggcgatcagatctctgagttcaaggaggctttcagcctctttgactgggatggccttggttgcatccctaccaacgtctgatggttgagcgatgctgtcacttggtcagaaccttactgaacgtctgattacacgatatgatcaatgtagttgatgctcgtggaaatcgaaccattgattttcctgaattccttaacct

SEQ ID NO: 53225 - DNA, 509 bp, Gossypium hirsutum
  Clone ID: uC-gsronu33B155c03b2
gccaggtgttggtcgacgcgtccgacccgaacattatagagacacatgacatattttagtttttattgattgtaacatgatctttggttttatatgtctgagtatatgttggaagttgtacatatcgttaagggggaatctttgagtgcttataatttaatcgaagttagattcgagtgagacgtgacctgaacaatgaagaacacattatttattggtattttgatttgtgtgacatatattaagattttatatttctgaatatttatatgaaagtgatatatgattctaattagaaatgtgaggatagattgtaattaatcttggatttgtagattattatgaaattgacatagtatgtgaacattgagggctatatggattaagattcttaggcctaaattgatagattgtgtaaaatgttaggggttcacattggtattatgtcgatgaagagatcacatcagtattgtcgtctggttactaaagcgttttaacagactgttcac

SEQ ID NO: 53226 - DNA, 583 bp, Gossypium hirsutum
  Clone ID: uC-gsronu33B155d05b2
ggtaattttgtgaaaatatgttgaaaaccaatgctagttgtttgaatgaatgaagtcaaacagttatgctttgggttgtgttggctatcactagagcttctggattgttaaagcaattgctggttttgattaattacatctatggtctgtccaataggaggattgaattgctttgcacgtcatcaaggtcttttcttttagagtttctagtttgcttgagcttaaaatgtggatgtgttttagtagcattttgtctttatatgtttcttacaaaagttcctcttatgtgccttttacttttgtgaatcatgaggatattgatggaacttgagcttcagtttaggtttctggattggagtgtttctccttgtattagggctgttaataccaccctgtgtttatctcaaagctaaagatacgaggtgtcaaactacatttctttctgctttcatttaaatggggcctgcttgctactgctgccattactgtattgaaaacccttgttctataggaagtcttcaatgataccgtaatggttgtactgactattattgcagtgagtgttggagcatttcggaattag

SEQ ID NO: 53227 - DNA, 232 bp, Gossypium hirsutum
  Clone ID: uC-gsronu33B155d07b2
cccacgcgtccgcccacgcgtccgctttgttgattgagttgcatgatggaatgacagaaatatatggtgtgatgttctcaaacccaggttgctgcttatggcggacttggactttgtaagaatatttacagtacttgtcaatgatgctccttaccaagtcatgcaaaatataaagctgtcatgtatccttcctatttcttcaacttatacaagggccatttccattgacacc

SEQ ID NO: 53228 - DNA, 554 bp, Gossypium hirsutum
  unsure (1)..(554): unsure at all n locations
  Clone ID: uC-gsronu33B155d10b2
tttaaaaaaaaaaaccttcaaattctccttgcttctctgactatgggacttctccagaggtctgccctaccgccgccgtagccagtggccggcattgcaggaaaacgagcctttacccttgcctccgagcgaatttgaaggccaagcaatcggagcccgaatagccgagaagtgatggttctcaatcccatccctttcacgggttgatcctcgacgacagagaaggactctccgacatcggccatgggaaacgagttttcaaggaaggaagaggcagaagctgctctgaaggcacccgatgctgtaatgggtaaccgctttattaagctctggtgtgcaaatcgggatagaatacctgatggtgacataaacagtggcagtggtgtgtcagtaacttcacgtggtctaacagcttctgttattccagctcagaggaaagattattttcaacctattcctctgaattcccccaagcctcatagtatgaatggtctcatggttcctcctgcaccgcggnaaaaattagagactttggagcagatgaaagaggaact

SEQ ID NO: 53229 - DNA, 421 bp, Gossypium hirsutum
  Clone ID: uC-gsronu33B155d11b2
cctacgcgtccgcccacgcgtccgaaccggtgcatgtgtcccctgtattttacgctattttcgtggctttcactggcaaaaacttgagaacattggccctactgtagttactgttggaagtgctctaacacacatgcttttgaattccacttaaagtattcagattgagatggtttttatgtcaaaagttacgtttcaccgcaatatcaaatgctaaatgtgtaattttttttggtttttgattcaatagtcggtttccgagccataatgtagcaatattacatttttcttctttgagttttaccattggctttacctttgttttttttgtttgtttcctttggacgatacaaagcgtatgaatgttgatatcatgtgatgctgttgtttatatagaatcatatgtactcattggtattat

SEQ ID NO: 53230 - DNA, 395 bp, Gossypium hirsutum
  Clone ID: uC-gsronu33B155e07b2
tgtacgcgtgggttttgttttcttaattatggcagcttcctttcgtaagtcagaaccagtgcagggtagatcacaaacccatgctaccttagaggttgaaaaccttaatccaacgccagcgagtaaaaatggatgccgaagtaacaggtttatggaggatggtgttctcttgacttgggacaatttgtcggtcacggctgctggtggaagaccgatccttcagggcatgactggttatgctcgccctggtgagccgttggccataatgggaccttcggtttgtggcaaatccacacttcttgataccttagttgggagacagggtctccaacacatgccaagctggacatattcttatcaatgggtttaattaatgccttgttttatggtatcat

SEQ ID NO: 53231 - DNA, 447 bp, Gossypium hirsutum
  unsure (1)..(447): unsure at all n locations
  Clone ID: uC-gsronu33B155e08b2
atgtcactcaggccaattcgtatgttgctcgaatatgatacagtcaaatctctctttttctttaatatgttctgtatttgttgactcccagatgacacttttttccttttttttttcccttttcattaactgctttaaacatttttatcatgtagccattacctgatttctatgttagtggtctttgttttgacaaaaaaaaaaaaaaaaaaaaaaaaaaaaaaaaaaaaaaaaaaaaaaaaaaaaaaaaaaaaaaaaaaaaaaaaaaaaaaaaaaaaaaaaaaaaaaaaaaaaaaaaaaaaaaaaaaaaaaaaaaaaggnaggggggttccggttttaggggttcaaatttcacccccggggcctggaaaacttttatttttttttagggaaacccaaatacaagtcccggggcctcggtttacaaacgggggaaaagggaaaacc

SEQ ID NO: 53232 - DNA, 308 bp, Gossypium hirsutum
  Clone ID: uC-gsronu33B155f01b2
aattcatgggattagcatacatgattgcaagagaggagggaatgcttatgtgagggactctcctagccattatggttggagaactatatcggacggtgatgcggtgtcgatatttggaggcagccatgtttgggtggaccactgctcgttgtcaaattgcaccgatgggctggtcgatgccatccaaggatccacagccatcaccatttctaacaattatatgacccatcataataaggtcatgctcctgggccatagcgattcttacaagcaggacaagaacatgcaagtcaccattgccttcaacc

SEQ ID NO: 53233 - DNA, 470 bp, Gossypium hirsutum
  Clone ID: uC-gsronu33B155g09b2
tgttaaccccaaggtcttggatcaccatctaaaagcagctggccgtggtggtcttgaagttgatgttagcaaattaatctggacaccatataaagaacaaagttaatgatgctactcatataaagaacaggttcgaattacactaacgagtttgtctacttagtagctgtttagttaggaatttgtagcttcttgtattttatgtataaagctgaggtcttaggttatgagattagaaagtcaaacttagatcaactcaagagctatttacattctagatgtacttattgccatcacaccatcacctgtgtcatctgagacatatcgggacaaactaacctgtatatattttattacaccgtgagttacaatataacgacttctctctctctctctctcttatgtttgacatttgatttgatttccacctgtgtttgatggaagttgttgctcgcaaccttattgcttct

SEQ ID NO: 53234 - DNA, 267 bp, Gossypium hirsutum
  Clone ID: uC-gsronu33B155h11b2
cctacgcgtccgcccacgcgtccgctgtctttatgattccaggggcttggccgatggcacctctgaaaacattaatatggttcaatattggatgaataatggtgttcgtcatggggaacctgttatcaggaaatctgatgattccagtttaaggagaagaatgaaatttaaaccacgagagctaggttggaagttctgcaggccccagatggttaattttgtcatttttgttgttgatgcggcttctgttttgaaatccatagaggg

SEQ ID NO: 53235 - DNA, 380 bp, Gossypium hirsutum
  Clone ID: uC-gsronu33B156b06b1
ctgaactcttacataaatctctatgaataaaaaacactctttgagtgatactgttttttaaaaaaaaaaaaaaaaaaaaaaaaaaaaaaaaaaaaaaaataaaaaattcccagtctaccttcacccatttgttacccaaaaacacaaatcgaaaaaaaacaaaaaacaaaaaaataataaataaaaaaataaaaactaaaaaagggcgccccccttataaaaaaccaaaattcactcccccttcataccaaaataaatattttttaaaagtgcacaaaaaaaaaaaaaaccggcccggaaattaaaaaattctaaatggaaaaaaccctgggtaacccaaaataaaaccctttgaacaaaaacccttttttccaacatgg

SEQ ID NO: 53236 - DNA, 325 bp, Gossypium hirsutum
  Clone ID: uC-gsronu33B156c04b1
acgcgcgccttattgttcgctagatcgctagtacacttgctagaggattacttatatcactcttccttatctcaccagtaccattcttggttcagatagtgatttctgctatcaatcatattacaaacagtgggggttggtttgctggcatcaattattacatgtattatctcaatctcttctactttgtacttgcttcgctgagtttggtcaattactgtgtctattttgtttgtttcttcgcgttataagcacaggtctaagaacttagatggtcccaagactgaagccaactagaccttcattttatttcatttccgcttta

SEQ ID NO: 53237 - DNA, 155 bp, Gossypium hirsutum
  Clone ID: uC-gsronu33B156c11b1
tcataatatacttggtacctgatcatcttatagatggaagaaacaaatggtgtactttgtacttaaatttttaccacagaatttgggtcatattcgatccgtcacttgggacttgttttgatggatagtctgttttaatgaattccttttttcca

SEQ ID NO: 53238 - DNA, 427 bp, Gossypium hirsutum
  Clone ID: uC-gsronu33B156d12b1
tccttaaggacttaaaaccgtatccacttgcttcttgtggacttccatggcacttggctactacctcagtaccattctggttcagatagtgaatcgtgcaacaaaacatattacaaacagtgggggttggttagctggcaacaatattaacaagaatcatctcaatctcttctacttgatacttgctttgctgagtttggtcaatttctgtgtgtatttgtttgtttcttcgcgttataagtacaggtctaagaactaagatggacccaagacagaagccaactagaccttcattttatttcatttccgctttatgtttatgccaaattaagttggtaacaagatgtagagatcgagttccaaatgtatttgaatttgtattttcatattatgttgcttgaagatattaaatgaaaaccccaaactc

SEQ ID NO: 53239 - DNA, 351 bp, Gossypium hirsutum
  Clone ID: uC-gsronu33B156e04b1
gttgtgtgtagaagagaagggcctctcttctggtgccatccagttcttagcccaccaatcttcttcttcctcctcctcccttgtttccctttcctgcccatttccatcttccttctttccttcctctttcctttgtcttcttgctttatcttccctttatcttcaatcttttctgttctgtttttttcttagattcataggtaagttcgttttggttggcttgattatttcctcacttcccttcttttttggttcatcgtgatcttttcatcaaccccttttgattgttatatagattgttactattcttttaatcttctaaatattattttttcatgaggagagggagag

SEQ ID NO: 53240 - DNA, 102 bp, Gossypium hirsutum
  unsure (1)..(102): unsure at all n locations
  Clone ID: uC-gsronu33B156f03b1
gtcgaaatcacaaataacttgaaacttttacctcttattatgcttgttcttctcatatctaaggctgttggtgatgttntcaatgaaggtttatattatgaa

SEQ ID NO: 53241 - DNA, 244 bp, Gossypium hirsutum
  Clone ID: uC-gsronu33B156h02b1
cccactcttccgtgaacggcccttgcacatgtgtaccagacgatcctaagagacggaggaggaggctctaccctgaaaatgaaaatgaaaatggcttttcctgaccatactgtgaatcatgattcaacatttgttaacaccaaatagcttacacaaccatctagatgccgcacccgcttacaaaacttgcatgtatttatgcctcaaacattatgaatcgagccaaccattacttatgctagct

SEQ ID NO: 53242 - DNA, 527 bp, Gossypium hirsutum
  Clone ID: uC-gsronu33B157a01b1
caaagctaataatacttaaattaaattattaattatttaaaaagctaaaattaaaataaatccatttaatcaaatgttaaaagctctaaattgaattttttaattttagggagaggttaaaaatcaattattttaaaaaataaaaaaatgaaataaattttccaaaaatcaaattatatcttcttgttgaaccaatgaaaccaatcagatgttttaacccaactcaaatcttcgtaataatatatcttaaacggtagcttcaacaaagatgagatttggtgaaagtgttgccggcttgagaagatcattttgatcacaacaatatcacattaagggtgggtttagatggatgatgcgtttatctgtggttagtgtaaaaataatggtgacagtgagattaaatattattataatactgtaacgtgagacaaaaataagctaaacacaccacgcttcaccaccaatttaaacccacccttatacacatatgataaatacttactacaccacacaggtgcactacaccc

SEQ ID NO: 53243 - DNA, 375 bp, Gossypium hirsutum
  unsure (1)..(375): unsure at all n locations
  Clone ID: uC-gsronu33B157b10b1
gtcgtangcggacataagaaagcttgtagctcaaaagcgctggaatgaactaatcaactatgatcagcttcacaaggaactgcgtagtggttatgtatactaggtattggaatgaggtatttattcatatattaattttatttaagtacttttaatttattatttgttttattcatttttatatttatcttaatcttttaaatttcatttactatttatttcatctacttaattattcctatttaattaacttttttatcctattcttttttttttaatatttatttatcatcattattattttattttctttacattatttcttttttaacttatttatccttctttacttatatttttttactttttatatta

SEQ ID NO: 53244 - DNA, 319 bp, Gossypium hirsutum
  Clone ID: uC-gsronu33B157c01b1
cccactctatcgcccacgcgtccggcttgacacaagattcatgcttttgggccaaggtagaagaagcaaaggaatggctagataatgtgagaagtgtgagggatgcaatgaaacaacagcagttgtggcacaagatcgactaacttaagcggttaccggcggcagaagcaagtcaggagacgattctaaccgtctggaaaaatatatattcttatgatctataattggcatttcgggtgttcgatatctaatgtgttatttggtttttttagggattgatttattacatggattggcaaatatgggttgagaattcttc

SEQ ID NO: 53245 - DNA, 260 bp, Gossypium hirsutum
  Clone ID: uC-gsronu33B157c04b1
cccattcgttcgaacacgcatacagaaaataattaaggacataatgctggacaagatactcgatgaattccggtcgtaagagcctatgcaccgagcttctaaagatcatgcaacaggggtttgcacaattaccagctgggcatttgcgtattgagtatgggaaggccgttgacctacgagtaggccattgtgtggaaggtttgacaagactgacaacaatgatgctgtcaatcactgacttggcttgatgtttgaaaact

SEQ ID NO: 53246 - DNA, 419 bp, Gossypium hirsutum
  unsure (1)..(419): unsure at all n locations
  Clone ID: uC-gsronu33B157e01b1
cccacttgtccggttcgatcaccttgtcctaaaactatcagacatttctcagcaattggaatcatgttacagggatggacttcagctatttgccattttaaaacgtaaataaatcaacgcttcatttcgatatcgtaacgatgctatccgaaaagactctatcttgcatgcaaacatttttaataagattcaggtttcttggattattttattaaagcataaatttgtactttgcttggatagattgctggtatgaatgagcaagtttgttctctgatggtttggatctataataattagaatcccattttctgggtttcttttctgtncaaaaaaaaattattgataaatatatcaattatataatcaaaaaatatatttaatataaatatccaaactaaatttataaaatacatatg

SEQ ID NO: 53247 - DNA, 567 bp, Gossypium hirsutum
  Clone ID: uC-gsronu33B157e04b1
cttagttatgcgacaacctcagacagaagagcaagccaaggcttgtgctgattcttcagagtctgcaaagaaagatgaaataaatggcagggatacttgttccaccacagaaaagtccagttccttgcctctagaatccacttccactcaagtggtacatgttcaggtaccttttgagacacaatccaccttagtaatcaatggctccaatgttggcctggagcatgcatcccctgatactagcatgtcatctttgggacgtgcatttgatagatctccgtcaaccgaggaaacagtgagcacatcctgtgctcgaactgatacatcagcaagtacccaaagttcatctgatgctgacatgtcaggtagcacaaaagccactgtaacagttatacggaacccctctaataacatcatggatggtttgatgcgtcgctgggatcttaacttctttcgaaacagtcgatgaaaggtaagatgagcttgtttgagctgccttgggattgaattatttttggaactaagtataggatccgtagctttgaaaatgttacaaaaaaggggggg

SEQ ID NO: 53248 - DNA, 123 bp, Gossypium hirsutum
  Clone ID: uC-gsronu33B157e10b1
cggatgcgtgcgcaagcaaatcgaacgcgtcaatcatatatctacgaaaccgaaagactaccgagacacacttataacatagaaaaagaaaagctcaagagagaagaccaagaccgatcaatt

SEQ ID NO: 53249 - DNA, 259 bp, Gossypium hirsutum
  unsure (1)..(259): unsure at all n locations
  Clone ID: uC-gsronu33B157g08b1
atngtaanccggcaaagagggatcataatgccatcaaaaaagacaacatctaagactccagcaccagctccaaagactggagcagctcctgcaaagaagacaagcaccaataagaatgcagctctctttgaaaaaagacccagagttttcagcattggtggaaacttgagaccaaagtctgatttgacaagatttgtttgatggccaagacacgtcaaatttcaaagtcagatgagattcttgtttgcaaagacttaag

SEQ ID NO: 53250 - DNA, 122 bp, Gossypium hirsutum
  Clone ID: uC-gsronu33B157g12b1
gttatctagctaattttcctttgatggacttaagaccaggagctaaaggtacttgactattcgcgattagtcgacacattgtggtgactgcagatggagctggaattactgatcgtgaatac

SEQ ID NO: 53251 - DNA, 262 bp, Gossypium hirsutum
  Clone ID: uC-gsronu33B157h09b1
atcgtcatagatcaagatccttctctgcggttgcgtcgtgttaagtctactcgcaatcgcgaaccgaaaccgcgacagttcttcgtttatgggatggaccggtgactttgaccgctcttcttctccaaggggaagatactcgattgtaatgaatacttggaaaatgatatgatcttttgaagaagccgatttcccactacacgttatgtccgaggcttgattctgtacatattgtatggtgtgagctgtatcctccatcttg

SEQ ID NO: 53252 - DNA, 497 bp, Gossypium hirsutum
  Clone ID: uC-gsronu33B158b01b2
tgaatcttttatttttctctcaaactcccttctgccaaaatctagactccggcatcagaccaccatggcagccgtctgttgccggcgacggagccgctgtccgtggttgccaaaaaacaaaaagtctcattttttggggttttttggcttcccgagtctaaagacgccatctttcatcggagatggtaacctcggccccccttttcacaacgatataactgaaaaggtaagatttttttttcgtttgtttctttaaaaaataaacaaaataaaaaaaaagatgaaaagggaaaacagaaaaataaaccgcctttagaaaatttatattattttgattgctatctctgtgtattcgtctgtaaaaaatttacatcgattcttgtggctttttatagccgaaaaataaatacaaaggttcttttttttccatattttctgggttgttgcgttcttgtccttcttgcaagtaccgtgattgcgacttggagtgcggtggt

SEQ ID NO: 53253 - DNA, 301 bp, Gossypium hirsutum
  Clone ID: uC-gsronu33B158b06b2
cccatgtttccggttgaatatcgcaatgatggtggagccgtggtccctatacgtgttcacgctgttcttatttcaacccaacatgatgagaccgataccaatgagaagattgcagctgatttgaaagagcatgtcattaagcctgtcattccagcaaagtatctcgatgacaaaactattttccacctcaacccatccggtaggtatgttattggtggacctcatggagatgcaggactaactggtcgaaagattatcattgatacctatggtcgctgttacgctcatggtggtggtgctt

SEQ ID NO: 53254 - DNA, 500 bp, Gossypium hirsutum
  Clone ID: uC-gsronu33B158b10b2
tccacgcgtccggtttaaagttgttttataaaaaaaataaattgcaaaagagaagggaaatgagagttttcagttggtacatgtgatgcaaacaaagaagatcatataacaaggaatttaacagttaagtgaattaaatgaaaacttagttttatgaaaattttgtaattttttaaagttaagtgatcaaaacttaaatatactaatagtttagtggcattaggtgtagtttacccaaaaaaaagaaaaatatcttatcgatttttcacctaaaagctatactcgcttttttccgttcctcttcctcttcttgtttcattgtcagaagcttcaatcaaaagaacaaagaagcagtgagagatgcatctatggccatcagttagactaagggattcattcaaaatcgcttatttaagaaaactagaatggaacctccatcgaatgaaatcagagaaacaatcttcttctttttccccgaggattccaagcaaccacaaaat

SEQ ID NO: 53255 - DNA, 527 bp, Gossypium hirsutum
  Clone ID: uC-gsronu33B158c01b2
cggacttttgggttcttcactttgatttgtcattctaaaaagcaacaaaagtataggatacccttttttttccttcctctttttatctctctccctctctatatattttgcacccaccatttgttttgctttagattctcgattctcatgttcatctttgaggatatattgccgctgctccgccttgatcgtttgaggtcgaagagtaggcttttcccagagtcctttttgcaaacaataaccgattcaatgagcaacacgagctgccaatcctcggagctagagatttgccgtgacgaatcagcggcgttgaagttaaagctgatagctatagcctcaatcctcctcgccggtgtggccggggtcgctattccactcatcgggaagcaccgtaagttcctccgtacagatgggagcctttttgtcgccgctaaggcctttgctgccggcgtgattctggccacgggcttcgtccacatgctcgccggtggtaccgaagctctcacaaatccttgcttgccggaata

SEQ ID NO: 53256 - DNA, 532 bp, Gossypium hirsutum
  Clone ID: uC-gsronu33B158c04b2
atcgactttacagacacatttgactacgatttggcaagcgagaaatcccaatcgaaccttaggaatagattaggatacaagtgacatgtcactaatgttttatgttatgtgatccagatgctggtcctgtatgttctaccggtggatgaatataccggcatatgttgcggttacttgacatcttatgtgagtagcaccgtgtagctatgtctcgactgacagcttctgtgagcaggcccgttaatggctcgagagcgagcatatatatgttatgagataaagcgtcaccaagctagctcggtttggagattgtcggagatggtatcacactattaaactattattttgggtactgatgattttaaacattttaagaatatggcatgtatagagatttggtaattttgttatatgtgtcattatgaatttagccaaatgtattaacttgtaattgtcaaaggctcgatgtggtatttggccatgtaacttggcttattttggttgattggttgtaagttatatatatttatat

SEQ ID NO: 53257 - DNA, 516 bp, Gossypium hirsutum
  unsure (1)..(516): unsure at all n locations
  Clone ID: uC-gsronu33B158e04b2
gattatgaaggggaaataaatgaaggttagggttaaggtgaaagaatgaacagttggtatttgatagagagattgaaaaaccaggggccatggtctttggatactacttcacctgcaaacgcaaatctatgggctaatttcaaacagcggatttctatctttttctctctctctttttatatacgcatatataccccccaattttctttttcctgcttttaccccttcgctttcctggtttctacaacattatgacccctgctctcacactatcatctaaatatctccaatttattttatgtctggcttttctcttattgttttttctacatcttttctgttgattttagtcataaaacagtgatttgccctgtatgcccttagttttaaaaatgcagtaaaatattttaatttttcatttaagaaatacttttatttttttatgaattataataacangtctgtctcgaacaacaagcgactcaaatccaaactacacctagagtaataaacacg

SEQ ID NO: 53258 - DNA, 308 bp, Gossypium hirsutum
  Clone ID: uC-gsronu33B158e06b2
cccactcgtccggttgatggtaatagacagcgacgttgaacggcagtggatgactcaaaagaaagaaagaacgacaagtttattgtagcacaagagaaaaaaagaaaataaattaagcaggaagaataataatggagtggaaggttaagaaaagagacgataataaatgataattagataaaaagaaaaaaggaacaaagaaatggcaaaaaatagttcaaaagtggaagaaagtagtggtaattgtgctgttgtggtggtgctagaggtggttcgatggtggtgaatttgtgattgggtggtggtgg

SEQ ID NO: 53259 - DNA, 541 bp, Gossypium hirsutum
  unsure (1)..(541): unsure at all n locations
  Clone ID: uC-gsronu33B158f07b2
ttgtgactaattctgagaagatgttgaccaatgttatgtcggaaaataattcagatactcctagtcctacactaacttctcaaagaaacacgaatcctttgactattggagctactgttgaattgaagcaaactgaagtagcaacaccatgcacacaacatagactatttcctgtcccagtaccagtgaagggtataagattgaataatccgtgcaatggatataatactataattcctccaatgttttgtgcacggtcaagttcatccatggcgccaagtccaagcacagccaaccaacaggaacctgcctttcatttgaatctgtttcgtcattccagttttgaagctaactcctctggacagttgtatgaccgacttgcctccaatacaaaccagtcaaccagccagctcttgcacanactggaccaaaagttggattcaatcgaggatagaggacatatttctcccaccactgatcagagtgcaagcagcagtttctgtaatggctccttaagccaacttaatggtgttgcatatgg

SEQ ID NO: 53260 - DNA, 341 bp, Gossypium hirsutum
  Clone ID: uC-gsronu33B158h05b2
cccttgtttccgggtatttgtctcttaattagaaggggtgcttttaatgaagtgacactgaggaatgcttcctttttgaattatatgtttgattcaatcaataaaatttggtactatcatatcactgcgctatatactcatgcttggttcaataaatatatttttatgattttggttcaaaaaaaaaaaacacaaaagaactaacaaaaaaaaaaataaaaaaaaaaaaaaacaaaaacaaacataaaatacggaactaataagaattgctttgttggtattttggaccatctcaatcaggattcttcttttcctgtttcctttttggatatattataacc

SEQ ID NO: 53261 - DNA, 502 bp, Gossypium hirsutum
  Clone ID: uC-gsronu33B158h10b2
ttaattcattggataagcgtaaagtgaattcactttgtttgcttattataaataacattttggaattgtaggtctttttaaaaaaaagggggggttcagtttttttttttttaatttttaattataagaaagctttctctggagaagatgataaaagtgtcgactatggcggagctgttaggagaatgcacggcggcactagcgacggtgagggagagggtgttagcaccatggccgacccttcatttccgtcgtctcagcttttcatattctgctgcttctgccgtcctcaatcaggattcttctttccttgtttacttttagtatatatcagaacctcttattattataattattattgtttatttattattatttttaattgttatcacttatcagaactcttccatgtaaattttgaggaaacccattttgtttgtttattttttttttcaattaagtgcttaattatatatgtgagagtacttaatttaattcatgg

SEQ ID NO: 53262 - DNA, 244 bp, Gossypium hirsutum
  Clone ID: uC-gsronu33B159a01b1
cctatgcgtccgcccacgcgtccggaaaatgaaggggtatatattataaggtattttgtatagtattcagcaataaacctatatatagagagagaatgtattttatatatatgccatatattataataccaagtttgcaagcttaatgcttcatgaatgttaaagtacaatgaaagacactcatggcatgtttgggatatcattttatgattgaatcatgtcgcgatcgtgttcgcttaatgtt

SEQ ID NO: 53263 - DNA, 283 bp, Gossypium hirsutum
  Clone ID: uC-gsronu33B159a06b1
tcctcttcttgaacgtcggacactactataagatggggggttctcagaccatcatctggggagtcgccccatcgatgactaccttcagagggaccagagatgagcactactcgcactaacacaaggatgcagtgcggatcaaactgctcttgagatccatgcccctgtggaaaaggctgtagaaaagaccctgacactgacaccagacagcctgaaaaattacatgcctgtggaatgaatgatcgacacagcatgaagcctgcaaggtctataattatgtctc

SEQ ID NO: 53264 - DNA, 363 bp, Gossypium hirsutum
  Clone ID: uC-gsronu33B159a07b1
ttctcgcgtccggagcaggtacgcaagcgttggggtgggttttcaattccttttgggccccctacgaagttttctggtcttcctcagcctcccatccgcgtcaatcttgggcactacctacactttggtcttgtgggtttataggacttttactgatttggtgaactttattttatttgtgtctagtcatacaagcaatagtatgagcgtcagagtttggagctattgaaagactttgttacagagatgatgtatagtcaatagcagtgatgtttaccttttacttttcttcgctttttctttcttaatggaagcgatcttttatacttttattatatgtatgggtatcctctttctttcttt

SEQ ID NO: 53265 - DNA, 437 bp, Gossypium hirsutum
  Clone ID: uC-gsronu33B159b08b1
tttttgagcgcaatgacaaaaatgaactatttggtgcccctgacccaactttgggcttactacagacacaagctcaattatgtgaggcagtgaaaaaggaagggatcggacctcggtgaagagttcacagctgactgttggattcccttatgtgcagcatctcaggatgtgccactaacatgaatagctgaagcttggtgggcgtggagagagcacaaatagactgtacctggatatgcaatggacactggattgctggagtgatcacccgctcgagaatatttaccatttgaacttgagaatactgctgaggcctgagactttgtgggctcataatgacaggatcagatcgaaacttactgccttatgcgatcatttgcctaccttgtatattgtagcattactaaactctattcaatgagactaaataatggatt

SEQ ID NO: 53266 - DNA, 437 bp, Gossypium hirsutum
  Clone ID: uC-gsronu33B159c08b1
tatctatgagatcaagttgcatatcaacttgttggatttacttaagattacttttcaaactaaacaaaatgaatgcttctggtcctgctcgaatgttggtctggtatgttggacatcaccatggtcgactgttgcattgcagttcatgcttaacactttcaaatgattgtatattccaagacctcatattttacattcccttcggtggaaaagagagtatcatgaactttcggcaaaatctaatggaagcaatgggacaaaatgttcatttcgtgattgatagttggatggaaggcgacaatttaactgcaagtgtaatttggcatcttgagtggaaaggcaaagagataccacatacgacaggttgcaatttctttgatgtcaacagattgatggaaagcttattatcagcaaaatcataggagttgaggagttgc

SEQ ID NO: 53267 - DNA, 161 bp, Gossypium hirsutum
  Clone ID: uC-gsronu33B159c09b1
tctcttgattgtgagaaatggtgtggtattttggtttcttttcctaagagcattatttttcttgcagttaccttggaattatgtactctttccaatgtcttgagtctgacctgaccttaatgtttgtttggctcataagcgagtgaatatcatctcatctc

SEQ ID NO: 53268 - DNA, 458 bp, Gossypium hirsutum
  Clone ID: uC-gsronu33B159d08b1
catagacatgttcatcataacaacaaaaaaattataaggatagggtataagaatcaaatccggtgtttctccgaggcttgactagtttgctctgctcttggcttctcctcttgctcttgttgaaccgaggcttccacaaacacttgaatactgctccaaatggtggttgaaggacactttctcaagatgtgaaatcaacaaaggaacaggggaagaaaatgaagaacaatggaagggaatgaagagagaaaagtgagagagaagcgaagaaatgaatgagtttgagatgtatttgaagtgagcagccaaggggggtatttataggtttattgatacttcaattataaatatttcgaagatgtacttttttttattgtaccttgttaatgttcaagttataatttgattaaggcttctaaatcaacttgtagctaattatcctttatttaaacgtcatg

SEQ ID NO: 53269 - DNA, 425 bp, Gossypium hirsutum
  Clone ID: uC-gsronu33B159e03b1
ccttctcgtccgcctgattcagatagttgtagtactgaagtagctgaatgtgtgcagctggagtgtccagagaaggatgatagctccgcatccgaatgtagcgacgattatgccggtgcagtaaatgagacagttgctaccgataatctgacccgaagtgcccatgatgattatcagggtggtgttgtagatgcttaagattaatctaataccctaccaagctgttagagttaattttcgggtggcaacaaattggtccctgctttgaaaaagggtattcattgctagtaaaaaatttaccatgattgattaaattttttttttttactatttgtaattttttgtatgacataaatattatcactatttgtttcttttactttgataattcctgtttattgaactaatggatcagttaatttaac

SEQ ID NO: 53270 - DNA, 558 bp, Gossypium hirsutum
  Clone ID: uC-gsronu33B159e05b1
ctctctttttggtcccttcttccattaccaaccctttcaagctttaacttccaatttcctccatggatttttagtgaaatcccaagaacaacttcatggcaagttaagtccgttgtgaagttagctagaatacatatttgtgggaagagaaaagaaaagttaaggatttgagaaggaaggttattgaagagaaagataaaagaagtgaagcacagattagggataaaggcaagggagttgcaaaagagtgaagaagaagagaatgactcatccaagtattagattgtgaagattgttttgaaactttagagtgaagatcaattctgactcatctcaatacaaactgaggcttggaagagagtatgttttgatttttggcaataattgatggcatgtacatagggtcatgttaacaatgttttggatgaactttcatggaaacatttgatagtatttgattcttcatgcaaattttgtaaacttggacttgtttaatttagttttaagcggcattatatgatgtcttgatggggaaccatgtgtgataatgtttaggaa

SEQ ID NO: 53271 - DNA, 381 bp, Gossypium hirsutum
  Clone ID: uC-gsronu33B159e11b1
ttttcgcgtccgatagcattgtgttaaattcattgctatcatttcgcagtgtggcagttgatagaagttacctatgcctataaataacagaatccacctcataaattacgagagtgaaaacttggcgttatgctgtggacaaaaagtggtggaggccttcaatgagaacataaatcttcggaggcaaatatatttacacatttcagtttgcagatacccttttgtattttgatacctataggtagttgatcacgttacccttatcgtgtattcatggttttaaaacatgtagtttgcagcatatatttccctttttttatttgccgtctattaaaaaagaaagaataaggggcgtgcaatatatgaccattacatcggctt

SEQ ID NO: 53272 - DNA, 574 bp, Gossypium hirsutum
  Clone ID: uC-gsronu33B159f04b1
catgttttgaggaacataaattcactggctttattttcaaatattgaagtgaatccacgacctgatgaaaagaacgagggaggcatagttgttgagataaagctcaaagagctggatcaaaaatcagctgaagttagtacggagtggaatattgtacctggacgcgggggacgtcccacattgacttcatttcaacctggtggaactgtctcttttgagcatcgaaatctcaaagggcttaacagatctattcttggttcactgaccaccagtaactatttgaatccacaggatgatcttgccttcaagctagaatatgtacatccatatttagatggtgtttataatccacgcaaccgaacttttcgtgcaagctgcttcaacagccggaaattgagcccagttttcactggtggaccaggagttgatgaagtcccaccaatatgggttgaccgagctggtgttaaagctaacattacagagaattttacccgtcaaagtaaattcacttatggactcgtgatggaagagataacaacacgtgatgaaagcagtcatatctctgcatatggtc

SEQ ID NO: 53273 - DNA, 461 bp, Gossypium hirsutum
  Clone ID: uC-gsronu33B159g01b1
gcggtcaaattccctctccctaatatggagtggccggccatgctatgggtggaaacatgttgggaacatgttggctagtgaggtatgtggataaatttaataggaagtatggggaataaagaaatggaaaaaggaaaggatgtgtggtaattgtttctttcctgcccttttgccgtgaaagtgagaaggaaaaacaaaaaaaagtgtccatctttcttcatttccccttggccgaatgttctaaagaagaaagaaaaaaatttgttcatcttttatcatccttggccgaaaatgctaagaagaagggggaaggggaagtaagacattcggccactccttctagtcttgaataaggtatgtaatgcatggcagcttttggaaattgcagaatgtattaagctagttactaagtaccttacttagcccatgttcaaatcttgaatattggtggtaacatgagc

SEQ ID NO: 53274 - DNA, 491 bp, Gossypium hirsutum
  Clone ID: uC-gsronu33B159g05b1
ccctttcgtccgcccacgcgtccggaggtattcaaaggaggcagccctttggttgttagccggccagatgatgcatcggaggtaggtcgagcgctagccaacagctgccggactgtttccggggtgctagtcgatgctcacatcggggacaagctcagcgaggagctgtttttacgggtggaaagccgaggcacgagccatgctaaggagttgctagaacagttgcaattctttcacattgttgcgtctctttcttttgcttaaaggaaaaagaaaaaatgaaaaaggctttcatatcctttttttcccctttcccttttgtgtgttatttcatttcccattgtaatgaaaagggatatagtattaattaattcacacacaaaagagagaggggaaaggatctcttttcttttttctttcttgttaactttgttttgtgtgtttttttgtgtgtgacatagttaatgaatattattaatacttttgtgttc

SEQ ID NO: 53275 - DNA, 397 bp, Gossypium hirsutum
  Clone ID: uC-gsronu33B159g06b1
agtttttattggaaagcgagtcaggactgattttatggcctgggaaacagcgtctttcgtacaaacaacacagatatcattcgtaggcccaagctaatcttcaggcctcttctcccatctatggcttcctgacacaacggttgacatatgacgaacaccgcgctgaaatacgataatcagtccgagatgatgaaggctaacttggctagcgatgctggtcaagagctgaccaggaagatcagtgactgactaccatacctatactgaccccgataaaatcgtattcgatgagggttcttacttcgttgaccgcacgaacggggagggtaccaacggcaactttgaagggggcatgcctgatgctatagtttcgcccaaggatgatgcttgtatgaag

SEQ ID NO: 53276 - DNA, 476 bp, Gossypium hirsutum
  Clone ID: uC-gsronu33B159g08b1
ttttagctgatatgtccttcccggaagagggtttccctgtgaatctcacatcacttgaaatctcaaatggacccaaaatgtatgcatcacttgttgaatggggattaaaatagactcacctctcttcaagagctcaatatcggcggtgagggatgctcacatgtggtgtcatttccagaagaagggacaggaagaatgctgcctcctcctctcacatctatctgcattgaaaattttgagaatttggaattcatgtgctccaagggctttcaacacctcacttcgcttcacgaattggaaatcagtaattgtccaaaactcacatctcttccagaaaaggatatgcttctttcacttgagcagctacatattttcaattgcccgttgctagaagaagggtgcagtaggggtaacggtcgagagtggtccaagattgcccacataccttatgtgcgttttcagtataaaacagtcat

SEQ ID NO: 53277 - DNA, 536 bp, Gossypium hirsutum
  unsure (1)..(536): unsure at all n locations
  Clone ID: uC-gsronu33B159g12b1
cagaggattcatacagcagcagcagcagccatcgaaattatctcaagaacagcaacaacaacaacaaagtccaaagctttagcccatcaacacccccaccaacatcggttaattaccgaactgctaaacgaagaaaggggattccacatagagccccaatggcaggtctaatcatagaatattaagccatactatttaactattattgccccacatatacaaaggtaattatcttgtatatagaagcagcaatggtgaacaaaaaggggataaacaagtggtataataagctccaaatctcaaggacttgaatgatattattaagttataaactttttttgttttggtcttttctattagtttagggcttagggtttcatttttagggtgagtttatacatataagtttctcttcctagtttttttttgaacaaatagtaatggggggatgaaaaatgtaaatagggttttctttttcttcttttcttatggntntagagaaaaagggtagtgaaaaataaagaaatagaagccat

SEQ ID NO: 53278 - DNA, 490 bp, Gossypium hirsutum
  unsure (1)..(490): unsure at all n locations
  Clone ID: uC-gsronu33B159h09b1
ttttcgcgtgggaaattgtataagaaatggggcggtgagttgtactcgaagcttagaaggctccagctggtgaatcagttgtggagcaataacaaggatatgagccattgtaaaggacagtgctgccattgttgcaaagttaattaggttcgtagagcaaggaaaggccctgaaggaaatgttcgggcttagctttacacctccacacccaaggcgaagaagctatggttggaaaaacagcatggcatcacttttttgaaagctttttgttcatgcctacgttacaacacaggtttagaggtaatttctggaaaattgtaggccatttaacattgtttttgtgatttatttttttgcggggttaaataacagattgtgatgacctttcataaggtggtgtaaaaatatgtatgtaaaatcttaaccggagtggattagagattntaaatataaattgttggatgtaattgtacaaacttatgatgggttt

SEQ ID NO: 53279 - DNA, 554 bp, Gossypium hirsutum
  Clone ID: uC-gsronu33B160a04b1
gatgatgcttgtttatgagtatttgccaaataaaaggggtgattactatctctttgacgagagcaagtctccttccttggattggactacaagatttaagataatcacaggcattgcaggaggtctcctctacctgcatgaagaggcgcctcaaaggatcattcatatagacatcaaagccagtaacatattgttggatcaacaattaaacccaaaaatctctgattttggtttggcaaggctctttcctggggatgatactcatgtaaatacttttaggatttctggcacccatggttacatggcccctgaatatgccatgcatgggtatttgtctgtgaagacagatgttttcagctatggagttgtggtcttggagatagtaagtggcagaaaaaaccatgatagccgtcttggttcagagaaggcagatctcttgaactattcatggctgctatttcaaagcggaaagatgttggatttagttgatccaaccctcaagaaatacaatcctgacgaggcagcaatgtgcattcagctaggcttattatgct

SEQ ID NO: 53280 - DNA, 407 bp, Gossypium hirsutum
  Clone ID: uC-gsronu33B160a05b1
actgttcccgccgccgttgtaagctgcctggttaaggccccaaactcgggggactttttaaagctaactagctgtactaacgcgaacctccggggctagcttctgataacgtgtatggccctgttgctagacgaagaagcaaagcagaattggacgggaaactcggagaccacaagttaggataaatgcgacatgaatttggcaagcaaaagcggtggctccaatgacgggatgctgaatgaccaatgatcgaaagctgatctagccctcggttcgactcgcgccgacggagagcgtgagttcatgttctgggggaatgctatcgacgatccacggtcgcattctagcggcgagacacctcgatcgtaacggagcactcaggagaaacactgtgcctcgctcacgac

SEQ ID NO: 53281 - DNA, 499 bp, Gossypium hirsutum
  Clone ID: uC-gsronu33B160a06b1
atggcttgtggggttgacatcaagacgaaatcatgcgcaacaaaatgcaagagatttaaatgatcacaagtagaaatttgactctagaggagattagtgtgtgtgaaggagctgcatatattagaaaatgaaagattgggctgctcccttcgtagctgcagcactgtttgcatttctatcaccaggggtaatcttgcaaatcccagggaagaatcaacccatcggttttatgaacatgaaaacaagtgtggctgcaatttttgtgcatgctgttctctatgctttgttcctcatcctgttccttgtggttcttcatatccacctctatgtctaacaacaaaggcactctctctatctaacaagattagattttcattttgtattatcctgttttctgctcccatgaagaagaatttgctactgttatttagcttttgttgtttattcacattgcttctatgttattcagacttcggttatgattatcaaacatagcatt

SEQ ID NO: 53282 - DNA, 231 bp, Gossypium hirsutum
  Clone ID: uC-gsronu33B160b02b1
ctttttttgctttataaagccgatgttagtgcgtcagccctagaggctgctgaatgtttcgaggctgctgcatttcttgaagaatctgcaccaattgaaccctttagataaaagaaacaactttgcccgcattttgtttttatgtaattttggacatgccatttttgtaaatcttataggttaggctatctaacatctaaaaatgttgaaaatttttacgtgagttgcttc

SEQ ID NO: 53283 - DNA, 511 bp, Gossypium hirsutum
  unsure (1)..(511): unsure at all n locations
  Clone ID: uC-gsronu33B160b07b1
ctatgcgtccggacatttgcaagggatatgacccttaagtcaacgaaagctttagtgcagcccgcttcaatcccggatgaccttgatccttggagatccaagcttctatgggcttctcgtgtgctacctatgccactcgttggtcttcttattattagcggtgtttgtgctgatggaggaagccaagcatccaattatcccgagctagaagctttatcaaggcttgattttggtgccgccatgaaggttttcctggcaaaacgactaacctccgagttcactcaagtgacagccgatgtggaagagaaatcggttatcatcggcgagaggaacagggctgcaacagaagcattgagacgagcggtcaatgatggtcataacaagatagcaatactatatgggggtggtcacatgccggacttaggtaggcgtttaagagaggaattcgaccttgttccttcccgagtacattggataacagcttggtccattacgaaacangatctccaga

SEQ ID NO: 53284 - DNA, 399 bp, Gossypium hirsutum
  Clone ID: uC-gsronu33B160b08b1
ttctcgcgtccgtttatggctgcgcaaagaccgtaccatgccaacagtgttcacaacggtaaggccagagcgagtcatgatcttacccggactcattctgtggaacgaggggaccgcaacgttgcatgagatggctcacctagtgagcagcagagacgataggacagacgaatctgacgaggtgagagcaaccgctgaaacgaagaaaatggacgagctgattcacgaggacaaggggaacggcaccattaccaacgatctgatctacaatgaacagaattctaaatggtgaacactacgccatacatatgctacacgataggtgcctgtgtacagactgcattgtatgaaacctaactacagactgtggtctacgcacagactagcggttagacgacg

SEQ ID NO: 53285 - DNA, 411 bp, Gossypium hirsutum
  Clone ID: uC-gsronu33B160c01b1
cccactcggccggcaagcaaacataaatccgacgggggggtttttaaagaaaattttggaaaaaaacaccgctaaagcatatgaaaagaaacaaaaagaaaagggaggacggataggaggaaaccaagcagggggggggggtttgggggagcgaggcttcggttccggggcgggcgagggcaaagcttttgtttggggtgcccgacaccaaattccggggccggggtgttacaaccccaggttgggaaaaccgagggctttccccattttaatgttgtgggagtacatccccgttccccccggggcggactttcaaaaagggcccggcccggtagcgcttcccaaaagtggccatgcctgaagggtaaaggggaggggccctggaggggaccttaaacacagccggggggg

SEQ ID NO: 53286 - DNA, 523 bp, Gossypium hirsutum
  Clone ID: uC-gsronu33B160c05b1
cggtgaactcaacgcccaacagggtctcgagggcgcgggcttctatctgtctttgaaccatatcgagtcaatcgacgaacagaaggcagctaaagaggcaaagccatggtctcaccagcggagccaccgaaccaccaactccaccgcaacctcaccaacttgctccgcaccaccttctctacccaggccacttctaaaaccacaccgtcccttccaccttccaaaatctccatttctcctctcctattcgctgactcgcttctccacctcactccctcgcccttcgagtcaactcaacatgactccgtttcttctaaatccacaatcaagggcgtgtcttcggccgagtctacctccggcttcccatcaacggtcagggtttcgggactcgcttccagtggaaagcgtggtggccccgccttcgttggccaagtctttagcatgtgtgatctttctgggactggtcttatggctgtttcaactcacttcgatattccctttatttctaagaggacaccgcagt

SEQ ID NO: 53287 - DNA, 465 bp, Gossypium hirsutum
  Clone ID: uC-gsronu33B160c07b1
tcttcgcgtccgggagaaacgcagtgtgacatgggcacccaatgtgtacgatcctccaccgacatcgctattgcatatgattagaaacaaaaggcaacacaagttgaagaggaacaacaacgacaaaaagaaaataggaaggaaagggttgaaaggcaccaagtcgacgcgaggtaacgtcggcaggaaaggcgtcaaacaaattcgcagaagcagcgaaagttcttataggtggtttaaagaactggtggttgaagatagagtagttaatgagatcgacaatttcaacgtcgacaagccggacccttattgtggcagcggttttttaactcagtcgtcgaccggaatgtactactctgtggcagaggctctatgagtatgtcttcttattcacatcatggggaaatctatgcctttatttttttctattctttaatagggttcgtaaataaataagcattatgc

SEQ ID NO: 53288 - DNA, 546 bp, Gossypium hirsutum
  Clone ID: uC-gsronu33B160d09b1
tgataaagtctgggaaaacaaatgacaagcaaaaagacgccggagaaaaagctggtgatggtgaccatggtccaaagaataattcagcagagaagaagcctgaaccagccgctgccaaaaatagcggtgttggtggcggtaaaggttctgctaaagataaccagcatccaaaagcggaccaaatgggaggtaaaagcgaagaacctgaccctacccaaattactgctgctggtggtaaaaagaagaaaaagaaagggcagaaaagcaaccctggtcccaacggtgatacaccaccaccacccagtgacactcagtcagccatggcagtggcactcccagtcccagtcccagccccagaccataccccaccaccaccaccaccacccaatgcttcaatcgatctaaatcctacaaatcaaccaatgtatccttacacacctatgtactatggacctccattttgtggggtaagttacaacaccatttaccctagctcaagctcttcatattatgctcccgccatgcattctaatccatacggaccac

SEQ ID NO: 53289 - DNA, 541 bp, Gossypium hirsutum
  Clone ID: uC-gsronu33B160d10b1
aatagctctcttggtgcaggccactgtctctttggccatcctaacgtgtccctttggtccacaatccattcggccctagagttcctcttggctcgcgccaaccgcttcctggcttatatctgaccgtactcatcgaagaaagccatccttttttgctgtcggacaaaggcttgcttgctttgtcttattctctccttgctgtgcaactagcgatatttgtttggtcgcgataatttgaatcccatttgtggccctctgcactccaaattcatcttgtcacttggccactctaacggtgggcaaaactgtgctgtacaaaacaactctaaaattattatggaaaaacgaattgaactcgaaaaacgggggcgcagtcccgatcagatcaaagaacttaacttggacaactgtcgtagtgctaatatttgtggcctcgacgattcttttgtcgcttggaagtttaagcatgatcaacattggcttaactagccttaaaggtttcccaaaattactcgatcttacacgactcgaattgagtgac

SEQ ID NO: 53290 - DNA, 400 bp, Gossypium hirsutum
  Clone ID: uC-gsronu33B160e02b1
attttataacaaaacaaaaaacaaaaaaaaaaaggggggaaataaaaaaaaatatttgggaactacaaagccaccatataaaagaagaaaaaaaagaaaaaaatgggggggcaatttttaagggatctaggtttacttacgcgggcttcatgaattgttttcgtttttagggcacctatcttgtgaagatggaagagcataataactttactgatggggaaactcgcaatttcttctatgatgagcacgttgcaagacatcacttttttgccagtgggcaatggaactaaaagcccaagccaaatcgcccttccaaacagtggcccaccctgaaagaagacaggaacgcaccgtggggggtctaataaggcgcggggggggtgggggtaacgcccagggg

SEQ ID NO: 53291 - DNA, 405 bp, Gossypium hirsutum
  Clone ID: uC-gsronu33B160e05b1
cccatgcgtccgcagtgacagcctggtggtggaaagagtggtgcagaaagaagtagtgggtaaagggtggattgatcaaatgaaatgggaagcagataatttgggaagagagatagaatggaggttgctagaagaacttgtagaagaggcggtgaccgatttaactggtaagttgttttgaggtgtttttagttttgtctgtttgtcgtctttccccatccactattgactatataactatcccctattatttgtgaatttgtgcatttgattttgaagaaggatgatcctagccagcttattttgttgaaaataaaaaaaaaaatagaacattgataataaaaaaaaaaaacaagtggtgaactaaaaaagtggtatctgagatatttttgtagaggaatcggg

SEQ ID NO: 53292 - DNA, 494 bp, Gossypium hirsutum
  Clone ID: uC-gsronu33B160e12b1
tgttctttgcgtccgcccacgcgtccgggtttttaaggcccattatcgcacgacgctggatcaccgtggccccaccatgggtggtggtcggagccacacgaaggtcagattttcggcctttttaagagctcctgaaaacaaagcacaccaaactcagaaaacatgaaagaaatggcctctcccccttcctttttagcctgattcagacaacggagagtagatctcaggagacgtgaccacggggttattccggtgtcagaggtgcaccagaggcatgtgaggtcagtgatggtagtggaggcgcgtgcggggagggctgaagtgacctggtgcgacgcctagggttctctctcccttcttttgctgaaaatatttagtgggctagggttgatttgggtagtgggctgatgtgggttttaggattgtttatttgggttttaagtttgggctgatggttttttgttttgggctataagtttaggtttatgggtttt

SEQ ID NO: 53293 - DNA, 534 bp, Gossypium hirsutum
  unsure (1)..(534): unsure at all n locations
  Clone ID: uC-gsronu33B160f02b1
ccttcgtgtccgcccacgcgtccgaaaaaaaataagaagagaaggctcgccgccttctcacgtctgcgctagggtttcaatcctagttttacaacaccgaaggctccgccgatttctggcctcacagccctcgtctaaactcctactgaggcggagtgagcgaggtttcagtcgacactaacacccaggtgtacgagggcagaggtcgacatggaggtacggaggtagaggcgcaagtgtatggaggcctgtcacgtgtgcaggggtaggccgaaagcgtgtgcagaggagatgcacgcgcgcaaaggcgcagcacgcgggggggggggggaagccttaggtttgactgcggctctggaaggagggctgatgctagggtttcttttagttttcgggccacctagtgattgggccaggtgtagttgggtataagcttgggctaggttaactgatttgggccacgttgggccattgtatttggactgtggactgttattaaccctttgatnggttaatttttttattacttttttt

SEQ ID NO: 53294 - DNA, 418 bp, Gossypium hirsutum
  Clone ID: uC-gsronu33B160g08b1
taatataaaaaaaaaaaaaaaaaaaaaaaaaaaagagagaaaaataaaaaaaaaaaagcgaaaaaaaacaaaaaaaaaaaaaaaaaaaaaagggacgacaaaaaagggggggggggtttgccgaacccggggttccgcccccggggtgccccggctgtcccccggattttacggccctggcccccttttaccggggttcggcttttgaaaggtggggcgcggaagaaccaaagctgtgcgcgggggggaaccccctggcgttcccggccagttttttgcgtgcgggggttgtcgcgtttggggcacggccctcattgtgttcacgcgccctggcagtgggccgtgcccccaggggggggccctttctcgcgggggtggccccccccgcttgggggggtttctccccaggggggtgggt

SEQ ID NO: 53295 - DNA, 321 bp, Gossypium hirsutum
  Clone ID: uC-gsronu33B160g12b1
ctacgcgtccgataatatttgactattaattaagggataattattatataatattgattatataaatgttagactagatccacctaattgtgttactgactgtaattacttgaacagtgtagcatttttttttacttttttcattattgttttttgtagtatatatggctattgtgtggttaagcaataagcagccatttccttagttgttatataacaatgacaatttcttcacgtatagtttttgtatgatattaatgtgttttgactttattgatgaatgtagttttatttatataaaaggtaaattatatttaattt

SEQ ID NO: 53296 - DNA, 382 bp, Gossypium hirsutum
  Clone ID: uC-gsronu33B160h07b1
tttattatcctccaccctcgcctattcctcaacaaaggctagctgtgccacatgtgatagatccgatttgattgagtaagttgccagtagataagatacgtaaacatggggctgaggaattcagggctaccgttgatgatgataatgctgagagagttgagttttggctcaagaatactatccaagtattcgatgaattgtcctgtactcctgaagaatgtatcaaatgtgtagtatctttacttagagataatgcgtaccattggtggaaaacattgacatctgtggtttttagagaacaggttacctgggagttctttcaatccgagttcaaaataagtatataagtcaacaatttcttgattggaaacataaagagttt

SEQ ID NO: 53297 - DNA, 453 bp, Gossypium hirsutum
  Clone ID: uC-gsronu33B162b04b2
gaaaatttggatgcctctgaactatttcccacttcagatgaaaagaatgaagatgaatatggtgaagcatcatggatcaaggttaatattggacaaagtggtttctacagggtaaaatatggagatgaactcgatgcacgactcaggaaagctataaagaaaggcttcttgtcagtaactgataaatacggcatcctcgatgacagatatgctctttgtgtggcatgtgaacaatcattatcatctttgcttttgttaatggatgtatacagaaaagagagcgattacatcattttatcgaaagttttcgatgtttgctataatgttctggaggtcttgagagatgctatcccagaattaacaaatgcattgtaagaaaatttcattaacattcttttatggttcggccaaaaattagggttggaatccacacctggtgagagtcatttaact

SEQ ID NO: 53298 - DNA, 495 bp, Gossypium hirsutum
  Clone ID: uC-gsronu33B162d02b2
cttaattaaacgagcaaaacgaaagcttcgtttttcttccaaaacccatattgaaccaagtgctgagtctagaatggagtgggttcgaggggatagggttgggtgtggcagttttggcactgttaatttggtggcatctaaggagttttcaaaatctccttcaatggcggtaaaatcttgtgaagctatgggttccgtttccctcaagaaggagaagcaagtgcttgatcaacttgggatttgcccgcaagttattcgctgttttggcgatgattatacggttgagaagggtgagaagttgtataatttgttcttggagtatgctaataaaggaagcctggctgatcatgttaagaaaagcggcggaaacttgattgaatccgatgttagaagatatgcgagatcgatacttaaagggctaagctttgttcatgctaaagggtttgctcactgtgatattaaactttaaaatattcttttgtttgataatggtga

SEQ ID NO: 53299 - DNA, 501 bp, Gossypium hirsutum
  Clone ID: uC-gsronu33B162d10b2
cctacgcgtccgaaaagcactttgcatggaggatcagttaagatcactaggaatacttgatacatgtaactctgattctatcgtctttgatggtattaatcttgaagctaatttgccaccaaagaagatgagagcagctatttcttctatggagcctggtgacgctcataagttgcttgaagacttggtgaaattgtggcaatcaaggtcatgtagtggaaattatgttcttccgtggatatatagtttgttgctgactcacggtcatcttatgtctcaagaatctgaaacccagatgcttaattccttattgaagaataccaaatcgagaggattggcccttcagcctttgctacaattatctgggcggttacagctagtaacaacacagattgacaaggcggctcagaacagaagtcaacacttcacaagtgatcacaaaatggatgaaagtgaagaagatgatgatgacgatgtagatgatgttctttatgtggaaga

SEQ ID NO: 53300 - DNA, 501 bp, Gossypium hirsutum
  Clone ID: uC-gsronu33B162e07b2
ttttgaatatggcacttgaagctctgaattcacctaccatgcctacacctttcaccaacaaatacgacgacatcgacaattggaagaaaggcaaacgttcaaagcgactacggaccgactcccctactacccccaccaccgaagaagagtatcttgctctctgcctcatcatgctagctcgtggctccccccaaggcgctgctcatcatcatcctcactcttcctcctcatctgctcatcctcttcatttgaacttgtcatataagtgcagcgtctgcgacaaggctttcccttcttatcaagctctgggtgggcacaaagccagccaccgtaaaccctccaccgcccaaaacccatctataaccactgaaaccaacgccgccggcagtagcgggaggggtaggtcccataagtgtaccattgccacaagtctttccctacgggacaagccttgtgaggccacaaacgctgccactacgaaggtggcaacaacaacagcag

SEQ ID NO: 53301 - DNA, 491 bp, Gossypium hirsutum
  Clone ID: uC-gsronu33B162e11b2
tttttcattttcaatgcatctgtggcacttggagtgcctgttaacaggcttgtacaagctgcagactcggtctcggtatgcttatcaaaaggtttaggtgctccagttggatccgtcattgttgggtccaaaagctttattagcaaggctagaagacttaggaaaactttaggtggtgggatgaggcagcttggtttcatttgtgctgctgcttttgttgctttaaaagaaaatgttgcaaagctcgagggtgatcacaagaaggctaaggtgttagcagaggggctaaatcaaattaaaggtctaagagtcaatgttgctgcagtggaaacaaatatcatattttttgacatagtggagggatctaaaatcacagcagagaagctatacaagaagttagaggaacatggtgtgcttgtgatgctggaaggcccactcaggatgagaattgtcctccaccaccaaatatcatcaagcgatgtgctgtacac

SEQ ID NO: 53302 - DNA, 445 bp, Gossypium hirsutum
  Clone ID: uC-gsronu33B162f05b2
ggctattgcatggatagctatctaccaaccgcacaaaggccaccgccttacccaacccagctcccaacaccaagaaaaggaagaagaagaagagaaaagacaaggaaaaagagaatatagatgaagaagatggattctctcaagaagaagaaacgaaaccgtacctcatccatctgcatgccttcttcactgagttaaagggttctatctgatgttcatcaatgaacaaaggcctttttgattctactaaatctgttcttctttgatctactttcttggggaaatgaagcatcatggaccgatttgtatgctacatatgaactaaaacctaatactataccatatattgactgctgcacatgattggggagctgctcccgttattttactgtatggattatctatttcacagcatgggagatctaatctatgctccagagcagac

SEQ ID NO: 53303 - DNA, 452 bp, Gossypium hirsutum
  Clone ID: uC-gsronu33B162f08b2
ttgttgttatagcttaccgacggttaaagatcaagactatctggtaaggggttcgttccctgttgttgaaacagagggagctgctgagtttgaatcttcatttactgtttcaattggtagcacgccactaagcgtggtgaactcatcggcggacttggtggttgaggggattttccgagctgctaatagctatactgacttctgcttagtgcatggaaaaggagatccctacatatcgagtcttgaactaaggccttttaatgattcagggtatttgaatgataaatcatccaatattttgaaagtggttaatagaactgatctaggaggctttggagagaccaggtacccagaagacagatatgacagaatttggaaaccagcatcaagttttttacttacgagcagccaacttcacttgtattattcacaacaatgtgaatacaacagtg

SEQ ID NO: 53304 - DNA, 441 bp, Gossypium hirsutum
  Clone ID: uC-gsronu33B162f09b2
ctgtacgcgtgggcggacgcgtgggctagcacaagaagcaaaatccgtctcctctgtttcttcccctttttttcaatgttatgttaattttcctgttacataaaagttagcaatcatggctgagaataatggaaatcatggagtagttttgaatgtgaacgcggaagccaatcagaatccgcctccatcaacctccaaaaccaaagattccgacgtcggtttcactgttcccttcatgcagaagctgatggctgaggtgttgggcacatatttcttgatatttgctggttgtgcatcagtggtggtgaatgtaaacaatgagaaagttgtatcactgactgggatttccatagtttggggattggccgtcatggtgttggtttattcagtgggtcatatctccggtgctcatttcaatcctgcagtcaccattgcttttgc

SEQ ID NO: 53305 - DNA, 490 bp, Gossypium hirsutum
  Clone ID: uC-gsronu33B162f12b2
tgatgggaaagatcttcacatatctgtgactatgccttccattgaggtcggaaccatagggggcggaactcaacttgcatcacagtctgcatgcctggatttgcttggagtaaagggcgctagtaaagaactagcaggcgcaaactcaaggctcttggcaaagatcgtggccggctccgtcctggcgggggaactttccttaatggctgcaatagccagtggtcagcttgtccagagtcacatgaaatacaaccggtccaccaaagatgtatccaaagttggatcataacaaggtataaagattatgttggagttgtaagtagcattaatcggcatggttggagggtacgaatcttttagccatatggcagaatcaccctccaagatatttggtccttttattgtgtccacactgtgaattcttaattgcccctttcttttagtttctgcatgtgtgtgtagttttgctttatgaacttgccaatcaact

SEQ ID NO: 53306 - DNA, 485 bp, Gossypium hirsutum
  Clone ID: uC-gsronu33B162h08b2
cccacgcgtccggtttgcattttcattgtttgtagtgtagttttcttgtggtgcaagaaacaaaatgcaagagaagggaacccaatccagaatagagaaatagcaacaccagtaacatcacaaggggtgtcgccatggttttctggtgcagaactcgaaagccttcctcatcagtccctcgtccaagctaccaaggttcattttggttcaagacctgatttcaagaaaacactactagacttaaaagaatcagatgttggagttcttggcgtgtggaccgaggaagatgcggcacgatgttgcgaaaatttgtgcgtctggattggcacagaacctgcactttgagtccattagcttcactttataatgaacatgtatatgttatttgccgaatgcaagacatgattatttactatagtaatgtgtaattccatcattgtataaacacaagcactgcgatctccatgaaagttagtaaataagac

SEQ ID NO: 53307 - DNA, 458 bp, Gossypium hirsutum
  Clone ID: uC-gsronu33B162h12b2
cctacgcgtccgaaaagtttgattatagtcatgagctaagttttatttttggtacaaatcaacaaaggttaatgccttgaaaagtcaatttattaaaaaaaaaaaaaaaaaaaaaaaaaaaaaaaaaaaaaaaaaaaaaaaaaaaaaaaaaaaaaaaaaaaaaaaaaaaaaaaaaaaaaaaaaaaaaaaaaaaaaaaaaaaaaaaaaaggggggggccgttttaaaggatcaaatttaacttcccctggcttgcaacgaaaaacttttttaatgggggccctaaaattaaattaatgggccgcggtttaaaaacttttgaactggaaaaaccttggggtaaccaaattaaatggctttgaaaaaaaaccccttttcgcaagttggggaaaaagaaaaaaggcccgaaccaatcgcctttccaaaaaattgcccaccctaaatggcaaatggaaccccc

SEQ ID NO: 53308 - DNA, 152 bp, Gossypium hirsutum
  unsure (1)..(152): unsure at all n locations
  Clone ID: uC-gsronu33B163a04b2
gcngtagtgcttggaaggatgtgaatcaagagtttagttacttttaagaaatgcttgcagtagtaaaaaatcgtatcttaaaccttgcaagggagatggatgtactctacagataaggatatcacttcccatctcttgcataatcttttaat

SEQ ID NO: 53309 - DNA, 320 bp, Gossypium hirsutum
  Clone ID: uC-gsronu33B163a12b2
actgatatcatacttgggttgcaaggagaggctcctacgaaacgcatgggggttccatacattggtgggaaattcacactcctcgtcatactcttcaaagtccagtgatctagataagtactagattcaatcttgcattgctttcccttttcatttgcctctgatgctccctgaatatcatggtttatatagtcttcttgttagtcacggattgtacaatctgcagcttatatttggtatagcatcactaatgatgcctcgatatcatatactggataaataatatagggtgtgccatcatgtttatagtgctctgtttc

SEQ ID NO: 53310 - DNA, 304 bp, Gossypium hirsutum
  Clone ID: uC-gsronu33B163b03b2
ctcctcgcgtccgctcaaccccaattttaaacgcccaaatttagaaccctagatttttctctgcataacttttgttaatccacaaggtttagctgctctatgagattccatcacagatctgaaggactcgaggctccgcgaattaggataagaaaaggatatttaaattcaaattgactactttttgagaaaaggatgaagaggaggaagaggtagataatgatgaaggtggtttttctgggctagagagtaccggtcattcggtgagcacggaagaggagattgctgggcctgaacatggaga

SEQ ID NO: 53311 - DNA, 469 bp, Gossypium hirsutum
  unsure (1)..(469): unsure at all n locations
  Clone ID: uC-gsronu33B163b10b2
tcttttacgcgtccgcatttctccacttgttctcactgtatcatcttccattaatggacacccatctcttcttcttcgtcttacttgttctccccgtagcttattccgatgaccacgacctgttcttggaatgcaatcagacattcaattgtggtaccatacaaggcatcggataccctttctggagccctaccctgcgccctagttactgcggtcatcacgggttcgagctcatttgccaacaaaatcagtcccctgttatcaccattaatacccagagatttcatgtactgaacatgactcctcctcccctgatgaccattgcacctgttgatacctgngaagatccttgtcctcaacaattccataacatctcattaaaccacctctttgattttgctgcaaccattcgaaatctcactatattctacggctgccctcttgaagatgatataccttttccacatag

SEQ ID NO: 53312 - DNA, 337 bp, Gossypium hirsutum
  unsure (1)..(337): unsure at all n locations
  Clone ID: uC-gsronu33B163b11b2
atcntgggttgtaccgtcattgagatgtttaatggtagacctccttggggtgaacttgaagggcctcaagctttgttcaaagttctgaacaaaaccccgcctgtaccagaagcattatctccagaaggaaaggattttctacgttgttgctttcaaagaaatcccgccgggcggccatccgcaactacgctacttgagcatccttttgtacgaaattcggctgatcaaaatggacaagccctcatgcaggccttttctagaatggatctaacggataaatcacattagtatgagaatagaaatgatgccgacttccccggtaacaaggatgacaaac

SEQ ID NO: 53313 - DNA, 278 bp, Gossypium hirsutum
  unsure (1)..(278): unsure at all n locations
  Clone ID: uC-gsronu33B163c04b2
ccnttttctctgcaatctcttctttttggagtttcagcacaccttatattacaatgagtttaatcagcgaaactcaaattacacccacccaagtctcagatgattaagccaacttattcgacaagtagagggatgattcttcaaggacaacattggtcctctaatcagccattgaactagtttcgctagacatcatggctaaagctggtccaggtgctttcttgtccctaacagaagtggatttcaagctccccaccaccaaccctgttagctcccgt

SEQ ID NO: 53314 - DNA, 338 bp, Gossypium hirsutum
  Clone ID: uC-gsronu33B163d03b2
ctttctcgtccgtggatgggagccatgatagtggcttgcactcttccagtgacattggtgcatttccctcaatggggcagcatgttcttcccaccatccaaagatgtcgtcaaatccaccgaagaacattactactcttcggagtggaatgaggacgaaaagaaaaagggtatgcactcggctagtctcaagttcgccgagaacagccggtcggaacgtggaaagcgcgtggcctcagcaccaaccccgcctaatacaaccccttcccatgtttaagtaaatcatattaagtgttttcctttttcttgttgaataataagaaggttttcacttttttt

SEQ ID NO: 53315 - DNA, 326 bp, Gossypium hirsutum
  Clone ID: uC-gsronu33B163d07b2
tttagagaagacctaaagaaccttgctacaatattcaagaacacagcatatacagaagggttttacgcaggtactcgctatcaacctaagcgtctttgaagtcatttgtgatgcttagcttaaactctgttgtaccattttgcttactggaaacaaaatccaaacaaaaaacgtaaattaaagggagaaatgtagttctcattgtctcataactcttgttttttcctgacatttgatggtaactatgtaagccctgtttttgaatcagataaaaatgttaattggatacgttgttatcaggataatgaaggagctttttagaatgt

SEQ ID NO: 53316 - DNA, 524 bp, Gossypium hirsutum
  unsure (1)..(524): unsure at all n locations
  Clone ID: uC-gsronu33B163d08b2
tttacgcgtccgcaaaattcacacgctgccttgaaaccatttcatactctcgaatgacatctcaaaccacgcgagctccctcataaggagcgtctccaaaaagaatacaatcatctacaaaaacaaataatttattgaaaaacgttccctaccaattgtcacacccctcatcaacccattctgatttgcttctttgataagagtagaaaatccctcagcacagatgagaaaaagataaggactgagagggtctctctgtctgccttttgaaggcaaaaaccactctctatttgacccattaagattcaccgaatatgatatggaacaaacacatctcataatcagtactatccaatcagcatgaaaacccagtttagttatcattcccgctaaaaaatctcattcaacccgatcatacgctntacttttatcgagtttaagcgcanaattccctttcttgccacttttcttcatcttaagagaatgaaggacctcataagcaaaaagcacatgaacgatatatg

SEQ ID NO: 53317 - DNA, 487 bp, Gossypium hirsutum
  unsure (1)..(487): unsure at all n locations
  Clone ID: uC-gsronu33B163e11b2
tttttattcagggtcatacaatgaagttagttgaggttgaaggatctcatgtggttcagaacttatatgattctcttgatgttcatgtcggccaatctttagctgtcttagtaacgttgaatcagccaccaaaggattactacattgctgcatcaacaagattttcgaggaccgttctcactgcaactgcaatgttgcactacgcaaactcacaaaccccggtttctggacccctgcctgcagctcctgcattccaatttcattggtcaatgcagcaggcaaggacatataggtggaatttgacatctaatgcagccaggcctaatccccagggttcattccattatgggaagataacaacaaccaagaccattgttttggccaactcggcatcttttataaatggaaagctgcgttacaccgtgaatggtgtctcctatgtgaattcngataccccttcggaacttgcagattattttaacatttc

SEQ ID NO: 53318 - DNA, 410 bp, Gossypium hirsutum
  Clone ID: uC-gsronu33B163h01b2
tcttttttaaaaaactttcagaaaattgatccatccaaggttttactttttcattcactcttcttctttaaattttttcttataatattagggtattgatttagtcccttcttccttttcattaaccaatagcttcttttaagcttgcgatgctattttctttaaatttttttaataaatactgatttgattgttcgacttactttatttatgattggtgaggtctggtgtagaggagttgtatctctcctaaatcaaactaacccttcaattatttcgctataagtttctttatttttgttgctttgatatgataagctgagaactacgaaaaataattctcttttctagctgtagttagatgccttcaaatttctgtcttttaagagtgaagatcaatatgaaattga

SEQ ID NO: 53319 - DNA, 493 bp, Gossypium hirsutum
  Clone ID: uC-gsronu33B163h08b2
ttatcttcccgatttgttttacctcgagcggggcagcctcgaggagcaaaagttaaagagatcgcgtttcagggagctgaaggaggatgtgcagaaagcatttaataaagacaaagccgagtttaaccgcaacggcttaacttcgtcgtcgtcgtcttctttaaaagatggcggtcggtataagctccaaaaattatgaagaagtctgggtttttttttatatattttgtgaaattaatgtttttaattgtttaacaaaccattaaaatgtctatagagatggtttttttaaatgtattcttgtaggctttgcttgatagggtgaaaggaaaattataaggatgaaaacttgaaaggtagaaaactaaaaggatggaaaacataatttttcctatgcttggtaggaaagacaaaaggttggaaagatggaaaaatatataattttgaaataaaatatatttttctcattctctttatttcaaccaagcatagt

SEQ ID NO: 53320 - DNA, 403 bp, Gossypium hirsutum
  Clone ID: uC-gsronu33B164a04b2
gttttatttggcgcgtgcagatctcgctacactggaaaaagattatgattaagttgtcgctagggctgatgacggagacgaaatgattactgatgagtcttgaggtttgtgccggtatgccgttgcatactgttatgaatttgacagtcgattttggatatgagttttctggctatgaacacctcggatgatgtcctatttgtggttgttttatatgaataaagggcacggcacatgcatttgatcggcatgtccaatttgcaagcagcttatgctgctgctgtttaccaagaccgaccgatcctttcaaaggatatattccctgatctagctttcatcatacaatcatgtttgcttcaggaccctatcatgacgtcaagttaagtcagatagtacttgtgct

SEQ ID NO: 53321 - DNA, 348 bp, Gossypium hirsutum
  Clone ID: uC-gsronu33B164a08b2
tttattttgagtggtaaagtccccatattccctgcccaagtattcaacattgaaggaaacccttacctttataccaaaggaacagacaaggtggataaaggatcattgcccaactccagcaaggccaaactcaacaaatctggaattttttatgttataaccatactaatggttccttattattattctcacttgtgggattcttcatttttcatatgaatacgtatatttaatagaacaactttgacaaaaaaaaaaaaaaaaaaaaaaaaatataaaaataaaaaaaataaaaatttataaaatattaaataattataaaattaattataaaaataaaattaaatg

SEQ ID NO: 53322 - DNA, 291 bp, Gossypium hirsutum
  Clone ID: uC-gsronu33B164b03b2
gcctttctgtccaccatggctgccaacgaagctgaaggggaggaagtttgaggcaaagtggtggatgggatgctatagctaacattattgttcatgttggtggtgccagcgagcttgcacgcccaggtactcttgcctaaaccgctgtttaccgaggtgctgggtcatgtgctgtcacggttttctaccacgtaccaagactcttagctggaggatgagccttatgttgacacggctcttatgatgtcgccgctggacattagtgcttcctctagttttccttatcactta

SEQ ID NO: 53323 - DNA, 528 bp, Gossypium hirsutum
  Clone ID: uC-gsronu33B164d02b2
gtcttcctaagttgatcaatctgtaagtttgaatgagtcagtccatgctttcctagtttgtaaagtttgaacataaatgcatgatgaattatttctttttatacttttttttaatttactgatgaaatggttgaattgtttttgcagttttcttgattcgaatgatcttagtggtgaagttccagatcttttgtttaacattccaatttataagtatgattattttttattagtttgtttagtttcctatttgtattgaaataacactttctatatgattaaattatttttggtatctgtgtttttactacatcctttacacaccagacacatattcatcagctgggaacttaatcgcttaactttgtttattcagttttgcaggaaacaggttaaattgtggtgaaaattttcctcacccatgtgtgtcaaatggaaatgattcaggtgatttcagtaactattttgactaaataacattttttttaagaagttcaaagcagcgttgcccaggaatgtgcctagatc

SEQ ID NO: 53324 - DNA, 497 bp, Gossypium hirsutum
  unsure (1)..(497): unsure at all n locations
  Clone ID: uC-gsronu33B164e04b2
gttttattatatgttgatggtttgaaggggattggaccggcggattgggtttacgggatgaaattgtcttacgccgtgccggacaccggttgtgggaggtgtactcggtccggcggtgcttgtggttatgataccgagactggtgtcatgatgtgcctttgctctacttccatgaatgctacgagagaatgtggtagcaatggagatataggaagtggtcaaaagttggcattgcggacaaagtttcatgcatttgccttggtggtgggtgcatttatttactttgtaatattcatatgaacaatgaatatagtggctgnatgttttcttcttcttatagttactggtgctccaaagaaagtgaccaggccattcttgtggagggttgattggtttatatccaaattttgtaccttctttanaaaaataaataatatttnattttttttttttatttaatatttatttttcttatttattttatattttattttggg

SEQ ID NO: 53325 - DNA, 525 bp, Gossypium hirsutum
  Clone ID: uC-gsronu33B164e06b2
cgtttagtttcttcaatgaatggcaaccgtagcagcgccagagcaccaccatcaccaccaccatccggcgtcgctagaggaagtccgtacgctttggataggagacctccagttttgggtcgacgagtcctaccttaactcttgctttgctcatacctgcgagctagtctcgataaaaattatacgcaacaagatcactggacttcccgagggttatggatttgtggagtttgtttctcatgcagcagcggaaaggatattgcagacatacaatgggacaccaatgcctggaactgaacaaatgttcaggttaaattgggcttcatttggtgcaggagaaagacataatgaccctggccccgatcattctatttttgtaggggatttggcgcctgatgttacagattatctattgcaagagacctttcgagctcattatccatctgttagaggtgccaaggttgtgactgatccaaatactggacgctcgaaggatatggatttgttaatttttaaatgagactg

SEQ ID NO: 53326 - DNA, 391 bp, Gossypium hirsutum
  unsure (1)..(391): unsure at all n locations
  Clone ID: uC-gsronu33B164e07b2
atttatatctcaattgtggctaatttttctcaaggtccacaggtcagccctgattcttttttttcccctccttcttgcattagggactgccatacagaaattcattatacaggtcctggtattacaggtataattgtgtagttactgaagcaagttcagtatacaatgttttggcacagttgtgtgttgaggtgcatttaagcaaaaatatagtttctgatttgttgtaatgtcaaagatataaattctttacaacactcaagaggaacatatgtatgatttatgattctataaagttatttctctcttccgtttgcaaaanaaaaaaaaaaaaaaaaaaaaaaaaaaaatattaaaattatttaataaaataaaaaaaaataataaaatg

SEQ ID NO: 53327 - DNA, 478 bp, Gossypium hirsutum
  Clone ID: uC-gsronu33B164e11b2
tcctctcgtccgatctgtacgaagaggttgacatcatcagcaaaggcggaaactacggttggcgtgtttacgagggtccatatcgttttaatccaacatcatcacctggagggaacacatctgcaaattccattaaccccattttcccggttatgggatacaatcactccgaagtaaacaagaaaataggatcagcctcaattataggaggctacttttaccggtccaacattgatccttgtatgtatggaaggtacctgtatgcagacttgtattcaggtgcaatatgggcagcaactgaagacccggaaaacagtggcaacttttcaacgagcacaattcgttttggttgtgcaagagactctcctttacaatgcagcagtgtgccaggaagtgaccttccagcattgggttatattttctcatttggtcaggacaatagcaaagacatctacttgttaaccagcagtggagttta

SEQ ID NO: 53328 - DNA, 363 bp, Gossypium hirsutum
  unsure (1)..(363): unsure at all n locations
  Clone ID: uC-gsronu33B164g09b2
tcctcgcgtccgcccacgcgtccgagaagttacacccgatggtggagtagggaaagccaacacattccttccagggaagcttcattgggtggctattgggatgatgtccatggctatagttctatggtagtagcttaaagtggaccctcagtcaccagtctgcagtttcatcactgagagtcgattttacttcgatatttgatgatttatgtttatttgattattgttctgggttcttctttatatatatatatatatacattattcatttctgtataaataagtcagacctggtgagggatgctgttttgtactcaactctatttgtatactgtggttatttttgagtatatacttgtatnt

SEQ ID NO: 53329 - DNA, 486 bp, Gossypium hirsutum
  Clone ID: uC-gsronu33B164g10b2
cccacgcgtccgccttcaccactgaaccttcaactgctcccttcactcctcctccggagtcggtacacttgaccacaccatcctcgcccgaggtgccatttgctcagttccttggccctaacctccattatggagaggctggacagagattcccaatataccagtatgaatttcagtcctatcaacttcatcctgggagccccattgggcaactgatctcaccaagctcaggaatctcaggttctggcacctcatctcctttccctgatggtgattttgcttctggtttacgttttcctgagttccgaatgggtgaccctcccaagctcttgaaccttgataagctttccaaccgtgaatggggatcaagtcatggttctggaactttaaccccagatgctacaacgtccaccccccgcaatggtcttcgtttggatcatccgctctctgaaattgtgtcacatccgagtttggataaacaaaacc

SEQ ID NO: 53330 - DNA, 569 bp, Gossypium hirsutum
  Clone ID: uC-gsronu33B166a01b2
cccacgtttattgtattttgttgaaaagattattaaagccaaacttgtcatgaactttgctataattatgcaaggggcaagcattctgtatgaaggtggtgaagatcttgaagaggatatggtagtgatttatgctgcagaccttgagaaagcattatctgagcttacttctccaggtactagcggtagtgtgcataccgaagaggatctgctacaggagttctcatgcagtatcaatatcaagcatagggaagactttgacgaagagaaggaacctgatggaatgcttctctccggatgggtagaagctcctgttgatacggacaataataagcctattggaaatgacgaaagtacatccaatgctttgccatcaatggaaactctggacggtgccaaggatgatgatattcaggatacttcggaagtggctgaagcttttgcagggaagaaaagataattgtctgaggattctagagtcacagctgcagatccttcaagcccttctagtctgaaacaaaatatacccgaaaagctcgatttgatgatgaggacgatgaactattata

SEQ ID NO: 53331 - DNA, 404 bp, Gossypium hirsutum
  Clone ID: uC-gsronu33B166b06b2
gcgagggtcgccctcccacttgcctatactaatgtatttggtttgttttttttgttttttttttgccgaaaaaagaagcaaacagatccatgtagaaaaagcaaggactgccagcggagcacaaaagcctgataagcccaaactacccacactaacacaaggcgaggccgaccccaagccaacaaccaagaaaagggagaagccacaagggctgaaccaaagcgtagcacaccacagaaccaacacacggaacggaggcccttgggccatgcccaactaagggtgcacacgaatacactgcagcccacccgtggagagcggcagagtctaaagacaaaaagcaaaaccagcttacgaaatgcagagtcagctcaggcagatatcactgatggaacgaacatcac

SEQ ID NO: 53332 - DNA, 465 bp, Gossypium hirsutum
  unsure (1)..(465): unsure at all n locations
  Clone ID: uC-gsronu33B166b08b2
cgttttgttagggttccttccagcgactgccgatccaccatttcattaggtggtcagcgatgcacaggccacgaccagatttccccaacgatagcaccatgcgaggaaccaggtatgccatcttatttctttttttttttaaacatctagatctaatgttgttctaaaaaatgaaaccgaatataaaaaagaaacttaatatcatccgaccctcacccgtatctcaatatttctgagatattcggggtttcattggtgtcgttccaaacgtttctttcctttatgctaaagtcgtaaggaaatgagaagaaaaacaaacggataaacagacttgaagatcacctttctctttggttgctttgtattgcttgcgtatattttcgttcgtaaatgttcgtactcgattacaaagattaaaatctggctttatagccgaaaagaagaggaaaatanatangaataatc

SEQ ID NO: 53333 - DNA, 396 bp, Gossypium hirsutum
  Clone ID: uC-gsronu33B166c06b2
aaaaattttattttaaaaaaaaaaaaaaaaaaaaaaaaaaaaaaaaattaaataaaaaaaaaaattatataaaaaaaaaaaaaaaaaaaaaaaaaaaaaaaaaaaaaaataggggggggcccttttaaggttcccaggtttcctcccccttctttgccccccattattttttttttggggccccctatttcaatttttttgccccttttttaccaccctggtggttgggaaaccccttgcttttcccaattttattgcctttgggcctttcccctttttccccatttggattattaccaaagggccccccccttttgccttttccaacattttgcccaccttttttgccaattgggcccccccttttatgggccttttaggcccggcggttggggg

SEQ ID NO: 53334 - DNA, 383 bp, Gossypium hirsutum
  Clone ID: uC-gsronu33B166c11b2
caggtaccggtcttgaagggtcgaccctagcgtcgcgtacggatgagtgtctctacgtccacaagcactggcaagagccagagtctgttacaagcgtgtcgatggataaatacaggctctgagtcatggttatttacgattgcatacaaaccccttcggcacacggtctcaagcagtgatgccatatcattatgtatgtttggcgtattataaactgcaaagcatatcaagagacctcctggaaatttgaaatgccagggtgcataaatgagaggatataaagtggctactgtggaaatctgaccgtgtgatgcactgcaaaagaatcaagaatcattgtagctagattggcttaaagcacaaagcaaacatgtacttagacc

SEQ ID NO: 53335 - DNA, 555 bp, Gossypium hirsutum
  Clone ID: uC-gsronu33B166d04b2
gaactgtttactacggacattgagacaaagagattttaggagcaaagttttcgattgccgtgaagcaccggacatgacggttcaatgctacctagagagaattttccggtataccaaggccggaccgtcggtttatgttgtggcatatgtatatatcgatcggttttgtgaggcaaatcctgggtttcggattactgctcggaatgtgcataggcttctcattacgaccatgatggtggcttctaagtatgttgaagacatgaattataggaattcatactttgcacgagtgggtggattgacaacaaaagaattgaacaaattggaggttgaattattgttttggatgggttacaagttgcatgtaaatgtgagtgtgtttgagagttattgtagtcacttggagagggaagtgagcattggaggaggataccacattgaaaggaccataagatgtgctgaggaaatcaaatcaagacaaagagaagcccaaggatatacaataaattgctcgcattttgtataatctacatcttaaacccttgcaatagttgt

SEQ ID NO: 53336 - DNA, 410 bp, Gossypium hirsutum
  Clone ID: uC-gsronu33B166d08b2
tttacgtttccgcccacgcgtccgcaaggatttttggtggcaaagaaacttctgcaaacacaaatagagtagttggaacttatggatatatgtcgcctgagtatgcactagacggccttttctcattcaaatcagatgtatttagcttcggtgttgtcgtaatagagatcatcagcgggaagaggaacaccggattttatcagcctgaacagtcattgagccttctaggttatgcatggcatatgtggaaaacaggcaaggcaatggatttactggaccaggcactgcgtgagagttgcaaagcagacgagctgctaaagtgtctaaacgtaggactgctgtgcgtacaagaagaccccggtgatcgtcccaccatgtcacaggtagttttcatgctcggcagcgagaat

SEQ ID NO: 53337 - DNA, 348 bp, Gossypium hirsutum
  Clone ID: uC-gsronu33B166d09b2
cctcacgtttccgcaccgttgtccagtgtgggacgtccatccttttctgttcagataaacaacgtaattgagttttgataagtttgacacccaaagcatggtgtagaagtgtatatatagagtgtcatgcacgtagacaaatgacatcacatgtgaataccacgatgttacctctcttaactacactaatttctgatctaagtttggatattcaaaaaaaaaaaaaaaaaaaaaaaaaaaaaaaaaaaaaaaaaaaaaaaaaaaaaaaaaaaaaaaaaaaaaaaaaaaaaaaaaaaaaggggggcagcctttaaagagaaaacatctttctacctcctcttttgaggg

SEQ ID NO: 53338 - DNA, 303 bp, Gossypium hirsutum
  Clone ID: uC-gsronu33B166e03b2
cgccacgtctgctttacgggctctgggatgggtgacatacccggactcttgttatggacagaatccggtatgctgtcgaggataaccaaatcaatatcaatggcggtggggaacccgacaggagactttacgtgcctgttatccatggagctgataagaaaggaaagctcacaattgctaaggagatcaagaataggtcacatctagataaagagaacagccaataacgaacaaatatcgagggaggaacattaacaggggctcactctgaaggagccttatgtgaacaggattattaaggca

SEQ ID NO: 53339 - DNA, 278 bp, Gossypium hirsutum
  Clone ID: uC-gsronu33B166e06b2
cccacgcttcctgtcaaaaaaaaaaaaaaaaaaaaaaaaaaaaaaatttaattaaaagggttgcgggggtggcggcttctaggttccctccgcttgcctgcggggtggtacgtccttttttgtgtcttgtggctccccttcactggcctctggtctccaatttttacactgggaactcggggaagccccccgttttccttgcttttcagctttttgccctttccccttttggcgtcttgggtatttggcccgatgcgcccgccctttccatcttttgc

SEQ ID NO: 53340 - DNA, 307 bp, Gossypium hirsutum
  Clone ID: uC-gsronu33B166f03b2
cccacttgtactctgactcgtgggcagacgacgagaaggggatgtattacttgacactataattcactgttgctaatcatgggatcattatcaactgttagcaccaatgtcatgcaagctatcataagatgctgctgaagatataaagagggtggaatgctgccgaagaataagcagtgaactagctagcagcatatattgcagacattaaactagcagcagcaggcttaaatatgtgagcagatacctcgcttgactgttgaacacggtcttgttcatgggaaacacggatatggaaacacatatc

SEQ ID NO: 53341 - DNA, 362 bp, Gossypium hirsutum
  Clone ID: uC-gsronu33B166f09b2
ttcccatataactggcagagcagtgttcacccctggatctatgagtagattttaaattaagctgttgcagatcatggcatccttgtgtttgcttcttgttagtgaactttttttatgaactttttactgaattacctctagttactgtttaagatgtttgtttgatgccattatttttgctcactaaattaatcaagttctgaaaaaaaaaaaaaaaaaaacaaacaaaaaaaaaaaaaaatagataaaaaaaaaaaaaaaaaaaaaaaaaaagaataccaaaaaaaaaaatctatttttaaaatcactatccttgttgaacattaaatatattataaaatctcgggggggcccttctttgg

SEQ ID NO: 53342 - DNA, 320 bp, Gossypium hirsutum
  Clone ID: uC-gsronu33B166h01b2
cccacgtttcctttctgccatggtgtctctgagcttgaagaatcctcaggatatatggagccttgtagaaaattcaagagttttcctcgaggctttgagattatttttcttgaagagagaaaaaggatataagaaaccttacttttgataaagatgatcagatggctgtggaatttgtgactggtggtgcaaatattcgggcttcttcttttgggaatcctttacatagtctttttgaagctaaaggaattgctggtaatattgtgcatgctggtgctacaacaaatgctatcataactggattgatcgcgattgaagca

SEQ ID NO: 53343 - DNA, 302 bp, Gossypium hirsutum
  Clone ID: uC-gsronu33B166h10b2
cctacgctaccgtttggcagtgaaggcactgaaggattgcccttataaaacaatatggggtcattcaaccccagggatagaaaggagataaatgaagagccacgaggcagaagaccaatggcggagaaaccttaacaataaccgctggagaactaacaacagaggggtggacacgccgaataccagagaacgcgaaccaaaacccataaaggatagccctggttgatccaaaattagcaaaaccagtacataaaggtacacaaagaagcgaattacgaaaaagatcaatagctccttgaaaa

SEQ ID NO: 53344 - DNA, 470 bp, Gossypium hirsutum
  Clone ID: uC-gsronu33B167a03b1
cggtttcgtttgttaaaaaaaaagggctatgaactcagtgcaatggggatatgtccgtatcatcaccggcaccatttttggcggtatcgttggcttctacgttatgcaccgcgtcgaactcagctacaaggaaaagatgaaggagcgattgaggcaatatgagctcgaattgaaaagaaaagagaagctagatgaacttgaagattccatctagtctttcttttttccttgtttttttttaacagttaagcctccattttcctttttctttaagttgttttttagaatcagcatacaataagcaggatatatgtgaaatcatggtgattttggttgattagtgattggttctttattaagtgttgaattaaattgaaaaatactcaaaacagtacaaacgattgcgcccttccgacttttgaatgggttcttctctttttcaaagaatttatcagagttttttttggatt

SEQ ID NO: 53345 - DNA, 554 bp, Gossypium hirsutum
  unsure (1)..(554): unsure at all n locations
  Clone ID: uC-gsronu33B167a04b1
acaacatgaggccaatcggttgctttccacaaattctaactagttttccatcagctaaaaaggactccgtcggttgtgcaaagccgtataatcgattagctcaacgtttcaacgccgagttgaagaatgcattggctcgacttaggattgagtttcctttagctacaattgtttatgtagacctctactctgctctatactctttatacactcacccgaccaaaaatggatttgaacgtcctcttgttgcttgttgtggttatggaggtaagtacaactatggcagagatgcagcatgtggagaaacaattaatgttaatggaaaaaacattatggtgggatcatgtaaagacccatcagttcgagtgagttgggatggagttcatttcactgaagctgcaaataagtttgctttcgatcttgtgtcgtctaaaaatttctcaaatccacctattcctttgaaactggcatgccaccataggtaaacatcatctggngttntgttgggtgtttttttggtaaaaaagagatgaatatcataaccaaagaggaat

SEQ ID NO: 53346 - DNA, 390 bp, Gossypium hirsutum
  Clone ID: uC-gsronu33B167b01b1
cttgcaaggcaccataccttgtatctcaaaggatggtagatatgtcatggagactccattcaaggtatggtttcttttgtgaatgtgcaagtcaataaaaaatcaagttctaattaaaaggtgatcaagtccttgaacagttctacttactgtataactgattcggattggatgttaacaaatactattataacattgcaacagcactatagggttgagaattcttgtaaagtaatgttgattgctgaaaggatagaggtacctgtctctaagttttaggatggaaaagttctgattctgttgcgtaaagcaacagtattgcttctacactattctctttgaagcagtaatacgtgaaggtttttatttggctgacaataatattctttt

SEQ ID NO: 53347 - DNA, 263 bp, Gossypium hirsutum
  Clone ID: uC-gsronu33B167b10b1
ttgcgtttgtggcggagattatattgccggtggaactgctgctaatgttgctactgccaccaccgctgctgctactgctaccacaactaacgtatagttttttttttatttacgttttactgattttattcttttccttttcttcttttaatagctcttttatatatatgattatgaggtatatatctggtggttctctctgaatattggattgatatcccatgaaccaaatttagttgaaaatcgagttttcaatctcttgc

SEQ ID NO: 53348 - DNA, 368 bp, Gossypium hirsutum
  Clone ID: uC-gsronu33B167d06b1
cccatgcgttcgcccacgcgtccggcttaattgggttcatcttcttgtatgttttaaagtattacatgttggctctaagagctgggggatactggaagcagttgtaattatctatctatattatcccccaagaattcatactactccatgaatattttgaaagcaaaatatattatggttttgccaaaaaaaaaataataaaaaaaaaaaaataaataaattaaaaataaaataataaatatataaaaaataaataaaaaataaaaaaaaataaaaaaataaataaataaatataaaaaatattgggggggccctttttaaggagtccagcttttctccccggtgttggcaaagtttatttttttttt

SEQ ID NO: 53349 - DNA, 537 bp, Gossypium hirsutum
  Clone ID: uC-gsronu33B167d09b1
tgtttttcgtacgagaaagctcaaaaattccgcgttgctcccttaaatggcgctatttgtcacgctacggtcttggtgttccatttacaaaaatctccacatatgccgacagctgtgcaaaatatctatgtactcgtcttgattcaaacaggacgccccattattccggatctacgccagttcgacaccgctcaccgacgtgggttgtttcaaacgatgagacttatcggccttgctcatctcctcactagccaaaccgcgatcaaattgtgacgccttcattttcatgtagcgtctttttattttacttaggtaaacactggtccgaaggttcccgccagcttaatttcttcgtccgccaatcacctttcgagacggtttggaataaacataccgtccgtttttcatcccaagaagaacaaagctatttggcgggtgtttaatatacaccaccaatttttgtagaccgtaaaggagaagaagagggagatgtccttcaacaaatgaatgatgccttcaaggggaagcttttcaaat

SEQ ID NO: 53350 - DNA, 510 bp, Gossypium hirsutum
  Clone ID: uC-gsronu33B167d11b1
ttatttctcacgctctgtgcaacgcttgcttcaagagttgcctgctctgattacctattatcccttgctctgcttgtccaaacagctctcggcgctgaccctgctttccatttctggtccaactctgggactatctatggctatgatccttatgaagccaacttataggagctcactgtctacctgtacattcaagcccctcccaaagggttcggtctaggatccataggtcacaagcctaaccaagctgatggcctcgcactttgcagaggcaatgtgtctaccactgatcgtaaaacctgtgctgtgtaagcaggcaatgaaatacgataacgctgcccgtacaacataagtgctatcgtctgcgacgataactgtcttttcaagtattcaaacatggagtagcttggacagatggataatcctaacatgttctacaagtggaacttgcacaacgagagtgtacgccaggcgctcaatgccgagaccatagaacttgtgagcgagttg

SEQ ID NO: 53351 - DNA, 416 bp, Gossypium hirsutum
  Clone ID: uC-gsronu33B167f02b1
ataaaacaaaaaaaaaaaaaaaaaaacggaaaaaattaataaaaaaaaaaaaaaaaaaaacatacaaaaaagaaaaagatgatgttggggttccttactgtctctttatctggttaatttgggggggggcggttttgggggtccctttttttgttcccctggttggcccgcttttgcttttttttgggggtccccaaattgtttttccggggcggggtttttccacctctgggtggggaaaaccctggggttcccccactttgttccctttgggaacatcccctttttccccgttggggtttatccgaaaggggccccccccgtcgccctttccaacatttgggcctctctattggggtgtgggacgccccctttttgggccctttaatgccggggggtgggggtgtgtccccccg

SEQ ID NO: 53352 - DNA, 469 bp, Gossypium hirsutum
  Clone ID: uC-gsronu33B167g05b1
ccattatgtgtttttgagttgctcataattttattcccccaatcgtttcaggtagatgctatgctatatatgttcgtatgttatctcggtgtttttccttctttgcttgagaaaaaaaaaaaaaaaaaaaaaaaaaaaaaaaaaaaaaaataaaaaggaaaaaaaaaaaaaaaaaaaaaaaaaaaaaaaaaaaaaaaaaaaaaaaaaaaaaaaaaaaaaaaaagggggggccgttttaaagaacccaattttcctacccctgtctggcaaggaaaaaatttttttatggggcaaccaaaattaaattcctgggccgcggttaaaaacgctgaaacaggaaaaccctggttgtacccaaattaaatggcttggaaaaaattcccctttttcccagttggtaaaaacgaaaaaggcccccccctttccccttaccaaaatttgacaacctaaaatgcaaaagggaaccccc

SEQ ID NO: 53353 - DNA, 442 bp, Gossypium hirsutum
  Clone ID: uC-gsronu33B167h01b1
ccctctcgtccgggaattcggagactcctctccgatgttcactgcactggcgacgattgccttgataaatctagtttgcttgattggattgatgaagaaagcaatcgtgaatgagggtatacctataatctatgagacaatgcttctacaatttgttctttgtgccattctggttctaatcaactggcccttgtaccaaggacttttctttaggaaggacaatggcaagatgccaaactatatagctatcaagtcaattgtattagctgtgtcatcttgtacatgttttacattattctcgacttaaaaaaaaaataatgttcattttggtttaattctctgtaactatcactccatgatttgaagaaataaaaggatacccttgttagccttcgggattaaaaaaaaaaacaaaaaatctatattaactatacttcttttt

SEQ ID NO: 53354 - DNA, 382 bp, Gossypium hirsutum
  Clone ID: uC-gsronu33B168a04b1
cccatctttccgaggaatctggcttaaaggttgggcggggttttttttaattaagggtgaatttttatggcttggggcctaatggggaaaaccggaccatggtaccccatagaaaaccttgaccggattgggggctatggtggtccatttaacccaaggcatgggaattggtggttttgggggtcaaaattaagggttggggtatccgaatattaaatcccaggattatggaaggggttaatattaaattggggttttaaaaaaaaaaaaagaaaaaaaaaaaaaaaaaaactaaaaaaaaaaaaaaaaaaaaaggggggggcggttttaaaggaccaaggtttccttcccctgccttgcaaggtattagtttttttttggg

SEQ ID NO: 53355 - DNA, 466 bp, Gossypium hirsutum
  Clone ID: uC-gsronu33B168a12b1
gggttttccaagctgagtttcccaaaccattggaaaggaaagaatggtttgtactgcgtcggtctgtcgagaagggggctatatggggcggctagcgatgcactcaacatagccgatgatatcaactcaacttagtaactaaatggttcctttgatccaccaatattacatattctataccaagcagaacacacatattagttcacttgtgactatgtacttatgcatgcatgcatctatgcacggatgtatgtgttgaaagatggatgcatgatatagccaaaccgaggtggtttagggtttaagctatctgtatgaataatcatttccttagtaaatccaagagagttatagtactgtagtgctattgtatggaatatatcacatacaggagaactgtagaaagctccagacccatggggtggcatcgactttcaaatgaatacaaaatcatcagatgagaggt

SEQ ID NO: 53356 - DNA, 544 bp, Gossypium hirsutum
  unsure (1)..(544): unsure at all n locations
  Clone ID: uC-gsronu33B168b05b1
ggagttggtatttcaattcatgctgggacatctaatggagtatttttgcgtccatgggatggtcctttcctttgctccacttgccaggagaagaaagaagccatggaagggaaaagaccatcaggaagtagacatggtagtgacagcgattagctagaccccccaaattactgcagcattttatgggcactaacaattgtttcagaggtggtcgtaaatgggaaagatatcacaatcatatactatagtaatttccttcaatttcttattgggggggtcatggagcattctggtccactttcaactgagggttcatttccatctatactcacaagccagaagaacaaagttcagatatgggtttagatttttgctttctgggttccaagtaagaagacttgtgtttaagtcgagtgaaaatggaaaaagaaaaaaaaaatttaaaaaaagagacaagatatgcttcataggttattccattttttcgtcgatgtccatgccatngaataccagtcgctccaattcataaaactaacattaaatg

SEQ ID NO: 53357 - DNA, 230 bp, Gossypium hirsutum
  Clone ID: uC-gsronu33B168b11b1
ttgtgcgtgggttatattatttcatattgtatgggggaattgtaaaacctatatgagctggaagaattaagtgactgctcacattagagaattaggagaaagatgggataagcaacatggaaatttattgattatttcatattttctttaaataggagggataaattctctatgtttttaacgaggaatgtgttcttatgtatatttaatacaattgaagaagtttattt

SEQ ID NO: 53358 - DNA, 442 bp, Gossypium hirsutum
  Clone ID: uC-gsronu33B168c06b1
cccttgtttccggtattcttagattcatacctaggtggagagggtcatacagggctgtctttttttcttttcaactttatagtttccaaagtgaagaaaatgtactttttaacttggttatatagtgcgctttatttatctaaaaaaaaaaaaaaaaaaaaaaaaaaaaaaaaaaaaaaaaaaaaaaaaaaaaaaaaaaaaaaaaaaaaaaaaaaaaaaaaaaaaaaaaaaaaaaaaaaaaaaaaaaaggggggggcccttttaagggacccaagtttacttccccgggcttgcaacgtaaaactttttttttgggggcccctaaattaaattgacgggcgggggtttaaaaacgtggggactggaaaaaccttggggttccccaattaaattcctttgaagaaaatccctttttcgccagttggggtaataacaaaagggc

SEQ ID NO: 53359 - DNA, 373 bp, Gossypium hirsutum
  Clone ID: uC-gsronu33B168c12b1
tcctcgcgtccgaaaaaaaaaaaaaaaaaaaagggggaatttttaaaaaaaaagggttaaaaacacaaacaaacaaaaaaaaaaaaataatataggggcgcccgatttaaaggaaccaggcttccttccgcgaccttgcgactggataacccttgtatggtgcccccaaaattcaactcgctggccatccttttacaaccaggtgacgggaaaacccctagggttacccaaataaatcgtcttaacacacatgcacctttaacgggttggggtactagccaagaggccgccccctaaggcccttccaaacaggtggtcaccctaaatggacactgtcactcgccctgtccctacccattaatcccggcggttg

SEQ ID NO: 53360 - DNA, 520 bp, Gossypium hirsutum
  Clone ID: uC-gsronu33B168d04b1
cccttgtttccgcccacgcgtccggtggggtttacggtggaattctccgagcaaagggtttagcaaaaagaattgctgttttctcttttcatttcacaacttcctttcctataaacactgcaaattttcaccagttttaatatggattccaatgtcaaagaactagccaccgaagttctcccttatatccgagtttacaaagacggctcagttgaccgattagtcgattcacccatcgtcccaccttgtaatgaagaccctgaaactggggtctcatctaaagacatcgttgtttcaaaaagcccaccgatttcagctagaatttacttacctaaacacgtcgaacaatccccaaaagttcctctgttagtctattttcatggcggaggcttttgctttgaatcagcgttctcttttgttgaaaccaagtacatgaacaggttggctaaacaagccaacgttgttgttatttcgatcgagtataggctagcccctggacaccctctccctattgttatga

SEQ ID NO: 53361 - DNA, 317 bp, Gossypium hirsutum
  Clone ID: uC-gsronu33B168e08b1
taataataaaacaaaaaaaaaaaaaaaaaaaagggcggacatttttagagagataacagagacttttttacacaagcaaacaacatggtagctcttttatagggttacctgcttttcattcccttgcccgccgttttacaccttcttgactgggaaacccttgtctgttcccatcttcctctgttttgccccacatcccctcttttgcccgctggcgtttcccccgtataggcccgttccgttcgctcttttttcagttgctcggccttaatggtgagtggcacgcgctctgtctcttgcgctttatgttcggccct

SEQ ID NO: 53362 - DNA, 546 bp, Gossypium hirsutum
  Clone ID: uC-gsronu33B168e09b1
ttattcgcccgcccacgcgtccggacactcgggggggatttttaaacaaaagagcgcctttagttcctccctcttctcgaacaagatgagtaccatgaaattttgccgtgaatgcaacaacattctctacccaaaagaagacagggaacagaagattctcctctatgcctgccgtaactgcgatcatcaggaggtggctgaaaacaactgtgtgtatagaaacgaagtgcatcactctgctggtgaacgcactcaaatattgcaggatgtggctgccgatccaactcttcctcggactaaagctgtaatttgcgcaaattgcaaacatggagaagctgtcttcttccaggcaactgctagaggggaggaaggtatgacactgttttttgtttgctgtaatcctaactgcggacatcggtggagagattgagatccgagatatcaaagcttgcttgatttaatgtctccttttttctttttttgacaaactaatttcagtaagacggttgtgatggatcctttttaaggattctagggttatttact

SEQ ID NO: 53363 - DNA, 528 bp, Gossypium hirsutum
  Clone ID: uC-gsronu33B168e11b1
tttttaccacagaatggatctaagttcaacccggtgccttcaagtgcaagtccagccacatctgccgctgctgcagcagcagccaccgccaccgccactgcaactgctgcagctaaaggcaaaggggttgctcccgttggatcttagcatggaatgagctgttatgtacaaccttgtgtccgaccatgtattgaaagatatataagaatgagtgactttgccatggaagtagcagttgagttgtggagaaatgcacggcttccccctccaccccaatttttcctgaacaccctttttgacaaatttcctcgtggtacagtggtaatgttccattgaattgaagagtatactctccttgggataaattagtaaaaagccttaataataaagtgctatattatcaccattttgctgctggagtatattttgattacctggtctttgtgttattctggaaagtaaaaaagggggaaatgcaaggtcctttttgccaacttaaaaatgtaataatggaatggaagcttttaa

SEQ ID NO: 53364 - DNA, 548 bp, Gossypium hirsutum
  Clone ID: uC-gsronu33B168g06b1
ccctttcttccggccagggtgacttgacttgtgtgggggagttacttggaagggggttgaatagatacacagacaattttctgtgattctgattgtatctattatgggtttatttttaccatttcctacatatttgcattttcttttttcagatttgaattccataaattggtaatgaagtcataaacaaacccattaaagtgtgagctacatgttagaatttgtcttctaataaaggagtagagatgaaatgatttttgatatataatagactattaaggttggtcaaaaataaaatccatttctcccatttccaattttgcctatatgacgaactcatatgacaattactttatcctactgctaatcatgtttatgaaatcacagaggaggatatagtcaaaatatttaatccaatttacagtcctcctaatggactttcatgacgggctgattggcttgtgtatggcaggttaataaaaaatttgttgaatgtttctttaccttagacacaatgagattatgctgcactaatattacttcttcta

SEQ ID NO: 53365 - DNA, 545 bp, Gossypium hirsutum
  Clone ID: uC-gsronu33B168h05b1
cttgctgagcctttgaagcagctttctgaaactcctgatacttttgaggattttgtttctgagaatctgaaagagtttcaagactggagtgaatactactcctgtgatgcaacgtatcgcaactggctcaaaattgaattagcgaatgcagaagtttctcccgacgaactttcggtagaggaaaaacaaagagcaataatggcagccaaagagacgttggatttatcttttttattgctactgagggaaagaaacccatggcttatttcttgggtggaacatattagtgaatcgatggaacctctatttcttgaattgcattctactgcaatgctccgcctcccttctggtgaatccatgtgtccagacgctactgtttgtgctgcattaatgagtgcactttactcttctgcaactgaggaagttgtctcagaaagacagttaacagtaaatgttgccatttcttcaaaagacagctacagcattgaggtaatgttgcgctgcttggcagtggagggtgatggaattggtccacacatcctcaa

SEQ ID NO: 53366 - DNA, 539 bp, Gossypium hirsutum
  Clone ID: uC-gsronu33B168h11b1
tttatgcgtccgagttgaagaaggtgctatcggggggaagttgttgtgcgctcatggtgatgctcgcttaggttatttcaattggtcaggaatccaatgcagttgtggaagctggattacccctgcctttcagctgcacaagtcccgagtcgatatcagcaccgtgtagtatcgttatccgccatagctctaaactgaatcactcgccggctcccggccagtgtttctaataagaactatataggattggaatttcccttgcacaaaaagtctatgagatgttcatatatggaccaacaattatgtaagagaaaaaaaaaaacaaaaaaaacaatgagttgttcaaaactttaaagtttgagggactgtctgaataatttgagagattgcattgatgtgcagtctttgcattgtggtgcacagttgaattaatattttataatggtttagacattatatgttttgtcttattattagactcgtccattcgttggatcggacctaaaattgatctaacctaaaaaatccatttttataac

SEQ ID NO: 53367 - DNA, 471 bp, Gossypium hirsutum
  Clone ID: uC-gsronu33B169a01b1
gcgtcgttcgcccttttttttttttttttttttaaaccaaaatatagagtacattgtttgattaaaattgaaaacatggttcatatttatccattgcaatgttcagatgttcaataacatgcaaaagatatatatatatagtctaatgacagcttcaagtttatctaagcaaatacatatatcacccaaaacttcccacagaaactcaaatttaagtactaacaagttcataaaacaagttaaacgaaagattacatcaagggaaaaagacaatcaagacaagtaactataccggtactcgtatttaatcgaactcacaaagcgataaccgcgtgtcgtttgtgcttgaggaatgtctgaaaatctttataaccactcctgtaatggtccagactgaaagtaagctgtcttattacctctcttttctcttcagacacatctaagatcatgttcctttgcttatccactttc

SEQ ID NO: 53368 - DNA, 498 bp, Gossypium hirsutum
  unsure (1)..(498): unsure at all n locations
  Clone ID: uC-gsronu33B169a04b1
atcttgattgaaaggatccaagcatctttatccgccatggaggagaagaaaacaatcatctacatgggggatggactgggtgatttctgccccagtttgaagcttggagatggagactatatgttgccaaggaaagatttcccagtttgggacttggtttgcaaaaacaggagcctaataaaagctgaagtttgcgaatggagcaatggggaggagtttgagcatgctttactccacttcatcaccaagattaccattgacaaaagcaacactaatggcaacaatgctgctcagctatattcagattgcaaagtacagacaatgccaggctcttcccatcaagccttttcccaaaccctttatgttcctcattagaatgcaaaacttgctgaggttaaaaataaaacatagctgatgcccttggncttgctattcttttattgaaataacatttgtataattgtattagtttcaaaatgtaccagaattatatttaac

SEQ ID NO: 53369 - DNA, 549 bp, Gossypium hirsutum
  Clone ID: uC-gsronu33B169a07b1
actaacaagccctctttttacaaccatcacttccatgttgtgacagagaagaaaataaaacaatccatttctccaatgggtttgcctagaaaatccccttctttgctctctgtatctttggtttcaatcacaatctttttggggtcctttccttttgttgctacagctgcagattatactaacctggtgtttaagggctgtgctgaccagaaatttcaagacccatctgggctttacttacagaacctcaaaaatctaatgcaagatttggtttcacaatcatcacagagaactttctccaccgcagcctctggtgaagaccctaatgcaatcaatggactttatcaatgcagaggggacctatcgacaagccagtgttacagctgtgtgagcaagatcccgaaaataagtgataaagtttgtgggaaagcagtagcagccagggtccagctgagtggatgttacttaaggtacgagatatctgggttcaaacaggttccagaaacagagtttttgtacaaggtatgtgggtcgtcatcaagtggaaga

SEQ ID NO: 53370 - DNA, 526 bp, Gossypium hirsutum
  Clone ID: uC-gsronu33B169b06b1
ggattataggatccaacctttcttagagctaaccattgttttgcaatgtagaatgctgtaattcattctgcttgtgtttcaatttgttagttgttcatctactaatgagtttcttgctgtaacatatgcagggctatggataatcaggtatggttccaaatgtttccccttttcttaaattgaccagtgtaatggtatgctgtaatgtttggtttagtagaaaaaattgtcctagtactattgaggcagttaaaaattatgtagattctgtcacggtattgtcaaaactagaatgcaatggtctaatgccgttcttctgttttattaagctctgaaatacttgtttataattcatgtgccaatgtcaccgtggatactgaatggtaaaagtgaagttgattcatcagaacaggaaacttgagatccttaagagctctttgttgtctataacatgaagatctgactgcttatagaattgctctcttttttggttctttaaatgacagttatatgttgcaccttgttc

SEQ ID NO: 53371 - DNA, 540 bp, Gossypium hirsutum
  Clone ID: uC-gsronu33B169b09b1
catatatctattgttttcaaatatatttgggttttcaacccttctctgttcaattgtttcttccattttgtttgacgatggtttgcttggtttctcgtacgggaaggcacttgcagcgatacaatgccctcggccgccgccaagttgtcggatgcattccgtacagatacaaacgtaatagtgatggaactctgagcactgacttggaggttcttgtcatctcctcacaaaaatgtcaaaaaatgatgttccctaagggcggttgggaacttgatgaatctaaagaacaagctgctttaagagagtcagttgaagaagctggagttagaggcaacgttgagtgcgaattaggcaaatgggactttatgagcaaacgctatggcacgttttatgaaggttacatgttccctttgcttgtgaaggaggaacttgccctctggcctgagcaaaatgtgcgacaacggacatggatgagtgtgaaggaagccagggatgtgtgccagcattggtggatgaaggaagcctttgacatactggttg

SEQ ID NO: 53372 - DNA, 392 bp, Gossypium hirsutum
  Clone ID: uC-gsronu33B169b10b1
ataatccgccgacaagtcgtagaacgggagcgagagttgtaggggagacatgctaggatgggcgagcatgcgaagcagacactatagcatcgggaggactaatagtaagcgatagaaagtgggaaaacattgattacatgggcaaaaacatgtactgacgtagagcagtaactgtggatgacacagaggtttgaactgatatggtcagttcaaagatgcaggtacacagctatcatactagcagagagtccagcggagtgacaaaagggacccttcttaagagacaccattaaaactaccaagggtatgggttagctgcattgggactaggaggcgtgcaagtgactgagcctcagttgcatactatatatccccatgggttaactgacaca

SEQ ID NO: 53373 - DNA, 458 bp, Gossypium hirsutum
  Clone ID: uC-gsronu33B169c06b1
caatttgtaatctcacgaaagtgtacggcattctagttgaaataatttcttcctgggttgcttcctgtcacaaaaaatggggttctggacattggtagaaggattgctgctatttgccaatgcattagcaatactgaatgaagatagattccttggtccaagaagatggactttagcagaatttcaaggaggaagaaacactctcaaggggcagatagttgggctcatacatgcatgtcaattcctcagactaccacttatccttttcaatatcatcactattgtagtaaagttagtctctggttgagatcaacatgaagaataaattcatggcttgtgacatgaatgaattaatccatacatactctgatgatatgttaataagctgtttttgccacctgtgtgtgtacgatactcgaaatgacagaataagagaatggttcatatgcttgtaaaaa

SEQ ID NO: 53374 - DNA, 526 bp, Gossypium hirsutum
  Clone ID: uC-gsronu33B169d07b1
ataatcttggggttttttttccctttccaactctaactcatatctttgactgctcaacaaatacaggcagtttgtgctgctggaaatcgctttgttgccatcatgctcaagcaaattctaagcaaactcccacggaagtcgcaaaaatctgattctttagattcagctggacttgattcaggcaatcatacttcaaactcgagcaatggagttcaatgtacgaatattgggaatagtataacaagtcgactaagtgttgttaaacgggtgtcgtcagctgtttttcctgctagtatcatggctggagtggaggcagtggagccgaatctatcattcaaggatgtttcaaatccgcagaagcagaacttgtttatcagtaaattgaacctgtgttgtgaggtttccgattttagcgatcccaaaaaggcttcttctgagcaagatcttaaacgccaaacattgatagaacttgtcgatttcgttttctccgggtctgcaaagttcaacgaacagcagtggctgcaat

SEQ ID NO: 53375 - DNA, 507 bp, Gossypium hirsutum
  Clone ID: uC-gsronu33B169f07b1
caggcgccgggccagtaattgccgggtcccacgcggccggctaaaatagctcgaaaaggcaaagcccctcttataaatcattccatattccccccccccccgccggcgatttccttaaaatattatttatttactttatcaaaaagaacccaaatcaatggcgcccgattccaagtcgagcaacgatcttttaattcacaattcctccggtctatctcctacaaacgtggatcccttcagctactcgaccagagaaaactccctttggaaacagtgtacttagatattcaagatgctacagattgatggaatgcaatccgggatatggtggttcgtggggtgcctgctatcgccattgcagcagctttttcgcttgctgtagaagtggccaactttaaggactttaatgggacatctgaggaagctgcttctttcattgaattgaaattggaatatcttgtctcaagtcgaccaacagctgtgaatctttctgatgctgctaaaagc

SEQ ID NO: 53376 - DNA, 550 bp, Gossypium hirsutum
  Clone ID: uC-gsronu33B169g06b1
aaataatttaacatatatattataatctctatgttacttaaagaataatttaaaagaataatttaaagaatatattgtctcaaatatttttactcatagatagatattgatatacagcaaaagaactaatgaaattgttatattgtgtatatatatttttaacatattttcgttaatttatttatgctgctagacgtgtataatataaaaatttcatgtaaaagtaaaaatgaataatatagatttaaatttgtaatcacaaactctcatgcaacttcatttttacatgtgtcaaacttcacaaagaacattgattgaaagtatctattcacaaagaatagcattaaggttcctttaaaatattgaccgagagtattctatagaatcaaatatgataatacaagactattttaatataatatatattaatagaaaattattaaacatataaagcttccctgcatcaatgactgaatgtattttagaagctggaaaatagaaagcaagaataccaatagacttgatatacttgaataacatgcaaccattg

SEQ ID NO: 53377 - DNA, 532 bp, Gossypium hirsutum
  Clone ID: uC-gsronu33B169h04b1
attagtatataggcttctgcagctattcaaatatgttcctcgcgagcagttgaccatccctgatttcgtgtttcagcacgatatagaagtgaacggtggaaagggtcttattgtagaccctcgaacgaaatacatatatcatcgaccatagaacatttaaatacacagtttcagagttgatgaaagccagtaattcttggtttgatttcctcatcaccttgtatttgtaggcaggtagtgggttggttgtgtttggtttttcatgtagatatgtttctttttttttcgttttattttttgagcaatgatatgtttgttaataatatatatttcatggtgatgtgagcttttctatttgatttcaacatgttgcactacatcctgagaaagtggactctttcttggcatgttttaaagaggggaagggattgtcggcgttttgaatctgtcgattatggacatggtcgactttagacagatcagattgtaagtgttgagctttgaattctaatttgtacttcattttttaatg

SEQ ID NO: 53378 - DNA, 497 bp, Gossypium hirsutum
  Clone ID: uC-gsronu33B170a01b1
actccgttgccctttctctcctcctctatattttaagcgccgacaaccattactctctgtctttcagattttcttctttcctcagctcagacttgtcgttcctttccaaactcactccgcgtcaaccgagtcaagattcttttcccaactcaccattgtaaatactaatacgcttcttcctctctctctctctctctctcttttttcttgactgatattccaccttcgctctctttttttgagggccgagatctgatatttaaaactgccccaagcttattatttttttggtgaaattggaaattttttccagatccatggactcgtttttttagactcagtccgagttcagaccaaatcggtgatcgttgccgagttttggtgacagagaatatagttattaggatttttcatttaagtgtagggttaagagtatggcagctgtgcgaagatggagcgagggaatgttctcagataatattaaggggttggtttta

SEQ ID NO: 53379 - DNA, 410 bp, Gossypium hirsutum
  Clone ID: uC-gsronu33B170a12b1
ctaatccttaagaccaaacttaataaacaaatatgaggcaaaccttgtcttcttcctttgtcacccctctctttctctgcattttcttcttctttgtttccatttcaacctcccatggcttaaccgccaccaatgacagtctcatacgcaagacctgcaagaaatgcgcccaaagcgacccaaacctcagctacaatttctgcgtcacctctcttcaagcagctccccacagccactacgccaacgaccttcgccaactcggcaagatttccatcaccctacttggccgcaacgtaaccaacacaaggtctcacattaaggaactgttgaagaaccaaaagaagatggaccctttcgtcagatcatgcttgcacgattgctttgatctttattccgatgctatccctaca

SEQ ID NO: 53380 - DNA, 323 bp, Gossypium hirsutum
  Clone ID: uC-gsronu33B170b01b1
caacttgtttcggatagactctttggtggacacttattgcggcatattgatcaatatgagggatgaattgaatgctgcatagtggcgatatgcataggcgcccttcttacagagcctatatataaacgagaatgcgatgcttctactgtattctactattgcggggtcactgctttgtaaacatgacaagggatgcacctgatctaaagactcattatgttcatgaaggtgagtgaacaattgactgtcatgttcctgaggaaagttatcctgtattggtatactggacaatggacggatgagattgatactacgggagctct

SEQ ID NO: 53381 - DNA, 309 bp, Gossypium hirsutum
  unsure (1)..(309): unsure at all n locations
  Clone ID: uC-gsronu33B170b05b1
gcctggtaattaaaacctgactgccgggnaatctctcaaatggtgggctgatgatcatcaaaatgccggagtatgaagaaactctaccgtagaggcatggttcatgcatcaccatcgagcacgaccgatcatgtgttggttctgccggctgccagaatgacccctaatgctgctcttttccctgaagacaaacaagtgttggcctagctcatctcttgtttcaacaatgcctatggcaactttttacgccgccggtaaaacacttcaaaaccccacactcataggtgaattagcagcagcagtagtgac

SEQ ID NO: 53382 - DNA, 470 bp, Gossypium hirsutum
  unsure (1)..(470): unsure at all n locations
  Clone ID: uC-gsronu33B170b11b1
cngtacacaaactgaaggaggtcaaattctcttttctctgtgtgtaattcctttctgttttttctcctcactttggtttcatcttctcaaattaatggatgctgctaaatggtcacaggattttggtttggttaagcccatggaagagatgctttctaatacatgcacaaggggaccaatgttagagagaaaaacaaggccaccagagcaattgaattgcccaagatgtaactttaccaacaccaagttttggtattacaacaactacagcctcacttaaccaagatacttttgcaagacttgcagaaggtactggactgaaggtggatctctaaagaatgtttccagtggaggtggtttcagaaagaacagaagatccctattatcaagcccttcatcctcctcttcttcttcttcctcttcagcttcagccaaagtttctggagaactaaagcccacaagtttcttac

SEQ ID NO: 53383 - DNA, 527 bp, Gossypium hirsutum
  Clone ID: uC-gsronu33B170c10b1
tttcctttttctttaaaacacttaaactctccctctctgtcggcgccgctcagcagttcatcgcccccttcaaaggctctccgaaccatgcctttaactccgacgacaacagaggaagagcaatcggtccaaacgtgaggtacgccctctctcttttattgctattatctctttagtaaatgctcaatagaatctcaaaatgaaaaacaacaaaacaaaaaaaggtcgaactacgaacaaataataagagagaaaaaaaatgaacctagaaatcaccttttggtgttttttgtttttgtattctgattgccctcttttttacaggttacaatcggcccttttatagccaaatagggacaaagaaataaaacttttacagtttttatttgctgctagtatttttgctgtcaattgctgctcctttagccgttggtatctgtttctgctgctcgtttgttcgtcttttgcaggtaccgagaccagttagcgtacggaggcagccgacgtggcaccacgcgcatggggag

SEQ ID NO: 53384 - DNA, 343 bp, Gossypium hirsutum
  unsure (1)..(343): unsure at all n locations
  Clone ID: uC-gsronu33B170e10b1
tcctcgcgtccgttttgatttaaagttgaatggcttagataaatccttttgtngaaaaaaaaaaaaaaaaaaaaaaaaaaaaaaaaaaaaaaaaaaaaaaaaaaaaaagggcgaacgaaaaaaaggaaaccaagaataaaaaacacgagcatgcaaagaaataactattatataggggcacctaatttaaaggaaccggccttactttcacaacctcgcgactgaaaaaaccttttttggggcccaacaaaataaattagcgggccatgcttataaaaccagttggcggaaaaaccaagaggctcccaaaaataaaccttcttaaaaaaaacccactttgaat

SEQ ID NO: 53385 - DNA, 440 bp, Gossypium hirsutum
  Clone ID: uC-gsronu33B170f01b1
atgattatttagaaaaaccagataaatcttgtttcttacacagtgcactatatcctggagactatggaatcccaaaagaggagataattgaatattggatagaaggacttccagatgaaatggagagcagagaagaaatgaatagcagagaagaaacgaagagtaagggcaatgcttgtttggaaaggattttagacagtagcttgctacaagggaccaatggcaagaacattgtaatgatgcgcgaaattgtgagaggtatggcactgtctttgataccaaaagatcgtaggttttttgtgaaagctggtatgaaattgaatgagctaccaaatgaactagaactagaagaggctgtagatatggagaaggtttccctgatggaaaatttcatatcaaaaatacctccaaaaatgtctccaaagaggaaaaagctcaca

SEQ ID NO: 53386 - DNA, 537 bp, Gossypium hirsutum
  Clone ID: uC-gsronu33B170f09b1
gtagttccatcccctctttcagttcttttattttgactcagtggagtcacttcctacagagcctctggaccctagtgatttaaaaccattaaatacccgttatgatgcacaaatttcagtgtttgggtccaagctccaaaagaaactggaggatgcaaaagtattcatcgtgggatctggtgctctaggttgtgagttcttaaaaaatattgctctgatgggagtttcatgtggtgaccaaggaaagctaactgtcactgatgatgatgtaattgagaagagcaacttgagcaggcagtttctcttccgggattggaatattgggcaggccaaatccacagttgctgcttctgctgctgcatcaataaattctcgtttaaacattgaagctttgcaaaaccgcgtgggtcctgaaactgaaaatgtgttcgatgacaccttctgggagaatttaaccgtgattatcaatgcattggataaatgtaatgctaggctttatattgatcagaggtgcttatatttccagaaaccactttt

SEQ ID NO: 53387 - DNA, 517 bp, Gossypium hirsutum
  Clone ID: uC-gsronu33B170h02b1
tagtgtccgcaaagtaatttaaagccaagatcttcaaatcatcggggctgttggattttccggcaacgaggcgagtacgttgctccatgcgaaccgcttctagctcgttgccagctgattcaccttggcttcgtgtttagtgatccattccttactgagtaagtgatgaagattggatttatggattctggagattacgtattggagattgttggctaagaataagtatgaaacaacgtctttgtaatacttggctttgctattgatattgcagagaggacgagaataagccgcgaaatgcggtcagagatgggcagtgttggagattcattggaaacatgactgtaaaagcaaatttctggcaaagatgatttcgccagcggtggccaatctgaggtaatgtcagtgaggatgttaccgtaatcggctaggatcatggactcaaaatctaataacaacaaccacactgactaagtcgagccatcgagttaaaagcttaagatcgaacagctgaaat

SEQ ID NO: 53388 - DNA, 359 bp, Gossypium hirsutum
  unsure (1)..(359): unsure at all n locations
  Clone ID: uC-gsronu33B170h03b1
gaggtttgtgtgacctgtagaaataatggagcagcctgatggcattgatgatgacaaagaatctttaaaccctacttatgaaaatcacatatgaaaccttttatgtctcttttgtttttttgtttttaagctaattgatcattttgtaatttaaacaatacatacataccgtaggttaatttatagttcccctaagtttaaatcacaagttttaaggtacttggtcttgtaatatacttctttttaatcctttcgatatatgtgagtgattatcaataaaattatacccnncaaaaaaaaaaaaaaaaaaaaaaaaaaaaaaaaattaaaaaaaaaaaaaataaataaataataaatcg

SEQ ID NO: 53389 - DNA, 560 bp, Gossypium hirsutum
  Clone ID: uC-gsronu33B170h05b1
cccactcgtccggaagggatcaagatttgatacgggatgctagtaaattgacattcttaaatgttaatgaatttaaattaagtcaacaagacctcatacaacattctaataaatttacaaactcaaaagcagctgggtgtagaaaagctgatttggaaagccagccgcaaatcaaatcaagtaaccaaggaagttctcatggctgcaacttaaaacttcctcttgccttacctttacctaaagctccatcagaatcttggttgaagcgcaccttgcctgctgtttcctcgagaaattcatcttcacggacggctcttggtacatgtaactatagtgaaactcaagcctacacagctctgtccagtgatctcaagtgggaaaacattgttaaatcttctaatgttcatcatggtcgtttgcggttttccgaggaacaacttcctcctataccagaagcttaaaagtattgggattcattacttttatggggttaaggatgcataaagaagattaaaccccttttaaatatttatatctacacacagtataagtaaatgatg

SEQ ID NO: 53390 - DNA, 383 bp, Gossypium hirsutum
  Clone ID: uC-gsronu33B171a01b1
gggaatccccctctctctgctagggttccaggcttagtcttggaagcccggcgccgaccctccttaccacttgtaccatcgagccgccgaaatagttgacggtcagagacgcaagacgggcttcaaatcccagatggaagagtggcgagtgccaaccacctgggccaaggctaaccaggctcggaacacggcgacttcggaaagtgtcgcgatcaaagtgattgataaggagaaggttatgaaggctggtctcattgatcaaatccagcgagaaatctctgtgatgaagcttgttaggcatccaaacatcggacagctctatgaggtcatggccaccaaaaccaaaatatactttgtgctggaacatgttaaaggtggagagc

SEQ ID NO: 53391 - DNA, 430 bp, Gossypium hirsutum
  Clone ID: uC-gsronu33B171a09b1
gcttttgcaggtgaatattacattacatagactcactttgttgaccttggttcaaaagatagatacattcttttgctctgtatgtctagatacattcttttgctctgtatgtctatttttctggggggtttcctctgaaacacggttgagagagaaacaagtgaattcatttgaggttttggtccacaatgttggcttccattattttaatggtgaaaagccacccagaagtcattgttaggaggactttcctctttgagctgccatttgcatgctgttgtaaggtctaccccctcctttcatttggctggctgtgttagaaagacaaattctttcatttaaaaaaaaaaaaaaaaaaaaaaaaaaaaaaaaaaaataaaaaaaaaaaaaaaaaaaataataaaaaaaaaaaaaatattacaaataattg

SEQ ID NO: 53392 - DNA, 204 bp, Gossypium hirsutum
  Clone ID: uC-gsronu33B171a11b1
actatttctagcttgcgagacagcctacaccaaattgtttgagatgttcttgttagtcgttaagaccatgaatgaccgccgttttgtctcgacgtatgtaatcatttctccattttttggtgtctttcattttttacccatggttatttgtttggagaagaagaatttggcacttgaaacataattcgttgttaatgcttttgt

SEQ ID NO: 53393 - DNA, 256 bp, Gossypium hirsutum
  Clone ID: uC-gsronu33B171b01b1
cggatgcgtccccccacgcgtccggggaaattcggttttagttatgattgagacagccctaaggcgacagcaatataacttgttgaatgcattgttcatgctgctgaagtactgtaagagttggtttgtttttcacgtccatttattcttccatcagctgactgatgggcaatcaattgaagtggacgttgttaaatgtcatgaccaagatttgatatctaagcatatgaatgtgctgcctgatctgctgatagct

SEQ ID NO: 53394 - DNA, 350 bp, Gossypium hirsutum
  Clone ID: uC-gsronu33B171d12b1
ctactcagaccggttttccggtcagctcgtagcgacgtttggaatctggtgttagccttggttcaggcgagtatttcattgatgtgtttattggtacacctcctaaacatttctctttaatacttgatactggtagtgatcttaattggattcaatgtgttccttgttatgattgtttcgaacaaaccggcccgtattatgatccgaacgaatcgagttcgtatcggaatataagttgtcaagatcctaggtgcaatttggtttcaccccctgatcctcctctgccttgtaaaacagagaatcaaacttgtccttattattattggtatggtgatagttcgaatacgacc

SEQ ID NO: 53395 - DNA, 288 bp, Gossypium hirsutum
  Clone ID: uC-gsronu33B171f07b1
cccatgcgtacgccaatctctctttttaaattccctggtgtaatgtttgttcgaacacgcgtgagagccccacatgcccgctacaaggagaagcctgggtgcgtcacctttccaatggcatcgccgtccctcctacgtgcaacctgtgcgcttctagagtgctgaggctccctgtccctaagacaagcttgcgcgcgcgatggagggtttctcgagggacttgctgtgcgggattggcaagggggacgcgccgccaccggagaagaggccggggcagctgctggagga

SEQ ID NO: 53396 - DNA, 308 bp, Gossypium hirsutum
  Clone ID: uC-gsronu33B172b01b1
tctgagatattattttctaggaacaaagaatcaaaagtcaacatttcttatattttttgcatttcaagtatgaaccattcaacggagacaaattgagcatatttcattgtcaattgaagaccatgtattccagacttggttgtgtcatcacttcatttctatctttcatgaagtctttccattattggatgtgccttttttttttatttcttaggtgataaggaggaatcaccctgccatgcaatcttggtataaattgcttaaagtgaaacgcctctgagaaagagactgaggggaagattgtccac

SEQ ID NO: 53397 - DNA, 196 bp, Gossypium hirsutum
  Clone ID: uC-gsronu33B172b02b1
cccgggccggaaaacccgggacgacccacgcgaccgaaaaaactctcggctcccagcccaaaacgacgcaaaaacaagggaaggggcacgaaacaaaaacggggaggggcacaccgagaagcagaaaaagacgcaagagaagacggaaacacccgcactagaacggcccgcacgacaagaacacggccggcccccc

SEQ ID NO: 53398 - DNA, 522 bp, Gossypium hirsutum
  Clone ID: uC-gsronu33B172c03b1
cgtaattgttggttatggagtgcttgggtaccaaaacaattcacccataccacctaaccatatggcagttttgggtccagggaatggtctaagtgtgtggaacagatcatcaaagccattgagatttgtgctcattgcaggtcaaccgttgaatgaaccagcggttcagcatggtccttttgtgatgaacacacaagctgagattgatcaaaccattgaagactatcactacagcaaaaatgggtttgaaatggctaagcactggagatcacattgagtgatgatacgatttgaaaagccctttaccaacaatgacagcatctccaaagaataaaaaaagggcaccccatatatatatatatatgtatgtatatggcattcactatctccatccatgatagagagaggtgagataggagagctgaaaaggagagatttcctactcattggagccaaaaaaaaaaatgcttctagaagtccaaagtgcaagcttggagagtgtgtgcatatttagttcatcac

SEQ ID NO: 53399 - DNA, 486 bp, Gossypium hirsutum
  Clone ID: uC-gsronu33B172d09b1
ccctctcgtccgaataaataataaataattaaataaaccaccacctttttctctgatcttctttattttctctttattttttctttttttttgccttttaatttctcaggttaccctgctttgtacgaatcggctgaaactcgaaggttaatatcttctttggtactttgaatgaaggatgtctactggagatgttaaaagggtttcgcgccaggatatacagttggttcaaaaccttatagaacgatgtcttcaactctacatgacgcagaaggaagttgtggaaactctgctggctcaagccaaaattgagcctggttttactgaacttgttctgcaaaagcttgaagaagagaatagagaattcttccaggcttattatctgagactgatggtgaagcaacaaatagtggaattcaacgagctgcttgagccacaagttcgattgatgagtcagattcgtacagctggagtttcctcaatctc

SEQ ID NO: 53400 - DNA, 289 bp, Gossypium hirsutum
  Clone ID: uC-gsronu33B172d11b1
agtctggcttcgattcgaaagtgggctcctgttgccattgtgttgggagttgtgttcctcctcttctgggtgaaagcaaagttatggtgattcaactgtgatccatagtgttaagaactcatcagaatttcttgggtttctctgttgctgagtaacctcttgtccacacccaagaccaaatattggagtgcattctggtttttattcatctcacaattcgcctcgtaggtacaattacaaattcgcaatgtggaactgtgtgaaagggagcatctgctcaaaacaaaaa

SEQ ID NO: 53401 - DNA, 536 bp, Gossypium hirsutum
  Clone ID: uC-gsronu33B178a01b1
cctttctctcgtgaagctctatggatgtacctcgagacgtagtctagagcttctccttgtttatgagtacattcctaatggaaccgtggctgatcatttgcatggaaagcgatccaactctggtttgcttacctggcatgttcggttgagaatcgccttcgagacagcgaccgcattggctttcctccatggaaaggaagtcatacaccgcgatgttaaatccaacaacattctcctggacaagaatttccatgtaaaagtggctgattttggactctcacgactttttcctaatgatgtcacgcatgtctcgactgctccgcaaggcaccccgggttatgtcgacccggagtatcaccaatgctaccacctcactgagaaaagtgatgtttacagcttcggggtcgtgttggtcgagctaatttcggcgaagaaagcagtggacatcagcaggcaccgacacgacataaatttggctaacatggcaatcagcagaatccagaatcaagcattgcatgaactggtggatccatctc

SEQ ID NO: 53402 - DNA, 414 bp, Gossypium hirsutum
  Clone ID: uC-gsronu33B178c04b1
ctttctttggaggagggaagtcaactggttttgggggtatttatgactcagttgagaaggcaaagaagtatgagcctaagtaccgcttgatcaggaacggacttgataccaaggttgaaaagtctagaaagcagatgaaggaaaggaaaaacagggctaaaaaagtcagaggtgttaaaaagaccaaggctggagaggctgccaagaagaagtgagatccccatagatatgaactaagtttcatgcagcaatacaatcaagcccctacttatttacctacatttatattgattgccattgaacttcaaacgtgtaatgctgagttcattgttcttttgaatatccatttggatttttgtattatggacctactttacctgttcctgtggagattttaacttgaaatgaattttt

SEQ ID NO: 53403 - DNA, 426 bp, Gossypium hirsutum
  Clone ID: uC-gsronu33B178c10b1
tcttctacgcgtccggcatgtcatagattcaatggcttgggatcaaccattacaatgttgtgtattttactctccaccagatgtaattcgtaacttactgaatgcaaatgcaaatggagttgtgacaccaagattggtggttgttttctcttcttaatcaaaaaaagaaaaagaaaaaaggagttgatttttatctatttgtattttggaaattattaattcctctttattatagctttgatatgaaatatgctttgaattaaaaaaaaaaaaaaaaaaaaaaaaaaaaaatataaaaaaaaaaaaaaaaaaaaaaaaaaaaaaaaaaaaaaaaaaaaaaaaaaaaaaaaaacaaaaaaaaaaaaaaaaaaaaaaaaaaaaaatataataataaaaattacaaaaaaaaaaaaggggggccccttt

SEQ ID NO: 53404 - DNA, 535 bp, Gossypium hirsutum
  Clone ID: uC-gsronu33B178g05b1
gatctctttgaggcaattcctggagttcccaaaagtaaggaaatgtataatccagctacatggatgttagaagtgagctctatagcagctgaagttaggctcggaattgattttgctgaacagtacaaatcatcttccttgtatcagagaaacaaggcgttagtaaatgagttaagcacaccacctccaggagctaaagacctctattttgccactcagtactcacaaaatacattgggtcaattcaaatcatgcttttggaaacaatggtggacttactggagaagtccagattacaaccttgtcagatacttcttcactttgatcactgctctcttggttggttctattttctggcaggtcggcactgaaaggagtagcgcatctgatcttacaatgatcatcggtgcaatgtatgctgcagtcgtgtttgttggaatcaataactgctcaacagttcaaccagtcatagccattgaaagaacagtgttctatcgtgaaagagctgctgggatgtactctgcattaccttatg

SEQ ID NO: 53405 - DNA, 325 bp, Gossypium hirsutum
  Clone ID: uC-gsronu33B178g07b1
ttctgtgctgagagatgccatcaatcgaagagagagacttttgttaccttcgggtacgaacctgtcaaaaaaccagcttagggtgactcatagtaggaggggagagattagcaaccatgaactgacatacctagcgaggccagtacatcagatgtgggacaccacactagtgcagagagctgtatcatagagaatgacatgtatacaaagatccaacgtcttaaacctgcaatagacttggactgattgggtgatgaggaagaaagaagattgataccctctgttccttgcctcaacaagaacaatacttgaaggatcgatccag

SEQ ID NO: 53406 - DNA, 374 bp, Gossypium hirsutum
  Clone ID: uC-gsronu33B178h02b1
attttctgtacggattgttgagggtcaaaagcaggagaggatctctatccttcgatgtgagagcggtgaccaaaaggaaggcggatgatgatgatgaagaagctttagctttgcagttttattgatttctctctttgctgttaaaaccaaaaaaatctgaatagcggaaatagaattagattctgttgaattgcagtaaactctgcccatatggttatttttacagctttttgcattgaaaaacattgtcaagtagtacctcccttgattttatttgtctaggctttaggagtatgtatctagggaaacgtagatattagtacttcaatggtatgttatcagtgattaaaactatctttgaatatgccaacatg

SEQ ID NO: 53407 - DNA, 516 bp, Gossypium hirsutum
  Clone ID: uC-gsronu33B178h05b1
tctctcgtccggaaaattatggcgatgaaagaggggaaaaaacccagttttttgctgggttttgcattgttattgcttctattgatgatgatgataagctcacaatccatggcagatgctgagatgatgaaggtgaaacccacaaaagcaagaacaagaaaggtattggagatggagcaagattacccaggtgaagtgccaagcatcccaagtgattatgattacaatgatttctatagaaggcaaggtgatgttccaagcccaggaattggtcattgatatatatatatatatagatatatatatgtatatgtaaagggtactgccatgcatgattttcttctaattcatatatatggtttatttatagatttttgttttaatcatgtcacatcagtgaaacattagtgaaatttgaagtgatatatattatgtgtatgtatagggattattgtaattgaatatgcatgcttttatgatggatacattaatgtgatttgtgagggtgaatggaat

SEQ ID NO: 53408 - DNA, 379 bp, Gossypium hirsutum
  Clone ID: uC-gsronu33B179a01b1
gcttctataaataaccagaactggagtggaacatgttacattacactcatagattggtgcgtttctagctgattcttatctaggaagatattggacaattgcttgtttctcgatcatctatatcattggaatgacacttttggcaatgtctgcatcggtcgatggcatgaagccattttgttattcgaaagataattgcaacccgaccgatacgcaaagcgccatgacttttctagcgctgtacctaatagcgctaggaacaggtgggattaaaccatgtgtttcgtcatacggagccgatcagttcgacgacacggactaaagggagtagattcacaagagttcattttttcaattggttctatttctcaataaacat

SEQ ID NO: 53409 - DNA, 567 bp, Gossypium hirsutum
  unsure (1)..(567): unsure at all n locations
  Clone ID: uC-gsronu33B179a09b1
ttctcgcgtccgcgttagtccctaaatctccgagataactctcaaaatttgcccccaaatttcccatttccagcaacattctgtctctgcatctttaggttcttcgaccgtttctccttcgtagattgaaatcagatgttgagaacggtttgccttctaaaaaggaaactatcctgaaagtaggaatgtcccagatgcagaaacagtactatagggctttgctgcaaaaagatcttgaggttgtaaatgctggtggagagcgtaagcgtcttctgaacattgcaatgcagctgcgcaaatgttgtagtcacccataccttttccaaggtgctgaacctggacctccatatacaacaggagaccatcttgttaccagtgctggtaaaatggttctcttggacaaattacttccaaagctgaaggagcgtgattctagagttctgatattttcacagatgacaaggctactggatattcttgaagattatttgatgtttcgtggataccagtattgtgggattgatggtaatacaggtgggtgagatcgtgatgcttnccattgagctt

SEQ ID NO: 53410 - DNA, 533 bp, Gossypium hirsutum
  unsure (1)..(533): unsure at all n locations
  Clone ID: uC-gsronu33B179b10b1
ttgttggctaaaggcaaggctggtgagtctaatccggatactggtttaggattaggcgagtctggtaattggcttcctggtagtcctagagttctatctcttctatcttctgttctcgaaagatcggtacgagggaacgaaaagttattggcgggatcgaaaattaaggatgttattaccatattccatggttcaagagcaccttccttgaaccttagacagtatgtcgaacgcatcttcaagtactgtaaatgcagcaattcttgctttgtcgttgctgttatatatattgacaggttcctgcaacgaatcgacgcttaccttacttcactcagcgtgcatcgtctcttgattacgagtgtcatggtagctgcaaagtttatggatgaccagcattataacaatgcgtattacgccaaagtggggggaattagcagagaagaaatgaacagattggagatgaggtttttattcgatttggattntcaacttaatgtcacgactgangtcttcaacangtattggcttatgat

SEQ ID NO: 53411 - DNA, 328 bp, Gossypium hirsutum
  Clone ID: uC-gsronu33B179c09b1
ttgttgctggaactggtttcttctatgtgaagaggaaaagtgctaagaaagtggctgagaaactcgagttccgcaagtacgatcctcgtgtaaatcgccatgttcttttcactgaacaaaaaatgaaataaaggttgaagctggtatgtagcagctattgaaatcaatgttactcctaggttctgtttctcgttgacaatatcaaattttgcaaaagctttgaataaattgacgtgtgtttctaaaaaaaaaaaaaaaaaaaaaaaaaaaaaaaaaaaaaaaaaaaaaaaaaaaaaaaaaataaaaaaaaaaaaaaaaaaaataaaaa

SEQ ID NO: 53412 - DNA, 459 bp, Gossypium hirsutum
  Clone ID: uC-gsronu33B179d05b1
ccttcttttccgcctgaaactagaattatggcacaggggctgaagccttcttctgatgcatctagtaggtctgtgttaaatagcacaggaaatataagatctcagggcaagtgttctgcagagaacaagatcaagtctcaggatgctcatgttgaaactttaaagatactggaagaagaaatggctgaattgactaccaaaggaagcagaactagctcaccaaatcgccgttttagtttcagcttaactcgtctgagtagaagtttcagttttaaggaaagttctgcagtcccacaaatgaaccccggttatgtttctgtcaagtctggcccagtgaggtctgattcttctggttttctggatgatatgaacagagataagttgaatggccataccagaactagatccagccccttaagaagggtgctagatccactactgaagtccaggggctaaatt

SEQ ID NO: 53413 - DNA, 508 bp, Gossypium hirsutum
  Clone ID: uC-gsronu33B179d07b1
tttttcgcgtgcgcggagctactgccgtcgtgggggtcatggtgaagttattgatgtgcaccatggccgtgattggcctccaaggccgatttgctgagcgcatagtggtgatcgctagatccttggacgatggaacacgggacctaccctatggccactggtcgtatgcagggttaaagaagtgccacgagcagggacattcatacggattccgacaagaaaacagcaaaaaaactgtgacggacgggcttggtaaggctggtaaactaccaacagctgatgccgacccgctacaccctcgacggggactcgaaagacgtggctaccgtacatgcactgcagaccaaggacatgaaagtggcgctttgcaaggcgaccaatgagaggactgcagagagtatcaagactggaaagaacaggttggttttatactaagcttaggtattgaggatattgacctttattatagtatctctatttgagaaaaaaaagtgagactttggatcta

SEQ ID NO: 53414 - DNA, 416 bp, Gossypium hirsutum
  unsure (1)..(416): unsure at all n locations
  Clone ID: uC-gsronu33B179e01b1
cccactcgtcaaccnaattaaattagagagagaggggggtctttataataagtttggctggaaatacacacaatctactgactaggtcaaagtgggttcccacattaaaaaccctaacgttcttaactcatgattaactcttcctcccaagctacggttacatctcaaacgtcgactaatgccctcttcaaggtgttactattaaagctcagcgtcattccaaaaactacaagtatcctttgggatcgatttttaaacccttaactaccatcgtngattagttatacgtacttttccacaattgtggagagtcgattaactccaagtcccctaattctccgccttctgaagaaacctgtctgatgaattcgagcccattgatttcgtctatgaactctattaggatgtcttaaaac

SEQ ID NO: 53415 - DNA, 523 bp, Gossypium hirsutum
  unsure (1)..(523): unsure at all n locations
  Clone ID: uC-gsronu33B179e04b1
ccttcttgtccgcccacgcgtccgcagttcttcagaggattgcaacaatagcaagtggtggaaagaagggaatcccacatgagacgcgtaacacatttttagtagtcacagtgctaattataacagccacatacactgccactttgaaccctccaaagcagcctgataccatttcaaattcccagaatttccatctcacgtatgacatatctttaggttcaaccagcactggacccgtaccaagtcctccacccgctgaagaaaaaaaaatagaaaatatactagacgtgtccacaatgttttggttatacaacactttaaccttttgggcaacaactgttttaacagcgtatctcctacccagcccgtcaatgtccttgtttattctcataacacttttcttgtttgggacctgttacatgcttttggttgctggttccatacggacactcgcacttcagtatttnttctatctttcgactcctggatcccgttcctattctaaactcagcactactaatta

SEQ ID NO: 53416 - DNA, 563 bp, Gossypium hirsutum
  Clone ID: uC-gsronu33B179e12b1
tggttaagagaaaaacaatgatttctatgctgttggggggttgaaaaggaatgcactcaaacagagctcaggactgcttataagaaacttgccctgagatggcaccctgatcgttgctctgcctcggcaaattccaagtttgtggaacaagccaagaagaaattccaggccattcaacaagcctattctgttctgtctgacgcaaacaaaaggttcctgtacgacgtaggagtttatgacagtgatgacgacgaaaatggcatgggagactttttgaacgaaatgactgccatgatgtccagtgaaaacggagaagaaagctttgaggaattacaggaattgtttgaaaaaatgttccaggctgacattgattcattagattgtagtggtcagtcaccaacatcttgctctgcttcatcttcgtttgcgtcgtacggtgacagttcgggctccaacaaccggagttcctccgaaatgagttcaggggagaccatgccggaaaacatcgatacacgacttaatcatatctttctggggacagatgggaaacacaggagacatca

SEQ ID NO: 53417 - DNA, 410 bp, Gossypium hirsutum
  Clone ID: uC-gsronu33B179g08b1
ttttaggacagctctggaagcaggacttaacccatgtcaaggacccacatctctcccagagaagattgacgaaaagacaaaagaagatctcaaggacatagctcggtcagaggcagacgtaagaaatttgaacaaaagggttaatgagctggggacacagcttaatcaccagcctgagcaaaagtctgtttccatgagtgactcatgcactcaacgtgaaccaaatcatcaaacaaaaatgaaggataagacaaagggtgctgaagctcctatgaggtcaagaagcaagaaggaaatgaaagtggacaaagcggaaggtgagaaagggaagaagcaagaatcatctatggcaaatagacataggaaatccggttcagcaggaaatggatgtggacatagccgaatctgag

SEQ ID NO: 53418 - DNA, 473 bp, Gossypium hirsutum
  Clone ID: uC-gsronu33B179g09b1
gttgccacacgtcctcttatcggtgatgtggtcactgctctctcgtatttagcaaatcaagcatacgatcctaatacaacagggaatggccatagaggctctggagaaaccgatgaaaaaagataccgagacgacagaggaggaagggtatcgaagaacgacgaaggaggagtatccggccgtaagggggatttagaagggtccgagaaagagaactcccctagagaaacagccaggatgttgaacagggatttggatagggaacgagctgtagccgaagccaagatgtggggcgagaattggcgagagaaaagacgacaaagcgcacaaggtagttccgatggttcaaacggctaacatcccgattttcttccatcaatgtttatccagatttctcacttgaaccagatgaaaaaaaaaaaacacatatccgagctcttttcgcttcgttctatcaaaaagctcggcccgat

SEQ ID NO: 53419 - DNA, 159 bp, Gossypium hirsutum
  Clone ID: uC-gsronu33B179h11b1
gtcttcgactttttctgcttgagacccgcacccgagccgacggggggggtagttcaccttggcgcgggtggccttgttgtaggcatcggcccacttcgcgtagaccggagccgggaaggtcgcgcctgcaccggtcacatcctgggccgaagccatgga

SEQ ID NO: 53420 - DNA, 178 bp, Gossypium hirsutum
  Clone ID: uC-gsflmaxxa002a08b1
tcgccctcgcgtccgcccaattcgtagaaaactcagtgagtcaatttacaaatcgctgagccaccgccattcttaactcttggtattcgtcctctcgatcacagctttaaattctcaattcaattttccctgattatatccctattacccttaaacttaatgatgcttcaattttttt

SEQ ID NO: 53421 - DNA, 430 bp, Gossypium hirsutum
  Clone ID: uC-gsflmaxxa002b11b1
gcaatgccgaggcaagagatcttcaaacttatcagatggtggccagtcttttaactttagcatctctggccataagttattatacgctctcccttctgtgtagcctttgaaaaattgttgagtattgatctccacctcacagccagctagacaatcaatagccttaacttcaggcatctccaacttttcacataaagcacgccacattaccatcggttcccagcttaaaccggatgaatttgcaagagtattcttaactataaccggttcacctttagcccatcgggtttgaaagtgacgaaagccttcgtcaagattatcatttgaagttgaagaatataagccattgtcaatatgtccttcttcagaagtattatccccatttaatgtcttttgaagccattgtttaattctgcagctgcttaatatt

SEQ ID NO: 53422 - DNA, 101 bp, Gossypium hirsutum
  Clone ID: uC-gsflmaxxa002d03b1
aggacatgttatttgtccttcaaatcttatcattcatcagaagctttggttctggcaaaacatatgatgaatgataagatttgaaggacatgttatttgtc

SEQ ID NO: 53423 - DNA, 513 bp, Gossypium hirsutum
  Clone ID: uC-gsflmaxxa002d05b1
caccaattggttttgaaaatgaggaaactggcgagacagtgtcgaaattcggaagatgataagttctctctccccaccgtcgacgatgctcgtcccatggatatcaacgaacaagaggagttggttcgttctcttgaaaagatgcaagctcaccaaagtctacaatggaagagcgtgtttgcagcacttctcttttgttactcggcgtttcttctatactcaatctatcagcagaccttatttccatgggaactgcggtaccatgcttacttcatggaagatgttgattcatggataataataactgcagattggctagctgttttggcatgctcaatggccattatgggtctattcaataattcaaaggatcacataaagtggatatggtactcatgctcaattggccttgtgcttgcaattttctgggtatactatatgctgagaatgccaaaatttcgttgggatgttatctggcttcctcttgggcccttatgtggagctggggtatgt

SEQ ID NO: 53424 - DNA, 510 bp, Gossypium hirsutum
  Clone ID: uC-gsflmaxxa002d06b1
caaacagcaaacgggaaaaaaatggcgggctggttcggatcgcaatcatatacggttgccaccatgactgtcaccagtacaccgtctccagatctcgcttttactaatcttgcttactgctcaccgtccgatcttcagagcttcgccgtccctggctccagactcttccttgttaatgttggcgatgcctttgttctttccatctctcctcatgaaagcattcgcagtaaatatattgcccttaatgctattcatcgtcggcttgcgaaggtttctaatggtgacactgtatcagtgagcagatttgttccacctgaaaatttcaaccttgcactgcttagggttgagttggaatttgtgacagaagggtactaaaaatgaacaggttgatgctgttcatctggctaaccagcttaaaagaggtttgtgaatcaggttatgacagctgggcaaaagttacatttgagtatcatggtaataactatattttcacaatcaaccaagctcaac

SEQ ID NO: 53425 - DNA, 370 bp, Gossypium hirsutum
  Clone ID: uC-gsflmaxxa002e01b1
gtctatttttactttgatcaatccttaatttccgagggggtattgaaaccctaatactaaaaagataccccaactcaaggcttaccaagggccactgaggaacctactgacgtattgaaatctgtatatgaaaaggaaaaccgactataaaagagaggctacagtcaattctaaatgatgaatacataaatagagcttatgtgtctgaaggcaaccaggctgcagctactaggaagccaccagctgctcctggtcatgcatcttactaagagaacggcaaagatgccaacgatactgagaaggagaagactggatcaagacagtatgctatcactaaattcattggagagaaacagaagaatcttactgg

SEQ ID NO: 53426 - DNA, 508 bp, Gossypium hirsutum
  Clone ID: uC-gsflmaxxa002e07b1
ttcatgcctaaatggttcctggttggtggtctttggaggatgtggaagacaaggattgctcaatgacgtctttgtccttgacttggatgccaaacaacctacatggaaagaagtttctggtggtgctccccctctccctagatcttggcatagctcttgcacaatagacggttctaagttggttgtgtctggtgggtgcacggatgcgggggtgcttctcagtgacacgtatctgttggatcttactacagacaagccaacatggaaagagattccgacatcatgggcacccccatcaaggttgggccattcgctttcagtttatgggcgtactaaaattcttatgtttggggggcttgcaaagagcgggaacttgcgattgcgatcaggtgaagcctacaccattgatttggaggacgaagaaccacagtggcggcaactggactgtagtgccttcaccagtttggtagccaaaatgctgtggtaccttcttctagactggatcatg

SEQ ID NO: 53427 - DNA, 467 bp, Gossypium hirsutum
  Clone ID: uC-gsflmaxxa002e11b1
aaagaaccttatcagtgccagaagcagcaatagtggacataggacatgagtctttcctatgaccaaacttaccacactaaaaacaaatcaattgtagcccatcatatttaacacgttgacaaaccttgccgagactaacagatgaacacgatagtttggttaaatccaaatcaatacaaacccttgcaaatcctcctgtatgaacatcttccgtattccaatcaatgcaaattaccctccccacacaagaaacaatcctccaaactgccataactgcgtaatattccagaggtaattttgaaaaatgaacccaagcaataagaaactcaaatcttatcacaacttggctgaaaattcagaaaccattaacaaacagtaaggtagtgtccactaatgatctaatgacctcattccaagacatgattataatatgatttctggtcaacttgataagaaatagtcattat

SEQ ID NO: 53428 - DNA, 513 bp, Gossypium hirsutum
  Clone ID: uC-gsflmaxxa002f06b1
atcaaggattacccttttgccaatgatggactggttctgtgggatattctcaaagaatgggtctctgattatgtgaaccattactatccagaggcaagcctagtggagtcagacgaagagcttcaagcatggtggactgaaatccgtacggttgggcatggtgacaagaaagatgaaccctggtggcctgtcctcaaaacaccacaagacttgatccaaattgttacaaccatcgcttgggtaacctcaggtcatcatgcatctgtcaactttggacaatatacctatgctggttactttcccagcaggccaacgattgctagaaagaatatgccaaccgaagaggcaactgaaagagattgggagtttttcatgaataaacctgaagttttacttctactgtgcttcccttcacaaattcaagctaccacggtgatggctattttggatgtgttatcgaaccattctccggacgaggaatacttgggagaaaaatcggagttggcatgggcc

SEQ ID NO: 53429 - DNA, 262 bp, Gossypium hirsutum
  Clone ID: uC-gsflmaxxa002f08b1
gtttaaaacataagaaaaaagattatacgcaatgagcactgctggacaggttattggatgcaaacctgcggtggcatgggaggcagcgaagccactatcgatagaagaagtggaagtggcaccaccccagaagcatgaagtgcgagttaagaatctgttcactgctccatggcacactgatgtatactactgggagtgcaaggggtacactactatgtttgctcgtatactgggtcatgaagcctcagggatcgtggagagt

SEQ ID NO: 53430 - DNA, 515 bp, Gossypium hirsutum
  Clone ID: uC-gsflmaxxa002h04b1
cccacgctttcggttaaaaactggttttccactgcagtggcgtgtaccaaagagagagagaatgaagtgtcagtaggccatgttttccaccatatcttgccttaaatgacaaatattgatcatctcccactctattcaacagagacccaggagcacattgttgttctttaagattgttaatttggtgagatttcttcgattttgttgatgaaaaaaaaaaaagatgaagactgaagaaaaaacagtgacagatgaacatgatgctggtgctgctgcaagacgaggaacactttctgttgctattcaacaggtggaagattctttctgactaacctaggaaacagcggatgctcgaagttggaagcgaaccaacctctttctcgagatcccctcgagaagtttggatgattcttcttaagactctgtcacagttaagatgccccaaacacctagtttgactcccaggaaagtgaattttcacttgacaccgaatccttccgatggaaggattaatg

SEQ ID NO: 53431 - DNA, 439 bp, Gossypium hirsutum
  Clone ID: uC-gsflmaxxa002h07b1
cccacgcgtccgcattttccagctccgtcattatcttccaatctcctttgttgtgcaagtttaaatcgacggcgatagagtgtgctagctaaagagagtagtaaaaaaaaaagaaaagaatctcgtcgatgttcatttcatttaaggagaaataaatttactactattattatccaatcgatgtaaagaatgagagcaccgataatttattcgttgcggtagctgtttcttgtgtagatgatgatcgatcgacagtttgcgttttgttaaatggagatttcttcgaatcgatgaagtgtttccggttttgttatgaatctgagtgttagatcggcttcttgatgccttgagtttactttttttctttcttttggttttggaggggaatcgatataattttctttcttcctttttttggggaaaacaatgatcaacggcg

SEQ ID NO: 53432 - DNA, 496 bp, Gossypium hirsutum
  Clone ID: uC-gsflmaxxa003d04b1
ctgtctcgtgggttaaggctgacaagtcctggctgctgagggttttgggggtttctaagactgaagtgtgtttgctttcggcattttctgcttcgtatcttcatcatgtgggcactacgccgagttcctaagccgctcagagatacaagtatcagaactggagcttctttttctgcttctgctagattacaaacttcaaataccttcattgaaaaaaatgctattttttctggttcttctcaactggtttctgatacatgtccatctttattgagattttactgctcaacacatgcttcctctaatttctttgtttggagatgtggcctttcttcccaagctggtgctgaaagcagtggggaggaagatgacttggaagatggtttttctgaacttgaaacagctggtaattctgagaacaaagagatcatatttctaaggatgaaactgaagatggactggattctgatcaagaatttctgttgatgttgaagaa

SEQ ID NO: 53433 - DNA, 432 bp, Gossypium hirsutum
  Clone ID: uC-gsflmaxxa003d06b1
ttttcgcgtgggtcttcttccagtttttgtaagtgatcattactgaactaagttcattaataagtactaataatccttaaatctacagccatggctgccatggcatcttctaccttcttcttcttcctactttgtctcacagtcaccgccaaaaagacctacattgttcacatgaaacatcaagacaagccactttcttttgaaacccacaatgattggtaccgttccagcttacagtcactcaccgtcaccccagctgagtctcttctttattcatataatgctgcatttaacggcttcgctgcttcacttgatccagaacaagctgaagctcttggcaaatcagattcgggtctggggtgttatgaagatactggttataatcttcacactactcgtaccccaccagttttatgcctggatgctgagtct

SEQ ID NO: 53434 - DNA, 454 bp, Gossypium hirsutum
  Clone ID: uC-gsflmaxxa003e11b1
tgtggacgcgtgggtttctcgaagtcatttgtgaggtccccaagagcttgaatttccagcttcaatcaggaaatttccgtaccgtttgaacttgtatctgtttggttggatatggttactcagatgcagacattctttgatggggagtgtctgagctgagcaaaagagatgctggatattggcttttagttggaatgaagaacttgcagagcacagaagatattaaaccttttactgaagatttacatgaacccaaaacggaacagcagtacattaaaactgcaaatggcttcttagcagacactgggtctttatctgcttttagcaacaatggcgggaaagttttatgccaagatattgaactggtccagattttattgaacgatgtttacaactctacctgaatagagatgaggtttgtaaaaccctcttgaattgagcaaggatagaccct

SEQ ID NO: 53435 - DNA, 326 bp, Gossypium hirsutum
  Clone ID: uC-gsflmaxxa003f01b1
ctttcgcgtccgagctgcttctaatgctgtgccagcatgaggttgatcggcttgaagtttgggcacaacctctttcaaaggaaggcacatcttcgcggcccaaaattagcccagacaaatggatcgaatatgccaggactgctttctctgtggatcctcgaattgccttttcgttagcctcaagatttccaacaaacactcatctgaaggctgaaatagctcagctagtccagtcacacatactggatatccgctgtatacctgaggcattgccatattttgtcacaccaaaggcagttgatgaaaattcagtacttttacaacaa

SEQ ID NO: 53436 - DNA, 461 bp, Gossypium hirsutum
  Clone ID: uC-gsflmaxxa003f03b1
ttttctcgtgggcggacgcgtgggtgacgatcaacgaatccttcactgcctttgtcgatgggatccctttttcttttatttgcagataaggggtgagatttagattaagagagaaacaaaagaatatataaatgatgttgcagaaagttgcgagcaatgcgtattcatggtggtgggctagccacatcagaactaagcaatcaaaatggctggaacagaatcttcatgatgtggaggagaaagtctctaacatgcttgaaatcattgatgatgatggagattcctttgcacaaagagcaaatatgtattatagaaagagaccagagcttttagccattgttgaagacacttatcgagcttatcgagcattagctgagagatttgattacttatcaagggatctacaaagtgccaaccgcaccattgccactgtgtttcctgatcaagttcatattcccttc

SEQ ID NO: 53437 - DNA, 432 bp, Gossypium hirsutum
  Clone ID: uC-gsflmaxxa003f10b1
ttataaagttaaagtctttctctttctgagtcagctcaggtccttaggttgggaacttgatagtcatggatggttggctgaagggatctaatagttttgtggatagggtaggactaaatgacagtacggtcttagctttatctggtcgggatttcgataaccggtttaagaatgagaattgtgtcgatattccttcttcggaacctgttatgattccaggaaattcagggaacatggtgtcttcctttggaacttgttctgatagagttggactaaatgatggtacggtgttggccttatctggtcgggatttcgatagccggtttaagaatgagaattatgttgatgttcttcctttggaacatgttatggttccgggaaatttagtgccttcctttggaacctgttttgatacagtaggactaaatgttg

SEQ ID NO: 53438 - DNA, 278 bp, Gossypium hirsutum
  Clone ID: uC-gsflmaxxa003f12b1
ttttggtctgcccttgcccatgtgtcacctgggggattgcttggtaaaccctgcgcctgctgccgctccattacaagccgagcctagtctataagaccttccttcctatccgcatcaaaacgctcagaacttgaatcccatggcaattgctcaacctatagatgctcaactggcgatccaaaggcagggaattgatggccttcttcagttacggaatgagaggctgagatatgtattacaagagcaaatgaagcgaccacacaccattctggtaaaga

SEQ ID NO: 53439 - DNA, 573 bp, Gossypium hirsutum
  Clone ID: uC-gsflmaxxa003g03b1
ctttcgcgtgggtttttcttttctttgcattcattgggttcatttttttccccagcaaatggaagacttggttcccttgtggaactatcaagaggattttgatgaactgaaactcaagcttcaatacactagtattgagctagagtcggtgaaaatggaagcatatgaacaaataaggaaatacagggatgaagtgaaccatttggtgaatcttgtaaaacttgcttgccaagaaagagatgaagcaagagatcagttccaaaagctagttaacaagttaatggcttcttcttcttcttcttcttcttctacaatcctccctcaaccccagcctgaaaatctgcttgtgattgcagcagcaaaagcaaactcaagcataactgaatcaaacagtttatctgagacgtataatcatcacccctcacatgggtcttccccagtagattccttgtttgatgcagtcacttcaccagattttttaagcattaataataacatggttgacaacagtttgattcataaccttggaaaggggaaactttgcctgaaaaaggaagcttttgcagctgtatg

SEQ ID NO: 53440 - DNA, 389 bp, Gossypium hirsutum
  Clone ID: uC-gsflmaxxa003g04b1
cgtgggttgagattggatttcaataggctgtttgggggagcagcatgtattgagatccaaaacctgacaagagatctcatcaagagggttattgacggagcagccgaaattttctgggagatctttgttcaggtggaattacagaggcagagccctcctcctcaggatgggagcattccgaaattggtgagttctataactgattactgcaataaacttcttggtgatgattataggccgatcctgacccaagttcttgtcattcaccaaagttggaagcataaaaaattccaggagatgatccttgtaaatgaggtttcgaaaataataaaggctgtcgatttgaatttggatacatggatgaaggcgtatggtgatactaccctttc

SEQ ID NO: 53441 - DNA, 308 bp, Gossypium hirsutum
  Clone ID: uC-gsflmaxxa003g05b1
gtgtctctgtgacaaatggagggtccttagctcgctctctctatgcaaaaaaaacaaaaggaaaaaaaagtctcccttctttgctttctttcaagtaaaaatcaaacgaaacacaacttaaatacatattaacagacattgattctgatcatcaaattctctgtttctgatccaccaatccaaccagagtgttcaactattgaagctgtccgagttctctttgctttttgaaatctgatgtctccgccgcttcttggcgtgaaggaagggggtcctaacaatgtcactctactggcttcttctggctc

SEQ ID NO: 53442 - DNA, 242 bp, Gossypium hirsutum
  Clone ID: uC-gsflmaxxa003g12b1
tcgtccacgcgtccgcccacgcgtccgagcgggtggagttcttgtttggttggttcggaggaaatggaaaaccggggaggacaaaatggggaaagagaaaaagagggaggaggttgaagaagaaggacaaaacggttaattcatggtggttgatgaagggtttgccttagaattagaggatttgttaagggcatccgcatatgtagtggggaaaagtaggagtggtatattgtataaagtgg

SEQ ID NO: 53443 - DNA, 170 bp, Gossypium hirsutum
  Clone ID: uC-gsflmaxxa004a06b1
tgcataaatacctcagctttccaatttagaagtctggtttcagtgctccaaagacattgtccgtatattgttatctggagacttagatcttggtattgtggggcttgatcctgtcagtgaattttggcctgggtaatgaagatcttatcattgttttatgatgcccttga

SEQ ID NO: 53444 - DNA, 217 bp, Gossypium hirsutum
  Clone ID: uC-gsflmaxxa004a07b1
tcttcgcgtccggcattcttcaggtgcagagctaccaaaactgaaaaaaccagggaggaaaaaacagaagtttcagcctaattttatgaaagtgctttggccaggaagagaattgtgactgctgaagaacgagagagagcgattaatgcagccaaagcatttgagccgactaaccctttctgcagggtcgtctcgcgaccgttttatctatacaggg

SEQ ID NO: 53445 - DNA, 173 bp, Gossypium hirsutum
  Clone ID: uC-gsflmaxxa004a08b1
tggtgtgtggaagctgcttcatatgccaatatcacagagctgtcaatcaacaaatgtcttgaagaatcatatgtcaatatgaaatgccaaaaaggatcatattagacaatgcattgaatttgagcaaccgcacgacaatagaagtttgcagtttgttcttgattaatatcatg

SEQ ID NO: 53446 - DNA, 227 bp, Gossypium hirsutum
  Clone ID: uC-gsflmaxxa004b06b1
gactcagtcaagagttagccgagagatccaagcaatggaggcttaggcttcctttggtttggctgtcaaagccagtgagatgcagttggggggaaaaaatagtaccaatctcactgctatgctgtctggttcagcaagttagcgctgtgtgattgcatcttcaccacactgctcagctgaaactcagctggagatttaagctgcaattgaaatcaactgtactgctg

SEQ ID NO: 53447 - DNA, 320 bp, Gossypium hirsutum
  Clone ID: uC-gsflmaxxa004b09b1
gattaaaccaaccattaagaaggagaaaaagcattggccaaaaagaaataaagaaatatctgacgatgggaagcgcaaacaccagcgctgctctaatctcccatttgcagctcaacagatgctgcttcaaactcgttgagtcaaccaggacccagctggagttcaactctctcaaattcaggctttcaaggagagggaagctggaattcgctgcttcccggcgcgggaaaggttttagaacagccgtttgttccgctgccgttgacgatgatctcaaagagaatcggccacaagctttcagtgaaaccagcagcccctct

SEQ ID NO: 53448 - DNA, 214 bp, Gossypium hirsutum
  Clone ID: uC-gsflmaxxa004b10b1
cccactttgtggctctctgagttttctcacctgaaacgctctgcactttctccctcagtgcctccatattcctctcttccaatttttttgccctcttttttctgctttctttttctttctctcaatagattttgtcttttcctctctttcatttctttctcttgatctataaaattccatcgattgttggaaagagcaagagggttcttgaggt

SEQ ID NO: 53449 - DNA, 377 bp, Gossypium hirsutum
  Clone ID: uC-gsflmaxxa004d10b1
ggttgtgcttgaaaagattcaggataagtggagaacggaggatctaggtaggctaaagtttcatgactccgtcgccgccaatatgtggactgctcatgagatcgtcgagcgttgtacaggaggattagttctatggtgatctggacgtgttatggggggctacaaagggagctactggccatggtactgctttatccgatgacatagatggctatgcttatgatgatcttgacgttctttatgtggacgaaagggagagggtggctgggacgattggagatgttgaaacatctcgatggggtgtggtgaagccagagcgttgtgaaagcatgactgaggaggaagctgaatataacaggctagatgatggtgtagga

SEQ ID NO: 53450 - DNA, 469 bp, Gossypium hirsutum
  unsure (1)..(469): unsure at all n locations
  Clone ID: uC-gsflmaxxa004e08b1
atttaggagaacaaaaatggagaatggaggggaagatcctgtgttttcatattcgtattataggaggaaagaacgcattgcattggtagccattgtagtgcttgcttcagtggctgttgcttcgcttttagtggcttctagttactattggtatattcgtaacagggtcctctctaagcgctccaaatcccactctactgggggtgattctaaggacaaagcttgctccaccgatcttgaagttgctatggacgaagggcttcatgtctttacttttaagcagttacattcagtcactggtggtttcagcaagtctaatgtggtctggcatggtgggttagggtccgtatacaggggagtgcttagtaatggcaggagagtngctgtcaagttaatggatcaggcagggaagcaaggagaagaagtatttaaaaaggaggtggaactggtgaaacgtatacgttcttca

SEQ ID NO: 53451 - DNA, 499 bp, Gossypium hirsutum
  Clone ID: uC-gsflmaxxa004f04b1
cttattgttgcagtgcctttgagaagttgaaagcaatggagcaatcattagaaaaaggtaagcagattcaagataactgtggtgcttcgataaaaaggcttcgggctatgctccactcaactgaagatcaactccgagtgcacaaaaaaaagaccacgttcttggcacagttaactgcaaaaacccttcccaaaggtcttcattgcctgcctttgcgtcttactactgagtattataccttgaattcttcacaacagaactttctagatgaagacaaattagaagacccccgactgtaccattacgcacttttctctgataatatattagcagctgctgttgttgtaaactcaaccatttcccatgttaagcacccttcgaagcatgttttccacattgttacagataggctcagttatgcagcaatgaggatgtggcttctgtgtaattcacctgggaaagtcactatacaggttcagaacatcgaagaatttacatg

SEQ ID NO: 53452 - DNA, 274 bp, Gossypium hirsutum
  Clone ID: uC-gsflmaxxa004f11b1
cctttgcgttcgaaaccttttaccctatctatttgggataattcaggtctcaaatctgttggcccgaagcgacatgattaccggtggtttgccacaccaattgtattgggcaggagccccttccacactggagagacttcactcaagacagcgttcgtgctgtcaagtcgtggccacaagcccgatcgtaaagagttcacgacggtccactacaaaagcagtattttgcatcgtggtgatgggatctttatgagtcttggtggagattatcttt

SEQ ID NO: 53453 - DNA, 434 bp, Gossypium hirsutum
  Clone ID: uC-gsflmaxxa004g01b1
aaaaaaaatttaggagaggcaaacaaaaaagctgcatccttctcctcacgcctctgaattttgtattttatttatttattttttctctgcgctttctcagcaaccaaacacatccttacacaatcattttactcttttgaatgagtatacacacttggcttctttgaaggttttaacttaaagaagagaaaatttggctttttccagcattttcatctactgcttctgcactagtcttaattatttggactctcgagctgttctacggttttgagatcgatcgaagctttcaattactcacttggattttgaaggagttccttttttctaaaaaaatattttattcaggttcttaggttctccaaattctgatcccatgggatatgctgatgtaaattacggaaacaatgctgtaaacagcttgagtgccccct

SEQ ID NO: 53454 - DNA, 495 bp, Gossypium hirsutum
  Clone ID: uC-gsflmaxxa004g02b1
gtaacccttaaggaagggaaaaaaatgtcaaaccttgaaaaccctagaaactggcggttcacatgggaagcgcaatctcattctccaaatctgcgtttgttcctcttcgattctcaagcaaagccttcggttcaatgcagaaacctcgaagttcaactcaatctttctcaatctcatcttctcgtttcgtggctaaaagagggggagaaggaagaggtgtcggttagggtctctactccaagagttctgatagattctgaagctccggtgagttttagagctttggatgatcacattgaggttaagcttgctttgcttcttcctgttgatcatccaagcgtttccagctttgatttgatgttggattcgtctggaaatggctataatgacccctcattggatgctgcacagccgctgctgatggatactgatttgcagagtctgtcatcaatggaaggagtacacttgtattgcagaaaatgctccactaggctg

SEQ ID NO: 53455 - DNA, 487 bp, Gossypium hirsutum
  Clone ID: uC-gsflmaxxa004g06b1
ccctcgcgtccggccaaaacccccaaaaaatgaatgatgaaaaatacatcatcggccggccgccaacattaacttccgatcaattccccgatagctttcccccacttttcctgactttctctttatccaaacaaaccccatctctctcacccaagctacaaaatcaaaagtaaaaattaaatccttctaatggatttcaacgaactagaagcaatcgagggcctacggtggccgtggcattcatggcccacaacaaaacctgacgcttcctcattaacgatcccactcgccgtcatgtgcacgccgttgacggagttctcggagctcccaatcctcccttacgaccctctcatttgttccaagtgcggcgccgttttgaacccgtacgcgcgcgtcgattacacctgccgtgtctggtattgttctttctgcttctccaaaaactctttccctcgaacttactcttcttccttcgaagaatccaacc

SEQ ID NO: 53456 - DNA, 469 bp, Gossypium hirsutum
  Clone ID: uC-gsflmaxxa004g07b1
ccttcgcgtccggttgtctctctctctctttctctctctctatctaaaaactctctcaaaattcagaaagctatttcttttttctttggtgggtgcctgagattttaaccggcaatatttttccactattcctcgggaatccctcgtcttcttcttcctcacaatcagtatctcctccttcgcaggatataatggtccaggttttcaaggtctggtttttgatctgatagaactctgactctaaaaagtgaaaataataataataataatggcggatgagacatattcagggctagggaatgggggtgaaatagataccaaagtggtgcagacatttcagaagaactttgtgcaggtccagaatatattggaccagaacaggttgctgatcaatgagataaaccagaaccatgagaccaagatccctgacaacttgaccagaaatgttggtctaattagggagctcaac

SEQ ID NO: 53457 - DNA, 530 bp, Gossypium hirsutum
  Clone ID: uC-gsflmaxxa004h12b1
cccacgcgtccgcagttacaaaaaaatctttcctctatctgctatcattttcaattcacttcttatttgaaatctcttcaacctaggttccttggccattcctcttccaaagcaacttcattgcagatcggcacatcccttaccagggcctctgctacacacggacatgaaacattggcatgaagggtcattttttaggctttaatctctcccctccagtctcgaatgtcaaaagctgcatcgaactgtactatgtcccttgttgtctcctctctttgcccctgtgttctagcaatccccaaggtacgctttttctttcctactccttctagttctgttaaatagctctgtattttctgtactagatcccttcctgatgcgagttttctttcatgcaacatttggttctgcaagctccatataatccacagagcacagcaaaacatctgacactgttccttagtgccttttttgaaaacccaaggcattgctgaaagacatggaagctatcctctttctccgagcaacat

SEQ ID NO: 53458 - DNA, 558 bp, Gossypium hirsutum
  Clone ID: uC-gsflmaxxa005b08b1
gtttaatcagaatctttccttcttcgattttttcgtagctttcgacgcttaagagaagtctggtattctgcagttaatgtaacaccctagtggattaaacctgtttctgtgtctgaaaagtgaactaagtcatccatgtttcaattcaatatggatagcaaatttaaaggcatagtttgggttggtaacatttatcagaggtttgaagctttgtgcttggagatggatgatatggtctgccaggaaacattccaatacgttgaagaccagttgcagactgtgggagctaatgctaggcaattctgtacagaactaatgcaagaagtgctcccttcatctcctaccaattcgaaggaagaacttaacttgtctctattgcaaaatgctgctgtcacagccaataaagattcaaacataaatgttcataaagattgcattcagaaagaactgagccatgtcagatatattaaaaatatacatgtaggttcatcttcagggcacagcacagagaatgagcgtggcttggctcaagcatgcaagaatgaagctcatgacact

SEQ ID NO: 53459 - DNA, 277 bp, Gossypium hirsutum
  Clone ID: uC-gsflmaxxa005c01b1
ctcactttttcgaggacacagggtgggaggtatgaactggcctcaacgcaagatctttctataccatgtcacctttggactctacatgctggatatggagggagcggtgccttatcagaatgctttgatctgatgctcttgcctgaagagaaccaatctggctcaggatttgcacacttcaaaggtggttgtagcaatatgttgctcatctattacctaacaaaagttaaagcatggtcatttttttaatgcctgtgtcctgattaatactgttatt

SEQ ID NO: 53460 - DNA, 276 bp, Gossypium hirsutum
  Clone ID: uC-gsflmaxxa005c05b1
ctcggtaaccgcccccggttgagagcaaattgccttgcacccttgaagagctgtatactggttcaacaaggaagatgaagatctcaagaactatagttaatgcatcagggcggcaagcacaggaatcggaaatattaaccattgatgtgaagccagggtggaagaaaggaacaaagattacttttccagataaaggaaatgagcagccaaatcagcttccagcagaccttgtttttgtaattcatgagaaacctcatgatttctacaaaagagatg

SEQ ID NO: 53461 - DNA, 156 bp, Gossypium hirsutum
  Clone ID: uC-gsflmaxxa005c10b1
tggtggcctcgggaagagttatcttttctgggtagcggcctgcccaccctggaaacggctcaaacagaggaagggaacagcggacgaacgatcgccatagcgttcgtgtagcaagcacagtaattctgtaattttatattcatttgacctttattc

SEQ ID NO: 53462 - DNA, 302 bp, Gossypium hirsutum
  Clone ID: uC-gsflmaxxa005c11b1
ttggtcaccgccacagcagcacattaatgtgggttggatagagtcaagaaaatgttcgttgatatccaatctaaactggctggagctccacagtttcttctttgccttttacctgataggaaaaattctgatctttatggtccatgggagaagaagaattctctctggagttcggatttaccctcacagcctggctccaattagggtcaatagatcttctccttaccaaccctgttttttaaaattcaatgcaaagcttggtaggacttgtattccattgataaccaattgtgccaaacacc

SEQ ID NO: 53463 - DNA, 285 bp, Gossypium hirsutum
  Clone ID: uC-gsflmaxxa005d02b1
ttacttttgggggttccagcgaggaacggcagaggggataacctagaggttcattgctagtctatacaacctgaaacaggaccatcatatgaaaaatgtaacccgatgtttcgtttgcttggggccactggccatccgcctggagagacggtgttaataccgatattatagcaacataactaacaaatccaactgcacgcccttgtgctttgatcttttttggaaagggagtgtgcgcaagctgtttatttcaagaacactctgcactcaccacacctcgatctt

SEQ ID NO: 53464 - DNA, 447 bp, Gossypium hirsutum
  Clone ID: uC-gsflmaxxa005d04b1
cccactcgtccgaattggttacttttagttcttatccccttttaaatccaccggaggtttctaatgctgggaggcatctctctgctgccgagttccattctgttcttcaaagtgctcggcaacttatgaagaatggaagtcctaccgatgataagcagctggttctattggatgcaagaaatttatatgagacgagaataggcaagtttcatgctccaagtgtggaaacactagatccaggtatcaggcagtacagtgatctgccctcttggatagatgataattcagaactgttgcgaggaaaacatgtcctcatgttagtattctaaatcctgataatgttctgccgatgtttattccagttctttcacacctgcccctttattcttatcaagttaaggagtttgcaatactctctatgcgtgtatgctgcattcaattaatgtt

SEQ ID NO: 53465 - DNA, 348 bp, Gossypium hirsutum
  Clone ID: uC-gsflmaxxa005d10b1
ctcggtcaaaaggaatgcgtttctctagttggatctggctcaccatatgctcctggggtgctggatactggctatcggtatgatacgtcctgggaccattctgcactgcaaaggcctcggcctcttatgaaggccgcatgccctaccgatgacagagagctggctctattggatgcaagaaatttatctgagacgagaacaggcaaggttcatgctccaagtgtggaaacactagatccaggcctcaggccgcacagcgatctgccctctcggatagatgataattcacaactgttgcgaggaacacatgtcctcatgttagtattctaaatccctgtcatgctctgt

SEQ ID NO: 53466 - DNA, 124 bp, Gossypium hirsutum
  Clone ID: uC-gsflmaxxa005e03b1
cttgttgaaaaatcagaagctgaactaatgaagaggaccaatttacacatgaccggtcattatgcaccaacatcaaacaacagtgaaccccattattatgctgctaacctactaactatagaac

SEQ ID NO: 53467 - DNA, 248 bp, Gossypium hirsutum
  Clone ID: uC-gsflmaxxa005e09b1
tcgctcacgcgtccgaaaaaaaaaaaaaaatagaaaatttactctcaactccctcttcccttttgaatctggcctagctccggtcagtacccctggcgccggaccggtcatcgtcctccgcgccggccaccgtacacggtggctggaaatctccaaaaaggtgctgtcagaggtgtggaggaggccggtggcagcattgcagcggagaaggtgccgacacaacgtgggggagcggcgcactaggggtt

SEQ ID NO: 53468 - DNA, 296 bp, Gossypium hirsutum
  Clone ID: uC-gsflmaxxa005e10b1
tgataaaaaaaaaaaaaaaaaaaaaaaaaaaaaaaaaaaaataaaaggggggcggccgtataagaaacaagctgacggccgcctgcatggagcgacataagacttctatagtggcggctcaattctttaaagggctcgccgttttacaacaccgtgatgggggaaacatctgttgttaccgcgctacataatcttgttgcacagccccctttttccagctgctgtaataggaaaaaggagggctccacccaacttttctaccaggagatgagcccgcttggcgaatggggggaccc

SEQ ID NO: 53469 - DNA, 190 bp, Gossypium hirsutum
  Clone ID: uC-gsflmaxxa005e12b1
tcgataactgtaagaaaaaaccctagcgtctaccataaccagcaattagcgtccgcctttgatattcgtgaaccatgatgaaaattaagaccccaaagaaaggaagagtcaaaagggaattcgattaacgagcgccaaagctagcggaaacaggaaagaaaacactgatgcttcaaggaacaaagactag

SEQ ID NO: 53470 - DNA, 480 bp, Gossypium hirsutum
  Clone ID: uC-gsflmaxxa006a01b1
attttgtagaagaaaaaaatcctcttttggttttttattgaggaactcctaaagtaaatacccaaaatttctgcaaaagtttccgatcgaaaaatctgaaaaaaccatgtggcgaaactccgccactgtaagcttctcttcgaagcttctctcttattcttcttcctccgccaatcctaattacttccattacgcatctgctttctccatctttagtccaaacggcgttgtagatcagacgctttcttcttctcatcaacgcttttactgctcatcggcggtgccttcgccgtctccctcatccggttccgttataaagctaggttttctcgctagcaaatctgacgcctttcgccctttgtgtttgaaagctagagatgcggtccagcttgctcgtcactacggtcggtgttactgggagctctgcaaggctcgtctcagtatgctggtggtggcgacttcggcgactggatatgtgct

SEQ ID NO: 53471 - DNA, 460 bp, Gossypium hirsutum
  Clone ID: uC-gsflmaxxa006b03b1
cggacgcgtggtgcactggtggactcatggttagataattgacttcacctatcgaaacctgcagagagcctgggacgtggagatcaggtgcacatgcctcctcagatcgcacaactgatcttgaagtggccgaagcggtacaaggaaacatcaaatgcatatagaatttttacacaagctgggacagacaccgcatcggttagacgcagctgacggggtgactacccatggatgtcaagagcttatgatccatgcactgagaggaactggaacgagtattgtaatgggaccgaagatgaaatggcacttcatgcaagatgtactggtatgcctctatcaatgggaaacttgcagtgactaacattggatataactggacagactgtgctctgggtatgctacctatataccaagaactaatcgctgatggtatccggatatgggtatacagcggacacac

SEQ ID NO: 53472 - DNA, 480 bp, Gossypium hirsutum
  Clone ID: uC-gsflmaxxa006b12b1
acgcggacgcgtgggctattttttttaacgacaacactctggggtgacggccgcagctggaacctgcaagcgatgaaaaccttgacgagcccttgctccaagccagactccggcaataatagagatagagggttttcttcttttcaacatctttctcttactagagctcatgggtggttattacctgctaaaaagcttgctagaatccgcttctagcatttgtgcattgggcggcctaggaccttgcagcctgtatgttgatcatgttgattctctccggacttacagggggagttggagacagcagaaactcaacctaaagaacacaatgcatcgaagaccactcgggccaaacactaagtgaagaaagagtggctaattcggggagcatttcttcatagtaggggatcatcctatgttaggctcatgggaccctgagagttgtatcccactgacttggtcagaaagacatgtttgggc

SEQ ID NO: 53473 - DNA, 363 bp, Gossypium hirsutum
  Clone ID: uC-gsflmaxxa006d01b1
atccgttactgcttccgggctggcatcaatgttatacaaatcgatgaggcttgctttaagagacttaccaaaaatacattagtatcatcgagtcattccactcgcacataactgtaaatacaaaaatacctaacctcattcaaattgatgaatcgatggaagtaaattatgagaggtatatgcagaaaggaagacattcgctaccatgttttattaaacaaacgaatgtgcattgaaagccatgaacagttgatggaacctgtgatccatgcttgtcaaggaataagctacagaaagttggatgtgaatcttaccactagcattgaaaaacttgtcaaagctggagagacttccagagtcacc

SEQ ID NO: 53474 - DNA, 253 bp, Gossypium hirsutum
  Clone ID: uC-gsflmaxxa006d06b1
gtaaaatatcaaaagcaaatgagaggagagagatacaaagacttccgactctgaaaactccgtcaacgctagagcgatataagaggaagactcgtttctataacggcgtcgtatatcattcagtgttagggttttttgagtttaagatgtcaactcctgcatggtagagattgatttgggactttatgaggtttcttcttgatccctttgtctgattattcgttcactcttccgtttttcttcttttttcttt

SEQ ID NO: 53475 - DNA, 159 bp, Gossypium hirsutum
  Clone ID: uC-gsflmaxxa006e02b1
cttgcatcggtacactggtgagggaatggatgagaaggtgcctcatcgttaaaccctattgtcatcctttcttttttgtggagttttagaaattaaagatttcaactgcaattcactattttccataatgcaagtgaaaaatgaattaggttctttggt

SEQ ID NO: 53476 - DNA, 118 bp, Gossypium hirsutum
  Clone ID: uC-gsflmaxxa006e08b1
tcgctctcgcgttcggcaccagcgcccatgtggagccttatttttgttttcaaacaagctcaaaaaagatggccaacgctgcatcgggaatggcttgtgcatgatgattgcatgttga

SEQ ID NO: 53477 - DNA, 212 bp, Gossypium hirsutum
  Clone ID: uC-gsflmaxxa008a08b1
ctacgcgtccgcattttccaaattttgccctgcttcattttctccttcatctgccgtcatactctctacacaatttctgcccttaaactctcttgccatatttcagatattctccttcatcttctcccatagatctgcaactttctcttcttctgctcccatatttcagtttacagatgactatgatctgtgctgatggatgctctacgatt

SEQ ID NO: 53478 - DNA, 188 bp, Gossypium hirsutum
  Clone ID: uC-gsflmaxxa008d07b1
ataaaactcttaattccagcgttagctaaaagctggatttctctgttatatgtatatatttacaaaagaaataaatcagcatcattctgccgttgcttaatgcagaaacaatcaataacgacttttaaagctctcttctttgcttcagatctttccatttttgttttcaggttcgcattcctgaagat

SEQ ID NO: 53479 - DNA, 360 bp, Gossypium hirsutum
  Clone ID: uC-gsflmaxxa008d11b1
cggaaatccctggacgtcccacgcgccttataacacccccgaaaaacacagaccaggcagggggcactgtgtgagcaaacccaccccctcttgccccgaagaccagcgccgaagccatagggcagaaaccaggctatcagcccataaggaaacactgtaagcatacaagaggctcccctgcaccggctaccaaaaggaaagggaaaggaaaggaagagaggaacacggccaccaccacaacaagtgagaaagaatcaccaacccaaccacagcagactccgcagccgaacgaggcagaagccaggcaaaaaaaagagcacaccctgcacgacgccagagaatacgaatggaaacacaaga

SEQ ID NO: 53480 - DNA, 272 bp, Gossypium hirsutum
  Clone ID: uC-gsflmaxxa008e12b1
atcaatttggaaatttcgaaaatagttgagagccgtctttttgattttgattcatgggatttcgccgcgcgacccctggttctcctgttgagaagaacactgaaagggcttaataagatcatagctaacccatctaatggagattaattcttctatcttcaatggatttgtcactatactccatactatgtttctttccatatcatacatcttcatttatttaattcttctctctttttttcctttatttttttctactttcttacatcttc

SEQ ID NO: 53481 - DNA, 517 bp, Gossypium hirsutum
  unsure (1)..(517): unsure at all n locations
  Clone ID: uC-gsflmaxxa008f08b1
tattgaatccggtttcattctccaatgatgtcgacaccagttatggagcgaaataggtgaatgtctgcacaataggaagatattagtggttcccattttcgaaaagcattatgttacgaagaacgaattgtctttgaccaccccatatgcatctgttcctcaaccatcagaatctgaagcagaaaataaagggagaaaaatattacttgatattaacttaccttgtgacgtgactcttccggacatgaaccaagacattgttgcagaaaattcagccatagaaaaggaagcaaatacaaagctaccaagttccccacatcagtttgacttgaactcctgtgtcgatgaggatgaagcttcttttgtaccctctgttccgagcagtggtatgaagatgactcangggatagatttggaagtgccactaattcctgagcctgaagatgtcattcatggagaagaattactggaaaagggcattgaaccacctttgcaatcagtacaaagcaaagatgac

SEQ ID NO: 53482 - DNA, 158 bp, Gossypium hirsutum
  unsure (1)..(158): unsure at all n locations
  Clone ID: uC-gsflmaxxa008f10b1
cggaattcctttgacgtcccacgcgnccggtaagaccccatcaagccaagaaggcactgaagtatgttttccatgctgctgccaacaatttcccaggaaaagaacncgaattactcattgccactcttccagacaacaacggatccttatatggcgac

SEQ ID NO: 53483 - DNA, 176 bp, Gossypium hirsutum
  Clone ID: uC-gsflmaxxa008g11b1
taaaataggtccctattccaaggagggaaagtgttatttttttataaagcataatatcacaggttttcccccttgaacacaaaaaagcacaaaaagcacaaaaagcacggccaccataaaatatcaatctgcattttcagctatcaattgctggtactttcaagcagtagatcttt

SEQ ID NO: 53484 - DNA, 199 bp, Gossypium hirsutum
  Clone ID: uC-gsflmaxxa008h02b1
acgcccgcttatacaccacccaccacaccacaaaacccccacgggggtgttttttaagaaagagtccggcgaactatcaaccttcaaacggctaaattggatagggtatccggtgactataaacctctgcattcagaccccacgaaagcaaaggccgcaggacacccaaggccaaacccgcaaggaccgcgcacccccg

SEQ ID NO: 53485 - DNA, 131 bp, Gossypium hirsutum
  Clone ID: uC-gsflmaxxa008h11b1
atcctaaaccatatatccgcatatatcattggggtctttgtcattgcttttccacgaaagcacaacgaacgcagacgaggaggcggcgagactcccggcaccactacagaaacgggggcaggggggggggg

SEQ ID NO: 53486 - DNA, 274 bp, Gossypium hirsutum
  Clone ID: uC-gsflmaxxa009a02b1
tcctcgcgtccggatatatagaactggtcaagaaacacgacctggagatctcacaaccaggtttggagcccaatgtcggactaacatggcagatgacaaaaaggagagaagaccaagaagttcacaagtttaccaaggagaaacctggctggtgtagcgatccacattttccaccatgtgctgcgtattgcctctctccctgtctgtctcttatgaattttacaatttaatactgtgttagtgagcatgttcaaaatggcttcgacatcattac

SEQ ID NO: 53487 - DNA, 468 bp, Gossypium hirsutum
  Clone ID: uC-gsflmaxxa009a12b1
attgatcgagacctactttgctgatcttacttgtgaggcatacaagacactcatcgggctgaagggtgtcactgcttatggccttggacttgggttccgcggaagcccaccactctaatagtttggtcaaatagcaacgtggcctaatggcaattacctctaaagggacagtagaggcattgcttacctgtatagaagtagagatttcattcactggactaaggctaaacacccttttcattcagcgcccaatacaggcatgtgggaatgtcctgatttttatcctgtttcgttatctagtaaagagggtttggatccatcttacatgggaaaacatgttaagcatgttctaaaagtgagcttggatgatgcaagatacgattactacacacttggaacatatttaactaatgaggatcaatatgtacctgacaatgcattacatgatggatgggctggacctagata

SEQ ID NO: 53488 - DNA, 323 bp, Gossypium hirsutum
  Clone ID: uC-gsflmaxxa009b08b1
ccctctcgtccgcggacgcgtgggttcgcgagaaagtgagaggtcgagagagaaaataattcgcagggaattagcgagatcctgcaattttcctgcgttttctctcttcaatcttctccggctatctgatctatccgtcatcatgacaacatcaaggcgtcttgcagaaagaaaggtggagaagcttccagagaacaccacatatggaggggctgatggctgagacaaccactaatgaggggcctgactatgcttgactgactatggttctgaaggttcttatatgtagcgcacaagagagcgcccctgtgatgcttgattac

SEQ ID NO: 53489 - DNA, 201 bp, Gossypium hirsutum
  Clone ID: uC-gsflmaxxa009c03b1
attaaaaccctaattttgaaatcaccagcgtacttttccgagttaactcgccggctcaggggaagatgtacggatccgatagagccggtgacgatgcagagcgaacagcttttagaaaaacagaaaagaagtacaagctttattacgaaaattcgaaatccacgaaaaagaagaagcaacctaaacaggtcgatttatcag

SEQ ID NO: 53490 - DNA, 231 bp, Gossypium hirsutum
  Clone ID: uC-gsflmaxxa009e08b1
ggtcgaatatcgttctatatgacatcatttggtgaagaagcggctaccatatcatccgctgctgcacttaccaaagatgatattatcttgcctcagtatcgggaaccaggagctcttctgtggcgtggtttcacattgcaagaatttgtcaaccaatgctttgggaacaaggatgatggtgggaaaggtaggcagatgccagttcattacggttcaagcaagcacaacttg

SEQ ID NO: 53491 - DNA, 365 bp, Gossypium hirsutum
  Clone ID: uC-gsflmaxxa009f06b1
gcgttttcaaacccatgaagcaatgcgttactcccttttagccggtggcaaaagggtccgcccggctctttgtttggcttcctgtgaccttgttggtggcacagaatgcatggctatgccagcagcttgtgctcttgaaatgatccacaccatgtctttagtccacgatgatcttccttgcatggacaacgacgatcttcgtagagggaaaccaactgaccacaaagttcatggtgaagatatagctgggctcgcaagggatgctcttttagcctgttaccttgtacacatatctgtatgcacagcaggagtcacacctgagaagctcgtcagagcacttcgggaattaggtaaatgtattgaaa

SEQ ID NO: 53492 - DNA, 338 bp, Gossypium hirsutum
  Clone ID: uC-gsflmaxxa009g10b1
gcgcgttctcggggggactatccgtgtcatccttttgttcccgaaattcattggcctttgcgcagatttctagggtttgtggcggatttcaattcccacttttctgtttctgtttctctagggttttaactcccggtcagctttatttaattattactcttgcttgtcttaatcttaatcttcgtgaatcaatcatcggagaggaggaagaaattacgagtctatagaaaatggattcgtcacaagctctcacgttctggtcaagtggtaacggcggaaacgggttggttagcactcaaactaatgatacggccaacgctacccctaatgatgatcct

SEQ ID NO: 53493 - DNA, 479 bp, Gossypium hirsutum
  Clone ID: uC-gsflmaxxa009h12b1
ttctttggagaattagcaacaaatgcaggacctcagccatcagtaggatatttaagaccaacaccagaaacatgaaatccctgatgacatgtcatttgtatcctgcgaattcctaaggttcgaccgggactcaacatccgccaattcatcataacattaatacgattatacatcgatccatttacattaaaaataacatagtaaacattcaaattaaacaacattaatatgataaccattcatacaaacttaccgtgacaactaggggcgtgaaggttatatcgagctaatcagaagcttttgcattacttcgatctaggtccgtacatggtttatcttgatctaaatagaaaatttcaatctatttaatatttgtagtactcaatttagtccacatttcatatttatgaaaaattaccattttaccccttatatttttacttttcacatttagtccctaagctcataaatggaatcta

SEQ ID NO: 53494 - DNA, 500 bp, Gossypium hirsutum
  Clone ID: uC-gsflmaxxa010a05b1
gtccaatttctcttcttctcttgtttcccataattttcaacaaacccagaaatagagaagagaatcgaaaacaaaaatgggagacgagaaagtaaaggaggaagccatgcggatgattgggatgttccaagttcttcctcgtttggtcgttttcgatctcgattacactctctggcctttttactgtgagtgtcgatccaaacgcgaaatgccatcgatgtacccccatgttaaaggcataatagccgcactcaaggacaaagggattgatctagctattgcctctaggtctcctactgcagatatagctaacacatttcttgacaaattgaatatcaagtctatgtttgttgctaaggaaatattttccagctggacacacaagaccgatcatttccagagaattcactcaaggactgggattcccttcaactcaatgctcttttttgatgatgaggataggaacatacaagctgtctcgaagatgggagtaacaagca

SEQ ID NO: 53495 - DNA, 265 bp, Gossypium hirsutum
  Clone ID: uC-gsflmaxxa010a06b1
gctgatcaaggggtcgatgtgattgccctggcaagtgaccaagttgatgttcctgtgtatgtggattacattgatattgatcctggagggaattcacagcatgatctttctctagcactgcatacagacacgagtaggcagccccaatattatgaggctaatttaaatggtgtggagacattcaagataagtgatccgaaaagcatcacttgcagggccgaatactgaccctggcgcaaaacaggacgtagtcaatccatcattg

SEQ ID NO: 53496 - DNA, 413 bp, Gossypium hirsutum
  Clone ID: uC-gsflmaxxa010b02b1
cgggcctctatcctccatctgactccaattgcgatggagcagaaggaagatcggccactaggtacgacgcatggagggtggacgtggcatgtatggaagcgcgcgtgaggccgagggaatgccctggtggctgcggcggtggaggctcgcccttgctgctaaggtttctagttctttttctgttttgggcttcaatgtaattgggccggggtatcgggctactataattgggccattcgagtttaagtttgattttagtctgtaattttggacatttgggcctttattttatttggtatttatttgtgtacgggccgggcaatattgggccattacaatacgtattagaaaaggtagcatttttcaaaaaatgttgctatgattaaaaatgattgtaacatctaataacattc

SEQ ID NO: 53497 - DNA, 523 bp, Gossypium hirsutum
  Clone ID: uC-gsflmaxxa010b04b1
ggcttcaaaacagatggaccaagtgttttctcaccggtccaccgatttccccaactctcacttccttagggtagaagctgaagaacagcctgagatatctgaggaatactcggtttctgctgtgcctttttttgtcttcttcaaggatggaaaggttgtcgataaattggagggtgcagatccttccagtctggccaacaaagttgccaaggttactgggtcaattaaccccggagaagctgctgctcctgctagtcttgggatggctgctggccccaccgtcctcgagagtgtccaagatttggcaaaggcaaacggttcttcccaaatgggaaatcaagtgcaaactggtctcgatgacaaaattaagaaacgattgcagcaattgattgactctcatcctgtaatgctattcatgaaaggaaaccctgaagaacccaagtgtggttttagcagaaaagttgttgatattttgaaggatgaaaaggtgaaattcggaacattcgatattatatcagacaat

SEQ ID NO: 53498 - DNA, 504 bp, Gossypium hirsutum
  unsure (1)..(504): unsure at all n locations
  Clone ID: uC-gsflmaxxa010b08b1
cccacgcgtccgaaaacaggaagctacggaggaaaaaggcgaattgcagattgggagaaagagaaagaaaaaggaacaatatttcactgaaaaccatgaatactgtcttctcagttgacgatttctccgactccttctgggcggctccggcttccgatgatgcgcttgggatgacccgaagccattccgagtgggcgttggaaaggtttctggaagaattttccggcgccggagtggcgatctctgggtcgcatgcgggcgagaatgtgatcggtccgtccttgatgtcacctcagtcgtccgttttccaaagtggaagaaggtaacgtggtggagataaaaaggcctaatagccagaatcataatcatccgccgtctgatcaaacgccgacagttccgactgactcggatgattaccacacgatcctcaagagcaagctcgaactggaatgcgctgcngcgttggctgtgaaagcagaagattcgtctgccgaagctgaaaat

SEQ ID NO: 53499 - DNA, 340 bp, Gossypium hirsutum
  Clone ID: uC-gsflmaxxa010c01b1
gcactgaggtacacactaggaggcgacgaacattgagacgtatttgttagacaatggagctaacattcatcatgatcaagcctgatggtttccagagggtttagttttctcctttttctttttttttttcttttttttttctcttttttttcttattctctttattttttcttttatttttttttttttcttttatttcttttattttttttttttttttttattatttcttttttatttactttttatctttcatctctttcttttcttttttctttttcttctttttttttcttttatttcttattatctttaatttttttatctttttttattctct

SEQ ID NO: 53500 - DNA, 228 bp, Gossypium hirsutum
  Clone ID: uC-gsflmaxxa010c07b1
caaagaagcctaaggttgaaaaggaaaactctaaggatggattcaccaaagagaagcttgcagttaagaagcaaacaaacaagtcatcagcaaaggtttctgctaaattactaggtatatgcttaacctgtctgaaatcttatacttgtgcttattttctatgagatttatgttgtatttctttctatttattattatttgttttaatttttttttatttttattctt

SEQ ID NO: 53501 - DNA, 113 bp, Gossypium hirsutum
  Clone ID: uC-gsflmaxxa010c09b1
agatggtattatagaaatagcagactcttactccttccggggatgaactgaatccggcgttttaaaacctgagaattctaaatctagttcgaaatgcccacatttaaccacgt

SEQ ID NO: 53502 - DNA, 261 bp, Gossypium hirsutum
  Clone ID: uC-gsflmaxxa010d01b1
cccgattctgaagctcctgcgaaattaaaagctcctctttcaatctcacaaattagggttttccgtaacaaaatcccttattagggtttccctcccattcttcaatttttcgagctcgttgtcttgcaagcttgttttattagatacataaaatgtcaaggacaagggaagagaatgaagagcagatagaccttgaaggggacaatgaacaagaggagaccatagaggaggaggttgaatttgaagaaatagaggatgagg

SEQ ID NO: 53503 - DNA, 284 bp, Gossypium hirsutum
  Clone ID: uC-gsflmaxxa010d09b1
tgataatcatataaagcggaagatattttagccattggcatcaagctcaaacttccttcttgcatgcgtgctcctccggaagcacacactagaataagaggtaaaaaattattggtagcatatttcgatcaaacgggtgattttatcgcctactacggatcccatactacctcctataaactgaaaattcattacttcgattgttataggaataccgcatagtctacccgagcctgctttaatagtctcagtttatcctgtatatttattgctaaatattaatt

SEQ ID NO: 53504 - DNA, 200 bp, Gossypium hirsutum
  Clone ID: uC-gsflmaxxa010e02b1
ctcagaaactcagtttctttttctctctcttgatttattacattcagtacaggtagatctatctatcctctacctctgttctccttacctgttgtttgtttttcattttacttatcctcaaactctttccttttgaagaaaaacttgaatttttttatctgacaaacaatggtgttcttactgtttttcttatgatctat

SEQ ID NO: 53505 - DNA, 287 bp, Gossypium hirsutum
  Clone ID: uC-gsflmaxxa010e10b1
ctcttacttctgccttgatatccttagatcaagatctcttctgatttaaccttgaatcagcaatggaggaatcatccctagctacaactttacccaaaactttaattatttgcgctttacttataaaattcatcaaatcatcggaatcgcttgcagcttaaccgcttacaagtgaagcaattgatctgacagaaattacttttatcatttactttgtattcacattattataattgtcaaaatctagctacaaattaacctctctatctcttatactatatttttat

SEQ ID NO: 53506 - DNA, 505 bp, Gossypium hirsutum
  Clone ID: uC-gsflmaxxa011a01b1
cccacgcgtccgataaaaacctctgtttctctgttccattacgttatttgcttcttcttctttttgttccgcctttgtcgaatctcgtaagaactgcattttagagaccggttcttcgtctgggtttcacctcgttagccagattttagcacattctggtcaaattcggaaatcatattactaggcaaataatgttctgttatctgccataaatgtggtgtagctttggagatgagaagtttcgaggaagcccgcaattgatggactgctcacccagcagtagtgataagaaaacattgaagaggtggtttttcattgacaagagggtcggataaaaagttcttgtaaggattgaaacttcataactctacttgacaaagctgattctatcgtaaacaatctagtttaacctggtataagtgtattaaaaagtgatccgaagttatcatcgacgaaaaggaaaaagaagtggtctgaatcttatggagttgaagtcaaatcattc

SEQ ID NO: 53507 - DNA, 515 bp, Gossypium hirsutum
  unsure (1)..(515): unsure at all n locations
  Clone ID: uC-gsflmaxxa011a02b1
gtttacaaccgtgattactcgaaaaagctcaggcaaggagaaaaaaccaccagaaattggcggtgcaaggccatttcttggccacctccacctgttaggagggccaaaaccagcccacattaccttgggtaactttgccgacgcatacgggccgatcttcaccttcaggctaggcatgcacccaacactagtagtaagcaattgggaaatggctaaagagtgtttcaccaccaacgataaagccttcgccagtcgtcccagaactctagcggcggagcttttgggatacaacttcgccatgtttgggttcagctcttacggcccttactggcgtcacgttcgcaagatagcgacgctcgaggtactgtccaactaccgattggcaaagctgagacatgtacgagaatcggaaatcagagcatcaatcaaacggctttacgagttagttaccaaaaattgttcggaaccggtggttgtggagatgaatagatggttntggactttgaacataaaca

SEQ ID NO: 53508 - DNA, 320 bp, Gossypium hirsutum
  Clone ID: uC-gsflmaxxa011a05b1
gggttcttgggaagagctatcttttctggtaaacgggctgtccaccctggaaacggctaaaccccaggtaagtgacagcgagcgagagagcaccggacgtagggtggagcccgaagcgcacccggaggcccttgaaagttcataggaccggatgcctgacgagcgcggtcgtactcataaccgtattaagtgttcaaggagcacagtctctggacaatggaacactgtaggcaagggaagactgatgaatggatccgctacctcgggaaaaggattgagtctgacggctgggcacggtggttccagacccgaacccgcat

SEQ ID NO: 53509 - DNA, 366 bp, Gossypium hirsutum
  unsure (1)..(366): unsure at all n locations
  Clone ID: uC-gsflmaxxa011a08b1
aaaaccctctttctacatttaccgggcttagattgaaatctccagttttatttatttatttttatttttacgtttctagcattattatcacaaggatttcctttttcttcttttggtcaaaaacttagattcattttattttattttgaggcttttatccccgctgattattcaagcaaagtgttttttcccctatttcctttagttgatttattggaagcttcgagttttcagtttggtaagtcgagtttgagagtgtgttggattagtgggtaataagtgccgactttgacacagatctgagttaaaataaccaacattaagctctttgggggttttggntttttggttgaagaaaattgtggg

SEQ ID NO: 53510 - DNA, 123 bp, Gossypium hirsutum
  Clone ID: uC-gsflmaxxa011d12b1
ttcaagctccttgatcattcctataaaattatctcattctctgcctatcaggcgcttgaataaagaaacaacccaggtggatcctagcataccaaaaacattgttggttgagtaaggaatgag

SEQ ID NO: 53511 - DNA, 134 bp, Gossypium hirsutum
  Clone ID: uC-gsflmaxxa011e03b1
gataaccttatcttcttctcccactccctcaatctcaccttcaatgtctctctccgctacactccgcgtctcttctttcctacgccacaacctctacctcgccccttctcgcgcctacgccctccgtcgtaatg

SEQ ID NO: 53512 - DNA, 364 bp, Gossypium hirsutum
  Clone ID: uC-gsflmaxxa012a01b1
cccacgcgtgcgcccacgcgttcgcccacgcgtacggcaacgagtgcagtggctgcctgtctgccctggtgcgagcgagataggtaaaaggaaaaaggaagggagaaaaaaagacaggacctactcaaacaatataaaacgctaggacgagaaaggaaaggacagaaatttatgaatttattgctactgtctgcataaagtttattaacaatcggaacgagtttcgatcatacacgttatacgccggttagtttaccaagccgattctgaatcaggtaaatcgataggcctcctactttgtatactaggaccactcttatgactccgaccatagggatgagggttagggcaacaggttcaacat

SEQ ID NO: 53513 - DNA, 514 bp, Gossypium hirsutum
  Clone ID: uC-gsflmaxxa012a04b1
cctacgcgtccgtgaaaaatcctttgaatggtattagatttacccacaaacttttagaaactacagccatttctgaaaatcagaagcaattacttgagactagtgatgcttgtgaaagacagatcacggtaataattgaggatattgactttcgaagcgatgatgaaggcatggagctgagcatggaagaatttgttctagggaacgatctcgatgctgtcgtcagtcaagtcatgattttgcttaaagaaaggaacttacaactctttcatgaaactccgaaggaaatcaaggcactatctttatacggtgatcgaattaggctccagctagtcctatcggatttcttgcttaacatggtgcatcatgctccttctccagatggatgggtagaaatcaagatttcacctggtctaaagctactacgagatggtaacgagtttctccgatacaattcaggatgactcacccaggtaaaggccttctttcactcttattcaagaaatgcttgaga

SEQ ID NO: 53514 - DNA, 404 bp, Gossypium hirsutum
  Clone ID: uC-gsflmaxxa012a06b1
ggataaggttcataactggagagattacctacgattacactgctatcctctccacaagtatgttcctgagtggccttccaaccctccttccttcaagtaagcctcttctctattcttcttcctttttctaatctccccccaccccaccaaaaaaaaaaaaaaaaacaccttacgttagagatacgtaattcgcttaacgtcatcctttttcattctatgtgtcatgcatgttctaagtatcgatgattcagctatttgtcgacgaattgcattattttattttgcgctcaagtaatatatatttagtaatctgacaatttgatttacatattaataaaactcttgagacagacaggacattttgcatggaaaaaaaaaattttaaaaaaacccaccaataaccg

SEQ ID NO: 53515 - DNA, 280 bp, Gossypium hirsutum
  Clone ID: uC-gsflmaxxa012a11b1
tttcaatctaataataatattcttatcttgttgttattcccggctgttttgcttatccaagatattcgtaatttgaattattcaatatttgggtccatattgtcatgttaggaaggtcaatttactttagaagaaagccacgcaggatactatcgggatcttcgatcttcgctcgggagacgtgattccatcagggtcagtttattttgatctaggtgtcatggatgttctaaggatcgcttatttaattttttgtacatcaactgcatttattttattt

SEQ ID NO: 53516 - DNA, 396 bp, Gossypium hirsutum
  Clone ID: uC-gsflmaxxa012b03b1
cgtacgcgtgggaaaaaaactggaggactggcactccaggaaaatcgaagaggcctcatcattttcaagcaagaactagggctctgacaaggttattgatctccaaattctgacaaggtctcaagaattcgttgatcttcatcctttctagctctgcagtgacttatccgaatcatctctacgcgaattatgcagcacctttcagctaagcattgtaatgatttatgaggcttaatcagaaggtattgatgttctatgtgaaattttgtaggtaagagctattagctaccgatttgttccagacataaatcgttggcaagctaaagctctagttgcaattcaagaggtttggtaacttatccaatcttctaaactaaataaaaattgtaagaattc

SEQ ID NO: 53517 - DNA, 276 bp, Gossypium hirsutum
  Clone ID: uC-gsflmaxxa012b09b1
aacttacttaaattaatccctctcaaaagcaatttaacccatccagttgacaaggtctaggtattttgatgaaatcaaccttatgcaaagtgtaccgtctatatccacacttgttcatatttaagctttagaggcaatgaaagcactttctgtctctaaatccttttgtatgccatatatttttgttttgaaagtttggttgtaaatgggattttgttacaattttatttctacaaataagatttgatgtcaatgaaaattctttgttattacatc

SEQ ID NO: 53518 - DNA, 317 bp, Gossypium hirsutum
  Clone ID: uC-gsflmaxxa012b11b1
ataagaactaatttgaagattactatttttgtgtgtgtattggagggaatgagtgtacgagtaatttaaaagtgatatgagtgatttgttgggagaatctagttgtgtcggtaaacgactataactattatattaggtctctgatgataatacggatggctttgattcccatagagcagctgacatcgtagaactggatgatgatggtgatggcactggagaacagattcttgagatttcaagcttaggaagagctgtagaggtgtactatatgtctattaaatttgatattatatggaccctcaattattgtgcat

SEQ ID NO: 53519 - DNA, 358 bp, Gossypium hirsutum
  Clone ID: uC-gsflmaxxa012c07b1
ctctctcttagaggaaaacagaaccacgcctccacctttctcactcttttctctgtttccttcttttttccggcgactttctaccggaatcgtaccggcggtggtcttctaagaagtgggttttccttgaaatgttgaaatttgaatgaaacccaacatttttcatcatttgagttctcagatttagccttgaaaaacttcaaaaaccgtagcgtgttggagtgtaattcttgtttctcttccacctgtgtcctctcttgtgtttgctttgccaaaaggatctctctgttttaagctacattttggcttctctctttttacctttttatctctgcaactctgctaagtaagaatggag

SEQ ID NO: 53520 - DNA, 273 bp, Gossypium hirsutum
  Clone ID: uC-gsflmaxxa012d11b1
tccacgcgtccgcccacgcgtccgaattgtagcactagcaaccaattatgctttgggttttgccactactttgttgtataattctgaaaccacagctacaaaatattaatatttactgtgtattatacaggtaggatagttcacggtgagtgagagcagccaaataggcacatagagagagagagagagagagagaggggatattaggggacacctcacacgatctgtggaggagaaaaaagagaattgcggaattattaatcaatttatgcc

SEQ ID NO: 53521 - DNA, 351 bp, Gossypium hirsutum
  Clone ID: uC-gsflmaxxa012e09b1
tgccaagtaacactaatccttttttttcttttaactaatgatagtatttgagtaacacttagctttcaatggatttccattactactagcttttgcttcggatctgctgctctctgtttcacgagatctcctcactttttaactcgctttgatagccaatggcgttgaagcggggactatcaagtgtgcgtgtactaagcaacaggagttctggatctcgattgcctattgctcattcttgcttttttttcagttccagtgccatttgtttcttttgtccctcccgcttctccctttaatccctctccattgccctctcaacgctattttatctctctccaacttaccttc

SEQ ID NO: 53522 - DNA, 319 bp, Gossypium hirsutum
  Clone ID: uC-gsflmaxxa014a04b1
ctcttcaaggcacaaaaaccccttagttccctaacttttcccttctatctgctctctatttctgcaaacatttccttcaactttcccgagaaaattctatccctcgccggaaccaatgccagtcaccggcgaaaccgatgatggcaacaataacaactctatatctcacattctttcatacaaaacgcccctgttcaaccttaagctctacttagtaatctcaatcttcctggccttttttcttcttctattctcttttacgatcttcctctgttgcccgttaaacagaaatgcccggaaacggaaagtgaagcatagc

SEQ ID NO: 53523 - DNA, 348 bp, Gossypium hirsutum
  Clone ID: uC-gsflmaxxa014a11b1
tcggttttactcctttgttgtttcttgttgttacccttttacgtatttgctaccccggttttaaagctattaagacagccggacgatgtggcggagatgtcgggggtggcggcgatttggatgatacctttgcactttagctttgcgtttcagttcccattacaaaggttcttgcaaagccagtcgaagactgcggtgttagcctatgtctcgtttggtgccttaggggtgaatgtgttgacgaggtgggtgttcgtaaacgggttggactggggtgtgattggtgcttagttggcgttggatatttcgtgtgcgttggggctttggggctttatagctacactgtcc

SEQ ID NO: 53524 - DNA, 485 bp, Gossypium hirsutum
  Clone ID: uC-gsflmaxxa014b02b1
gtaatttaattttcttttcggtttcagattgaaaacaggaggaaacaaaagatattaacggatcaataattcgtttgaatctggagacaaatttcaactctaaatcttaaaatttagtgtttctttttactttttagatttctttgtttcttttcatatatttttatttcaaaaaataaaatgaatgatcagtctcagatgatcaatcagccgccacaaatgatgatggacccgattcagtcgcagatgatgaatcagtctcatcagttgatggcggcggcggcggcggctgctcactctcaggcgaggagccaactgggggcggttctgtcgcagccgatgagctctggtcatcagatgatgaatcagcctcccccgacgttgttgaatagaagctacatgccttggcaatcccaggatccaaaccctaaccctagcaagaaattcccttctttcactcgtaataacaattggaaaggtaaaaa

SEQ ID NO: 53525 - DNA, 241 bp, Gossypium hirsutum
  Clone ID: uC-gsflmaxxa014c01b1
cgcgatcgatctccaaaatgagcgcatattagccctgctctgttcaaggatattaataggccggggaaaagaagcgtaccaggattcccctagtaacggcgagctgaaccggaaaaagcccagcttgagaatcggtagccatcggtgttcgaattggagtctggagaagacgtctcagcgacagatcgggcccaagatccttggaaaggggcgcccgtgagggatgagatttctgcctttc

SEQ ID NO: 53526 - DNA, 211 bp, Gossypium hirsutum
  Clone ID: uC-gsflmaxxa014c06b1
gactacaaccacaccttttcagatagcctttcccaaaattttacaatgtatttgctatccttgaccactcccttctctttccccagacaacttcaatccggatttcccgttccatctttcctctggatctgctactctatggaccgtcatttcccccaccaggtatgattcttcctttctctctaaagcctcttttgctaagctatgggct

SEQ ID NO: 53527 - DNA, 160 bp, Gossypium hirsutum
  Clone ID: uC-gsflmaxxa014d04b1
gttgcttactgcttgatgtagtgaacttttcaaaagccaaatacaaaagcaactgtagtattacttcagagtatataaatataaatctatataggagtgaaatgagcctttaattcaaccactgcaaagaccattgaatctggttgggaaggagggggga

SEQ ID NO: 53528 - DNA, 225 bp, Gossypium hirsutum
  Clone ID: uC-gsflmaxxa014d05b1
ctaactttgatgttcaccgaacacatatatggatacccactatcaatgcccactttgctctatcggacattctggctatacaatgtccgcctcgactgttgggcgcctagaaagctgaaatcttaactgtatccttgttagaactatcaccactgcctgtgtttctgacagaggtgataccgaagagaaccgatcgccggctggtgcattggcataggtctaccc

SEQ ID NO: 53529 - DNA, 231 bp, Gossypium hirsutum
  Clone ID: uC-gsflmaxxa014d06b1
ctgactcgtgggcggacgcgtgggtccaaatcttctttttctctttactttgaaaaagcttacaactttcttccaaatctttcttcttaaacttctgggtttttctttatacgaccaagcaaacgcctcattgctgtgtcgaaagcacaaaccaaacggaaaaaattgagctccctagaaggattgggaaacttgaccagtgaaaagaggcgacttagatactaagttatt

SEQ ID NO: 53530 - DNA, 343 bp, Gossypium hirsutum
  Clone ID: uC-gsflmaxxa014d08b1
gcccggaactgcacctgggccgacccacgcgagcgttcattgtgcgggttcctgccttttcgacttactgacgagggaaacacacataattccacagattagcaactaagatagcatgaggttcattcaatattaggtattcatcctcgacaaagaaatacttgagtttggtgactgggtgattaactagcttcacacacactctctctccctctatttctggatcaaaggggggatcacagtatgccctgattcagggattaaaaagaaaaaaaagctaagttctatattctgttgaggcaatggccgctaataacagcaattgcaggttagaagaaatcga

SEQ ID NO: 53531 - DNA, 191 bp, Gossypium hirsutum
  Clone ID: uC-gsflmaxxa014e08b1
tcgttaaaagaaaaagccaaaaacccgatattatatccaaaagaaaccaaaattttatttgcatgcttttaaatttgatttcatggctgtaacaagcacatcaaacagaaaagaaatggatcggatcaaaggttcatggagccccgaagatgatgatttgcttcaaaaattagtccataaatttggaccta

SEQ ID NO: 53532 - DNA, 265 bp, Gossypium hirsutum
  Clone ID: uC-gsflmaxxa015a06b1
ctgtcatgtgcggatgtgctggcgcgggcgtggctgctggacggtacggagcgtacggcgctggcatcttacggaggtggtggcacgcgtgggaggctgacgcgcatgcaggaactgctagggtttctgttataaaattttcgggccatttgggcctatgtaattttgaggatgggcttgcattaggctattactttgaatatgcggcatgtaactgagctataggcctgctgtgactgttgttgatgatggaccactaactact

SEQ ID NO: 53533 - DNA, 242 bp, Gossypium hirsutum
  Clone ID: uC-gsflmaxxa015a12b1
tcggttgcacttttctctcttatatttgtggcccattaactttaccttgggaaccaagattgccgttacggtaggaagatggtcccgccctgatctggtctgcacagcaataaaaacgatgctttgtagaaaacaccaaacggacttctgataattgtggaacgagacagacaccttgtgtaaggaattattaattatgggatgcgatggctgcggcgccgggggagcagaacggggataca

SEQ ID NO: 53534 - DNA, 368 bp, Gossypium hirsutum
  Clone ID: uC-gsflmaxxa015b04b1
gctacgtgttccgatcccggttcgggaactggaagatatgccattcgggcgggttatgggagatatggtaaggctttctacaggtgatgatgggatcattaatgcagctctgtcatctgccgagggattcgaagtggctatagacctgggtttggatacgaagctttactgttctgaccacactatgggattactggctatgatttcttaatcgtgatctgttagtagacggaatgatgcaactgaaaatttggactggacaagatttttgcatcaagagagctccacttcaattaggacggtcaagccttaaggaaattccaaactggggtgaacaagcttgctgatttggttggagtcactcttgg

SEQ ID NO: 53535 - DNA, 499 bp, Gossypium hirsutum
  Clone ID: uC-gsflmaxxa015b05b1
ttaaatctttgctgctgaaactgacaagctcaaaaaaaatggcagcactttcctttccatggtacactaaaaccctattatgtcccaaaaccaccaaggtctggtccttagcttcccatggatcaatatctactagcccttttgttttcccacaatttctcaatctctccattaatcatcacccataaaaatctgagctttacactctgttctaccctgcaagaaatagccttggagcttgaaccaggaaaacccaaaaaccgaatgtgaaaaaaaagctctttgtcttgaatttgccttgggcttctactggtgatgatatcaaagatctctttggccaatatgggaatgttaaagaggctgcgattataaagcaaaaagatgggaaaagtaggaattctgcttttgtaactatggcttctggtgatgaagctcaagctgctgtagataaccttgattctacgaagtttagggagaattataaggtagagcttgcaag

SEQ ID NO: 53536 - DNA, 250 bp, Gossypium hirsutum
  Clone ID: uC-gsflmaxxa015c03b1
ctgttatcatactacgccatacaacgaaaagaagaaatggttgtatcctttctttccaaactctctattctaacattcactgcttcagttttagtagcttcagctctggctcatgatttctccattgtcggttattcgcctgaggatttgagttccagggataaacttattgagctctttgaatcatgggtatccaagcatgccaaattctatgaatcctttgaagagaagctgttgcggtccgaggctc

SEQ ID NO: 53537 - DNA, 158 bp, Gossypium hirsutum
  Clone ID: uC-gsflmaxxa015e11b1
ctcgatagcaacgatgaagacatcccaaagattgcacccaacaaaataatgcattattgattttaatttctcctttccaatttttttgcctataaatagagagctggggataatactaactgagaacgtactcctagacatcgaaagcctgaaacagc

SEQ ID NO: 53538 - DNA, 389 bp, Gossypium hirsutum
  Clone ID: uC-gsflmaxxa026a01b1
tttatattggcataagtgcagacatcacaagtccaagaccttggctacatgcgcaatgtgtactgaagcaccggaaccttagatgactccaaacagggtgagtttaatttatcttttcaccattttgctagtttcaaacattttaggatttcatccatggagatgatgaggaatagtatttcatgttccaggttaacaaggaatcgtatttaaataaagaatatctctttcttctattttattttccagaattcatccatagagatgatttcatacataacgcaataacattttatgttgcagatatgcgtaccagtacccccactttttatttgcatagtgggatgcttattataaattaatattttgagtttaatcaagtttgggta

SEQ ID NO: 53539 - DNA, 345 bp, Gossypium hirsutum
  Clone ID: uC-gsflmaxxa026a02b1
ttcatgcatgcagatgctacggttatcgaatgagctcttattcttgtatatgggggagcggcattttgttcaatgatcaaccggtgacaggctcgcaagctttatctagtggtttgcggaacaagaccttgaatcatacgagtgttcactgagaaattgacgaagccctattgaaccactcgtgggttaagcagggatgaggtaacctgcgatggtttgtactcaccaggcgaattgtaatgtttaggatgttgaggctatgctactacgatcgcaggctgtgattactgcaaagcatgttgaggatacagatgtgaggactgtgtagatcatacccaaaaagga

SEQ ID NO: 53540 - DNA, 355 bp, Gossypium hirsutum
  Clone ID: uC-gsflmaxxa026a11b1
tcgttttccttaattttccgactcttttggctctgttccgatggcttttatttcccgagcccgccgcaccttcaccggacccttccctccatgttcttacttggcttcgattcgtctcagttcgactctcacttcccccaagcttttcattagcggtctcccaagggaaacaacagatgaacagttccaagaggcattttacccatttggccagattgtcgaagccaaagtcgtgagagatagagccacccgaaggtcaaaagggttcggttttgttacatatacatccattgaagaagctgaaaaagctagagaagaaatgaatgccaagttcttgcatggatgggttattttt

SEQ ID NO: 53541 - DNA, 380 bp, Gossypium hirsutum
  Clone ID: uC-gsflmaxxa026b01b1
tttggaagctgctgcagctgtagtggaagaatatggtcttccttgtggaaaggaggaatttcttgcagaacttcagccagtattctatgcacagttgtgcaacattaaacctcttccaggtgcctgtcggctacttaaacatttgagtggtcatggtgtgcccatggctttagcttcaaactctccaaggggaagcatagaatccaaaatttcttatcaccaaggttggaaagattatttctccgccattgttggtggtgatgaagtgactgcagggaagccaagtcctgagatattcctggaagctgctaaaaggctaaatagagaaccttcaagctgcctagtcattgaagattctatgccaggtgttacagctggta

SEQ ID NO: 53542 - DNA, 479 bp, Gossypium hirsutum
  Clone ID: uC-gsflmaxxa026b05b1
tccacgcgtccgaacagccatcctccctctgttcccctctccctctccctctcccttctcccatttgttttccttcacattcctctcaccgttttcagccgggcctacaattttcttttaaaagaaaactatcttgagaatcaataacgaagggaaattgaaatcggatcgaagggttgagggcgagaggagaagaatgagcactaagaagaaaacatcgcagggtcacttgagtagaacacgcataggaaagtacaatctgggaagaaccctgggtgaggggagtttcgcaaaggtcaagttcgctgagaatgtcgagaccggtcagtgtgtggcgatcaaaatcttggatcgtgatcaagttctacgtcaccgtatggtcgaacagataaaaaacgaaatcttaacgatgaagctcatcaagcatcccaatgtcattaacatatttgaggttttggcgagcaagacaaagatttaca

SEQ ID NO: 53543 - DNA, 381 bp, Gossypium hirsutum
  Clone ID: uC-gsflmaxxa026b10b1
tcggtgctgttctctgctctcaccagatcaaaaggaaattcaaaagaaataaagatcgtacaaataagaatctatattacgctactgagaactctgccgaggaaaaagcagacgcaatggccgtacagcggttagacagaggcgatctatggaagaacaaggctcgcgtcatggaactccagctgaagcagcgcttcagggtggcagtcaatcgccaccgtcctttagaccttgctgaacgttacttttactgctaggttcagcgctgggttcagcgcttgcgcgacttccgtcgcgatttcctgccttattccttttctttttacccgaaaaaagtgagtaaagactttgacgtggacgttgattcaactatttttttaa

SEQ ID NO: 53544 - DNA, 519 bp, Gossypium hirsutum
  Clone ID: uC-gsflmaxxa026c02b1
gctgaaaaaggttaatgaaaagcaattagatgctctaaaatctatagtccattattcggaaaatcgtagtattgatgcaaccgagcttcttggttcatggcaaattaaagagaagatagtgacgttggaagaagaaattgttgagctaaaaaaaattattgaggagaaaaaaatgaagaaaagaaaacggaaagaaaagggatcatcaagtacagttaagagccaagaaatgaagcgatcacggttggcaaccgaagggtcccctttgccaaaatctgaagcaaatcagttgtgtgagcaactgaccactattctttccgaaggcgatggttcggtccctatttctagtaatgccaacaattctcctgttacctcagctgccccacatggatcaacctgttgttttccccgaaatgggatagcccagatgggaaaggctaatgaaaagcaattagatgctcttgaatcgatagtccagtatccgaaaaatttagtaatgatgtaacgagcttcttggtt

SEQ ID NO: 53545 - DNA, 535 bp, Gossypium hirsutum
  Clone ID: uC-gsflmaxxa026c03b1
tttttaataaataaaaacctgtctttctctctcttttgctagcctacagtccaactttcaaagctaaaacaaaattatttttcttgaattttaaggatttacaagaaaaacaatgagtgcaccaaagagagcttggattgtggcagcatcaatatatgtagttgaggctttgaaggaccaaggaatttgcagatggaactattgcctaaggcttgccaagaacaattttaccaaaccattttcatctttgaagcaggaggccccgccggcaatggccgtcgcaacttccggtaaaatgagggaagagatgatgaagccagagaggtctatgaaaaaggtgatggaattaagttcatggggtcctaaaacaattaggtttttaatgtaaatcttaattggtttttaagaggagaaaaaaaatttgagtatccttactttagagatatataatttttaattaaagtttgatttaacatgttcataaccgagcggttagtaatgagcttgttcaattttataaaatttttttcctaat

SEQ ID NO: 53546 - DNA, 407 bp, Gossypium hirsutum
  Clone ID: uC-gsflmaxxa026c05b1
tccttttgattttcagccatctacctgccgattgattccttataaaaaaatcaacgatgttccaaaacgctgagaagagaacgttcacgtggacagatggtgtgaattgcaaggcaaaaagtgttagggcatcatttgctgcagatgtaccctgaactttacatcttacaaagttactcataagcaccaaaacagatgacagggagcgaggcatagcactttgcttttgatcaggaactgcaagttgatccgaaagttttacattgtgagaagaggttggccaatatcatggagcatacaagatatccgcggggcttttggatacctatggacctgagagggatcttgattctccaattgctgaggctgattctgcaagtattggtgatgaacccgactactatggt

SEQ ID NO: 53547 - DNA, 256 bp, Gossypium hirsutum
  Clone ID: uC-gsflmaxxa026d03b1
ttttatcctttcattttccgatcttcctaagggatccctgaaggccaagccctggacctaccgaaaatgcaaatggaggtttttggacctttaaggaggacttcggttatccaagaagatgatggtttgggttccattgtaaatatggaggctggatattcatgaagccattatcaaaagggtaaccaaaatggggttcattccagacctcgttgattctctttaaagagtagttttgggaaactatatttctttt

SEQ ID NO: 53548 - DNA, 377 bp, Gossypium hirsutum
  Clone ID: uC-gsflmaxxa026e03b1
tctagtaagcaaatagttgaagattggaaggttggatggagagtgaagaagaacaaggtaggtgaaggtgaacatttggtgagcagagaagaaattgcagagctagtgcgcaggtttttggattttgagagcatggagcagatggaaatgagacaaagggcttggaaaattggagaaacatgtcaaacagcaattgcaaaaggcggatccacagatattaacctagatgctttcatcaaggacattttcgaaagacaccatcattagcttgtcttagttggttccttatttgtagatccaattatgtcaacagcaatctgattcaatttgttgacaataaaacattgaattgagcaagcatggaattgctctatttt

SEQ ID NO: 53549 - DNA, 314 bp, Gossypium hirsutum
  Clone ID: uC-gsflmaxxa026e04b1
ttaaaaatggtaagaaagccttttggtatttggaagatgattgtctggatctcggatcattataacttaggttatgtcctacaagttatgcaggaaattgaaattgatgcattcatataacaagttatggggtcacctatctagagaaagatggagactggataaagctggatttgttgcccttgtaccctgagaatccacatcttgtaaacatgtttacgagacacattaccgatgtgatcgggtcgcattgctgatgaacataataaaagaaggtggagattactttgttgtacatcaaggttaaatccaac

SEQ ID NO: 53550 - DNA, 453 bp, Gossypium hirsutum
  Clone ID: uC-gsflmaxxa026e05b1
ggagcccacacaggcatcagtagtcggtcagtcactggggctttcgccatcacttcatgtgctagtgctgcgtaatagtccccccccccccccccaaccttcatcttctgcgatctggcccttataaacccaacccccctccaacctttcattccattcccaacctctctgttttctcctttctgtcacccatggaagtcctcataatgtctccctcttcatgttcttctctggtttccttttcccaggaaactccgtcttcaacccttcagcagaggctgcagtttgtaatccaaagccagcaagatttgtgggcatatgctatattttggcagacactaaacgatgacctgggtaatctgttcttggcttggggagatggtcatcttcaatgcactaaagatgctttttcaaggttgagttccagctttcacagcgaacgaactaaggtga

SEQ ID NO: 53551 - DNA, 341 bp, Gossypium hirsutum
  Clone ID: uC-gsflmaxxa026g09b1
tcgttgatctactactaagcagcaaaggccaaaaccaaaagtgttgagcctttcctatccaaagcaaaaaaggagtaaacaaaatatttataaataaataaataaaattgaatcaaaaactcgaatggcgcttaaactggcattctctcttctttcatcaactcacagtctgtgaaaacttccaacacttccggcattaaggtttttccggtttatataaattcagggcttccttaatccccccaaactttcctgagtggccgtcattttatagagggaagaggccttcaaagtttcattcttttttcattaaaaaaaatctattttacgagtggtttgat

SEQ ID NO: 53552 - DNA, 313 bp, Gossypium hirsutum
  Clone ID: uC-gsflmaxxa026g10b1
cttaaatggccggcacatcctaaagctttttcatatccggacagagctcagtacgacaatagtggcactatagtgagagaaccggcatctacaccaaggcctaacgcggccatttgctttgaaccaagcatcatgacatgcctatgaaacgcaacctgactcatcagcctctattgaaccagaacctaccagatgcatgtgctacaatctatatcctattatgaaacacgcctttactgtgtagcctgtgcacaattggacattatgcgccgcaggtaccaccgctcctgctataaccgatgcacttacgcga

SEQ ID NO: 53553 - DNA, 477 bp, Gossypium hirsutum
  Clone ID: uC-gsflmaxxa026h06b1
ttgacgcgtgggttcgctggctacaacaaatctgttagagtgtttgatgtacatcgacctggtagagattttgtacaatattcaacactacaagggaacaaagaaggtcaaacgggtattatatctgcaattgccttttgtcctactcacactggaatgctagcgacgggatcttacagccagactactgcaatatatagggaagacaatatggagctcttatatgttttacatggacaagaaggtgggataacgcatgtgcaattttcaaaagatggcaattatctatatactggagcccggaaggatccttatattatgtgctgggacataagaaaagctgttgaagttgtctacaagttatacagatcatctgaatctaccaaccaacgaatagctttcgatattgagtgctcaggtcggcatcttggtacaggtggccaggatgggcttgttcatatttatgatttacaaacc

SEQ ID NO: 53554 - DNA, 258 bp, Gossypium hirsutum
  Clone ID: uC-gsflmaxxa026h09b1
tcgttcacgcgtccgagcagaagatattgaaatggtaaaatcaaggtaattgaggaaacctgttcataccaaggtggaccatcttcgccatgggactagaggtgacactattactgtggagggaggtagcacaaagatgggattgcagaagggttgacgctgatggaccgcaagttcgacaaatgcgaactgcggaatgcctggtatgagacgagacaggaatgataatgtttaccgctagaaatgaacaagtggact

SEQ ID NO: 53555 - DNA, 336 bp, Gossypium hirsutum
  Clone ID: uC-gsflmaxxa027a10b1
ttggttttactagtatggtggaaatgtttactgtttaatgctgtttatctgcataataattctttttcttttttccttattatgtctatttagttttttagattatgtcgctgattcgattcctaacttatttaggaaccccattttaagattttggcttaatgctggtaaaatgtagcatggattccactttggtaaagcattggatgattcattgtgaggtctatctgctttggcctaatatgctttactctttttttgtttattgcttgattggtgacagggagccatggaattggcctggttaacaaaagaacaacgattttggtgccttcg

SEQ ID NO: 53556 - DNA, 125 bp, Gossypium hirsutum
  Clone ID: uC-gsflmaxxa027b12b1
tctgttttattgtgtaaaaccgagatctgagatatgggtttcttggaaacaacacctaatttttgtctgagattgggatatattgcatcttttttgtacacagaatcttgatgcataccgaggtc

SEQ ID NO: 53557 - DNA, 555 bp, Gossypium hirsutum
  Clone ID: uC-gsflmaxxa027c02b1
cccacgcgtccgcccacgcgtccggttcaaagctgtcatttcttggttatctatctctgttgctgccatagctagcaggtgatttagggcactggtaagtaacttgttccagaaatatttttgctttcattgcattgaaaatttaataatagacaaaaataaaatctttgctttcatttcattcaaaattaaataaaagacggaccatgaaattattttttggtacaaaggagatcgtagataggggaggagttccaaatgtcgagatttgaaccctagacctgatgatgtcacttataaagccgtgtctacatgaactaggtttagtgtttcaggttcatgccttcaaatttttgtttagttggttatttaacctaggcacaggtattatgaagtccatttccaaagtgtattgaatttatcacaaagagaggtggtttctctttgtttatgattgcatggttcccgtcacacactcctaagattgggacacaacttatgataaaaatgtgaagataaatcttatcagatttggttacatttttaaactaaacc

SEQ ID NO: 53558 - DNA, 298 bp, Gossypium hirsutum
  Clone ID: uC-gsflmaxxa027d10b1
tcgttctctcaaagctatgaatggagttcatcacatgtgcatcattacaagcttcatcgcgggatgacgttagctgtgattcaagatatttgatttagccctttcagacagtggattgccattgttccaactcggggtacttgccatatatattgatctttccccatatggtggtgagaatggcactccaaattcagaaattctaatgtacattgggcatattcttatcaaccagctgtatcttctcccctttggttggaccaactccaaattttcgtgaacatactttcaaacattt

SEQ ID NO: 53559 - DNA, 422 bp, Gossypium hirsutum
  Clone ID: uC-gsflmaxxa027d11b1
ttgttcacgcgtccgcggacgcgtgggctttattttgttttttgtttacaacaacattggctggacacacagtttacaccctttcagatgagtcttgatacaatatctcaagaacgatctgttggcttgtcatcaatggccgagttctaatcgtaacaaagtttctggatgaacattcagtaggagaagaggtgttgttggaattagcatggaaggatgcgacgaatgaattcaacgatatcggacattgcatgtcggtttaaaatttgctccttaagtattaagattggtgttttccagggtcacactttaaagaattatgaaacaggttggtttaaaccgaggtagcccaaataatgaaagagatgagtgcaattcattatcaaaggatgaccttgacccctaattatgctggaagtatt

SEQ ID NO: 53560 - DNA, 465 bp, Gossypium hirsutum
  Clone ID: uC-gsflmaxxa027e12b1
tcgttcgtagcccctcctcccccgatcccttccccgtccgtcatccccgtcgtccctccttttgtctctaaccctacgacggcgactacggtggctggtggtccaccaccgagtttcgatcacccatcttactctgacatgatatgcgaagctatcggggctttataagacaagatcggttcaagcaaaagggctatagcttagtacatagagttagttcacaaggacttgccaccaacacacttggccttgttgacttaccacttgaagcgctttgaaaaccaacggtatcttagtcatggtcaagaaatcttacaaagcttgcttttactgctagatcctggggtcctatcccggattctactacttccaacccttccgatgttttttctctcctggattcaaacgaagccgtggtcgttctcctaacccaaacccacatttctggtcctgcgacccttttct

SEQ ID NO: 53561 - DNA, 333 bp, Gossypium hirsutum
  Clone ID: uC-gsflmaxxa027f11b1
tttacgctgggtctgatgctgactatgcatatgttgacgctgcttctattcgggaggagttgtctagcggaccaaaccaaaggctacgcatgcctttccctttatcctcatcaacggctgaggaacagatcaacctggagcatgatcatgattaatatgatcagtggccatcacctgatgatccatcgatgcatgatgcttaaggatatgagatgagacatggtggactgactgcctgttctttacactcctcttgatggtgaggaaaagtttattcacgcatctgttactattcaggataactgttcatcatcatccttcaaattacggtta

SEQ ID NO: 53562 - DNA, 284 bp, Gossypium hirsutum
  Clone ID: uC-gsflmaxxa027g01b1
gcggaacacttctcgaggggcctactacgctagcttgattacacactaggctacctcactgggtgggctgaagatacggagggctctagaggccggcgtgtcggtaggagaacccttaggaagaccaacttaccatggcgggatgggacgcgctccttgatctgttgactagaaaacttgccaaactgttggcacgttgcgctcgcttattgttacagaagccggtgcatagacaacccatgtctatcaatcaaaaacctcccaaggggaaaagggaggcttgc

SEQ ID NO: 53563 - DNA, 459 bp, Gossypium hirsutum
  Clone ID: uC-gsflmaxxa027g02b1
cccacgcgtccgcccacgcgtccgcccacgcgtccgggttttcatatttcccctctttttttaatagaggagctcttaatcaaccgacccaatcaaattcataaattttagagttttgaatgggtacggagagaaaaaggaaggtgagcttgtttgatgttgtggacatatggtgagttacatttttatttttgttcccattatttcctttaacatatgttttgcatggtttaattattatcataagtggattgatttgccaattaaatcacttatgtaatcaatccaaatatatgtgagtattaagttgattggagcctggcaagggccaggggagggggcaggtcccttctaaaatgaaaaaattattttatttgggcctttatattttataaaattataaggaagtaaatggattaatttgatttttgaccgcaaaaatataaataataataatat

SEQ ID NO: 53564 - DNA, 334 bp, Gossypium hirsutum
  Clone ID: uC-gsflmaxxa027g04b1
gttagctatgtcaggggagccgtccttcgagcggagctcccgccgagggcgcacatggagggtgtacagcgcaagggtgattcagaaaccctagggtttctgaattgttttaggctattgggcctttgggcctgtaggaattgggttaggggtttaggttttgtctgaaaaatgggttaaatgtgatttgggctttggtaaatagattgtaataattttggacttttcaattctttgggttttattattattgttgggttttctgacgggccgggcaaatttgggcttgtacaatgaccttttacttcttttatgagattataaaattttagtc

SEQ ID NO: 53565 - DNA, 473 bp, Gossypium hirsutum
  Clone ID: uC-gsflmaxxa027g08b1
aaattgcctgccttcttctctccaaaaattccccgtcgatttcatatccccaaatcaagccaaatcgattcgccttcatcttcttccaaccaaagcgactgagaaacactagcgggaagggaggtaatctttttctgccctcatcaagcttcatcctctccgacgtttcccttccattgattgcagaggaacgaaaaatgtcatcactttcacatatttgatcttctagcaccgccgcctgtgcctctactaccagtgagaataccttgtcttctttcctttaatttctacacttcagatctttatctatgtttcccgattatcctaaatttagcggtattatttatttagtttaaatttttatttagccttcaacttttctttctcctcaaaaaataagaaaaaggaattaaggtggagaactatctgtgcttaatttcgttgtgaaattaataaaattttatactattttt

SEQ ID NO: 53566 - DNA, 353 bp, Gossypium hirsutum
  Clone ID: uC-gsflmaxxa027h01b1
gttaatcgtgaaggataatttaaatgaaaaactttcatatagagactgtgaaaagattgcaaaggatcttaatctgaccttggaacaggtacttcgtgtatattatgataagcggcaaaagcgtcttaatagatttcggggtgttccaaatagcaatggagagcagtatcaaggagaaagagataaacagtcatcttctcggaaaagaaagagatcaactgtcaaatcaatagaaggaataaaggctgatgcaagaatcatacaattaggtgaaaaggagggtggtacactatctgatggaaatgatgagctaaaagaagattatcatttaacttcttcagtgggacctgatg

SEQ ID NO: 53567 - DNA, 526 bp, Gossypium hirsutum
  Clone ID: uC-gsflmaxxa027h06b1
gtcaccctcaccacaagaaaccttctgaaaacagtgtcgatggatgtttgtcgggccaccaaactattcagaagtaccgttagatcgagcaaacttctcgcttaggaaacgttggccatcattagcagaggagaaacgtctaatggatggaggagacagaccgtcgtaatcctgattgtaacggtagtagcgtcattgagccgaatgaccgtagtgactgcaaatctgacattgaacccgtggccgaaagtcgctcctattagaaccagataaagaacgaccgccgtcatgagtaggaccggccaccgtcgtgtttaacggtacctcaaccatgttcacatgaaacggtacatcatgcatcgtacgaagctgctgattctcaaaatccaagagaaccccaatgattttttgaaacagatgtggctcagaggagaaagacgtcagcgttatcacggaatcaaaatctgatgaaagtacctctaccttttcggccttcgagacgacagatccagacgcctccaagaga

SEQ ID NO: 53568 - DNA, 448 bp, Gossypium hirsutum
  Clone ID: uC-gsflmaxxa027h12b1
caatactgtagtacagtgagaaggaaaaaaaaaatggagttgggagctcaagattatgctgataggaagaaagatatcagccaattcctgtctcaagatatttaccaagatgaaatcaaggcaatgataaatcacaagcgtcgccgtctcatcgtcaacatctccgatctacactcttttaacaacttggctactaggattctgaagaatccgagtgaatatatgcaaccttttttcgatgcggtgactgaagctgctaaaagtattgacccaaagtacttgaaagaaggggaaatagttcatgtgggatttgaaggtcctttcgtttctcgtcgcgtcacacccagagagctcctttccgaatttattggctccatggtctgcgtcgttggcattgttaccaaatgttctctggtaagaccgaaggttgttaaaagtgttcactttt

SEQ ID NO: 53569 - DNA, 349 bp, Gossypium hirsutum
  Clone ID: uC-gsflmaxxa028a04b1
tttctatctctgatcataatcaaagctccttctccattgtctgcgattgaaggaaaattaaatggataagcctttgctagatgcagaaactcgcaatggcgtgagcaggcgagatcgactgtatcggccttctgaagctattacgcttggctctcattaccaaagagcagccgccctcgtcgaactggctgagcgaaggtggtggactgcccgcacactttattgatatatcaagctccggaagtgctgctaacttctacttcatgttcattaaatgtgacattatctggaccctccatgatattgcattggatgatcaaaactctcttgagaagccgatgcagtggtt

SEQ ID NO: 53570 - DNA, 498 bp, Gossypium hirsutum
  Clone ID: uC-gsflmaxxa028a07b1
tcttttctaaaagaatcaacagatcaagctgcaacgtgttcaggcaacatcgatgccccattcgacgagactttattcgatatcgagaaagagattgatgatttattgcctgtcgaagtaaaagaacagcgtctaagtaactttgttacaagctaccatggtaggcggttgtgttgcagcaatgcctatacttaaaaagatcccaacttcggtcctatggggttactttgccttcatggctatcgaaagcttaccggggaattaattttgggaaaggatcttattgctcttcacggcaccgagtagaagatacaaagttcttaagcagaaacatgcaacatttgtggagactgttccattcaagacaattgcgattttaaccgtttttcaaactatttatttacttataatgtttcgggttaacttgggtaccgataggccgctgttatggttcctttgatgaacatgccttttagtccatgttgacaatacttgttg

SEQ ID NO: 53571 - DNA, 457 bp, Gossypium hirsutum
  Clone ID: uC-gsflmaxxa028b05b1
ttgtttcgtgggcggacgcgtgggcggacgcgggggattaaatggttacatgtgggtttattatggagttgtgaagcccaatagtattctggtagccactgttaatggctttggtgctgaccttgagcttgtatatgtcatcatcttcctaatctttgcacctcccagagcgagagccataactgccgtactttttggtgttttggatgaggtgttcccaatagcagctgtgttgataactcagatgtcctgtaatagagaaatgcatataactattgcaggcttcttgtatctggttttcagtgtacttacctatggttcacctctttctatcatgaaaacagtagtgagaacaaagagtgaggactacatgcctttcctcctatctttcatccttttatcaatggactaacttgcactgtttatgctgtgctactagagactggtttattggaat

SEQ ID NO: 53572 - DNA, 284 bp, Gossypium hirsutum
  Clone ID: uC-gsflmaxxa028b10b1
ttgtttatggaggagaataaaagtaaacaaaacaatgttaaaaggcccaagggaggaatgatcgccatgcccttcattatctcaaacgaggtgtgtgagaagttggccgtggctggaattttatgctaacatgattagctacttaacaacgcaagcttcatatgccggtaaccaaagcagccaacactctcacatacttcggcggaactgtaagctggacaccataggcatggggcatttcgtcgccgatgcatacgccggacgttactggactctaactgttg

SEQ ID NO: 53573 - DNA, 282 bp, Gossypium hirsutum
  Clone ID: uC-gsflmaxxa028b11b1
accccagcaggcaccggacagaaatagccggaaagacccacgcgtttgttttaagaacagagagaaaagcaggcaaccatcttcatcatcgtaccataaacatctactagaatcaaaagggggatcagatctcaaaagagcagtcgaagcagagggaacaatatctgcacaaaagctgaccacctaaacaccgattaggggcagctacatggaaaaacttcccaagatagccaatgacactactcaacctgaaggcaaaaaaataaatttccaaaaggatga

SEQ ID NO: 53574 - DNA, 284 bp, Gossypium hirsutum
  Clone ID: uC-gsflmaxxa028d08b1
tcgttcacgcgtccgggaactcatcagttctgctaaaagattgaagaccggcaactaacatagtgagcaacggtgaatatgacttaacattcgagccgagacataatttaggtgtaattataacattatagtatatccaactaagagactaatagggacgagtattcgatcgaacaactggactatgctcgcggattctaaccttgtaatatagggatagagccctgagtgcgtattctagtataaacactattccaaccatctaaagaattgagggtaggcga

SEQ ID NO: 53575 - DNA, 481 bp, Gossypium hirsutum
  Clone ID: uC-gsflmaxxa028d11b1
ttgttaaatcgtcgagcttatggtggagagaattcactaggtaagaagattatcctgttgttgatacgccgactccttcggattaagctcaagagtaccatcatgtgcttgtacaaatttcgactgcacagtaacagaaccatcaagaaaaccatataaactataaccattaacaatgaaccgaacctgttgctttcactgaaggaaggtgccttcatcgagcttgacaacgccatgccgaggaaaggaattaacaacacgatcagcagttaaaatagtgccatgaggttcgacagagtctgatgcatcagaatgtgtgtgtgccatgaccgaggatcagctagcgactgataccatgaatagaaatatgtaaaataataggtaaatctaattgtcttttataattgaattagacctcattaattttttaatacaaacaagtaattgtatttatagtaattgaattagcttgcttactttt

SEQ ID NO: 53576 - DNA, 461 bp, Gossypium hirsutum
  Clone ID: uC-gsflmaxxa028d12b1
ttcacgcgaccggctcggttaactcctttccctcgctcttaaaagaccccgccgtctctctctgtctacatatcactctctctatctgtgtcgctgtatgtgtgtgcggggcattccctttgccatatgctgcagatgctgatatcatatgggcggtgatgaatagatctctgcttagaaactaaggatcaatagagatgggcgcttgtgtgtctagacccgaaggctgtggtggccactggtcgaggccttctaagaacaacagtcgacagagaaggcaaacctttaagaaagggcgcactccgcgtctttgcgactgttcactctgataaggaccagcgctggtctcactctaccaacgcacctgttcaaggaagccaagagctgtggttggatccagttgcaggatttgatctcgactgcgaagaggatgatgaaagcgttcaagaggatacgttgtc

SEQ ID NO: 53577 - DNA, 548 bp, Gossypium hirsutum
  Clone ID: uC-gsflmaxxa028e05b1
ttacttccaaaagtttattcagtttcagctgacagtgaatgttgcagccttggtcatcaatttcattgctgctgtatcttctggagatgtaccattaactgcagtccaactattgtgggtgaaccttataatggacactttgggtgcactggccttggctaccgagcaacccactaatgatctcatggacaagcgacctgtgggtagaaccgagccacttataacaaaagttatgtggaggaacctcattgctcaagcactctatcaggtagctatcctactgattttacaatttaaaggcaaatccatttttggtgtgtcggaggaggtcaaggataccctgatattcaatacatttgttctctgtcaaatctttaatgagttcaatgcaagaaatatggataagaagaacatattcaaggggatacataagaacaggctgtttttggccattatcggaatcaccttggtcttacaagcaataatggtggagtttcttcagaggtttgccaatactgagaggctaagcttggagcaatggggggctt

SEQ ID NO: 53578 - DNA, 491 bp, Gossypium hirsutum
  Clone ID: uC-gsflmaxxa028e07b1
ttctttaaaccgcagaacaaccaagaatgcgaggggaggaagaaggagttggagtcagcgagggagcaatacatcgccgtcgcgacggaactcgatgccaagaagcaagagctgaataaagtcaggcaggatttcgacacggcgttggaagtgaaattggcggcgtttcagcaggcggcggaggcgcagctctcggctaaaatgcattccgagagggttaccgagctgacgaagcaaatcacggtgatgaaggaagcgattaagcaagtgaaattcgctacgcaacaagtgtacaaagagcaggagagcatagcggcggataaagaaatgttgcagaaatcttatgagagtgctaaagaggaagcggagaagaaattgaaggctgcgagggaagcgtatgatccagagctagcgagatctcttgaggagaagcttaaggaaaccacggaggaggtcgaagcgttcaagattgagatgaagaaagtcatgct

SEQ ID NO: 53579 - DNA, 507 bp, Gossypium hirsutum
  Clone ID: uC-gsflmaxxa028f12b1
tttttcacgcgtacgcccacgcgtccgctttttctcacttcttcaagaaacagacggttaaagcaccgagtaagagatagcatagataaaagaaggttgtgagtgagcttggtagctatggcgggagaacaattgcaggtgcttaatgctcttgatgtagccaaaacacattggtatcatttcacagctatcatcattgctgggatgggtttcttcactgacgcatatgatctcttctgcatatctctcgtcaccaaaattgcttggccgaatatactataatgttgatggtgcggagaagcctgtaagtttgcctcccaatgcattggttgcagctaatggtgtagtgttctgcggaacactagcaagccagcttttcttggttggcttgggataagctaagccaaagaagtgtatggtatgactctaatgctcatgacatatgctctgttgcataagtctttctttgggcaatacccttaaatctgcattgcaaccctttgcttt

SEQ ID NO: 53580 - DNA, 508 bp, Gossypium hirsutum
  Clone ID: uC-gsflmaxxa028g03b1
ttcattcgtccgcccacgcgtccgttacaacttctttagaagtttcctcctacaaatcttcatcactaccacccgctttcgcttccttcaaacctctggcgcacttcttgtttttgcttcaaaaatattgtgggtaaaagcttatagatgggtcagaaacttgatacgatgcgcccaaagccatcaaaagacgagttgctttatcaggctgcaattgccgggaacgtggatggcattaaatctctttgcagagaaggtactggccttgagtggatagacagagatggaaagactgccctcattgtggcatgcatgaatcctgaattaatagatgtggccaagacactgattgagatgggtgccaatgtcaatgcttaccgccctggacgtaatgcagggactccgttacatcatgctgcaaaaagaggcctggagcaaactgttaagctgcttctttctcgtggcgctaattttttattgaggaatgatgattgtcagacaccgcttg

SEQ ID NO: 53581 - DNA, 473 bp, Gossypium hirsutum
  Clone ID: uC-gsflmaxxa028g09b1
tctttacgcgtccgaaccggtagaatttccacccaaaaaagaaacactgtttaatcacatttcaaaggtcactgctgctcagtttgcagccaaatgctaagggagatgcaaaaaccgtagcaaaagagcaatgcccaccaactttgtttcttccaggataatggaatggcgaaacttggattgcacaaacaaattgtgggtgatctttcactgcccgactcttctccttttgctaagcttttgggttcctacatccaatccaagtctttccttgatatacgtcggttacatgttcggataatcaaatctaattttgcgtctgagacttttatcctaaacaggcttatcgatgcctacggcagatgtggctccttggaggatgccgggaaggtgtttaacagaatgcctcaaagaaacactttttcttggaactcggtcatatctgtattgacgaaattgggttacgttgatga

SEQ ID NO: 53582 - DNA, 338 bp, Gossypium hirsutum
  Clone ID: uC-gsflmaxxa028h09b1
tcgttttagcgtacagtaaactctttaaatcaacttctccttcttagatatgttataatgagggccatgggctttaaccccaaggaactccatggcatgactagcggcggctatccctctggccgtaatgggcatgtgcatggttcaaacttcggttatggcactgcttggacctggcgggcactattatcctgacaaaaaggctggacccggaagtgtaaagccttacccatcaaaagctcatctcacaaggaggtgatccctgactcaatgcgccaaggaaggcacgttattgtctcaaacatgtcccgaggcatgcctatgtgctgctccaaggt

SEQ ID NO: 53583 - DNA, 354 bp, Gossypium hirsutum
  Clone ID: uC-gsflmaxxa028h11b1
gtccaaccgctcgcttttcgcgtaaatatagcacaacggagaaaaattattctgatgtgagtgctcgatccccggcggactaggcgtacgaggtccatcctgcgcttgaacaaatgttcacggaacattggcgatatccatctacgaaaacatatctaaactatgagccatagataagtgcacccaacctgttgctaactatgaaagacggagaattcattgagcttgacagacgccgttcaacggattggtattaacatcactatcagcaccaaaaataacgacatgaaggacgacagactatgattccggatagtgtgtgcttgccatcaccgtagatcatctaacgactga

SEQ ID NO: 53584 - DNA, 185 bp, Gossypium hirsutum
  Clone ID: uC-gsflmaxxa029a01b1
cacgcgattgatttaaaatccgaagggaatcccaatttctgcggtgggcattactaccgcttacatgtccgctttttattaacctccggctatggctaccaattatgattctttaaaacaatcccttcttcctagcttcctttactcttcttcccccaacttaaatctctctggatcgactcctt

SEQ ID NO: 53585 - DNA, 355 bp, Gossypium hirsutum
  Clone ID: uC-gsflmaxxa029a04b1
tcgaccacgtttccgttcaaatccagagggaaatgggtgattcctaccgtgttaggatcagaaccgacgcgatatgaatgccattcagctattcttttgaatgaagattggataatggttatcaccttggggtttcaccccagatgactgtatttggttttttagagatggatactcctattccttaagcaatcagaaaaagtctttggtgacttgaattattgcttggagtaagggtgtcaaggttgatgctctaaaactagttttttttaattgttcttttcgaagttggtaaggtgtcatttattaaacctgctttttaaggaaatttccaccaatgttcggattctttgtc

SEQ ID NO: 53586 - DNA, 179 bp, Gossypium hirsutum
  Clone ID: uC-gsflmaxxa029b07b1
actcaattatgagatagcatgaactcatactttgatgggtggggtaatgctttaaactaatcgtggttatacctttaagctctatgagaaagctctggatagtctaaatgagaaagaattgaatgctgattatgctacaatgaaccacttcccctgttctgaagacccccattttcaat

SEQ ID NO: 53587 - DNA, 569 bp, Gossypium hirsutum
  Clone ID: uC-gsflmaxxa029c07b1
ccctctcataattcatcagcaattacacgaaatggaacctcccctcttcctttcagatgaaaggcatgaaatcatagaaaaaaacgagagcattccttcttgatctgataaagtcggagtccaaaagtcattaatccttttgtcattcctgttcaaccatcatcggtcctgatctgcctctctttccactctctccggagcttcttcaatccagtacatagagcaagcatgatacttcccttcctcagccaagatatgagcagtgttgtctgcttttcgagtcaaggtatccccttccaccataatcctttgaaaacccaaatcttccgcaaagattagggattgtagacaagcaggtgcctccgccactgtggaatccatcacatactcattcaggacttaccgagtaaaggggcactcacggatcaagtggtccactgacttcgcagcagatcgacaaacagggcaagatttatcgcagcaatcccttcgcgtctgtaaaataagtagcgtaggcagatagttattagcaatctccatattgtatcctaatttttctgccatgttta

SEQ ID NO: 53588 - DNA, 241 bp, Gossypium hirsutum
  Clone ID: uC-gsflmaxxa029c08b1
ctcttttttaataatttaagcaaactttatctttatgctgggggatggattcaccagctatgacgagcgatggggggtacaatctagcatagatctgtcagtatcccgcgagtgaatctgggttaaggaggggccagtttgcgaatgtgccgtcgccttattacgaccaccccaatccagatgtatcgtgtggtttgaggagaatgcttcatggacaatatgaggcatttaacgttgtctc

SEQ ID NO: 53589 - DNA, 481 bp, Gossypium hirsutum
  Clone ID: uC-gsflmaxxa029d09b1
cccacgctttcggggaacgggccatagcagtgagcgggggcggatcttcttctttattacaaagatggttgctttcaggtttcatcagtaccaagtggtggggcgaggtctcccaacagaagcagatcagcatcctaagatctacagaatgaagctttgggccaccaatgaagtccgtgccacatccaagttttggtattttctgaggaagctgaagaaggtgaagaaaagcaatggacaagttttagcaattaatgagatttttgagaaaaaccctaccaagatcaagaactacggtatttggcttccatatcaaaagtcgaactgtgtatcacaacatgtacaatgaataccgggacacaacttctaatggtgcagttgaacagatgtaccctgagatggcatcttcttacaaggttagggttccatgcatttaaaatcatcagaacagttactatcccagtcaaacttttgcaagagg

SEQ ID NO: 53590 - DNA, 394 bp, Gossypium hirsutum
  Clone ID: uC-gsflmaxxa029e03b1
cttttagcacttgagtatctgcacatgatgggcattgtttacagggacttgaaaccagagaatgttttggttagagaagatgggcatattatgctatcggatttcgatctttccttcaaatgtgatgtctgtcccaagctgttaaggcgtagtaagcccaacttggaagacaatgaagatgacgataacttttgcttgacaccttcatgtgcttcccccatgcaaccggtgctgtcttgtttctcatcttccaacaggaaaaagaaaggttctagggttacaacaattaccagaacaagcttgatagtacgccgccgcccaagaagttggtccctaaattggggctgaaccacttaatgctaagtccaagtccttcgttggtacccacgaatac

SEQ ID NO: 53591 - DNA, 247 bp, Gossypium hirsutum
  Clone ID: uC-gsflmaxxa029g04b1
cgctcaaggttttttctgatttgaattccccgaggatctaaatggtggcgttatttgaagtagctcggtcgcgacttgttgggtgatcaatggagaagggttgtatcgggttgttgggatctccgtggaaggaggtgtctgtccatattgtcctgtagtgagttgtgctgttgatggctgtaacggtggtggcccagataggtctggttttgactcgattcctactcagaattagagttctttttta

SEQ ID NO: 53592 - DNA, 493 bp, Gossypium hirsutum
  Clone ID: uC-gsflmaxxa029h06b1
cccacgcttccgtccacgcgtccgctgctctctgcctctgcggtgcgtcactctgctatttttgattttcagctttcgatcctactgctcgttacttattacgccgtatcatctcatcttttctctctctgtttactttggtgagaagcagatatttgttttaaagctatccgtttagcggaaatagataaagttatcgccgctattttccgttacaccgcctattgagatctttatagtggcagacggggccgatattgcaaaatagcgacccgcggcatcgatatttgaaacactgccaatactacgtgcagtaacaagcggaaagagagagactttggcggtgaaacccgaaacagcaagaagttcaaaaagtattccaactccaaaggaccgatgaagaaaaacaagaacgatactagaaagaaggggaaaggtcctcgcttgccttctgcgctacgaacggagcttgatcgcctggaccctaaatagc

SEQ ID NO: 53593 - DNA, 386 bp, Gossypium hirsutum
  Clone ID: uC-gsflmaxxa038a11b1
cttacatatttctatattatatatagtatccacccctttctttctttttctactcagcataaagtaaagcatcttacttccttttttctttagtctttgttctttaatggagttgggttcggtttcaaaagatacaagctggtgggtttatactcttccagctttctttggatccaaaaatttgttcgatgggtatgttttgttttccctctttatggcatttctttccattgcccttttttcttgggcttttgctgttggggggaccgcatggaaagatggaaggtacccatacgggaccctatctattggtgagcctggggagaatccgtgtttttggtagcctctttactttgagtccggggttggctcaccgtgcgctcgcc

SEQ ID NO: 53594 - DNA, 526 bp, Gossypium hirsutum
  Clone ID: uC-gsflmaxxa038b03b1
ccctcgcgtccgaaatgtaactggtattccttatcaatgggaaacttgcagtgatgttgttggatataactggacggactctcctctctctatgcttcctatataccaagaactaattgctgctggtattcggatatgggtatacagtggagacactgacgcagtggttccagtgactgcaactcgatactccattgatgccctgaaactacctaccattaacaagtggcatccttggtatgacaatggcaaggttggtgggtggagccaagaatacaaagggctgacatttgtgacagtaaccggagcaggtcatgaggttccactgcatcgtcctcgtcaagctttcattcttttcagatcattcttggagaacaagtcaatgccaagttacttgtattcattatccgccgtgaataagtggaaagagttttagactagttcataaatcgggttgcggaaataaaaaataatataagttgtaaaatgataaactactagcccgattaaactctgtgcaatcatt

SEQ ID NO: 53595 - DNA, 552 bp, Gossypium hirsutum
  Clone ID: uC-gsflmaxxa038b05b1
attctaaagccatccccccaaaaaaaataatttcctttttgaaccctaaatatcccttttttttccccttaaacctcaattgaaccgctcaatctcaccatgaacggtacgaaaagatttgccttatcgagctcggctgccgatgccaatgattctgctttccgcaacaaaagaataatggcaggatctccttttgatcctcaaagggcagaaccatctcaacagcagccgaatgcaacaccaccattagacccgcagcgagctgagttgtctcggcggcatgtgaaagctctcaacatccaatttgcaagttgggtgcagtcacaactgaagaatcaccctgatgagctttggcaagatggtgttagtgattacctaagtcatgcttcaaacattatggaaaagttcagtgatgttgtcaattggctcacagcgaatgcggataatggtgacagtttgtctgctgctgaatcccatataaatgaaagcaaaatggttcctgaaaccaagaatactgagattagttttttcagggaaaattggattacttca

SEQ ID NO: 53596 - DNA, 502 bp, Gossypium hirsutum
  Clone ID: uC-gsflmaxxa038b08b1
cccacgcgtccgggaactgcatccatctcatctcatctcatccaattccttcaatcaaaatccaaaccttttccatcaatttccctacttatgaaacaaactgtttgaaaaagaaaaaagaaaaaaagaaagatgagccctttcctttgctttgttttacaagcatggaatcctagctcttgtcaagtttcctccatggaaacttctcgttttctcagagactatgctgtttgggaaatcaatgcttttctttggatttctcttataactattacttattttctttcttataagctttttaagttgtttaagttatggaatcaagcttgcaaaatcccaggtcctccttctccttccttttatggtcatttcactagtctctccaaacaaaatctcacagaggtattgtcagattcacacgaggaatatggttcaattgtgaagttatgggtgagtcctaaacagcttttggtttcaataaaagaacccagaattattaaag

SEQ ID NO: 53597 - DNA, 418 bp, Gossypium hirsutum
  Clone ID: uC-gsflmaxxa038c03b1
gattgacttgatttgagagagaaattttatattttaatatccatttttcttttaaaaaacattacaccgtataaaatgccagaccattgaaccaggggtggaaaccttgttttattacagcccacctcttccttctctccctttttccttttttgcattacagaaatctccctctttcattctgttgtctctgagatggcccggaacggtggcgttgcttggatgaggacgacggagaagatagacggctacgatctttctacttctgatactgaagaagatcatgttcttgccgttgatgatagcctcgttgatcggaaagtcattgaacgcttgctcagaattttctcttgtaaagtgactgcagttggatagcggtaggagagctttgtcatacctgggatttgttgtggagttt

SEQ ID NO: 53598 - DNA, 532 bp, Gossypium hirsutum
  Clone ID: uC-gsflmaxxa038c09b1
cttacgcgtgggcagctttgtgcggagaaattgaggataatggcggacatttcgaagctcttctccttctcttgaaattacactctttcaccaactgtttagctaactaactttattcattcattcttctcgattttgccccccgtttttccctctatatttattttttctccagctctcgctcgctttctgattgtcgatttgaaaaaaaatctcttcctcttccaatggagtcctccgctgttctcggatcatttcaccattctgtatgcgctgtttcacaagcaccttgctcactcgaaaggcctggtactgcttgtatgtattctggcggctggcccgcttcaagaaaatcatgtctcgcaggcttgatatttggcgagaagaactgttttccaaaacaacaaattgtaactctaatatcatgcatgaagacacctgatgctactggaacagttccttctgatagctccaaaaaaggctcattggagaagaaaacttcaccgactgcaactttttcaaatggatttga

SEQ ID NO: 53599 - DNA, 528 bp, Gossypium hirsutum
  Clone ID: uC-gsflmaxxa038d05b1
atttaggcctctcgctcttcatatttttttttctctctctctctctcttttgttgggtggatgctgcaaaatcgatttttcgttctctctctttctatcactctctaatttttcatattgtctctgctaattttcggtggaatctgattgcagagttgtcaaaaccctagatcttgcttgtttggttcctgtatttcgtctgatttgggcatttagcggttggatctcgatgttttcgtaaccgtttcagctcgatttccgaagatcttccccattaatttacgtgaaagtttcgggagcaaatattttgcttattagaccgttagttttttcatcttcttttaattgattttgtcgatggcttcgaatcctccattccatgtggaggatacgacagatgaagattttttcgataagttggttaatgatgatgacgatgacataggccccaccgtttcaaaatttacggagggtaatgactcggacgaagctagagccctcgccaatttgactgtcagtgaagatttt

SEQ ID NO: 53600 - DNA, 419 bp, Gossypium hirsutum
  Clone ID: uC-gsflmaxxa038d08b1
ttcagtcgtgcgggttgtgcacagtgtatacgctttgtctgcagaggcatcgattagagcacaacgggcacaactagtaatactggacgcactaaatacaggaactcaagcctttctggattcaaacattagttgatgccaaacttccctcattgaggtgttggcgtacagaagacacaaaaacattgaatgttagaaccagttaccggcagatgacgtgccctgcgaaccgagcgccaataggaacggctagggcaatctatgcatgggtggaatctgcaacaagcgtgattttgaagcaaatacctgccggtggaatgagagcgagatatgctaccatcgtactcatactgattgtgctattggtgatgggcaaatcagggtgggccctggtgttgaaagtggatcaggtgctactg

SEQ ID NO: 53601 - DNA, 228 bp, Gossypium hirsutum
  Clone ID: uC-gsflmaxxa038e02b1
ttttcgcgtgggttccgcttagtattagcgatgatgtattgtccctttttaaaatgaagatcatcctcatgattttgtcttttggaaaaatatacactgttgatttactttatgtagtcatagtgtaattaagtttgtaatttcatgagagcttgtattgtacaagcgtttaacgcgcttaataatgtatgttttttcgtttttcaagaagtttaacattatttactc

SEQ ID NO: 53602 - DNA, 527 bp, Gossypium hirsutum
  Clone ID: uC-gsflmaxxa038e07b1
tttacgcgtccgcccacgcgtccggtgcttttattcttccaagggttccatcaggccttctttcttaagctttgggttttcaagatgaatcattgcaatcttcagcagaacgccaccgtttcggcttacgaagagttgagagggtttatctcaatcactgatcatcaaaagggcggtgccgttgtttgcaccaagcctcggcgaattcaggtcctcgccaataaccctaccaagccattgagattgcatatgagtcatcaagccgaggtaagcgattcgaaagctggtgcagaccttcttgatatcatcctcaataaggaggatttagggacagaagaagaacaatctatagcatcatcacctccgtttttttgtgggtcgcctccaagtagggctgcgaatccacttgtgcaagatgctcggttcggagatgaaaggcttgcacaagccctttcgactttggagattccatctccatcttcgccgtcgtcatttgcacgtaaaggagggtgtgttaggatgaaatt

SEQ ID NO: 53603 - DNA, 463 bp, Gossypium hirsutum
  Clone ID: uC-gsflmaxxa038f06b1
ccttctcgtccgcccacgcgtccgcccacgcgtccgatcaaaacttcatccacatgtcggagcttagtttgaagaaaaagtggaagaaaaggttagggttatgagatgaataatgatcaagtagacagaaaatggagggaagggttaattatccatgcatgttatcattttagctatagaatatcatttttttgtgtatgtgtgtatatatgtatattatattgagctcattgtgaatattttgaaatattgaatagaaagaagaacgagaaaggaaaaaggaaacaaggggaaagtaaagctggaagcttgaagaaggaattttagagaccttttgagctattttaagttgaagttcgcgttgaaagatgttagcagactctcgagggctgtcaatggcgaagcaatgaatcatgcatcggttgaagcagaagatagaggtcctgatcaggcacaacaacag

SEQ ID NO: 53604 - DNA, 454 bp, Gossypium hirsutum
  Clone ID: uC-gsflmaxxa038f10b1
cccacgcgtccgcccacgcgtccgcagaaactatagaaaactcaaacaatcatcaagctagttctgtggttgaaggtatgactccaacccatgaggccgctactttggatgatgctcctgttgaaaaccgagatgtggagggtcaatctgggggaaatgactctaagaaccctatacctgagccagttctttctagtacaactgaatctgctgatatagagcttgttccacaagatggtggagccttgctacaatccccggtggttcgagataaggagggtgatgttgctgagattcgccatatggtagtagatccctgtgagaccaagttgtcttctttgaaagattttactgctgaatccgccaacagggattctgctacagaagttgatggtgggaagcaattgtctgcgggagttcaaactaccaagattgacaatgttgaacattgatc

SEQ ID NO: 53605 - DNA, 267 bp, Gossypium hirsutum
  Clone ID: uC-gsflmaxxa038g01b1
cgttctcgtgggcggacgcgtgggcggacgcgtggggggaaatcatcgatgattgcggcaatggcaaacctattggactacgatgtttatgatctcgaactcactgcagtgaaggaaaacacggagttgagaaggcttttgcttgatacgtcaagcaagtcgattatcgtgatcgaggatattgattgctctatcgatctcacaggccaaaggggtaagaagacggagaaagatggaaacgaagacgagccctcggatccggtcacc

SEQ ID NO: 53606 - DNA, 519 bp, Gossypium hirsutum
  unsure (1)..(519): unsure at all n locations
  Clone ID: uC-gsflmaxxa038g08b1
tctactcgtccgcggacgcgtgggtttccccatttccaatcagacaactaaaagggattcgtccccatggcggcaaccggaccttctctgtttgtcgccagtccgttagtgacgtcaacggccggaaactcggtgaggaaccggtgcttaagctcatttcgagcgatggcggtgtctgcagatcagaaatcgtcaccggcgacggttgcaacgaggtcaacggagaagggaagatggttggaagagaagaataggaagggaaggaaggaagaagaagagttaacatcgaatatttactcgaatcctcaggaaataaccgacgagaatggaaacacgttgagagaatatttccaagagtgcaaagatttgatgatccaatcaaaggcagggccgccacggtggtttactcctttggagtgcgggtcccatgctcctgattctcctctcctnctttttttgcctgggattgatggcatggngcttggaccttttaacatcatcataaactgggaaagattt

SEQ ID NO: 53607 - DNA, 528 bp, Gossypium hirsutum
  Clone ID: uC-gsflmaxxa038g12b1
cttacgcgtccgggggcatcacaacgcattcgctatgcaactctctacactttctcttttccctttctctgttcccaaatttctgcatattaaggcgagccgtgagcgtgaatctcggtgttattttactctaaatcagggattcaatagatcaaacaaattgtccagatacatagttacaagatctcaacttggtgggactgggatccttgatgctaccaattctttatcagaaattaagccgagtccgaaatttagaggagtatgcttctatggtatgacagttatggcaggcgttttaccgtttgggatactgatagtggctcatcccttggcgctcatctttgatccctacaagacaaaattttacaatcttattccaaaactatgggcaaccgcaagtattgctcccttcttcgatatcgagttggaaggattggagaatctgcccccgcagaatgctcctgcggtgtatgtttcgaaccaccagagtatcatagacttctatccgcctgtaactctgggaag

SEQ ID NO: 53608 - DNA, 539 bp, Gossypium hirsutum
  Clone ID: uC-gsflmaxxa038h04b1
atttcttgtcttcttgtaagttctttgctatctgatgtcccagtttcagtttcattttctcttttggtctttaacattttcaaatcctttatatattatctccatcttcacaatcacttattgcaaagtataaagcacctatttcattttttttggttgaaaaatgttttatggcggaaggaaagcatcaagatctcgctctcattactcattattgctccacattatgtttttttctttttcctttttatgcttaatggttcgaatgatcacagtctcacattgccgcatttacactgaataatgcgagcttttgactctccaacgatattgcatctcacatttctccattttacgtattctctgctcaatattttactatgaagtttggttttgtgcgaaatgatttagactcttctccggggcagagcctagatggaagtttcagataatccaactctgttatctctacccattctgtgtccggagtttcatcttcaagcaagattttcaacttcaaaagaagctacaagggctga

SEQ ID NO: 53609 - DNA, 526 bp, Gossypium hirsutum
  Clone ID: uC-gsflmaxxa038h05b1
tttctaaatcaaagtaattttcaagcagattcagaacattcccatctcaagaagtgtgttcatgatttgctgaaaatgacatctgttgagggaaatacggctgagcctcggaaaactagtaatccggctgctaacactgctaagattcagagttcatcattgtcattccgaaggtggggtaggaagtatccttttatcagatatgggcttccaatgatttcgttgacagtgtttggggcagttggccttggtcatctcttgcagggcagtgaatatatctgctgtgcagagaacagcatatatcattttaactttgaggggcaaaccatgttatggcgtaaataattggctcagttctgttcacggtgtatttctcatgatcggagttggacctatggtattaggccgtcagttctgatggtggtatatagttgtaaatttttaaagttggagaaaagaattccaatgacaataggatgtaatcatatgattggaaatagaaggctatttttgcattcttgttgac

SEQ ID NO: 53610 - DNA, 519 bp, Gossypium hirsutum
  Clone ID: uC-gsflmaxxa038h10b1
tttacgcgtgggcggacgcgtgggttcgcaacgaccagtctagggtttactattgagaaattaaataagaaccaatcagaaatacccattctcaagtaagaagctatgctataaatatgtaatttagggttagggctatggccaatacatgagactaaaagtacgatttgggaatcgatcaacgaaaatgaggaagcgacaagtggtactgagaagggaggagccaccaagaagcagcagcaccaattcatcgttgacaagtagaagtgtgagatatgcagagtgccaaaagaaccatgccgctggggtcggaggttatgctgttgatgggtgccgggaattcatggccagcggtgaagaaggaacaactgcagcccttacttgtgctgcttgcggctgccataggaatttccatagaagggaagttgaaactgaggtagcttgtgactgttcatcacctcctcctttcaatggagcataatatatatgtagctttattaaataaaatcacttctcatg

SEQ ID NO: 53611 - DNA, 523 bp, Gossypium hirsutum
  Clone ID: uC-gsflmaxxa039a08b1
tttatgggccttgatgcgctacctaggcagcagcataattcatctgcacaaagatgccgttttaaaggcccttctcgacattcttcgtgtcactgtgagataccagtggaaagctgggagcaggatcaaagctttccagatgagcaaatgcaatgcgaagtaagtccctatgaagtgccgaacaaatacaaagatgtgtatgaaatctggcaacaatccccaagaactacttattcaagagacagctctccacaaaaagggaggtatagtgataatgcaaatgagaataaaatggctttagttcgtcagaagtttatggaagcaaaacatctagtgacagatgaaaagcttcgccagtccaaggaatttcaagatgcactggaagtcttaagttccaatagagagttattcctcaagtttctggaagagccaaattccacgttctctcagcatctcaacaatttccggtgttcatctctaccgccttcgacaaaacgtataactgttcttagaccttctaaga

SEQ ID NO: 53612 - DNA, 429 bp, Gossypium hirsutum
  unsure (1)..(429): unsure at all n locations
  Clone ID: uC-gsflmaxxa039b03b1
gtgttgacaagaaatgccctggcgagtcccgcttccctgctcaggttcgggtgttaacaaggaaaatctgtgagccacttgaggaggactcctttaggccaattctccaccactacgatggtcccaagttccgccttgaactcaacgtgccggaggcactctccctattggatatatttgctgaacaagatccttaagcaaacatactacaaaggacatacaaatacacaaagataaaggaagggaagaataagtagagagaatatagagagcatatntgggagttttaagacgttatctatggggtgaactgaatgcaaggatccataacctgcgagttgtaaacctttttgctcacaggattgctatggctgccatttatttgttatacagtttgtcttatacataaataatagtgtacttatcact

SEQ ID NO: 53613 - DNA, 307 bp, Gossypium hirsutum
  Clone ID: uC-gsflmaxxa039b09b1
gtttatgctgagcgtttggagcccacccctgataacgagagtgagcatccgcttcctgatgatgaaccatgggggataccacggatagtatcatggctgtagaaggcggtctcggctgtgacacaggtgttgaagcccaatcgtgtgctcccgactgtgctcttacatgcgacgtataactcaatggaatgaagcactgaatacgctatgacacgggaagcctacttgctaactgacctgatccacgctggcgattgctgctgtagctggtgctaatgaccctgtaaatgatgcatttgaaccattt

SEQ ID NO: 53614 - DNA, 448 bp, Gossypium hirsutum
  unsure (1)..(448): unsure at all n locations
  Clone ID: uC-gsflmaxxa039b10b1
tttttcctttttcattaccaagcttcgtaatttcttgcatattatcaaatatttctcataaaacccatctttaaaacccttttaaaattcatttttagcctttttctttaatttttacctttttttttgcttggtgttaactctagatgttaaagccatggatatagctcttgcaagcaccgcaccaaaatcgccagaggctgagcccgagcctgagccagtgagtgaaacaccaactcggatccaacccaccaagcctgtatctttcaccaacggtgttctcaagcgtcacaagccttaccaccaccaccaccactaccaagcgccacccatcgtcataacctacaaagaatgtctgaagaaccatgcagccagcttaggcggccatgctntagacggttgcggtgaattcatgccgtcgccaacagccaccccaactgacccaact

SEQ ID NO: 53615 - DNA, 445 bp, Gossypium hirsutum
  Clone ID: uC-gsflmaxxa039d04b1
ccttcgcgtccgcccacgcgtccgggaggccatctgggaaaccctacaaccctctcgattcctctccttcgccatcccaaaccctaatcccaccctcaatccctcactcgcctccccactcattcgaatcgctgtcctcgactcaccgattcagccctcctctcctctcattcccagtgtcgccgccatgatcgtccccaagcaccgcgagtccgactggatcttctcgacggagtccggtcatctccaactcctcctctcctcccctaacatccaacgcctcatattaatcggacaagaacaacaaccaatcatcaacggctctagttcatcttccatttaccgccgttggatcgatcccgattccctaaacaacctggagatttcgctaaagccactggtaattgcattatctcctaaaagttacttccataatgaaaacttg

SEQ ID NO: 53616 - DNA, 421 bp, Gossypium hirsutum
  Clone ID: uC-gsflmaxxa039d06b1
gtttttaatatctctcaataacaattaacaggttttctattagcttgagctgaccgccattgaagaactaaatcaaagcttgtaaaaaaaatatttgaagttgttaagagttgaaattggggtgaattaaaggtgtgggtgttttttattttaaaagaattgaattgggtttttttcagaatttggattttgggtttgttcttcgtttttctgctatggagtcaaacgcggggacattggagaccagatctaataaaacggcgttggaaagggaggaagtagcggcacttgaatcgctacaatttacagacgaaatccactgtttgatgtcggctccggcgaccgacaatgccagttccttcacggctttgcttgaactccctgctccccaagctgttcagcttattcactctccggattc

SEQ ID NO: 53617 - DNA, 482 bp, Gossypium hirsutum
  Clone ID: uC-gsflmaxxa039d10b1
tttctctgttgctctgtttacttgaggcgtggcttttggctttcattactctctctttcctctgtctcacagtggcagccatcaacaacccatcaatgaaaatgtctgctttgagccaaaaaaagaagagaaagggagatagcgagagccagtctttgtcttcaaaatgtcttctccttgtttttttcacatgattaatcatggacgttgttgccattaatactctctttctctttcactttgtatccagcttttgacatcctttgaagcagacaatatcattcatatcccactgatcgattctcttgtttcttccctctcttcttttctattcttttcttttttcctttattttattaagtttttcactctataaagccatatggatatgtgcgttaaattcccagaagattatcggtaccgaaccaggagagaaaacccatctttctcttccactctccttgattctatctaccgttcga

SEQ ID NO: 53618 - DNA, 423 bp, Gossypium hirsutum
  Clone ID: uC-gsflmaxxa039e03b1
cgcaattcccgggtggccccacacgcccctgatactggcagaacattgaaataccaccaagaaagaggaagtaaaagaaagttcgcttcagattattgttttgtttggattgtaatatctgaaaaaaaacaacttgctacgcccttgccccgttgggacttctcacaattagggtcaccaccaagctacaatcttacttttcgtgataagatagcgtctagcagtgatccatatgttgtcatcaccaccactcaacagaaagtgaaaacaaatgtggtgaaaaaaaactgaaatcccgagaggggtgatgaagtgagtctttcaatcaaagatcttaatgatccaatcgagttaaccgtgttctacaaagacacgttgggtgcggatgatcctatgggacctgcagagattgacttaaaacca

SEQ ID NO: 53619 - DNA, 479 bp, Gossypium hirsutum
  Clone ID: uC-gsflmaxxa039f03b1
ctttttcgtccggaggattcccagcagcaatcagctggatggagagactcctggaacaaggaatgttttcgagaaggtggtagtcggacactctcctaggcgaccaagacattcaaggaagttttcaatggatagtacaaattcattcatttctagggagatgggttcagagtttatcagtgactctcctaggtgtaactttggttctcccaggtttaataccagcttcaagaagatggaatgagcttccgaaatggatgagatttctagcacaagaagaatggataatgcttcacaagttggagatgatatgactgacagagtgtatactattgattctgtccataatggagtgccatatagtggaactagagatcacaaatctgggtttggaatttctgataattatgcatacactccaagggaggcatttaatctaccagatgtttgtgatcctgatatcaagaagctctacatga

SEQ ID NO: 53620 - DNA, 435 bp, Gossypium hirsutum
  Clone ID: uC-gsflmaxxa039f04b1
tttccttttttgctttatttttcccaataccggagaatcttttaaacagctgtatttgaactgatttgaaaccctagcatttggatccactttgaagttttagatgtgaagcaagcttctctctttggaaagatttttttttggatttggttgcatttgggggttgaagtggtgagaggaagtgtttgaatcggagatggcggatattgacggcgaagcggtggaagtaggaaacaatgcgaggagtgagtcgcctgtgagggtgacgtcaagctcgacgggagtacctccgtcgctgacggtgtcagcgtcgtttaaagagagtggaaggaaaggttcgtcgaggaggaaagctgttagacctagctctcatgcgggtaatgagttcattacgcttgtttacgggtcggatccggagaaagtagagcttcaatc

SEQ ID NO: 53621 - DNA, 366 bp, Gossypium hirsutum
  unsure (1)..(366): unsure at all n locations
  Clone ID: uC-gsflmaxxa039f08b1
gttaattactaaccctagagaatggacaaagataaacacgcaaccaaacgctcccgagaccgcgacggccggcatcaccgtgactccgatcaccaccacgacagccgcgattcccaccggcgatcggatcatagatcttccacatcgcgccgtgacgagcgcgagagatcttttgagagggaaggatcgagagataggaagcatcgcgagggttcctatgaagaagttgaagcgaagaggaagaggaaagagagggaagagagtgaggagaggggggagaagaaggantnaacttggagaagaaaatagaagagaaaagagagagaggcggaggattggggataaggctaaagaagatgatgaaat

SEQ ID NO: 53622 - DNA, 395 bp, Gossypium hirsutum
  Clone ID: uC-gsflmaxxa039f10b1
tttaaacggagtaggtatccttggatctcctgatttggttggacatggtggcacccaaagcattaaaatttctccattgatgaaaaaaaaaaaaaaggcctgtgaagaagggtagaagagtggtatggcttattttctaaactcgctgttttccttttcatcttttataagattatggttttcttggtcatctggtacacttttcttgacgttttgaaactttttatggcattgtaaattgctttacttactctattcgtgtcactttgttcatactttccttttttctttttcatttttaggaaatttatattcttttgtttcactttcccttaaacagtgtgacctattttatagtatctatttttaattaataaattgttgagcttaagctc

SEQ ID NO: 53623 - DNA, 511 bp, Gossypium hirsutum
  unsure (1)..(511): unsure at all n locations
  Clone ID: uC-gsflmaxxa039f12b1
tttttcgagctaagaaagaggcagaggagaaaaatggagaatcaagtgctagtggcacttctaagtctggaaaacgacatgttaaacctgtagacccagatccttatggagaaagattattgaagactgaggatcctttgtcagaagcaactaagtatttgaagttgcttcagaagaattcacctgattctttagagacgcacttgctttcatttgaagtcaatatgagaaagcaaaagattttgcttgcctttcaggctgtaaagcaattgctaaggttggatgctgagtatccggattcacatcgctgcttgattaaatttttccataaagtgggctcaatgcctgctccagcgactgatgcagaaaaacttgtttggagtgtcttagaagctgagcgaccatccatctggttctctttgaaatggctntatgatatcaatttcaggagaaaactcttactgaggcaaatgaaattttccttcgtaaacatcaagattctttgatgcat

SEQ ID NO: 53624 - DNA, 263 bp, Gossypium hirsutum
  Clone ID: uC-gsflmaxxa039g02b1
ccgcgcgggccccggcgcggtatccggggggagccccacgcgcgctgtgtttgggcgcccaatagataaccgcatatgacctgggttaaacgaaatatggatgtaaccctctcgagcatcctacacagcaacatcatccttcattttctctagaccacgccggactttgagctctggcatcgaacgcactacggaggtgcgacggacattcttatggctgggggagagaccaatatactaccctgattgcgggaaagagaccg

SEQ ID NO: 53625 - DNA, 324 bp, Gossypium hirsutum
  Clone ID: uC-gsflmaxxa039h01b1
gctcccacatctaagaaacgaagcattctgtctgttcctatctatataagaaatctgtaacaaggaaagaagaacgaaaattatatgattttttgaggctttgctaagaataaattgaaagcactggcaaacaatgttgctgttatcgagatctgttcggtgttcttgctggcagcaagtggtggcatcagcggtgggtgttacgcatttaaaaaacaatggtgattccaaaagcggagaactatcccgttcgacgaaagcagtgcaaactgtttgttgacccgcacagctcaaagaggcatgccataagagcctggagtcatc

SEQ ID NO: 53626 - DNA, 327 bp, Gossypium hirsutum
  Clone ID: uC-gsflmaxxa040b02b1
tcgtttttacagggaggctatgcgcaaggttctgaagttccatctcactcgggcacaagatcggatgaaacagatggctgacaaacgaaggtcggaacgcgaattccaggtaggcgatttggtttacttgaagctgcaaccatatcgtcaacattccttgcataagtttaaaaatcaaaagttagcacctcgatactttggaccttttccggtagaagctcgagtcggccaaattgcttacaaactctcgctgccatcatcggcccgtattcatcctgtttttcatgtctcacaattgaaaaatcatataggctcagcagtgagtgc

SEQ ID NO: 53627 - DNA, 131 bp, Gossypium hirsutum
  Clone ID: uC-gsflmaxxa040b10b1
tctctttcttaattgtagaaaatggaatgttgcatatccttgtcttaagtgttgacagtaaacatgtcatttttagttttgcaattaaggaataaaatgagatcagcatatgtggctgaagttgacgtgtt

SEQ ID NO: 53628 - DNA, 147 bp, Gossypium hirsutum
  Clone ID: uC-gsflmaxxa040c06b1
atgcatgtccttcctatatgcagccggctgttaaatcaagagatatttcgagtctcaggaatgatggccaaccaaggatttggcgaccttgaccggttgaggcatagaagccccagtcccatggcttcttcaaaccttatgtcaaat

SEQ ID NO: 53629 - DNA, 509 bp, Gossypium hirsutum
  Clone ID: uC-gsflmaxxa040e02b1
ttaactcagccccgtcggcagcccttcgtccggcaacatatcagacagttcttctaaagaacaagaccggttcctccccatagctaacgtgagtcggataatgaaaaaatccctccccgccaacgcaaaaatatccaaagaagccaaagagacagtgcaagaatgtgtgtcggagttcatcagtttcatcaccggcgaggcttccgataagtgtcagagggagaaaaggaagaccataaacggggatgatctgttgtgggcaatgacgacactgggttttgagaattacgtgggtcctctcaaggtttacctcaacaagtatagggaaaccgaaggggagaagaattccatggctaggcaagaagaccatcaccatcaccatcaccatcaatcacccacatcgtacggtttgatcagccacggtggggctaatgaattcaacaatgtaagtgcgggtatatcgtcgtcggctaacgctgccgatcatttccaggggtataacagtggtg

SEQ ID NO: 53630 - DNA, 425 bp, Gossypium hirsutum
  Clone ID: uC-gsflmaxxa040e09b1
ttcttcacgcgtccgctttctcattgcatcagagttttcactgtaaaatggcaacttattcgaaagaagctagaagagttaagttctgggttaatggcgattgaaaactgtggttcaagttctgctcaaaacatagaggtcttttctgcgttggttccttccattttagtcaccgtaaatgaatgtcactgtctcgcaagagcatgtgtggatctttcttatagtgggaaactcttgatgcaaagctacctcgatgtaatacttgctaaattcgacaaccatgtgaaggatctttctgggttttacactactgggattttaagccatggtttcgccattgttgtttcaaggcccggtgttactgctttcaaagatgacatgaggttttacataagggatttatttacaagaatgaagaatgggga

SEQ ID NO: 53631 - DNA, 512 bp, Gossypium hirsutum
  Clone ID: uC-gsflmaxxa040f01b1
tttcactcgtccgcggacgcgtggggccacataagccggaaaaattctaaatggctacaggagaatctcacagatatggatacgaaagtcaaacaaatgatcaagctcattgaagaagatgctgattcctttgccaggcgagcagagatgtattacaagaaacggccagagttaatgaaattggttgaagagttttatcgagcataccgtgcattggctgaaagatatgatcatgcaactggggtgcttcgtcaggctcatcggaccatggctgaagtatttccgaaccaagttcccatggtgtttgcagatgactcgccgggaggttttgctccagaggttgatccctgtacacctgagatgacgccacttgtacgagcatatttggagcctgatgagctgcagaaggatgctgtggggatctcttcgcatgctatcaagaggaatgtagcattctcagaagaatctgaatctccaatgagcagaaagggtctgaaacatttcatgatgta

SEQ ID NO: 53632 - DNA, 520 bp, Gossypium hirsutum
  Clone ID: uC-gsflmaxxa040g06b1
ttcacgcgtccgcagagaccgatatggaaaccctggttcgatcaaacttcccccgtactaattcccgtgctttagacaatcccttatccttatccgccacgcctccaaatcttgccaataagacccattatccacgtctccatgttcgtcacgagttgcccaaatggtggcctcaacagctgcctcagcgtaacactgcttccatctttgattccgagtattaccagacgaaggccaatagattaatcaaagcaatcatcgacaatagattgggtggaaaagacttttccgaggaggatataattcaaggcatccggtgtgcgtgtctccattgacacaacaaacacacgggattcattatatcgtgcagcggttgagttggttttaaacgtttgctgcagagattatgcagggcatcaatcaactctacaaatgttcagattgatggtgaagatgctcgagaattccttgctgggctagctgaaaatattggacttgacaatatccgtgcttctagatg

SEQ ID NO: 53633 - DNA, 432 bp, Gossypium hirsutum
  Clone ID: uC-gsflmaxxa040h10b1
ttctcgacgagttcttcaaaatccagatttttaaccaaaaacaagaatttcccaggtctaaaaacgttaaatccaatcaaatccaggaactggggtctaaacgtgagtgccccatttagagttgcatccgttgaagaagatgagggaaggaaagagagaaaccatggtattaatggatttgaggaacaagaacaagaggcagggttcgaccctggggcgcctccgccgtttaagctggctgatataagagcggccataccgaagcattgttgggtgaaggatccatggaaatctatgagctacgtggtgagggatgtcgctgtggtgttaggccttgcggctgctgcggtctatgttaacaactggattgtttggcctctttactgggctgcacaaggaaccatgttttgggctctctttgtcttgggcatg

SEQ ID NO: 53634 - DNA, 318 bp, Gossypium hirsutum
  unsure (1)..(318): unsure at all n locations
  Clone ID: uC-gsflmaxxa040h11b1
tcaaagctcacgttgcatggatgcatggattgctgtcattagtccaaaatgagagcataattggaatgatttgttgaaacattatatattagtaataaattactaaaaagtcaaaaaaccgataccaattccaaaatctaccctaaattaaagctacttttatttccattattaccttctttttttaattatttctcatccctatatattgtgaaaagaaaaaacctttttgttatcaattaggttaatatttgatatattgtaattgaaaattgaagattcaataccattaataaatattttctttatttcaattna

SEQ ID NO: 53635 - DNA, 487 bp, Gossypium hirsutum
  Clone ID: uC-gsflmaxxa041a05b1
attaatattaattattaataattattattatgggtaaaattgaatccaacttggtcaacacaccccatttcaatcccttaaaccctcaagagtttagaaaacaagctcatgaaatggtggatttcattgctgattattatcaaaatatcgagagctacccagttttaagtcaggtgcaaccaggctatctccgggctaacttgccgcaaaacgcaccgtctctgcctgaatcccttgaaacgatccttgaggacgttaaaaaccagataatcccagggatgacgcattggttaagccctaatttctttgctttttttccttcaactgttagcactgccggtttccttggtgaaatgctttgtacttgctttaactccgttggtttcaactggattgcttccccggcggcaactgagttggaaatgctggtcatcgattggctggctgacatgctgaagctgcccaagtcgttcatgtttcaaggtac

SEQ ID NO: 53636 - DNA, 278 bp, Gossypium hirsutum
  Clone ID: uC-gsflmaxxa041a07b1
tgtttttcagtattgaaggaggcggctttgcttcagagatgaaagatcacctatcaaacctgtaagttattcatttgtttgtgtggaagaatacattattcatagaaccttcaaagttcccaaaagataaagggaagtgaaaggaaagaaaagaaaagggctgatttgtacttgacatgaacttgaatttgtaccattatagcatatgttacgacggtaatcatcctcagtttttatacgagagatgttttccaaattcagatcgtactttgttttcc

SEQ ID NO: 53637 - DNA, 492 bp, Gossypium hirsutum
  Clone ID: uC-gsflmaxxa041b09b1
gtttcaggcttagaaaatttggggttttgattgtaatgtgggttttgtgttgagtgctttcctattgccatggattcctcttttgaaggagttgcgctcgatccatcaaaatgtagtaaattgagcatggatgaaaaacgagaacttgtatatgaattatcgaagaggacaagtagagcctctgaaatgctacaatcatggagccgccaagagattttacaagtcctatgtgccgagatggggaaggaaaggaaatataccggtttgactaagcttaaaattattgaaaacttgttgaaaattgtagccgaaaagaattcaggggatcatgaaggtgtgacggatcccgaatcacattcatccctatcaagtggctcgagattatccaaaaggcaaaggaaagctgattatccttctcgactgcctattccaggtaatgatcctgtaatccgtaatggcagcaatggcatgattaatgctattttttgcaaa

SEQ ID NO: 53638 - DNA, 495 bp, Gossypium hirsutum
  unsure (1)..(495): unsure at all n locations
  Clone ID: uC-gsflmaxxa041d06b1
tggacgcgtggggttcttgattgattgatcaagaatcatctaagggtcattaagatgaagtctttgctgtttcaattcatattggtaccatttgttatcttgaactttgtcaacaatgtgaatgccggtatcacgagtagattcattcgagaggagtggccatcggtcgatatccctcttgatcatgaagtatttgcagttcccaaaggatacaatgcacctcaacaagtgcatataacacaagggaactatgacggaaatgctgtaataatctcatggattacatttgatgaaccagggtccagcaaagtacaatatggtaaatctgatacgaactatgaattcagtgcagaagggaaaatgacaaactacaccttttataaatacaattctggctatattcatcatgttctcgttgatggccttgagtatgataccaagtactattacaagactggngatggtgattccgcacgagagttntggtttcaaaca

SEQ ID NO: 53639 - DNA, 489 bp, Gossypium hirsutum
  Clone ID: uC-gsflmaxxa041d11b1
ttttaaaatttaaatataaatgttatatacattgttgaaattaattcgtacatggttatatattgtcgatattgaattgtttatgcatataggatgccgaattggatttgtatatgattatatattgccgaacatgattcatgaatggttataccttgctgaattgtttggtatatggatataagttgtcgaattgattcgtatatgttgtaccttgctgaaattaatttgtacatggttatatattgtcgatattgaattgtttatgaatataggatgtcgaattggatttgtatatgattatatattgccgaacttgattcgtgaattgttataccttgccgaattgtttggtatatggatataagttgtcgaattgattcgtatatgttgtaccttgctgaaattaatttgtacatggttatatattgtcgatattgaattgtttatgaatataagatgccgaattggatttgatatgattatata

SEQ ID NO: 53640 - DNA, 499 bp, Gossypium hirsutum
  Clone ID: uC-gsflmaxxa041e04b1
gtttgaccaaattggtgttgtttcagaacttgattcatgaactcataacaccgttgctgatggctttcgggctgtggttcacattgtttgagcttttactcaagttgtttcttatcttagcctttgtgaaaaagggcagtgcgggaattacaagtacttttactcgtacgaaatggcaatcttttgatatccctcttgaccataaagtacttgcaattcctaatggttacaatgctccgcaacaagtgcatattactcaaggtgactatgatggaaaagctgtaatgatatcatgggttactgctgataaacctgggtcttctagagtacagtatggcacatcagagaagaaatatgactttaaagctgatggcacagtggctaattacaccttttacaactataaatctggctatattcatcactgtcttgttgatggtctagagtatgagaccaagtactattacaagattggtgaaggtcattcatctcgagaatt

SEQ ID NO: 53641 - DNA, 411 bp, Gossypium hirsutum
  Clone ID: uC-gsflmaxxa041e10b1
ttcacccagagacgaggaagggcgtagtaagcgacgaaatgctggaggagggcttggcgggggtgccggtttaggaggtggagctggtggtggtgctggaggagggcttggtggtggtttaggaggaggagccggtgggggtgctggaggagggcttggcgggggtgccggtttaggaggtggagctggtggtggtgctggagcaggtggcggtcttggaggagggcttggtggtgggggtggtgcatgtggtggtagattgaggaacgaaaaacatattgacctcgttgggggatttgtgttgactcatgtaccggaagaatatagggggatgcacttggtacatatataaaggacccctttgttgctttagctggtcaaattttgaatggaacatcttttgggtctgtt

SEQ ID NO: 53642 - DNA, 399 bp, Gossypium hirsutum
  Clone ID: uC-gsflmaxxa041e12b1
acgcgtgggcggacgcgtgggcggacgcgtgggcggacgcgtgggcggacgcgtggggttttagagaaaaataaataaatgaatggtacttttttaattttttcactaaaagtttgattattgtataattaggttttattgacggtattggttcctcgcataaacaagtaaagatggataaaacttgaagggggtatttgctagttttgaagaaaaaaggggaaatttttcggggggttcaaaggcctaattttcatgtaattttggttcatataagagcttggttttgtgggtaaacaagtttaaggaggttaaaaaggcttgttttttgtttgtatggaaagaggggtagccggaaagagtgtaccgccgaattcatttgataaatctaaagttttg

SEQ ID NO: 53643 - DNA, 498 bp, Gossypium hirsutum
  unsure (1)..(498): unsure at all n locations
  Clone ID: uC-gsflmaxxa041f06b1
cggtcgcgtggggaaaaataattctgattttgatctgtgcttgacttggttgattctcagatttggcagttctaagtcagtagcttggcagagagaaaaaagaatgttgaattctgggaataatttaagccgagggaatgcggggttgtcatcagatatgccaccattacctcagtgtttgcctttggaaccgatttcattaggcagtcagaaatatacacggtctggagagttaagccgggtgttgggcgttcctcttcgaaacagtacatcagaggatcattcttttggagtttcacaccctaagccttcccctccagtggcaacagaagagcttaagaactttaaggaaagtgttcaagatacctccagaaaggccagggatagagtaaaaaagttgcgagagtcaatttctaaacttgaaaggtatagagaagctttaagctcaaagaagcgacaacgaagtgatatttcaagtgagagaacangtggagtaag

SEQ ID NO: 53644 - DNA, 467 bp, Gossypium hirsutum
  unsure (1)..(467): unsure at all n locations
  Clone ID: uC-gsflmaxxa041g05b1
ccctcgtgtccgcccacgcgtccgcccacgcgtccgcggacgcgtgggcatcaaccaaccataaactgctttttgtctctctattcattcatctctatccccatctccaatttctctcttcttcttttttctttttccaattaaaactttccctaaacccacaataaaacaacaccatgagtcgcttctggactgtgctctccaatcttcatgctttagctgggcctgtggtgatgtcgctgtatcccctatatgcctcagtgatagctatagaaacaccagggaaagaagatgatgaaccacggcttgcttattggatcctatattctttgctaactttaacagagatggtgcttcaatcagcattagagtggataccaatttggtacacagcgaacctagtgtttatggcatggatgggattaccacagtttangggggcagcttttatatatgaaagtttgtga

SEQ ID NO: 53645 - DNA, 518 bp, Gossypium hirsutum
  unsure (1)..(518): unsure at all n locations
  Clone ID: uC-gsflmaxxa041g06b1
ttatgtcttagaagttggagctgatttttatgttagcaatttacataaatggttcttttgcccgccttctgtggcatttttatactgtaataaatcgactacatcgtctgatttgcatcaccctgttgtttctcacgagtatggaaatgggttgcctattgaaagctcctggactgggactagggattacagttctcagttagttgttcctgcagttttggagtttgttaacaggtttgaaggagggattgaggggataatgaagaggaaccatgatcaagtggtgaagatggggaagatgttggttgaatcatgggggacaaatttagggtctcccccggagatgtctgctgcaatgattatggctggtttgccgtcgaggttgtgccttaatagtgagaaagatgctttgaagttgaggtcacatctgcgggattgatatgaggttgaagttccaatctttcatcaggttccaaaggatggngaagagggtgttagaaataacgatggatttatta

SEQ ID NO: 53646 - DNA, 121 bp, Gossypium hirsutum
  Clone ID: uC-gsflmaxxa041h11b1
attctcatgagtccgcccacggatggggggagctaaaaccacgtctgggtaactcacgggtctcctgctgcaaatgtgcgaaatatgtgatccaaggcgacattgcagtgaatgcggcaaa

SEQ ID NO: 53647 - DNA, 390 bp, Gossypium hirsutum
  Clone ID: uC-gsflmaxxa042a06b1
tttttcacttggagcttcaaataatataaattcaaattaagcatttaaacccccccccccaaaaaaaaaaaaccccttccattcttcgacactgtgattacaaaagatcacattttttattttcggtggggtttaaggggtaaagataaagccattgcctttagtcctttacccccaccccatttatttattaaaaaaatagaaactttactgttaattcatagaaaaattggatgaccgtgggaaagtgaaagacacttggttggttggccccgttttaaaaaccctttttttttaaaattggggggggcaggggaaaagaacggtgaataagaaaaatggggggcccgaaaaagaaaatgaaaccgactggttgggggaaatgggaat

SEQ ID NO: 53648 - DNA, 304 bp, Gossypium hirsutum
  Clone ID: uC-gsflmaxxa042a12b1
agctctcaatataatacaacacttcaaatgtgagcatttatacccccccccccacccaagaaagagcccgtgccatgatccgacaactgggattacgggggccagagctctctattccacggtggggtgaaaggtgtaaagataaagcccacggcctctaggaccttacccccaccccgaagatttcgtacaaacggtggaaacaaactgctaacccatagaaaaaatggaagccggtggaaacgagacagacactctgggggcagggcccgataaagaaaaaaagagctttgaaactaagggg

SEQ ID NO: 53649 - DNA, 491 bp, Gossypium hirsutum
  unsure (1)..(491): unsure at all n locations
  Clone ID: uC-gsflmaxxa042b01b1
tttttgtattaccattttgaagtttttattgtatttgtaatgtagttaccactgtttcatgtcattttctggtcgggttactcttcatatgaatagattcatgtattactagcagctgactgtagatgcagaaaactattttatttattcctagtaagtgatttctcatgcacattgtgctccaaaattgacacacctacaatagaatatttgagctgaggcccttcctgcaaaaggaatgtaggtagcaatggcttcgtcttccctactcctaattttctatctgggagtgtgaaagctctctttctgcaggtttgctcataaatttctactaagctactagttttaaacagtgaagttaacctgaagtaaaggtcattcagaattccgtaagttttactgccttttgcatgcttgattaatagcaaatggctgaaagagagaagtgaagttactatgatgattgnnggtatggagtccatggcaagaac

SEQ ID NO: 53650 - DNA, 450 bp, Gossypium hirsutum
  unsure (1)..(450): unsure at all n locations
  Clone ID: uC-gsflmaxxa042b06b1
ttttgtttcatgatgacacagatttggtcgtggagtgttggaaagatgaatagcagaggccggaattcttttcagtctaagaaagttccatggaagcatgaaaaagaggaggctgaaatgcaggggaacaagccaacaattgcaacaaagacaatgaagaatcgacgagcctcaagcaaagagagaaaaaaggctttacaacaagatgttgataaactgaagaagaagcttaggcaggaagagaacattcacagggctctggagagagcttttaaccgacctttgggagctttacctcgtcttcctccctatctccctcctcctacattggagcttttagcagaagtggcagtactggaagaggagattgttcggctggcagaacaagtggtgcacttcagacaggatttgtatcangaagctgtgtatacctctacataaaaaggaaca

SEQ ID NO: 53651 - DNA, 492 bp, Gossypium hirsutum
  Clone ID: uC-gsflmaxxa042d03b1
ccaatagaaaacatgaaagaaacgaacgaaatctctgttctgtttcagattcaaccaaaatttatcagcttgattactcttttttgaagttgttcgatttgcgggtggataactgctcattagaggaagacccatattgcaatatgttgggaaatgaggtttagatttaagaaatggggtgtgttttcggaagagaggtatcttctgggattgtttcagagtctagagcgagtaggaatgctagctttgaatctaataggaaagtagagcatgttacggttgcgaagactgatgctagtgctgtaggggttgaaaatgagggtacccaaaaggaggaaacatctgatggggaaaggaaacaaacgggggaaagaagaaggtcaaagccaaaccccaggttgagtaacctacccaagcattctcgtggagagcaggtggcagctggatggccttcgtggctgtcggatgcctgtggcgaggcacttaatgggt

SEQ ID NO: 53652 - DNA, 385 bp, Gossypium hirsutum
  Clone ID: uC-gsflmaxxa042d10b1
ttgttcacgcgtccgattttttttaccctctaaattactcaaaaaaataagtaaccaatctaacacgaaatgtgtgaggaaaccatacaaatttgagcataatgaaaaggattgaaaatataactgcatcggtttcaaccgttccgttccaaccaacacaaaccatcccagtaataaatcgatgcaactctcccttttgcactagctaaagtttcgatctatatcaatcgcactagtttattctgctcaattccaattgcaccgaccaaaacattgtacattcattgatgtatgaatattttatatttgaatatgcatatattaaatattttttaaaaataccgataaatttggaacaatacattgaaataaactgatacaaaag

SEQ ID NO: 53653 - DNA, 346 bp, Gossypium hirsutum
  Clone ID: uC-gsflmaxxa042e07b1
tttcacgcgtccggtccaatttactgcaattttattagaatatgtggcaaattaactagagcttgaactttttttttgcatggactactttctcttacctttttttttttttggtggtggttgtatggtttagcaattctatgaaagtgtgtcgagcaaggcaagatcaaagccaagaagcccttctagatcctcatcaaatgaggaagaccctggtcagcgccttgaagcaaggctccaagctgccgagcagaaaaggttgaacattttggcaaagtctcaaatgcgcctaaccaagttagatgagttgcggcaagcggcaaaaactggtgtaaaaatgccgttt

SEQ ID NO: 53654 - DNA, 349 bp, Gossypium hirsutum
  Clone ID: uC-gsflmaxxa042f03b1
tcttttcgtggagagactgtcacccttgcacagaagttggatgcagagatccagtctatgccagatgctcatccgttcgaagagacacggtactgcaacacaggaaactcacagtttgctggtcagcagtctgtagctagatttggagaggatcgtgaactatgcgaccatccacgccattatggacagaagggaaagacagggacgcttaagagctgagtacattgaactgactagggcgataagcgagcaaaggcttagacgagcgactagcgcctacattcgtagacaaagagtcaagggcctacgagatactatggctgccgtcatggaagctcgggcaggattt

SEQ ID NO: 53655 - DNA, 433 bp, Gossypium hirsutum
  Clone ID: uC-gsflmaxxa042f06b1
ttttctcgtccgcccacgcgtccgaaaaaagtaagatccatggtttccctgcaggtctttgtactagtttaggtgttggtgggcatataacgggaggtgcgtatggttctatgatgagaaaatatggtctcggtgttgataatgttatcgatgctcgaattgtcgatgttaatggacgtgtcctcgatcgagccgctatgggtgaagatcttttttgggcaatccgtggtggtgcaggtggaagctttggcattattcttcaatggaaaatacagctagtaccagtaccatctaccgtgacagtctttactatcaccaagtccttacaacataacagtaccaaaatcttccatcgatggatcgaggttgccgataacctcgacaacgacctttttattcgagtaaatcatccaacggcatgatcaacggcgag

SEQ ID NO: 53656 - DNA, 502 bp, Gossypium hirsutum
  Clone ID: uC-gsflmaxxa042g01b1
ttctttgatacgagtactgatgttgctttcatgggctacctcaataggtggttcagcagtcgagtgcaccaccgtgagagaactaatctcgttctgtgccacctttatcagcaacggttcaccagatccttaccctggtacaccatgttgcgaggctgtcacgaacctctacatgatgactcattccactgacaataggagatcactttgtgggtgcttaatggggcttgttaccgctaacaattctaattccaccgctatcgctacgttgcctggcttttgtggtgtcccgctcggtttcaccatcggccctgataccgactgcaacttcgttccgtgacgatgagtacacaaagtggtggcaatgtggcgttgaaaggagaaggtttgctctaaccattcaacagtttcatatgaattttttgttcaagatttgaacatggaaaccgtccggaaacaccagtcccggctatcgaacagccattccttctttcatcactgt

SEQ ID NO: 53657 - DNA, 470 bp, Gossypium hirsutum
  Clone ID: uC-gsflmaxxa042g04b1
ctctaagtggattttattgattttaggcttccactgtttgttttgcttatgattagttatcttttggagttttgaggtttccttgtcttcttttaaacagaggatgccaaactatttagtcatcttgactatcaattgctgagaacttattttttggattaaattgcagagaaatatttatttggtttgggtttttctttttttatattgaaaattattgattcattgagtttgttattttgtgggatttgatttgaccctttcgctcaaggattgaagttcaaaatggtatagcgtataactaggggaaggatacactgcaaatggtatatcgtaaatgtcatttagatattgacacagttcgtgttgtctcgtgttttcgatgaatccaaaactaggattcttattgtcagttgccttggacatgaagaagttattgcagcacattagagttgatatcttaaccgggc

SEQ ID NO: 53658 - DNA, 501 bp, Gossypium hirsutum
  unsure (1)..(501): unsure at all n locations
  Clone ID: uC-gsflmaxxa042g06b1
ttcttgcgtccggattttgattggagcgggaaacaaggtatcaacatggaaagcggggctgcggtggtggagctacaaagaaattcaacaaattttgcaaacatagtagaagagatagtgaagctggaaaagaagatattccccaagcacgaatcacttgctaggtccttcgatcaagagctgagaaagaacaacactggattgctttacatgatggatcttcatggagaggttgtcggctatgtcatgtattcttggccctcttcactttctgcttccataacaaagcttgcagtgaaggagagtcgtagaaggcaaggccatggggaagcattactaaaagcagcaattcataaatgcaggaccagaaacatccatcggatatctcttcatgttgatcctttgagaattcctgccatgggtctttacaagaagctnggttttcaagttgatagctcgatcaagtgttactactcangtgatagagatgccataggatgt

SEQ ID NO: 53659 - DNA, 413 bp, Gossypium hirsutum
  Clone ID: uC-gsflmaxxa042g10b1
acgcgtgggcttttttttcaaacccccccattattctctcttgttttcaacacccccctccttttccttcttatctcactttcctttcctccaaaaaaagcatctctgcaattccctaaaaaaaaagggtttcaagtgcctcacaaatgaagaagattgtgctgaagttggatttgcatgatgataaagccaagcacaaggctctaaaaacagtctcgactctttcaggaattgataccattgccatggatatgaaagcacagcaattgacagtgattggaacagttgaccctgtgaatgtggtgagcaaattgcgcaagaactggtcgaccactatagtatcggtagggccagcaaaaccgccggagaaggaggagccgaagaaggaagaacccaagaaagaggagcccaag

SEQ ID NO: 53660 - DNA, 296 bp, Gossypium hirsutum
  Clone ID: uC-gsflmaxxa042h08b1
tttttcatcttgatttacacatcacaccaacacaaatatccctacactctgaactgatccctattgtttcatttcttcaactattgttacctctgcttcaatgggtaacttgagcttcgtccttggcatcattggtaatgtaatttcaatactgctttttgcttctcccataaaaaccttttggggggtgataaagaagaaatcaacgggggattataaaggagagccctacataacaacccttttgagcaccagcttgtggactttatatggaatcatcaatccagatgggttac

SEQ ID NO: 53661 - DNA, 356 bp, Gossypium hirsutum
  Clone ID: uC-gsflmaxxa043a07b1
ttctcttaaattgtgtgaagatgaataaactgcaggcggcgtaaaggttatactgggacgtgacgtactcgatacgcatccgctagctagattatctggaagcattgcacggtgttacgtttggccgtggttgtgtggtggaaacacgagaacttgagaacctatactgtaaagataattgcaacagagaggcctgcagtaaactccacagaacccagatcctgctgcataaaggatgaccatagacacacacggacttctccagaacatcgaaactacacgctcacaacaacctgcttaatagaaaacgatcgatgaggtcctacgataaacacatgcgctagggcgacttatcg

SEQ ID NO: 53662 - DNA, 267 bp, Gossypium hirsutum
  unsure (1)..(267): unsure at all n locations
  Clone ID: uC-gsflmaxxa043a08b1
tgtcttagatgtagtaggcaactcgttgacatgatccattgctacaaattgacatcaatacatcacatctgtgaacttggtaaaaaatatgaagatttatgcattcactttggcatatgcttccatgtagaaaatatgattcggtttcctacaaaaggaagagccatagccattcattctttttctaaataacatctctcatttgttagtgatggaattccaattttatatgaataaaatttaaaatgaaaaatgcttttcgcncat

SEQ ID NO: 53663 - DNA, 221 bp, Gossypium hirsutum
  Clone ID: uC-gsflmaxxa043a09b1
ttagaactaaaggacccacccgccattttcttagcatttgtacggccgtttaaccaatcattcacgatcacggaccgacagagcctgctggggacgtagatgctaaaatgaaccgtgggtggtcgatacgccctacacaaactcaacttgagggtacagcgcccatttattcaccaaaaacttgaagttataaacctggtgcagggcttaatatacagggc

SEQ ID NO: 53664 - DNA, 194 bp, Gossypium hirsutum
  Clone ID: uC-gsflmaxxa043a10b1
ctctctcgtacgcccacgcacacaatagcccgtggatcttttaaaaccatcgtgggaaacaccccatgcacacgcttcaaaaatctttcctcgagacgatatctacctcttcctaaccactcaacgtgctgaacttcctgcaagatcaaattccatttacaagaccattggttcagcccgccttttctacaaag

SEQ ID NO: 53665 - DNA, 409 bp, Gossypium hirsutum
  Clone ID: uC-gsflmaxxa043b01b1
tgcatggacaagggtttgatgactttgatgatgaggattatatcaatagttacaaggtagactctcagcaaaataatccaaggcagaaagcttcctcgaatgtttatgttgacaaggaggtgttttctgaaccagaaagaagtaggggctctaacttcgttcgtaaaaatatagctttatccggctccgaggatgacttatattttgattcacatgaagaactttcagctcatcctaactggaaatcgagtcatgtagctaattcgaagcatataggtagaattgcgtcaaaagacttgagttttgactcagaagaccatgatttggattccgatggtgatgatggttttggcaatttcaggtccaaacagtggaaagaggacaaacggagttatggtagaagcaaatc

SEQ ID NO: 53666 - DNA, 385 bp, Gossypium hirsutum
  unsure (1)..(385): unsure at all n locations
  Clone ID: uC-gsflmaxxa043b04b1
tttgttacaatgcttggttctcgagagacttcattggcaaatccaccagatgatgatcaagatgccattagcatatgtaggcatgctaaaggagaagacaggaattgggaatctgatactggcacatcagttatttccggtgcaaatttggctatatggcttctttctgtccttgcttgtcatgatgaaaagagtaaaatcacaataatggaagctggagcagttgaagttgtcactcagagaatctcccaacgatcttcccaatatgctcagattgattttaaggaagataacagcatatggatttgtgcagtattgtagncgatcttattccaagatagagatatcattcgggcacatggaacaatgaaatctttaccagtac

SEQ ID NO: 53667 - DNA, 426 bp, Gossypium hirsutum
  Clone ID: uC-gsflmaxxa043b06b1
cttctctctctctcccaacccacatttgccaaaagctattcagtttcatcgctgtgtttttgtttttgtgtttttgtgtttttttttatcctttgctggcaacagtagattaggcgagaggaaaaaagagtgagttttttttagatggacacgtatacagttcatctagcgatggcggctctggtcggagcttcgttggtggcagtgtcggcgtattatatgcataggaaaaccttaaatcagttgctggagtttgccaagacggtggagagggaaagggaggacatttccgagggagaagagtcgccacagccgcagcactccaaaaaacggcgcggccaacacttccgctggaaggggaacggatactaccgccgcggttcggcgtctttgccggatgttactgtgatatccggcggatttgat

SEQ ID NO: 53668 - DNA, 201 bp, Gossypium hirsutum
  Clone ID: uC-gsflmaxxa043b08b1
tttcactccttcggcaacactgcccgcttaagtggttattttagcctctggcctgcacatcctcgcagcaccgttgccgccctataaaagaagtttagcttccggtacctcgtgccagcttgagtaggcatgaagcctaacaccactgctttgttgccacaaattagccgacttgttttacacccttataaataatagtgg

SEQ ID NO: 53669 - DNA, 460 bp, Gossypium hirsutum
  unsure (1)..(460): unsure at all n locations
  Clone ID: uC-gsflmaxxa043b09b1
tttaaggtctctcgccacctatttagatggagagaaagaagtggcatatgcagattactatgaacgggccctcacaaatggtgtactaggcatccaaaggggcacagaacctggagtgatgatttacatgctaccacaaggtcgtggagtctcaaaggctgtaagctaccacaagtggggaacaccatttaattcattttggtgctgctatggtacaggaattgaatcgttttccaagttaggagattctatatatttcgaagaggaagggagcatccctagtctttacattatccaatatgtatcaagtactctagattggaaatccggaaaaattgtgctcaactagaaagttattcctgttgtttcttcagatccataccttcgtgtgacgttgacttcctcttaaaagagggatcggagcaattatctactttgaatntgaggataccaatctgga

SEQ ID NO: 53670 - DNA, 167 bp, Gossypium hirsutum
  Clone ID: uC-gsflmaxxa043b10b1
ctggttacaatgcttggttctcgagagactttgtgtttttcaaaccagatgatgatcaaccactcccttaatcatcttccgcatgctaaaagacaacatacctattaataaatctgatactggcacatcagaatattcatctgctactgtgataggctatattcact

SEQ ID NO: 53671 - DNA, 336 bp, Gossypium hirsutum
  Clone ID: uC-gsflmaxxa043b12b1
tcacgcgtccgcccacgcatacgttccgacggcaactaaagccaatgcgtgagaacatgaaatccctggttcacgttgttatcgatccgttgagaacgacagaacattctgcattggcaaagaaatacagaatgaaaagaaatggacacaccaaactttaccactagcagacaagttaaggcacgccaacattcaaatgatggcaatgatctttcagtactgtcacattgacaccgtatagcccgaggatgcttaagaacacaaactccctcacaacaggggaacacattttgcatagacaagacaacacccaggctagctgcatcacacatcggg

SEQ ID NO: 53672 - DNA, 353 bp, Gossypium hirsutum
  Clone ID: uC-gsflmaxxa043c12b1
ttaattttccaaaaacaaaataactcctgggcctgggtggtttcattcgctatttcgtgtatttttattgtgctttatattatgaaagaatatggttttgttcctcctactaatttgaggggaacaagttcctggtatcccaataaataaaatgtattataaattaattaacttaaaaaaaaaaaaaaaaaaaaaaaaaaaaaaaaataaaaaaaaaaaaaaaaaaaaaaaaaaaaaaaaaaaaactaccaacgaaaataaaaaaaaaaggtggggggcgcccttttaaaaaaacccatattgatttgcccgggaatgcaaggctttttttttttttaagcgaaacaaaattc

SEQ ID NO: 53673 - DNA, 339 bp, Gossypium hirsutum
  Clone ID: uC-gsflmaxxa043d01b1
ggaccggccgaattccttgtctacccaccgtccgtcacgcgtccggcagggagctttagctttgtaaattttactccctttcgattgttcctcatcaaattccccattatccctttcttactttcttcttcttcaaccctttcatctttttaattccttttttcagttttttttttactccaatgttacctccaaaccctagcctttttcacgccaagccatctccgctactacctttactttaccggaccccattcacctgtcttaccgccgccggagacgccccttccggcccaacattccataagtggttccaatatcccaccacgacaacaactt

SEQ ID NO: 53674 - DNA, 470 bp, Gossypium hirsutum
  Clone ID: uC-gsflmaxxa043d07b1
tccacgcgtccggcagggcgctctgagctttgcaaaaatctccctccctttgtcattgttcttcatcaaattccccattatccctttcttactttcttcttcttcaaccctttcatctttttaattccttttttcagatctttttttactcgaatgttacctccaaaccctagccttttccacgccaagccatctgcgctcctccctctcctttcccggacctcattccgctgtttcgccgccgccggagacgccccttgcggcccaacattccataagtggttccaattcccgaccacgacaacaacttccgacaacgtttacagaggtggtgcgcgaatcgggcaagaaatcagctacgaagctccggctgggagtagcatcaaagtcaagaaatggtcgagggacacagagagttatttgactaacgacgatgaacctcttgcccttcccatgacttaccctgatac

SEQ ID NO: 53675 - DNA, 300 bp, Gossypium hirsutum
  Clone ID: uC-gsflmaxxa043d08b1
ttctacgcgtccggctctgagctggctttgcgtgcggtgtcaggatcggggactgcttggacacaagagtttaagacgtgtgtttgtggtaccatcaagagggaatattcgatagatattggaacgagggaagcaaaaacgaaacagccatcagccgttgctaatggcaaaacttgggcaaggaacgatattaactctgtcaagttaatcatggtcaacaggaaactcatgtccgataccccacattccttgacttctgagacaacattgactgggttccactttaagacaactgcctta

SEQ ID NO: 53676 - DNA, 474 bp, Gossypium hirsutum
  Clone ID: uC-gsflmaxxa043e02b1
ttgtcgcgtgggcaaaatagttgtgaacacaagcactaaaagctcaaaggttaggagagtgcaactggaattttttatgaccacaatacatctgtgtttgaagttgaagttctattgaactactatcaatgatcaatcttgtttttccatatggtatgaaatgttaggctaacaagaagcaacatatacaagagacaagtatagcgaagttgcaaacgttaagatgggatgtgtggtaaggctaagaaagaagtggttagaaactagatattcacctccaagttgagatggctcttaaagaagataaggtgacaaagattagccacataagaagcagatcgattgcttaacatgttagaataatgaaaaatttggcattgcattggataaaatattgaaaaccaagaccaatatagacatggataagatttatagaacttgaagagaggcccggcataaatgtttctatgtctt

SEQ ID NO: 53677 - DNA, 203 bp, Gossypium hirsutum
  Clone ID: uC-gsflmaxxa043e12b1
tggacgcgtggaatgcccttcccgaatctggtgtatttatacggctctgagcgcggagctaccacctgcccttaatcttgaacctctcactccctttcggtctattacccgtctctatctctcaaaccgccaccaatgccccataacccgacggcaatactagaaatgaaatcttcttatctgacgctcacacctacggaacc

SEQ ID NO: 53678 - DNA, 334 bp, Gossypium hirsutum
  Clone ID: uC-gsflmaxxa043f03b1
ttatctcgcaggtgtgctaagagctgctgagcgagagcataaatacactgtgccaccaatgggtgaaagcttaaatgctacatatgtcaatgccgaataccatcctataaaactatatctactgatcctttaaacgacccgagtcggataattgaggtggcagagaagaaacctcagggataagcggcttgtggtaggcaatccttcatatcgacgtgggtttgtgaatcatagaagacagctatttctataattgggaaccacaattcaccaagcattacttcggccacccaccaatatggaacgactgctgcgtgttgaccgtcactagaca

SEQ ID NO: 53679 - DNA, 482 bp, Gossypium hirsutum
  Clone ID: uC-gsflmaxxa043f07b1
ttaagatcatgaacccagaaaacgaacatgatccacaaaataactttaaattcaaactcaaagctttgaaccttttgtttctagcgtttttggccatgatcttagatcctttttgcacgttttcaattcacgatttggttcagataatccgccatgataacttaaaaacaatcacaatatcctcattttctctcattttcttagtaaccctttacttcagaaaccgtcgtagaaaagtttacctactgaatttcgcatgttataagcctaaaccagatcaaatatgcagcaaagaacgtataatgaaaatatttgcaggcactgggaaattcacagaagagagcttagcattccaaaagaaaatcatggagaaatcaggtgttggtgataagacatgtgttccgagagctatgatggcggcttcagtagaaaaaggaattgcagcggcgaaaaaggaaacagaagaggttatatttggagcc

SEQ ID NO: 53680 - DNA, 402 bp, Gossypium hirsutum
  Clone ID: uC-gsflmaxxa043g01b1
ccttcaccaaaaaagtttgaggaaatgcctttggttatccagaagccatcgcaccatccgcatcatcttcaccatccccaccacaattcagagccaccatctctaccaggtaatcatactctagatttagaccctctccccttcgccatccctcttgtgctaggaaatgaaccggtctattcgcttcatggggggcataaacaatctcacactttttcaatccttgtctgacaattctaatgtcttggatataagccccgatggtcgatctatcatcaccactcgagttcgctttctttatcacagagagagaatccccttccaccaccacctttagaaaccgagaaccaaccccaggctgaatgcttgaaggcatgcaagggccttagctgcaaaaaccgg

SEQ ID NO: 53681 - DNA, 478 bp, Gossypium hirsutum
  Clone ID: uC-gsflmaxxa043g09b1
tttccactcgctcgtgtcttccttccatcccacctccaattaaccccgacgccgccgtcatcatcgtgatcaaccatcgaatttttattataatccagatttttatcgaccacatgggcgaacaagcctcgggacagcctcaaccacaggctcaatctcagccttcaaacgactcttacgacgcgacccaatgccaaacccaaaggcaagcccaaactcaaactaaaactgaaaactcgaatgatgccttcgccgccgctgttcccaccgttactaccgccctcgttgtctctgcttcaacggaactcaccggtggttctccccttacatcctctcctccttctaaaatcccttctcgccctagaaaaatccggaaactctcccctgactcgaattccgaaccgaatgcctcccaacaagcgacgacttccacaacatcaacatccgtagcggtgccgctttaaaccgtccccagagc

SEQ ID NO: 53682 - DNA, 443 bp, Gossypium hirsutum
  Clone ID: uC-gsflmaxxa043g12b1
ttatttagtttgagaaacatagtagctttttgaccattgtttcatgcaagtatggtggtggcaacattgccttcttgccaaacctgtggctcacctgaaccatctcctccagcacctgaacccgaagcttttccacctgaaccggaagtacccgaaccttatccccctgaactggctccttatacagaacctgatcagtctccggaaccaagtgaggcaccaattgatgatgatggtgtttttgacgtcactaactatggagcggaggctgatggtcggaccgaatgtagctcggcattctctgcagcatggcatgcaacatgtgattatacgaggaactctaccatttacataccagaaggaacattcttgggcggtccgatctcatttcgtggcccctgctataacgatagatcgctaacgtagagatcaggggaacatta

SEQ ID NO: 53683 - DNA, 282 bp, Gossypium hirsutum
  Clone ID: uC-gsflmaxxa043h01b1
ctttgccattcatttgggaaatagtgtggccttatctccgtcactcaacgccgccccctatatatagtatctgaacatcccttcattgtttttccttccaaaatatctccagcccccttaaagcctatcttcttcttcttctactactactaaacttagagggtgaaatggccttcatacatcaaaccccatcactggaggtcttctcttctgccgcttatacaagaaagataacaccacccactccttcaacttctcggttctctttgccctttactttta

SEQ ID NO: 53684 - DNA, 454 bp, Gossypium hirsutum
  Clone ID: uC-gsflmaxxa043h03b1
tttacgcgtgggctaggtgcaatcatgtatgagatgctcataggctatcctccattttgttctgatgatcctcggataacatgccgcaagattgtcaactggaggacttgcttgaaattccctgaggaaccaaaaatatcccccgaggctaaagatttaatatgtcacctgctctgtgatgtggaaacccccctgggcaccataggagtggaaagaattgaaggcacatccattggttcaaagggtgttccttgggaaaagctatatgagattgaagctgcatataagccgacagtcactggagacttggacacacaaaattttgagaagtttcctgaaattgatggcccttcttcctcaataccagaagtgggacctttgaggaagatgttgacgtcaaaagataacaatttcataggatttacatttaagaaatctgacgtcgttaagtcac

SEQ ID NO: 53685 - DNA, 319 bp, Gossypium hirsutum
  Clone ID: uC-gsflmaxxa045a01b1
tgttttttcctctgctaaaaggctctttgatctctgtttcgtggatgggttaaaactctacaatggctaaaaccaaagattgcttggtacaataacatttcatagtttagtcgtgcacttggccatgctgatagctcggaccctaccagaataccttcgttttctaaccctactacgggatacaaggaatcatcaaccaggttttgaacctgttcaccgaccgcatgagctacttaataaggcgagtgaccgtttacagcctctgaatagtcagcaagaaccgattcagttactttcccggagctgctctcgctggtta

SEQ ID NO: 53686 - DNA, 238 bp, Gossypium hirsutum
  Clone ID: uC-gsflmaxxa045a04b1
ttggttcttgaacgcgcgcggtcgaactctttatttttttctaaacccaaagcgaacgctcataaatgggacggatagctgagaaaaagtctgctggaaggacaccagtgaaggagacgaaatctttaggttactaaggtccttcggagacgcagcctttggtttgttttatgctcccgctggatggcggccctgttgtcggagacccaatgtattagaggaccaagaatagtaccgt

SEQ ID NO: 53687 - DNA, 374 bp, Gossypium hirsutum
  Clone ID: uC-gsflmaxxa045a10b1
tcgttcatagaaccgcgtcttctagcagcttatgacattccagcggtaatccagcagaagccaagttggagacaactggtagcttaattgattttgatgctgatcctgaacctgcagaagctcctatggttactcagacacaacaaactaccgcgactgaatccattgtgcatccaacttcttgtaccaacgagaactggacctctatcgatgtttacccccagacaaatgtctctcagacttcttctaatgtgaacactgtggactctgatctttctcaattgtcagttccggtatctgaacctggtcacttatcaggagtacctagtggtgtcggtggtcagaagcctgctcatgacgccaatatgaatatg

SEQ ID NO: 53688 - DNA, 456 bp, Gossypium hirsutum
  Clone ID: uC-gsflmaxxa045b04b1
cacaaaccatttctcccctaaaacgattccttttattttttccccccaatttccccaaatcggcagccgtttgcagcccatacacactaattttgttctttcttcttcctgattttttattttcttggctgtggcggtggttttatttttgaacgatttcacgatctttcagttctaagaaaaaaatgagtgcggattcctctaatttgaaacgaagcttcaattcaaattcttcaaacaatcaaagtaatatcaacaagaagaggaaaagtaaacagaaaaccctaggcatggcttggggcagcaattctatatcttcctctcgctcctcgtttcgcgtgaaatgtcaatggggaaatgttaggtgatgctggaaaatgttatgaagactacgaaaataacaacatacggctgagaattcatttgatgatattagcaacaaagtggtcgtagatt

SEQ ID NO: 53689 - DNA, 425 bp, Gossypium hirsutum
  Clone ID: uC-gsflmaxxa045b10b1
tcttcaatttcttcttcacttagaggtttgagcagatcgatcatttccagagaattcagtcaaggactgggaatcccttcaactcagtgctcttttttgatgatgaggataggaacatacaagctgtttctgaatgtgacaaccagaagaaacctgagaagagatttgtaactttggaggaaataggaaaaagaaataccagtgctggaaatactgtagatggtactcaactagatgcggagattgctggtccagagaacattaatgtaacaatatatagcttttatatattgaaacaatataagaaggttacttatgcaataccgaccaatgattctgctcagttcgttcacttgatatgtaacatgataactaaatgtcttatgttggctaggaaaaaagacggagcctacgggactgggaag

SEQ ID NO: 53690 - DNA, 258 bp, Gossypium hirsutum
  Clone ID: uC-gsflmaxxa045b12b1
ttcgttcacgcgtccgaaatatttatagaaaaatcgaatcatacaggcgaaaaacaaattgaaaaatttggccttgtcatttttggcagtcacactattgttgattatatttacaccggataacggatactggacaatagcgggcggtgaaacgccagtggcagatgtggagctcgacaaagcaatgcaagctctatggagattcgcagttgctgaacacaccaaaaatagaacaaatactgggaacatctccaacca

SEQ ID NO: 53691 - DNA, 325 bp, Gossypium hirsutum
  Clone ID: uC-gsflmaxxa045c02b1
tcgttggtgtctgagaaaaagggagatggcctccggtattaaagatgcactcgcaactctaacggagtccaaaccggcacgcttaacatccggcgtatggtcggttctagagcagatcaatgcctatcccacaaacatggacgctgtgggtcccatggaggcgctcaaccttacaaggtggaccagacccggcgtcgacattgacgaagatcgagctcttaccggaagagctgaaaaggatactcaaaacctctgccttgggggtagtaactgaaaacgatgatcacttgtgttataacggaacttgacatccaagagggttctg

SEQ ID NO: 53692 - DNA, 408 bp, Gossypium hirsutum
  Clone ID: uC-gsflmaxxa045c07b1
ttgttggtgtctatgggctgggcaggagagctgttatttgaaagaaacagtttgatctctaactcaaacgaaccgtacaagcttaacactcgacaaatagacagttctaacagttgatccatacctttcatactaagatgaataatgtggggcctagggagaggctgaaagtctgaacctggttaagatctgcactacacaattgtaaagcccgggctcttaaatgaaagcaggtgataaagaattctaggaacccaaccctctggattactaaaagcagcccatcatattgagttatataagcgaggatgacaaacaatagggttctgatatcggagccatgtgtaccagcagaacgatctgtgtctacttatgggctagcagcgaagagcttcatcatggacgcat

SEQ ID NO: 53693 - DNA, 439 bp, Gossypium hirsutum
  Clone ID: uC-gsflmaxxa045c09b1
tcttttgggacctgaacacaagcgccttgtgcagactattgccctgagccaacaccagctcaggacgatactagatgattcagacctgcacaccatcactgatggctgtgtgtatcttgaaatgattgaatccaccctgcgtgcggcattgactgcttctattagtcaagtgatggcgatgagtaatggaaaagcgttccgattaggcaatgatacagattaatgatgactgagcgagaccttatatggagatagtgtatgactctaacaggtcttagctgatttcttattgctttcagataatcatacagcacatggaagtcaactagatgatgtagctaacttgaccactgatcaatacagactgtctgttcagcatgcacatatggaggtaacgatcacacatgcacgtggcggactacctgaaacaatgctgaac

SEQ ID NO: 53694 - DNA, 348 bp, Gossypium hirsutum
  Clone ID: uC-gsflmaxxa045d03b1
cgcgttcatttatactgtcttctggaagtggtaggactgttgtggatgataatgatagcagacctggctgcgcatatgaggcgtggcgagcgtgaggcagaacaaaggctctggagggaaatgttgggcagcgcctctactagtgaacagttgtggctactttagaggtgctgaaaggagtgcatggcatggcattgctggttgctatactggaagatgcactgtgaatatatatcacaccttaagacaggtgcacccacaacttggattatatgtcataggatcaggctttaacaggatttccgccaaagtgattgaccacccactggatagagctcacacaagaat

SEQ ID NO: 53695 - DNA, 236 bp, Gossypium hirsutum
  Clone ID: uC-gsflmaxxa045e01b1
tttcttaatccataaacggaaccaaatatggccgggaaagcaatcgagtcggttcattgctaaagccggaaaaagacggcgggagccgtaacgcactgcatgaggggccgtggtttgatcaagagcaatgggtgttccattgagcttgtcgagcccaagatccttcgttataaggccgtatatccaatccttgtcctagtgcgttagaggttctcctaccctgacatgtggatccg

SEQ ID NO: 53696 - DNA, 402 bp, Gossypium hirsutum
  Clone ID: uC-gsflmaxxa045e07b1
cttcgttcatttgtcagaccaaaaacccatgagccgggcaaggtgcttcttgttcacttgtgccatagttactgcgaccgtcactaaccatattctgtcttcagggtgcctcctgtttaggcttaagggagaatggcatcacaaccactccggaccgatgcaaggctcgtgatacgtctagacctgaggtggatcacaggactcttgaaggagctccttaccatcaaacttgtttccaatgccgacatcgaaagggaaaccttgtgatgaacacctactccatcatggatggagaactgcattgcaagcgtcattttgagcaactatttaatgaatgtggcaatttcagcatgaattttcaaacagtgatgaccgagaagctaaatgacgcgtagaggactc

SEQ ID NO: 53697 - DNA, 293 bp, Gossypium hirsutum
  Clone ID: uC-gsflmaxxa045e08b1
gccttccttgcgtcctaggcacacccacgcacgcgcctgggctggggaccaatgtccacgctgcctcattcatggctaccgccactgacatcgttcgggctccagctggggaactttgtgccacattctcggaaaccggtgccaaggcaacccctaccgttcaatagtcccgattggccatggaaggtacaatgatcactggtatggtgagtcacctacacatgaacaacgccggccacgccaccgacaacatcgtaggacagcctgccaaccctatctctggatgccggttt

SEQ ID NO: 53698 - DNA, 428 bp, Gossypium hirsutum
  Clone ID: uC-gsflmaxxa045f06b1
tttttgtcttggaccgcaacagcctcctcataagatgtgctggcctgtttttcatgctgttgagcctctttctaaccttttgaactcatcacacttgggatttggagtagttgaagtttaagtatttagatttcagggttagttgtgtccaaagattaaagaatagaatgtggaagcatttacttgtaagatttcaacccccaatggtatccataaacatgacccctttagacagtggtgtcaactccacatatgcgccaaccggctggtgtgaaaaactccaattcctaacacacgcacacacatatatattgttcatttataatatggtaatgggtctccatctttcttatgtcaagttgcaaaggtttaaatcatgcatgtgaatcaatatggtagcaaactcctttgtaatagctatataaagt

SEQ ID NO: 53699 - DNA, 237 bp, Gossypium hirsutum
  Clone ID: uC-gsflmaxxa045f07b1
tttcttctcgaaatcctcttcattctcattctctctccactgaactcttgctaaacgggatcggcttaatcagactctcatcaagggcaaaagagcccattcgggcactcgcacctggagctgcagggcacatggggtatagctcatgtacccaagatagctaggaaagtcatgaccggtgcagaccagcccttgatccttgacctgcgagacatgccacctgctccggaggctacg

SEQ ID NO: 53700 - DNA, 428 bp, Gossypium hirsutum
  Clone ID: uC-gsflmaxxa045f09b1
tcttaatcttatcaatgaacttatgattaattctcattctgttgccagaaaggataagaaaaaagtgagactgactgagagaaacaaaaagaacaaaattatggaaacaataaagaaaaatggggagtcctggattgggaactggaaacagtgggcaaaggttaggcatcacggaacctatttcgttgggaggaccgactgaatatgatgtgatcaaagcccgacagcttgagaagtatttgcaaaatgtgggattgtaccaaagtcaaaaagaggctgttagtcgagaggaagtattggggaggcttgatcagattgtgaagaattgggttaaggcaattagccgtgctaaaagattgaatgagcaattggttcaagaagcaaatgctaagatattcacttttggctcttatcggctaagggtacat

SEQ ID NO: 53701 - DNA, 349 bp, Gossypium hirsutum
  Clone ID: uC-gsflmaxxa045g03b1
aaaccgttagatctcgtaaacaagccggagcagacgccgacgcgggtgacgcgctccgtcaccgacagcatgtgtgttaaagtagtacaacagcagtttatatattgtctttgaatcctattagcgattgctgcggattatgctctcagccatatatatataaacatttcgagggttgtctttctatataaacaagaacagatagaaggctatgaactcagacacatggggatagagggtcaccgtcacaggtgacctaatgagaaaggctgctagacatggtgatgtggacaaccccagggagaaggctagggtagactcagacttcactgatcctatggcatgctca

SEQ ID NO: 53702 - DNA, 435 bp, Gossypium hirsutum
  Clone ID: uC-gsflmaxxa045g08b1
aaccgatggcgcttgtaaacaagccggcgcagacgccgacgccggtgacgcgctccgtaagctacaggtagggtgttaaggtgctccaggcacagtccattgatgaccacagcaacatggtagctattcctgccattgatgcactcaaccctaccgagttcaatggaccgggggttggcattcacgaagatcatggaggcccagaaggctccgaaattggtactcttgggtttggttctgaacgtggccctgaaacaaggagcactgctggatgatccggtgatgtggactactagaggtttgcatctaccgttgcctaagaattcagaaatcctaaggattgcacatatcctccaaatcccacatatcccacaaattccactaagtggacaggtcccacatgagccacaaataccactaatgccgggacactct

SEQ ID NO: 53703 - DNA, 420 bp, Gossypium hirsutum
  Clone ID: uC-gsflmaxxa045h01b1
ttgcctcggtcgtggttgtatttatgctagtactagtaccatgggcttctcaccgagcaccagcacgggacagtcgtggaccatgcgtgtaaagagcatcaacgactgcaggggaggcctaccagcgcatgacatcagcatggataggctgaaaaccacgctgaaagagacgagcatgattgacgagacagagccccaacctatagggctaactagcatgctgaactggattattgtgagtcaacacacattgggtagaatcactggggaggctattcatgaccatggtctctcacaatctagagaatcatgcggactgaccgctgctaggttagccatctcaccaggacgcagggatgctgagctggcttatctagcgactattgtaggactctatatcagcgatgtgcctccagctgc

SEQ ID NO: 53704 - DNA, 422 bp, Gossypium hirsutum
  Clone ID: uC-gsflmaxxa045h04b1
ttctctcgtccgtgctgatcctacagtattgtcggtgttggtcttcttggcactttcacatatcgtcacaaatataagataaatcaagtcagcttctccagttctactccttcttcttactattgtcgtgcaacactatcaacaacgatggaggaagtgaagccaacatttgattcagacaaagctgctgtactagttaacgagctcaggaaaacctttaattccggcaagacaaagagctatgaatggagaatatcacaattggaaagcatatcaaagatgattgatgaaaaggagaaggaaattgtagaagcactacagaaggacctctcaaaacctgaacttgaagcgttcttatcagaaattttgatggcaagatcctcatgtaagttggctctgaaagaacttaaacaatggatgat

SEQ ID NO: 53705 - DNA, 508 bp, Gossypium hirsutum
  unsure (1)..(508): unsure at all n locations
  Clone ID: uC-gsflmaxxa045h06b1
ttttcccaacattctagtgtgattcctatctcttttgttgaccactcaaaacatttgtaaatttggcatattccaaattaattccaagaattggattaatattagcccatgattctctcccttgattttgctttgaattttggctaggttgctacctaaattgtgtctttccaaaaaaaaatattctctctctccccccttagccagatactgtttactgtagtagcctttcgcggctgagccctaaacgtcaaatcccaacctatttccatttcctgcatcccatgttgtaatctcaccggacaaaaattgttaccatggcctaagcagccacataagaaacaaaacaaagttattttttcatatttgaactttgcataagtaaaatttgaatcggagatcataattttctttcttcttttcagaggctttcgaacatcaacctagactncgacgcatagataatttctgtagccgtggataattgcttcatatcatattcaagata

SEQ ID NO: 53706 - DNA, 486 bp, Gossypium hirsutum
  Clone ID: uC-gsflmaxxa045h11b1
ttttcacgcgtccggggctatggacctaatgaagtgcttattgcaattattggaagtcaatttatgtacagaggcttgtggttggagcatgcacttattttacaggctttattgccgctctttgccgacttttcttctgataatgattctatttcccaccctaaaatcattgttttaagcagtgattcagcaagcaactacagcatggctgttgagaaaattgctcttaacttaagatatcccagtggggtggtgaagcatgtagctgttcatggagatgttgatggtgttctgagcatgactgaccttgtgatatatggctcgtttcttgaggagccttcatttccagaaattttgataaaagccatgagccatgggaaaccaatcatagcaccagatctctccaatataaggaaatatgtagataacagggtaaacggttatcttttccctaaggagaatattagtgttctgacacagatcata

SEQ ID NO: 53707 - DNA, 315 bp, Gossypium hirsutum
  Clone ID: uC-gsflmaxxa046a08b1
gtggctagcatgaattaacaatggcggctggtctagttacaagagaacgctggtcttttaaacacggggtcatatcggctgaaaatactagcctgataggtctaaactatggcataattgggtacatctggctcatgccatattgcaccattgagacgcggaaagcgatcaatgccgacacgtataaccagtaacatctctaccttgaaatatagagactttgatgccgaaccaaccacaagagctctggcagggcacagagcaaggacgtacatcaaactgctggaagccgagctgttgtcgagcaaaggatac

SEQ ID NO: 53708 - DNA, 451 bp, Gossypium hirsutum
  Clone ID: uC-gsflmaxxa046a09b1
gcttataataattcacatgcttacagaaagctgcctgtttttgcggagcttctttttcttcttctatttttgttttatttctaccgtttgtttgaaccgtatcagcttttcttcttcttcttcactgctttgtatctctcagctcagtttaactgagtccgctgacatatgaagatgccagtaagtggcattgctgttgctgctggcattgtgcaatgcaatcaaaattcatggagaagaaagcaatgggctgtgtgatgttaatctaacattgcgctcaagaccacatagtgtatccatattggaatttggtgctgttggagattgcaaaaccttgaataccattgccttccaaaatgccattttctatcttaagtcttttgctgacaaaggtggtgcacaactttatgtgcctccgggagaaggcttactcgaagtttaatcttacaag

SEQ ID NO: 53709 - DNA, 411 bp, Gossypium hirsutum
  Clone ID: uC-gsflmaxxa046b05b1
cttataccatcatgcagatattaggagacactttgaagcttttgcttgggcttatatttctcaacaatgcagaccaagagatgtttgggaaggaattctgctgaaattgatcaccccatcaaaggaggagaaggaagaaattttgagaatgagggatgaggaattagcaaagaagctttacaaagttcagcaagagaagaaatgtttgattgtgattgatgatatttggaccagtgaggcgtgggagactttattccctgctttccctgatgaaacaactgttggtagcaaaatattgctcacaacccgcaataggaaagtagctttggatgctgatcagaatggattccttcatgaaccagagtgtttaaatgaagaacagaagttggagctattccaattgaaagcatt

SEQ ID NO: 53710 - DNA, 503 bp, Gossypium hirsutum
  Clone ID: uC-gsflmaxxa046c03b1
aaaggttctagttcaagtggttcattggaatctgaaaaagttgtgcagttgaacaaccatactgtatctcgaatggaaccgagctcttgtccgaatccagctttgaatatgtgcgctggcacacattatgctgaagccaaacaaagtttcaccaatactgaagttagtgaatgtgcaaacagtgttgaaaagtctggtgaaagcggtgaagtgagtaattccttcgatttaggtgagagtaggaagacaagcctctatagagagagcactggtagtgatgttagcgatgaaagcagctcgagttttctaagcagtacagtgtataagccccataaagcaaatgatataagatgggaagcaattcaagccgttcgatctcagaagggagatttggacttcaagcacttcagggtgctgaagagactcggatgtggggatattggcagtgtttatttatcggaattgaccggcacaaagacttatttcgccatgaggttatggat

SEQ ID NO: 53711 - DNA, 531 bp, Gossypium hirsutum
  Clone ID: uC-gsflmaxxa046d02b1
cccactcgtccgaactacaataaaatacaggtttaggaagaaatgggttctctagtggggcatgttctcccaggtttagccttctttttacttggtttttggcatctctttaatcacatcaagctccattctctccatccgaatccctacacatctcccacatggttccccacaccaaaatcaaggcacttagagctgttcctcatcatggtagcttcctccatctccatctccatggagctctttatcagccctgcaaggcaccaacctttggatcctgatggaaccatcccatcaactcatctccacaactttgagcactcttccatatctatgactttctttacttatgcagctttcgctattatccttgataaaattagccccaaagctaagcatagcctaacacagtttattgcagccgtagcttttgcccagcagctcctcctcttccactttcattcagctgatcacatgggagtggagggtcagtatcacttgcttctacagaccctcatctttgttctttac

SEQ ID NO: 53712 - DNA, 378 bp, Gossypium hirsutum
  Clone ID: uC-gsflmaxxa046d09b1
cccatgcgtacggagagctgcctgagcaggatagacgtgtgtcacagattcttagccatcatgcaggcatcaggactactaggggcagtgggggaggccgtctaagaccacgagaggactcttcgaataccctaatagacatggaagctgtgacctgtgctaaggcgcatcaacatattgatgactggagcagaggttatggggacatgaaacactaggtgtatgatgaggcggacactatactcgaccgagcttgtgaggctgacactcacacgcaaactgagacagttggacatcgggctataaaacccaatggccgaagattgcgaactattttcgtgacagctgcactgacagaggctgcacctaaactgattg

SEQ ID NO: 53713 - DNA, 463 bp, Gossypium hirsutum
  Clone ID: uC-gsflmaxxa046d10b1
aagttgggaagctcttggcaaggaagagaggagaaagaaagagaagctcttgatgcaaattggttcatttcattgaaacacacgctgtggaatttcaagaacagctccattttgcacttgctttcaccataactattgccatattagtggtcaccatccttgttaaaggcaacaagagacaaaagaggaggcccccagagccagatggggcattaccttttattggtcatcttcatctttttggaaaaaaccagctgctacacaggatatttgcagacatggctgacaagcatggaccggccttcttgatccgtctcggggttcgtcgagcacttgtggtgaataactgggaagttgcaaaagaatgtttcacgaccaacgataaggtcttctccacacgtccaaagtccatagctgtaaagtatatgggatatgactataagatgttaggttcgctccttac

SEQ ID NO: 53714 - DNA, 548 bp, Gossypium hirsutum
  Clone ID: uC-gsflmaxxa046e05b1
gggattttcgagaggcattggggtatcttcaattacgatggaagtatcaaatatccgttggatttgggaaaaggcaaagcactcacccaagccaaaggcgtcaagtacttggccaggcaatggtgcgtgttatcgccttcagcgggcgtttcggaccccaacgcgttggctcaaagcattagccaagcttgccagtacgccgattgcacaagcattggccccggatcctcgtgttctaatctagacccccaacgcaacgcttcatatgcgttcaatatgtattatcaaaccatggatcaaaggaaagatgcatgttcgtttaataacttatcaacggttacaaccgtggatccatctcagccaccttgtcgtttcgagatcatgatcgacatcgggaaacacgaactctctgtgtctaacaaagttccagcagccggatttggaagcctgctacttgtatctctgatgctggtattgggtttggctaatggtgtccactgattggagtccatcctttgcctttgatgcagagtcaagcaggcaaatga

SEQ ID NO: 53715 - DNA, 510 bp, Gossypium hirsutum
  unsure (1)..(510): unsure at all n locations
  Clone ID: uC-gsflmaxxa046e11b1
gatgaatgcagccttggccctgccaaaggtttggatgagtctgaggtgatgaaactagtatcagctggtgaattatcattaagtagtttacaatcaccttccttgaacgattccatcttcatgagaaccatggaactgtctggtatattgagcaaagcagataataatcggacaatgctccaaaaagagggtgctctgctataggttttgatatgaaactaatctaagagttttgttatggaagtggataaaaatggatccaccctccaattttgatattggaagatctcaatttccccatttttatacatcattatcattattagctgggttattcataagcaggcttctgggtgttttttttaattgaatcctgcaaatgctacaatgattgctatngatgtgtcctgtattttctgtttcaatgtgtacatgataataaattatatgtattaaatgtaatcatattgaattgacgtgttcgatagtttaatccgcggggttgaggcc

SEQ ID NO: 53716 - DNA, 394 bp, Gossypium hirsutum
  Clone ID: uC-gsflmaxxa046g10b1
gtttattgtaacaatgaattttgtgctgctgcacatgacggtaaactcaaagattgtgagcctgatcttcaatgtgaatactatgttacttacggtgacgggacctcaaatggtggatactttgtaaaagataccatagaacttcagcaagtgactggtaaccttcaaacttcacccacaaacgggagtatagtattcgggtgcgggtctaaacgagctggtcagacaactacatcaagtgaatcagttgatggaatcattggatttggacaagcaaattcatccatgatttcacaactagctcaaaacggagtagtgaaaaataaattcgcacattttttggataatgtggacggaggtggaatctttgcaattggtgaagtggtaggacctc

SEQ ID NO: 53717 - DNA, 335 bp, Gossypium hirsutum
  Clone ID: uC-gsflmaxxa046h09b1
cccactcgtccgcccacgcgtccgtgagagacaagttagggaactcacttcaatctgctttgtcactacttcctaagaatgaaagcaatggataaagaaaagcctgctttgagcggcttttaagggaaaaatcatggagatttgcggagtcattgtggaaactagcaaaagaccatgaaaagtaatggatatttgtaattttggataatgtacacaaaattttaggggggtcgtcgacccaaagtacctgagaggacaagttttcgtatacttgtaatcgtcatggattggacgaaggatctaatttatgtgatttattgaatccttttttttat

SEQ ID NO: 53718 - DNA, 508 bp, Gossypium hirsutum
  Clone ID: uC-gsflmaxxa046h10b1
cgaggcctgaagaaaagtcctggatgtagttggattgaggtggggaacgggattcatactttcatggcaagagacaagtgtcatccagagtgtcatcatataaccaagaaattggatcaaatcacggaaaagctggagaaggaaggaggttatatagctcaaacaaagtttgttttgcacaatgtggaggaaaatgagaaagttaagatgctatatgggcacagtgaaagattagccattgcatatggtctgctcaagactgctgagcaaacccccattcgggttacaaagaatctacgtgtctgtggtgattgccatactttctgtaagttagtctctaaactctttggacgggaactacttgtgagggatgccaatagatttcaccattttgaggatggggcttgttcttgtggggatttctggtgaatgttacatccaattatttgaattggacttttcgacattcttcttgctgaaggtattggaatcattcttcagtgatcag

SEQ ID NO: 53719 - DNA, 422 bp, Gossypium hirsutum
  Clone ID: uC-gsflmaxxa046h11b1
cggtttcgtgggtaaaattaccattgtacaaattatgactcaactgtgactaacgcgagtgaatatctacttctcgatcttattttggggatcgcttgcgaggtggcttggaggcacacattcaagtgtagcataatgaaacgaatgcctgattagcatagctttggaggcatatattcaagttttccggacgcataaggatgcctatttctttgtgtggatttccagactagaatgctcttcattatctgaactttggaaactaattgctactaatggaggaagaagcagtttttatgggaaccttaacagaggagattatggagaatgtcaatagttcaaagcctgaattgaagcgtgctataattaggtactagcattcttgatagagccagagtgaagtcatgaaacgtaagggaact

SEQ ID NO: 53720 - DNA, 389 bp, Gossypium hirsutum
  Clone ID: uC-gsflmaxxa047a05b1
gcgcccatttgttcgtccacacgtccgcccacgcgtgcgtgtgatgcttttagtcataacatggcaatgtgatactgaagagttgtaggtgattccatcgctcggcacttacggtacatactcgggaaatgtataaaggtaaaccttaaggcatactaattggtgagttacttaacattgtgcgcgctttacttgtattctataaagactgcaacaatgcacactgaattgctcttctcttctcaactcatgagttcttttttagtttgcatttgagatgaacccttttggtacctacaaagaactgagaatggctgaatttagtgaacaacatgagtattcgcaattactcataaaataaaagtcatgaatattgataagcttatttt

SEQ ID NO: 53721 - DNA, 301 bp, Gossypium hirsutum
  Clone ID: uC-gsflmaxxa047a11b1
caaaacttggtccagagttcaacaatagttgctcctgggtatgttcctagtgaacttgacgagagaattttgttagaactcccttcatccatggttcggccactgagggttatacgaggaacctttcaagtaacctcaaagaaaataaattttgtagttgataaaactgaatgcaacatatcgatggatggttcagaagacaactctgaagcaaaaaatgatgaaaaagaccgtagttggttgatgacttctcttcaataaatgtatagccgaagatatctcctaagaagaagtgcttttg

SEQ ID NO: 53722 - DNA, 163 bp, Gossypium hirsutum
  Clone ID: uC-gsflmaxxa047b06b1
ggtggttactatggtcgtggccgagcaggacatggcaggggtggagaaccttttccagtggggtttttagttcctatgcgatgatgagctttgaagctctttataactgtgatagaattaggaactctttaggaaatataaggaagcataattactcgtaatg

SEQ ID NO: 53723 - DNA, 498 bp, Gossypium hirsutum
  Clone ID: uC-gsflmaxxa047b10b1
gtttaagtggtaaaaaagcaggttcatcaacacggggaatacttggagaaactgaagggcagaggctttgtgaatcgttcagggaaaatcagtatcctgatcgagccacgaaagagagattaggtaaagatctcgatatgactttccggcaggtcagcaaatggtttgaaaatgctcgttggagcttcaatcatccaacatctaatcaggaaaccacagctaaaagagttgcagaaaatgccataacctctgttgttccgaagaaaaactgaatgatcggcatcgtagagagggagaaagagagaaatcaaaattggtgaaatggagaggtattgaggcagttgatttatatagctttaaatttaatgaacattattggataggaatagaaggaactttgttgctcgaggaaaatttgcagtgaaatgaagttgtgacccttatccaaatagatatttaaatgctttattttttaaaaaaatttattcattcagtttc

SEQ ID NO: 53724 - DNA, 390 bp, Gossypium hirsutum
  Clone ID: uC-gsflmaxxa047c05b1
aaatcgacttctccatcccgcctaccctaattatatggtgctttatttatttactccaaaaacaactgatctgcaaaaattatatttactttttcccctttattatgtttagtctgcgtgcttgaagggaaggctgaagctaaggttatccgtttcccttcgtgccagtccacttctcttcctttttcttaatccaagattatcgccggatgtatatatatttaattattctctgttaaaagggaaatttgattggtaaattcggagcaaaaagtcatttgaggttttaggtgaatgacgagtgcttcggagttgttctacactcgaaggtcgagagtaggtcgacccaatcccgatccagggatcgactctttaattgatcggaattac

SEQ ID NO: 53725 - DNA, 466 bp, Gossypium hirsutum
  Clone ID: uC-gsflmaxxa047c10b1
ataacattgcggggatacctttcggttatcgtggattctcagacaaaggcttggctgaaatgccgctatcgcggaaagtagtccaaaatattcacctttcaggtggaagcttgttaggagtttcacgtggaggaccctctgtcagtgatattgtctctagtatggaggaaagaggaatcaacatgctttttgtgctaggtggaaatggtactcatgctggggctaatgctattcacgatgagtgccgcaaaagaaagttgaaagtggctgtagttggtgtgccaaaaactattgacaatgacattctgttgatggacaaaacctttggttttgatactgctgttgaagaagcacaacgagcgatcaactctgcatacattgaggcacatagtgcttaccatggaatcggtgtcgtgaaattgatgggtcgtagtagtggtttcatagccatgcagtcattcttagc

SEQ ID NO: 53726 - DNA, 142 bp, Gossypium hirsutum
  unsure (1)..(142): unsure at all n locations
  Clone ID: uC-gsflmaxxa047d08b1
cccatgcgtccgctttgacgctatatcaagtgattcttcaacagctactaaattcagagaaagaatttatgacatgggcaaagttatggagtcgagtatacacaataacatacgttgcaacaaatatagaagatcattggnt

SEQ ID NO: 53727 - DNA, 514 bp, Gossypium hirsutum
  Clone ID: uC-gsflmaxxa047d12b1
ttgttgcgtgggcggacgcgtgggttttaagagccggccttagaattttcgagctggaatcttgatttttccttttctttttacgaacacagatttttggccacacaaattaaagtccactttattttaccttttaaatttctacttgtagcagtcagagagaaaattagtgaacgcagagagaaaacgagagctttgaaactttttttttttgttatcatcgaatcaagatggaccttattggatttgcaattatgttctagttatcggagattcagtttctgccactagaaaatcatgtggagttttgcgtccaattgtgtagccggaactgttgggcggaaaaatgtttttctaaatcaaactcatgctgcgttagaatgttcagatgatgaaggcccttccgtaattagcagggatgagtgtttagaatgcccgatatgctgtgaatctttcaacatcgtagaaaatgtgccctatgttttatggtgtggtcataccctttgtaaaaact

SEQ ID NO: 53728 - DNA, 303 bp, Gossypium hirsutum
  Clone ID: uC-gsflmaxxa047e10b1
ccctctcttcttaggtctggggggttttttttaatgattaatcggcctcttccaccagccatgtctttcctcaatgatctttttaacctcaatcttagcgatattgattcaaagatcatagccgaatacatatggatcggtgcatctgaatggatttgagaagcaaagttaggactttgtctggacctaagccggaccctttaaaacttctgaagtggaactacgaaggttccagttccaatcaggatcctggtgatgacagcgaggtccatcattattctcaagctatattcaaggttccat

SEQ ID NO: 53729 - DNA, 436 bp, Gossypium hirsutum
  Clone ID: uC-gsflmaxxa047f01b1
ctgacgcgtgggttttatttattcacttcttcaatcgtcattttgatcttccattaatatattaggatatgtataagatggatgatgtctaatgtaaattccaacttgtattttaatatgtagttaaattatttggttccactttcatataaatttgattataccatcttaaaattaggatgcaaagggaaactagcaatggtgtagcagcagcagcggcagccgcatcgcgagtccatccggcatgcgctgcatgcaagcatcaacgtaaaaaatgcgacgagaattgcattttggcgccttatttcccggccgataagtgccgagaattccaagccgtgcacaaggttttcggtgttagcaacgcgaccaagatagtccgtaatgccaacagtgacgaagacctgaaaaaggtggcggattcgctgatatggga

SEQ ID NO: 53730 - DNA, 552 bp, Gossypium hirsutum
  Clone ID: uC-gsflmaxxa047f04b1
gtctcaacactaagcaggttttgatcaatatcaggtgcatataaaatatcagtaatgaacttagtacctgaacaacttataatggctatatttcttttgactgcagtatagtcaccgttcccaattctgaccttcttgaactcggtactctttaggtttttgaacaactttttgtcatgtgtcatatgattagtgaaaccattatcaatgagccagcttttacttgtttcgtaactagtgaaataagttacaacaaaaagctaatcttcttcttcttgatctgccacttgcacttcatctccttattgctgatttttgtacttacaaataacaacttcatgtctcatttggttacacttgttgcactttgcatctagtcttctctaacacttaaatggagggtgacatttcttgccgcaatgttgacatagaggataatccttatttactcctaatcttctatttccagttttacttttgttcccaaatgcagaactatctcgattcgagtgtgaatctttttattccttggactcttattcttctatgatc

SEQ ID NO: 53731 - DNA, 471 bp, Gossypium hirsutum
  Clone ID: uC-gsflmaxxa048a05b1
tttatgcttaggttcctctataggtttttacttgctaatccttttacataatttaggcaacaacttttttcttacattgcacatataattttatgaggccaatgactattagtggaacaacagcgacatgcatggtttgtcataagaaaggagctgtgattgattaattaacaggtgatggcatttctcatcataagactggcttgaaatgaactcattgccaggttgtgttggtgatgggaaactattgctcaacggatagggttctgtcttgcaagccatactatgatcaaccgttgctggcctcgtggacttaccaaattaggaatgccaaaccctcctctgaaaattgaaaaggaacagaaaaggctgctagcgatgaagaacaaggctcctgtggttcacacgacaaacggggtgcctgtaagataactgctaccccatataggggtgactcttgaaggagaaaac

SEQ ID NO: 53732 - DNA, 524 bp, Gossypium hirsutum
  Clone ID: uC-gsflmaxxa048c03b1
gaattttatttttccctctgttttgaatcagaatacaacggatcaaggagaagcaatgcaagaaatcaatcatccatatggattcaacgatggtgcgaatattgggaattcggtatcacagctgatattgtcaggaggctcaaataccttagattcaatcttctctcgttgcgagccatcaatagcggccgtcggcaccaactctgtttatgagccattaggctcttcagtttatcttcggcagagagatctccttctaaaattctgtcaaggaaacgcttcattttcacgcaactccgtagcggatcagcttcgaaagagccaaaacaccgcatcgacgagcaactgcgtcagtcctcaaaagacgaagctgtacaggggcgtgaggcagagacagtggggtaaatgggtggccgaaattcggctcccacaaaacagagtgcgggtctggttaggcacttacgaaacgcccgagacggcagcttatgcatacgatcgtgcggcgtataagctcagaggggaac

SEQ ID NO: 53733 - DNA, 532 bp, Gossypium hirsutum
  Clone ID: uC-gsflmaxxa048d10b1
cccacgcgtccggtcggatcttcttcaagtaatttcaagctctacgatcaattcgaattgctggaatatgaagataggttagtgttcaaatcccccgaatctcccgatcaaggcttttcgatttgccgtcgtcaaggaaacatcgaacccctatctgatgaatcttcttctggaaaaccatccaaaacctctaccatttatggcgtggctggaacaattagattgcttgcaggaacatatgtacttgtaataacttcaagaaaggaagttgggagttttctaggtttccctgtctaccgagttgaatctatgaaattcctggcttgcaatgaggctttgaggttttccaattctcaagaaaaaagagacgaggcttacttcatgtccttgttgaaaacagttgaagcaactcctggattatactactcgtacgaaacagatataacagtgaacttgcagagaagatgcaaattaatggaagcgtggacgagcaaaccattatggaaacaggctgatccctcgtttgtttgga

SEQ ID NO: 53734 - DNA, 521 bp, Gossypium hirsutum
  Clone ID: uC-gsflmaxxa048d11b1
ggtgttttgatgaagttgattgatttttgaaaaatcggtttctgggtttgcttagatctattatgaattctggtctaaacttatcattccgagttttgattttattttctttaataatatcctcttctgggttttgattttcattgattttgctaatgaatggatctatctagctgataaacgaataaagaaaataaatacaggtttttagtctcatatatttttttctttttgtttgaaacccttcccctcatctcaaaaaatgaaaattaaaaagaaaaccctgtttaagtttagtagttgcttcaagactattttcatggaaaattttattattttattatttattttggtctttcttagctttacttctctaacaagtagagcttggttttgcccttgaatcaaatggatgttttgtttagcctaaagttcctctttttagaggtcatcaccaaatattaatgatttttgttccatttctaagatttgtatggtaattggaacttatttatttctct

SEQ ID NO: 53735 - DNA, 530 bp, Gossypium hirsutum
  Clone ID: uC-gsflmaxxa048e03b1
gatatctaatagttatattatgacagatcaccagcagaggattcatcctgtggtggaagtcgaagcaccagcccccacgacgcctttggtgcctcatggctcggctacatcggagaaaggcagcccgattcaacagcgtccaccacaacgaaccattccggtgaggccaccaccaccaccaaggaagcgaagctgttgttgcaagtgcatatgttggacagttagtctcattgtcgtcctcctcataatcctgggtgccactatcggcattctctaccttgtcttccgcccccaactccccaaatactccattgatagcctgagaataagtaatttgaggctcaacttcgatatgaccttgtatgcgaaattcgacgttaagatcacggccaataaccccaacaagaaaatcgggatatactacgagaaaggagggcgattaagcgtgtggtatacaaactcaaagctttgtgaagggtcattgccaaagttctaccaaggtcaccaaaacataacaaagctggaagtgg

SEQ ID NO: 53736 - DNA, 516 bp, Gossypium hirsutum
  Clone ID: uC-gsflmaxxa048f01b1
ttaaaaatgcagttttgattaatcgttgatttaggcgaaaattgactcaagtacagttcctttctttgctttgctttggtgtgcttgagataatgtaattgaagtaattttggtcctggtctacctagcttatttctttttcttttggaagcaagttttcatggtaataccatacaaaggatatgagcggagaaggataatggaattgtagttcgtttgcagaagggaaacatatattgggtgaccaaagaacaaggagtggtgaatatatttttcgagttttagattcttcagcaagttaaaattgtgacaagcacactcctgttggaccattgaataagatttgcctgctacgattccatgggatggagaggtgtcttctattcttcactttttcttctcactctagtcgaatcttcaagtagatcagagaaaatattgttctcaagcttgggtgcccaaaaagctgtagaattcagctggccagtcttcagtgctagcatatttgtctttgtc

SEQ ID NO: 53737 - DNA, 530 bp, Gossypium hirsutum
  Clone ID: uC-gsflmaxxa048f06b1
tggtaacgctaggtaagcttcgccacccaaacatcgttaagatcctagggttttgctcttcgggtctcgatcggattttgatttatgagttcattgagagagggagtctcgaccaattgatttacggtgaagatcaagaaaacccggacggcaggtttctatgttggtatacgaggaagaagatagttcttgggatagctaatggtctagcttatttgcatggactggatacacccatcatccatagagatattaaggccagcaatgtgttgttagatcgggatttcgaagcccatatttctgattttggtctggctcggcaaatcgaggagtcccaaacacacgtatccacacaggtggccgggacaatgggctacatgccgccggagtaccgtgaagggaacacagcggcgacggttgtggcagatgtttatagcttcggagtattgatgatcgagatagccacccaaaaccgccccaattggccggtgaggtttgaggggaaagttataggactagtagagtgggct

SEQ ID NO: 53738 - DNA, 524 bp, Gossypium hirsutum
  unsure (1)..(524): unsure at all n locations
  Clone ID: uC-gsflmaxxa048f09b1
cccacgcgtccggtgtgttttgtttcatttcattccaattgaatgctaacgtttcgcccatcccatcttctccgctatacttgttgtattactcgtcctctcacccctctccttcctcccttttcctcccatatccttccttccaactcgcctttctttcgccccaaacccctctctctttcttccttaaaccctcactccaacatgtccactcgcccctccgccttcgatgccttaatgtctaatgctcgccgtttagccggtaagaagagctcttcctcttcttcgcccaccaagaaacgcaaatcccccgattcgtcgcccacccaaaaccctaatccccccaaaaccgtcggctccactgaagtcaagcacgacgcagaggtttctagtgatggaatcggaaagcccattaacgattccccaaaacccgatttagatgaggcgaagaaacccccggattcgaagaaggtgaaggtggngagcgcctccgagagacacgcggagatgaaagggaaaattgt

SEQ ID NO: 53739 - DNA, 529 bp, Gossypium hirsutum
  unsure (1)..(529): unsure at all n locations
  Clone ID: uC-gsflmaxxa048g01b1
atctaatcaatttggtaccaattttggggcgcaatgagggtgctcacccttcctcatgcgtaaccgactcccgaacccatttgtttttgattttgcgtgaatcgaaattgatttaaatagaacaaaatgttttagtaggtgacccaatcacacctaaacaaaagattggtggcgactccacactcagttttaaaagtcgatccctgcttttttcctaactcgaaaaaatggtttcgacaattttgatatgttttgagtttagaattttgttggttttggtcatgggatggttatgttttatgtgtaccttattgggtaagcttcggcttgattttaacttgtttaatgagtctttttggaagcacacagcttgagacacgggttgttacatggtcctgtgctacacacggtcacctcacacagccgtgtgtattctgttagttctagggcaggttttatacgggttgagacacgancgtgtgtctcaagtactgagttacactggctagcgcacagcctgcgacacggt

SEQ ID NO: 53740 - DNA, 530 bp, Gossypium hirsutum
  Clone ID: uC-gsflmaxxa048g11b1
tttgtcttcttgaccagcgtccttcagaaagtagatcaagcgaactttggttttcttgcatccggtaagagattattccactttctaagacttcttttgctaactgatgggcatgcatgtttttattttctgggaatatacttgaactttattgtttgataatgggcacacttatcttgaatatctcgaatgattgctccaatgactgacttatcaacttctgttgtttggcatttcctgattactgtctttgaatcccctttgatttgtgaatctctaaagcccattaagattcctaacttaattgcttccaatcctgcatatgcttctgccgcgaacggagatggaacataattgtggaggactgtcttcgttgccagtttttcattcctacaaccccaaaccaccaccccagaggcagatctgaaatttctcttgtcgtacgcttcgtcgaagtgtatctttactattgctttctttctgagatgaatatccgttcgtgaactagctggtttcttgagtaccatatt

SEQ ID NO: 53741 - DNA, 449 bp, Gossypium hirsutum
  Clone ID: uC-gsflmaxxa048h02b1
tgttttaatgtgcaacctactgaagaacccaatcccatgccttgctgctatcctgcaggtgcaagaagctatgtacgagcaacaacaattcctactgctatgccttcacatttctttaccggtttaacatcattgactacgatacaccttgacaactacctttacgaaccatgggagatcctagggagcttcatggtaggatcttctttgataactttgtcaaccaacactgctaatatcaaaggcaaattcccaggtctattagaccctgaaactgtcccatcctttactgcactttattcggctctaaacaaacttgaaggagaattgcctgctgagttctctggttcaatgattcagtctatatgggtaaatgggcaaagtttgaatggcacaattgaagggatacaaaacatgacttctttgacagatgtattgtcacatgagaa

SEQ ID NO: 53742 - DNA, 531 bp, Gossypium hirsutum
  Clone ID: uC-gsflmaxxa048h03b1
cttgcttctcggtgaagaggaaagcaaagataattctttaatggcagtcgacggtgactctcctccgcattacaatgacgactgttcaacgtctcctttcaggaaatctccatggtcgtctcacgaatccactcatttatatgcttcggctgttgaagacaccaacaacgtcactcctaacgtgctcatgggttcgttggtacgtgaagaagggcatatatattccttggctgcctctggggatttgttatacacgggttcccatagcaagaacattagagtttggaggaaccagaaggagttttctgggtttaaatccaacagtggattggttaaaaccatagtcattgctggagagaagatctttacgggtcatcaagatgggaagattcgggtttggaagattgctaacaaaaactcaggtgttcataaacgagttggtacattaccagcttttaaagattatttaataagctccatgaagccaagtagttatgttgaagtgaacagcaatcgtaaggccgtatggct

SEQ ID NO: 53743 - DNA, 539 bp, Gossypium hirsutum
  Clone ID: uC-gsflmaxxa048h07b1
tattaaaatgtcgaatcccggagaacccttacgtatgtcgtcggactatcccggcaccggaggagcctctgaacggcaacaagagccggacggcgatgccgatctacgtgttccactccaaaatctctcgacggtgaaaagaaggatggactctctacaagatttcctctctcaatcggtcaacaccaacactttgatctccaaagatcaaatggaccacgtttcctccgaaatcgtcaacgccgtccaccaaactatcatcaacggtgccgctcttctctcttgtgcccaaatccattaccgtaatctggctccggttctaaacctgacaccagaaacaaaacccgagttcgaagattacgatggaggagagtccgaggtaatcgaattagacgccgtcgaattgctttcggaacatttacatttctgcgaaatttgcgggaaaggtttcaaacgtgatgcgaatctacggatgcatatgagggctcacggagatcagtacaaaactccagaagcgttggcgaagaaaccggaagtaa

SEQ ID NO: 53744 - DNA, 337 bp, Gossypium hirsutum
  Clone ID: uC-gsflmaxxa049b01b1
ttctcgcgtccgcgatttttctttcaaaacttcttctgaatcgtttcactttctttagttttgaagctttcttccttcctttcctcatctcttggcatttcttagtctggttcgtgcaaccgatcatatcttctttgatctttggcatactcagggacctccatttctaggttaacctcctcttttctaaaatttgggagtttaaacctaaaaatcttgcattaaaaatgcttaaattaaattatcaatttttaaaagggttaaaattatatatatatttcatttaaccaaaggtgaaaaattactaaattgattttttttttttaaatttgtggag

SEQ ID NO: 53745 - DNA, 343 bp, Gossypium hirsutum
  Clone ID: uC-gsflmaxxa049b06b1
ccttttcgtccggtttcttctggttggatgagaccctttattctctgatccttctatctgttgctgtgtccctattttttctgcttgcacgagactcctggtttacgtgatcctcctcctttttatctgttgctccgtgaatcgttttcttggatcacccaaaggattttcctttaaatagattgagctagtgaggttggtagagtaatttaaccaaaacccattatggacaaaggagagttgtttcatattgcgagctctgtttttggtagtataagcttttggaggatttttgcagagatctgacatgtgtggggagaaccaattgttgttgagattggac

SEQ ID NO: 53746 - DNA, 296 bp, Gossypium hirsutum
  Clone ID: uC-gsflmaxxa049b07b1
ttctccacgcctccggggccacgtctgcatggagcacagttgcaagtcttgtgactgcgctgaggttaatccacgccaagagcagactcagttccagcatcatggtgcgcaatccccgacagctatggtatacctatctttatatatcgtgtcccgactcctacctactgagagcgttgtgcaacacaacatattattggccgtctctgggatatcgacctccgaacttgcggttccaactgtagctatgcagcttactaatcagtccctttctataactgtacactggatcttcc

SEQ ID NO: 53747 - DNA, 272 bp, Gossypium hirsutum
  Clone ID: uC-gsflmaxxa049b08b1
tttttgctaccactagagctcttgttgttctgagaaaggttattgtcattccctatggcctaaaatcccatggtgttctatgacctgacgattggcggttatccctgtgctccgattgggtttgatgtattaggaaatcgcgctcctcgcactgcggatacctttctcgccctctttactgcttagaaaggtttctggcgcagcggttagctcctccactacaaatgctgcggtattacattgtgggatccctaactttatgtgccctggtg

SEQ ID NO: 53748 - DNA, 342 bp, Gossypium hirsutum
  Clone ID: uC-gsflmaxxa049b12b1
tcgtcttcttcaaaacctaacataaaaccctaattcttaatctttaacattctctttcaatagcgttatctttcctttggctactgacccctctttcgtatttacgctcctatcctgtctaagctctgccatacgcaacgaaattggaaattccacttccaaacggtgtcatgttggacagttccgtgggctttgcactgcaagctatggttgtcgtgaccgacattgttgaaacaaattcagtcccttggttgctgatgatgatgggaactatgcctaatggaattgatgccctcattaaagagcctgtagcatatgcagggtttcttgtttgctcttttt

SEQ ID NO: 53749 - DNA, 337 bp, Gossypium hirsutum
  Clone ID: uC-gsflmaxxa049c04b1
ttctttagtagctgggaattgtggaagaggaagtggttatgattatgggaggtttgcatccaggtcaaatttatatcttgggaaagattttttggcttgagacttgtgtaataataattcattttgaagaagagcaaatgggtgtttgtcaaaagctttaaaaggtttctagaatggaaacgggaggaggttctgggttattgcgagagttaagaaagggaagaagcatgattacccttggccggataatattgacctggatatcaaagacgggcacttgacttacttgtgtcatttcaagcctttggctgagaaaccgaaaccggtgaccttacca

SEQ ID NO: 53750 - DNA, 275 bp, Gossypium hirsutum
  Clone ID: uC-gsflmaxxa049c08b1
tttttgcgctgacttgaatgaagacaacatcaacggttcgtattacgtgggtgtctcttcactctggggttctacatagccaacatgtttggatgtcaccgacaacagcctatttaactcaatttgaactcttaatcctcttctatgatagtgccttcatccccagtaatttgtgaagatggaagaacaaaagttactttagtgcacatgaagcttgtacgttcttctgatatgaagaagctccaagatttcattggtatagccctgaacaccgg

SEQ ID NO: 53751 - DNA, 341 bp, Gossypium hirsutum
  Clone ID: uC-gsflmaxxa049c09b1
tctcttttccttcttcatcccgggacaaatcggcttcaggtcattccttgactgtccgagaaacaattacagttactcgggccgaaatcgaaggtgccaccgtatacgaagtcacagctgcaggaaatcatagatcaaaaatgggaatttgtttagcacttcattggcagatatggccaaccagtacattgctgttgacaaaatgttaaaggaatagacgaaacaagcaacatctatggcttaaactttggtgattttgttatagaggagaatgcttgattcttattaggaagatcagatctttatgtatcagattggcccatctactggttttagattta

SEQ ID NO: 53752 - DNA, 336 bp, Gossypium hirsutum
  Clone ID: uC-gsflmaxxa049c10b1
cggacgcgtgggcaaaagccaagtgttctttattgcttctacaatggataatacacccttaagtgcaatcaaactcacgtccttctagctattgcaatagcaatggtgccaactaagctaaggctcaatccattgatttagtttgtttttgaaaatgttgagattatattcccactgaatctggacagtactttctttattgaaagaaagagaaactggaactgtagtttcttgattgttcaagggaggaggggagggtgagcatctctgactttctttcagttagtgatcttttctactttgcacatctgtttgactttgtcctttctcagtatc

SEQ ID NO: 53753 - DNA, 241 bp, Gossypium hirsutum
  Clone ID: uC-gsflmaxxa049e04b1
tccttgcgtacgcccacgcgtccgaccacgcgtccgctttcgcgtgggctgacggtgaaaagcaagatgctataaacttatttttgggctactttcaaccacaggaaggaaaacctgcttctttgggagttggattctgattactatcttcatgattttggcgcaggagatgacctattccctgattaagtgcgcggaggacaatgttaagcctttgggagatcgtgggaaagtatccttg

SEQ ID NO: 53754 - DNA, 336 bp, Gossypium hirsutum
  Clone ID: uC-gsflmaxxa049e06b1
ttttatacggggccagtgggttacccttaattttggtcaacaaatgttgcaacagcaggagaggacaatgctggctggctgctctatacccccccaatgaagtgatctgaaactgaagcaagcggttgttcaagttcaactcagacacaccttccacttgctgcaataacttacgtccacgtttattctactctgcgtgcactcaaaccttttgagataattgctcaccatattagttgtgcacaaccccatttttctttttcttattccttttatccaaatcttattctcagcttattaatcattcattcgatttgcacatgagaaatcggatta

SEQ ID NO: 53755 - DNA, 325 bp, Gossypium hirsutum
  Clone ID: uC-gsflmaxxa049f03b1
tttttcgcgtgggcggacgcgtgggggctttgcgagtgcattctataattaaaggagctgttgtggcgttctctgcataccgggattttaatgccttccccaggagactcacggagggctgtcagagaactggagtcaaactcatagatgtcccaaatggaaggaaggatgctgccgacaaggctattttggttgacatgttcttattcgccctggataaccccccacctttatttatcatgctgatttcgggggacgttgattgtgctccggctcttcacattcttggccaacgtggctatacaatcattcttgctattcctgc

SEQ ID NO: 53756 - DNA, 324 bp, Gossypium hirsutum
  Clone ID: uC-gsflmaxxa049f08b1
ttctttccagcggtcggatgagcaccggcgtgtcgtggtgtggcctgcgcccccggcagtcctcgaatatccggaggtccgagtgccgcgcgtgcccggtagtagttatggccccatcatgtctctgaggtgatacagactatggagaatgatacaatgtaggcatggctagtggtgatattggagccgatgccttaggtaatggattgtatcttagggctgagcacgggggtgcaatgtctgaacctgtatgctgtgggagcactgatctagctggtccctgggtgagagcgggtctgagtatgacgaccggtggacagactg

SEQ ID NO: 53757 - DNA, 334 bp, Gossypium hirsutum
  Clone ID: uC-gsflmaxxa049f10b1
tcgctttacgccacactctcattgtttctctgtggtaatggaaggctcagtcgaagatatggcgaaagcagtttccgatttagcattggattcgtctgctgccggtgaagctcagagcaaaaatgctcgtaagaaggaacttaaaaataagcagagggaagaggagcgtcaccgcaaggcggaggagaaagcagccaaacaggctgcagtcatggctggcacacacagtcagaaacatgcatccgctgaagacgaagatatggatcccacgcaattccacgagaacaggctgaaatttctcgcatcccaaaaggcagaggggaaaaatccatat

SEQ ID NO: 53758 - DNA, 353 bp, Gossypium hirsutum
  Clone ID: uC-gsflmaxxa049f11b1
tgggaccacgcggcctttttttcgtccgcccacgcgtccgctgctcttggcttgaagggctgacagaggtcaatgtatgggtctgggtctaaatttcttgatctagtgaggacctattacagctatggatgaattcaattgctgagggctattttttaaggttatgatgatagctcttgggccattcaaaccaaaactggcagatttgtaggagaagtgcagctgatactgctttatgccaacgccttacaccaagcctcaggaggatatagtcaaccgtcggcaccaccagcattatgcaccgacaccttattaaccaccttcatacgggggaccacctgtttcagctgctt

SEQ ID NO: 53759 - DNA, 205 bp, Gossypium hirsutum
  Clone ID: uC-gsflmaxxa049g06b1
attctaattagtgaatcatatggacagcactgtggccctaaagctcgcttgtggagtggtcttgtgcttggatgtgggtgcacccttggctgtgggggccatcagatgtggacaactgatattaggcttgacaccctgcatcccttacgtgagaaacatcggtgctggtggcgtgcctgtatcttgctgcaatgggatcagatct

SEQ ID NO: 53760 - DNA, 298 bp, Gossypium hirsutum
  Clone ID: uC-gsflmaxxa049g09b1
tcttacataaataggaaacctttattttcccttcctcttactctcttcctatccgattattctgcgcgctaacggatttacaatctgcctatgtgtcggactaacagtaatcacttgattgaatgcttgaaagcaaattgccacccaaagaagatacatcactgagttccatacttatcttccctctagatatactctttgggccttttaggaggagaattgggaggaggtcatgattacaggaactttgtatgaagcacgttgctcagaatttgctgggcaatgtttaaagggtcaa

SEQ ID NO: 53761 - DNA, 233 bp, Gossypium hirsutum
  Clone ID: uC-gsflmaxxa049h09b1
tcttttacccatgcgggccatcaagggctgtaccctgtgttctagggacagagattgttagctcaccacccagggccataacctgggaagttcgacaaggggccgaatactgactatgatcggattgtggacatttgaggatagtctcctgagcatgctacataaagttttggcgaaatggaatcagaacactcgacgaacaacaggctacctccggactctacagacctttg

SEQ ID NO: 53762 - DNA, 157 bp, Gossypium hirsutum
  Clone ID: uC-gsflmaxxa051f03b1
ttgactcgtgggcgttcggagaacaaaatacagagaaagatgctcatgaaatgctcagttatgctcttgaacatggaatcaatgttctcgatacttttagcagcctacccaattcccatgaagaaagagatcagttttttaacttatatttacattt

SEQ ID NO: 53763 - DNA, 106 bp, Gossypium hirsutum
  Clone ID: uC-gsflmaxxa051h03b1
ctcactcgtgcgaggcaatccgagatccttccctatctcacctatgttctgagcttgcgtgcgggcctaggacggatctatgaatctattcctttagcaacccctg

SEQ ID NO: 53764 - DNA, 350 bp, Gossypium hirsutum
  Clone ID: uC-gsflmaxxa051h09b1
tcgttactgactaataattttaagtaccaacaaccatcattcatgtaatgtacttgtttgtgggcatagcacgaatctatgaacattcctttagcaaccctgagctgtgtggtccttatttggggccttgcaaagatggggttgctaaaggaacacatgaaactcatgttaaaggtggactctctgcatctttgaagcttttgctcgtaataggcctgcttgtcttctccatcttgttcgcagtcgcagctataatcaaagcacggtccttgaagaaagcgagcgatgctcgggctaggaagttaaccgcgttccagcgcttggaatttacttgtgatgatgttcttgga

SEQ ID NO: 53765 - DNA, 270 bp, Gossypium hirsutum
  Clone ID: uC-gsflmaxxa052c08b1
ggggatcacaagattactaatggacacattgctttattcttgatcaaccgatttaaggctgctatacgggaaactatggtgcttccaaactgtgaaagtgcatacattccatggatgatggcagaaaaagatgattggatccctagaaacgttgccccactatatatggctcaatcatgatttgttctcatcttctgatcttaaaacactctcgtgaatgttccaggccccttcttgtttcttgatttgtgagctatatgaaaactcttt

SEQ ID NO: 53766 - DNA, 109 bp, Gossypium hirsutum
  Clone ID: uC-gsflmaxxa052e03b1
ggaattcaccttctaaacccaccacctatcagtgtcgccatggacgaataattcatctctcagtttctctagcgcttcaaagttgtgatgatcacctttttgcctctat

SEQ ID NO: 53767 - DNA, 182 bp, Gossypium hirsutum
  Clone ID: uC-gsflmaxxa052f12b1
tttctttccctgcctatcagcctccattcaaagattttcatcactttagaaaggggaataaaattaatgttcacattgattctctaagattcttttgctaacaaagcttcatttcctctttttcccttttctttattatttttaatctccttcattcattattcttactactaaatttatta

SEQ ID NO: 53768 - DNA, 147 bp, Gossypium hirsutum
  Clone ID: uC-gsflmaxxa052g08b1
ttaaacttatgctgaggctttgaaaatcaaggatgcacctgccctcgataaaatattggctccttcgaggaatagaaggaatacgacgatgcatgtggacctttcacatggcgcgcctatcgatatgggtacggctcttgatgctag

SEQ ID NO: 53769 - DNA, 186 bp, Gossypium hirsutum
  Clone ID: uC-gsflmaxxa052h04b1
tccactcgtccgatcgctcctactgatgtttaccaaaggttggtcagtttcctacatgctgcaaaaccgcattgaaacactgcttcatccttacaaaacattggggaaaatttcaggtgacatgggttagttacctggttatgttgtcatcatcaactaagggatgtgattcactagcatcattgt

SEQ ID NO: 53770 - DNA, 468 bp, Gossypium hirsutum
  Clone ID: uC-gsflmaxxa052h10b1
attatcagctgaattctactctcgcttaccctgcaagtttggggcagacgatttctcctaaaatattagctcattcctcccacctcagttcgacttgaatttcataagacaaagtttacaaccatgagctggaatttaaagtaatctgctttctgtaacgatctttggcgtaaaagagagtgtttggagcttttaatttgttgaaagagaatgaggaccaagcgaaaacgagcatgcaagaaatccccagccagaaaatcagctgcagtggccagaaatggaaaagcaacgaaccaaagtgaaaaggcagtgaaccaaaataaggaagcatttttaacttctattaacaaaattaacaaagaagactctgtgtcttgagactctaacgatttggtagttactgataagtgtgattctgaccctgatgatgcccagagaaatttattattattcgccctcttctagtga

SEQ ID NO: 53771 - DNA, 281 bp, Gossypium hirsutum
  Clone ID: uC-gsflmaxxa054a06b1
ctttaacaaagctctagcagagactaaagctataggagaggaaaaattcaaatagcgggtgagaacagattgtggatctgttataattgacgatggtagtggaactagggaacggcgatgatggcgtcacctcattggcgtcaccgacctccgccatggccagtgttcttcctgtcgcttgcgtctctcaacagtcgtacgtgtacgagcttctgttcttcactctcgatcggctacataaagagtcagaacttgttctagttgatgcggaaaggattcag

SEQ ID NO: 53772 - DNA, 377 bp, Gossypium hirsutum
  Clone ID: uC-gsflmaxxa054a10b1
tttattgttgtgtgttctctaatagaatcgaggtaagagacactgggctcaggggacatcaattttaactagaagaacatggtcatatttagagtgaaaagtcttgcattttatctagtgctaaggtggtgcatattagtccgtccatggatcaatgcatatttgattttcttttcacactgctaggtgctttcactcatctgtaaggattggggtagattatctttaaaatagttgagcggagctcatcgatgaacttacttggaattgcttgtgtgctggcgcttacatgatttggaaatggattttgattgaaatattcacgcaatatctatatgcatggcatggctagaattcgggatgcaatttaactgaaa

SEQ ID NO: 53773 - DNA, 402 bp, Gossypium hirsutum
  Clone ID: uC-gsflmaxxa054a12b1
tcgattttattttctttaaactgtgaatttcatgtgcttgcagacagagagagagagagcagtgcagtgcagtgaaggtgaaatggctttcggtagtactccagttcttctttggctcttcttcttatctttatctccattgaccaaagctaaagttccagccatcatagtgttcggagactcctccgtggattcgggcaacaacaacctgatctcgacggttttgaagagcaattttcagccttacggtcgtgatttttacgggggtcaaccaactggacgcttctgcaatggccgaatccctcccgatttcatcttcgaagcttttggactgaaaccaggcatcccagcttacttggatcctgcttataatatatcggatttcgccactggtgtttggtt

SEQ ID NO: 53774 - DNA, 522 bp, Gossypium hirsutum
  Clone ID: uC-gsflmaxxa054b01b1
ctttgataaggtgcttgcaaaagaagtgctgacgggcagtttctatgttgtacagtgagcattattttggctgtcttctgccatctcaacagatctcgggcttttcttgtaaattacagacaacaaggaggaaatctaagaaaattttgcaggaaaactgttttgcagcttgttgaaaggtatctctgtaagtgaggataatttggtctctgcaaaaccatcatgcaaggaaaacgggcatttgtagatgaaaaggattgcttatgattaaagaggtaaaagtttctcggtttggataataaaaattctgtaccaacacttgttcagttgtagtaggcacgtttactacttggtgctttttaaagcatttcttggacttgcactctgttgtagatacgaggacattaattttgcgggagaactactcaagtgatttataacatacagatgctatgttttggtgggctgattttggagtttttatgttctgagctaattagaaggggatatttcattattatt

SEQ ID NO: 53775 - DNA, 201 bp, Gossypium hirsutum
  Clone ID: uC-gsflmaxxa054b06b1
tttattttttcgaggacgcgtctacttttgaatggggagggtcctagttattgagggatcacgcatacattatagatccataaaattcgtaataaatcatctatgccctgttggagctatataggatatactaaagaataagcccttactggattcctacatgtaatgtcaaaatcctctttgtattctattataatatat

SEQ ID NO: 53776 - DNA, 335 bp, Gossypium hirsutum
  Clone ID: uC-gsflmaxxa054b07b1
ttttgatattctgcttgcaaaataagttctcacggccgggttctttaaattacaggggtcattaaacaagctgccttcttccatcttaacttatcttcgtcttttcttgtaaattacacacaacaacgatgaaatctaataaaatttttcatgaaaactgttttgcacctctcttaaatgtatctctttaagtcaggataatcttgtctttgcaaaatcatcatgcattgaaaaccatcatttttttatcacaaccaattctcattattaaaacatataaaattttccttttactggataataaaaattcttttccaacactttcttcaatttta

SEQ ID NO: 53777 - DNA, 463 bp, Gossypium hirsutum
  Clone ID: uC-gsflmaxxa054b09b1
tttgagggaaagaaaaaatcattcttttctcattgttgagactttggctcaaagctaccatctttactgtcactcccgaaggactcaaatggtagaggcgcaaacatggactacaaggaggatgagcaacccaagattggaatcaaccgccactgccgaccaccaacttttggacatcccggctaccccaacagctgaggtgagaaacggcatctacagcgttggatcacatctatctcctaatctcttaacggcactgatcattgcttcatggttcatgtccaacattggggtccttttactcaacaagtatctactcagcttttatggctaccggtatccaatctttctcaccatgctccacatgaactcatgtgcttgttacagctacgtagccataaactttcttgaaatagttccaaggcaacatattttgtcgaggaagcagttttttaaaatattt

SEQ ID NO: 53778 - DNA, 384 bp, Gossypium hirsutum
  Clone ID: uC-gsflmaxxa054b12b1
tctttttaggagcttttggagaggtaagattgggtcaggataaaaaatcagggggtgtttttaacacgaaaaagtttaagaagtcagaaatgcttatcagaggacaggttgaacatgtaagagctgagaggaatttgctggcagaagttgccagtcacttcattgtgaaactctattattcttttcaagatgctgagtatctatatctaatcatggagtatctgcctggtggtgacatgatgactttgctaatgagagaagacactctaactgatactgtggctagattttacattgcttaaagtgttctggccattgaatccattcataggcataattacattcccagagacattaaacctgataatcttctattggacaaaa

SEQ ID NO: 53779 - DNA, 205 bp, Gossypium hirsutum
  Clone ID: uC-gsflmaxxa054c01b1
ccatgcgtttatttatgctgcgaaacctgtaaaaactgacgggcggtatttaaaaaacggcgccggtaaaaaaccaacttgagactaacatcataattccgtaccagataacatcgccgaacccacacatcccgtatggaacaaacaacaatttatggttatctcacaaaacctctccaaggaacataatttaacccaattagta

SEQ ID NO: 53780 - DNA, 503 bp, Gossypium hirsutum
  unsure (1)..(503): unsure at all n locations
  Clone ID: uC-gsflmaxxa054c03b1
cctttttggacttttcatccatatgattgcaagggtgtaaccgttaggaatgtaaccatcttagcacctgtatttggagctccaaatactgatggaattgatcctggtaagtaatccctgattataaattttgaacttttgtctataaaaatttttggtagctaaggctctagactcgattctcattcatgctactagtagttgtatagaaatgctcactgtacatatataactcgcttattgagcaagcttggttgacaaatctgtagaatgaattcaagactataattgaagaaggtttgcagaggctattatatacattagttaaagtacgactgtgcatttgttggaacgtatagaagcaggaaggtgagaacttagatgtaagatgtatggatatggtattctgagctgaattcaatgaaatgtgtgggcaaattgcaacanaattgctttcattattttggcttttcttctttttcccattcctctttaacacatac

SEQ ID NO: 53781 - DNA, 185 bp, Gossypium hirsutum
  Clone ID: uC-gsflmaxxa054c08b1
ttgtttttacgttcaatccctattcttgcaacggggggacttgttaagaacgaggccgtcttaacacctgcatttccaactccaaacactgatagaattgaacctatgcaataatccctcattattaaatcccaaacttcttgtctataaaaattttttggtagcttaaggtttaaactccattc

SEQ ID NO: 53782 - DNA, 403 bp, Gossypium hirsutum
  Clone ID: uC-gsflmaxxa054c10b1
ttgttttttcgctgtgtttcatctctcaggtaatggcaatggcgatggcgaagccgtggatgtattgcttgcttgtttgtttaggtatggcgttgaacaatgtggcttcagggcaaggagaaaacccttttgagccagatggtggaaggagaagagaaatggtgcctgctatgttcatatttggagattctctcattgacaatggcaataacaacgacctcccttctttcgctaaggctaattatttcccttatggtattgacttcaatggcggtcctactggtcgtttctctaatggttacaccatggttgatgaaatcgctgaactactaggacttcctttaatttctgcatattctgaagctttcggcgggcaaagttttcatggtgtcaactacccctc

SEQ ID NO: 53783 - DNA, 154 bp, Gossypium hirsutum
  Clone ID: uC-gsflmaxxa054d05b1
gttattttttcttttacatttcaaacatcaatatctggggaatatagtgctttaatgacagtgactgctatcttggtcccagtagttgtcctcaaagtattgatcctactgatgcaattttatgttgaatattatgggtgcttgccagaatgga

SEQ ID NO: 53784 - DNA, 508 bp, Gossypium hirsutum
  Clone ID: uC-gsflmaxxa054e02b1
ggtaggtgttgaatttgcaagagaatatactaaactggaagttaaatttgttcctgaaatctctgaattttcagaaactaaatcagatgaagaccttgccaaagaagttgctcagtttgcatctctggtgcaagattctgtaggggtcttaacagagactagcaatctatttgaatcaatgtccagatatccattttctgcttgctctggtttggtatttgtaccaaagatcactgcaaagaatactgctaaattgtttgacctgatggtagaagatattagatctttcataaatggaagagggagaatgagccctgagataaatttccacttgcttgggataggggatccatgtgagacaagatttgtgcttggcaaaattattttagaaacaatgaaggctggtccccgtggagatgcgacagagataggcaatgatgagaaagaccttcaaccaaaggcgactgatgaaattttgtccaataatgaaattccagggaacgaggtt

SEQ ID NO: 53785 - DNA, 386 bp, Gossypium hirsutum
  Clone ID: uC-gsflmaxxa054f03b1
cctacttcttccgaattctacgacttttaccaagagaaaagtgtgaaatagctttcagttttcagcttagcttcttcaaagctatgggaacccgaggagttatcggagataaatggtctatgaggattctctgggggtgtgcaattggaagtgcagtcgccctgtatatggttgctgtagaaagacaaaaacagaacagagatcaaatgatggcagaaagtttaaaggccatggaatcggaaggtagtggtgagcgagtttgaacattgacatgtttaaatgttcatagggtacttataacaaacttgttaatgaggcttcccaacacttgcttttggtcttaccttttggctggaagtctgatgcgtgggttgcaaaaatttttt

SEQ ID NO: 53786 - DNA, 489 bp, Gossypium hirsutum
  Clone ID: uC-gsflmaxxa054g12b1
tctctcacgcgtccggaaattccatctgcctttcccggtctatttgctcacagtcacaggttcagctgtagaacaagaaggaaggcgcttcgctcaaccaaaggtgtttcactgcattatctgtttagccagtccaaacgatggaccgatctagacttaatatgaggggtcgttgctccggttcaacaccatcagaggaatcggctttggattttgaaagaacctgctgctgtcatcctcatcttccttcatttagttcaccgacacttcagccttttgcttcggctggacagcacagtgataacaatgctccttacttttcatggccgacatccagcaggttaaacgatgctgctgaagagagggcaaactattttgctaatctacagaaaggagttctgcctgagactcttggtggggtggcaaaagggcaacaagcaacaacattgctcgagctaatgaccctaaaagcatttcatagcaagaatt

SEQ ID NO: 53787 - DNA, 423 bp, Gossypium hirsutum
  Clone ID: uC-gsflmaxxa054h04b1
atttatttcaagtacaatactgtttggccaaaggggtgggaaggttgaaaatatgtggagaataaaaaaagagttcgattataaaagtttgtccagaaagcttgaaatgcatctggacaagctcattgcacaaaatgaactgcaacagaaagtatttgatgatgaagttgaaagaataaacttagaagcactaaaccgtgtttcggaggttgagagaaattttgcaggtgccttatagaaggagcgactaaagtgccagatggaatatatggagtccgttaagaagctggaggaaaagatgattgaaaatcatacaaaagcatgggtgtgatggcttaatgcaggataaatgtaacggagaggggcctcggtcttttattgttgaggatgttgttgatttcaaaaagcttcttggtgaaagaa

SEQ ID NO: 53788 - DNA, 334 bp, Gossypium hirsutum
  Clone ID: uC-gsflmaxxa054h07b1
ttccctcgcctccgctctgctattctcccaaagggcaggcactcttacctttttgggggtcttaaaacccggaaatagcttctgtgtgtttcacacctttaactatcgctgaagtaaaaatggagaattcttcaaaaaccctttatgggtacactgccattctcctcaaaatcgtctaaaaatcctctttccccccaggttttcagccatggaaatggtgactcattaacggaagtgtctttcaaggcaatgtgtaaaacaacctagattcctttgcagtctttgatgatggtggctgcattgcacttgacaccatactgcttcgcgccccact

SEQ ID NO: 53789 - DNA, 340 bp, Gossypium hirsutum
  unsure (1)..(340): unsure at all n locations
  Clone ID: uC-gsflmaxxa054h11b1
tactttttcgcccatccagtcccctcccatgtgggaggatttaacgacnaaacggggacgctctccaacgactctcgcaacggtgcatggaagacagacgtgcgcggcgtggaaggagaacgtgcgacgtgttgtgatatctgcgcggaggctatttgctgctgcggtactgaggcgaaggggctagggttctttgattctgttatgggtttattgggctaatgtaattgggttacaatttgagctcgttatttgtttttttatccacgccaaaattgggctattacattaataactcggataattcaactaattcaaataaaagattggtggctgtcac

SEQ ID NO: 53790 - DNA, 187 bp, Gossypium hirsutum
  Clone ID: uC-gsflmaxxa055a01b1
gaagattttacacaagacttttgcctgctagacgaattatatctctcggccaccgccaggaaggagccatccggttaacaggaagggcttccttccttttgccttcaccttcttaatattctcatgaactttcttatcagccagtcatggattggggtttcccaaacccaggcatttttattcattc

SEQ ID NO: 53791 - DNA, 482 bp, Gossypium hirsutum
  Clone ID: uC-gsflmaxxa055c04b1
ttggatttcgacatcggagaagaagaagacgaagaaggaacgccatcgccgtcatcgatatcgccgccgcttcagtacttcgacagagatcgccacgtggcgttcttggagatgatgtacaatttgatgccccatcactatcaatcgcaggagatcaatcgcctcactcttgcatttttcactatctctggccttcatctcctccgagccttagatcgcgttgataaggacagagttgccgattgggtttttatcatttcaagctcatccgagaagtcgagccgaattgaaaattggtcaattttatggatttcatggctctagaacttcacagttccctccagatgaaaacggggtttcagctcgtaatgctggtcacttggcaagcacgtattgcgctctagccatactaaagacagttggcttataatttcttgaccatagacaaagaatcaatttttgatatcattggaggaattttc

SEQ ID NO: 53792 - DNA, 440 bp, Gossypium hirsutum
  unsure (1)..(440): unsure at all n locations
  Clone ID: uC-gsflmaxxa055c10b1
taagaatgcgacattgacagtgctgcacattccgaccgatggccaccaaacccgagctccaatccagcgactggtcatcggcagcagcagcggcaccgcagccagaaaccactccttctgcacccaagaaacccgacggcggggcacggatccacttcacgaacccggatgatgccatcgaggctttcgtcgatggctgcccggagaaaatgcccaagggcatgaccgttcttcaggcctgcgaaattgctggtgttgacattcccgggttaggtggtcatagtcgactgtcaatcgctgggaactgccgtatgtgcctcgtcgaggttgaaaaatcccccaagcctgtcgcctcttgcgccatgcctgctctcccaggaatgaagattaagacggatacacctttggcaaagaaagcacgcgnaggagtaatggagttt

SEQ ID NO: 53793 - DNA, 465 bp, Gossypium hirsutum
  Clone ID: uC-gsflmaxxa055d11b1
tacccaaatatttgcatgcctgttcttcttttctggtacgttttttgaacttggaatcatgggaactctttaaattgattggttcttgggattgcttaggcttatgttatctattgccttgaaagtggtggacgtgggtgatttaagaggagactttttgatgaatctagattgagggtatggaggcaggtttataactataagggtagcttttggatttggcaatttgtgcggtctatctttctttgtttctttgaatgtatcttattgttattgaagaaaaggatcggcttgtgaacctgcccggcttttatctggatgttctcaagcctttgaatttactaccctttgaacagaaaatcgttttttttttgtatcccaagagatagatgggataaagagttcttcaagcttcagggtgggtaaatataatttggccaaatttattaaattgaggaagatctt

SEQ ID NO: 53794 - DNA, 483 bp, Gossypium hirsutum
  Clone ID: uC-gsflmaxxa055e04b1
ttttgttgcagcagccttgattctccttgccggtcaagtcacggccagacgtgaaatcatagaagtcaaaggtcgcggagtaacggaccctatcctcgaagccaaactaatagacatgcttgaagaaacagagcgtacaaaggataaggtaccggtacttggtaatagcgagatggttaagtattgtgataatgcctatggaatgtccataggaaacttgaaaaaggcattgggtatgcttcaacgtggtattaaatcaccccaaggtttcaaggaactcgaagccatcgtgttggtagtgatgaaggcttatgaggaatgtgatcatgtttttgcagagaatgcttagcctttaccttttggtattagtaatactaaattgaaatcactgggcactaagtgtaagcaatatgctgaagaggatgcttaacagaactaaattttatgtatgtgcatctgtatgtgtatgaaggttgatgtttc

SEQ ID NO: 53795 - DNA, 483 bp, Gossypium hirsutum
  Clone ID: uC-gsflmaxxa055f03b1
ctttggtgttggtgttgttcggttgatgggttcagctgtgccatatcaccacagctgcttcttcccgccaccagctccgccttcaagaaactctgtcatctatgtaatgtgtctagattgaagcatgtatggtctgaaacaactttcaaactcatgacaactggcaattttcgatgtgcaaatgatgctgactgcccttcgtgctcatcttacttattcttcaatgcgaagaaccaagaaaagggtttggaattgcgggtaatagtggatcattcaagatatatacttacaggagaaattcatttaacacaaggaaattgcccaacacccttatagatgtcaatgtgttgtaagttttcgcttgtgaaaacaattacctgtcaattcacaaaagattgaatgtctttttaaaaacgaaaggcaatttttaatttgcagaatttatgtgcacaacggcacacaagggagctgctgctttgttta

SEQ ID NO: 53796 - DNA, 478 bp, Gossypium hirsutum
  Clone ID: uC-gsflmaxxa055g06b1
gctttgacaacatccttatgctggaagattgtggctaaaactgttgattcaactggagttggactcgtaatatatcaaaagccttcctcatattcctgttacaagcatcgcaaagaaaaacttccacctttgtgtgaacagaaaaccaatcagaatgcctcatggtacgagcctcttagttattgtatttcgcgccttccagttgacaggatgggtaatttgctcagatggtccacaccatggccacaaaggcttagcagtaagcctccaagccttccatccgaaccagatgctgaagacatattcattgaggacaccaaacattgtgcagcacttgtatcagaggtgtatcttgatgggctagctataagcttgggacgtataagaaatgtaatggatatgaatgctggttttggaggggttgctgcagctcttattgaccaacctctttgggtgatgaatgttgacccattgatgc

SEQ ID NO: 53797 - DNA, 321 bp, Gossypium hirsutum
  unsure (1)..(321): unsure at all n locations
  Clone ID: uC-gsflmaxxa055g07b1
ccggcactgatttgatatatgttgtaggatttgctgcttcgtaccagtttgagatgtaccaaatcaatgctaagaatggagagttgttgaagcatgaaagtgcatccttttctagtgggttttcgggagaagtttcactagtttccactgagacagttgtggctcttgattccacagggtcaattttgctaacaataagttttcaagatggaaaaattagttctcaacagacacccattttcaaatcttgtcgaggattctttaggaccggcngtcttaataccttcatcagccttaggaatatttgcaataagacagatg

SEQ ID NO: 53798 - DNA, 115 bp, Gossypium hirsutum
  Clone ID: uC-gsflmaxxa055h09b1
aacacaacctttgtcttcttatcctccaaatattcgcagttctgatcggcaagacacagctgagtcttctgcggagtcagagtttccaaccctgaggactagttctagatcgcga

SEQ ID NO: 53799 - DNA, 493 bp, Gossypium hirsutum
  Clone ID: uC-gsflmaxxa057a03b1
cctacgctttcggaagcagagacctctctaccaggcactggttcacgttaacaggggtcattcagcttcttcttttcgtttctacgcaaaatacatacagtttattccctttgtttcttcgtttttggtttccaaaggataggaaaaggtagatactgagtgaagtgacaatgggcaattgcttgcaatacttctggcctactgcgcaaaataaccctgacacttcaggacttacaaccggtctcctgagtgaaataacatctgaaagtgattttccaaccgtcaatctgaaagttttcacatatgctgagctagacaaggctactagaaacttcgctttggcgaatcgccttggggacggcgggtccagtcatgttttcatggggtacattgatgagcggacctgtagagctgcaagccttgcaactggaacaccccgtgctgtgaagcgggttagaaccggcagcaatctgactcatgatgagttgctgag

SEQ ID NO: 53800 - DNA, 299 bp, Gossypium hirsutum
  unsure (1)..(299): unsure at all n locations
  Clone ID: uC-gsflmaxxa057a05b1
aaatcatttccatcttcctctcttcaagatgaatgccttggtctacatctataggtcttgacgaacagattcagagattcctcccaccaggtaataactctctcttctcttaaggcttccttcgcaataacatgagcgatcatattttctgctttagggacaaaatgaaactcaatctcctagaatctgtgttttatgctttgaatgtctctaatgattgctccaatggccaatntatctgtttctgtactctgacattttctaataacaaattttgagtctcccacaacatccatttt

SEQ ID NO: 53801 - DNA, 452 bp, Gossypium hirsutum
  Clone ID: uC-gsflmaxxa057a07b1
tcgaatatcccaaccttttttccaaagaagaagaaaaggttcgtttttgagcttaacccaacaatgctaccttgtttctgagtccagctgtagcctccatttcctcaaatgggttgttgtctaagctctaaaaaaggttcttctcgtggaaaggaagcacatttacatgcgggtcttgaatcttttaaccaaaagccaagccttgaaagcagagctccgccgccttcagcggaagaagaaacggtgaaagaagttctgtctgaaactccaaagccgaaagctcgcatctttatcccacaagaagaagagaagaagaaaccccagatagaaaaaccggcgtttgtcaagatccaaggggaggaaagcctgaattttaacatcaagcctgagccgaaattgcctgtcaatggtattgaagagtcagcgttggaggatgtttctgagatttgtag

SEQ ID NO: 53802 - DNA, 335 bp, Gossypium hirsutum
  Clone ID: uC-gsflmaxxa057a11b1
tctgatatatatatatacatggaaagaaaggggagcaaaagtctgatggtaaactataggtaacaaatacatacacataatggaaaagttataactttatagcaaagctttaagcttgaactataagataaaatgaagagcatcagcatttccccccgtcccatctttccccttatactcccacagcttgaacatcgctacaaaatatcccgcctcaaccatcgcttgcctcttcttcaccttgacggtgccggtcgatcactcttgttgatggcctctctcagcaaccacaaccacaaccacaaccacaaccacaaccaccattttcggcacgc

SEQ ID NO: 53803 - DNA, 495 bp, Gossypium hirsutum
  Clone ID: uC-gsflmaxxa057b03b1
aaatggttggatttttgggaccagagtttggatctttcttgttcatgaattaagcttttgttcaagattttaatggcttatttgtctgagccatcatcttctttgagtttcagttcatcttctcatctatctaatggctcaatcactcacaatataccccctttttctgttcctgaaactggggctaaccttgaagctttaagtttgaccaagctcagctctagtttggagcaactaattgttgaaaattgtcctgtttttagtgatgctgatatagttgttgaaggtgttgctgttggtgttcatagatgtattttagctgttaggagtaagtttttcaatgaggtttttaaggatggatctgggtcttctgagaaagatggaaagccaagttataacatgtctgagttgttgccttatggcaagattgcacttgaagctttccaggtgttcttgagttatttgtatactggaaagctcaagccttctcctatg

SEQ ID NO: 53804 - DNA, 533 bp, Gossypium hirsutum
  unsure (1)..(533): unsure at all n locations
  Clone ID: uC-gsflmaxxa057b07b1
tcgggattcaacaaaaacacaatgttgatgcgctacgttcgttcgtccctcatcgcgtcgcgttttttctcgacggcagcgtcggtagagaaagcagtaccaactaacgaagtcgctccgaaaagcagcggtggaggtcgacgaaacacgttgggacggaggcttataggccttgtgtatccgaaacacaccgctgtagctacaatacagaaatggaaagaggaaggtcgtacggtcagaaagtatgagctcaatagagtcgttcgagagcttcgtaagctcaagcgctataagcacgccctcgagatatgtgaatggatgagattgcagaaagatatcaagctcttaccaggtgactacgccattcacttggacttaattgcaaaaattcgtggtttagatagcgcggagaaattcttcaaagatcttccagacaagatgagagaccaagccacatatacagctctgcttcacacgtatgtccagaacaagttatcgggtaaagccgaagctttaatgaagaanatgtctga

SEQ ID NO: 53805 - DNA, 521 bp, Gossypium hirsutum
  Clone ID: uC-gsflmaxxa057b09b1
aaattttcatccccaagttcccaacccatttgccaccgaagacgccgactagaccacctggtgcatcaccctcgactaacctctctgctgcgccgccgtcgctgtcgtcgtcgctctccactcctaaaaaataacttttgcttacccgctcgttactccctcttcttctcatctgtttttaaagccctatgtatactgattggttgggctactttggtctctcaatgagaacttcacatgctgaggcttagctgtcagcagtagcccaatcttgagaacaatgattaatttgtttatcagtagttaacctagtaaaaagtctcttgaagagccatccatatgtattctttttctttcaataacctctttttccccagattctgtggtcaggtggtacattctttacaaaagcagggaatattcacggaaaatttgagaatactcagcctaaccagacaccttcgcagaacttcagccaatttggtgggggtaatgtcaataaaccagggtcctttagggac

SEQ ID NO: 53806 - DNA, 450 bp, Gossypium hirsutum
  Clone ID: uC-gsflmaxxa057c08b1
cttacgcgtgggcttggggtttgaaaaagggaggccaacaccaaaatgacagttgttattatgattagcatgctttacatttcttcagtgacaccaattcttgggtgtgagagatgtgggaaagcaccacacatgcgatcaaagcctaagggacaagcctctaatggcactatcactatgactcccattgtgaaacctccaatcaagttgccaccggtggatgcttcaatagctaaacgacccatagacctacatccggttacaggccgtacaattaacctcacttcagggactgatactccaggaactaatccaccaagcgggagactgtgcctaacaccaccaaccaaggacacttgccccatagacacactgaaagtggtggcttgagttgatctgctgggagggatagggcacaatggactaggcgacccgggttgaatcattgtt

SEQ ID NO: 53807 - DNA, 509 bp, Gossypium hirsutum
  Clone ID: uC-gsflmaxxa057c11b1
tcgcccacgcgtccgttttcttattaagttcctttattcagttttagcaaaaactctcagttaacagtggtatttgagccaagttatcaaaaaaaaaggttgtagctttttgtattcaatggcgtctgaaaattttgtgcaactagcaataccttgttttgatagtcattatgatcactagagtatgctaatagagaattttctaagatcaaaatagtattggcaagttgtctcgaatggagtgccaaagtctacattaacaatgtcaaacacaaaaatagaggggatgaagttgaaggatcttaaggccaaaaactacttgtttcaagctattgaatgtttaatcttggagacaattctttgtaaaaataccttcaagcacatttgggaccatatgaagaagaaataccaagggtcaagtaggattaagaggcaatagtttcaagctctacgattcgaatttgaaacattgcggatgaagactagagaatcaatttctaatttttttt

SEQ ID NO: 53808 - DNA, 491 bp, Gossypium hirsutum
  Clone ID: uC-gsflmaxxa057d10b1
cccacgcgtccgcccacgcgtccgcgtttctgttttttttttgtttttttttttgggtatccttcatctattctacaggagttgttgaagcttccatagatgcgatgtcaacaaaaatagacctctcactctcccgacccaaccgcatctatcgcccctccgagcctcttgaaggcaaaatcttggtgaagtctgcatcttccatttctcactatggaattcgcatggccatcaacggctcagtcaacctccaggttcggggaggatcggcaggagtcatcgagtccttttatggtgttgtcaaaccaattaccatcctgagtaggacccttgagattagaccatctgggaaaattgtttcaggtacaacagagataccgttctctataactctgcggaatcctaaagaagataattcagaaagggtttacgagacctttcatggaaccaatattagcatccaagtattggcaactgtagatataatgaga

SEQ ID NO: 53809 - DNA, 509 bp, Gossypium hirsutum
  Clone ID: uC-gsflmaxxa057e12b1
tcgcctacgcgtccgcccacgcgtccgcccacgcgggcgttccttttggatctaacgtaaccgtaaacggaaacggaaacgtcggtggcggaggttctccggtatcgaagatcttctcggccttgcctgtacgaaagactgcagcagataattttttgaattcggagaacgaaaagtctgattatgattggcttcttactccacctggtacaccactatttccctctttggaaatggaatcacagaagactctaatgagccagattgggatgtctaatgctcgtccagtttcactgaaaacaaggctggcaaatctcccggaggaacctgctttgaagagcacccttgccttaaagcaacaagctccgtcagccggagtaatcttttccagtactctaaatagaaggccatcctcttccgggggttcaaaatctgctagtagacctgcacacctactggtcggcccactcttccacgacaaccaagccttaaggtcttttattctacat

SEQ ID NO: 53810 - DNA, 409 bp, Gossypium hirsutum
  Clone ID: uC-gsflmaxxa057g08b1
tcgcctacgcgtccgcccacgcgtccgctttgatttctccttcgtagtcaccactcatcaccactatttccattactggaaacaaaaagagtccccccttccctctccaattcctttaaaaaccagtaaaaaaaaaaattttcctacatcctcaaccgtagcccatagatatataaaacaaacatatattcttctgaaccaaaaatatctataaatacccaatgcttcttttttaaatacagttgggactgtacaaagggggagagagagccagctttgtgaggaagaaaaacaaaaacccaaatgcataataataatataccctttgcttggtttgtgttttttggtttgtgagtgagaacaaagatctgggcttttgaacttattggtatctttatagctgagatct

SEQ ID NO: 53811 - DNA, 458 bp, Gossypium hirsutum
  unsure (1)..(458): unsure at all n locations
  Clone ID: uC-gsflmaxxa057g11b1
tcgaatcatttaatgcaggggtctttctttccttttacaaacactgacatgcaagcagcagcctctaatgttctaccaactttatctctgtggttgatgacttgggaaaagaggaaacaagcatgaggctgatgaacttgcagagaagatgttagagatggcttcagatggtagagtggaaaataagatatctcgaaaaccaaagaaattgatccatagaaaagaaacgaagtatggtggagatgactggcaaacaatagtacacaggtatggctaaagtagtaattctgtttggtgctaaatgataatttccaaatatagacagtagtgaactatagtcttccctcaaaaaagtattaaagaaccattatctaataaaatcacatatgtcatgtcatgacactgccaagtaagccctttggtatcctggactcctatatgtgatatattntttatta

SEQ ID NO: 53812 - DNA, 479 bp, Gossypium hirsutum
  Clone ID: uC-gsflmaxxa057h10b1
tcgcttttaatggcagaaagagaaatttgagagagagtgggaagagttagatgggaaaaagttaaaaattgagaaagagttgaagaatgtcaacctacagcaggagaaatttgacaaagaaaaacttgctgaggatgaaaggttaaagaatgagaagcaagtcgccgaggattgtataaaaagagagttggaagctcttgaagttgctaaagaaacatttgctgccaccatggaacatgagcggtcagtggtagctgagaaagctgaaagtgagagaagccaaaggcttcatgaccttgagttgttgaaaagtcaacttgagagtgatatgcaggatatatttgaggagatggaaaaggaattacgagagagaaaaaagccctttgaggaagaaaaagagagagaattgtacaatattaattatttaagataggtagctttgagagagatggaagagttgaaacaagaaagacttaaga

SEQ ID NO: 53813 - DNA, 498 bp, Gossypium hirsutum
  unsure (1)..(498): unsure at all n locations
  Clone ID: uC-gsflmaxxa057h11b1
tcgattataaaagaacggcggaaaaaggcctggggaaagcgtgaaggactttcaggagctgatatgcggtttcttccagacagtgccgccatggataatgaccagcagtgttacaaatcaagggcgggatgagatactgttgcatatggctcaacttcgaaattattggctgaaacactgaagggaagagaacccatggtcaaagctttttgtatgttgttaacgtagttgattttcaaacgccatttatttcaagtatcccaatgattacattttcattccgatacacaatcagtgtctgattagggatggtaagataactggaatttatcagactgactcagacctaacctgaccttataaggagatatataacttttgaaaatcaagttcagtgattgggtgagacttanagtaaaatgttggggtgttttataaatgtatattaaaatattaaaaaataaatactttcatgaaatacttaccttttttaatgcc

SEQ ID NO: 53814 - DNA, 508 bp, Gossypium hirsutum
  Clone ID: uC-gsflmaxxa058c07b1
gatgaactctacaaatggcagaaacaggaggaaaatgccttcaattccaaaaatgcactttctccgtccaaatggcccagacccttggcatgcttcgataagagatgcttctgttaaaatatttccttaagctaacatttccttctatttatttctaacccattcaatttatggtatacgaaagatgtaaaagtgtgttccaacacactaactagacttgtagttgtatgttcgatctgtcgagaagtgtgtgtgagagggaaaagatggggattctattagtagcatctagtcagcttacctggtcatttggatggtagtatctttagactgtcttgtttatgatttgtctgtttatataatatgattgagccattttttgcatttgaaatgtagtcaacatgactgatcgtataagatataggaagttaatattgcaatgccttggtcaggtactgtgaatgctttgcatctggcatgtattgtgatgagtgcaattgtgttaatt

SEQ ID NO: 53815 - DNA, 522 bp, Gossypium hirsutum
  unsure (1)..(522): unsure at all n locations
  Clone ID: uC-gsflmaxxa058c08b1
tcgccttcgcgtccgcccacgcgtccgctcttttctgcacctcaaatttccaataataataataatggaaaaccaaaacccgctccaaaatggagctcttgagggtgccgctggaaacggtggtcgcagtggtgatggatcggctctgatctttcttggaaccggctgctccagtgccgtcccaaacgctatgtgcttgattcagccctctgatcctccctgtcaagtctgctcccaatccctctccattccccccgatcgtaaccctaattacaggtgcaatacatctttgcttatagattattgttccagcgatggtatacgcaattatattattattgatgtgggcaagacatttagggaacaagttcttcggtggttcactttccacaagattcctcgagtagattctattgttttgactcatgaacatgctgatgcaattcttggtttggatgaatttcgtgccatccaaccttatagtcctactaacgatattgatcccaccgncatttaccttac

SEQ ID NO: 53816 - DNA, 496 bp, Gossypium hirsutum
  Clone ID: uC-gsflmaxxa058d05b1
gctcaatgctttttgtgaaaagcacagtgtggaacagagagcaaaggctgaaactcagaagcatggagttgaagagttgaaaaacatgaagcaaattcgggttaaactggagaggttacgccttctttgtgatagaatcatcaaacgtgaaaaattgaagcgggagttggttgtttgctcgcatgaaatacttgcacgcaaaagagatcatgttactcgttcactgctttttcatagtccttttcatccagatgttagcttagaatcggcaacaacttccctcaaaggtcacacggatggttacagatcatgcagtgaatcgatgagatcagatgatataactgtagatagtactctttcagttaaacaccaaataaagattcctgtgtccgtggaaaatgatcaaaggactgatgatagttccacatcacagagcccttttgtcccaaagccaatggatagggttagattctctgggagcagatccctcagagat

SEQ ID NO: 53817 - DNA, 531 bp, Gossypium hirsutum
  unsure (1)..(531): unsure at all n locations
  Clone ID: uC-gsflmaxxa058d12b1
cccacgcgtccggcaggtactctagcttccggtctcccggttgactcttttgtcacacttcaactgctagctccacttccaatatttctcggtggtctacctctattagcagcactagtttgtctggcactctaaaatttttcttcttcaacactttttgggaaatccttaatataatgttctcgggaaccacatttgaaacaagcctggctaatcgtccaacactccctgaaatgttgtttaccacagtactgacactcgagtctattagatctcacattacctacattcgccattgaagtagcttgagctttaaaaccctaatatgatctcccacaatcccgatacgagtgtccagttgaaacagtcaaccgaggattcatttctttagacttctttgactgagattggaatgacttactcattggcctctttcttgcgtcactggctacattcacagctttccttttctcgttgctcagtttttcagctttacaagctcgatcaccaataccacanactctttcactt

SEQ ID NO: 53818 - DNA, 461 bp, Gossypium hirsutum
  Clone ID: uC-gsflmaxxa058e02b1
ctttcgcttgggctgaaaactttaaaaatccatcccacaccgaccgttcaaagtgtagtggttgtcggcgagctttttctgatggggattcgagaaagtcacacgttcagtgcctggaaatggctaggcttcgtatctgcagtatgggtgcagaccatttcaggcaataattacactttctcaaactactctgatgccatcaagacgcttatgaaccttacccagcttcagcttaacaatttgtcagtggctaaagatgttggtaaggcttttggtctccttgccggtcttgcttctgatcgtttgcccactcccgtcatcctccttattggtgccattgaaggcttgattgggtatggtgctcaatggcttgtcgtcagtcagaaaatccaaccacttccttactggcagatgtgtatatttatgtgcttgggaggcaacagcaccacatggatgaacac

SEQ ID NO: 53819 - DNA, 484 bp, Gossypium hirsutum
  unsure (1)..(484): unsure at all n locations
  Clone ID: uC-gsflmaxxa058e05b1
cagagcacgtccagttccacattccactacttcccaaagctgattgtgaatttctcattccatcaaaacactcgaaaaattggtccacgctataaagaggcaagaaactcaacaggttagaagaatcgcatttgaaaagattacaatgcataatcttaggaggtaagtttcagcattaaattctccctcattcatattttatactcagtaatagtcgatgcagaaccattgaagcaatttttagaaaatgttctttaatattcgaattagaaatgcttaagatttcttttttatgaacagagataacatgcgaaacaatgacagtaaatactacacgcaagctagacggggcttttttctttggtattctctaaattttggtactcgtagatatgatatataaggtttctgaataaaatcttagaagcttatgatattagttcctttcagaaaaactctacatanaatttaattctgcagaaac

SEQ ID NO: 53820 - DNA, 499 bp, Gossypium hirsutum
  Clone ID: uC-gsflmaxxa058e07b1
ttggtttcaggcatttattggagaatctgagttggccagaactgaggttgtcaagagattgtggacctatatccgagagaagaatttgcaagatccaaaggacaaaagaaatgtattatgtgatgactcattgtatgctctttttcgtgtgaagtccatcaacatgtttcagatgaataaagctctgtctaaacacatatggccattaaatgaggaagaagtgacggttcaagctgactctgcaaaaacagaaagaaaatctaaacaagcaagggaacgggttgcagatgaaccaaaacagaaagaaaagaagcagaagaaaggggcatctggttttcttgctcctcttcctctttcagatgctctagtgaaattttttgctactggtgaaaatgcattatctcgcgctgatgttgtgaagaaaatgtgggagtacataaaacagaatgatctacaagatccatctgataagaggaggattttatgcgacgataagctc

SEQ ID NO: 53821 - DNA, 482 bp, Gossypium hirsutum
  Clone ID: uC-gsflmaxxa058f12b1
cccacgcgtccgatccaaacaaaaccttcttacttaattttccaaagtttccgagtagctcatggtgtatcccatccaaatttagtcatttccctacttacaaggtaagctaatcctgtaaaggcagaattgtggagaataaaagagacagtgtaaacaccctagctactgctccatggccatggcaacagcaaccatgatgatgagcagaatgatgaatatgccaccgtcatcgtcatcgtcaacaccatcatcttcttcttcgccgttggcaactcagtcactctcaacaccatcatcaccatcttcatcaaggcaagcaagcagcctcccactccgtacaataccaggatcctacgggtggcctttggtaggaccgatatccgaccgtctagactacttctggttccaaggaccagacaccttcttccggtcgagaatggagaagcacaagagcacggtttttcgtaccaatgttcccc

SEQ ID NO: 53822 - DNA, 409 bp, Gossypium hirsutum
  Clone ID: uC-gsflmaxxa058h01b1
catttcttaaaaacagtagaatcatttttctctcgggttgcttcatttgctctgtgactttccccagattttataaaatcttacgatttcttttcatctaccaaaaaagtagtacagaaaaaaaggatagaattcttttctttttcttttttttttcccgggaaactgaaatcagtttcaggtcttttttccttcacgttttctatttttttttctgttagtaaggcaatcaagaagttcgttctttcaattctcgagagagaagcataaacttatttcttgcatattttcagttgaagaggagaaggtgatttttctcgtgatttagagccattttaaatacagtttcagtttccatcagatccttttcagttcttctcaattatctttccattcaggtccttttgct

SEQ ID NO: 53823 - DNA, 400 bp, Gossypium hirsutum
  Clone ID: uC-gsflmaxxa058h08b1
tttccctctcgtccggaagaaatgacatcaacaggttggaagaaattagacttgccgaggaactgctaagccaactacaaaatcagtgcatcccagataaagcaataacatcgtcaatgaaggaattcggccttgaaagggcaaaaatgaatgggtggccaaatacgtatgtatttacaaaggcaatgggagagatgcttttagggaagttcaaaggagatttgcctcttgttataatacgccccacaatcattgcaagcacttacaaacaacctttccctggttggattgaaggtgtcagaaccatggatgttgtcctcgtgaattatggaaaagggaagctaacatgttttcctggcaatcttaactctgctcttgatgtgataccagtagatatggt

SEQ ID NO: 53824 - DNA, 443 bp, Gossypium hirsutum
  Clone ID: uC-gsflmaxxa058h09b1
tcgaaataataaaaaaaaatctcttaggtgctctgctagggtttaatccctagcgtcctcgcaccatccttagcagcgcgccgcaacccgatcgtcgtctcagcctccgaccgtgacggagggagactcggtgaagcaggtaagtggtctcttccttttttatttttttcgcaatataaaaacccaaatcaaaaaaaaagatctaaaataactccaataatcaccttaaaaaaataaataagcaactcgctcttcaattgatttttctctgtattttccgtatttctccgtccttattttgcagattaaatggccttttataggccgaaaagagaaaataaaatatataatatatatattttgcttgtttttttctttggactccttgagtccgtttttgcaggccttcgtggagaggccggcgcgcgtggagaggggtcggc

SEQ ID NO: 53825 - DNA, 415 bp, Gossypium hirsutum
  Clone ID: uC-gsflmaxxa060a06b1
ttcacgcttccgaattgctttaaaagaacaatagcagatgaaggcatgatgtctttgtggagaggaaacgcagctaatgtgatccgttatttcccgactcaggccttgaactttgccttcaaggattactttaaaaaactgttcaactttaagaaggaccgtgatggctactggaagtggtttgctgggaacttagcatctggtggtgcagctggtgcctcttcccttctctttgtctattccctggattatgctcggactcgtctggctaacgatgccaaagccgcaaagacaggaggggagaggcaattcaatggcttggttgatgtatacaccaagactctcaaattagatggtattgctggcctttacagagggttcaacatttcaatgtgttggtataattgtgtaccga

SEQ ID NO: 53826 - DNA, 271 bp, Gossypium hirsutum
  Clone ID: uC-gsflmaxxa060b11b1
ctcacgcgtccgatcaagcctgcccatgagtctcacacaccaccaatagtattttgcgctatttttcacacgtcggaacatgacgcccacctcgtcaaaattctgacttctgcttgctgttaccggtcttgtagccatattttctacaaccctatacttcactgagtccaaatagtgtagattcaaaagtcacctttttttaactaatatatttggtttctgcaagtatcttaattatatgaacttttcgtgttcgaattctaaatctttt

SEQ ID NO: 53827 - DNA, 487 bp, Gossypium hirsutum
  Clone ID: uC-gsflmaxxa060c01b1
ttatttttaattttccttgttcacttaaccgtgtttagagcttttttttcattttttgagggtttttttttgtttttctttacattatttgcttcttcaccttttttatttcaacttctgttctccaccatcattttaagggtaagtaacttttcctttcttatcttcttctttttgctatgtctttttctttttcaatggcctttgatgatgcttaaacatcttttgagatttctaagtcaccgatgatcgagaatcatgggggagagccaagcaccacaagcggtggtggtcaaaaacaaggtaacccttcaaggaaaaaatggatttatactacccacaaagtctttgaatgcaccaccacgtctaatgagtcaacaagcttactttagagttgagggcttcaccacaaagttacccagtatgagtttttttcaagtggatgagaaatatgacctctatatagtccttgagaaaactcttgctt

SEQ ID NO: 53828 - DNA, 286 bp, Gossypium hirsutum
  Clone ID: uC-gsflmaxxa060e08b1
ttcacgcgtccgcaagttctttctggtcaccatctgtgattttccatacatgtttgtctgagagatttaaagagtatcctgctaaaggctggactcaaatagctggtacggaccctgtaccatggcggtgagcaccgagtttgtaacaattgtccaggtacccaggctgagttgcactctagagtgccctatgaagttgacttatccactggcattgacagtttaaatgtctgcgacagattattcactcctttcctggaaaagaagaaagtctaggacttttttt

SEQ ID NO: 53829 - DNA, 424 bp, Gossypium hirsutum
  Clone ID: uC-gsflmaxxa060f09b1
gttttctcttttcctctttctctgtgtaagggtttcttttctttctgttccttttttttaaaatacaataattataacaacaacaaaaaaagtcatgtcgaagaagaggaaatccgatgctacgcgcctggacgaggtgagtcggagcatgtacactgccttctgcagcgccgctaattctctttctcagctttattcccactccatgaaccaccagagcctctctttccaggctggcgaacgttacgccttggagaaactttttgagtggattttgaggcagcaagaagaaggattgaaagtgatgacaactgatattgttgcttatttgcagaatgagcttgaatatggagcagaggatttccctatgtcccccagacagccatttcagcagcagcagcaccctcggtctgcaacacaccag

SEQ ID NO: 53830 - DNA, 452 bp, Gossypium hirsutum
  Clone ID: uC-gsflmaxxa060g06b1
tttccgtttttgttctttctttctccactaactcaatacttacaaacagcatggaaccacctttaactgaagagatgcaaggttgagggatgacttttgaggcattgaagtttgaatgatctcttaagttcttccactttcttgataactatatgaaattggatgctggattggatggcttgggtgagttggtaagaaacctcattgcaagtaaattatgtttgcagaaacttgctgcaatgctttttatcatcgattgtgagaggatgaaacttctatttattggtggaagggaaattagctcagagtagtggtatttatgtctcagaccgcagtaaaccattgttgaaatgccctgaacataaattagtgtgtgcattttcaaactgatacttactttatttgaaagtagaggaagttgtgaatgacaaatttgaactttttattgatgc

SEQ ID NO: 53831 - DNA, 397 bp, Gossypium hirsutum
  Clone ID: uC-gsflmaxxa060h05b1
tttgcgttttagacatcgagatatacattatttgatctttacaaaatatgggcgtacacaacagatagttagagatggacggtaaaggagaaggtccagctgtaggtatagatctatgaacaactaagtcttgcgacggtgttggtcaccatgaccgagtggaaattatatataacgatcaaggtgacagaacgacaccgcctaatgtaggttaaacagataccgagcgactgatcggagaggcatctaacaaccagggtgcaatgaacacaattaacaccgttgttgatgctaagaggatgatagggcgtagaaacactgatttttcaccgcaaagtgatatcaaattgaggccattaaaggacataacagggcctgttgacaaaccaatgattgt

SEQ ID NO: 53832 - DNA, 400 bp, Gossypium hirsutum
  Clone ID: uC-gsflmaxxa060h07b1
tcgttcacgcgtccgcccatatcgaaacacccacctcgtatttcccgtccgccgccctttcttcttcttcttcttcttcttcttcttcttcttctttgcaagtgattttgagtgaactgattttaatttttgggtgttttaattgttttgaagagattccctcaaagatgagactgttgaaagtcgccacctgtaatttgaaccaatgggcgatggattttgattgcaatttgaagcacattaaggattccataacaagggcaaaagaagttggtgctgtcatcaggctcggacccgagcttgaaatcactggctatggctgtgaagatcatttcttggaactcgatacagtcaatcacgcctgggaagtgtttggaagaaatacttcttggtgattgga

SEQ ID NO: 53833 - DNA, 487 bp, Gossypium hirsutum
  Clone ID: uC-gsflmaxxa060h09b1
atttcccatacgaaaaataaaattatattatcaatcattaatttttatctttcagttttagcctataaaaaaaaaacaaaaccatgaatgaatctgattatacatacagttcaatcccaaacgatgtagctctcaaaattgcttcttcccttgaggtgactgatctttcctgcttgagttgttgttctcgggtctggagggatttatggggctccgattgtttatgggaacccttatttaaacaaagatggcctcttttatatgaagatgtcttgaaagaccccgacttcaagggttggaggggattttacataaagcagcacaaggagatgaaggatcaagctgattcggttgttaaatttgtagaaaaatgtttgcaatccgaatcaatccaggtcaatgactatcttgaagcgattgatgcctgaaatgatggggttcgggttaaagatgttcaaatttgctgttaaaaccaagctgaatgttt

SEQ ID NO: 53834 - DNA, 288 bp, Gossypium hirsutum
  Clone ID: uC-gsflmaxxa061a03b1
ggcttgtttcttaaacgggaccagagaccggatggagctcaagccgccatgggagctatccagttcgggtcaaagctctgatggaagaatcattccgacagtatgaggcaactgcccatagagaagtgatggtagtaccgacaacaaccgtgcatagcgcgagctaacaacacaactcttccttactaataccgtcactcagcatacattgcctggcccgaccatgcagtgtatcgggcgcatgtgagacggagctgaatgaacataccataacctacatttattgtg

SEQ ID NO: 53835 - DNA, 501 bp, Gossypium hirsutum
  Clone ID: uC-gsflmaxxa061b01b1
aacagcaatatgatcgtttcttggaatcatatcactccttggaaaaaaaatactaagggccaacctgatagtgttgttgcattagccaaatggaggatcttaaatagattgcatgacaggaatgaaacactatactacagagtccttatggacaacatcaaagattttgcacctataatttatacgccgactgtggggctagtatgtcaaaactactctggattgtttagacgcccacgtggtatgtatttcagtgcgaaggataaaggagagatgatgtctatgatatataattggccagctcaacatgttgatatgatagtcctgactgatggcagtcgtattcttggccttggtgaccttggagctcagggtattggaataccaattggaaaacttgatatgtatgttgctgctgctggtatcaacccacaacgtgtgctccctgttatgctggatgttggcactaacaatcataagctacttgaagaccggctttat

SEQ ID NO: 53836 - DNA, 477 bp, Gossypium hirsutum
  Clone ID: uC-gsflmaxxa061b08b1
tcaaaatctctgaactcaaaatgcttgaccaaagctaaagcttttggggtagatccaattcacccatcaaaccttagtttgccctgccaattttattttccttagagaaataagaaaaaaatgacaatccattcggatgtaatccaaaaactcttaacaacaaatgctcacatcggtcgacaagtaacaacccaccacttcaaacagttcacctacggcttccgaaatatacaatgcattatcgattgcgtcaagaccctaatctgtctccgcaatgctctcaacttcctttcctgcctctctcgtgatccttgttgctctttcctcttcatcaacactaaccctctgttccaacccataatcgacgagatgacctccagagtcaccagcttaagccctgaaagggctagtagcctttggaagatgcgtggctttatgaccaacagctgtaggcctaagaagattcggtctatgcac

SEQ ID NO: 53837 - DNA, 355 bp, Gossypium hirsutum
  Clone ID: uC-gsflmaxxa061b11b1
tcccatgcccgcgtcctgccattcccctagaccgcgataaataataatagcaccggacgtctaaataaaaagggaagagaaggctcgactaacggaactatcgaagataaatatgttcatatgatccatgcttatgaaccatggcactgatactagcctatttagcgaatggaccataaagtatagctccatttcttccatgtgcgagactctaagggagcttaatacctaccgacatgtctccaaagacactttcaatattaccaacaacctcgatatggacgtcaccgagcctaataagcgaaaggatccattcctttgatcacggaactagctggatcgtatgaagaactgt

SEQ ID NO: 53838 - DNA, 465 bp, Gossypium hirsutum
  Clone ID: uC-gsflmaxxa061c03b1
gagaaattttggacgtataagagtcctcagagaaggagagagagaatattgtggtatttgcataaccaatatacgttttattgcaggagatgtgaaatttgcaagcaaaaatgacatcttccagtgggtaaagcattggtttaaggttggtactttggttgtcttctactggctcttgttgcagagctttactatttgctttggtggaagaagagaattaccggctcacaagatgaagatgattacaacaactacgcaaaggagctcgatcaactcttctgctgaaaaaaatctgcttctttgcatgcattcaccgttgtcaacaacaacaataatcaaggtttagttaaaaacaaagatagcaatagtgttgaaccagactagtaacttgcctcaagcaggagtttgctggtaaaggccttggtgaagagggtgttgaataataactcatgagactacacactc

SEQ ID NO: 53839 - DNA, 536 bp, Gossypium hirsutum
  Clone ID: uC-gsflmaxxa061c06b1
cggtcgcttgggtttcaatttctcatgcaatcatcaaaagctatagaacccattttgttcaaaacccatttatccactatgctcaaaatcctccacaaaagaatcaaaggccttttccctcgtctccgatggccggttcgatgccgttcaaattccaaaatcgtcattaaagtctacaccaaacctcacgatgataccgtgaatggaggttcgcaaattcaccaaaatggcgaatcgggtgttttaaactcggcgtcggcgaggccaattcgtatagcgaatttcaatgccgccatgttttcaatggcacctgcaatgccaaaaccagataaatcttcgagttttgactacgataatgaaggttttacaaagtctacaaacgatcaccggccaaagggtatactaaaacaatcccccttacacccaaattccatgaacgaaaacgatagtctcacgaaacaacaaatattcgtgaaatctaagctgagggtgccgattaatttaccagataatgagatttgcgtgctgagaaaccg

SEQ ID NO: 53840 - DNA, 228 bp, Gossypium hirsutum
  Clone ID: uC-gsflmaxxa061c07b1
tcttttctatcgaaaaccatggaaaaccccgataaaagaggaggggtagtgctgagatggggttgcctccaatgctttcttctccctcacaaatctcttccgccattccccccctcagcttccattctgaggctaccatccgtctacatactctaccatacttctgaactcctccaatacttcttatttctgcttcctcgcacatcctgtgcctgcaacccactcatt

SEQ ID NO: 53841 - DNA, 513 bp, Gossypium hirsutum
  unsure (1)..(513): unsure at all n locations
  Clone ID: uC-gsflmaxxa061e08b1
ccctcgcgtccgtttccttgttcaagcccttatttttgtctgtgtgtgtgttttttttctttctctgatcctcctatattgtacattcccgtagcaccaaccagcaaataattactattggatgtgaactttctgatatatccatgaagtagcgggactcaatgtttcaaaacacatgatctttctgcaaaatgtttggtggtgcttacaagtctcagattattggaggttggacgatttagactctccagtgtcaatggcgtcaggtaccggaggaatgaacaaaggtggatttaatgtacagggctacaaatacagtggtccaggaaagaagaatgcatcaaagaaatcatttaatatagggatgatgaaaggaccagaaggactactaacattgagtcgcaacctcagatccgaggtgacacgagttgtgttcccggatgatctcaaagtgtccgataaaatgatatgtgatccnaagataaatctattttgctatggaacaggttcttt

SEQ ID NO: 53842 - DNA, 554 bp, Gossypium hirsutum
  Clone ID: uC-gsflmaxxa061e09b1
tttgacgcgtgggcggacgcgtgggcggacgcgtgggtagctattaagatttggaactaaagagggaataagaaaaggaggggaaacgcgtcataagtcagcaactacttaaaacaccccaaaacaacaattgaaattctcaaactagttgaagaaatcccaacactcgaagaatcaaatacccttccaaacacacgcattcatataatatgcccaaccataacagcagaaaaccaagttgcaaatcaatctttaaggaataatttcaagttttcaggtctccagttatagtaaaaggggggggggtgggattcaatcaaagcaaatcaagttcgaagataaaaaaaaaaagtaaaaagggggctttacgaagagagaattctaccggaaaaataaaagaatcaagccttggtagacctggaaagtcgctccaaagaaaattcgtgcaatttatagagacagaaatgggttttctgcgacatttccttcgattagaaaccctaaccccataaaataataatataataaaaaagggaagggtattggacacttga

SEQ ID NO: 53843 - DNA, 336 bp, Gossypium hirsutum
  Clone ID: uC-gsflmaxxa061e10b1
ctggatcgacccatgcgtcctgttgtgcgctacttgggcgtgtctcacccgacaactagccgttgaagagatggatatctcgggtccatgagtggtacatgtgatgctaggggtatatgatttagtgagagaaacggctgctcgtagctactacatatgcacctggtgtgagcgacttactactgaggcagatgattgcccttcacagtatataatgcaaactgagttagttgacattattgacaaaagtggctgacgtttacgagctattgagctgaagcgcattacgcgtgtggactactattcacctctattatgcttgagaagctatgttgg

SEQ ID NO: 53844 - DNA, 583 bp, Gossypium hirsutum
  unsure (1)..(583): unsure at all n locations
  Clone ID: uC-gsflmaxxa061e12b1
tcctcgcgtccggtttttttggtcaaggaatcaacatccaagaaacgcgttaaagaaagtggaagaacactgtctatgaactggaaggattttgagtgaaagatccaaaagaaaaaaaaaaacaacaaaagatctaatgatcatttccacccaagagagcagaaaatctgaagatcttcaagaatttccctctgctttcacaattcctctcaccttcatttccattccttcaagaacagaatcaacagaaaggctgaaactttcaagaaataaggagtctcagaacacccaaagtttggatcttaatggcatggccctctcattcccacctttcctcaaatccacccttctttgcttgacactcctttcatctattctcttcttcttcttcctccaagccccacgaaaacccccacgaatccctcaaagatccctcctttcaacttcctgttattctcgacattcttctgatagtaccctcattaactacctttccctcattactgtcttttcaatgaaaaagttttcctctctatttcctttcttttcctttttttctncttactttacattctatcaaaca

SEQ ID NO: 53845 - DNA, 456 bp, Gossypium hirsutum
  Clone ID: uC-gsflmaxxa061f01b1
agagtatgtaggatttcatacgcaagtaagacattatctgaaactcaaaagggtggggaaaaaaggattcatgcctatcaaactcgttatgagtaaagcatactatctagttgaatggtgctttgaggaatgggtaatgaatccttttttccccaccctattgagttatacagtatgttggatttcatacgcaagtaagacattatatgaaatcagacttcttggtacgtaagcactttgagcttaatcaatacatttatgcattactcctatgagtcgtctagcaatgactttctctatcagcttgtatatcacatagcataatctaatcgatctaaactgggtaatcctggaaggactctggactgttgtgacaagcacaatgttcgctctattgatcgagcgtatatgcataccttgatttaacctgtgaagacaatatttggaacatcttct

SEQ ID NO: 53846 - DNA, 530 bp, Gossypium hirsutum
  Clone ID: uC-gsflmaxxa061f05b1
ctccctctctctctttctcttctctttctgaatttccaaaatcggatcaaatcctaattgtccaaattctcatcgttttaatccaaatcagatcacatttcaattcacatataggcgctgataatcgttattcgatctttgttcattttctcactgtatctacagataaattgataggcattttgggggataaggaaccgtaaaacttacatttaatcctaatggcgtgtataaaaggggtgaacagatcgtcgtcagtggcactggcgccggacgcgccctacatggctgctgggacgatggccggagcggtggatctatgcttcagttcatcggcgaatctcgagatcttcaagtttgatttccagagtgacgatctcgagctccccgttataggcgagtgcccaagctcagagcggtttaaccgcctatcttgtggcatgaacggatccagttccgatgagttttctctttgactcattgctggtggcctcattgatggtagcatcgatctttggaattctttaaaa

SEQ ID NO: 53847 - DNA, 417 bp, Gossypium hirsutum
  Clone ID: uC-gsflmaxxa061g01b1
gtgtctttgcgcttatcatcggatctgggttcttcttctttcttcacaagttggttctttcagcattgggagaagctgatcaaataaactttgatggctcatggggataaagatttaaaacttgacattgaaaatgaaccgatcactggtgaagaagaagaataccaaaaccgaaaccctattttaggccttaaaaacatggcagaactgctgcttgctaaggctagaggcagtttcacccaagggtcgtcggacgatggagtgtctctgtctagtgatgcttcgaattcaggtagtgtttatgcaaagaacatgcaggcaatgacgagcatgaatgttgtgggacatgatcataatatcaaagatgatggtaaagagaataaattagtgaaggagaaatgtaaaagtttgagcaat

SEQ ID NO: 53848 - DNA, 498 bp, Gossypium hirsutum
  Clone ID: uC-gsflmaxxa061g08b1
ttaggactcgaggctctgcgaatttgcttcatttttaaaaaagatagaggcggattcgaatgctccgttgaaggtgaagccgatggatgcttggattgcattctcaaaagccgtcgacgctcatgctaagaggcatgaaatctaaacttccatgttactgaccaagggctgtaatactggaaataggcatggcaaaatgctacactaaagagcaggataaatcgataatacaaacagacatactactcaaagcctggcattcgaacaagaaaagagcagactagcgattgagaactcatgttcgagcagcgagttgcataagctgatataatccataaaaatgttagagccatgcaagacacaactcatttgactgaagtggttgcatgagaaaggcaacagaagaaagcagaggatgaaatgagtctgcgacttgtattgcgacggcagaactaatgcagataaatgggatggagctcaaaccactcattatgttgg

SEQ ID NO: 53849 - DNA, 400 bp, Gossypium hirsutum
  Clone ID: uC-gsflmaxxa061g09b1
cccacgcgtccgccgagttgctccagattattatagatagaagctagcaattcgacatcatccccaggaactaacgtgttgattgcgtcataggatctcatccctggtggcaagaccacatcattctcagtgaacagcggagttatcactttttcactcagctgttccttaattgtgtttgcgactgatctatttactcgatcctggtagttctctgttgctaaatttcgcagcctggcgactctccaactggctattattaaaataaacgacggtaaggcaaggccggaaataaaatcaattagatagttaagaacttgatctgacatgttgcattctactcgaatgtaagagaaattcaaatgttataactagcatgaaagtcgatctattacgaccg

SEQ ID NO: 53850 - DNA, 507 bp, Gossypium hirsutum
  Clone ID: uC-gsflmaxxa061g10b1
tatttcttgaacatttctcaatgtcaattcaaacaattaatcaatcttcataagcacatataagattaagtgaggtaacaatatatttctatattgaaacaatttaatcacaataatcttgcaagttatgtaaggctaatgtaccatttaataccgccgctaatttatccttcagctaccttaaaagattaaacattcaccaattaaatatcatgtcaattaattacaatttcaatatgtttaataattaattaattcattaccttacactttataatgcatgtagaacataagcatgattttatttaattgaacaacttaccaatgcctataacaacataaatatgattttaataatttaagtggacagaatgaaatcaatataacatgaattaaatttaagtcattttaattagaagaacaacaacgcataaattattcatattcagaatcacaacatgaacaagataattaaagagaagggaactaggatgcaaatctagtatt

SEQ ID NO: 53851 - DNA, 531 bp, Gossypium hirsutum
  Clone ID: uC-gsflmaxxa061g12b1
gattcagtctgttgcttctgaagttacagctgacgactgtgatggtaaaagtattgactggtggcgtggagggaagttgtcaacccatgtgttccagaaagcaattttgcctgcctcaatggttagaaaagctgcacaacaaggtggtgtgagaaagatttctggtattaattatgttgatgattttgagattcctaaaagaagcagacaattaatttggagagctgcagtaaaaaggagtaagaatgcagcgcagcttgcacttcaggttagatacctagatcttcatgtgagatggaatgatcttgttcgtcctgagcataacatctcagatggaaaaggttcggagacagaagcatatgtttttagaaatgcaattatatgtgataagaaaactgtagaaagcaagatccaatatggagttgcttttggaaatcaaaagcaccttccttcacgtgtcatgaagaatgtagttgacatcgagaaaatcgatgatgaaaaggagaaatattggtttcatgtaacatacat

SEQ ID NO: 53852 - DNA, 460 bp, Gossypium hirsutum
  unsure (1)..(460): unsure at all n locations
  Clone ID: uC-gsflmaxxa061h01b1
atttgttcatgtttcttccttcactctcttttgtttcctgtcccatgaatcggtggaacaaccaaaatccataataacattctttcacttccttctttctttttctcttttccattttgatccctcacaatttctgggtctgcaatcaaggacgtctaaacctttcacattcatcacaaccgggtctgtttatattgtctcaaaggttatcataagcctatataataataaaagaaacatgcaaaaggataacagtgcaccatctacacctactagtgctcgagctcggcaccgaagacggtccaatgagtttccggctgatgagagcaaaacaaacggacatcttttactagtaaatgatcacaacaaataccggtcaatgtggattcgagctttttcatctctgtggatgctggggttcttcctcctggttatctatttgggtcatncttatgtattg

SEQ ID NO: 53853 - DNA, 102 bp, Gossypium hirsutum
  Clone ID: uC-gsflmaxxa061h02b1
gttttactcttaaaggtcctaaagtatctttagtcttcggcatgtttaaagactcgaacaaccgacatcaagtagctcggaattttcttaacttactgacct

SEQ ID NO: 53854 - DNA, 430 bp, Gossypium hirsutum
  Clone ID: uC-gsflmaxxa061h07b1
tcctctcgtccgcccacgcgtccggttctcagtctataaaaacaggttttccgggcaatttccagccaatttcggtcggttctcccctttgattagtattgacatatcagagaatcaattttcaggtggattcccgaggttcttgtgtgagaggggaaagctaaaactcttactggctcttgagaacaacttttcaggggagtttccggattcttatgttgaatgcaaatcactggtaaggctcagggtgaacaagaaccatctttctggaaatattcctgatggattttgggcacttccgcatgccaatatgattgacttcagcgataatgacttcactggaggagtatccgccagcattggatcttccatcggcttgaatcagttggttttgcaaaacaataaattttcgagctctcttccctccgag

SEQ ID NO: 53855 - DNA, 460 bp, Gossypium hirsutum
  Clone ID: uC-gsflmaxxa061h08b1
ttcttatcttttgttgctcaatcgacccccaagtgctcctctcagcactaatttgccaccacgagcaacgatctgcgcatccgagccctaaaggaggggttttcgcctttgaaacccccattcagacttcgatttcgacgaagtaaagggggaatgacggctagcctctcaaggtaagctcctctttcattttatattattatacacgagaatatgtgcgcaaaaactaggaagaaaagaacagattcaaaaagagaagatgaatgaagctctcgaaaatcacctttcttttctttttcttttgtattcaatctgccaatattgtatatgtatttgcgtattgcctgttgtgcgtttgtgttgcgtaaaaaactcacctaggctattacatggcctttatagccgaaaagaaagaaaaatcaaaaaatgaaaattctatttttcttcttccctattcgct

SEQ ID NO: 53856 - DNA, 577 bp, Gossypium hirsutum
  Clone ID: uC-gsflmaxxa061h12b1
tgtgttcatggaggaagaaatctgtgaagagcctaaaacctctgaaattatgattgttgagtgtgttgaaactgctacaaacatgccatacatttttagtgctcatgaaagcgtcaaacaggatccatgccttctaactgttgatacatccgatgggtattgtcttgccatacttaagtcttcaacaccatgtgtctcacctatagtgaatcagactacgaagagtctgaggacatcatcaatgtactctgcttcacagaaagatcttagggatgataaaccagaaactatgcgggtcacaccaaccgaacatttagcagctagcctgcaccgtggtcttgagattattgatagtcaccgacagagtttggcattgaggaggtcatcatttcgtttttcattaaaacctgctgattctaagccaatccttgcagctagaaaagttgatgtcggagttcatacttttccacaagaagaagacccagcagcatttctatgtagcaattgttcacagagaacatacctagaatgcaaagatgacactgaagactctaacctgcaatagttcctgttgatg

SEQ ID NO: 53857 - DNA, 424 bp, Gossypium hirsutum
  Clone ID: uC-gsflmaxxa064d11b1
tcgcaatattttgatagtgtgaaccaagctctaatgttccttgatccccaagctagcttggcaacactataaggaatggaaagaaaatgggactaagctttaaagcttagtaagtttgcatgcatataataagcaacatatatcattcattaatcatgtaactactcaacataagttaacataaatattatcatgtatcttaggcataacttcctcattagcattcttactaagagttcatctcatacaaaagttcacactcatgagttatagacacatacatgtaccaacacgtaacatagtcacatacttcgtcatctttgacatactcttcggattaaccgttaaacacttggaatactatcggatacatagggctcagaccactgctgtaacgacaagacgggctcttgaaagacttgct

SEQ ID NO: 53858 - DNA, 330 bp, Gossypium hirsutum
  Clone ID: uC-gsflmaxxa064e08b1
tcgcaataatctttttttctttttgcttagcggttgagacttggaaaataagcaatttttaccagtcttctcaccgctgtggctataattccctcgctgatgccgggcggcgaattgtccaccgacgggaccgagccgttcatggcctctaaagttaaagccttttctactccgtcgccgatcgttgaaatcagccgaaaagatgaacctataatggaaaagaaagagaaggatccacgaaaaattgctagaaagtatcaactggagttatgcaagaaagccatggaagagaacataaacgtttatttggagactggttgtgggaagacc

SEQ ID NO: 53859 - DNA, 492 bp, Gossypium hirsutum
  Clone ID: uC-gsflmaxxa067a03b1
ggtttctagaaaagacgagaaaaaatggagaaaacaaaactaggaaggcaagaagttgttttttttgttccctgtaaacatggtagcaacccttacccaaatttagcagagaaaaaacaaaaagaagaccaaacaatgatgatatatgttgtttctttcattcttgttcatgcattacattgttaatcataacgcagtctttcctccggctcgctgtgacaatggaagaaacctctggatatacagccattgccgtcgacaaggacaggaacagccaacttgctgcaaaatgggcagtggatcacctgctgaaacccggctccaaatgcttcttcgttcatgttttaaagagtttgcatccgcaggagtttgaagccatacctatggaaggtcggtcgtcgtctgaagctgagatgcaactctacttcctttcttgccgaggatactgctctcgaaaagggattgaatcacatgagatggtcctccatggca

SEQ ID NO: 53860 - DNA, 428 bp, Gossypium hirsutum
  Clone ID: uC-gsflmaxxa067a09b1
gaatttatttgtgtagtagcagtacctgtgaaaaggtgttctcattatgatttgaggaactaagcgaatatggcagtagaggaaggccaagtctatggctgccacactattgaatcatggtacgaacagcttctagtgggtagcgtatcctgaatattgggggtggcagacttgactgcttaatggtgcggaccctgccgatacattgcacctttgctggctgaactagacaagaagatcccttatgttacctttcttaaggtggatgctgatgagttgaaggaagtcgctaccgtttgggcattggaggctattccaactttcatggtgcttagggaggggaagattgttgacaaagtggatcttagcaaagaaagaagagcttcatcagactgtgtgaaagcatatggctgtgctcagtactactt

SEQ ID NO: 53861 - DNA, 489 bp, Gossypium hirsutum
  Clone ID: uC-gsflmaxxa067b02b1
cccattcgttcgaaagtggtacatggtggtggaggagatttcgacaccataaccaaagccattgaaagtgttcccacaggaaacaccaaacgtgtgatcatatcgattggacctggagtttatcgagagaaaatcaaaattgaacgaactaagcctttcattacattgattggagatcccaaaagtatggcaaatttgacattcgacggcacggctaagcagtatggaactgtagatagtgccacccttattgttgagtctgatttcttcgtggctgctaatctgtttatagtaaacattgctccaaagccagacggtgaaatggagggagcacaaggggtttccttgagagtttctggtgataaagcagctttctataattgcaagatcattggtttccaaaatactttgtgcgatgacaagggcaaccatttctttatgaattgctacattcgtggcactgtcgatttcatttttgggaatgggaag

SEQ ID NO: 53862 - DNA, 491 bp, Gossypium hirsutum
  Clone ID: uC-gsflmaxxa067b03b1
cccacgcgtccgaataaatttacctacctttcataaattctttccgtctttcttaccttttgaaaagctttgtttgaataaaaaccaaaatcctttgaataaaagccatggtggtagcaatggtagcagcatccatggcttccggtttgagaataaaagcaatggcagagctttgttgttatttgacggtggtgctttgtgcattcttggttccatgtttggcgaagcttacaacgattgaacaccccgtcaaacctaatcgctcccttagctttttggtcgttggagattggggcagaaaaggattttacaatcaatctgaagttgcttttcagatgggaaggattggagagaaactaaaaatagatttcggcatctcaacaggtgataatttctatgataatggtttaaccagcgtatatgacccatcttttagagactctgtcacaaacatatatactgccaaaagcttgcataaaccatggtacagt

SEQ ID NO: 53863 - DNA, 398 bp, Gossypium hirsutum
  Clone ID: uC-gsflmaxxa067b06b1
cggacgcgtgggttttccaccaagaatgcattgatcattggcttgaatcacataaaagatgcccagtttgtcgttaagagttagatgtgactagtaaatcaatagtaaatccctgaaatctctaaaatctcaagttttacaggtgatcggggattttgatctaaaagagttcatcatgtttaatcgactgttcaggaaacctaagcaggacacaaatgctctaaccacgttagaaaaattaatcgaggtgtaggatttgattatcttttattttttcactttaattggcaaaccagttattcatttgggtatgtctcttgctttgcttgagttcaaaaatttctgcgatatatgtaacagttttttgcgccacatagcccacatattccacaaatgtt

SEQ ID NO: 53864 - DNA, 493 bp, Gossypium hirsutum
  Clone ID: uC-gsflmaxxa067b07b1
ttcactgcccaacaacaacaaaaaggaaactcttcgcttcacttaaatccacgtaaaaggaaaaacccacagctctttccctttcatttcctattttgatttgttatgttcttttagttaatacgatcccttaaccttagttagatctaaagttaatttgtaggggaactagtgttaattgtcccaggagaaccatacgggagctgtggaggttttgaaagatgaggcggagaggactagattttaggagaccagtgaggaagaggtttcccaatgtggtgtggtggacagtgtgcggaattttggttttggttctcatcgtggttttgagcagagagggtcagattgaatcaaaacccactatttctaggaaaccttatcggcgtgacagaattatggaaggtgtaaccgtcactgatgaaatgttgagctccaactctgtcaccagacaacttactgatcaaatttctcttgcaaaggcttttgttgtgat

SEQ ID NO: 53865 - DNA, 387 bp, Gossypium hirsutum
  Clone ID: uC-gsflmaxxa067b08b1
ttctaatcaacgggctccaacacccttatggagctgggcatgtggttgatgctatacgtcgcgactgcacccctttccgtaaccgatgtatgtagacggataacattgattaaaacgcctcatggtacgcactgactatcaaactattgctgaacacgagcaacatacaagtgattatgtaggacactcgtaatgatcctcacgttcgtatcagttgtatgactagcgagtctgacatgaacgattgagacgtatgaattattggctgatgccctgaagtccgtatactcatgaaaagtaggtgtctgatcaagatctataaaggtaagtcaactattagaaggattccagagctcgcccatctctcgtatcatgagcctatatact

SEQ ID NO: 53866 - DNA, 492 bp, Gossypium hirsutum
  Clone ID: uC-gsflmaxxa067d09b1
tttcttgccgatgataggtatgggactgttgtttcagagatcataaaatccaaagctaaactttatgatgccttgaataaagccaaggattccagttttgacgctacacttgctggggcaaacagactgaatcataacaatacagaggttgaaaataatgcagtcactaaccatgttccaaatactacccacccaagctctggagctaaacatctacgccatgagttcaagatttcaaaatcaggagaaggtactgattgcattgatcttccaattgcttttgtgccagcagtcattggacagggttcagatgctggtgaaagttctttaaaaaagcaacgcaagaagaagaaaagggctaaactgaatactacttctcagtcggtagttgctggtagcccattcaatcaaacaacaccttgttcacttgctctatgaaacttgcccatcgcttgcgtgatttgtagcatatattttgtaaggtttggcact

SEQ ID NO: 53867 - DNA, 499 bp, Gossypium hirsutum
  Clone ID: uC-gsflmaxxa067e01b1
aatttgtttcttgcactggggcccttcagacatcaatggctcagcatatgtccaaggaagaggaacaggtgtttcccttgcttattgagaagtttacatttgaagagcaggcgtcattggtatggcaatttctttgcagcatacctgttaatatgatggcggagtttcttccatggctttactcctctatatcacctgatgaacatcgagacatgcgcaagtgcttgagcaagataaattcaagagagaaacttctttatcaggttattttcacctggatggcaggtgtcaagacagctgagaaatgtaaaaatggcaaaggcgaggctcgatgtgaagcttttggagctagtgtcttaccaagtcaaactgaaagtggttactgtgcatgtgaatcttcgaaaagttgtgaaaggaaatatatggagctaagttctagacctaaggattctactctgtccagtcctatagatgaaattatgctttggcataatgctat

SEQ ID NO: 53868 - DNA, 339 bp, Gossypium hirsutum
  Clone ID: uC-gsflmaxxa067e02b1
ggtcaccggtgtatctgagagttacaggcactgggcatgggctacctattgtgcagtggccaaagcgagcaataaagcctagttaatgaaagaaggaccagggaagcttgatgaagttctacagccctgacgccattctctacctaggcgcattagtagacatgatgacggacatgtttctgtgtttttacaaaacatgatgtgcgttgcgagacatatactaaggaccatgtatttgtcaacgatggggcatctatacagtaatcttacgctaactgataaaggcttatgtcgctttctacaaaattagtaaccccgggactcaaattcaagcctatg

SEQ ID NO: 53869 - DNA, 486 bp, Gossypium hirsutum
  Clone ID: uC-gsflmaxxa067e04b1
ctttgtttattttcatagtttacaatctctttctctgtgatcacactacttgcatattggttaaagtgatctccttttaaaaagggtctgctcaaatgaaaatgtttagcttttctcgtagacctatgaagcttaacagagtgaaaaaggtataactttcagaatctgttcatggaactagaagccctataagaccatccaaaagaaacaacaatacaattgtggaatcagctttgcctgctggtactagtcattgtaatgattttgatccttcgactgcccccgagattaattcgtcggggaattccgagaactggatggtgttatcggttgctggctaaaaacccgtgccacggtttaatcacgcagccgctgtagtcgggaataggatgatagtggtcgggggtgaatccgggaatggattgttagatgatgtgcaggttcttaatttcgataatttttcttggacctcagcatcatcgaagc

SEQ ID NO: 53870 - DNA, 405 bp, Gossypium hirsutum
  Clone ID: uC-gsflmaxxa067e06b1
cccacgcgtccgacgaaatggcggaatcatagcaacaaagaaactgaatggcaaacccctacagacagacgctttatgtgtttcaatatatagactgaaaaactggggaaagtagaggtgaagaaattggcttactaaaggacaagatcaaagctgtgagctccaacacgtccatacataactttaccaccaaaactagcacagggatggcttattttcaagtggcatagggctaaaggcagggactatgacactgctggcatgattgttatgcgaccttgactcaacagaaagtaggaaattttatcagatgatagcttcagcaatgacttaagctgtagctctattacccacctctacaatggatggatgattgatggagtacagcatgaaagatggagggga

SEQ ID NO: 53871 - DNA, 399 bp, Gossypium hirsutum
  unsure (1)..(399): unsure at all n locations
  Clone ID: uC-gsflmaxxa067g02b1
gctatttttcaggggaaaaagattaaattactaaggggttgcaatagttacagtctgccagattttttgcgtgataaaactgaggaatttactccgacatcctgcatcaatgtagtgaacccagacgttgtcaattggtaaacaggctagtttatttataaagcaatgagtacagggactaaacctctgcaagaagtttcaagcttcactctgcttcataagtcttccaactgaaaagaccctgtgacacggatatgtggatatagtccggtgaaatatctgttacagaatggcaggggagataccatctgtagatacgaaataaatgggtgaagactttggaatcaatcccgagctaaatnattcccagggattgtctctagtagtgaatggggatgt

SEQ ID NO: 53872 - DNA, 403 bp, Gossypium hirsutum
  Clone ID: uC-gsflmaxxa067g07b1
ggagaagagaagttttgcgctacatcattggagtctttcgtggatttcggtgtttctaagctgggaaaaacatccagcttttgtcagctgagttggagaaagaaacgcaaaacccagagtttagtattggtgatcagggggtgaaattgatgggaaaaacggagattgtttgccacaaaatggattatgcatatgctgtgttcttctgccactcaattgctaaaacaaacgtgtatagggttccattagttggggcagatgggacaagggctacaatattggctatttgtcatgaagatacttcagcttggagccccggacacttggcttttcagactctcaaagttaagccaggaactgttcccatctgccatgttctatcaatagacgcccttgtttggat

SEQ ID NO: 53873 - DNA, 423 bp, Gossypium hirsutum
  Clone ID: uC-gsflmaxxa067g08b1
tcttttcgctcgcggacccgtggctcagctacatgggtgtgattgatagtagggtgacagttgatggcccgagggggttgtttctgggttctcactggagccgtactaggatgtttggtcactgataggtatatgagactgtggagagctctgtcacatgcatattggacgggcccatgtcttggaacggaaaagagggtcagaagtgtattggctaatcgaggacattctgtgcaagcggattaggcgccccagtcgtagaaaatgatgttatatggcacgtaggtacaaggatagtcgggttgcataatttgtgtgctatggcgtttctagttagtcttatcctgtatatcttaaagaaaatggtatcagagaatgataagtactaggttggtttgaccatgttaatggcctttgtctgat

SEQ ID NO: 53874 - DNA, 266 bp, Gossypium hirsutum
  Clone ID: uC-gsflmaxxa067h03b1
caaaactgctgaaacttttttgggaccaagggcctgttcacagaagatttcgcacgcatgaccaacgagtccgccgctcagggggacacgactatcaatgagaccgagcccaaagggtgcaacccgctatggattgtattgctggttagaggtgcactacgggtaacattccttgtggggaactacatactgcactggtacgcgcagaatactcgaagtgctaggaaagagacgcccgtatccatgatgaagacggaacgagagag

SEQ ID NO: 53875 - DNA, 495 bp, Gossypium hirsutum
  Clone ID: uC-gsflmaxxa067h06b1
gaaggctaacacacacaagaggccacctcgtagagctaatgaactctcataacattcttatctctaacctaaccttccggaattcaccattttggaccattcatcctatttactgcagcaatgtcgttattaagggcatgacaatattggctccccttaatgccccaaatacagacggaatagaccccgactcaagtaccgatgtatgtattgaagactgctatattgagagtggagatgatcttgtagcagtgaaaagtggatgggaccagtatggcatcagagtggcacgaccaagctcaaacataatagtaaggagaatctcaggcactacaccaacttgttctggtgttggcattggtagtgagatgtctggagggatttctaatgtaattattgaagatatgaatatttggaattcagcagctggggttcgtataaaaactgacaagggtagaggaggatacattgcaaatatcaccataaaaaacataa

SEQ ID NO: 53876 - DNA, 162 bp, Gossypium hirsutum
  Clone ID: uC-gsflmaxxa069a07b1
ccctgacagaaacagaagttgtttatgtttcaaaaggaaccaccgacaacagagacaaaaaaccgaattcagaggaacaagtatcatcccctggtgccaactttgggtttcagcattcaagtaatttcaaaaataaagaaaattgatggcaatgttttactt

SEQ ID NO: 53877 - DNA, 120 bp, Gossypium hirsutum
  Clone ID: uC-gsflmaxxa069b02b1
ctcttttgcatatacctttagtcactaagcaataggggggactattgaaaatggtttgcgaccataaccagtgctgcccttacagtcttctctcttctaatttccaacttatcattcacc

SEQ ID NO: 53878 - DNA, 184 bp, Gossypium hirsutum
  Clone ID: uC-gsflmaxxa069b10b1
gttttctggtgctggcggtggaactagtgctagggctagttttaaaggtagagctagtggtgatactggtgctagtgctagaggtggagctggtgctggagaccaaggaggagtcaaaggttgtgcatgtattatttttatcataataaatattatattttatttttatatatcattttttctt

SEQ ID NO: 53879 - DNA, 139 bp, Gossypium hirsutum
  Clone ID: uC-gsflmaxxa069c02b1
gtggatgttgcccattgtgtttgcggttgagaacaggtggtgttctatagggatgtctgatttgagggctacgcctgatcctcagatttataagaaaggacctgcctttgggatgcctggcatccacgcggatggaatg

SEQ ID NO: 53880 - DNA, 129 bp, Gossypium hirsutum
  Clone ID: uC-gsflmaxxa069c04b1
cgtaattgggcgcagtcctcgcctggctttgccctctccttattaggttttaagaagccgaactaatagccttgcttagcagcaagcactccataccaacgccagctgaagatggagacggaggaccag

SEQ ID NO: 53881 - DNA, 119 bp, Gossypium hirsutum
  Clone ID: uC-gsflmaxxa069d06b1
caagaatgaggacgcctcatcatcttttgactctaggggtcttcttcaccttcatcgctgtttctgatgaagcccttaatgttggaatgcaggccattgataccgccatctttgtgagc

SEQ ID NO: 53882 - DNA, 140 bp, Gossypium hirsutum
  Clone ID: uC-gsflmaxxa069d12b1
tcttctgcgtccggttcatcagtcacagcacattgcagttatttgtgaggttactgtgccttactatcacaacagacatcatcaagatgcttatactaacgccagctgtagatggagacagagatccagtaccctttttc

SEQ ID NO: 53883 - DNA, 199 bp, Gossypium hirsutum
  Clone ID: uC-gsflmaxxa069e08b1
gtctttttctgtccagtgtataagcacatgcttaggatagttgttaatgaggagttgtatgagcaggagaagccattgtctttgaaggatgtcagatgcctaattgtcattctgagacaggcgttatggcagctcctatgggtgatttcttctgttcaccctacctgtgggaaatctatctccaatacttcttcttata

SEQ ID NO: 53884 - DNA, 196 bp, Gossypium hirsutum
  Clone ID: uC-gsflmaxxa069f06b1
cttgcattaagtctcaaagatatcactgcaagaaaaagagaaatccagacatggcttccaacactgttgcatccgctgctcttcttcttaccttgaacttgttgttcttcactttggttagctctacctacgtgccttgcccaccaccaccatagagtcccactttccctcgttatcctctctattctctcctctt

SEQ ID NO: 53885 - DNA, 113 bp, Gossypium hirsutum
  Clone ID: uC-gsflmaxxa069g08b1
ttttctgcgtgggtcgtgcactaaacaattgaagggggggatgttagaacaaacatgcgaataacccaaccccaactaagaaactgtcataaatgttggacatgacatgggta

SEQ ID NO: 53886 - DNA, 111 bp, Gossypium hirsutum
  Clone ID: uC-gsflmaxxa069g12b1
ctttatactaaattcttgcagattcctgttggggggggacttttagaacaattagcggcacgcgcacaattccatcaagaccagatacgtcttcttgttgtacatgagacc

SEQ ID NO: 53887 - DNA, 187 bp, Gossypium hirsutum
  Clone ID: uC-gsflmaxxa069h03b1
atatttttcaatctcttataatataaccaagggaacttttgaaaacttacgggcaactccgcacccaatcctagccgaggatctgttgcatagcctcctctcctcgaacaacagcacgacaagcatcagatgatgaacctcaagcttcgccggcgcagcagaggcctatccatgaccctgactgctg

SEQ ID NO: 53888 - DNA, 120 bp, Gossypium hirsutum
  Clone ID: uC-gsflmaxxa069h08b1
accactcccacattaaatattgttggttagacaattgttaaaaacagttcggcgcatccaaacacgcggcagatgcagagactcaggcgcataccgagcagctccatgaaacgattgccc

SEQ ID NO: 53889 - DNA, 131 bp, Gossypium hirsutum
  Clone ID: uC-gsflmaxxa069h11b1
cttcttctcattctcttcactcgatcagtcttggggtggtttttaaaggacttgaaactgcttgctcggctcgcgtctcgacgttttctcgagacccgtcaagctttccgtcaactctcccaggcccctcc

SEQ ID NO: 53890 - DNA, 108 bp, Gossypium hirsutum
  Clone ID: uC-gsflmaxxa069h12b1
ttttaagtcattgttgaccttgttgatcaatgcgggtcttttaaaagcgtgtgccgcttcttgttaacagtaccacatatgaggaacttttatgtcaggggttagctc

SEQ ID NO: 53891 - DNA, 239 bp, Gossypium hirsutum
  Clone ID: uC-gsflmaxxa070a02b1
gggcgtcatgggcatgcactgcgcagcataggtggatctggggctgctacaggtgagccttcaggcttaccaatggagaggatgttaagaggcgtgcacaatagaaaaagaaccactgtgactgtttacaacagaatggaggtaagctctgcgatcaccactagtgctatgattatagtgaggagcatacacgcttgggtggctagagaagagagacggcttagggatctctgaagctc

SEQ ID NO: 53892 - DNA, 360 bp, Gossypium hirsutum
  Clone ID: uC-gsflmaxxa070a04b1
ctatgtcaagatcgtgcactggcagcttttaatcttgaggccgacaaatggggagtcaatgtgcagccttattcgtgtacttctgcaaatttcgccgtttatacggcacttttgttgcctggtgatcggatgatgggattggattcgccatctggagggcatatgagccatggatggtatatgccgagtgggaagaaagtgtctgctgcgtcgatattctttgagagttttccttacaaggtgaattctcaaacagggtttattgattattataaggttgaggaaaaggcgcttgattatcggcccaagaggctaataagtgggagtagcccagcaatgatggagagcgagcatgcaagg

SEQ ID NO: 53893 - DNA, 350 bp, Gossypium hirsutum
  Clone ID: uC-gsflmaxxa070a10b1
gactacaaaaggtcaggccatggactagcaaggaaggccaagaacatcgagcagcttagtctttagcagcaaagttgccttgctgcaaatccattgataagtctacaaaggtctctcttgttccttctgtttcttcgtgttatttatagctacttcgtttataggatacgattttatacataactgcccaaaattagtttgaataaaatcatgttgaaatttgaattctacttggtaggttcttgcattggggatatagcatccctttttcaatggtaaaatagaaagttatgtagctttaccgtctaggtttcgaactttcagtaaccaagcaatgatgttcatcttgc

SEQ ID NO: 53894 - DNA, 461 bp, Gossypium hirsutum
  unsure (1)..(461): unsure at all n locations
  Clone ID: uC-gsflmaxxa070b10b1
gtttttgccaatggcctttacgacctggtcattggggtgctctttctcgactccaatctcctcataaagctcacttctctccgcagaatccgccgcctggagaccgtgtgggacgatgaancttacttccatgatgctgctaaatgccgctcttttgtcgccaaaaggcttcttcaagaatgcgagaccaagaaaggcaacaatagctcgataagagccgggtatggaggctggcttttgtacaccgctgcctcggctggtgacatccggtttcgtcaagcagctgttggagagagaccctttccttgtcttcggagaaggagaatatggggtgactgatatattttatgcagcagcgaggagcaaaaactctgagcttttcaggatgctgctggatttcgcggtgtcgtccaggggttgccttggcggtggcgaaggtgaattgagtgacactcggccgg

SEQ ID NO: 53895 - DNA, 399 bp, Gossypium hirsutum
  Clone ID: uC-gsflmaxxa070b12b1
ctttaatctccaatctctcccccccccccacccttggtggctgtatgatgtactgtagggtgtactgtgacaacacaattaacttgggtcttttccgacagacagacagacaggcagacaaccaaatgaaaaatcactaatctgctttgagtcttttgaccacccacactctaaaccccttcactttcccttttcctacatcctagccttgtcaaaggaacttaagggttgaatattaccccccacattgggaatttttcattttgcccttccgggcatgaagcggaatcagctgtccgaatgcgggggctgcggcgcccctgagcgttttcttctccacaacctccggcacagagccagctatcgacgcctctgcaccaactgcatcctcaagaacca

SEQ ID NO: 53896 - DNA, 364 bp, Gossypium hirsutum
  Clone ID: uC-gsflmaxxa070c08b1
gtaacatttgacatgcaatccattcattttttttcatggatcatcaatcatttctgtgattaaaaatcatatcttgctattcaaagtcttcatctttattttgtttcttttgatatataaaaaagaaagctctatttgtactttttttgtgaagatctggctggtggtggagacatggggagattattcgcggcgaatcttgaagggacgggttatggctgcaaacactgcaatacccaccttgctctttgctaagctatcgactgcaattactttcatcgtctgcgtggacatgcatatgaggccatcaaaggcttgtattctactccccattatagggcagatagactgaaaacttccaaca

SEQ ID NO: 53897 - DNA, 438 bp, Gossypium hirsutum
  Clone ID: uC-gsflmaxxa070c11b1
gggtcaaaaaaatccataaaacagagcacttaaacataaccaaatcattaccaaaagtcaacaacaacatgcaatagaagttatatttaaagggtttttttttcttataaacatggttgatccaacttcattttcatatctttaattaaattgacagcttctttttgtttttgcccttaagttatcaaattgagtgaaaataaaaaacagagacagcaaatgaaaaacgaagaacaagcacgtttcttgtttgggatttcactctctgatttgcctaaatggaaacagtttcttatttgttcttctgggttcttctttggttaccttgctaatggcgcttgtgaggaatatgtatacaacagactccagttcagctatgggtggtacttcaccatttgtcaaggatttgaatatctcttcctaatttatcttcaaggt

SEQ ID NO: 53898 - DNA, 125 bp, Gossypium hirsutum
  Clone ID: uC-gsflmaxxa070g06b1
gcaactcgttgacgaagcctggaagattgctctaacagggggtgatctctagcccagaaaatgttaccagccacctgaactatcacgttaacaaggattttgaaaaacctcatttcacccacccc

SEQ ID NO: 53899 - DNA, 532 bp, Gossypium hirsutum
  Clone ID: uC-gsflmaxxa070g12b1
ggcatttccttgattcctttcctttctcaagaattgtggaaaatcatatttttggaggttctgagaatggagacgcagaagctagacagtcatatgcaatcagctgcagcttttgtgcaagggggaatcctggatgccaatgacgattcttgtagcatatgccttgaggagttttctgctagtgatccttctacggtgactaattgtaagcatgagtttcacctccaatgtattcttgaatggtgccagagaagctcacaatgtccaatgtgctggcaagccattagcttgaaggaccctgcaagtcaagaattgcttcaagcagtagaaacggaaaggagcattagggttactgcaccaagaaatactgccatattttaccatcccgcccttggtggttttgaattgcaacatttgccggttggtgtaaatgaccctgaacttgaagagcgtataattcaacacttggctgctgctgctgcaatgggaaggacccaccacgctagtaggagggagggccagagaagatctg

SEQ ID NO: 53900 - DNA, 218 bp, Gossypium hirsutum
  Clone ID: uC-gsflmaxxa070h03b1
ccccagacacaaaatttgaaaattttgagatgagatttttagaggaaaaaaaccatgctgactgttctgttttggctatggagatgcattcaagcgcaaacgactgcgatttggctatgcctacctcaattctgcaatacttactcacctattcattctaccttctactaactgcttccactgactttacctcggctccccccatgttctgcaggacc

SEQ ID NO: 53901 - DNA, 222 bp, Gossypium hirsutum
  Clone ID: uC-gsflmaxxa070h04b1
acagcttgagatcggagatcaaaggccctgtttttcattggggttttttgtttgaagctctttggttgtaaacctgattttttttaaaataatacttgatttttagcttttgggtgaattttgaatgtaataataatatatctctttttgattattttggggtaaattcttcgttagttatttttgggtcttcggaattggaatttttggggaatggaggtt

SEQ ID NO: 53902 - DNA, 290 bp, Gossypium hirsutum
  Clone ID: uC-gsflmaxxa074b01b1
gcttaattttctatatagtgtgaagacataatccgaacctcttaaggctttatgggcggaagtcggctacccgttatctacgcgtcacttttcttatgttcggaatgtaacacacactcaggaggatttacagccgtctcttgtagcctcttattggcgctatgtacagaacacactccgcatatagctatgtgccacttctgatcgtatccttgctaacgggactccgctgtaagtgactcatgcactcgtgcacttgtctgcgaattcttaattcatgtctacagtag

SEQ ID NO: 53903 - DNA, 113 bp, Gossypium hirsutum
  Clone ID: uC-gsflmaxxa074b02b1
gtttcgctttcggtgtagaaagaaactacaagcggtaggaagctataatggagaggcgagcagcgagatgaagttatgttcatatccctgttctatggggaaggatgaagccc

SEQ ID NO: 53904 - DNA, 149 bp, Gossypium hirsutum
  Clone ID: uC-gsflmaxxa074b11b1
gtttcgtttttggagaaaaaacaaaccttctaggggagcgggctatttaataaatccttgcagggggctgaacggtacacaaaagttgcataagaagagtgatggatcaagggagaaatgcattattgtggccatggattgggtcgcct

SEQ ID NO: 53905 - DNA, 163 bp, Gossypium hirsutum
  Clone ID: uC-gsflmaxxa074c01b1
ctctatagtgtgaagactctaacgggagctatatagtatctaaaggcgtacatcgtaaaaccgttatgtacgtgttccatttcttatatgttgaatgaaatccatactcaggatgatttacactattctcttggtctcgataatttgcactttctacagaaac

SEQ ID NO: 53906 - DNA, 213 bp, Gossypium hirsutum
  Clone ID: uC-gsflmaxxa074c11b1
gctacgcgtgggtcacaacaagtagcgcttccggagatgggcaagggttatggaagcccataaacctgacagcgcaacgctggagggaccggttatgaatgcaagcgaagctttaatggaaggagctgaagttcacagtggaatgaacctttaattttttgctgattgtaggcaagatgatggcactagcaattaagctccatgggataacac

SEQ ID NO: 53907 - DNA, 188 bp, Gossypium hirsutum
  Clone ID: uC-gsflmaxxa074d09b1
tcggctacacgtgcgacaaaacaagtaatactccaggagatatgatagtcacattaatccacataaagtttaaatggcaaggctgacgggaccgtttatggatataattgaagttttagtggaaacagctgaaatacaggaagcacgaatggagtctttttttactgatttttggcatgatgatggta

SEQ ID NO: 53908 - DNA, 154 bp, Gossypium hirsutum
  Clone ID: uC-gsflmaxxa074f03b1
gttacactgttgatcaagagacacaacctctaggggaggggaagcttaaaagaacctactcagaattaaagggggatgtgggaagctgcagacaataaggagagttctggtagaaagggtaggactttatcaccagtgagggttgacaggatat

SEQ ID NO: 53909 - DNA, 262 bp, Gossypium hirsutum
  Clone ID: uC-gsflmaxxa074g04b1
gtttcactttttataaaaaaaatcatactcaaggagcgctgctggttaagtgaacccttgcaaagctgcggaggcatgggaggagaggaagccactatcgatagaacaagtggaagtggcaccactccaaaaccatgaagctcgtattgaaatagtgcccactgctgtatgacacactgatggatacgactggaagagtaagggctacactcgtatgtcctctagttcctaggtcctgatgcccaaggtatcgtggagagtg

SEQ ID NO: 53910 - DNA, 141 bp, Gossypium hirsutum
  Clone ID: uC-gsflmaxxa074g07b1
tcgctttcacgtacgataaagaaaatcatctgctatgggcgctgttgcataactgaaccttctcagatctgcggtggaatgtgattcgatgatgtctttattgatagatcagttagataaggtaagattttatatgcatga

SEQ ID NO: 53911 - DNA, 218 bp, Gossypium hirsutum
  Clone ID: uC-gsflmaxxa074h03b1
ctttcgcgtatgctaaagagacaaaacctcaaggggaggggtagatttaaagaacctatgccgcttaacacaggaagatgtgaaggggcagtcaatagggacgaataagggcgagaagtttccgagagacaaacaaaaaagcacttctcgaaaaggcaccccagaagatcagagagtgcgattgcacagagaatggtgaaagaacatttcaagaggct

SEQ ID NO: 53912 - DNA, 142 bp, Gossypium hirsutum
  Clone ID: uC-gsflmaxxa074h06b1
gttactctttcgataaagagattaatcttctaggggagatattgattatatgaagcctcgcagttttacaggggaatatgaggagcggatgtctctatggacagagaaaaaagacagggtatgatttaaacacggacaaggt

SEQ ID NO: 53913 - DNA, 372 bp, Gossypium hirsutum
  Clone ID: uC-gsflmaxxa074h07b1
tcgcttacgcgtccgattgttttttccttttgttctgtgcattcatacaaaccttaccatatttaggttattcgagtgatggaatcggaagacgatatgattgatgactcggtttgcatgggagatgatttttacagctgcgatttgagctattgttacgacgacgaccctagtgattacgataacgattattacttggacgatgacaatgattacggcttacttgaagatgacgatgatgatgatcaagatggcattgtttgtcgtcgccctcaactaagttatactgatttgagggatgcagatataatacagctacacgaggatgatatttctaaggtttctactggtctttcaatatcaagagttgat

SEQ ID NO: 53914 - DNA, 531 bp, Gossypium hirsutum
  Clone ID: uC-gsflmaxxa076a07b1
ttccaaaacaaaattcacgtctttttcctctttgtcactctctctattccccccatgtcattcgcatacttagggttagggtttttattgtgattttagatatttccttatttactctcttcaagttagatatttaatttggattccgtttcgacttatctaggagttctcatcaatccgtgggttttaattttttttctttgttctatcggaagtttcaattatccctttttcctttatcgaattctgatatttcagtcgttaggtttctaaacaatgcctcctagaaccgtgaagagaggagccggggccggtggtccaaagagaacgccgaggtccactagaggggcatccaaatccgagaatccaccagcggagcctgtacaagaggccgtgaatacaaaggaggccttcagttccagctgaggagctcgcggaggccgctaggccgttgagaaaccaactccggagcaaaaattggtgatcgtggagaaggggctgtgaggaggaaaacaccgtttaaatttgaat

SEQ ID NO: 53915 - DNA, 449 bp, Gossypium hirsutum
  Clone ID: uC-gsflmaxxa076c04b1
ttttcgcgtccgcctaggcatgatagtgctgagactattaaacgggcacttgaacttggcatcagtgttaagatgatcaccggtgaccagctcgccattggcaaagagactggtcggagacttgggatgggaactgatatgtatccctcttctgccttacttggagagtgtggggatgaggatattgctgctattcctattgatgacctcattgagaaagctgatggatttgcaggagtcttccctgaacataagtacgaaattgttggaagacttcaagaaaggaagcatatatgtggtatgacaggagatggtgtgaacgatgccgcagcacttaaaaaggcagatatgggctttgcagtggccgattcaactgacgcggctaggggtgctttggacatagggttgactgagccagggctgagtgtgatagtgagcgcggtattgac

SEQ ID NO: 53916 - DNA, 546 bp, Gossypium hirsutum
  Clone ID: uC-gsflmaxxa076e02b1
ttctcgcgtccggtgcatttcatgcggcttctatgttcaaacccgacaatcctttctgcaggattatattgcgaccttcttatgtatacaagggagtacttctccatttgccccgttgctttgctcggagatatctgaacggagttgacggggtcatcatgcttcagataccggaagggaaaaagtggccggttcaatgcgtttattgtaacgacaatttgaagttcagcaaaggatgggccgaattcgtcctggataataatttggatgaaggagacgtttgtatattcgagttgattaatacgaaggagatcgtactgaaagttaccattttccgtgctcttcgagactgaaatcaggatagcattgaacccgaatataaccgagtcttccgttcttcaactaaataatactctcaggtacatctttcatgtaggatatggcatggagtttatgactgccttagcttaaatttgatatatagttatactcttgctatgtatattccaattcttttttttaagatttcatgtattggaggatttt

SEQ ID NO: 53917 - DNA, 399 bp, Gossypium hirsutum
  Clone ID: uC-gsflmaxxa076e08b1
gatggaaagaccgtggttctaccatcagaagataacccacaacctgatgcagcagaggctaaagcgggcggcggttgttgttgatgcttcagaaaatataaaccctatgctcctccggtcctgtcagttaggcctcaagttgcggataatttcttcttcatcttcttccctaccggtaaaatgttaataaatacttgttttgacatgtccatgataatcttatggtggttgatacatggattagctaaagatgtaaatgaaagtgaaggtgaagggggcattaaaaggggaaaagaaaagcaaatgatataagataatatatttagaatgccagtgtaatttcctctgttttatttgactgtgattttacatattcaaaatgattaaaaaaaaccaagc

SEQ ID NO: 53918 - DNA, 573 bp, Gossypium hirsutum
  Clone ID: uC-gsflmaxxa076f03b1
cttactcgtccgagtatctggagttggagcgccaactctgacaggtaggcggtggttacaccgccagattcaaaatctccgttcgatcaataggatgaatcttatggttagtaggactgaaggaatatcagctgccaatatgggcattgatcttgttaattctcacattgatcaaagtagggaaccaatggttcaacaagctaggacagaagatgcgggaactcagcctcaaacactgtttgcggagaggttacaggacaatccctcttcttcactgcaaggtagggacttcctttcttcaaggttgagccacttgagaaggcaagcagttcaagattcaactaccacttcgtttggtacatctgtcaatttgacgttatggcctgaacttgctggtattagttcaaatgagcaactccatcattgcagcaatggatcaaacattaggcccgatggctgtgatttgcctttttctgttagagatgacgataatattttgatggccaaggaacaattgcaggcaatggttgtaagccatttatagcctttccacggtattgatagactttcaag

SEQ ID NO: 53919 - DNA, 258 bp, Gossypium hirsutum
  Clone ID: uC-gsflmaxxa076f08b1
tttttcaaggacaacgagggattactttgtgttcgtaagacattttggcgtcccacggaagaagaacctataaagtctgctattgtttgaacatgatgctcacataactgtaacattccatggccctagaatataatctgagatgttatagtttaccgtagatctagtcatccttctaatgcaaaatcatacctacttatgacaatttcaatttttgggccaaaatttccagattgaattaaaatgcataatttcgat

SEQ ID NO: 53920 - DNA, 492 bp, Gossypium hirsutum
  Clone ID: uC-gsflmaxxa076g01b1
attttccacttccttgccttgcttaaccttttcatctcacattccatttccaaggagaatattgtgacaatgacgagtgatacctcatattacgatatattgggtgtcaaggttagtgcatccgcagctgaaatcaagaaggcttattacctcaaagcaaggcaagttcatcccgataaaaaccccggagatccaaaagccgatgaaaaatttgctgcactctccgaggcttatcaggtattaagtgatcctgacaaacgtgaacactatgacaagaatggaaaggatggaatcataccaggctccatgttggatccttcagctgtatttgggatggctttcggaagtgactacttcgatgaatacgtaggcacactagcaatggctactttggcatctcttgaagttgaatttgaagaaagttcagtagataaggaagctcgtcccaaaaaatagggaaaagtggaggtattgcaaaaaggaagggaagac

SEQ ID NO: 53921 - DNA, 343 bp, Gossypium hirsutum
  Clone ID: uC-gsflmaxxa076h01b1
ttagtatattactcccaattcgtttctttccccatctacacttggcaagaaaaatcaaggacagttgaggtagaggaggaagaaaaaccaaaagaaggagaagaagaaaagccagagggtgagaagaaaaagaagacaactaaaactgagaaatattaggactgggaattagcaaatgaagcaaaaccaatatggctgagtttgttgttctgtcacctctataaatatgcgaaatccaaaggatgttgaaaagggtgagtacaatgaattctacaagaagactttcaatgaattcttggatcctcttggatacactcacttcactacagagggtgaggtggag

SEQ ID NO: 53922 - DNA, 654 bp, Gossypium hirsutum
  Clone ID: uC-gsflmaxxa076h06b1
tgtacgcgtggggtttttatttgtgatgaagactgtccataaaacaaaatttccctgtgatttcctttggtcctgttgagtgtacatttctttaggaaaaaattatgatttcaaatccaattttttaaaatagaaattttatattttaatatctttaaaatggtaaaatttttgcattaataaaataataaaaattgtattttagttaatattatttggatcgatttggattggaaattaattaaggtattagtccgaaggaaatcattggaccaatcaacttgggaatctatatgaacaggttgaaccaaaaaaaaaactaattggattgggcaatcaaatcgaaatttttaataattgatttaattaatcggatgaattcgtcaaaccaattagacttataaatcgataacttaacgagttgaattttgaaaaccttaaatttagcttgttaaaaatttacaatttcaaataagaaatggggtaaattacagcaacaatcactcactttggggtagctggaaaacagtcttttaccattttgtgggttataaagtaaaggttttatactagatggtggggaattattgcctctattctggtgtagtccttcgttattatttttaattttaaatttaaaatatttaaaaccat

SEQ ID NO: 53923 - DNA, 478 bp, Gossypium hirsutum
  Clone ID: uC-gsflmaxxa076h09b1
gtaagaaggaaaaaataaaaaacaagaaccctctgctagggtttttctttaccccttttgcgccgccgttcgcctgcaccaacgctccgatcgtgaacggagatggcaacactccggcgtgttcgacgaaagaggtaagatcccttttctcttttctttatatattaagcaaaaataaataaaaaagagaaactatataaaaagaatcaaatatatatatgtataaatgaaaaataaaagattgataatccacaatgaagtaaaacagagagagaaaaaagaaaagaaaacctttgtatttcaaaaaagaaaatttcctatttgtgtttgtatttctttcggtctctcttttcgtaaaaaaaaatcttccccctattttcggtcctttttacagaattttcacggctttaaatagccgaaatggaaaaagaaaaaacaaaattaaaagaaatctattctgttttttttgttggcatat

SEQ ID NO: 53924 - DNA, 221 bp, Gossypium hirsutum
  Clone ID: uC-gsflmaxxa088a02b1
ggtttttgcccagcctccatcctagatgaagcgggggggttttttaaaatttatgcggctgtgcacacccaacgccgtggactgcactccgcacccagaagccgaggcgtgagtcgctagagcgaattgtgaagctattgagaaaccaagccgccgacgtggagagctctcggcgccactggtgggagggactcggggggcatataagggcacatgaactc

SEQ ID NO: 53925 - DNA, 266 bp, Gossypium hirsutum
  Clone ID: uC-gsflmaxxa088a04b1
ggttatgccccagtcctggacagtcacaccttttacagtgctgtcaaatttttcgaactgttgaccaagattgacatattttgtggtatggtgctcttacacgaactaaagttcttgaacaacggtgatgcatgtatggtaaagatgattcctgatatactcctgtgaagttgtgacctttatgtgaatacccaccacttggacgttttggtgaccgtgacatcttcttgtctatgctggctacaagtgttatcagtgttgctatc

SEQ ID NO: 53926 - DNA, 497 bp, Gossypium hirsutum
  Clone ID: uC-gsflmaxxa088a06b1
aagggttaatatcaatttcttatgatattttatatatgtatgtcatattcatgtttcatgattgtgttagaattacataaataaaaaataattaaacaaggttaataatttatctttttatcatttaagtgtagtccttttgtatgtttattgggctgttttttggtgcgtatcatgttagtagttgtaaagaagtataaaagtctagcatggcaattatcagtgttgctcaactcactgaacacggtaaaacacccctgtgcgagcagcgagtttaagttacggctgcatcatgctagagagcttctttttcacaaaacaaggagattttcatccgcaagaagctgacccaattacacttctgtcgggccccccttccaggtaaaattcttgtcccagacaagtctccttgtaattacgtcgaacatatagtaggctacacgtaaaacgcgtaaccagtactaatcactctcaactctttacccatatcattctta

SEQ ID NO: 53927 - DNA, 522 bp, Gossypium hirsutum
  Clone ID: uC-gsflmaxxa088b02b1
cggactcgtgggcggacgcgtgggtttaaaagcgaagtggaaaattgttatatattttttcccatctctgaaatcccagaattcaatcatttttagctcaaaaccccacttttttccccctttccttttaatatatagtctttacctgagaaactacaaggttcatcagcccccccacattgaaaatgacggagacgccgttctcaaaactctccgacgacgtcggtcttaacatcttctccaagctcgaacatcaccccaagagctgggcttgtctcgcttgtgtctgcaccaaattctcttctctcattcacaacacctgcttcaaacaaaaatgcttcataaccatccccgtcgtttgcgccggtctcctctcctgttcctgcgtccctcccggcggttggtcctccctccataagctctccgtctgctgccctggcctccatcacgctggcgtccttctcgaccactccgattttggcttcgcacgtgagattggccccgaggtgaaatatcccaagc

SEQ ID NO: 53928 - DNA, 532 bp, Gossypium hirsutum
  Clone ID: uC-gsflmaxxa088b07b1
aaatccattagcgagtctaggccctaccttggagaaaagttaggttgcagcgtgctttcctggtcttaccaggaaagataaaatctctgaatgctcgaaggacgcaacaaagaagaagcaggttgtggttcaacaggcttcccaaccgctatctactggtaccttgaagcatggccctgctttcatattccctttgagtcagtatcaaacaactgcaaatccatctgggccttctaaatctgctacctcaactggcaaagcatccttgactgataattcaacacttggaatttcgactagctctacggtgttaccaggagtagcaggagctgtgagctttaattacccaaatttggctgctaaccaggctccgtacttgactatattacagaacaatggttatcctttttctatctctgcaccagtcggaaacccatcagcaattagaggaggaacccccagtcagtcgttgcctttctttaatgggcctttccattcttctcagatgttccatcctcaacttcaacagcag

SEQ ID NO: 53929 - DNA, 583 bp, Gossypium hirsutum
  unsure (1)..(583): unsure at all n locations
  Clone ID: uC-gsflmaxxa088b08b1
tccatcgcgtccgcccacgcgtccgattggagctaccgggaagtgacgttgtgtcagatgaggaagctgagagtgatgatgaagtactttacagacgcacagtttctctgtagtaaagtttttcattacattaatgaattaactttgttttgaactgtaatttctctagcccatctttcttatctttaggcctctacttatgttctcagtttttgttatatttggattttctccctatattcattgttacaactacagtgcttgctcatgcacatccagacttgcctgcacttgcatggacggtcatatagtgcatattcaaaattgcatctgggagctatcttttttgctgttaattacccggtttgtttatagtattgggttttataagtttctccttagaattaaagctttgatcaattaaatcagaaatcagcgaggagtatttgtggacacctaggtgagcttccttgaattcttgaggacttttctatagcaaacttacattttagtgaaatctttntatgcttcttttactttgccatatgtttcgacttcaattcttgaatattttactggtttt

SEQ ID NO: 53930 - DNA, 532 bp, Gossypium hirsutum
  Clone ID: uC-gsflmaxxa088b12b1
ttcacgcgtccgaaaatccccaaaaaaggaagggaaattataaagatttccacggggagggaaagctcaaagcgaagggtcgaaaactttcagatagattttctttttttctttttgagggagaaaaaggtgtgctgtcgtctttctaatggagctcagcttcagagctagggtttcgtttttctttgcctttttttgaagattttttatgaaggtgttgaggagtgccataatttatcattttcgaatcttttgttgacaattaatatgattttacatgatcagcttgcttggaaggtttccttttagatgctctcttgaagtttcattcctgttctagatggaacaaaaattgtcagtacgttatagagttctctttgtttggtggttttgcatctaaaacgccatgacgcttgaggatttttttaccctggctgagatgaaagatggactcacggtcccttcacgagttgaggagctagtatctgtaatgaaaaaagagaaagaatctgttgtgaaaatatgtgtgatg

SEQ ID NO: 53931 - DNA, 311 bp, Gossypium hirsutum
  Clone ID: uC-gsflmaxxa088d02b1
ccccggttaatagccgcgccggagcgacagatacgggagcggaatttgaaaacggttttccagtgacagccccacaaaaaagcgaagatgcaatccagcagccccaaccagaaaccaaggcactcagagaaaaaacaaaaacaccgacgaagaaggggggaaaaagaagaagaaaaagaagcaaaaaggaaatgagacagatgacaccaacggtcaaccgggagacgaagccaacacgaagcagaggtcccgctagcactagcaaacctgcacacgcccgggaatacccaccgcgaccccaaaccccgaaa

SEQ ID NO: 53932 - DNA, 547 bp, Gossypium hirsutum
  Clone ID: uC-gsflmaxxa088d12b1
agctctactctttttccatggaggccagggtttgttccggggtattaaccaaaattcagtccccctttttaagccctttacatgcaagtaaactccaatcttcaagaaacatgtctattttgcctaatactatacatacccatcaattctcaaatgcttccctttatcttcgctcccatcaattctcaaatgcttccctttatcttcgctcaactttttctagcagaacccatggtttcaaacaggcgattaaagatgattctcgcgagttcgaattatcaacattaaccgcattgtcacctttggatggtcgttattggggtaaagtgaaagacttggctccctatatgagtgaatatgggcttatttactttcgggttcttgttgagattaaatggttgctgatgctttcacaaattcctgaagtcattgaggttccaagctttagtgcagaggctcagtcttatttgctaggactcattgatggatttagcatggatgatgccctgcaagttaaaaaaatagagagagtaactaatcatgatgt

SEQ ID NO: 53933 - DNA, 466 bp, Gossypium hirsutum
  Clone ID: uC-gsflmaxxa088f01b1
atctttctctttccaatttcttcttcgatccttgcccgacttaatgatcaaccccctgtggcgttttctcgatcgccatcatcattgagtcagtcaataaaaccaactcgggggtgagtttaccctcattgaaaaagcctttcttttttcaatttgaaaaaattccgtcctatctttttatcgatggcatgcgaggttataaattcatggacattcaatggcctagcgggtgctttccttgatcttttcattgcttatatattgctttgtggatcatctattgcttatttggcttcaaaacttctgggtttatttggactgcccttgcctctgccttggaatggattgtgtgggtacccaaacaagaacatttgtgtccaagccatgttagttaatgacccatcatttaaaatctcttctgttcaatcttctgcaatgaagaagctcccttttgattcactctgga

SEQ ID NO: 53934 - DNA, 336 bp, Gossypium hirsutum
  Clone ID: uC-gsflmaxxa088f02b1
ggccgacgcgtggatggaggcgggcgagagtgctgggcggaatatcgtgatctgtacttggaagccatccgagcgccaagcttcagatgaggaactccgaagatggattgactcgtgaaacaatacattaaccgtgtccgatgtgggagctcgggctatgaacgtcgtcagttccgatggccttattatgggcaacatgcagctcatgttccctgacagacatgccttagcctttgagactacattaactggattccacgttagtatgacggccttaatgggggaggtatgaaacgctactggcaactcaacaagataagaagagtctgtggggga

SEQ ID NO: 53935 - DNA, 500 bp, Gossypium hirsutum
  Clone ID: uC-gsflmaxxa088f05b1
cggacgcgtgggttaaagtgccagaagctttggtgacagaaattctatctaaacttccacgaactgatggaaacgccgacatcccttatttctctcaactttcagaagaaaaaggttgccatttggaacccatcaactagagaatttaaaatccttcctccatcctcagtccaacgacctacttacccaggccttacctttggtgttcttgtttacccggtggaaggaattgacaagtcttttgatttatgggttatgaatggagaagaatggactaaacaattcagtattgaatctattcctggagttgtcgacccattggggttttggaaaaataatgaactatttcttttaaatacaaattatgaagtagtcttgtttgatccctccacccaagagcttaaggtgcttgggatcaattcttacctggatcatcatcgagagtatgtctccctcttttttacgttgagagcctggtttcaatcagtggaatacaagag

SEQ ID NO: 53936 - DNA, 426 bp, Gossypium hirsutum
  Clone ID: uC-gsflmaxxa088g01b1
gctttttaagaaccggaggtgtctccgaaatggggatagaaatgaaagtgagtgttacgatgatgatgatgatggtgaagagagtaaagaaatcgaagaatttaatttattagggcatactatgtgcctcaaaaggggaagagacggctgttcttcttcttcgtcgtcaaagcgaatgacgccggagcccgatctcgagacgagaaaagcggccgtgaaatcatggggcaatcaaccactcagtgtagcggatcccgacgtgttcgacatgatggaacatgagaaaaagaggcaattcatgggaattgagttgatagcttccgaaaatttcgtttgccgggccgtcatggaagcactcggaagccatttaaccaacaaatactgcgaagggatgccgggagcaaggtactatggagggaatcaata

SEQ ID NO: 53937 - DNA, 471 bp, Gossypium hirsutum
  Clone ID: uC-gsflmaxxa088g10b1
ttctacgcgtccggaagatatggagaagcaggtggaaatagacgatgctgaatttggtgaaggaatccccgaaacctacagacctgcattaatggctggagactcgcagcatcccgaggatttctttgctgaattggatgagatagagacagaccctctgaatctattgttcccacaaggattcggtggtggtgatcaagatgagcagaaagaaaagaaaacaatggatccttttggtctgtttgattggccaccagggaacaacgatgcttccttctgaaagacgccaaaaaagggtttatagcaagaccttgttttagcagcaacaaatttccacactaaacaataattcaaggtcctcctataaaccttattagtggaatattattataacttgaaaaatctctttgggggagtcctaatgttatagttatttaccagaatagttcggagatagaagagggggggggg

SEQ ID NO: 53938 - DNA, 527 bp, Gossypium hirsutum
  Clone ID: uC-gsflmaxxa088h11b1
ttggtttgtggggtatgtgggcatagagctgcgggtttatttgacaaaacgtcgcttcaagtcagtgctttcccctccgtgatattgcctgattttctttatttgggtagctacgataatgcctctcgttctgagcttcttaagactcagggtattactcgtgtcctcaatactgtacctgcttgtcaaaatctctacaagaattcatttacctatcactgcctacaagatgacaaaattttgcaatttgatgatgctgtacaatttttagagcaatgtgagagagataaggctcgagtccttgtgcactgcatgtcaggaaaaaataagtcaccggctattgtaatagcttacttgatgaagtctaaaggatggaggcttcaaccgagctatcagtgggttaaagaacggagatcatctgctgagttaagtcaagatgcgtaccagcaattgcaggaatatgagcacaagctctttggatcatgtgataatagcaatcttgcaggagccccatccttcaactttgg

SEQ ID NO: 53939 - DNA, 369 bp, Gossypium hirsutum
  Clone ID: uC-gsflmaxxa089a01b1
cccactcgtccgaaatttctgaaactttttttggggggaatttttgaccacagtttgcgttcgcaacggtgtcgaacgagttcgccgataagggggacaagatcatttgatggaacccaatccaacgggtacaacccaggattgattgtattgctgggtattggcggacgactgataacattccttggggggaactacatactatactcgtacgctcagaagactcttcctactaggaaaaagaagcccgtatccaagaagaagatgaaacgagagaggctcaatcaaggaccctcagcaccacgggaataggaactcaaggtacgacttttctctgatttggacattgacaaaaaccgacgagctcac

SEQ ID NO: 53940 - DNA, 538 bp, Gossypium hirsutum
  Clone ID: uC-gsflmaxxa089a06b1
gttacatgaacagctgccatgtcctcaagagtttatgtgtcctctttctaaaaagcttatgagagatcccgttgttttatcttctggtcagacatatgaaagacccttcatcgagaaatggctgaaagcaggcaatcggacttgccctcaaacccaacaagttctttcccacacagttttaactccgaatcaccttgtgagtgaaatgatatcgcagtggtgtaagagtcaaggaattgaattgccggacccagttcagaaccgtatacaggagggtgtcaccgaagcagagcgtctgcatttcttttctttgctagataagttatctgccgccgcgcttcctcaacagaaggaagcggcgaaggagctgctgttgttgactaagaacatgccttcgttccgctccctttttgaggaatgcgtggacgccattcctaactgctcaccccactctcgggaaccaaatcccgagtggtgttcttacactgatctccaggaagatgggataccacgctgttgaacctttcaatccatgaca

SEQ ID NO: 53941 - DNA, 547 bp, Gossypium hirsutum
  Clone ID: uC-gsflmaxxa089a11b1
tttatgcaaatggtggcaacagcagcagccatggatgatcggcctagctgctttaggtaccccagaggcaatggcattggttctattctcccaccaaacaacaaaggaacaccattagagattgggaagggaagagtactaagagaaggaagtggcagggtggccattttggggtatggaacaatcgtacaaagttgtgtgaaagcagctgaacaactacaaatgcatggcatctccgcaacggtggcggatgctcgtttttgtaagccaatcgacggagatttattgaaacaactagctcaagaacacgagatattaatcaccgtggaagaaggatcaatcggagggttcagcacccacgtctcacatttcttgtgcttgaatggactactagatggcaagcttaagtggaggccaatggtgctaccagatagatacattgaccatggatctcaaagtgatcaaattgaagaggcagggctgagctcaaagcatattgctgccacagttctttcactactggggataaactagggaagcaaatgta

SEQ ID NO: 53942 - DNA, 362 bp, Gossypium hirsutum
  Clone ID: uC-gsflmaxxa089a12b1
ctcttagatgtcactgtaagaaaaaaaaggaacgggacatgaataacaacactgatgtaatcgctgctctaacacacaccttgaacttgaagcacatcactccagagagctctacatacgggccgtgaccaacaccaccgaagagccacatgcctgcccacaaaagcccaccgtgagaaccacatcagccatacgctcgaccgagagtttcactgcaactaggcatgagagctaacgccttcagatcaatacacggtgttactggaccgtatgggaccaaatgctgatctcgcatgcttattttgtacaccctcaacactgttgctacgcattagcgctcctactgaagctaacagtgttca

SEQ ID NO: 53943 - DNA, 476 bp, Gossypium hirsutum
  Clone ID: uC-gsflmaxxa089b03b1
aaaaaatatttgagtgtttgattttaatttaagaaagatggggaaattaatttccaaaaggcttggagtgtttgtgatgatatttgtgtttgctataggtatagcagaatgtagaaaacttgagaaggaaacccttggaggtggttttggtggaggcgtctgaggaggggttagtggtggccatggtggtggtttatgtggacacttatgaggtggttattgtgggcccaaaagatgcatatgttggtgatgaggcttaatctaaaagaggtatttttacattttaataccccattgtgcacttgttctttaacaattgtgattatcttcgaaagatttgatgttattcctatttcttctggttgtgtgttgccccaaaagagcaccctgttttacttacctaagcttcccttaaccccttgggctaccgttttaagatgacttcatattatgattgcgaccttttaattacctgc

SEQ ID NO: 53944 - DNA, 272 bp, Gossypium hirsutum
  Clone ID: uC-gsflmaxxa089b04b1
atttttatcgacctgatgccgccacagatgattgggggacattccgatgcgatttgtactgcacagaaaggcacattccgcgccgagtaatccgattctaccactcggcatcactatcatgctttggccttggcttcatggaggatgctcccgggagcggatccactgttctgctgactatgtagagccatagggccagatcaaggcctagcactgaatgagaggcggatcaacaagggatgaggggaatcacctacaccagtcacttcact

SEQ ID NO: 53945 - DNA, 485 bp, Gossypium hirsutum
  Clone ID: uC-gsflmaxxa089b11b1
gcggtccttgaacaaattatttcctcttcaaaccctagatctggggttttattttatcttctccctctctattttcccctcccttttcaaaattttcattttttgccctattttattgtttttcgacttatcaaaatcacaagtgcaaaaaagaaaatctcatcttttcttgaatctcagagaatgggggaattaaaggacaacgacgcctacgaggaagagtttctcgactacgaagaagaagatgaaaaagcccctgactctgccttcactaaggctgctgattctgctaagaagttagtcattttaatttatacattttttaaggaaaacaatcattctaatttatacatttttttaaggaaaacaatgttctaatataatctgcaagtattagtgtaaagcaatttgattttaatttgtttcatttcttttttatgtggtgtaagtggtatgttccgattcacagttccggattcagtgac

SEQ ID NO: 53946 - DNA, 401 bp, Gossypium hirsutum
  Clone ID: uC-gsflmaxxa089c01b1
aggtcattggcaacaatattgcctgccatgaaacgctggttgccaaagcttaggaatgaggacctcatcattgggcgccatccatacttacgatctgtggggaaagagctcacaaggtctcaggtcatagctgcaatccctggaaccttgttatgcgcatagaacgcttcacagaagcctaggctggctcataatatgctgagtctggcttgcctgattcagggaattgcaatgctttctcttggatctcttaatattggagccatagtcttgactgggctttttgcatatgagataatatagggttctaccactcccgagaggcatagtgttgcaaaggctccagaggcgcctataaagcttccggtgccaacaacagactcttgacgaccgttatccat

SEQ ID NO: 53947 - DNA, 454 bp, Gossypium hirsutum
  Clone ID: uC-gsflmaxxa089c02b1
cttggttatcaaagactgcccttgagccttctcttgtttatgaatatggccttcttttttctcacaatgagcttcagaaggaggatttagcctatttcagccatgaagttctttcagagcatgggaatttcagttgctaagcataggctggagattctcaaggttgctaggaaggaaattggggaaccccctaagagcttgtccaagctcattttagcaattaacaaaacaagaaagtgtttcaacaagtatgtcaacaagttggttcatcatgataacaacgtgattaaaccgttgccagggccagagccggttcgtcatcaagatcagcggagactagcggtggcgttgttacagaaaggtagcaagaacgagagggaggtgaagatagagcagccgatggtgagaacaaccaggaaggtagcaaaatctggtcccttggactatagaggac

SEQ ID NO: 53948 - DNA, 340 bp, Gossypium hirsutum
  Clone ID: uC-gsflmaxxa089c03b1
gctccatagattgaatcaaattctctgcagtttcttttttttttctttttaatttcttgagctgtgtggaacgaagagaagcttaattattgcttggtaattcgagtggaagagttgaaggaagagagaatgtggggatttggggggagatattattgggggaggatggtaagtcagctatggactatacaatgatgaagcgtcctggcagtcatacacacatatttctcgattgtgagacctttgacttccagaaggggaaagtttccctcgatggataggacgattacattgtgggaggaacaagagatttgcctaacttgctggctgacgctttcaa

SEQ ID NO: 53949 - DNA, 506 bp, Gossypium hirsutum
  unsure (1)..(506): unsure at all n locations
  Clone ID: uC-gsflmaxxa089c12b1
ggattaacaaaattcgagttccccaaaaggaaacatcaacaaagccatggctgaaactacttcttcaacatcatcccccaagcatctccagtcgccaaatcccttgttgatggacccttcatcatcggttccgacaccgccaccgtcatcggcggcggcgtcaaatattaacccgacgcagacggcgacgccgctaacagccccatctccgacagcgacaccaacaacaaatccctcaattgatccctcactgcaaaatttgcagcagcagcagcagcaaatctcgcaaatttcgtctccgcctctttcaaatctcgcccaacaacaacaacaacagcaaatcttgcaacaacaaacgcaacaaggtgttgggggtttatcaaattttcaagtgcagcaaaacctttaaagatcgccgtcaatntcacgtattaatcaactccaacaccccaaggaacatggtcatcactgatccccgcccaagttcttctgggtgaattttctga

SEQ ID NO: 53950 - DNA, 535 bp, Gossypium hirsutum
  Clone ID: uC-gsflmaxxa089d10b1
gcgcccacgcgtccggaaaatctaatctttaaacccaaaatccaaattcagaacccttattttttcttttcaaaacctttcaaaaaaaaaagaaaacccaagaacaaatgttattattgttattaatattccagcaaaaaaaaaaaacacaagaaataagaaataatgggttgtatctgcaattgcttcgtagggttgctgaacagcgtattgctaacagtagggataggtttcgtcatatctggtgcttacctcaacatcaatggtaacagcgattgcgagaaagttttaaccaccccgttaattgtgatgggtggtcttttgctcatcctttcccttataggaataatgggaacctcatgcagcagcaccttctgcatgtacatttatttgaccctcatgttccttttgatactcggtgtcatcgctttcaccatcttcgttttcatgatcaccaaccaagccgtcgggaaagccatcgccgatagcgagaaagtcattgaacccaaaaaccccatggatttttccaattggt

SEQ ID NO: 53951 - DNA, 509 bp, Gossypium hirsutum
  Clone ID: uC-gsflmaxxa089d11b1
gcggctgccaacgccaagagcgcgacgtcaagcttcgtggacggaacagtagttgccaatgccatcaacactggtacagataatatgaacgtgatattttgaatttgaggtcactgataaaggatgagggaatccgaaattatgttaagtgggcgccaagctaatgagtttacaattgatatgcgagcgagtgacaaaacaggaggaaaggcgtttggggcctttacctatacagttctgaaggtcatcaaggagagggaaggtgcatcaaccaatagacagcttgtggtgagggctaggaatgaaataataaacctaggaattggcaagcagcacccttgcctttattgcaatgatgagaatgctgatacaggttttcttggctaccatcccaattgccaacaccagtacgggtgtgtaagctgtcggctttcattcaagggttatcgatcactagaggtcgaaactctaaactaataataatgtgctcgatcagtgtgcactactac

SEQ ID NO: 53952 - DNA, 346 bp, Gossypium hirsutum
  Clone ID: uC-gsflmaxxa089e07b1
ctcacgcgtactctgactcacacaactctcatgggtgcgtttagaataaaccggtggtcactgatgattctaacttacccactactgccgctctataaggactctacagtcaagcttgcgcgtatacattgcatttctcctcctgagatacatggtgtctcacacccaattctactaccgacctgtcagcgcacacttcaaggcatcgtggtgctcggattccgggtgacacgtggatcagatttcatgagatcatattagccacttcgaccttcagtgagaccctattatagatgatagttgaccccgaatttcacattaacagtcaaacatccaggcatgctga

SEQ ID NO: 53953 - DNA, 456 bp, Gossypium hirsutum
  Clone ID: uC-gsflmaxxa089e09b1
ttatatatcttgctcgcactttctatcattgcggcggttgtcagccatgaccggaaagacgatccaaatcacccgaccgctggtgacctctgtgatgttctctgacaccatgtggatacaggtattctaactcgtgcacggcttatatcccgatcttgactatccgatagggcttgtgctaatggcatatctatgagttgggagaccatctttactgtagaggtgcgtatgatgatctacataatggctagctactatgatacccacttgatggtcactctaaaatccgtacgtgctgaacaggaggtaattaccctgtgcctacctatgtggaaccctgactgccgagatctctgcatgactatctcttgtggctgtgatcgtattgacaacggcttcatcaatgcccatgacgaggcctacctactgagatgactcacatgtcgagccatggct

SEQ ID NO: 53954 - DNA, 567 bp, Gossypium hirsutum
  Clone ID: uC-gsflmaxxa089e10b1
gaaactctcccatcccaaatcccaatacatcctgccccaaagcaatctctcattgttttatgaaagaaacgtaatcaggcagccatgttttggtataggaacttgatcaaactatccacacctatcaaatccaaaacccccatcaccaaaaatcttctacaagcttctttatccaacttcagcaccgccaaccaaccccctgcctcggctcaggctcagccatcaggtctcggacccaccaagccacacgacaaaccaagggtggtggtgttaggatctggatgggctggttgcaggctaatgaaaggcttggaccccaagctgtatgacatcgtttgtgtctcgcctaggaaccatatggtatttactcccctattggcttctacttgtgttgggactcttgagttcaggtccgttgccgaacccattgcgaggattcagccctgcatctcttcagcacctggatcttatttttttcttgccaattctactgcagtggatactgaaaaccatgaggtgcattgtgagactgttactgatggaaccgacaccctggacccatggaag

SEQ ID NO: 53955 - DNA, 576 bp, Gossypium hirsutum
  unsure (1)..(576): unsure at all n locations
  Clone ID: uC-gsflmaxxa089e12b1
gcgattcaaatcaaaccagtactcaacctcaccggatttttctctctcacgggatactccgccgaacttcactccaacgcccaatttctttgctcaaaacgccgtcggttttttttttctgtcattttgtaaccgtctctgcaaattgttctgcagaaaagaaaaggaaatcttttgaaaaacgccaatccaagaaaaaataacagttccatgaaaagcttaactgcaaccaccgtgctccgacgcgacgtcagccgtcgtcattactggaatcttctaattctttcattttattaaataaaaagaaaagcaagttcaattctatgcatcctctctgttgtatttccaccgtatcggatcattccccagtcaaacctttacccgacaacgtggccatgcctgctcatgcacctgtaactaccgtaacgaccttcctcttccggctcttcatttagatccaactcggttcgatctacggtccaaatcctgtgccagtccgatcaaaatcagaacaatcaacatcgccgtagtagtagcgtggatttgaatcngatgagccagagaaatgggacaccg

SEQ ID NO: 53956 - DNA, 307 bp, Gossypium hirsutum
  Clone ID: uC-gsflmaxxa089f06b1
cccactcgtactgtgacacacacaactctcatgggggggattttaacaaaccggtgggcactgatgactcatagatacccactactgccgctctataaggttttgaagggcaagcttgcgcgtagacactacaacaaccctccggagatcagtgcctctcacacccaagtctctgccgaccttacaaggtacacatcatggctccgatgttcttggattccggagggcacggttaaacgagctcatgagctcatatgagccacttgcatgacctgtgaggccctatgagagctgatagttcaccctg

SEQ ID NO: 53957 - DNA, 334 bp, Gossypium hirsutum
  Clone ID: uC-gsflmaxxa089f08b1
atctcccaaactgttacacatataggactatggggtgctttcagaaccaacaggggctatgagatgattctcgcaatccaacgtatggtgccctatacggactataaggtcaagaggtcgcgtgcacattacacgaaacttacggagaaatggtctactccattgaaaagcactgatgacatatcaagaaaacataaaaaagccattgcctgcataagttcagaggtagccattggaccgagtttgatggtcttaaaccagagacataaatcttacatgagccactaggaacgatcaatatgaagcccttacttaccatcaatagccaaccatc

SEQ ID NO: 53958 - DNA, 449 bp, Gossypium hirsutum
  Clone ID: uC-gsflmaxxa089g03b1
cggacgcgtggggcaaatatctcacttgtttttttgtttaattgcaccttttcagccttttcatttcatcaccttggacctctataatcttgacatatttttatagcatttttatcactattaatcctataattttcagttcattgtatactgctcatcttcctccccttgaaaacttgcgctttgatgactttctttgttctcatgctgaaaatctgaaatctttagtgtgttcgaaattattactgtgtcagtccttttgttttttatttccttttgttgcagtcctttttttttcaagctaagtgttgatcatatatggattctcttcagggtattcaaacatcaaatataaacccttcttgcaccaccaatttgaatgcaaattttcctgcaaaccttttcatgaccaccgtgggaaccatgggcggcgttaccaccaacacgaa

SEQ ID NO: 53959 - DNA, 461 bp, Gossypium hirsutum
  unsure (1)..(461): unsure at all n locations
  Clone ID: uC-gsflmaxxa089g08b1
tggaaccagccaaatttacttttctggcctgtgtctccccagagagggaaagctgctatcggttaacctgcttcttccacaaacgagatgtgaaagtttcaattacttctgaacatgggtgttaggaaaggcagtacgaaatttattggaagggctgtttggttgatgatgaatgttcttttatgctagagaccaattttagtgcattcgtccggggtaacctgactgaaaaagcttaacttagctgcgtggcaaccaaaccaccagcgaatgaacatgatggtcaattccttggggagctgtatttaatgaacatagttcctcttcctctcccatttgacttcctaaactgctaatcaatagtcatctgaatatacaatatttattcggagtgactgatatttttgatagctcagataataagatcatctctgatatattttatcgattgangaaaatat

SEQ ID NO: 53960 - DNA, 356 bp, Gossypium hirsutum
  Clone ID: uC-gsflmaxxa089g09b1
cccacgcgtccgcggacgcgtgggtttagaatgtaagaaaacctagaaacttccctctctattcaatgaattggagctttacttgtgtggggaagatagctcattgcaagctcctaaataatcagtcaaaattaggtattttgcattgctctagtgtttaaaagggaaaaactgtaactatagattagggttttgtatttcgtgaattagggattcctaactgaatttggtactaatttgtaatttgtgattgtgaactatgggtctctgctttgtgaggtaagcaaccaaatgatgtatagcatagttttgcacctaatcattgatctttataataggatggcagttagttggat

SEQ ID NO: 53961 - DNA, 392 bp, Gossypium hirsutum
  Clone ID: uC-gsflmaxxa089g10b1
tccacgcgacctgtaggctaacaagcgtgctagacaacccgctaggaacccggaagggcacagggaagatccctggcgggagcactcgcgaccgcacctgataccgagctaaagcttctaataagagcacgcctgacagcacccctaagatgaccaactatacctgaacctatccatgaccgaggcaactccagaggaagctctgatggatgctcacatgcatactgacctgcagactggtctatagactcgaaagactaagcgaaccactaagcaaaccgtctcctcccaagttcccttcaagatagccctaaccataaccgaagcctatagcgagaagtctctgataaaagccatgattagacgcatgcgctgcacatattcctaaacct

SEQ ID NO: 53962 - DNA, 432 bp, Gossypium hirsutum
  Clone ID: uC-gsflmaxxa089h12b1
gcgcgcgagggccgccctattttttttttttttgggggttttttttaatttttttttttttttttttttttttttttttttttgggcaaaaaaacaaaaaccgaaatggagttaatggggataatggaactttgggacccttgtccaaggatttggaaaccaggcccttgaaaaaaaaaaagggcccggaaggccaaaataatggctaacaaaaatttcaaaaagaaaacccaggaaaaggaaacaagggggagaatggtctgaaacaatcaggggcatttgcaaacttgcaaaaagccccctttcaattggcaccgggaaaggggggtcggagcaacctaagggcaggaaccaaggggggggggggcggggggaactctggaaacttgcgaagctgggggccacacgccggggtaacccacaaggaggggg

SEQ ID NO: 53963 - DNA, 130 bp, Gossypium hirsutum
  Clone ID: uC-gsflmaxxa090a02b1
atcctatatgaaaagtatttattttgtgaggagctttttcgacactgggtgcggttaaaacaacggttactcaacactcttactgtaatcaccgcaccttgtgttacgttctctgccactctcagctcat

SEQ ID NO: 53964 - DNA, 232 bp, Gossypium hirsutum
  Clone ID: uC-gsflmaxxa090a11b1
atgtttcgtgggcggacgcgagggctagcctgggagggattaaaaatcatagaggtggttatcaaagtggtcattaaatagcatactctcaggggtaccagaattcaagcgggagaacagtgcagccataggcagcgaaaacgctacagcttctagaggagcaagcgccaggcaacaacatgcttattcttatataagaaaagcccaactagaagaatgcaagtatggaatt

SEQ ID NO: 53965 - DNA, 195 bp, Gossypium hirsutum
  unsure (1)..(195): unsure at all n locations
  Clone ID: uC-gsflmaxxa090b02b1
cgcccatctttccggccttagaacttctgctctgaaagcggggtctaagatttagtcgattagtatttctccatctggatttggaccgagctctctctcctttcgtcttaattggattcactatgtcttattatacccctaagaacatcctcataactggngcagatggttatattgcgacacatatagctaacc

SEQ ID NO: 53966 - DNA, 351 bp, Gossypium hirsutum
  Clone ID: uC-gsflmaxxa090c08b1
ttcgccgacgcctgcgctgacacggggggcatttttaaaatgtacttggagatatacaagatacaactactctaccatagcgggtaaacccatcgatggattccacatcttatggatagattgatactcttttataatagatgcaaacgtaaagtttaaaaggtatttatatactggaagttcagaatacattgaatgtggagattgataccatattactattgatttgcaatactaggattgaaatggcaagagtaattttatttgaaaacaccctgttcaaagtttaatccaggagcgcagagaggtataagcccaagtacaggctgatcaggaatggactatatacca

SEQ ID NO: 53967 - DNA, 274 bp, Gossypium hirsutum
  Clone ID: uC-gsflmaxxa090e02b1
gccggcgtttttttctcaagcttttgttagttcttttatgaggggttttaagaaaattgattagtgcggctaccccccaaccatagcaggctgggggctcactaccctccaaagtctctctacccaaccccccgccggtgatcaaattctccaacggctacgaccatcgcctattctccaagcgcaagaatgacgattatgctcttgctttcgaccgcgaccaagacttggaggctcccttagaccctgttagaatgcgaaaagacgaccacca

SEQ ID NO: 53968 - DNA, 447 bp, Gossypium hirsutum
  Clone ID: uC-gsflmaxxa090f09b1
cccatgcttccgatttgttttctctgttatccgatgggagttctttaaataccaaaaatgctgtttttttgctgctcaaaaaccagagttcggggtgtgaaaatggcttctgatgtgccttgttgtggtgctgaattctcattgtatctgttgatcatagtggggttagtgtgttttgctgggttaatggctggtctaacactgggtctcatgtctctgggtcttgtagaccttgaagtcctcatcatgtctgggccgcctcaagatcgtatccatgctgcaaagatatttcctgtggtgaaaaaccagcaccttctgctatgtactctattgattggaaactctttggcaatggaggctcttcccatttttttggacaagcttgtgcctccatgggctgcaattttggtatcagccactctgatcctcatgtttggagagatattg

SEQ ID NO: 53969 - DNA, 468 bp, Gossypium hirsutum
  Clone ID: uC-gsflmaxxa090f12b1
tttattcgtccgcccacgcgtccgtaaatttccggaggagctgtttaactgcgtcgctgtcaccttaaaaatcatatctcgagttccaaaactcgaaaaccagttccgtaaatgtttcctgaaactagactcatatttccatctacaattttttttctagaatttttggtcgagccaattagtacagttttttagttaaattctcccctgtttcagtgttcgactacactgacctttgcgcattacaacttggatatctccctgtacagggcttcaatactgattccgtttgtttctatagaaactagtctcgaaaaggaatctacacatatattgcatgacttctaattatctctggttaatttataatgaatttccaaattcggaatagggaatccagaacccgttctggccctgtttcgcagaaacttaaatatctcacaatattctgtcatatgattgtttcgt

SEQ ID NO: 53970 - DNA, 504 bp, Gossypium hirsutum
  Clone ID: uC-gsflmaxxa090g02b1
aaagtttttataatacttgactagccttttcaagattggtgtcttctatttagttaattttataagtttctctctttcccatgtttttgtttgatggtagaaatagattctttaccatgttttcaatagtcgaaatattccaccaccacctgattctaacattcctaatagtgccttgttggaaaagagaaattttagaggaataaaggttaagaaagatgattagttcctatcagcacgaaaagctatgggatacttgtgcgtctagtatctatgatttctttctatttgaaaatctgcatggcttcacgtgatatgttatcaaattttcaaggaaaatgtgaagttggattgtaagagtaaagtgtttgtggacatgcttctaatatctcaagtgtttcgcattgcaaataaaaagttgaatgattctgataagttcgagagaaaccaaaaacactacatttttatagattcttttcagaatttgagtcaaattttgttact

SEQ ID NO: 53971 - DNA, 489 bp, Gossypium hirsutum
  Clone ID: uC-gsflmaxxa090g12b1
gtgtttttattgcaatgtatgctactcttgcaaggggggatgtggaaagatgcttggtgccagagtctcccttttatgttgaaggacctggaggactttttgaatacattgaaaggctacttaaagaaaataggcatatggctcttgagatagcagagggtgcaggacaggagctgctttctgagagcttgcaatcaatgactcataaagatgctataggaaacaagcttctacaggatgttgcgctatggatatcacagaggatcaaggaccacttctcaaaagaaaggaagatgacaataaacttcagatatatagatcctacttatatgagccgtgctattccaagcaatgcatgtgacaatgtttactgcacacttcttggtcaaagtgctgcgcatggagcaatggctgggaacactggcttcacaagctgacttgtgaatggaaggcatacatacataccattctatcggattactgagacac

SEQ ID NO: 53972 - DNA, 485 bp, Gossypium hirsutum
  Clone ID: uC-gsflmaxxa091a01b1
caaatttttgacggagcagatctttcccaccaaatggggctttcagtaccacaaatgcctcagcccaacaacttacagttcaatgctcataggctacctcagaaagtgcagcaacttgatcaagttccaaagctaccatctacaatgaactcactgggatccattattcagccgcaacagctgaatgacatgactcagcagtcaaggcaaaatttggttgctcggactctaccctctagtcaagttttgcagcctcaagcccttgtccgaagtaacaatatccttcatcagcagcaaacatctaatccaactcatcaactccctctaagtcttcctcaaaacctgcagcagcagcagcagcagcatcttgtgggcccaaatcatccgcaaaacttaatgcattcccagctgcctgatccactcaaccagcatttacaagtgcctgacaaccaggtccagtttcaactgatgcagaaactttagca

SEQ ID NO: 53973 - DNA, 530 bp, Gossypium hirsutum
  Clone ID: uC-gsflmaxxa091a04b1
ttcttagttgcttaaacgctgaaccaatattcccagggatggtttaaatccctctcagaaatctgctttcactcatccaaaaacgcttccttcatacccaccctaccctttcttctatttcaaagccccgcccttcaagctccgctcttccactctccaaacgcctcataataccccgagatccgcccctgaatccttatccctcttcaaaaatttggaatcttacggattcaacactacccaaatcgccacattggtcgaaaaatgccccgaaatcttgcattccagatttaactcaaagtttaagcccaggctcgagtatctaatcgaaaagggttttaaaggtataaaaaaaaaagagtctggaaacccttcaacaatttttttttgaatcataatctacactcctttatacccctttgagggaattttcacgttttcaaaaaaaaaattatcccatctattattgtttctttcttcttttggattcgggatttaaaaaaaagagaaattaacaaaaattcggaatt

SEQ ID NO: 53974 - DNA, 374 bp, Gossypium hirsutum
  Clone ID: uC-gsflmaxxa091a10b1
gctttttcgggttcctagaggtctctaatcaacccggagtttctttggctgcctcttgaccttatctctctcccggcgagattggatctaagcgctctgacatatatctatttttactgcaacctcacttggtgcctgcaaaccggaagagaaaccccaatttattaacttccgaggggatgccagttaggggtgtactggatctaccactattggaatatttgggacttggataatatgtgatatttacgggtatgggcagctactgatactattggaggggtgatatgtgttagatatatggagctccgggttagtttaaaagggaagactttgaatagccaatgccatatatgggtaattggaatgagaaa

SEQ ID NO: 53975 - DNA, 587 bp, Gossypium hirsutum
  Clone ID: uC-gsflmaxxa091c03b1
cccactctttcggaaagatggaaaggaaaaaaaaaggggggggactatttagaccttagtaaccaagcaatcgaccataaagcaaactcttaataactaaacggcagtgataaacagtcattcattagtttggatcactgatcctttcttcaacaaaattccattcaccccccattccatcttctcccgtaatagccatttcccaccagaaccaaagaatagtaatgcagagcctccaccgaataaagaaaaaaacataaccttccattcttgcccttcaccactctccctcagcaaacacctcaagccaccacacccccatccctgtctcctcgtttccgttcgattattttcatcccacgatagagtttttgattttgagctttgaatcagttacagagtttttgagcatgaaaaagaaaaagaaaacagagataggggagatgaggaaatcgttcaaggattctcataaagttcttgaagcttacattcatttcaccaaattcctaaagcaagggattttaatttcaggttgggattgattttacaaggatacaataattttctatcggtaattactctaacag

SEQ ID NO: 53976 - DNA, 500 bp, Gossypium hirsutum
  Clone ID: uC-gsflmaxxa091c07b1
ccgtatatgtccactggagtgtgcaccatccggtggttttgaaccgcaggccccattccaccccactctttcaggcttcaaaaatattcgcactacagtgctgaacggtgcatggccattcttcctaggatctgcaaacctcgcggctgacacaagatgggaaaccctcgaagctctaagatgcgctctcctttggctcgatctagcatacaatggcgtcctattcgtagaatccctaatgagatggcaggattagttactccccttcattattgatgtcttatttatcctaaaaaactgctgcacctgaccctagtgtgtgtatgtgatgcacacatgaagaacgctgggcctatgtcaaaagtaacaaattattctatgaactcctgccacacgttcagccttctaaagatcttatctagcgctaacgaccattagcataaaattctagcatggattccttacatcttacatgcaggtgctgccccatgcaccaccct

SEQ ID NO: 53977 - DNA, 420 bp, Gossypium hirsutum
  Clone ID: uC-gsflmaxxa091d03b1
ctcatttttacgcccacgcgtacggttttactagtgtgggatagcttgaagtggcggtcatgacaaacgctggaacttacgaaaagtaaattacattggtttgctggcttgaaagaaaggtacactgcatacataaccgaggaagcaaaacacttgtactgtctttgacactaacaatgaactgaactggcttcagctgagctggaggcaaagtgttattggaaggtagcttagagggatgtactatgcctctgcatcagttcctgccttacatgctaatagggggctgatgaggttgacaaagaccagacagatcatcatgttatagatgctcacgaacggtgaagaccgtacaatacctcaaacactgattggaatattctttgaggagatcagacatgctggtgctggtgggctgag

SEQ ID NO: 53978 - DNA, 257 bp, Gossypium hirsutum
  Clone ID: uC-gsflmaxxa091d04b1
ctttattgagcgaccctaatccaattattggccccatcactctacttcacccacgacgcgagcctttcgagcatggcctcttacctatccagaagctcattttcaccgaccccctgcaagccctaatccctctcaaacaaaaactcgcttcttcttcttcttcttcctctactcaccgagtcaactcggatgcccttgctgatgcgctccagatctcatccgaacatgcgcgtctcatccttgatactctcgcctcg

SEQ ID NO: 53979 - DNA, 333 bp, Gossypium hirsutum
  Clone ID: uC-gsflmaxxa091d07b1
agaagtatagttttagaggtgttgatttggatgctatgcttgatatgttcattgatgagcttgtcaagcttttttctgccgagcttgcagaaggttcaagagtggtataaagagaaagcccatggcttaaatcaagaaacttctgaaggcgaaaagggaggctctaccaggtgagaagttagaaccagataaaacttatctttgaaatatgatcattagactccgaaatgattggtagaattatttggtgtgtacaatggcaatacattaatttatgttgagatcaagtctgaaatgatcagccataaactttgttagttcttatattatata

SEQ ID NO: 53980 - DNA, 200 bp, Gossypium hirsutum
  unsure (1)..(200): unsure at all n locations
  Clone ID: uC-gsflmaxxa091e04b1
caattttattgaagagatttttggacaagacacctgggataagtgcagatagttgctcttgaaaagtccagaatcttctcagtcaagaaggctatgattttggttatttaattatttatttttcttttattactcccttgtaaattcatctactaaatgtaatttgcttcagcatgttaaaaagtgatcttaatnngatc

SEQ ID NO: 53981 - DNA, 592 bp, Gossypium hirsutum
  Clone ID: uC-gsflmaxxa091e08b1
cctattcgtccgggcatttcctcttcgctttttgtagacatccatctcgtctccagttggcctctgaaattccacaccctaatttgtttctttagggtttcttttttcaagatccaaaaatccattttttttcttgttatttagagaatctgaatcgaaatcaagttcataaaacatctgaaaaacaaattttggattcaattattccaggtattttagattcctttaaagtttgatccgacgttggttatcagatggcggatcaacaagaagaagaggatcttagaatggctctacggatgagcatgcaaaactcgccgccagagccgaagaggagcaagccgagagaagccgcgaacttagcgacgacgacgccggaagagagtcgccggttgcagcgtgaactaatggcagctgcagctgagaaacggatgctggcgacgggaaaaagcgttccggcttctggttcccctctgaaaagtgatagtggcggagatataggaaccaaagagatggaaataaagccaaagaagtgaaattggtgtatgaattgtcggagaaagaagcttatcagttattttttatggttttt

SEQ ID NO: 53982 - DNA, 404 bp, Gossypium hirsutum
  Clone ID: uC-gsflmaxxa091e10b1
cttatatgggggagattgttgatgctaacacctggtggtggaattttaaggccttattgcaaggaacaaagcattagctcttataatggaacagatactgggaatgaagtaaaagctctttatgatctgactaagagggtaagcagctccataaatgacgatggttttatccacaaggagggataccagcatgcggtctttagaaacagcagcaagcaaaatctctttgcagatagagtgagtttattaatttattcataaattattattatctaaataaagctgcaattaggttttgttatatcgcatgaattcgactaattcgattgtaaacacaatgggggtaataggatttggagaggggggacctaatttaaagcgatttcatcccaaccctccaatag

SEQ ID NO: 53983 - DNA, 436 bp, Gossypium hirsutum
  Clone ID: uC-gsflmaxxa091e11b1
gtctttgtccgttataattaactaataatccgggaatcttttttacgcattttcgtttatttctttagcctttttttttttttgatttctagaatttgggcacaatgttcgcagaggctgatagctttccgagatccaagattggaaacattatgcattccgatcctaacatgtccatacctggttctgggagtgaagatgatatgtacgtgcggtatagcagtgcatccacttccggccctgcctacgaagcccataggacgagtctagaaggctcgcccataaccatgtcaccgtggaaccaaaccacttctttcatgaaaccttcaactgtcatttccgataatgatgttccagctaacagccttattcggttcgcttaacacgtgaagagggtcatattttattccttggcagtcacaaaggatctccttta

SEQ ID NO: 53984 - DNA, 506 bp, Gossypium hirsutum
  Clone ID: uC-gsflmaxxa091f01b1
ggaagtattaatgatgggcactcacctccaggtaggagtggtttgtaaggtgtaccctggaaagatttctcccaaggtggttttagacttgggaaggagggttctttgatgggaaagacatctggaaagaatgcctctggtaaacaaggagaccatgccggcacggttcgtaaaaacaagcgggcccctaagagacgtctacttgatggggaattcagtgaagatgacaatgatgatgagatccgttacttggaaaaacttaaaacttcgaagattagtccagcatataaggaagatgatgatgaaccaggcaagaaacagaaaaaactctccagggtttccatcatagaaaactttggcacttcaagttctgccaaagatgagaaaaggaagcatagatcggatagggtttttgaggataccgattatgaggaggaagatgaaccagtaactgatagtgagcttggaggtaagaagaaaaggaaacaaaggaaagaatctgttga

SEQ ID NO: 53985 - DNA, 454 bp, Gossypium hirsutum
  Clone ID: uC-gsflmaxxa091g01b1
aaggattttaagattctaaaatttttggggtttatgtggagagtccactgtcatgggtgatggaagctgctgcaatcatggccattgctttggctaatggtgatggaaagcccccagattggcaagactttgttggtattgtttgtttgttggtaattaactctaccatcagtttcattgaagaaaacaatgctggcaatgctgccgccgctcttatggctggtcttgcccccaaaaccaaggtgcttagggatggcaaatggagtgaacaagaagcagcgattctggttcctggagacatcattagtattaaattgggagatattatccctgccgatgctcgtcttcttgaaggtgaacccttgaagattgatcaatctgctcttactggtgaatcactcccggtgaccaagaaccccggggatgaagtcttcttttgttcaacttgcaaaca

SEQ ID NO: 53986 - DNA, 454 bp, Gossypium hirsutum
  Clone ID: uC-gsflmaxxa091g11b1
aatcttaagagcaaaaaaaaaaaagaaaaaaaaaaaggagagaatgaaacactcttttttgcctattcccattccccccactctttttcttttgccctttttgggattctggaaatcccaatcaatgttcttccatttcatttgaccttttttcataaaattgttttagcttctgtttttttcttttgttgttgttaagctgatactgctggtggttgctgtcagaaacaaaacatgggtgctatcagtcttgaagagatcaagaacgagactgttgatctggaaaaaatcccaatagaggaagtgtttgagcagctgaaatgtagcagagaaggattgagttcagaggagggagccaacaggcttcagatttttggaccaaacaagttagaggagaagaaggaaagtaagatttttaaatttttggggtttaatgggaatccactgtcatggg

SEQ ID NO: 53987 - DNA, 358 bp, Gossypium hirsutum
  unsure (1)..(358): unsure at all n locations
  Clone ID: uC-gsflmaxxa091h09b1
attttatacagaaacaccctcacttctaaatatctgcgtgtctttttacctttttaccaattcccagctcttttttttttccatttctgtcttaagtctcaccatctcttacaaagtaactcaatccttgcaattagctgtaacagatctgtttagagctgaagctttcttcataagaagcagtgaattgcagatctgttagtctggttttggatttttaagttgtgggctattatcttgacttcaatcagtgaagagcaaggaaaagaaaaagagggaaaaataaaaatcaaaacataccctttnttgtgtgtgatatatttattggggtgtggctgccatttttcaggtttttttt

SEQ ID NO: 53988 - DNA, 130 bp, Gossypium hirsutum
  Clone ID: uC-gsflmaxxa093a04b1
cccacgtgttcgaagcacagagcctccaaaaaacacttcaaccgtgtagccatgacattctcgcgttggaatgccgaccctagcaaagatgcacggtcgagtggatctatgatcgattaactggtagtgg

SEQ ID NO: 53989 - DNA, 473 bp, Gossypium hirsutum
  Clone ID: uC-gsflmaxxa093b02b1
cccacgcgttcgtttgtgacatctccttcttgtaatgaaaaaatgagacaaaaaaatcaaaagaaaaaaaaacaagagaagataatgcaagaaaatgaacggattttgaaagaaatcgagaaaaaaaaagagaagaaattgaaaaagaaaaagagtgtgaagagaaagaaaaagaaatcgagaagaaaaaagagaaacttgaaaaagagagtgagcttaaagaaacacaagaaacgagtgttgtggaagaagagagaggatttgaaaaagagtttgaaaaagaaatgagagaaaaagaaatgagtgaacagaacgagagagagcaagataacacaggtggtttaactaaccatactacaaggttcttttatgaaggttttttttattcaggtttttgaagattcccgagacatgtttcaacttcaattcttacttgtcgagagacacttttatttgactgaaaagggtaaggt

SEQ ID NO: 53990 - DNA, 149 bp, Gossypium hirsutum
  Clone ID: uC-gsflmaxxa093b06b1
cttgatactcccaacattacaaacataccgccgtttaaaactgttaacttcatgccgattgctatctttttttcctcaaccccaattcttaaacgcccaattttgggaagctattttttctttctttggagaactttcctggtacacat

SEQ ID NO: 53991 - DNA, 116 bp, Gossypium hirsutum
  Clone ID: uC-gsflmaxxa093b12b1
cccacgctaccgaatggcgttagggaagataacccttgtgcagggtttagccttggtcatggcaactttgccaaggactggaaccatggatcaatcagactgcaccagtgtgataa

SEQ ID NO: 53992 - DNA, 101 bp, Gossypium hirsutum
  Clone ID: uC-gsflmaxxa093c06b1
gaaaatcttatttctccctctgactcatactcacagcagaggcattttattgaaaacatatttgcaaagaagaacgatttgtgatcaagatattcagtcat

SEQ ID NO: 53993 - DNA, 134 bp, Gossypium hirsutum
  Clone ID: uC-gsflmaxxa093f02b1
tcgccgggcagatgttaggggacacatcagagaccacgccactggaggaggattcatgactgctaattctagctacactcaccgagagaaccatctcgagttcttgagcaggcatggagcagacactaaggaca

SEQ ID NO: 53994 - DNA, 201 bp, Gossypium hirsutum
  Clone ID: uC-gsflmaxxa093f06b1
cccacgctatcgcggacgcgtggggccaaaatgcaaacccatggtatctttttcctttgaaaattaaagtgaaaaaaaaaacgtattcatgcctttcaagtttcaatggtctatttaaaagaaggcaaagcttttgggcaattgtgctccttagagcatcggtctatgtcccacactttctctttccaccaatatttgttg

SEQ ID NO: 53995 - DNA, 489 bp, Gossypium hirsutum
  Clone ID: uC-gsflmaxxa094c09b1
tgttttatgattccaggcatgatttctttcctgggctttttcctttattcttattatttattaaaaccgattttgtagaagcatggaacaaataaaaaaagaaaataaaaagaaacggaaaacagaggaaaaaaggggaaacaatcagattttcccttttcaaatatttgttctgccttttttattcactagtgcgcgttcgtaaaaagaagaagaagattacaaaggtgaaatttcggcttttatagccgatctaaacaactcttgatgtctatttttttgttgctttgcgatttggctgcttctttctgttgcgtgtctattgctctttgcaggtgacagaggtgtcagagcatgcggaggagaggcggctaggagcggtgacagccaggcatggcagaggaggcgaaacggcgctgggggcatgcggcgccaaatagggttagggaaccctagggttcttttttgacttgtttaatttttgggctt

SEQ ID NO: 53996 - DNA, 419 bp, Gossypium hirsutum
  Clone ID: uC-gsflmaxxa094d08b1
tatgatacagttaactgggaaacgtgatgataggaaccatcatactgctgtttgatctggaaaccccgctgccgtgtctgaaatattgaaaaacactgggccggatgaacttaaagaactgttgcctaaacagaaccaatccggcgaaaccgccttatatgtcgccgctgaatacggctatgtcgatttggtcgaggagatgattaactattatgatcttacagatgctgcgatcaaagctagaaatggttttgatgcttttcacattgctgctaaacaaggagatttagagattttgaaactgctgctgggggtgcatccggaattggcaatgacggttgatttatcaaacactactgcattgcacacagctgcaacacatggccatatagagattgcgaatcttttattagaggcag

SEQ ID NO: 53997 - DNA, 148 bp, Gossypium hirsutum
  Clone ID: uC-gsflmaxxa094e01b1
cggatgcgtgggcggacgcgagggctgaaaagaagaaactatgaagaatatatgttcttatcacaccagtactgctgcatggcagaaagataatttatatgctacagctcttgaatccagactgataagacagcatgggaagcagggg

SEQ ID NO: 53998 - DNA, 132 bp, Gossypium hirsutum
  Clone ID: uC-gsflmaxxa094e04b1
tcggtaaccttcttctgtacagcaggcgcttgcaagcacctgtagagcactcaatcatgttcccgccggcgtgaaagatgcgagcgataaaaagattctagctgatatgctgcttcgggcagtagataatcc

SEQ ID NO: 53999 - DNA, 164 bp, Gossypium hirsutum
  unsure (1)..(164): unsure at all n locations
  Clone ID: uC-gsflmaxxa094e09b1
ataaactatccttcatggctttcaaccacanagcncaagtaaaaagctaagattgtttatagcaccccgaaaccaaatgctngcgtggctaaggatggtagcggccaattcaagaccattgctgaagctctcgctgcctaccccaagaacttcctaaacagaca

SEQ ID NO: 54000 - DNA, 496 bp, Gossypium hirsutum
  Clone ID: uC-gsflmaxxa094f05b1
gcttctgcttcttccacacaagctgaaatttcctgcatacagaccactctcagtcacaggtacttttcattctccatattccctctctcacctataaacttcaccactaaccgtctcttgtaaccttctcacatcctcttctccaaactttgagcaaaacccaaaaagcaaacagaaaaagaaatgaagattttttcttcttttaattttctttttgatttaacaacatagtgaatttggttttcttcctggcttatgtatgttttttactttgatctcttttgatatgttctcttgattctgtttttgacaaaatcattcttttctgctttcccatctgttttgctttatcccctttgctttgctttatctcaaaaatcttatgctctctttggtttgagaaaactaaaaaattacaacttcttctcttggtggtttcctctgtttgacattctttatttcaaacttcatcagccttagtttcctttttttcttt

SEQ ID NO: 54001 - DNA, 279 bp, Gossypium hirsutum
  Clone ID: uC-gsflmaxxa094g01b1
aaatattaaagggaaaggcaaccagctcgcgtgtagaaattgtttaatcacctggcacatttttgtcgaccaacaaaaaagaaccaaactcagatttcagctctctaacacacagctgcgatggccattttcttcttttccaactacctcacaggcctcatttgtcttggtttcttctccaaaatcttagctgcagagcacagttcttccttttctttcaaaagttttggtaaagatccaaaattcgagtccaatattggtttatatggggatgcacat

SEQ ID NO: 54002 - DNA, 124 bp, Gossypium hirsutum
  Clone ID: uC-gsflmaxxa094g10b1
tgctcacgcgtccgcttccgtctccatgcaacctggccacttcttggctacaaccagggcttctgggctgaaattggcttcatttgtgaaccaggaaagaaccaaccctatcttttcaggttgc

SEQ ID NO: 54003 - DNA, 231 bp, Gossypium hirsutum
  Clone ID: uC-gsflmaxxa095a07b1
gcggtactggctgctttcaccgacgaacgagtctttgcggatttaagtgttctgtggagcataaaggactatggaattcagaaacttgaaaggatgataacagtacggtttatgatttgttttattttatctatagtttctcttagttgttcctttattactttaactttttttattttatatttattttttttttttaattctttttttcttaattttttatatattttc

SEQ ID NO: 54004 - DNA, 233 bp, Gossypium hirsutum
  Clone ID: uC-gsflmaxxa095a09b1
gtcatcattctaaagagattattgtaaattcgagtagagagcttttacacaagatgagagccaagtggaagaagaagcgtatgaggaggctgcataggaagctccgacagatgagacagtgatccaagtagatgcgccttggactgaaatagttttgctctgaccatccattgttttaacaattatcatgtacctatatctatatgtctaatatagtacatgaactttgatca

SEQ ID NO: 54005 - DNA, 174 bp, Gossypium hirsutum
  Clone ID: uC-gsflmaxxa095c03b1
cccacgtgaccgtttcctttccacgtcttccccttttgtttttcctgttcccgtgacaggcgagacttatgacgacgcatggcgagaccgctgcaacgagcacgcccgatgcacgtgcattgcaggaagggatagcggagttctactaccagacgtctgggcttagggaagaca

SEQ ID NO: 54006 - DNA, 108 bp, Gossypium hirsutum
  Clone ID: uC-gsflmaxxa095c04b1
cccacgctaccgaaatgccaaaggtactagcatcattacgcgatcttttaaccctagaccgagccgaaagagacgatggcgaagcataccgccgttggttggggttat

SEQ ID NO: 54007 - DNA, 153 bp, Gossypium hirsutum
  Clone ID: uC-gsflmaxxa095c06b1
tcgccccgttctggtgctcaagatagggccgatctacctaggggaggagtgctgcactatttgtgggtgcacacatcaggagcgggagaacctttaggtgggtgaagcttgaagattcagtagaccccaaagcttcttgtgtcactcccaggc

SEQ ID NO: 54008 - DNA, 514 bp, Gossypium hirsutum
  Clone ID: uC-gsflmaxxa095c12b1
catcatgcgatcaagatacaaagggctattcttaggcgagggagtgctgcaataacaaagagtgggtgcatcaggagtgggagaaagtttaggtgggtgaagcttgaagattcagtagatacaaagctgttgggtcacccccaggccctcaccaagttctgttactttctaatggatgccttgaaggagaaaggagctaagttgaagcctttgctttgtgcttgcatgttgcaagagccatctaaggtgttgattgttggggtctgcggaaagcctcgtcttggagcacttcaagggaatgcgttcggtcttgcattcaggaatgctgccgaggaaaccggagctgaattcttccatgagcttttcgaatcttcatggattgtgttggatgctgtcgttgttaattccttcatggtcaaactaactgaaaggctttgatgtaaagctttggattatgagtgacggtaattgtaactttggtttttcttttttttttaatgaaaacatttgttca

SEQ ID NO: 54009 - DNA, 184 bp, Gossypium hirsutum
  Clone ID: uC-gsflmaxxa095d10b1
gcatgtatcaggcaacaggtctcgcggcaaaactgtggcaccataaggagcagtaaaaggatcatccgaaggacacaaaacaatcaaagaaactcatgaactatgctagtgggaagaggaacccactgctagatccttcttctaccattcctggaatgcctagtgagcgtcaaagattaaaact

SEQ ID NO: 54010 - DNA, 231 bp, Gossypium hirsutum
  Clone ID: uC-gsflmaxxa095e10b1
atttctctaacaacttgctcagaagctgaaacaggaaaactacaaaaccaaaaaagctcactcagaatttaccctttcttttgcttatcaaccatcatgcgtgttaaagataaagagcaggtcaccccagaaatagacgaccttgatgacaactactacaccaaaacgtcttgctctttgctttcttggggtgatttcttgtgtacatagatggttgtattgtactcattt

SEQ ID NO: 54011 - DNA, 176 bp, Gossypium hirsutum
  Clone ID: uC-gsflmaxxa095f03b1
gaagcatcaacgccaaagagataaataacacgatgattgggttatattagatgagcaattaggatcaaacccatctaaaatgcggggatggagaaactctgttcaagaaactgctgccttaaaacccctctttctaaccattatcccaccgaaattcctgttacagtggttacttt

SEQ ID NO: 54012 - DNA, 355 bp, Gossypium hirsutum
  Clone ID: uC-gsflmaxxa095f10b1
ggtgctactcttcagagacctttcgctcggccactcagagagagagtcaactccactgccattgcaaacgaaacctcgaatgctaccgagcaagcttacctcaaccgatctccaatctccactcggacaactcgcttctcaactcaccgactccgacctccgactcactgcttatgacgtcttcctcgccgtatgccgtacctcctcttcgaaacctctctcctcttccgcttccgcttccgcttccgcttccaattctgattcgctgggttacaactcgcctagtcaaaacaacaaccactcacctaattcgcccgcgttgcaacgctcgcttacgtcagctgccgctagtaag

SEQ ID NO: 54013 - DNA, 362 bp, Gossypium hirsutum
  Clone ID: uC-gsflmaxxa095f11b1
cagataaaaaagaaaaagaaaaaacctctctcgttgggtccatatggaaaatcgattcaagctaagaatctctcgcatgtttcgatcctcgtttgcctcttgtcggacccggaacatgtcggacgttattgagaaacctgttttttcacctgaaaaacacaacggcttccatttggtcgaaccattttcgtcgtcgccaccacccaagtctcgacccttccctttcgcttctaaacccagagacgccatcaatgctcctaaagaatctcttcccagacgtaaatcgtcagctcgttatccttcttatatagtctccgtcgcctattttgacggccgaacgggtccgccgcctgctcctccta

SEQ ID NO: 54014 - DNA, 380 bp, Gossypium hirsutum
  Clone ID: uC-gsflmaxxa095g03b1
ctcaaattgcaaatgcgaacctggaacctacgagcagtggaagcctaggtggctctgtaaattctagtagaaaaggtaatgtgctgcagatatctcgctctttttctgttcccttaaatgacaaggacggaacaacattaaggagaatggattcatttttccgagtagttccctcaactccacgagtaaaggaaggagaaataagttcaaattcttccgtgggacctgatgctgaaaatggcgatcctgatggtgaggacataccagaagacgaggctgtttgtaggatttgcctggttgaattgggtgaaggaggtgaaacacttaaaatggaatgcagctgcaaaggcgaacttgctttggcacacaaagactgcgcc

SEQ ID NO: 54015 - DNA, 155 bp, Gossypium hirsutum
  Clone ID: uC-gsflmaxxa095g05b1
ggcacctactaaataatggaaacggagaagacaaaaaccagcacttgctagaagcaatcaagtatcggagatggaagaagacaccacaacatcaaaaatggattcccccaccaatccccagcaaaccacttctgacgacgataagatagactatt

SEQ ID NO: 54016 - DNA, 434 bp, Gossypium hirsutum
  Clone ID: uC-gsflmaxxa095h12b1
gtttggtttttgcggagaaaatatgagagagtatatggggtgtttggataacgtggaagcgattaagaggcttaaatcgacggagagaggggagagatttgaacgacattgcccggagaaagggaaaggattgaattgcttggttccagctccaaaaggatatcgacctccgatcccctggcctaggagccgcgatgaggtatggttcaacaatgttcctcatacacgtctagtagaagacataggtggccaaaattggatttctagaaaagggaaggataaatccaaggttcctggaggtggcacacagttcatacatggggcagatcaatacctgaatcagatctctaagatggtccctgatattacatttggacatcatattcgggttgttctggatgctggatgtggtgtcgcatgttttgttgcctatt

SEQ ID NO: 54017 - DNA, 552 bp, Gossypium hirsutum
  Clone ID: uC-gsflmaxxa096a03b1
tctcttttagaaaaaaaagggttgctcctaaagaaatggggtttcttcaatggagcctagaggtgcttgcagatcaaacaggtcttcatttgagaaatgggtggcaattgtattgacctttctagctgtggtttcacctctctatgtcaaccaaaagccaacagaactggagcttgaagagcaatccatggactccacctcatggttatgtctcctgtttgtgctactgctcttagcctttgctttctggctttacctgaaccagagctttactaggtttgaccgtcattggattaggccgagcaggtattcgtcatatgaaagactggttgcaataggcttgatagtcttaggtggtctttctcctctttatatcaacaagggcacgagtgagttcgcacctgacgagcagcccatcaactttgcttcgtggttgcctcttctgctattgatattaaccttggccatcgttacattgcttttctgtgatagaagctctacgaagttcgatcctaactggattcacagagttggtggttcttcttgctggat

SEQ ID NO: 54018 - DNA, 430 bp, Gossypium hirsutum
  Clone ID: uC-gsflmaxxa096a04b1
cggtctcgtgggcggacgcgtgggttcgaatccttgggttctatatatgagaataatctaaactaatgaaaaacagataaaatacgatcaaagaaagaattaagacatggctcgccacattattgttgttgcccttgttttcatagctattgttggggcatttgctgctgatatatcaccgtcacaagccccatcaagagctaccaagacttttgctccttatgggtcgccatcttcatcctccaatactatcagcgctagcccaagcgagagccctagcccaagcgggagccctgaggaaagcagcaaaggaccctctggtgactctcccgattcagattctgatgaagataccgatgaagatgaagaagctgaaggaccagattctgatgatgacagtgactacagtgcataattaaattcaatgatg

SEQ ID NO: 54019 - DNA, 495 bp, Gossypium hirsutum
  Clone ID: uC-gsflmaxxa096a07b1
cccacgcgtccgctcaaatgccaccatttttattcatctttccatttattcatattccattccttcttcttcttcttcttcttcttcacgcttctgtactcttcctttaaaaccaacttccatgctttcccttccttgattttatttctcccctacacttaccaattttcttttttattttttctataattattggaatttctttttgtttttcccttttttccttttttggttgcaatgtacagtgcggatcgttgcttgttcgttgattcgatcagggtctcacgacaagatggcttgtttctcagtgacaaaacaggtccttcctcgtttgtttcatccatttcactaaagacccagaaatgttttgtcgataaaaacgaaaatgtgtgtttggtttcgtgttctttgggtggtcaaaccctgggtcctgtgaagtcgaggagaagtggtggcaaagggggatgggttctatcggtgagtttgtcgagggag

SEQ ID NO: 54020 - DNA, 439 bp, Gossypium hirsutum
  Clone ID: uC-gsflmaxxa096b02b1
cccactcgtccgaaaaagaagagagaacaccccttctgtctccccatgttctctgttagggtttcaagaacccattttgcgctgtcgccatgcctgccgatcgagagaagagagtttctcccctccccttttgggtttgatttcggcgacagagaaagggtctccggcgacacgaccatgggagatttcggtctctttttgcaggtgatgtgaacagccagacgcatgcgaggaggcgtgcgactgccaagggtgaaaggggcatgcggcggctgaagcttgaaggggctagggttgctgaaatgttttgtgtagttgggctagggtttctagacttttaggcttgttgggcttgttgggtttagatagtttaggcctaggtttaatatgtaaatgggcatttattggactgtaaaaatatttggaatttggtttattt

SEQ ID NO: 54021 - DNA, 550 bp, Gossypium hirsutum
  unsure (1)..(550): unsure at all n locations
  Clone ID: uC-gsflmaxxa096b04b1
acactctctctgtcccttcgcattggactgttgattggccgtcaatggcggctccagaggcctcaaccgccgccgtaccgactctatataccaataacaccttgcgaaatgctttcggcggtgttctctctttcttcatcctcctcctgatcggagttctcgctttctcgatccgtcttttctctgttataaaatacgagagtgttattcatgagttcgatccttactttaattacagagtcactcagtttcttacaaagaagggaatttataaacaaatacaacactttgtcctcaactttctagtgttaactgcggaaatgcttgtggagcaatctgtaatatatggatctatgaattattcatttgcgccagagggtgccgttataatatgcttcacgtcaggaactactgggaggccaaagggagttgtcataagccatacagctntaattgtacaatccctggcaaaagttgctcatggctgtactcattcgaatggctattctatatnctcttctttctcaatgagcaaatatcctgtgatttc

SEQ ID NO: 54022 - DNA, 554 bp, Gossypium hirsutum
  Clone ID: uC-gsflmaxxa096b10b1
cggacgcgtgggccctttcaaaaatgaaggtgtggattgctgtgttgattgtatcatgggcttattggatatccatagtttgcatccagatggtttccgaagctgcgcgaatgagaaacatccagcaacaaatacttgcagttgcagagcctcacgcggatggaacttatggaacgtttaatccagatggcataatgatggagtacgaaaccagctgggaggacatttcctccgccattcaatctgcaacagatggaatcttcgcaagggcagttcgtttagtatatgatgctcaagaattggttttaagcaccctgaggcaagttattttcatcattgcattaatgccaatggaatgtaacccaagagctaatttgcagcttttgcgcatgccaacctcaacttcttctttgagatccagtgcttggtagataacagtgacacttgtgaaagagtgttagcaccaacctcacatattactggacaaaatggtttctgcgttgatgtataccaggggagctaccacgatggaaacaaagtaatcttatgggaat

SEQ ID NO: 54023 - DNA, 541 bp, Gossypium hirsutum
  Clone ID: uC-gsflmaxxa096c07b1
cttttatcggtgtttgataaaaggtcaattagagtggttgattttcgttgctaatattaaagatcggtgtggtgaagaaagatggatttcgcttgtagttttaagcgtcctatggtatttcatggtggtgaagggagtattagtagctataggatgctggatccgttatgtcctagatttaaatgtaggaatttgagttacagtgttgttgatcccatgattggatccaaaactcggtgtttgaagaaaatgaggaaaagtatggcttatggtggttgtttaagttcgaatttggttttcgggggggaatttaaccgtcatttgtgcagtgcgtactctagtaggtcgttgtgttacggtttgcgtgatgtgtcgaaagtaagagtagttaggctgtgttgtcaaggtaatgattcgctggcttatgctgatgggaatggtcggaatgtggaatttgcagagagtggtgatgggagttcgagtggtactgtatggaatggtctggaagatgaagatagaaatctacatggtgaagcggaac

SEQ ID NO: 54024 - DNA, 201 bp, Gossypium hirsutum
  Clone ID: uC-gsflmaxxa096c11b1
gcttttccccaccgtactatttaagcaaccatatggggcattttctttttcacatagatatctcaattcggggtaggattctaaatgctagaatctgaatttgaataagtgatttcatgaactaattaagctaaatccgggatcattgtgcaaccgtgaatgttttgagcactttcttatcatgaaaattctcttttattc

SEQ ID NO: 54025 - DNA, 229 bp, Gossypium hirsutum
  Clone ID: uC-gsflmaxxa096d09b1
ttgtctcgtggggaaaacacaaagaaaaacaaggggggaattttaaacagcttcttctttaggcccccccctccaacaccatggacatgaagaagaagaacactcgcgccggcatactcgccgctgcctcaaagagcgcagccatggcagcaagcaccgccccagctcgcaaacgagatggcgccacacaaagctccggcgcaaacggcgcaggaccagaatctgcacc

SEQ ID NO: 54026 - DNA, 562 bp, Gossypium hirsutum
  Clone ID: uC-gsflmaxxa096d12b1
tgggttttgctctccttccagttttggtctcagttggcaccatttagtactctgctgctcaaagcttcaaatgtagctcgagcgacccgagtacatgtcatgcattggtcggctacatcactgttaacaacaccaacctcggcgccattcaatccctttttagcgtcaaaaacctcaggagtctccttggatccaacaacttacctctcaacaccaagcgcagctatgccatacccgcacaacaggtcatcaaagtccccatcaattgtttgtgcaacaacaacactggaacttccagcggtgctcctatctacaccgttcaaccaggtgacgggctctaccacattgcagctgaggtgttctcgcggttactgctttaccagcaaattgcagcagccaataatattagggatgccaatttgataacgattggggacaagctcaaaatccccttgccctgtagctgcgatgaagtggacggccagaaagtggtgcattacgcacatatggtgaagtcagggagttcttcgggggagatcgctcaagagtttggaactaatga

SEQ ID NO: 54027 - DNA, 411 bp, Gossypium hirsutum
  Clone ID: uC-gsflmaxxa096e01b1
cccacgcgtccgcccacgcgtccgctgaaatccgaatggattttcttaaaaatccatctatcatttcaattttcagaaggtttttttttaaaagaaaaagaaaaagggaccgaaagttaaattagtaagctttttttggaaccatttttactttaaagtatttaatgaacatttttaatattaaataatttataaatttattaaataatttataaaaaatatatttacttaataaattgttaaaatacaaaaaaaataaagatttaaaaaaagaataagtggtcttcgtattggggcagtggccagtaaactaaagggctgtggatggcccatacaataaaacaggcgcctctcgaggaggcccaataataatgaacccaaaaaaaaagaataataaataataataaatag

SEQ ID NO: 54028 - DNA, 152 bp, Gossypium hirsutum
  Clone ID: uC-gsflmaxxa096g03b1
gtttttgttatcaattcatctttggcttttgcactccagctcctttcattctctgtctctctctctctctctggtctctctacaaagctatctctcagctctcatctaacgacacatggtaaaggacaactggcacagacgtacgggcacac

SEQ ID NO: 54029 - DNA, 359 bp, Gossypium hirsutum
  Clone ID: uC-gsflmaxxa096h01b1
cccactctttcgcttcaccatgccaattccttttggggggatcgttttacatttttattccgtggttagacacttcttactcgccgtcgtaaactgctgccactatacccatttggagtgcttcttctccttttatcttcaacccgcgcaataatagatcgagtcgagccgagcccgaaatatacgctctaaacaaagccatgaagggttcagggatcttgatccctacatccaaagcaatcatgtagagcacacttctatgacggctcatgagcacgtagccatgacaaagggcgagcactacgccgacagctgcggcatgaccattgacagctgcgatggtgggcatggggagggag

SEQ ID NO: 54030 - DNA, 551 bp, Gossypium hirsutum
  unsure (1)..(551): unsure at all n locations
  Clone ID: uC-gsflmaxxa096h04b1
accatattgtcttgtctgctgcaactcttgtctttggggctcatcttatcttcagctgcatcaatccaaaccccgaagcattatgttgtatacatgggaagctcagctggtgaaactgcagaatcagatcatccgcaattactgtccacagtaattccaagggaggaaagagaaaggatttcaattacaaatcattataatcatgcattgagaggattctctgcaatgcttactgatgatgaagcttctgagttgtctggacgaaatggggtggtatcggtttttcccgattcaattcttcagttacatacaacacgatcgtgggatttcttagacgacaactcaaaccctaagttgaatcatggatcatatctgcctcataaatctacttatgatgtcattattggcatgatcgatacaggaatttgggccgagtctccaagtttcaaagatgaaggaatgggagaaatacctaaaagatggaaaggagtctgcatggagggaccagacttcanaaagtctgactgtaataggaagttgataggggcaag

SEQ ID NO: 54031 - DNA, 494 bp, Gossypium hirsutum
  Clone ID: uC-gsflmaxxa096h11b1
cccattcgtccggcatcaaatggtgctaggaaagtggggactgctaaagccaagatggtggggacactcacgggggtgatgttggttcccctgcatctcaggatgaccatgatcaccaccatcggttcaatcaccgtgaagaagaaagggaaagagcgccatcgcctgttgaatcgcatgtaaccatggagaagtatgtggataaagtcactagagatgcacaaagcatagagaaatgtggattggatgacgtcaagaacacccatgttgctattcagcatgttgagcatgataagatttctagctgcaccagtagttcagatgactaatctcgagcctataataagaattcaagggaagaagcctatgtttttggtaccgtcatgtctgcaaaagctctgaaagttgctggagatgaaactcatggtactgaaattatccacgaccaattcgggttgaatgaaagtgaagtgaagttattgctctcatcaaat

SEQ ID NO: 54032 - DNA, 482 bp, Gossypium hirsutum
  Clone ID: uC-gsflmaxxa097b05b1
ctcacgcgtccgcggacgcgtgggttctaactggctgtgcgctgctctgattctattcaggaaaacttttatcatatgggaactaatagaaagagaaggataaaagcgttagaaccacattcagaaattaatgtgcacgaaggttgtaagggagtcgataaatctagaaagacaagcgttgagcagcagcttcagggagcaacaggaaaaacagaaaaggatgagcattcatcacctagtggttcaggtgaagcatcatcttcaaggtctaaaactacaaaaaccagaattgtggaaggaattacaatatctgcacttgacttgaatacagaagaaagactttatccttccactaagattaagttgcagctctttccgatagatgaaagcactcgtctaggtttagaaaaggatggctttcatccttatttggaactgactttaagtgctagaaagaagatattctctgtacttaagcacct

SEQ ID NO: 54033 - DNA, 489 bp, Gossypium hirsutum
  Clone ID: uC-gsflmaxxa097b10b1
ttggttgtattgacttggaggtcgttattaaggatgtcaagggagtggaaatactactggcttcgccttatcctttatatgatccttacactgtgcattggaacagtattttcaggcttggggcattctttgtcttcagttgtgaaaagagtcgctgcaatttttgtatttgtgtcatttacttcacttttaagcatcgcgggagtacctgcactactcaaagaagtcaagatttatgcgagcgaggagtcaaaccagcattcaggagctttagtctttttgttcggccaacttctgtccagcatcccattcctgttcctcatctccatatcatcgagtctcgtcttctatttcttaataggattgcgagatggattcagcttgctgatgtacttcgtgctgaatttctttatgtgcctctttgttaatgaaggattgctgctggcagttacttctttctggcaaaatattctctggagtatcttaaca

SEQ ID NO: 54034 - DNA, 443 bp, Gossypium hirsutum
  Clone ID: uC-gsflmaxxa097b12b1
tcgtttattgttatggagttgtgtgagggtggaggggtgctttacaagatattgggggaaaaggacagccgctatagtgaaaaagatgcagcatttgttgtacggcagatgctcaaagttgctgccgaatgtcatttacatggcttggttcatcgtgacatgaaacctgagaatttcctatttaagtcaaccaaagaggactcacctctgaaggctacagattttggtttgtcagactttatcagacctgggaagaggtttcaagatattgttggcagtgcctactatgttgctcctgaagtattgaaaagaaagtcagggccggaatcagatgtatggaatattggtgtaattacctacattttgctttgggggaagcggcctttttgggataagaccgaggacggtatatttagggaggttttgaagaacaagcctgattt

SEQ ID NO: 54035 - DNA, 316 bp, Gossypium hirsutum
  Clone ID: uC-gsflmaxxa097c03b1
ttttatatgaagccacacgggacaggtattccggggggctttttaaaatcgatggggggtatcaaccctcacagagtatgatgctctaacaacactatggggcatctcctttccgctgctttactgtgattctcatggatccagagagggtgggttggacatgattacggacctttccaagatatgtcaagcacaaaattcaacaggggtgctcagatccttactgggaattgcctctcatagatcattattgattggtggcaaagggaccacaatgctcaccacattgatcgttacaagctagaaatcgatccag

SEQ ID NO: 54036 - DNA, 405 bp, Gossypium hirsutum
  Clone ID: uC-gsflmaxxa097c11b1
tcttttagccttgaaagctttgcctggtaatggggggcttttttatacttatttgggggaacaactcgagattgttcgcaggttacctgatgctcaccctcaatatgaaaccctcaacaatacttttgtgagggcgcttgttacaatgcacaatatgcctaggattaggatcatggactcgtcgacgttaactgaacatactttgattactaatacacgtaagacgttcgatagagcactttgagcgtcgcctgtgactcaacatgatcggatttgggaaccttatttggttcttgtgagttaaaggggtatccctactgagacatcactgatggtttataggagatatttgaagtatgatcctaggcatattgaagacatcattgaggtgttggtgaattcaaa

SEQ ID NO: 54037 - DNA, 338 bp, Gossypium hirsutum
  Clone ID: uC-gsflmaxxa097d04b1
tttcccacgaaaaattatgaaaaaaaccgggggggacttataaaacacagggggatttaatggaaatgggtcctgtcttctttgcacactacggaggttctggaccaccctactccactgggtcattcaatggcttaaaacagggacaaaaaatctatctggaggatacaccttctctccccacctgtgatgggacaacctaagcacatacagtggagatagatccagactcccactgctcaagcgggtgctccttaaaacaccatgtgtccctctcctgaagacccttctccaaccaaaagtctattggacacacttgatgtgaaaaatcttaatgc

SEQ ID NO: 54038 - DNA, 364 bp, Gossypium hirsutum
  Clone ID: uC-gsflmaxxa097d05b1
ttattttggtgacaagcgtgatctcattgatgggggcgatatttaactttctcgtcgtggtgacagcttttatacagatgtgctcgatccttttgctcacaacaaggagcctgagccaagatcctgaacatgaaggatcacatgatggagagcccatgtctctccgcttgccaaggcatgggaggtggacttctccgaatctgggactctcaggaaactgatgactccatgaactttacgattgatatgccatggcttggaaaagaggaagacaaagtgtctgtggaacataacactctggtgatcaaaggctaggactaaaaattcaaataggaagaaaatggttacaggaacactcactgga

SEQ ID NO: 54039 - DNA, 308 bp, Gossypium hirsutum
  Clone ID: uC-gsflmaxxa097d07b1
aaaacggccctgcaaagatctccttttggcattaggtactgcatgtggtctgaagagcgatgaaagcctatgcttgcgaggtgatgaacacaagattatcgacattcggagatgcctttggagccattggcttcgataaaggatgatgagcaaattgtggcattccggtttcaaaagaaagagatagggaaaactaggctagtaatctttcatcgatggcaggaaaaggcatagccttttggaactccactggatacttatttggtggcggactcaatcaagtggagctgatattgtagccgctgttt

SEQ ID NO: 54040 - DNA, 431 bp, Gossypium hirsutum
  Clone ID: uC-gsflmaxxa097e04b1
ttcactcgtccgcccacgcgtccgttcaactgggtggtacaatatatgaagtgggtgattgggtgaagtttcgaagaagtgtcactacacctacttatgggtggcgagatgcaacccataaaagtgttggctttgtgcaaaatgtggtggacagagacaatcttatcgtgtcattttgttctggagaggctcatgtattggtaaatgaagttgtaaaagtgattcctcttgatagagggcagcacgttaagcttagagaagacgtcaaagagccaaggtttggctggcgtggtcaatcacgtgacagtattggaaccgtcttatgtgttgatgatgatgggattttgcgtgttggctttcctggagcttctaaaggatggaaagctgatcctgcagaaatggaaagagttgaagaattccaggttggggat

SEQ ID NO: 54041 - DNA, 436 bp, Gossypium hirsutum
  Clone ID: uC-gsflmaxxa097e05b1
cccactcgtccgcaaaaaacacaagttttcaggggcgaaaaaaaaaaaaaaactctttgttgggtgttttttttctttgggtttagatttgttcttctacttgcatgaaagagagtttttgtagaatgtcttctggatggtaaattcgggcccaaattggacatgagaatgcttgtgggaacatgcttgagccaagagaagctgatatacctgcattgtttctagtcttggtggtgcttcctctggttacatatttcttgcttgggaaatggagtgaggtttcaaagaaacgagagaaggtaagtttacttgctcatcttgccgctgaagaagctcttagagcagaaacaatggctgctgccagtgttattccagttgtttctgtttcgaagaagggattgcatgtgtgcgctaggtgctttggtccatctacaac

SEQ ID NO: 54042 - DNA, 503 bp, Gossypium hirsutum
  Clone ID: uC-gsflmaxxa097f03b1
atcagtttgggatccgttccaagaagtcctgcgcgggggtagcagcttggttgcggctgcttcgcccgaatcacggttcgagcttacgaagctagactggaaggaaaccccggaagctcacgtgttcaaagcggaccttccagggctgaagaagaacgaggtgaaggtggaagtagaggaggggcgagttctctgcattcgcggggagaagagcgtggagaaagaagtgagcggcgggacgtggcatcgcgttgaacgcagcagcggtgcgttcgtaaggcgtttcaggttgcctgaggatgccaagcttgataagctgacggcgtgtttggagcggggggtgctcaccgtcacagttcctaagaaagagctcaaacacccccctaaaagaaccattcagatccatgtccagtaatctcgtgttttccttttgctaacaatgacagcagggaatgagaccaggtctttatgaatcatatatatatataatcttatgagtgctt

SEQ ID NO: 54043 - DNA, 474 bp, Gossypium hirsutum
  Clone ID: uC-gsflmaxxa097f04b1
agttcagcttagcatattagcaaataattgaaggggggtggctacagagaccaaaaccaatttagttaaggtgaagaacagtggtcaagatggttcttcaaagccaaaatttgatgctgttatcaacagaaagaagatcgaaacttcaagcaaacagcctgttgattccaaacaaaaatctgtaataacaaaagcagaggtaaaatcgaaaacaaattcaagctcatcaaaaaccactgctactacaaaaactaaagttagggagaaaaaagtttatactttgcctggtcagaaacatgatcctccagaagagagagaaccattacgaatattttatgaatctttgtcaaaacaaataccaacaagtgaaatggcagaattttggatgatggaacatggcttgttgtcccctgagagagctagaaaagcgtatgaaaagaagcagagaaggcagaagcaaattcgggccggcac

SEQ ID NO: 54044 - DNA, 444 bp, Gossypium hirsutum
  Clone ID: uC-gsflmaxxa097f06b1
aataataaaaaaagagtagaaaataatttttgggcggtggtttgggaaaccgaagggggaggaaaacatagagagtgtgtctgcgcgcggggggcaatgactctggaggaatttttgaagcagtgcgagcagtcaggtgatggtgctttcgctgccctcaaatcgcttctggagaagcttgaggatcccaagacccgcactgaagcccgggtcttcctttcggatcttcaatcccgggtcggttcctcagatgattgcttccacaaataccatttccggatacaggacatttacttggatcggtctgaaggctatcagggaaggaagaaactgacaatgatggtgatccctagcatttttatgccagaagactggtcgtttaccttttatgaaggactcaatagacacccagattccattttcaaggaaatgacagttgctgag

SEQ ID NO: 54045 - DNA, 434 bp, Gossypium hirsutum
  Clone ID: uC-gsflmaxxa097f07b1
attaaacatcccagaagaaatccctggaggtgcgcttctctccttgtctgactatccatgtctgctttccttctcctttcccttctttccctctcccatttcttcatcttctcttcttccagtcatcacccacctcataactcccctgtttacgcctctgagtcctctcaaatccgccttgcttgcaaatccactcgcttcccacaaccctgcgaatcctccctttcgcgatcctctcttctccctcctaaatcgacctccctccaattcatccaatccgccatttccgtctcttccgataacctcaaaaccgggcaatccatggtgaaatccatcctcgactcctccaaaggcaaccttaacccgttcaacgccgccgacatctgtctcaacatcctttctaattctgattaccgcataagatcgaccaatga

SEQ ID NO: 54046 - DNA, 455 bp, Gossypium hirsutum
  Clone ID: uC-gsflmaxxa097f09b1
ttcacgcgtccgggcgaagtcaggttacgggacaaaccatggatgaaaagctgggtaggatggtaactcgtgtagtgcttccacgtgttgtcatgcattcacgacatcactatggggcattctcagaaaattgtactggctcagagctagaagatgggggaggacgtggcacatcatgatctcattgggaaaaaaggcttttgatgaatgagataatgacaggatcacgggatacaagatcagttgtttcaaaaatgacactggcgatgttggaggatagtggatggtatcaagctaactatagcatggcggatcgcatcgattggggacggcaccaaggaacggatatcggtacttctacttgcaatctctggaagggagcatatcattgctatacaaccaaattatctggctgtacatatcaccgggaagctgaaggttactgccctattgaa

SEQ ID NO: 54047 - DNA, 306 bp, Gossypium hirsutum
  Clone ID: uC-gsflmaxxa097f12b1
ctcacgcgtccggtgaaattaagaggtgggcgggagttttctagaagaaacttagcaagtttgggtaaaaattctagtattagtactgggaatagtgttaatgatgatgaaatggaagattgggaattggagtttgttggagagattgatccatttagttatcaagcacccaagaagcggaaaaaacaagagaaatctagggttcttaatgatgaagaagggatggattggtgtttaaaggctagaaaaatggcactcaaatctattgaatctaggggattggcgcataaagttgaggatttgatt

SEQ ID NO: 54048 - DNA, 280 bp, Gossypium hirsutum
  Clone ID: uC-gsflmaxxa097g01b1
cccactcgtccgggcttatcttcaaccattgagggtggatattaaggctgctctggcaatattctggcttattccccacccccttgtctctttagataatggtaatgataaggctacttatgtcactactcactatactataaaacactggaaaaattgcaacgaaaagctcagattgaatgaggagataatcaacaaatgctatactactggatttcgttataagcttctgctgcaataagctaacgagactgcacatgtgaagccacctcatgaatat

SEQ ID NO: 54049 - DNA, 317 bp, Gossypium hirsutum
  unsure (1)..(317): unsure at all n locations
  Clone ID: uC-gsflmaxxa097g07b1
ctttctctctcactgattcctcaacttctgctgactcaagttgctgcaacggtggattcttaacttgttcaagaccgcattgtctcttcgtttttaagcacacttattctttttcatttttttcctgattttatttgtaccgctgaatctgggtttcactctgactactacntgctgttcttttccttttctttaaacccatcacattccattccttactaactttttccatcttctaagaatctctgctagtattgtattctcttcgaagtactacagtgcaaagatatgttcttgaataagcttacaccaacgac

SEQ ID NO: 54050 - DNA, 503 bp, Gossypium hirsutum
  Clone ID: uC-gsflmaxxa097h06b1
cggagacatttgctgacttccggatggagtgctgtggtaaataagaagaagctgggctctggagatgcggtgctttttctgaggggtgaagatggagaactgaggcttggagtccgaagagctgctcaaattaaagatggctcttcttttccatcttcttgcagccagcagttgaattgcagcaattttgcagatgtggttcatgctgtttctatgaaaagtgtattcagcatttactacaatccaagggccagttcatcggacttcgtaatacccgtgcataaattctggaagtgtcttgatccctcattttctattggaatgaggttcaaaatgcaatttgaagctgaagatgcagcagaaagaagacactcaggagtaataactggaattagtgatataaatcctgttcgatggcctggttcaaaatggagatgtttgatggtaaggggggatgatattgatgccaacaggcatggtagggtttctccctgggaaattga

SEQ ID NO: 54051 - DNA, 242 bp, Gossypium hirsutum
  Clone ID: uC-gsflmaxxa097h07b1
tttctttgcaaacgactcttaaaacaacagggggggggtaaatgaatacacgggggcagacaagactgctatcatgactggtaccattcgtgctccccatggcactggctatcaagggggctacatcgcaatggctgacagatatccagatgggcctccaaatatgacttccaaaacgaaagtcgggaccccagacaggaacccacacagcggggcccaaagcggggctatatgcctggacc

SEQ ID NO: 54052 - DNA, 477 bp, Gossypium hirsutum
  unsure (1)..(477): unsure at all n locations
  Clone ID: uC-gsflmaxxa097h10b1
atttgaacttcaaaaattagggtttcgaggcggggactttaccatagcttgccaattctatttcttcgtcatccctttggtttttaatagaaattaaatttgataatctccttactgtgtttgatttccttcaaaaatggcggaacacttagcctccatcttcggtaccgagaaggaccgtgttaattgtcccttttatttcaagattggagcttgccggcacggtgaccggtgctcacgtctccataaccggccaacgatctccccaaccatccttctttccaacatgtatcagcggccagatatgatcactcccggagtagatccccaaggacagcccatagatcctcgcaagatccaggaacatttcgaggatttctacgaggatatctacgaggaactaagcangttcggtgagatcgagagtctcaacgtttgtgataacctcgccgatcacatgattggaaacgtatatgc

SEQ ID NO: 54053 - DNA, 517 bp, Gossypium hirsutum
  Clone ID: uC-gsflmaxxa098a08b1
tgtgtacgcgtgggcggacgcgtgggttttaaacgggtgctgcaatttatttatatagaactataaaacaaaaacagtttgaaaattgaagttgtctgattttgtttctgtacccaaatcgatccataatctcagtatattaaactactaagagcaaagatgtatgaacatttacttcggtacattaatcattcaccttctataagtcggtaaaataatcacggaaaattggcactaaaactgtacttagttgagtggaaaaatggagagataagaggagagagcggaaagtgggaggaaaacaaatttagattgtgctttgttaagaacaaagcgaggggaaagaaaataggacggtctgctagtttaaaattatgtattttttaattttttttttcatttttcatatttctagttttctacccattttacagtaaagtttaaatgtgtgcttgattgggttgaagtagacatgtccattggccgggccgcgtccaaaaaattttcggtccgactc

SEQ ID NO: 54054 - DNA, 146 bp, Gossypium hirsutum
  Clone ID: uC-gsflmaxxa098a11b1
tttttattgttttgtattttagttctccactggggagaattttatatcaggatgggggtcttactttctttatctgactacctagtgtgattagtactccgcatcttaaattgtttaaatagcaatggatgaataatttttttctt

SEQ ID NO: 54055 - DNA, 537 bp, Gossypium hirsutum
  Clone ID: uC-gsflmaxxa098b06b1
cctactcgtccgcccacgcgtccgagaggttcatatgcaagggagaccattgaactgtgaagctggtagaaaaagccggttctatggggaagatggggagcaatgtggagtagaacagttagctctacagtattatgcaacagaaggtggatggcagggtgtccatacagagagtggtatatggatgactatcttcgggcttctcatgtgggatattttattttcagatgtaccaaatgttttccgcaccagattccagactgctccattggatatggatactgatcatttttatctggcaagaaagagccttatcgagccccaactacaaaaaatccacgatggtttggctgaagagattctcaaaacatcatgggaattgcatatgggaacagcttgtagaggagttaattgggaccaacactccctttccgaccttcgagcagctgtttcatgtatcagaggtccttgcttggcctctctatgtagacatctcgctcaggattaccgcagttggttgagtggaatgcctgattt

SEQ ID NO: 54056 - DNA, 514 bp, Gossypium hirsutum
  Clone ID: uC-gsflmaxxa098b12b1
ttactaaacgaaagagctcttagagtccagagagggtggtgcacaggagctcaaaggaggacggctcttcttcttcttcggatgaggatgctaaaccctcgtgcatctctcgggtgaagcatagattgcgtcgtcatcgccttcgtcgccgtcgtagaagcgattcttctcataaaaaactctttgccgccgaggatttcgctggcattgctcaccttactctcatcaacgcggagatgaagtttaaggacaaatggctggcatgtgtttcgtttggggagcaaacgtttcgaacaaatgtttctactgaaacagacaagcctgtttggaactgtgagagaaaacttcttttggaaaaaaatggacctcttgttgccagaatctcagtatttgagacgaacagattatcaaaaaataacctcatagggtactgtgagatcaatctacttgactatctgacacaggattcagattctgactttgtacattcgacctgattgatcctggatcatct

SEQ ID NO: 54057 - DNA, 526 bp, Gossypium hirsutum
  unsure (1)..(526): unsure at all n locations
  Clone ID: uC-gsflmaxxa098e06b1
aaataatcataaaattaattgtgtttttatggtgagaaaaattaattaaactcattgatatgttgaagggtatttatatttctatttgagaatcgaaaagagattataaatagttttaagtattatatcgaaaaaattaatttatttatcattttttatcatttaagtcgatatttattaacagttctactaacgaaatgacatagtaaaagggctttttagactttttgtctagaatatataattagccttaattttacattgttgttaatctacccatgttctatactattcaaatattgtttaattactcattgaaaaataataaatttttaatgattaatttctaagcatgtttaataatttgaaggactagaattttgattgtttagatttgagttttaccatgctcatttaagcacgtgtgggttattttaaaatttatttcagatttaagtctttatcacgtattggtcttattcatttttattctaatatgattnttttgaatatattctattataac

SEQ ID NO: 54058 - DNA, 294 bp, Gossypium hirsutum
  Clone ID: uC-gsflmaxxa098e12b1
tctctcgcgtccgcccacgcgtccgcccacggggacggtcttgagactaaaagggtggggcaactacatcttggggaagggtttgctgctgaaaatcttaagcaagtgggctattatttgggctagggtttagtaattgggttatttaatgtgtaatgggtctggttttaattttgggctacacatgttgtaaatggacttgaaatttggactttttatttaattatttgggttttgtttgttttaaaccataaattaacattgaagataatctacccatgttctatactaatc

SEQ ID NO: 54059 - DNA, 513 bp, Gossypium hirsutum
  Clone ID: uC-gsflmaxxa098f01b1
ccttgttttccgactcctaggtgcctataagggcggccttccatatcagattccgtgctacaggaggtcaccggaccaatatctccggcatgtgcgctaaatctgttctcatgaatcttgctccttccaggatgaatattggacgtattgcggtatctacatccattctgactgatatacaccctaagaatgggtgtttgaagagggagaaagctataatctagcacattatgttttagcaaacatatcataacaagagatgctgtggcggcataggcacctgcataattgttgacacctgcattctcatactcatgcgccgtagagaagtgaaggactactgaactgccaagtccatcgaaggtgtttacgaaaagtgtcaagctgggatagtggtaggagaccttggagcgtccgatgcatggggtctagaaacggcggcaccgcttcggaaaaattgtaactagtgatgtgactcttacaaggtaatgcttatgtggcatggctgtatgg

SEQ ID NO: 54060 - DNA, 521 bp, Gossypium hirsutum
  Clone ID: uC-gsflmaxxa098f04b1
cggacacctatttttgttcttttttctggaaatgcaaaattcaaacctaacctggaaagcttcgtctcaatctcttttccttaaggtattgttttggcaggaattgttcaacatgtctactacgccaagtgatccacttcttcaagtggaaacaacttgcggaacccttttatatgaacttcagataatctgggatgaagttggggagacagatactgatcgggatgaaatgctgcttgagcttgaacgagaatgcctggaagtatacagaagaaaggtagatcaggcaaatcgctgtagagctcagctaagacagacaattgctgattctgaagccgaacttgctgccatctgttcagcaatgggggagaggccagtgcatattaggcagtcagatcaaaatgctggaagcttgaaggaggaactcagcaaaattcttccacaattggaagaaatgaagaaacggaaaatagaaagaagaaatcaatttgtacaagttttacaacagatacaaattatca

SEQ ID NO: 54061 - DNA, 531 bp, Gossypium hirsutum
  Clone ID: uC-gsflmaxxa098f08b1
aatatgttaaatccaaaatttggaatctttcataattagccccacaataaacggaccataagggtccgttaacaaaaatagccaattaaaaataaaaaaaagtttacgtgtccccatttttctcctattattcacaaaaaaatctcttcttccctctatttctctccagttctttccctttttgtctctctttggatttcgtttccttcgaaaatcaaagagctcaagcttctacggtgagacgtgacattgaggaagttgaatgagtatcaagagtgttacaattgttttatgaaaataagttaggaaaagaaaaactaagattcctagttgttcattatgtgtgtgtttgctctgaagattgatagtgttgatgcaaatgctgattaaggtcaatgaggacgagattttctagatttaggtgtttatggaagtattgattatccttccaagcatttaaagctgtgggtacaaagagtttggtagtttagacattgcagcagtatggctattgctggtctacacaaagtt

SEQ ID NO: 54062 - DNA, 377 bp, Gossypium hirsutum
  Clone ID: uC-gsflmaxxa098g01b1
atgtctgtgacgcaattgatgcaagcatggcttggtgaatttttttaacgaaggcgctgatgatcagatacccaaatcatgatctttggtcgcacaaggtcgacattgcataccgtgaccatgatatgagacaccaaggctgcatttggatgcccaccgacaacgatgaggatgcccacacttgtgaaatagctcatcacccttgcatatggcctttgcaacccaaccctacatatggtgttatactttcattggactttatcctttttctgctttctgcattactctgagtaaagaattaactgtatgacattcttgtataatttataacaaggaacctggaaacaaatattaattaatttccaaacattaatatc

SEQ ID NO: 54063 - DNA, 514 bp, Gossypium hirsutum
  Clone ID: uC-gsflmaxxa098g03b1
cccactcgtccggccttccccgactactgaactgagacaaaaacaagtctgaggctcacagaagtaacaatgtcagctttgaggtttagctcacgctttaacccaatgttatcaaacataatccttgttcaaaccaaatcattattattcagtttctcttccttctcctcatcagtcagaaaaccttgtaagactctttgttgctcttccagctctccactttctgggttagaggatgagttggttggttatatttttgggaagaagaaagcaacagaagtggctcatttggtttggaggcatgtcttgcataaaggggatattgtcatagatgccacatgtgggaatggttatgataccgtagcaatgcttaaaatggttgctgatgaatctggtcatggtcgtgtttatggaatggacattcaaacagaggctttagagaatacttcttccttactggatgaaactgtcactcagaaagagaaagaactagtcaagctctttcccatttgcc

SEQ ID NO: 54064 - DNA, 506 bp, Gossypium hirsutum
  Clone ID: uC-gsflmaxxa098h01b1
ccctctcgtccgtatttctcttgttttgacagggagggcatcaaaagtacaggagtgtgggttagttccttttttctggagcttgaagttaagaatcctagtactttttactgtaggcaatgaagaggaccatctatttatgattgatgtggcattcttatgcgtttcacagacaaatccaagtcgggatatgatgtaacttttcatcataatatcgttcctgccaaagccactcatctgacaaatagcatgaagtttttaaatatcaaatcaagagagggaatcaatatagaggcaaccaaaggctccaggttaactttagagcctaagaacatgaggaagacagaaattcaaaggaaggctcctcataatgacttgagtagttggaataaaataaatagtcagggtgtagatggttcaggcattacctcaacaaggatttaagtgcaaggactccctcagcagaaaggctcagagagcccttgccatgccaggcaggaaagagc

SEQ ID NO: 54065 - DNA, 523 bp, Gossypium hirsutum
  Clone ID: uC-gsflmaxxa098h06b1
ctttttctcaaaagccctctcgcctctttatctgagggacttgtacaactcaacacaaggtgtctccaaagcttccgcacttcacttcacttcacttcactcaccaataaaaaaaaaaaaaagggagttccaaaacccaatcaacaaatcaaactcaagtttagcatcacaactacaaattaccccaaacggccaaaccttagatccccatgatgagccccaagttttccatgaagactattacagtacctgctctacaccctatgtaagcgctccttcaagccctggccgagcgccaggaccaggacctggctccatcaatggctatggtgggtgctattatagtgcaccagctagtcctatgcattttgcactgacctcagcatcttcttcaatggtagcatcaactcaaccatcttctcctgataataacccagttccccttggatctgagtttgagttctctgcaagatatggggcatcatcagggtcgggtcaaacaggtaccatgagctcagctgat

SEQ ID NO: 54066 - DNA, 532 bp, Gossypium hirsutum
  Clone ID: uC-gsflmaxxa098h09b1
cttgtctttcaagctttccgtttgttaacagaggctttaaaccgaagctgagatcgcttcacagttctttctcttctccagagatctctctccatctcatttggagctcaatatatcaaattcatcagcttaaaaatggcggccgtcgccgttcaccatttcgctcagtgcatcacttgccatgcttggagtcccgatcactccatggtagcattttgcccaaataataatgaggttcacatttataaattggtgaatgacaagtgggagaaagttcatgttcttcagaagcatgatcaaattgtttctgggatagactggagtggaaagtcaaacagaattgtttctgtatctcatgatcggaattcatatgtttggaaccgagaaggaccagagtgggtaccaactcttgttattcttaggctcaatcgtgctgcactttgtgttcggtggagccccaaagaaaacaagtttgctgttggaagtggtgctaaaactgtgtgcgtatgctattatgagcaagagaaatact

SEQ ID NO: 54067 - DNA, 527 bp, Gossypium hirsutum
  Clone ID: uC-gsflmaxxa098h11b1
ttgtatttccagatcaaatcacaacatcatcgggggttttaaacacaatccccgtgggtccaaccaacgcttcagaaacctcgatcttcttcaagaagacattaatggtaagaaggagattaaaatcggtttagttaatatcaattccaatgaagaaatccaatatcaactacccggttcagttgttagtaccgtccacgttcgcttcgatcgtgtttccaagaagagaaaatgggaggattttttccccttccggatcgatgaaaaccagcagaattgtccggagattccgatgccagccctggagaagtaccaggatctggacgtggtggtggcgaagctgccatgcaaagggtggagcgggaaaagcgggatgagggatgtgtttttgcttcaagtgaatttggtggtggcgaatatattggtagagagtgggtgggtgactccggaggtaaaaccggcggtgtacgcggtctttgtggggagctgtgggccggtgcaggagatattcagatgcgaagatctgt

SEQ ID NO: 54068 - DNA, 374 bp, Gossypium hirsutum
  Clone ID: uC-gsflmaxxa106a02b1
ggggggggtttcttttgtatgcattaaccctaaaaaaaagtgacttaaatgattttcagcatcatcaatagaggtatttttacagattgaagctatgtttatgggttccttcgtttggatgttggccaatgctcaaaatttttcggaccaaggaaagataggaaggtgaagaagacaacagtgtaaagtgaagcctaaaaaaggtcttttaggctatgggaaatcataattgctttatacccatgcgccattttgaagtaaactattggttaaactcaaaatgatgtgagctgagttgaatttgagacgactcaaaacaaaacattttgaatatagactgatccaaattcaatctaaaattgactcaactttct

SEQ ID NO: 54069 - DNA, 215 bp, Gossypium hirsutum
  Clone ID: uC-gsflmaxxa106b01b1
cacaatttcttcttacccccagaaggggacaatgaaaaggggggtgttggtttgaaaaaaatgtgttttgagatggcccccattaacgataataacgaagctatatctattggcaggatcaatgcttatggtccagggcggagaacccacccttatttatcaaaaggaacgacacccatggcaccattgctcccctgagagtgtcagaaaagggg

SEQ ID NO: 54070 - DNA, 465 bp, Gossypium hirsutum
  unsure (1)..(465): unsure at all n locations
  Clone ID: uC-gsflmaxxa106b04b1
cccacgtgtccggggaatgcctttggagttaaattttacaaaattttcaatctgattttctgcaaatttaatcttcaagtggttgtggtcggtggcttttgaagtgaaattttgcaatttcagtcttcttctttgtgtgttattcgactgaggtttatgttccaaatcgaacatgtaaagatgggagtgttgtgaatgagaagacggctgaagttgtgttattcgattttttttctatctttttcatttataaatttaatccgttaaaatgaaactagcttaacagttgaagcaggcaaaaaactgccctgccctgctctgttgntatctctactatttattatagnaaataatttaatttagaacccatagtattttggtaaatttttattatatttatattatctaactgaaaaaaaaacccacaaaacccttgaaaaaagctgccttccatttgatataaca

SEQ ID NO: 54071 - DNA, 187 bp, Gossypium hirsutum
  Clone ID: uC-gsflmaxxa106b09b1
gttttttccatctcatgtatcgcagttgacatctactagtcaggctgagaagattcatacaggccagcatggaggagcaagtgtaaatgctcctatggcacgccttgaaccgagaaagaaagttagagatgaagatgatttcttggttcctgtttttgttaattcagagacaggtttacaacatagc

SEQ ID NO: 54072 - DNA, 232 bp, Gossypium hirsutum
  Clone ID: uC-gsflmaxxa106c05b1
cccacgtgatcggctgcccagaaatactgaaggaaagaaacaatcagaataatcagctaataataagcaaatgagcataactttaccaatgaagttgttattgcctttaacttctccaaccagaattccatctccttctttatacacttcttttctatctcttgcaaaccctattttcacttccccctcttcttcatcaacattcaccttcttttcgaagattctcatatct

SEQ ID NO: 54073 - DNA, 235 bp, Gossypium hirsutum
  Clone ID: uC-gsflmaxxa106f02b1
cccacgcgttttcccacgcgtccgcccacgcgtccgctctctgtgcaccacaaacaaacaacaccgaatactgtaaaaaaaacccaccataaaaaagattgtaacaaagagaaataaactatcatttttcgagctttgctcactaaagaagacgatgaagaagaagagtggtgaagtttttcgttttgcgcaaagcaatgccccttaaattactgaattcaatgctcttctgttg

SEQ ID NO: 54074 - DNA, 481 bp, Gossypium hirsutum
  Clone ID: uC-gsflmaxxa106g08b1
gttcataaccgctgccgtaaatctttatgatcatccattaatggctgcccaaacagtgcccaaactctgtgaaatccttgaaggggacctgtgcaacatgccactaacttctgtttcattggaaaacatcgacccgttaggctcgaggctctcgacatgtttgcctatctctgctggctcatcctatgcgcatgacatggtcgtggcaaccaaccagatggagtttattgatactatcatcacatcaatgccatcagcatcatcttcctcttcatcatccttatcagctttatccagtgggcaatatatcacaaaccctaatcttccatcaggcggttgggacccttggcacgacccattcacattttcttacatgattggggttagatttagctaggtacttcgtctgggggtttacttcagtccacacgcattatttttccctaaatattattttgcccagatttatttattttttagt

SEQ ID NO: 54075 - DNA, 445 bp, Gossypium hirsutum
  Clone ID: uC-gsflmaxxa107a06b1
gaggtttgcgtgagctcggattgcttaagttcagtggaatgcatgcaagaagctgcagtctagcctaatgtcctggattgaactggaatgtattgtgcatttgtttgcaagaatgaggagagcatttagtgaaggttatataatagacactgggcaacggtgatgtgagcgtcatccattcttccgtcaagcggccattaattgtcagaagctgttcttttgaagatcgaagggaaaagctttttagataccggaaccagaagacctaatagaattttggtcggaaaaacaaattttgcttggctggaggcccttgccggttgtcaacccaaggatccccggagggttgcaaagactcgagttttcgccaccttcagaggcagttatgggctacttattaaacacaatcaccaacttttaccccgacgaagctagttagttaaac

SEQ ID NO: 54076 - DNA, 375 bp, Gossypium hirsutum
  Clone ID: uC-gsflmaxxa107b07b1
ttttagccaagccgacaaggctcttgcttccgccatttcattcaaagatggtgaagatttcgatatccttcaatcaccacggaattcagttgatggaagccaaaatgaaaatcctgttccaagaagcatgcctattctgccagtgggcacacccgagcaccatgatgttggcttgagctatagtaaagattccgaggataaaaacggctctgctagtgaagtggtctcaatcgaaatggaaacactaaagggtatctctgaagagagtaggaaagtcaatgctggtgttagtgtagcagcttgctctgttgggcaagcaactgatgccaatgagaacgaaggaagcctgtttaatgaaaacctatcgagtgcctt

SEQ ID NO: 54077 - DNA, 433 bp, Gossypium hirsutum
  Clone ID: uC-gsflmaxxa107c01b1
ggaaaaaaaatctttactaggaaaagagagagatcaaaagatggagacatgaaagctattcgggttatttggtaaattacaggactgcacaataatttgtttggaagttcatacaagttgtaatgcaaggccaaaggggtacttttggttccttgcctgaaaccttatttgatcatgggtcttcatcaagtaatgctgctatagaccagcaagtatgctggaataatatccgaaatcccattgaaagcagattgtcggattgtttgctgtcagctaatgatgcgaatattggacatgggaactctaatgctggagaggatcaggagctgggtcggtgcagcttgggagagcctagctctagtggcacactgagtgttgtaagccataacgagcggaaaatgaaccatgggtggtcattttccatgagtgcttt

SEQ ID NO: 54078 - DNA, 532 bp, Gossypium hirsutum
  Clone ID: uC-gsflmaxxa107h12b1
actagatcagctcccactacatcttcaataccaaaatcagcttcccttacttcttcacttatgaaatcagctcctgctacatcttctgttacaaaatcaggtactgctgcgtcttccataacaaaaccatcagctgccactacatcaaaaagctcagtacaatcacggggcacatctccaaccgtgaagtctaggccttggaaagcatctgagatgcctggattttcgcttgaaacaccaccaaatttaaggacatcattgccagaaagaccggtatcagcctcacgggggaggccagcagcacctggtgccagatcatcttctgttgaggccaattctagtggaagaccaagacgccagtcctgctcgcctgctagaagtagggcatcaagtggcagttttggtaatgggagctccattcgttctgtgcgtagagcagatgccaatggcagtgacaacgaaagtccagtagtgattgtgacaaagatggttgagagagtggtaaatatgaggaaactggtacccccaaaac

SEQ ID NO: 54079 - DNA, 196 bp, Gossypium hirsutum
  Clone ID: uC-gsflmaxxa119a03b1
aatcaatactttactttagtttggcgtttactggggcaatttttgattattacgcactgttggcccctcctatcctctgctaaatggagctgtacacatcaactatgctatagctgctcatttagggatcaatctgtccttacgcgctgagaagaaggtgttttggaggtgggagcggtagctaacttcatcgatc

SEQ ID NO: 54080 - DNA, 150 bp, Gossypium hirsutum
  Clone ID: uC-gsflmaxxa119b08b1
cattatcccacttcaacttttcaactcaagctgcagcgaaagtagaagccgaagtacaaacgatagcgaaaacacagccatcatgtggagaagagccctgatggatagcaaagcttgccaatcatggtgccttatagcaaaaagaggttc

SEQ ID NO: 54081 - DNA, 102 bp, Gossypium hirsutum
  Clone ID: uC-gsflmaxxa119d04b1
ccctcgcgtccgcactctctcaacgctatctttgggttccttttacaagggagagcgtgatctgcccttcttaactctatctcactaacccatgcgtatttt

SEQ ID NO: 54082 - DNA, 209 bp, Gossypium hirsutum
  Clone ID: uC-gsflmaxxa119e03b1
actcgctcttcctcccttctcgtacttcgcggattttcttttggtctcatttcaattttttcctgtcattcttttatagctatgtgtatccacgggcaaaacacacacacaaacaatcaacagttggatgatagtctacgagagagggagaaacctaaaagttcttctttgttactttaaactgatatcaaatatctatatcttaattt

SEQ ID NO: 54083 - DNA, 157 bp, Gossypium hirsutum
  Clone ID: uC-gsflmaxxa119h12b1
gtccggatttcccgtgtcgttcaaccaccccccgaatcctaggcaatctcctcacaatctctaccgtaagtcttgtttaaagctttggacgggcagaatcaccattggaaatccttcggccctgaaatcggaccccaacctgtaaagctacccgttc

SEQ ID NO: 54084 - DNA, 220 bp, Gossypium hirsutum
  Clone ID: uC-gsflnu33B002a04b1
tttctgttatgtatcatacagctagtactcatgtaatgttatagatttttatataaaaaatacgcttttataatattttgattaagatacttagaaagtttattattcacttaagtttatgtaaaaacagttttattgaacaagttcatgatgactattttgtttataatttaattaaaatatatcgatactgcattattgtcttgaatttcatgctgtt

SEQ ID NO: 54085 - DNA, 333 bp, Gossypium hirsutum
  Clone ID: uC-gsflnu33B002a11b1
gaaagctgaaatggtgacgatagtagtagctacaactagcgatccggcctcaatcaatccagcctacgccctcttggccatgcccggttggctccccgtgcctgctccctctttattgcaacagggaatcaaaagttttgctaataaaaatgtgcgatttcttcaacacgacaaaggcattgtcgaagaggacgatttggatcgccgttgggaggaagctaccggcgaggctgtcgatgaggttattttctttagcaaacacaccgctgtttccaaccgccctgctctcaccgttcatccatttggggtgcctcatttgcgcgaaggagatgt

SEQ ID NO: 54086 - DNA, 372 bp, Gossypium hirsutum
  Clone ID: uC-gsflnu33B002b04b1
tcacgcgtccgcaaaaagaacatgggttctgaaaagcatgggtttatatggctatcagggcttttgttcctgaatatctttgtcttatccacagccgatgtccactactacgagttttctttgcaagaatccctgtttacaaagctgcgtagcacgaagatcatcttgaccctcaatggcagctttccagggcctgagattcgggttcgcagaggggacacagcttttgtcaatgtccacaatcaagcaaactatgctgtttccctcgactgggagggcgttacggatacaattgatggttcgaataatacaattcagccagggagaaacttcacttacaatatagagttaggggatgaaataggaactcta

SEQ ID NO: 54087 - DNA, 248 bp, Gossypium hirsutum
  Clone ID: uC-gsflnu33B002b07b1
tcacgcgtccggtcggaggacatattgtcttcagggattcttgttttgatcgatccggccactgcaagcaaaagcatgacccttcgctatactgtgagccaagatgttacacacagggtttcaaagaatgtcatgcatctgatgattcaagacactcgtttaaactttatatagttggctacaagtgcatgagtgcctatgttaatcacaaaaagattcagaatcacatttgttggatctgggaaaaa

SEQ ID NO: 54088 - DNA, 242 bp, Gossypium hirsutum
  Clone ID: uC-gsflnu33B002b09b1
agccagccaaggagaacaacaagagtggggaattttaatcagggaaacccacataccccgtcacaaagagcacgccggagaccggaagatactattggtgtgttcgagagcacacagtcaacagacactgactagggcgccaagactccaaaggatgtcaagaccacttggcgtactggaatgcatcagctctgcttcataaacaaggactagtatgaatctgcttaattctcggctgaaat

SEQ ID NO: 54089 - DNA, 117 bp, Gossypium hirsutum
  Clone ID: uC-gsflnu33B002c04b1
tgaaacccacaaaccggaacacgagctagggtgtcattcctatcaaggccccgaatgcacccaactagaagtaaacaggacctaggctcagatagttaaaataaaaaccactatggg

SEQ ID NO: 54090 - DNA, 324 bp, Gossypium hirsutum
  Clone ID: uC-gsflnu33B002c11b1
tccacgcgtccgcactcaccaaagctaatctattctttctttctttctttctttctttttctcttcatttattttaatttcttgtttacatcaccaaagctaaatctattctttctctgtaaactgccaaagctaatttattttctttatagaaaaaaaaaatggtggccatatctaagattgcaactggtaatggtcatggtgaagactcaccttatttcgatggatggaaggcatatgagaccaacccttttcatcccattgatagacctgatggtgtcattcagaatgggtcctagctgagaatcagctttgctttaactt

SEQ ID NO: 54091 - DNA, 155 bp, Gossypium hirsutum
  Clone ID: uC-gsflnu33B002d02b1
tgtaactatcgccataacttcttccttcactattgtgagcattcttaaggactctgccctagcacgctaatccccgtcctttttacttaatgcccttcgattgccaatgtattgagccaggttcacttgctgatattaggatgtgctcaaaacaa

SEQ ID NO: 54092 - DNA, 119 bp, Gossypium hirsutum
  Clone ID: uC-gsflnu33B002d12b1
taaaaaaagagagatggcgtctgtaataaaatctgcaattttaattctgtccgtgtttatacctgtacgcttcagttcgtgctgtctaggttgctccagtttcactccaatgaatgacc

SEQ ID NO: 54093 - DNA, 334 bp, Gossypium hirsutum
  Clone ID: uC-gsflnu33B002e04b1
tgtacgccgtcggacgctacaaaatgcatcggggagtgttagaataagcggatatgcggacagtcccacaagaggaaaaccttctagactgatgctgaatgcatggtcggacaagagacagccttggaaactgaaacatctatagaatgccgagaaaaagaaggcaaaagcgaacagccgtaatacaatatgagcgaaatggcagcactctaagaccgagaaaacggggatgtgagataaaggggaagaaacataggcacatgatatagaagcacccatggcaagggtaagatgcatcgtgggaaagggcagaataaagggcagacacccaagg

SEQ ID NO: 54094 - DNA, 255 bp, Gossypium hirsutum
  Clone ID: uC-gsflnu33B002e05b1
ttcagatctgaatattgaaactgcctttctcgggtatctcttaagccaaaaacgaagcagaccttcgacaagactcataacccggcaagacgatcactcgcgaggacgagagcctccgacacgatcgacaacgcgaagaccaatatccaagataaggaaggcataccttcagaccagccgcgtatgaccttccccggaaaacagtttgaggaccgccggacctcgggccgaatacaaacattcaaaaggaggcaa

SEQ ID NO: 54095 - DNA, 144 bp, Gossypium hirsutum
  Clone ID: uC-gsflnu33B002e07b1
tggacgcgagggacggacgcgagggtttcgcggggaatttttagatctttacttcctcagccttcattactgggagaaaccgatctatttcttctcgaacaaatcagtgaaaatctttcctaacaggccattcaggcctagttg

SEQ ID NO: 54096 - DNA, 453 bp, Gossypium hirsutum
  Clone ID: uC-gsflnu33B002e11b1
tggacgcgtgggctggaggaagcctgcaactggccattttaaatgcacagattaagtggccagctggacctaaactacagtatcctgaagctcttcaccaattcgtgacttggatgcttcagcctcagcctagtgttcgcccttgcatagatgatatcatatttcacgtcgacaagttaatctcgaagtttttacagtgaaatatcataagagggattagggtgagaaggaaagggcattcaatcagtaatggacgagttgatcatctacattttagcaacttcttataaacgtgagtttcttcacaagtcttcgaaatacttctgaagtgacagcagtagcaatttctttatgaaaaagttccatagtaatccctttttgttccgatttgggttaaatgttgatattctttgcctcctattttcttcttttctaaagtctttcatatattta

SEQ ID NO: 54097 - DNA, 463 bp, Gossypium hirsutum
  Clone ID: uC-gsflnu33B002f04b1
tcgatacaagaacatggtcgagggaaagtgctggagactgtggttgagattcaagacaggcatgatgcagcgaaagagatcgagaaaagtttgctggaactgcactcaggtgtttttggatatggcggtgatggtggaggcacaaggtgaacaaatggatgattttgagcatcatgtgatgaatgcaagccattatgtgaaagatggttccaaagagctcaacactgcgaaacagtatcaaaggagcaccaggaagtgtatgtgtattgggattattcttttgttgcttcattgttctagagattgacattcccattggtactagctttttcaggttttgattgggatgttctttacagaggatttaaatgtctatttttcctttctgcttttttttacttgaaacagtttgatctggagtatgcatatagtccttttgttgggactcacattccttttaaat

SEQ ID NO: 54098 - DNA, 206 bp, Gossypium hirsutum
  Clone ID: uC-gsflnu33B002f07b1
tgcattcatctcataatggagggaaattttagggatatcttatcatctataaacctgtttcactcattggctatccaatgatgattgattggctaaactagctaccaaaaaagctgcatcagtacaaattgggccataagggataccatttggctaaggaagtgaaattgagagacagaaagaacgaatgcactaaggatcatgcc

SEQ ID NO: 54099 - DNA, 323 bp, Gossypium hirsutum
  Clone ID: uC-gsflnu33B002g02b1
tggtgataaaaaaacgacaaaatgggaagagggaaatttaagggcaaaccaaccgggcaccgccatttctctactcccgaagagctccgtgctacgtagagaaaagaaaagggagaaatttatacttttaaattttaagttttagcttcgtataaacttgggaatgattccgcctttaatgcatgaataacttgggaactttgagtcaaattcttagacaaaaataagaaactatatatttttcttttataacttttattaatttcacctgatttgcttttttgtcttccttaaatgttctaatgggatgcagttgctggtag

SEQ ID NO: 54100 - DNA, 367 bp, Gossypium hirsutum
  Clone ID: uC-gsflnu33B002g06b1
ttcaaacgtcatgttctaggatcatattatgaaggcgtgtagatttgattttaataatgcattcaacatgcttgatgaaatacctctgtgaattattagctttcaatgaatttactctgcatatgatgatcgtccatgaactaaaatctattggctggagtgtgtctaaaatgcacaaaccccatttttcctattggttgtttttttcatctcatgcgttagtagattgctgcaggagtcacattggggcttgatgaagggtgcatctattagcttaaggggcatctttctcccactgtgtacatctagcgcggagctattgattatccattactaccctatgccttctttgagcattcctgctaat

SEQ ID NO: 54101 - DNA, 178 bp, Gossypium hirsutum
  Clone ID: uC-gsflnu33B002g07b1
cttgtaaaaactagacgaccgccactatcttgctcgggtctacgtcttgcaggcacccgaccgtcctcctcattataaatgaaagcttctcctcactctctcttttacgccctttggctatggaataatagagacgcctacccgataaataacaaagaaattaaaatcctacttcaaa

SEQ ID NO: 54102 - DNA, 113 bp, Gossypium hirsutum
  Clone ID: uC-gsflnu33B002h03b1
ttgacgcgcgggaacaacggatgcggacagggaaaagtttggctacaaggaacggtgggacggaaaagaacgaggccagtgacgagaaacgcgagcttaacatcaaagaagat

SEQ ID NO: 54103 - DNA, 161 bp, Gossypium hirsutum
  Clone ID: uC-gsflnu33B002h06b1
ttaacatatgagtggaggagtgggcaagactggttatgttcaaaatccatgtcgccagaaatcggatgcagacaagatgaagcatgtaatcatggaaactatacagcaactatcccatgaagtaacatccaagagcctacggatagctgatctacgatgca

SEQ ID NO: 54104 - DNA, 348 bp, Gossypium hirsutum
  Clone ID: uC-gsflnu33B003a05b1
ttatctctttctatttacctcccttgtgcatctcttttaatgtagtttttttatttttttcatttgataaagttttttttatgtttatgaaaaaaaaagtgaaagctaaaatcaaaataaaacttgctactcatattctctcccacatttacaaacctttattatccatcatcgctttaacaaacctatttgattctttcaatgatctagtccacaggttcgcctctctcgaagaccttaccagtcgtgacttactgcagtccatctttgacaaagtttttcaagcttgttcccttaatctcctaaccaaccccttcaatcacctttatcttcttacctacaacattt

SEQ ID NO: 54105 - DNA, 225 bp, Gossypium hirsutum
  Clone ID: uC-gsflnu33B003a10b1
tttctaactgtctaccatgcagctgatgagttacgatgattagatctacgtgcgcgatgacttgggattggggacagtggaagccggtaaaacctgaagattatgatgaaatgaactgaatggactgagagggttgcgtgcctctggttaaaaaaaaacaaatttaaaaaaaaaaaaacaaaataaaacaagggtcggccgggccagcggttccaaaggaaccaa

SEQ ID NO: 54106 - DNA, 354 bp, Gossypium hirsutum
  Clone ID: uC-gsflnu33B003a11b1
tccacgcgtccgataaaccgcacacggcggggatggactatagtttagcagcgctgaaactgctatgcggccaactaaaagacgctcgaggaacaccttcacaaagcgccttaacccttggcggcatcctctttcaacgtgtctggcttcagggcgttttggtttcaaacgacgacgaagatcacctgcttctcgacgatagcactggcattgtcgagcttaacctctacggtgatttccgtctacgtcaatggaaaacaggcatgtatgcaatggtggtgggaggatactttgttcgtacaggagatattcctgtaattaaggttcataagattgttgatctaacttcatttc

SEQ ID NO: 54107 - DNA, 275 bp, Gossypium hirsutum
  unsure (1)..(275): unsure at all n locations
  Clone ID: uC-gsflnu33B003a12b1
tccacgcgttcgaataaacgtacaattaatggatcttttatagttcatgaacaccgaaatcacaatgagatcgagcaaatgtataatgaatcaaacttttaagtaggagattaagtagatgactatcacaacggtgaagatacttgatctggtacactaagttatcatacaattagaattattagctgtgtattctacaaatcactgacttccacgactgatncgtttatggtgtatcttgattacatgtacaggcacaatgactagaatttatc

SEQ ID NO: 54108 - DNA, 438 bp, Gossypium hirsutum
  Clone ID: uC-gsflnu33B003b06b1
ttcttttcgaaaggaatggctgaagcagaccaccaaattctctctgctgagatcaaacttgggtcacagtactatttctatatggagacacaaactactctagctgttccagatgaagatgacagtatggtggtgtacagctctattcaatgccctcaaattgcacatgaaacattagctcaatgtcttggtcttcccgcaaacaacattcgtgttattacaagaaggattggaggaggttttggtggaaagaccataaaagccgtctctgttgctgcagcctgcgctgttgcagcttacaaattacagcgaccagttcggacatatctgaatcgcaagactgatatgaaaatggcaggaggaaggcattcaatgtaagtcacattcactgtaagatttaaagaaagcgggaagattacaggcctaaaactgagaatt

SEQ ID NO: 54109 - DNA, 230 bp, Gossypium hirsutum
  Clone ID: uC-gsflnu33B003b10b1
tccagaccgctcgaaaatagaaaccaggtagggggggtatttaagttaaaaaaccctaaaaccccaagaaaaaaaaacaaaataagatggggggacaattaatgaggacacacgcatacatccgcgggcgctgggacaaaaagactcatgaacgggggcgcctaaatcaaattcgcgggcagaaatcaaacaatgcctgaacagggaaaagccgggggcaccccaaacag

SEQ ID NO: 54110 - DNA, 285 bp, Gossypium hirsutum
  Clone ID: uC-gsflnu33B003b11b1
tccacacgttcgggaaaaatgagcaccaagggggtggtttagcagaagtagcacgaacagaacaagcagaactaatactatagggagagacaaccgaacaatgagaaagcgacatgactgcgacatcccacccactgagatgaagatggtcaaaacatatattggcaaaacaacacccacaccggagaggttcatggaaagaaagagagcaatccacagctatgactaagaggaaggccttcttgcactaggaacacaaactaaggcatgaatgacatgaattcc

SEQ ID NO: 54111 - DNA, 192 bp, Gossypium hirsutum
  Clone ID: uC-gsflnu33B003b12b1
tccactcgtccggtgacctgccgtcaaaaggggaagaattgagaggggataccgtgaaatcacaaacaaacctaacacgaagtgacggttacgacgcggtataactgaccccaatagtgggactcatgaagtgtgaatgaaactgaagggtgtgcatgacttatacatacaaccacactaagtacctgggta

SEQ ID NO: 54112 - DNA, 420 bp, Gossypium hirsutum
  Clone ID: uC-gsflnu33B003c02b1
ttataagtgatttaatctacgttattcagactcgtgtgttggatatgggtatgcatctgacagagtatatccaattatttaaaacttttctatatatttggagggcttttaaaaggttatatccttgtaactgtgtccaaaatggtgttggagttaagtgcttcaagaaaaactaagacgcgaaggtaaacgggtcaggtcaatttggattttaaaatttacgggttatttagggttcagatcctttcaagtgtaggttattctggtttgggtaatcttctgctcgggttatttaattctgctagttggttcttttcagattaggtcgtctcaggtttagggcattttggattaagtgtttagctcatttccggtttaagttattctgagttttagccattttggatttgagttattttc

SEQ ID NO: 54113 - DNA, 111 bp, Gossypium hirsutum
  Clone ID: uC-gsflnu33B003c12b1
tccacgcgtccgtataaactatgaattaaggggagatttttggaacataagcaccataatcagaagaagatcttataagtatataatggatcaaattcatatgaataagaa

SEQ ID NO: 54114 - DNA, 176 bp, Gossypium hirsutum
  Clone ID: uC-gsflnu33B003e01b1
tccacacgtccgaacaaaaaaagaatataaggtccatcttaggaacctacacctcaaagccacatggtactacagcaacaattcaaggaatcaaagcttcaagtcttgaaataatgatacaactctcagaaagactcaaaaactggaacgggaacctttaaaaaccatataaacag

SEQ ID NO: 54115 - DNA, 179 bp, Gossypium hirsutum
  Clone ID: uC-gsflnu33B003e10b1
tccacgcgtccgactaatcgcccccccaagggcccgtttctggaccagagcccccccagacccaagcccctcatgccactatctaacggatcaagttcccaaggaagaccccacgccgccgaagcttacaaccgcctaaatacaagcgaggagaacctgagctcccacccacaaagaac

SEQ ID NO: 54116 - DNA, 123 bp, Gossypium hirsutum
  Clone ID: uC-gsflnu33B003e12b1
tccacgcgtccgaccaagcgaacaagaaagggatctttttgagaagagagacaccgcaaccaaaaggtgagaacgcaagtgtccaatgaaccaagtttacacgtacgagaaaactgagatgac

SEQ ID NO: 54117 - DNA, 170 bp, Gossypium hirsutum
  Clone ID: uC-gsflnu33B003f02b1
tccaggcgtacgattaatggcacattgacaggggcgtttttagatcatagacccggcttttcgaataggataaggcaatttttctatgaataaaatgtattcaggggtgtataaattgaatgtgtataagaaatgaaataatacatggaaagagaatatcaaagaataat

SEQ ID NO: 54118 - DNA, 384 bp, Gossypium hirsutum
  Clone ID: uC-gsflnu33B003f06b1
tagtttgaccctagatttaaccctggtgtcagagtcagttgttactatggtccacaacttccgacggctcaatcttacaacataactttgtatgtaagcaccacggtaagcgtggaacctaataaccaagatggagatggtgtagtgctcacgagcagtggcgaatactgcaaaaattggccaaacacgaaagcgtatcctgtgccgaaagcctctcacctaggtattttgcaaaccactgacatcttgaaggccatcgtaaatgccgccaacttggtgtaacccctaaaaataaataaattccgtttttttggaaataaaatttcattttataaatatattttaataacaccatcttatttatttacttactctcatcattag

SEQ ID NO: 54119 - DNA, 244 bp, Gossypium hirsutum
  Clone ID: uC-gsflnu33B003f10b1
tccacgcgtccgaacaaacgctccaacaggggatcgtatttagtatcgagcacaccttaaccgaataacgtaattctaagttgcaatggatcgaacccgcatgtagcagagcaggtggccggatgctactacgtaaaaagagcgtgagcggagaagcttctaaagcatgcactaagtactactaacttggatactgagcaacaccagatgttctacaaccgtggccctgctcctgaaccagtag

SEQ ID NO: 54120 - DNA, 178 bp, Gossypium hirsutum
  Clone ID: uC-gsflnu33B003f12b1
tccacgcgtccgaccacgcgcacaggaaagggtaggtttttagaacagagaccccaaagacaaaaggagaaagagcaagggtacaatgaagcaaatcatcaagggtgggatagatgaacaaaagatcacaacggtcaaatcgcaagagggggaaaccagagatataaaactaattaga

SEQ ID NO: 54121 - DNA, 246 bp, Gossypium hirsutum
  Clone ID: uC-gsflnu33B003g01b1
ttcacgcgtccgattaatcgaagaaggaatggtccgtttatggttcatatgcatcaaatttagaaggtgatatggcaaatgtatattgagttaaagttttaagttgtagattaaggataagagtatcataaaggtcaccatacttgtatgggtacattcagaaatcatatactttgaatgagatgtcgtttaaactacaaatgactgatattgattactgaagagcttatggtgtattttgagtac

SEQ ID NO: 54122 - DNA, 263 bp, Gossypium hirsutum
  Clone ID: uC-gsflnu33B003g02b1
ttcacgcgtccgatagatgaaaggaggaaagggaattttttggtgcacatcccccgcatccaggagtggcttctgcaaaggtccaatacggtaaacctttaaagtacagaacaaggtgacgattctaacaaaggtcaacaaacttgcatgggtacactcaagaaagatctactcagcgtgagggggtgtggatacgacccaatgactgacatggcgttatgcagggcgccaagaggccttatgcgtacacatacaagagcaaa

SEQ ID NO: 54123 - DNA, 241 bp, Gossypium hirsutum
  Clone ID: uC-gsflnu33B003g08b1
tcacgactttttcatgtgaacagaccattctcaactgttctctgttccttaagcggaagaggggatttctttctggctgtcctaacaaggcaaatagcctaaggacgggactgcttcctgcttgagaatcagctgttcgggattacgttgattgacctaaggacgggataggaatgaatgatggctgccaattcccttataaaaaaaagtgaaatattgaagagagctgtgggactgaata

SEQ ID NO: 54124 - DNA, 167 bp, Gossypium hirsutum
  Clone ID: uC-gsflnu33B003g10b1
tgaaaggagcatatgctccgctcagaagtgcatttgttcttgagcatatcaccgaattcgttaaggaagccgtgagaggagggaagggaaatttaccactgaatggtggtttgttcatcgtatagacagacgctcgggatggtaaagatgggaaaatcactgttgag

SEQ ID NO: 54125 - DNA, 207 bp, Gossypium hirsutum
  Clone ID: uC-gsflnu33B003h01b1
ctcacgcgtccgatcaatcgctgaagataagggcagtttttggatcctacgccctgcatccaaaagatgatagggcgaatatttcttgactcaaagtttcaagggatggaacaagggcctgagtataagaaaggccacaaaacctggatgggtacatttaataaccatccacttagagttaggggctgttgaaacgacaaaaacctg

SEQ ID NO: 54126 - DNA, 270 bp, Gossypium hirsutum
  Clone ID: uC-gsflnu33B003h03b1
ttcacgcgtccgattaatctaagaaggaatggtccgtttttggttcataggcatcgaatttagaaggggatatggcaaatgtttattgagttaaagttttaagttaaaaatcaagggaaagactattggataggtcaccatacttgtatgggaacattcaataataatatacttagaatgaggtgtgctgtaaactacaaatgattgaattggattactgaagagcccatgatgtagtatgagtacaggtaaaggcacaaaaactagagg

SEQ ID NO: 54127 - DNA, 203 bp, Gossypium hirsutum
  Clone ID: uC-gsflnu33B003h05b1
ttctacagtcggtggcatacgaaacacaaagggagaggttaaaatcttggacctatgaatgacgaacaaccgctaaagcattagccaaggttgctctcattaagcaagaacgaaagctgggggctcgaatacgatcaaaaaccgacccagtgtcaaccataaactatccctacccgagatcggcagatgttgcttttaggact

SEQ ID NO: 54128 - DNA, 263 bp, Gossypium hirsutum
  Clone ID: uC-gsflnu33B004a04b1
ttcaactgtggatgccctatcgttctttatgatcgatcacagctcttcaaacccatcaatggaaacaaccctacactcagtccatgcatgactctagactcaggatgatccagtgccggggggcctctggacttcagatggctggaggagctagagcgcgaccaacaaggctgaggcaacggtactgctagacctggaatggaggacggagactacatacacatgcgcacttgactgtggccatcattggtgctgataatact

SEQ ID NO: 54129 - DNA, 507 bp, Gossypium hirsutum
  Clone ID: uC-gsflnu33B004a08b1
ttcacgcgtccggtcagacgtgcctaaatttaaaaatcgcgaaacacacgggcaaaaattagggcacacgggtgtgcccgacgggcgtgtgccccaaaatctatataaacccctcactattcatcatcttcctccccaaaaatctctaaccctagtcacttcaactccacacgccctacctgccacacccttacgccgcctacaacactatttccgatgactcaagcttctctcttttgcgtttgttcactcttttctctctattctctttaaatattttgcctatttcatgttttctctggtccattttactattttaagtgaatattaatagtagaataatataaatactcgtgcttgtcatttttcatactacattcatccatttttcttattttcatggattttatatttacccacatacattcatgcattagatttttccgtcgtattattctcatagtcctattttaataacctatataaatgctttagttgtttaagttt

SEQ ID NO: 54130 - DNA, 123 bp, Gossypium hirsutum
  Clone ID: uC-gsflnu33B004a11b1
tttagccttggttgtatgattgctggaatgatattcccggatggagcccaccctgccccgaaccctccacatattctccggcatttcgggttattaaaagccctaaagacccagggtacgtgc

SEQ ID NO: 54131 - DNA, 483 bp, Gossypium hirsutum
  Clone ID: uC-gsflnu33B004b04b1
ttatgatgatacagactcagacagaactaaggggaagaagcttgatgtcggattttcggggactactaaacagtgggaggatacattcggcaaaagatactcgaagtcgggggccatgtatagagggaattctccatctcctcttgcagctattccttgcattcccgacattttacctaagaaaatagatgcaacaaatgagtttccgaacattattaagcttcctgagatgaggattgtagaggtacttttggagattgttgcagttaagaacttaccggacgaaaagaaggggaatctctttgtcttgttaagtaaaactcaacccgatgtattctgtaatactaagcagaaactgactattttatctgagtctgggaagaaacaggttcttttatttcagtgtgaacctactggtgaactgcatttcgaactcgtatcaaattcaagttccactttaccaggtacagagacatgcaaaac

SEQ ID NO: 54132 - DNA, 493 bp, Gossypium hirsutum
  Clone ID: uC-gsflnu33B004b05b1
ttcacgcgtccgtaaaaaaaaaaaaataaaaaataaaaaaaataagaaaaaaataaaaataataaaaataaaataaataaaaaataattaacgaatgttaatatatgtgttttattacttcctcttgggcgcgtgccgtctctttggtggttcccaatttttccgtccgcgtgcttgcaacgtttactttttttttgggtgcccctaatttcatttcactgcccttctttttccaaccttgtgcttggtaaacccctggcgttccccaccttattgcccttgcggcccttccccctttccccctttggcttttttgcgaaggggcccgtcccgttggcctttcccaacatttgctctttctgattggcaattgggcccccccctttttcggcccattaatcccgtccgctgtggttgttcccccccacttgcccgttccttttgcgggctcctttgcccctttcttttcgttttttttcctttcttttttgcc

SEQ ID NO: 54133 - DNA, 433 bp, Gossypium hirsutum
  unsure (1)..(433): unsure at all n locations
  Clone ID: uC-gsflnu33B004c02b1
ttcatctgcacttctgtatcttcatgaagagtgggagcagtgtgtggtgcatcgagacattaaatcaagcaatgtaatgcttgattctagtttcaatgtcaagcttggtgacttcggattggctaaactaatggaccatgagctaggtcctaaaacaactggattggctggaactttaggctacttggctccagagtacataagcacaggtagggctagtaaggagtcagatgtttatagctttggggtagtccttttagaaattgcaactggaaggaaatctgttgatcctggaagaaaatctgacatgggattggttgagtggtnntttggggtctttatgggacaggagagctaattttggctgttgacgacaagttgggcaaggaatttgatgagatacaagtggagtctttgatgattgttggactgt

SEQ ID NO: 54134 - DNA, 112 bp, Gossypium hirsutum
  Clone ID: uC-gsflnu33B004c04b1
ttgaacgcctctaagtaagactacggactagaagcgacacacgcgcccgtcgcccgattgcacgacccgcagtaggggcctgtggaccccatgggcacgtgtcctaagtgca

SEQ ID NO: 54135 - DNA, 487 bp, Gossypium hirsutum
  Clone ID: uC-gsflnu33B004c05b1
cttttacttctgttttttttctatcaagactctgtttttgccctgtttttttgtcttaccatccaactttctccaaccaaaaacaaaacaacatgggggctctcgattatatttcaaacttttgtactgtctctagaagaagaaccaaacgcaaaccaatgcagacagttgaaatcaaagttaaaatggactgtgatggctgtgaaagaagagtgaaaaatgctgtaaccaacatgaaaggtgtaaaaagtgttgaagtgaaccggaaacagagcagggtaacggtgacggggaacgtggaacccaacagagtgttgaagagagtgaagagcacggggaaaagagcggagttttggccgtacataccgcaacatgtggtgtattatccgtacgcatccggggcgtacgataaaaaggcaccggcgggatttgttcgaacgtgtttcagcttatccgtgtagttctttcaacgcgcccgaagagaact

SEQ ID NO: 54136 - DNA, 439 bp, Gossypium hirsutum
  Clone ID: uC-gsflnu33B004c06b1
ttcacgcgtccgggcactcccaaggcctcccagaccgtgtcagaggcatcgatgatgttattaacgcatggaggttggtaactatgtccaccatcacagcccattgtggagtcacattcattgactactttagctttaacagtttgtccgttcccatgtatgttaatatacttgagacaccttttttttccttgttgaaccatcctgttgaaaatgtcaccacaagttctttgttggagtggtacttgttatcacattcaggtggtccgcggccatcctcaccatcatcaaaccgtacgttgagagtctgggttgccttcgtatggtttgaaacttgtggggaacacttgtaaatgtcataaagcttgccttctttgcagcaattggagtcatgttttgtattacgttccttaggaggctttttcccttttatcttacc

SEQ ID NO: 54137 - DNA, 467 bp, Gossypium hirsutum
  Clone ID: uC-gsflnu33B004e03b1
tttcacgcgtccgcccacgcgtccgggcgcagagacgggccaatccaatatgactaagcgaggcatgggaggtagtgctgggaacaagttcagaatgtccgtgggcataccgtttggcggatactgtgaactgcgccgacaacactggggccaagaacctttacataatttgtgtcaaaggaattaaagggcgtgtaaacatgctaccatctgcttgtgttgcagacatggacatggtcaccgtcaaaaaaggcaagcccgattcgtggaagaaggtgttagaccgccgcatcattcgacaacacatactttggcgtacataggacggtggttacatggacttcgaagataacgctggggtgattgtcaatcccaagggagaaatgaaaggatctgttatcactggttccattgccaaggagtgtgctgacctgaggcctaaaattgcaagtgctgacaatgctatt

SEQ ID NO: 54138 - DNA, 268 bp, Gossypium hirsutum
  Clone ID: uC-gsflnu33B004e10b1
tcttacatctggctgccacataaagacggacagtgggtcgtattggatttttgcaataccgaccctcccgttaactatgcattgcgaacggaggctcgaccaaaggcatacgaagggaatccaagatttcattgatgccctgttgcctatcatgcccgaaaacactgcattctaccacagacgctgatgtcaccacttcagcctatctgctttactcttgccttgggtgtcttcccttgcacaccttgtcacacttttcatgggcgat

SEQ ID NO: 54139 - DNA, 466 bp, Gossypium hirsutum
  Clone ID: uC-gsflnu33B004g01b1
gcgctcacacgtccgccacgcgaacagatgagccgagctttagatgctccagccactggtgcatatgccgatcaccacctgtgtgaactactgcaatgacacggtgcctgttttgaaagcctgccttacagattccatgaaatccgcgaccctgcagtggtagaacctggtgaatcagtttcaacttgttgagatttgcctcaatcttcatggtaatattagcagaactgacactgattttctagtctgaccaggaatccatactgagctttgagttattggaaacccattgcaaagtaaagcaatgtatatctccactcaagttcaggtcaacagaaaataacagagctaaggggttttacctatgaattctagctgaagctggccacggagtgaattgagggtccattgaaagtgaagcaacaactagtggaaagatagattggacattgagaggctgtccccg

SEQ ID NO: 54140 - DNA, 373 bp, Gossypium hirsutum
  Clone ID: uC-gsflnu33B004g02b1
tttacgcgtccactcactggatcgtttacatggccaatctgtctccggtttcggtcaggccaggcggtgaatgagtgaaagagcgccagtgagcaaagaccgagacccatgcagcgacacaggagaggcaatattcctatgggtaccagtaggcggagcacgaaaccaggtctcactgttaacgctaagatcgtgcaagaggctccggagaccgctcaggagtgccggttggcgctgattagctatactactagctaaggcagcgacaagtgcctgactgagaacagggagacaaaagactgggacgactttatgtcagctattgccactaaagggactgtagatgacaacgaggcgagtaagatttacctta

SEQ ID NO: 54141 - DNA, 423 bp, Gossypium hirsutum
  unsure (1)..(423): unsure at all n locations
  Clone ID: uC-gsflnu33B004g03b1
aagagcatgaaaatggaaattgtagggctttatgcatcttacattgtcgaaagcttgaggaagtgactctctttgaaactatttcatgaatattgtagtaaattttactcgttgggtattaaagaaatgttggcnnaaaaaaaaaaaaaaaaaaaaaaaaaaaaaaaaaaaaaaaaaaaaaaaaaaaaaaaaaaaaaaaaaaaaaaaaaaaaaaaaaaaaaaaaaaaaaaaaaaaaaaaaaaaaaaaaaaaaaaaggggggggccctttttaggggtcccaagtttcctccccggggttggcaagtaaaaattttttttttggggccccaaaaataaaatccctgggccgggttttaaaaagggggggctgggaaaacccttgggttccccaatttaaatcgctttggggaaaaccccctttt

SEQ ID NO: 54142 - DNA, 486 bp, Gossypium hirsutum
  unsure (1)..(486): unsure at all n locations
  Clone ID: uC-gsflnu33B004g04b1
ttaaaagagagagaaaagaaaagaaaagaaatggaaaatctggctattctactactagtgattttcttggtagccatgccaatggcgtattgcgtcaaagaaggtgccgaggaagtagatgaatggttcgacaagcttccatacgcaaaacaaaaggttactaagctccatttcttcttccacgacagatttgctggaaaacacaacagaaccgccgtccgggtcgcccacggaccggagaccgacaaatcaccaacctcatgtggtctcgttttcatcatggatgacccattaacagaaaggatgaatccgacatccaaagagttgggtcgagctcaagggctgtacgcattttctgggcaagacgaactgagcctgttgatgtcgtttacttggtgtttaccaccggcgagttcaacggcagcactgttactgtacttgggaggaatccgcgcgatccncaccgtgagatgcctattgaggtgg

SEQ ID NO: 54143 - DNA, 496 bp, Gossypium hirsutum
  unsure (1)..(496): unsure at all n locations
  Clone ID: uC-gsflnu33B004h06b1
tgagcttatacgaggttctcaatgttgcaaagacggcatctcagcaggagattaagaaagcatattataagttggccttgagactacatcctgataaaaatcctggtgatgaggaagctaaagagaaatttcagcaattgcaaaaggtgatatccattctcggtgatgaggagaaacgagctgtctatgaccaaactggttgcgtcgatgatgctgaccttgctgnagatgttgttgagaatttgaaaacctttttcagggctatgtataaaaaggtcactgaggctgatattgaagagtttgaagtgaactataggggatctgactcagagaagaaagatttatttgatctttataaagaagtgcaagggcaatatgaataagctttttctgttcaatgctttgttcagatcctaagcttgattcacaccgtttcaaggatttgcttgatgaagcaatagctgccggggaactgaaagaaacaaaagcctacagg

SEQ ID NO: 54144 - DNA, 441 bp, Gossypium hirsutum
  Clone ID: uC-gsflnu33B004h07b1
tgaaggcgaacatcgtcacagcgtctcccgagacaggagggctgaattaccacatgacgagtgtgttcatggggctgattcgggtcaagctaagcccacaccatcggaatgaatctgggaactgatgcagccgctactgctgtagctgttgaagttgccacagactggcccccaactctggctactgagatgcaggctgacgacaagcgtggacttgatgaacagccaaagagagaagtgaaacatgagcatttaacatacagctctctctgaagagacgagcgagaaattagaagacgaggctgatgactggataaaagctgaaactatcggaggacagtggaacacgtgctaccaccatgcctcttggaaaggatgaggactgtctcattcagggaccttgaggatgatgatgaccacatgcccataaactacaagaaa

SEQ ID NO: 54145 - DNA, 151 bp, Gossypium hirsutum
  Clone ID: uC-gsflnu33B004h11b1
tgagccttggcgccgaccacactgctgcaaagacggcatttcacctcgagacccagaaagcatattataagccgtccttcgacactccaccctgataaaaaccctggtgatggaggaacctaaagagaaattcctctcgctcgtaataggt

SEQ ID NO: 54146 - DNA, 391 bp, Gossypium hirsutum
  Clone ID: uC-gsflnu33B005a06b1
tttcacgcgtccgcccacgcgtccggatctgcagagtacaatctagatcgaggtcttctgatctaagcttctaattgatatggtctggatagatagttacttgactaccaagatggatgctctcgctgcttaaattgaaagcatgtctggaaacgtgcttgtctacaggcagtatgagaccacgactacgatagcaagtgaaggtattcttgctgcttctgctaagctggtggatgcaggaaagcaccacacatatgctgagaccgagaatgctcgataggctatataacccaatgaaagctatttattcgtttgttggagcaaacaatcagagcaacattcttgaagatttggagactttatgactgctctacaagctggaaactgagta

SEQ ID NO: 54147 - DNA, 444 bp, Gossypium hirsutum
  Clone ID: uC-gsflnu33B005b08b1
tttacgcgtccgcccacgcgtccgcccacgcgtccgtgggttgctgtggagccacatggaatcccagacccagaatttccaccatttcaatcctcgacgaagatgaagaaacacctcaatcacaacaagtcattaccaggaccaccacccgattcaatgtcgtaaacagcgccaccgtccccctgttgctggcccgccaccaccaccaacaacagcaagcggtacccaccccgccgacatccgcctcggggatgaacttagcaatggcgctggccgcggagcgtaatttgcggggaaacaacgacaacaccaacaacgtgggtcccagaccggttcaggtaaagacattgatgagattgattgaagaaacggagggtgaagattgttggacacaacatgaagagcaactgaataagaagcagaggaaagaggctgtggaaaatg

SEQ ID NO: 54148 - DNA, 332 bp, Gossypium hirsutum
  Clone ID: uC-gsflnu33B005c07b1
ttcacgcgtccgcttaaaaaggatccttaaaacaggaaaagaaatctggaaatttcctatacagatttgtttcagatgcccacagagaagaaactaaatggcggtaagaccttcccctcaaacagaaacgtcaggaaggagattgaggtctgcattactagatgaaacaaatatccccaatctaaaaaaaaacagagtaaatttgttgtctatggtggccggtgggagcgacgatcggaggctgctaaatcagaagctttcactagagcatcttcaacccaaaaacagtcttctaacctccgtaaaccctcttccgccattgcatgagcaac

SEQ ID NO: 54149 - DNA, 402 bp, Gossypium hirsutum
  Clone ID: uC-gsflnu33B005d08b1
tctcacgcgtccgatttgagattgtcaaataataagctcgttggtagcataccagctggtttatttgatctgggattggaagatatggatctttctgataataggttaaacggttcgatcccgagaggttcaagtagtcttttcgagtctcttcgaaacttggatctgtctagaaacaatcttgaaggtacaattcctgcagaaatggggctttttgctaacctgaggtacttgaacttatcttggaacaagcttgaatcaagcataccaccagaactcgggttatttccaaacctgaccgtgttggatcttcgaaacaatgctttatccggtgatgttgcaggggatatatgtgaatctgggagcttggttattcttcaattagatgggaactcattgact

SEQ ID NO: 54150 - DNA, 500 bp, Gossypium hirsutum
  unsure (1)..(500): unsure at all n locations
  Clone ID: uC-gsflnu33B005e02b1
ttttcctctctgcttgaagttaccaaagaaacagagcaacaatggcgaaaaccagccttagccgcctattcgcgtcactctcggagcactccatagccaaaccgtctttcactggttcgagatcagagtcggtgactcgttcagcttacaactccgtgactcgcttcgtatgttcctctgctcaggaaactcaattgatccgtgaagaaagatccaacgagggagatcgagaagctgcgaaagagaatctcgaatctgtgaataaagaagaagatgaaggtgaagatggtgatcacgtgaataaagagacgggggaaggtttcnggtcctaaaggcccagaacccactcgctacggtgattgggaacggaatggtcgctgctccgacttttgaattttttttttaattgttatgaatgtaaaactgaattgaatcagcgatttttaatttcccggagaataaaaaacattggtggagtaatgataaataatttttttggt

SEQ ID NO: 54151 - DNA, 500 bp, Gossypium hirsutum
  Clone ID: uC-gsflnu33B005e03b1
tttagtgctgctactgaatgtggttgcctaggaggtgctggtgaagcagggctgccattactgttcataatggcattgattgtgctcggactatttacggtgattggcatattttatagtgttctggttgctacaatggttgggcaaaggatttggcagcgtcactatcacatactcgcaaaaagaatgctgacaaaggaatatgttgttgaggatgttgatggagaaatgaatggatctgactggtctcctcctcctctcccacctgaccatattcagcagctgaaaacacttggccttctatgagttcagaattatattgccattgacaaaaacaacataatgtaaagatggactgactccccattctcgtaggtcagtcttgactacaggcttgttatgaatccacttatttcaacaaaagtgttttatgcagttatcaagctagaaaagctacgaaagattgtcaaaatcatttagttagaagtctgtgaatgata

SEQ ID NO: 54152 - DNA, 238 bp, Gossypium hirsutum
  Clone ID: uC-gsflnu33B005e07b1
tctggtagcaatggttgaacatttcccatcagtgagttaagaaaatatgcatttactttcgtttgagtgtgttgtttcagttaaaggagttttgggtgcaatttttctttattgctttcatgggttacatatgtttctcccttgaatgctttttattatgcagttcaggtggagaaattttttcttaatgtttctgagctgttttttttgaaaaaaaaaaaaaaaaacaagcatctac

SEQ ID NO: 54153 - DNA, 498 bp, Gossypium hirsutum
  Clone ID: uC-gsflnu33B005g03b1
ctgttggacgtgtacaagataaaagttgaacttctatgaatttgatgtatttaggttggttgaaaaaagctatagcttacagaaggttgtaccttaatggccaataatctgggtaacttaatattgcgagcagctagactctattcattgacattctctgatcaatcaatgagtttcttaatgcaggttccattatatgtggcaacaaaaatggcatcaatcaaaagatcgtctttctttgttccatcaacagacggatatgctcgtgcagcaatgcagtggataggctatgaacctcattgcacaccctactggccccattccatcctttggggcttagcttattcactgccagagagtgtggctgatgcatggcgtttgcgctcttgtcttggcattcgaaagagggggcaaatgaaagattctaggaagaaggaatgaaaacacattgctgagtctggtctattttctgttatggagttcatattttacttggat

SEQ ID NO: 54154 - DNA, 373 bp, Gossypium hirsutum
  Clone ID: uC-gsflnu33B005g05b1
gtttcactgggctatactgtgtctatcaggatggccgatctataccaagtgctatctgcacctgggctatactccagtgctgatgtgcaacacgctggccgatcttgtggagacatggctttggtggcactaacaagttgtgatactcgatagcgggaccaggctgtgagaggattctaggacatagctatgagctcactcatatgaagggcttgctgtgctgtgtgcaagacacatgttgatctgatggagagaccatttgctgtcgatccagcatcgaagatgaccatgatcaaacatggatggctatttatgcctgacatacggcatagctggacgatgaacgtgagctatcaaggatagatgctgagag

SEQ ID NO: 54155 - DNA, 476 bp, Gossypium hirsutum
  Clone ID: uC-gsflnu33B005g06b1
ttcgctcgtgcaacaacggcgtcttaagctttgactgatctgattgcggcagatgcccagagactgccatgctcctggacggttgcacgaaacgaccgccacataccgaaccgtgtgcaccatacttgctaggacgagactcaaggacgcgattgacttgaagagtgaaaggggaaccgacggtccacttcagatggcgaattgggcccgatggataggcttaggctctcaagggatctagtagctgcgttagatcctagtaggaacttgatcactctagagtgatagagggcgatcaagctgaagcaatatgagatacttcgtaacctctgtttaagctgctattaagagcaaggattgtgcctgcataggaggctggaccgtggaatgcaggagactgcaccactggattgcacgtagagcgactcatggagcatactggggggatgcctccaaggtcattggcgctcacctta

SEQ ID NO: 54156 - DNA, 149 bp, Gossypium hirsutum
  Clone ID: uC-gsflnu33B005g12b1
ttcacgcgtacggtttaccctggtccaactggtaagtacgactgtgatttttaaaaaaaaaaaattgcatagcaatgttacgatagttgtagttataaaagtaagcgtgatttggaatggtaggggaagtgtatatatgtgggatgtct

SEQ ID NO: 54157 - DNA, 325 bp, Gossypium hirsutum
  Clone ID: uC-gsflnu33B005h06b1
ttcacgcgtacggacaaagtggctattctttacctgaagaagtctgggcctgatctcactaaagtcctgacccaggtctatgttggcattgccgggactggcgttgctgcagccttttctgttacacagaaggccgcgtatgtgcgagcccaattgtgtacatctatctctacagcactagccttggcatccggctcgtttggctctcctgggcaggtaacagactgtgggacactactgtacgtactagctggattactgacagggtgaatatgaaggtagaagagatgatccagagagtcgagataagtgttgaggacgttta

SEQ ID NO: 54158 - DNA, 257 bp, Gossypium hirsutum
  Clone ID: uC-gsflnu33B005h07b1
ttcacgcgtcctcccacgcgtccggcgccattaccggggattggtaacgtactaatcttgttctttgttttttatgaccagatctactccaagtacttttacgtttgattcgaagatagaaaaaactgcgagagccaatcgcaaggaaacaaagttatgcaaaaaacagttaagagtggttgggactcagaataacccaccaccagaaattggaatcaacaacgaagtaaagtctagggttaatgaaaaccctactc

SEQ ID NO: 54159 - DNA, 347 bp, Gossypium hirsutum
  Clone ID: uC-gsflnu33B005h08b1
ttcacgcgtgcgtctgctgcatccaactcctaggatgatcctgctaaggaggctgcaaagttcactgctcaggatatcatcatgaaccatactggacaaatcggaaacggatatgcccgagtcctctgctgccacacctcacacattgctgataagtttgctgaactattgaccaagattgacaggcgatctggtcaggagctcgagaaggaacccaagctcttgaagaatggcgatgctggaatgattcagatgattcccaccaagcccatggttgtggagaccttttctgtgtacccacccttgggacgttttgctgtgagggacatgcatcagaccgaggcagt

SEQ ID NO: 54160 - DNA, 252 bp, Gossypium hirsutum
  Clone ID: uC-gsflnu33B005h12b1
gtaaaataaagctaaaagaaaatgcctgctgtaggtggaatcgggccgggtaccggcaaggaatacccgggtaatctcaccctatacgtccttgtcacctgtattgttgcagctatggggggtttgattttcggctgcgatattggaatctcatgtggggtgacgacgatgactccatttttgctgaattcctttccatgtgtctggatgaaataggaatcctacaagacgaacaacctgtactgtctattg

SEQ ID NO: 54161 - DNA, 320 bp, Gossypium hirsutum
  Clone ID: uC-gsflnu33B006b06b1
ttcacgcgtacgtccacgcgtccgaccacgcgtgcgtccacgcgtgcgtattttttcactgaattcactttctcactcttcgatttagagcttccaatcaaaattacgtaaataaaaagccaaattttgtatccctaatttaaagaaaaatttgaattatttgctttaaaaaaaaatatagtcctccgccatagaatcttgtttgtgattcattgaatgtatattatttctatatactcacattctttgattacaagctctagggtatttcttttttttaaaattgttcacttttttttcttttaaactatcgttgattg

SEQ ID NO: 54162 - DNA, 478 bp, Gossypium hirsutum
  Clone ID: uC-gsflnu33B006b07b1
ttgtaggggagaacaaaaatgcggaggcagataaaattgttgatagatagattaaagaaaaggctgctaagcaatggaggcatcttgtgaaatctaataagacggatgtgtgttgctagacttatacatgatctatgggcgatcgcataatgggcgacgctatataaccaaattgtatcataattggcctataacatgttaataagctcgttccgttgtacatttgagagatatggtggcaatcctaacccgtgaaaacggggttgtgggagagcattaaaagcgtcgtgctgctaggcgaagcggtgaagtcccaacacatagagggtcgaggtgcagtatccgcaaggattactagcctacgctctgaccctagttgcatggggcacgtggaatcccgtgtgaatcagcaaggaccaccttgcaaggctaaatactcttgcgtgaccgatagcgaagtagtagtgcctaaattttt

SEQ ID NO: 54163 - DNA, 474 bp, Gossypium hirsutum
  Clone ID: uC-gsflnu33B006b12b1
ttagcttgcagttcgtgtctcggaatgcgggttggctccattgttgtcttctggctctacaagcgagttctctggaagcctttttgtatcatacggttatgcagccccggaaatcgagttcggaagctatacttgccagagtgatgtctatagcacttggcgtcgtaatgttagaactgctcaccgggcgagaatccttcgataggtcacggcctctgggggagcaatttctcgttagatgggcaattcagcagcttcacgatatcgatgcattagttaggatggttgatatcaccctaaatggagtgtatccagtgaagtcattgtcacgctttgccgatataatatccagatgcgagcagtcgctgccgcccatcagaccgtcaatatccgaaatagttcaagaccgtatacacatgattaaaaggtggatcttatattcctaccggctgtacatagaagaatggatgatta

SEQ ID NO: 54164 - DNA, 338 bp, Gossypium hirsutum
  Clone ID: uC-gsflnu33B006e01b1
ttagtcttaccattttcttaaattctcaacagcatcgattttgtgtttctgttgatcatcagtggtggcttgccggctttgcaaggatggtttgtcaggctactatattttactaaatttattgaatgacagttgatattgtttcaggttttagacgtttttgtatgttcatttatttagccagtagagcgagcttactatcaagaaaataaattacccaaggtgtgagttaatttaacaaataaaatgaaagaatatatatttatattttaaagctatatggtgcaacagtcaacatgccaccagctactgctgtcaactacaccaaatggaatctg

SEQ ID NO: 54165 - DNA, 339 bp, Gossypium hirsutum
  Clone ID: uC-gsflnu33B006e05b1
tcagtaccaggagcaacagtagttcagatgacgaatcttaagcctttgagaagaagtcaaatgaagaaacctgtaatcttggttctgatgcggactcgtatagtaccgaggataagtcagctactgttttgtctgaagaagttctgacggctgctgaaaataacacacttaagaatgttgatagtaattctgcagtggagactgttgctgatgacaatttggtaaagaacatgtcacttgtgccagaggaggtggaattttctgcaaagagttcagtacctgatgtggttgaatcagggatgaaggataatgaagagacataattgtcttcatcaaatg

SEQ ID NO: 54166 - DNA, 266 bp, Gossypium hirsutum
  Clone ID: uC-gsflnu33B006e11b1
tccttatttgcgtataacggtgtgcttaatgtggaaggtgcttaaatgacagtgagtatgaggagaacttttgttaggagatactttgttcagattgatcatagccacatctgccgtagtgcgttgtgcgtcagcatggaatgattgccatggcgagatcgcaaactttctactttgctacccacctatatttccatggctcgactgaaatattttacccttatactgtttctctatcaccccttcaatgtattgtctttgatttt

SEQ ID NO: 54167 - DNA, 332 bp, Gossypium hirsutum
  Clone ID: uC-gsflnu33B006g11b1
tccacgcgtacgtacaggatggagattgaggcgattgttatgtcgtttacggggaatcaggttgatactggctattgtaaagtggagggtatggggcactttccagattggggccgtcggccctttatgggcacgatagggtctcttgacagacaactacgagctctgcataggatgcaacctcaagaaatttaactggtactggataaacatctacgggtacgggagaaccctgtggttctccaagaaaatcgacttgagatgcatcgacttttacacactctactgcatagacaagctgaccgctacaagggtcagggacaacagctggg

SEQ ID NO: 54168 - DNA, 177 bp, Gossypium hirsutum
  Clone ID: uC-gsflnu33B006h05b1
cgccaaaggaggcaagaacccagaatggaatcacgtgtttgagttcgacctcgaaagcttaccccccgaggaatccgatcatcttttcctcaagttcgatttgcgtgcggatggcttggtcaatagaacaatcggcgaggtgcgtgttcctttgaaggctttgatagatgatttttg

SEQ ID NO: 54169 - DNA, 452 bp, Gossypium hirsutum
  Clone ID: uC-gsflnu33B006h08b1
tcacgcgttcgtccacgcgtgcggaagatttgtaaaaatccctataaccatgagtattagacgatgaccatggacgagtgtggaacatgaccaaagaggggacgggatacgcacagtttacagtgtattcggcaaaaccgtcatatttacacaccaccatgtgatttgtatttgctacagaaatgggaatggatagaatacgctttgtcgtcccttcatcagacgttaacaataaaaattttgttataaaaaagtctttttttgggttggttccacaatcaaggccacacgtgctactctctatcacttttggctcctaaaaacagactcttatacaactttgcttagctttctttttatttctgtgcgggtttttatatgggctgtttctattttaacaacaacatttttttatctgggaattgctattttggattccttgactccctttt

SEQ ID NO: 54170 - DNA, 458 bp, Gossypium hirsutum
  Clone ID: uC-gsflnu33B006h11b1
tccacgcgtccgcccacgcgtccggccagtggtggaaccggagaagaagaggaacacagagggcatcactaggtacttagagaaggtgccgtattagtgtgcactcgttgtgcccggggtcgaccagcaggcttcaatagcaggcccagaccacccatctttgtcaccagtgatagccctaatgcactgaggagtcacgttatggaaatagctaatggttctgatgtagttgagaccctagctcactttgctaggaggagacatagaggagtttcagttcttagtgggagtggtaccgtcactaacgttacatgtcagacagccttgagctcctgttgcaatgatggctcttatggtaggttcgagattttgattttaactgttgcgtttgtgactggaccagcttttacagggtcaatcgggcttactatatacctagctgtgggttaaggacaggt

SEQ ID NO: 54171 - DNA, 483 bp, Gossypium hirsutum
  Clone ID: uC-gsflnu33B008b07b1
tgtgatgattcagaaagggataaaggaaattcctgagttgttcatcattgggaacccagacatgacaattgtggcatttggatctgctgttctggacatatttgaagtcaatgatatcatgtctggtaaaggttggcatttaaatgcattgcagaggcccaacagcattcatatctgtgtcactcttcaacatgtaccagtagttgatgccttcctccaggatttgagggaagccgtacaaactgtgaaagaaaacccagggccgataagtggaggtctagcacccatatacggtgcagcagggaggatgccagatcgcggcatggctcaagatttgttggtaaattacatggatggttcatgctagtgcccaaatagagccgatgaaggctgattttagatccgtatgattggctcttcccggaatcaagtgcaatgtctttgagttttgcgtctcggctcattattaccttgctatcccac

SEQ ID NO: 54172 - DNA, 308 bp, Gossypium hirsutum
  Clone ID: uC-gsflnu33B008c02b1
atagtatagacgaggatgccgagattggaccttattcaggattggcaattagcttatgttgaagggctcaaaaaagctggacaagaggttaaacttttatacatggaacaggccacgattggtttcttattgttgccgaatagcaatcacttccatactgttacggacgagataaccaagttcgtgagttctgactgtattaaaacaataggggaaagaatcatgcaatgtatcggagctctattatgcgtagattatgtatgtttattcaaatgttttttaggataagatggaattattaatattat

SEQ ID NO: 54173 - DNA, 503 bp, Gossypium hirsutum
  Clone ID: uC-gsflnu33B008c12b1
ttttatcgtttgtgagggagttttttcaaggtattgattacgagttggaagaaggggctgcgaggtactttgtcaatgttctcctaaactatcttgttctgatggggcagataaacagagctcgctgtgtttggaaggttgcctacgagaataagcttttcccgaaggcaatagttttcgatcagcatattgcttggtcacttgacgttagaaatttgtcggtgggagctgctcttatagctgttgtgcacaccctccatagatttaggaaaagaatgttgtattatggagtggtaccgaggcgtatcaaattggttacaggacccactctgaagatcgtggttgcacagatgctgagctctgtagaatccccatttgaagttagtaaggtggttttaagggccaccggagactctgttatgtagtggttcaaaaaaccgattgttcagcagtttcttttgaatgagattccatcaagagctgacatccttatgcacaagctg

SEQ ID NO: 54174 - DNA, 432 bp, Gossypium hirsutum
  Clone ID: uC-gsflnu33B008d11b1
tctcacgcgtccggagaaagagaaaccctagccagtcatagccacccacaaccacaagattcaacccaaatcaaaacacacagagctcggcagaaatctgctgtgttttagggtttgagttgcaaaggtctcaagaaaaaaatggaagaaatcacccaaggagtcaacaacatcaacttggccgccgattcccacaagaagaaccggattcaagtctccaataccaaaaagcccttgtttttctacgttaatctcgccaagagatatatgcaacagtacaatgaggtggaagttgtctgcccttgacatggctattgcgacggtctgtacgattgtagaaattttgaaaaaccatggtttggctgttgtgaagaatatctcaaccccaacttgttgcatgatggaggactttagcggttttctcggtccaat

SEQ ID NO: 54175 - DNA, 488 bp, Gossypium hirsutum
  Clone ID: uC-gsflnu33B008e04b1
tcacgcgtccgctttcaaaccctaaaagaacactcatttaaacataatcaacccccccacccaaaaagctatgagagtccccgtttcttctccacaaagcaaccattgccaaagccctaaacctaacaacaatagtaacactagtagtactaggaacataagtttccatggtgctactattaacagtgtttcaacttcgtgttatgagcctacttcggttcttgaactccggcgaagcccgagtcccgggcatgataatccggtggatcatcatcagcatcaacaacagcagcagcagcatcaagctccacttgagtgggatgaacatgtgttacgaaacatggattgcgattccatcatgaaagatttgggattagacgatgaattagtacccgtcattaaaactttttcaccacaagagaaccatattcagaacctcccttgagatacttcctggagttaactcccccacctgattttacaatctt

SEQ ID NO: 54176 - DNA, 502 bp, Gossypium hirsutum
  Clone ID: uC-gsflnu33B008e11b1
tttgtatcttctcttcagagtagttcccagattcaatctccagcttcaactcaggcagtatcgctttcccctctaacaccatctacgccaataactcctatgtcattacatcagcaacaaaaaaaccacttggtgcctcgtgggcttggtaggagttcccgacctggtgctagtgggttgaacaatcagataggccagcaacaacagcggcagcttcaacaacagcagtttcaacaatctggaaggcaccaccctcagcaacggcaacaaacacaatctcagcagcaagctaaacttttgaagggagcagggagggggaacatgcaggtgcatcagaacctttctgttgatccttctcctctgaatggccttagcatggcctctagcaaccaagctgctgagaaaggagagcagatgatgcacttaatgcaaggtcagggcctgtattctgggtctgttatgagccctgtccaaccatctaaaccttcagtttcttctcagt

SEQ ID NO: 54177 - DNA, 470 bp, Gossypium hirsutum
  Clone ID: uC-gsflnu33B008g11b1
tccacgcgtccgcccacgcgtacgcgtgggcaggcaattagggaaagtgagcttaattaacaggctggaagtaagaaggatgagccagtgtatgaagcaggtgctgatagggaaagagcagacgatatatgcagcgttgctgaaaatgaagaaacttaaaaggaggccaatgatgaaaaactgtcggcagttgaggccacggatgaagataggaaaggtgacaagactgcaaatgctgattacaaagataagaggactgaagatgactattcaactgtagaaggagcatcattggaattcataccaccagatctaaagtggccagatatgccttcacaggactcgctggcactggattatctacttcttcaggctgctttggttctaccaaaaaggatggctctacaggtgcttgtggttttggcctttcacaaagggacacttatccctattcaacacatcggggactt

SEQ ID NO: 54178 - DNA, 318 bp, Gossypium hirsutum
  Clone ID: uC-gsflnu33B008g12b1
tctacgcgtccgcccacgcgtccgcgatttttgcttttgtataacagatatctgtatgatattctgaccaaggccagtgtggttaagaagaaaattccagttctcatttgttgcaataaatccgacaaagtgactgcacataccaaggtgtttatcagaaagcaaatagaaaaggaaattgagaaactgcgggcatcaagaagtgcaatatcagcagctgatatttcaaatgatttcactctcggagtatctggagaagtatttttattcactcagtgtagtaatgctgataccgttgcatatgctccaggtttgaat

SEQ ID NO: 54179 - DNA, 326 bp, Gossypium hirsutum
  Clone ID: uC-gsflnu33B008h05b1
atccgtcagaacggctgactgctcatgaagtattatgtcatccttggatttgtgaaaatggcgttgccccggataaggcactggacccagcagtactttctcgcctcaaacaattctcagcaatgaataaattaaagaagatggctttacgggtaatagctgaaagcctctccgaggaggagattgctggcttgcgagaaatgtttacggctatggatactgataacagtggtgcaatcacatttgatgaactcaaagctggtttgcgaagttatggttccaccttgtaggatacagacatacggtaccttatggatgccgtttat

SEQ ID NO: 54180 - DNA, 231 bp, Gossypium hirsutum
  Clone ID: uC-gsflnu33B008h07b1
tgaggagtatgcgaagaaattaaaacccctcgttgaaaattcaaagccacgaaaaagaaaagaaaatcgagggtatcattgcaaatgttttcttttcctttttttttttggtagtgaaatttgtaaaatcttatttgtagtcaattttataagaaaacaaattctcctctctctcccccctctctctctctctcttctttctagttaatcataatttagagttgttattcg

SEQ ID NO: 54181 - DNA, 404 bp, Gossypium hirsutum
  unsure (1)..(404): unsure at all n locations
  Clone ID: uC-gsflnu33B009a06b1
attatgtacttaagatatcgccctttagtggatcatgtggagggtggaaggataaaactgctcctgcctgctggctggataacctgcnggatctgcggcctccaggcttgcaatgcttgctggcatgcggcctggcggctggtctgcacagattgtaccccctgcagattgatacttgtgcttgtagcatataccatcaatcgcgtggaccatccttgtcttcttagagcngcttggcatcgccccggtataagctgcagcttttgactgtgagcctgaataggtaaacgtgcttgctgaaagcggctgcaaatgtggctataactgcactcgcaacccttgcaattgcaaatgagaaaaaaaagctaagcatattatggaagctgatctaaataatatatgat

SEQ ID NO: 54182 - DNA, 341 bp, Gossypium hirsutum
  Clone ID: uC-gsflnu33B009b08b1
tttcaatgtccttcacattcaaattggatccaatgtacctaaaacgggtccttcaaacgatatttatatacgagttaatgatcgatttcaaaatttgttaagattatcaagagatttgtcaagaaccaaaaaagattgtttaattgagttgaaaatttatcgttgaatataataaaaaaagcaagatttattcattagggttgagacgtacttaccaattttttgcaaactaagggtgttattgactttaattacaagccaatgaaaaaaagttagaatggtgaacggtttgatttcagatagcaaaatagttttcagaacttagatgaaaattttgatgt

SEQ ID NO: 54183 - DNA, 496 bp, Gossypium hirsutum
  Clone ID: uC-gsflnu33B009b12b1
tttcacaggtgcgcatggtcgaagatgatttgatgtacaacacatttctagaggtatatgagaaccactgtgcaaggaatgatcgagagccggatcttcctattacctatttcaaggagcagttaaaccaagccatatcaggacaaatttcacctgaagctgttgtagatctccgcctccaagcttataacgatataacgaagagtcttgtagcagatggtatcttttcccagtatatgtacaagaccctgcccagtggcaatcatatgtgggcttttaagaagcaatttgctatccagttagctctgtcaagtttcatgtctttcatgctacaaatcggtggaaggtctccaaataagatattatttgcaaaaaacacggggaaaatattccaaacagattttcatcctgcatatgatgtgaatggaatgattgaattcagtgagccggtgcctttccgtctgacaaggaacatgcaagcattcttctctcattt

SEQ ID NO: 54184 - DNA, 509 bp, Gossypium hirsutum
  Clone ID: uC-gsflnu33B009c10b1
ttcacgcgtccgctaggttcgaaagaacatacccgggtggtatgcgtcccacttccatggcaccaccagttagagtaagatcaaattgtaccattggactagacattgtttagaagcaatgccattgttcaccaatgcttaaccattttgttttcaactagtctttctttgattgactaaagaaagtgtatgaatttgacgagtttatgaattcaatattgtttctaattatttctttaattgttgttttgtatgttctagagaactaatattgttctagaattgctacctattgattcgatggtgtagtaatttcattaataaaattatacattttatcttcttgaaataggaaaatagcttattgcaaaagatcttgataagatccaaacatgggacataagatattaacattagaatataaaacaaatcactagcaaatatttcattacgaaatagcatagaaatgtagctaaagaatacaacacttgattaagaatctaaatatg

SEQ ID NO: 54185 - DNA, 363 bp, Gossypium hirsutum
  Clone ID: uC-gsflnu33B009d11b1
tgtgaaggaaagcttgtcaatgccaccatattcagatgttagggtgggaagttaagattaacaacaggaggggtgctattatgatcgtaggaaaaaactactatcgttgagaagataataataacatcagcagcactactacttccgtcgtggaaaaaaaaaaaaaaaaaaaaaaaaaaaaaaaaaaaaaaaaaaaaaaaaaaaaaaaaaaaaaaaaaaaaaaaaaaaaaaaaaaaaaaaaaagggggggcggcctttttggagcaaccattcttaccgccgggtggaggcgaattatttttttttttttggggccacataaatataatttgcgggccgttttttaacaacgtggggggggga

SEQ ID NO: 54186 - DNA, 476 bp, Gossypium hirsutum
  Clone ID: uC-gsflnu33B009e01b1
tccacgcgtccgcccacgcgtccgcccacgcgtccgcggacgcgtgggggcttcttctttttccaggttttcccagactttgcttctccttgtggttttctggggaatcaccagcagcagcaatgctcaactttcaaccgattattactcagaatcatgcccaaacttgctttcaactgtcaaattcactgttcattctgctataatgaaagaggcccgcatgggtgcttcactgcttcgactcttcttccatgactgctttgttattggatgtgactggatcattgctactggacgacacgtcgtcgttcacgggagagaaaaatgcagtcccaaatcgaaactcactcggggattcaatgtgattgacgacatcaagtctgcagcagagagtgtttgcccggttgttgtttcttgtgcagatgtaccgtgcattgctgctaggactctgctacattctgggaggacgcgataat

SEQ ID NO: 54187 - DNA, 354 bp, Gossypium hirsutum
  unsure (1)..(354): unsure at all n locations
  Clone ID: uC-gsflnu33B009e03b1
tttcacgcgtccgccatttttatcatcttcaacagaaaaaagaaaggaaaaaaaaaacaaaggaaggaaaaggggaaggatttgagagaaaaaagagaaggatcgaaaatgggtttggttccaccagaactaagcttggattttaggccaaatttcgtaccaaaaacgatcactaattttctagnggaggtttcactggtcggaaatgtttccgataaggtctcgaaactcgatacatttgtgaaagggttnggaatgaagaaatgaaaaagatcgatgcttttaaacgtgaacttcctctctgcatgctccttttgaatgatgcgattttagtattgaaagaggaatcaacgc

SEQ ID NO: 54188 - DNA, 216 bp, Gossypium hirsutum
  Clone ID: uC-gsflnu33B009e08b1
tccacgcgtacgatttaaatcatacgcgtctgaaggttgtcatcattgcgaatgaattcgagccggacaaaaaggtggctgtttgatcactccgtgagaaggatcgaaattgggtttggttccaccagatctaagcttgcatgacagagcaaatttcgtaccaaaaacgatcactaattttctatgggaggtttcactggtcgaaaatgtttccga

SEQ ID NO: 54189 - DNA, 231 bp, Gossypium hirsutum
  Clone ID: uC-gsflnu33B009f08b1
ttcacgcgtccgggaattttgcatgaattcaattagtagatagaaaccaacaaaattcagcaaaacgaaatgaaaactggtaatagtcatattattacctcagcaatcgatgtggcaacgcttaaaccagccaattcctgataattcacataaactcaaaccactgaagctttaaaacaaaaccccaaaagaaagaaatagaaaaataaaagaatgtaaatttaagaattt

SEQ ID NO: 54190 - DNA, 506 bp, Gossypium hirsutum
  unsure (1)..(506): unsure at all n locations
  Clone ID: uC-gsflnu33B009f12b1
ttgcttagatttcaacacctactccctgccatcaaatcttgctcttcttttctgggtttgattttcataaagatgacaaaagataagaaaatcggtgtagcagtggattactccaagggaagcaaagcagctctgaaatggtccatcgacaatttgttaaaccaaggggatactctttacctcatccatgtcaaaccccatcaaagcgacgagtctcgcaaccttctttggtctaccaccggctcacctttgattccattatcggagttcagagaagaggaagtgatgaaacatatgcaggtggaaccctgatcctgtgattttgaacttgggtctgatattgcttccaggcagaaacaggggactcttgtggctaagattactggnggtgatgccagggataagatatgtgcatccgctgaagacttgaagcttgactgtttggtaatgggcagcagaggccttggcaccattcaaagggtactgatcggaagtgtgagcaatta

SEQ ID NO: 54191 - DNA, 504 bp, Gossypium hirsutum
  Clone ID: uC-gsflnu33B009h09b1
tttaaccataacttttttggttttgttccagtgaactgttcgctgaactcactgatagaattgtgccggtcgcaatcaacacaaaacaaacagttttccacgggacaacagttcggggacacaaattgttggatccttattttgtattcatgaatccgatgcctacttacgagatcaccttcttgaaccagctgcctacagagcttacttgcaaaggtggaaaatcagccattgaagttgcaaactacatccaaagggtgctggctgggacattgggatttgagtgcaccaacttgacaaggaaggacaagtatgccatgcttgcaggaacggacggtcgggttccatccaagaaagaaaaggaaaaggctctagtactttaaaaaaaaaaaagaagagatgatttatattaatttggccattgtttttcattacgttaaaactttgtcttacaaataaaaaattgtttgtgatgctagttataaaaataacaaatatgtatat

SEQ ID NO: 54192 - DNA, 500 bp, Gossypium hirsutum
  Clone ID: uC-gsflnu33B009h11b1
ttcacgcgtccgcccacgcgtccgaaaaacttcttctttttttttgtgagctatggagatttagtgaaaattgttctttggatttggaggtaaaagtaaaacatgagagcaattcctggaagtccagggactttgactagcctatttttgaggattatgcagtgtgtttttgcagctggttcaattgcttccatgtctacaacttcaaacttcttcaatttcactgctttctgctaccttattgcttcaatgggattgcaagttgtgtggagctttgcacttgcaatattagacggaattgccttggtgaaaaagaaggtcctccataatccagttttagtcagctttacgttgtcggagattgggtcaaccacttttcaaaccttcaaaccctcttgatattttttactgccaatgaaaactcaacttttatcaaattttacacaggtgacggcgttgtttgtctttggctgccgcatcttcctcgggcggcattgccg

SEQ ID NO: 54193 - DNA, 373 bp, Gossypium hirsutum
  Clone ID: uC-gsflnu33B011a10b1
tgcacgcttgggtcccagcggtcgccaggatcggccaataatgtcttgggaggtcatcctactcctcacagggctaatgcttagccttgagaaagctgaaattccaagcgtcggtggcagaaccaaaagctattcgatcctttgcactgagtgcgataatagaacaggcgtgtcatgcactctaaaacaatctttgaatgcagtcgagaccaagattaatgctccatcatcggaggaatcgaaatcaaatcatggaatgaggagtaagacacactggttgttcttgtcttgtcagtttactacatcataaacaaggcgagtattaaatacatcagcagtgtaggcgttttctgccgtgagcaaagacagatcg

SEQ ID NO: 54194 - DNA, 431 bp, Gossypium hirsutum
  Clone ID: uC-gsflnu33B011b05b1
tctcacgcgtccgcccacgcgtccggcaggaatcaccatcatgggttacgattggggccataaaaaaccaaagtccaaggctgtgatccctaaaaaggccaggtccgacaacccgtacctcaggttgttgatcaagctgtacaagtacttgcacacccgtgtcccctgcgggttcaacaaggttatcttgaagcgcctccaccacagccgttccaacaaaatccccatctccctccagaccctcatcaaaaagatggacaagaagaccgacaaggttgccgtgattgtgggatccatcaccgacgacatccgtgtacaagaggtgcccgcgctcaaggtctgcgccttgcacttcactgaggccgctcgtgcccgcatcatcaaggcgggtggacaaatctataccttcgaccaacttgccatccagaggc

SEQ ID NO: 54195 - DNA, 454 bp, Gossypium hirsutum
  Clone ID: uC-gsflnu33B011c01b1
ttcacacacgtgccgtaatgatttaatgctgaggaagagctatgactgcacttgtacacatgacagatggtgacctagaagctttaggcataccaatgggcccaagaaagaagataattttggaattggaatcaagagcctgataatcagagttttagcaagtagtcgttgcctgtttaatctcaagatgtgttaatggccaatcctacaagactgtaaggctgcgttttgggtgataagaacctgcatatgtaccaattctttttggtattgtttttgtttagttttattaacaaaaatatggcttcacgggcctttgtcattgaaatggaaggatggaatattattagattgaaagtagggtcaggatgtttctttggtgccaattagtggcattgggtttagaaaaccttaagtgacatatgtgctgcattgccttcatttatatttttgg

SEQ ID NO: 54196 - DNA, 413 bp, Gossypium hirsutum
  Clone ID: uC-gsflnu33B011d04b1
ttccactcgtgcggatcaattgaactccaaaaaacaggtacaggaagtttcatagatgaaaaggggttccgcagcgctgtatacatgatcgacattggacaaaatgatctgttaatggctttgtatgcatcaaacttgacatatgaaccagtatccaaacagatcccttcttttcttgcagaaatcaaattagctattcaaaacatatactcatatggtggcagaaaattttggatacacaacaccggtccgttaggatgtgcgccgaaggagcttgcattacatcctcataacaagatccgatcttgacagaatcggatgcttccgcgtccactacgatctggcgaaagcattcaatcgaggattacgtaatatctgtaaagaaatgagaactattctaaaagatgcaacca

SEQ ID NO: 54197 - DNA, 491 bp, Gossypium hirsutum
  Clone ID: uC-gsflnu33B011e01b1
ctcacgcgtccgcccacgcgtccggtggcaagtttacaacactcttggtggcagtcatggtatacctcgagttcactataagggtcgtcaaggtgactattacgttatggttatggatatgctgggtccaagtctgtgggatgtttggaataataactctcatacgatgtccatagaaatggttgcttgcattgctattgaagcgatatcaatattggagaaaatgcactctagaggctatgtgcatggagatgtaaagcctgagaattttcttctaggtcctacaggaacacctgatgaaaagaaattatttcttgctgatcttggattagcaaccaggtggcgagatagctcaactggtttgcatgttgaatatgatcagaggccggatgttcttaggggaacagtccgttatgctagtgtgcatgctcatttagggagaacgtgtagcaggagagatgatctagaatctcttgcatatacacttattt

SEQ ID NO: 54198 - DNA, 440 bp, Gossypium hirsutum
  Clone ID: uC-gsflnu33B011e06b1
ctgcaaaatttctcctctcaactatacttagtaaaagaagaaaagaagaagaaagaagctaagcccattaatataattcatgcaaatcaataataaataagggcaattctatctggcctgcttctcctctgcatcgctgttgcattgtttgtgtactgtactatttgctctgtcatctgctcaattttctggtatctgaaacacccatcaaaagaaaataagaaaactcttcgtttgtctttttttcccccatggcgttttgagcacctcttatcaactcgaggctcaactcacctgcttcaagttccccgagtctactcgttgaccattaagacttggagaagagaatctgataaaagagggtttctcctttttcttcttcgtttgaatttttggttgctttcaccgatgaatcggcgattcctatttgtactatcatc

SEQ ID NO: 54199 - DNA, 466 bp, Gossypium hirsutum
  Clone ID: uC-gsflnu33B011e09b1
ttatgaacggaacttgggattcgttatatccggaatggatcgatgaggagcaagaagaaaaggtccctgtttgcccctctctaccgaagatcgaagtccccggaatacgtcttgatctggttgctgtcaagctgccttgtagaaatgagggtaattggccaagggatgttgctaggctgcatttgcagcttgcagctgctagtcttgcaacctcggccaagggcttttatccgatgcatgtgcttttcatttcaaagtgctttccgattccgaacatgttcacttgcaaagaactcgtagcacgcgaaaacaatgtctggttatacaaaccagacttgaatgtgttgagagaaaagctccagttccctccaggatcttgtgaacttgcccttccttttgaggtcaagggtcagttcatattcttaaaacaaatgcctcatcctcctgcaagaatatagagagattc

SEQ ID NO: 54200 - DNA, 183 bp, Gossypium hirsutum
  Clone ID: uC-gsflnu33B011f01b1
ttcacgcgtccgctgaaggccatgattgttgatgctgccatattgttgtaatttaccatagaattttggtttggaaatttaagcaataatctcttcatattttttgacacctgtaattctttatcatctctctggaaatttcactgtttggtatgaaggaaaatggaaggaaaattatctttc

SEQ ID NO: 54201 - DNA, 261 bp, Gossypium hirsutum
  Clone ID: uC-gsflnu33B011g09b1
tgtaacccttgatttgtctagcaatgatctgcatggttcggtcccacatgagttatcaaatcgtgcttatctgaacaatctgatactgtcaaacaataggctttcaggctcaattccataccaattatcaggtttggataggctgaaaaggttttctgtagcaaataatgatctctcgggtgctattccttcatcttttgagaatcgtgataaggcagattcttctgggaacagtggtctttgtggggatcctcttggaaa

SEQ ID NO: 54202 - DNA, 452 bp, Gossypium hirsutum
  Clone ID: uC-gsflnu33B011g12b1
ttcacgcgtccggaacgccttatggcagacgcttcataagtcaggagttgaattcatatcttgaatacttgtttaaactcattgttgagaggggtcctgatgttggattgaaagtttcattaaatcgatatgatttgtttcatggtcacctttttattgccacagagactggaaggctaggcatattgtttcatgctaaagaataccccctgtatgataaacaagtgtttccatactacttgggttattgccagaaggattctaatgtgacttatgatgattcgataaacttgagaaatattctctggcttgctccattgccaagcaattcaacacaaggctggatagctccaggagtcctgcttgtcctggatgctcatcctggaggaattgtatatagggatctcatacctgagtatgtcaatgctgtgaggaccatatatgaagatgat

SEQ ID NO: 54203 - DNA, 371 bp, Gossypium hirsutum
  Clone ID: uC-gsflnu33B011h03b1
ttcacgcgtccgcccacgcgtccgattacctgcaaagctcattaaatccactttcagatccctagaatctatcaacccaaaacctcattcgggtttctcaaatttttatttcgtctatcgaggagaagaaagcttcacagaggagaagcgatagtcaaagtttcatctccatctgacagtggagatggtagatgggggtattcctgattcttgaattttttctttgtgtttctaatattatagggagctttctcttaaagtgaaagtcggtagatgaaaaggtatatagatgggaaacttagttgcaaagcatttaacctttgcagagttcgttaatggtcatatagatgtgtaaactttcgacatgtttt

SEQ ID NO: 54204 - DNA, 447 bp, Gossypium hirsutum
  Clone ID: uC-gsflnu33B011h09b1
ttcatccacatattatccgccgtcgtcgcaacagccgctttcttcttccgccatcgtgggacccaccgaaaaggtcttatcctcaagccctgacacccctctatccttttgtcccagtgaaccagatgagaagcctcagcctcagcctcagcctcccaagaagaaaacttcggttaacactctcaaaaggaaaaaagaacaaattttagagatggtgaaggattttacccatcgcaatgaattgcttaaaaaggatattgagattaagaggcaattgcttgatcaacaaatagctgagaatttggaattgaaatcgaagaaacaaaagttaaatcagagtcttctcacaccagtaacaaataaaaggttggatcttggggtacaatcagcccaagttagtattggtcaataccatcattatcaacaccaacaccctactagatctaa

SEQ ID NO: 54205 - DNA, 396 bp, Gossypium hirsutum
  unsure (1)..(396): unsure at all n locations
  Clone ID: uC-gsflnu33B012a05b1
ttcacgcgtccgcaaaaccaccgtctaaccgggngccgatgaagctcccccagacaatgacacattgttagggggtctgattgggacagaaagaaaagaagtgaaagaaatgatctgaaagaaagaaagaaagaagaaaaaagaaggaagaacaaaaagaaagaaaaaaataaaacattcaatgcagttggggcaagctgacccaacccgacccgactgacatccagaaccagcagctccaggtccgaaaaaataggctaagtatacaaaaaaagaaaataaaagaaaaagagaagagccaatacagtagcaataaaaggaataccgtcgacgtcgttctcacgccattggtccaacttggtgacactacactatcggtaactagcaaaacaacca

SEQ ID NO: 54206 - DNA, 208 bp, Gossypium hirsutum
  Clone ID: uC-gsflnu33B012a06b1
ttccacgcgtccgcccacgcgtcgcggcacacgatcgtcaagcgtctcggcgccatatgggccgttggtttttcaaaacatttgccaaagagagctgaaggaagggggtttgcatctttaaatgtggactggcaaatgagaatatatatagccatgcattattactgcttaaaaaaaaacagactctagcaagctcttatggttcgag

SEQ ID NO: 54207 - DNA, 116 bp, Gossypium hirsutum
  Clone ID: uC-gsflnu33B012a10b1
tccacgcgaccgcaaaagccacctgtaaagcattactaagcttacttaccacaacggattgctgaacatagatagactactgtaacctacacgcaatagaatggcctaattgtttc

SEQ ID NO: 54208 - DNA, 371 bp, Gossypium hirsutum
  Clone ID: uC-gsflnu33B012b01b1
tttagacgccctccaggggtcggcaggcgatgctttcaggacattcgtcgctaccttatgcgacaccaaagtctttgcatttcgctgggagatgggcatgaaggctgaaactgctaagcatagacggtagggcaccagcaggagcgcagcttctactactgttagagtcggcgcggtgaaacttaccaactgcagacatacaaaggattgacagactgagagctatttgttgaatgtatggctggtggtgcatgaccgcacttagttgttggagcaacttgtctgtgagacctcgaccacgaactaggcctcagcttgctgactaggtacacggaggggaacgtccgagcttagatagttagcgggactat

SEQ ID NO: 54209 - DNA, 190 bp, Gossypium hirsutum
  Clone ID: uC-gsflnu33B012b06b1
acccgtcgtttcacgcgtgcgagcatgtggagaaaatgggtctctggtattttcagttctgtatgcaatacagggagcctatgcttttatctgtgttcaaatgaatatatgtaagtaaaatttcgtataataaaaagactactttccaccatcaaaaggacaaaaaaggataagctttttactatgatgc

SEQ ID NO: 54210 - DNA, 306 bp, Gossypium hirsutum
  Clone ID: uC-gsflnu33B012b11b1
tctatgcgaacgcaaaagccatatgtctagaggttatatgctaacttatggctgggggtatctgaacacatatagaatgcctgaacgtagatgatagtagagctggctacactgcctcgcacaatgatgacagatataaacttggaccagctaagcatgcttgtattgcagctcatgcgcatagcggcaggtggggactcttggtagagggcgtatgcgctaccgttgttcaagacatggttatagggactggaagttgtgaatcgcacaggagtgtggcttcaagaacggatgctgtttcgatta

SEQ ID NO: 54211 - DNA, 322 bp, Gossypium hirsutum
  Clone ID: uC-gsflnu33B012c03b1
tctacgcgaacgcgaaatttgtggcgatcaagccatacttgttgctgatcactatggtagcatctatgtttaattatgtgtttgacgtagaggcatttgagtgtgtgatcctcctttggaacagaaatgattgtatcgcaggcttgcctgcacggcctgttgcggtgagctagctgagtaagcctgtggttgccctatagtaactggactatgagacctcttcgttcaaactgtcaggtatgggatatgtgttgttgcatcaagtaattgtagatagttacagcaatgcacatcctggtataaagatcccgaaagacaccta

SEQ ID NO: 54212 - DNA, 284 bp, Gossypium hirsutum
  Clone ID: uC-gsflnu33B012c11b1
tgttcacgcgtacgcaaaagccctatgcaacgaggcaataatctaactcagggctgggggaagctgaacacatatagactaccgtaacgtacacgatgtagaatggacaacctgactccaaaagactacagatagaaactggatcgagctaagcatgcttgtattgcagctcctgtgcataggaccagggggggcctattggtaaatgtcgtaaagggtacggttgttcaagacatggtcttgggtactgcaagttgtgaattgtcaaatagcgtggcttcatg

SEQ ID NO: 54213 - DNA, 421 bp, Gossypium hirsutum
  Clone ID: uC-gsflnu33B012d06b1
tccacgcgtccgcccacgacgtccgcccacgcgtccgcccacgcgttcgtccacgcgtgcgggatcatcagagtgcttaaatgttcaagatattaaacgaggggtatggaaagctatccaaaactggagtaatcaagttaaggagagaacatgatgaaggcaacgcttacgtaccatccttggttcttttatcttagagatctattagggtagctagcttgataagtttcaaatttcttgccagcaatttgttatcagtctatcagtagagttgggcatatatatgttgtcaagggtacaccatgtgatacctgatgatcgccaatttggccgagaaaatacaaagactaaagactttgaaatgtcgaatatgtaaacatgtgattttgcgtctgttttatgtggcaagacaaataatggg

SEQ ID NO: 54214 - DNA, 283 bp, Gossypium hirsutum
  Clone ID: uC-gsflnu33B012e05b1
tgaaatacccctttccacacacgaaacactagcatcacattattgtgttagacgtacaatctaagtctacctgcgagaaaatggcatactaccaaaccttagctttcgcagctttgttattgatcttgctacccgcagccgttactggagatttaggtgacttatctgctgatctatctcctttctatgataggtggtgggatgatgaagaatgtgtgaggtcttctgttatgtcagcgcctctcaatcgcttgaacaacctctgcgtctaattgaaagaatg

SEQ ID NO: 54215 - DNA, 421 bp, Gossypium hirsutum
  Clone ID: uC-gsflnu33B012e08b1
ttgttgatctcaacatgttgctcaaacgcgggaaaatagtcagcgccaaagccattgctaacctccccatgttccaccgccaccaggtctcttcatcggcggcggcgccagcccaggagtacgagttcagctgcagcaacacccctaactacatcttccctttcaacctccccaccaagaagaagaacagcattaacaactactaccaccacttgttcgcttgtacccacgcgcctcctactcacgacgacgacaccgccgccatgaacgccttcaaggttgtcttggagatgctcaacaacaacatgggagtggaaagcgatgctgctgttattgcggcttcccctatgttaccagggttcggacaaactccactggtgagacaacttagaataactgactcttcctttccttaagagat

SEQ ID NO: 54216 - DNA, 262 bp, Gossypium hirsutum
  Clone ID: uC-gsflnu33B012f03b1
tccacgcgtccgcccacgcgtccgcccatgcgtccgatcataatgatcaagatccgacggtccatatggatctgaacaaaatgaaaaatggcactcatgcgccctcagagtgtggttatatacacagtttttgttttgattgattccctttgtatttgcgtgtaagaatttgtaatatattgctccaatttacgtgaaatgcaatatatatattctctttggaggagactactacacccgattacacaccttcacctactac

SEQ ID NO: 54217 - DNA, 303 bp, Gossypium hirsutum
  Clone ID: uC-gsflnu33B012g05b1
ttcgatgtttcttcaatggagatgtggtggctgattaatataagagctactctaattgctcttatttttatatccattttttatttttccaagaagatttatgttaaattccttacaatatcgacatctccttcttcttcttcttctttattatcatctactcttcatcttccttctgcttcttcgcccatttccaatcaagattctcaatcaagaaccctagaggttgtgtctgattcagatttgaagtttttaattgataatttggatgagaagcgcaatgaggaccaaaattgggagaat

SEQ ID NO: 54218 - DNA, 443 bp, Gossypium hirsutum
  Clone ID: uC-gsflnu33B012h06b1
tggaaatgatacagatgacatcaatggtttaccgggtgatgaagttcagcttgtgaaggaagagagccaggattcagagaacgtaatgcctgttggaaaagaacaagatcatccccatagtgatcgggcccttggttctgaaccagacattgtgcctggtgagaacctctctgagagaaaaaaaaaaagaagaagaagaagaccacccaagagaatcaagtaagtgcaaatgcatcagtttcacaaagtggagataaggatacttccactttgaagtctgaggagaaacaaactgctggcaaatcttctcaagtgagaacctttccgaatggattggatgtccaagagttagcaatgggcaaaccagatggtaaaagagcatcttgtgggagcaggttagtgtccataccttgggaagcttagaagaatggaaaaatttttga

SEQ ID NO: 54219 - DNA, 347 bp, Gossypium hirsutum
  Clone ID: uC-gsflnu33B013a12b1
ctttgtccttcaagtagatcacagtttaaacatcggagagatatggccccggatattgatctgaatctcaagcaccagtggcgctgcacttgggctcaatcttagcaacggagaaggtccggtggaattgccggtactatatcaagcacggagcatggcgacccggggacgggtggtcacggatgcagacccggccgacgatctctacaggtgtcctcctttacaagatgtgccagtgcctggtcatgagcactagcggagaggatgcccaggggccgtccatctagcctcagaggaatcaggatgactttgaggacttgtacagagacatgcttccagcgctgagc

SEQ ID NO: 54220 - DNA, 309 bp, Gossypium hirsutum
  Clone ID: uC-gsflnu33B013b07b1
tccacgcgttcgggcaaggggtctcttggttgttattttccagactgtggacccgaaactgaaaaatctctgacatattacgctgagttgcccgaccttgatgctcgtgtagaaggcaacagaatgtattgtactaagctatattactagagattccaacaacatctagtctggtgattgctggcataatggtgaaggtacaaatttttgagtgtgcgtattcaagaacctggcatcctgttgtgtttagacattctgagattctgcctatgtggctcaagtagatcgatgcaagttacaagaggggtg

SEQ ID NO: 54221 - DNA, 159 bp, Gossypium hirsutum
  Clone ID: uC-gsflnu33B013b08b1
ttcacgcgttcgggtttagggtatgtttcttgtgattttccaggatgtggacccgaaacagacaattctgagccatattacgatgaactggacgatctgtgtgttcgtggtaacgaatactgaatatccagtattgcggcacacgattatggattccgt

SEQ ID NO: 54222 - DNA, 468 bp, Gossypium hirsutum
  Clone ID: uC-gsflnu33B013b10b1
ttctccacgcgtacgcctcagtggaaccattgaaggtacaaaactggatgcttgctgaaatgcctgggctaataacagactttgtaatctgtcttgatgatcgggtcttgtatttcgacaactggcttcatggggatgtccgacaatataatatcgaggaccctaagaatgcggacttggctggtcaagtgcgggttggtggactggttcaaaagggaagccctatagtggctggtactgcagatggccaaacatggcaggccaatgatcctgagatccaggaacgtagtctgagagggggaccgcagatgatccaggtgagcttagatgggaaacgcctatacgtgacgaactcactgttcagcacatgggatcgacagctctatcctgaactcatggagaagggttcccacatgttgcacatcgatgttgacaccgagaaaggaggccttaagataaaccccaact

SEQ ID NO: 54223 - DNA, 496 bp, Gossypium hirsutum
  Clone ID: uC-gsflnu33B013b11b1
ttcttcacgcgtccgcttttatcggatgggcaagatacttatactgtcactggtgccggtgcaaacaagtctcaaccaaattaccagttgcttgtccctctgtctatgcatgggagtgataacacaggattccagattccagtacatgcttttggttttggtgcagatcatgatgcttcatcaatgcattcaatttcagagatctcaggagggacattttcttttattgaaactgaagctgtactccaggatgcatttgcgcaatgcattggtggtcttttaagtgttgtagttcaagagctgcaagtgggtgtggagtgcatgaatccaagtctttgccttggcccgcttaaagcaggcagttatccaagccgagtagcagctgatggaaaaactggagttattgaggttggagatctctatgctgatgaagagagggattttttggtgtcggttaaagtaccagctgagtcttctgaatgtgaaacctcgttgc

SEQ ID NO: 54224 - DNA, 454 bp, Gossypium hirsutum
  Clone ID: uC-gsflnu33B013c01b1
ttcttgccgcagtacctgcacaaagacatcaaggacatcctgagcaggatgctgaccgtggatccgaagcaaaggatacggatgcacgaaatccgagagcacaactttttcaagagcaagcgatggacgaaactacctcccatcctttccgtcgaggagcaattgcggactacgattccgatcagtctcgacgaagatgtggacgcggatattgtgaagagtttagtgagtttgggctggggatcggaacaagaagtgcgagaggccctcttgtccggagactgcaattatgaaactgtattttatcgacaactggaggagaggaaaaggtttccctaccactcttctccgcgaaaggcaaaggtcaagacgaggggaagaaccaacaccctcacaaccctcagcagctctgcacctattcccttcgagattccctctgctttcgccaggtgtc

SEQ ID NO: 54225 - DNA, 131 bp, Gossypium hirsutum
  Clone ID: uC-gsflnu33B013c05b1
ttcacacatccggagcggcgtccattagattgttttttctttgactgctgaccagatactggtgaggttttcttatatgattaacgcgcacccgcccatcatgcctactttatcatgaacataattcaacg

SEQ ID NO: 54226 - DNA, 412 bp, Gossypium hirsutum
  unsure (1)..(412): unsure at all n locations
  Clone ID: uC-gsflnu33B013c12b1
ctccaaaatcaaaatgtttgttgcttcaatctctatttggtgggtgatccgagttgggtgttgctagtggctattttttatctttttgaggtggttgtgtggtgtctcttgactggcaattgaggatgtttggctagtcttgtgctccattgttttctcactgtcttgtaagcaaggtctttagtggaaataaaggctcgataaacgagattagacgcattaattttttcattagtggttgacaccaaaataactagtgatgattccttctttttttccttttttttatgtggtttgacggtttatgcttgagatcatggtgtaattggctttggctatatgtcattgttgctatgtctgtgatgattgttgttatatgaaatgaaacttctttttatcaaanaaaaaaaca

SEQ ID NO: 54227 - DNA, 347 bp, Gossypium hirsutum
  Clone ID: uC-gsflnu33B013d04b1
tcctatttaccttgcgctctgggaacgaggtacatccacaccagctgagagatcagagctctagtgcaggctctgcaggcctgtatgtcgcacgagcctaagagcatggcgacttgtgcaacctgcgccaagacaaacatggggatggcatttggagagatcactaccaacgctcccgtagactaccatacgatctgtcgtgacacctgtcgagtcgctggttcgacatctgccactctgacatgcgatgcctacgcttatataagaactgctagctgttgccttcccttggcatggacccacaccttgccatgaaatccatctcagttagcgtgctgaggaaatct

SEQ ID NO: 54228 - DNA, 317 bp, Gossypium hirsutum
  Clone ID: uC-gsflnu33B013d09b1
cacggtaccgagcccggacttactggctggacccacccagcgcttcctccacacgtacgaattgaaatgaagtgacttgtggttttaaaggttgcagaacgggaactccttttgcattatatgcccattagaatttgcagctttcattccatcgatcaagtgggcactgccaattgaagagtccatcttataaatgatgatttaggagctatttataatgttcttgaaagcgctgaattaattttaactgccgagtgtgttataaaattatagaagctaaatccttggtgtaaccaaatttaactccttggaatact

SEQ ID NO: 54229 - DNA, 108 bp, Gossypium hirsutum
  Clone ID: uC-gsflnu33B013e04b1
tgatacgacccagagctagaataacgagatacttggttctatgccgacagaccagatacccgacacatttcttgatacgtgttgggcggccggctctatctacatggt

SEQ ID NO: 54230 - DNA, 139 bp, Gossypium hirsutum
  Clone ID: uC-gsflnu33B013e08b1
tcccacgcgtacgggccccgggtctctgtgaggtgcttatacaggcaaaaggtccgaaacacaatattttggggaacatgaggatcaactgaagccacaaagagaacgcagtaactcctagtctgtggcttgcatacat

SEQ ID NO: 54231 - DNA, 194 bp, Gossypium hirsutum
  Clone ID: uC-gsflnu33B013e09b1
tcccacgcgtccactcatacgggaattgtgaagctattatccagattaaggacccggtgcacaaaattccaagccaattgaagaaaaccttaagcgtcagaaagaactcggtcacgactactgagcatcccgaattgcctcacaacattttggatttggtgcgcatcgaggatcttgattactgacaacaatgg

SEQ ID NO: 54232 - DNA, 281 bp, Gossypium hirsutum
  unsure (1)..(281): unsure at all n locations
  Clone ID: uC-gsflnu33B013f03b1
gcttcatgcgtncggttatccttaggtttaatatttggttttgtgcctttttgggaggttttgttagtgattttggagaaagttcttaatgataattgctgttctgtttctggattgtttatactggctgatgcgtaatacgtgttaggattgtatattataaaataaaaataatgacataaccgattatggacatggtggaggagtttatgacaacatctgggggcggccgttttagaggctctaagtttttccacgcttgaatgcgatgtattagtttt

SEQ ID NO: 54233 - DNA, 186 bp, Gossypium hirsutum
  Clone ID: uC-gsflnu33B013f07b1
tcccacgcgtccggtcaccggtccactgtgaagtttttacgcaggagaaaggccagaaacgcgagtatgttattgacaagagaaacacttacgggcatgaaaagcacgctataacacctacaaaggttctagaacaccctgacaacagcttcgatgctttacacagcgactaatcgatttgctgac

SEQ ID NO: 54234 - DNA, 362 bp, Gossypium hirsutum
  Clone ID: uC-gsflnu33B013f09b1
ttcttattggtcccaagttcggggtgctgagctaggccatatgctaagggccatgcgcaattctagccgaaagggagagccagaggtggcgccggaaatgttgactgatgccatggccaacatgagctgacaagtgatactgattaagctagtatatttgaccaaaggaaccagagactgaacaagattcaaggacataggtggcggcagctcatgacgacctgtcgggctctcaaatataagcgatctttataccttgacattgcatgcatggatttaccaggcatcgattgcgagacgtgcaaatgacataacagatggtatgtgctattgactatgatgatgagagagcatgaggaaac

SEQ ID NO: 54235 - DNA, 173 bp, Gossypium hirsutum
  Clone ID: uC-gsflnu33B013g08b1
tccacgcgtacggtcaccggttaattgtgaatttcttttgcaggaaaatgtcaatatactcaagaagccaaatgacttgagattcaactaatgctacaaatggattgttttaacagctactaagtttctttgattgcttgacaatagtttcgatttaaaggtcaccgactatc

SEQ ID NO: 54236 - DNA, 519 bp, Gossypium hirsutum
  Clone ID: uC-gsflnu33B013h04b1
tttcaagtttaatgcaccacgagtcccaccaaccgtaaagctgaattatagttcagtattgggtcagtgcttgagatttgtcaacagtgaggagataccagacgctgttcttcaagtgttggctcgatgcactgctttctatttagatcatcaactcaacatcaccagtctatcagagtttgggaatggcacgattaacaagttgaaatattgtataataagtgaatgcccacggcttggaactgttgtagaaagcgaggagggaactgaggctgtatttccatgcctggagcacttgagtattcattattgctggagattagcatgcatttggaggggtgttgtccccaaaggaagctttgcagctctaagaagtctgtccttgtgtacatgcccagagttgacatatgttttcaaaagctcaatgctgctgttcttttctaacttggaagagttgaaggttgatgactgtgaagcaattgaaaaaataatttctgatgatgagattagtgaagctcg

SEQ ID NO: 54237 - DNA, 380 bp, Gossypium hirsutum
  Clone ID: uC-gsflnu33B013h05b1
tgcttctcatcacctccctccccacctgttagaaaagagttgccactattgagcttgactcccactcccacaaggtgtgagaaagaagaggaggagcatgatgacggtgttgaagaccaatatcaggatctgtatatttgcaatgggatgagcaaagggaaagagggaggggggctggttttgagtagtggtgcagcggaggatgaggatgaagatgaaactgctacggttgcactgcatatagggttaccaagccctaccgcttcagagttggcttcagttttatcatcatcatcatcattctcggagatgagagacaaagatggggatgagtacccagtcaacactctcagcaagggacaatattggatccctacccc

SEQ ID NO: 54238 - DNA, 536 bp, Gossypium hirsutum
  Clone ID: uC-gsflnu33B015a08b1
aaaatattttcctttttcccaacactgaatgggcaaagctccaaatttccatggcaggtcttcactataatttcttccctactgatttctactatcctcgtccggcacaatctacgccgtctccggccgtcgattctactcctccggcagctctgactacgccgatcgaggagaaaaacatcgtcgacgatgataataagaagcctgtgatcgtggtttaccgtggcaataagacgagtgtttccattaggaaacaaggcgaacagcatggtaggagttatgtgcgtaatcgagttgagcaaattaagttatcgcgaaactagatttgttttccttcgttgattttttattgccgaagagaattcgaaccgtttttgaatgtttaatttagtctttgaggatctattttatgtaattaattcgattttgtgttgtttttaactatttttccagttatggtttaaattctcaacgaatgatgttggattctgagtttatgtgcatatgaatcgaattttcctttccttttcttttgg

SEQ ID NO: 54239 - DNA, 539 bp, Gossypium hirsutum
  Clone ID: uC-gsflnu33B015b09b1
tttttagcaatccatggagattggcaagatggggcaagaagggaggtgattggcatatttggtaaccgaaatccacaaccggaaggcattgcaaaactcaaaactatgaccatgatcattaatgaaactctaagattgtatggtccatcaaatggaatgttgagaagagttggaagagaagttcaaatggaaaaggtagtcctccctgctaatatagatattctaattgcaaatgttgcacttcaccatgaccctaaactgcggggagaagatgtgcatctttttaaaccagacagatttgcggaagggattgccaaagctaccaattacaatccggctgccttttttcccttcggattgcgacctcgaacttgtgttggtatgacctttgcaaccacagaaaccaagattgttctctccatgatcctacaacgctatgctattacactgtcccctgcctatgtccactcaccaatacctataatcagccttaaaccacaacatggaattcaagtaatactcatgtcactgcatagcga

SEQ ID NO: 54240 - DNA, 291 bp, Gossypium hirsutum
  Clone ID: uC-gsflnu33B015b12b1
ttcacgcgtgggcagacgcgtgcgcccacgcgtgctctgaaacccacaagtgtgttcatggctaacaagctgctacgcatgtaaaaaggacgacttcatgttaaataacattggtcgttaaattaacgtgtatgaatcaaatgtgcgtggactgtcacctttatatattagaggaccaacaccctgcttgttttgatggcaaagtatgggaccaactccaaaatgaggcactcaggtctaagttctcttcaatatatccaaaatggaatcataccaacataattctataaa

SEQ ID NO: 54241 - DNA, 542 bp, Gossypium hirsutum
  Clone ID: uC-gsflnu33B015c02b1
gtttaaattacctgcaaaaactatgggaatgggttgggttcccatcgttagagtcccaaactgagagcagccttaacatcgagcctccatgcaaatccgccaaagctcatcttccacacatcgcaaggaaccattttcgattgctttttctttccctttccatctccgtaccgtaaccctacccggcacgagaatgcaccctgtgggaatttaaacccttctttcaccaccaaccccaccgcggtttcagccccttctccgcccaccatgctcttgaacgcctcgttcacccacaaaacacggtgccaaccgtccgatatgaaccctggatacgtgtccttatccagattcctcattctatccacgtccgtacagctccccatgtctccttcatccatgcagctgtctgttatgctctccaccgtcacccatgactccacaacactcactttcctccccgtcgcctgatccgacaaccccatcaccgcagccgccactttttgatctgttgcaaccattttctgcaacttcaagcacagcag

SEQ ID NO: 54242 - DNA, 562 bp, Gossypium hirsutum
  Clone ID: uC-gsflnu33B015c10b1
gtccaatattcccacactagatgttgttaaagatataaacggagatgggagaatcacacaagtgaaaatcgatacaaagaggtccatacgctggtttcttgcaatcaatactgaggaaatagaagatttcacgtttaatgtgggtttggaggagttagttgcagcagatggtaagcgtagcatagacggatggcatactattcaagcttcaggagggaagaatgcaccaacaaagtttgaactcacactcttctggctgcaaaattcaacacgccgttcagacaagatggtgcaatcggagcagcgaccactcttgaggatcagaactgatcttcctggagtggtgacaccgaaggttgaaacagtccttgagaagcttccaccatggtattcattatttgggaagtccacatctcctcacactttatcatttttgagtagtcttcctattgatttctagataagatttggaactctttgttagcgtttttggtactggaaaaggttgtacattagtcccactaccaccgagctacacaaacaaaacaccctaacatttatt

SEQ ID NO: 54243 - DNA, 300 bp, Gossypium hirsutum
  Clone ID: uC-gsflnu33B015c11b1
tttactcacaaggttctagatccgggtcaggggcataagagaatccatactgctgtacacgtgcatactagtgcgtagatttcctagggagacgccgaaggatggtctactgtccgaactttcaccacgatctgcctggtctatcgtttgcgaaacaacactgattaaactggtggtagattgcctttaaaggagttgatggatggctcaacatacatggggaactcggcatttataaccgacacgaactatagaggatgattgtaacgcactgtgaagatgcgcattaaggttactatg

SEQ ID NO: 54244 - DNA, 533 bp, Gossypium hirsutum
  unsure (1)..(533): unsure at all n locations
  Clone ID: uC-gsflnu33B015d10b1
ttctaatgcagaaggggctgatggaggacgcagttgaatatttagagcgtgccatttcaaagctgtctcttgctggccatccaacagaggttgaaaatgttgatcttttaattctatcgtctcaatgggccggtgttgtctatatgaaacaggggaagaaggcagaagggcttgcacacctggaaacaattgcaagtttgaaagagccagaagatccaaagagcaaagctcattactttgatggattgttgttgcttgccagtgcattatttgactttgggcgcaaggctgaagctttaaagtttttgaagttggttgttgcttataatcctaagtataactatttactcgaagaattaaagaacgaagaagatgattttgcgagtaatcttgcaagcagtaggagacgaggttactaatttgcctgcataattatntccttgtttgagttatgaatgttaggcagctaggcaatagcagctagccttttagggactccataatntctgttttcaaataatctctaaaacttt

SEQ ID NO: 54245 - DNA, 527 bp, Gossypium hirsutum
  Clone ID: uC-gsflnu33B015f05b1
tcctacgcgtccgggccggtgcgggtgtgatgggggtgcaagctcatcaagaggaatttgtggggtctaatgatcatcaagccttggtcatcaaaggcaaacgtacgaagcgccaaaggccgtcgtccccgttcggtgtcacggtgacttgtaactcctcaagtgcttctattggtggtggaggagtggcggaggactacaactccatttcctctccgacgacctctggtgagattcatgagagcactgaggaggaagaagatatggccaattgcttaatcatgttggcccaaagtgatggtcccaggaagaggatggatgaagggaaattcaaggttggtagcctaaagttgtctgagattgctaccaccactaataaggctggcttttctgtttacgagtgtaaaacttgtaaccgatctttcccttcctttcaagcactgggaggccatagggcaagccacaagatgcccaaggccaccatggctgaagacaaaaaaccacttcgtttagcagttaaagatgat

SEQ ID NO: 54246 - DNA, 423 bp, Gossypium hirsutum
  Clone ID: uC-gsflnu33B015f06b1
aaggcgggtcccccggcgggtcccggcccggatttccgggtcggcccaagccgtccttcaaatgaaaaagttcgacacccgtgaatggagggcagagtacaccatgtgggatacaatgcccgtcgccggtgccttcaaaggctacgcctacagtttctggatcagacaccgttagaccctgcaagacattctttgtcgcctgctatcatatgtatctagaaaaccctaacgaccctagttcctccaccggttgggtggccgtgttcaccgagatcaggcacattgaacgtagtaccaccaagacccaagctgtgagatggcttgagcaatctacgtgagcgcccgaaggacatacctagcgtggtcgacaatcttttctgtgacctaggtagaggcgctctcacggcggctaccttacaccag

SEQ ID NO: 54247 - DNA, 192 bp, Gossypium hirsutum
  Clone ID: uC-gsflnu33B015f12b1
tttaaaagaaaaagtttgaaacccggaaatgggggacgaggaacaccattttgaatacaaggccgacgccggtgcctccaaagactacccctacagtttttgtgtttcaaactatagactcttccaagaaattcttactcacctggtaaaggatgtttttttggaatgtacaatcgaacttgagttttacat

SEQ ID NO: 54248 - DNA, 467 bp, Gossypium hirsutum
  Clone ID: uC-gsflnu33B015g02b1
ttttcatgtggataacatgcttgagtctgatgggctgctattccatgatgaacggcggaatgcaagagagcattcaaatgaccagcaaacgaatagcaatgccacaaagttaggtggcagccgatttgacagggcctctgcttctcatacatatgaaggcaatagcgaaaggaaccatcaccagccaactaggtggagataatgctatcaatgactaggtaactagcagatttaagcctctcatgaagcattttctttctttctttatttatctgtgtattagttccccagtgttttgattgtatatgctccatttaagcaaacaataatcagcatttatctatgccttctatacaatatgcatttgtaaataaaaaaaaaattggatgaactcataattgttataccatttgtaattgattgtcttcatttatttataagaaaaaaaaaaaggtttctggtttggt

SEQ ID NO: 54249 - DNA, 254 bp, Gossypium hirsutum
  Clone ID: uC-gsflnu33B015h03b1
tttttgcgtccgaagaggtcctaatactgattggggggttagtaactgggatggtgcgattcatcaaaattaatgagaggttagaggttgggaatgtatattcactcgatacattggttgttgcagtcgtagcggagaaaaggtgcataggtgcagtcagaatggacacggtgaatggattcctttcaatgagcgtatgctggatagcactgcaaatattgataatgggtgaaggaaatggatacgccctgggg

SEQ ID NO: 54250 - DNA, 116 bp, Gossypium hirsutum
  Clone ID: uC-gsflnu33B015h04b1
gttctttctcggaggaaagctgataatctccggatccttttaaactgatatgtgaaggaacatgtaatgaacagctaacagaagctatgtgttaattccctcaatcttgaactagg

SEQ ID NO: 54251 - DNA, 513 bp, Gossypium hirsutum
  Clone ID: uC-gsflnu33B015h09b1
gtatgaaccttgcaggtgctgccaagaaccgggttgaattcctcgctgctgtcgataggaaccgttggctctacgatggccctactctccatagagccatttacaggtacaatgcttactggcttcccttgctagccaaatgttatgaagaacccattttggaagggcctttggttgttcctcttgattgtgaatggatttggcattgccataggctaaacccagttcgatacaagtctgactgtgaagaactctatgggaagatccttgacaatactaatggtgtgtcttcccttcgaggcgcatgtaaacggcaaaccgaagaaatttggaacaggctttatccgaatgaagcttatgactttgatttcaccaaagccttgtctgaaaatgcctctgaaacactttctggacttgaaaaacacactgaatatgatctagtttcagctggtaaaaggcagagtcctttcttttatcaggtatccagagcgcatatgaataacaatatcttta

SEQ ID NO: 54252 - DNA, 366 bp, Gossypium hirsutum
  Clone ID: uC-gsflnu33B016a01b1
aggcaagatgcttgaagtggcgtgcaaaatgcttgtggccattggtcaagattctaattttagcacatgccagatataaaaatcacaatcatcatttccccatatcataaacacaagacttcagtgaattggaaggtgaagcatcatagtttaaaactcttcgaatatggtgtgatgcattgctctctacaataggattttaggtttttctttttaaagttgggatcatgcaggtgtacatggtaagatatggaaaacgggtaccaaaatatatatactattttccattcccacatgctgaaatataatgattcaccctggttagttgctgataccctctaaatgtacaagaattttttttttttt

SEQ ID NO: 54253 - DNA, 344 bp, Gossypium hirsutum
  Clone ID: uC-gsflnu33B016a02b1
cgtacgatcacacgtgcgtgaaaaaaggggtaaaatatcaaaatcgtaaggaagacccaaagagggtcctccgcatgtgaagggatagtgcttgaggatttattacctaccggacaactaagtagtgtaaagtgtgctcaatgcgttaggcaaattggtgtgagatctggggttcacccgacatgttaggttacatcgcaatcgggatgctttgtttctcaaccagtgaccgagggactggtgattctggttaagggatcttagttggacgagctaaaactggcacatgaggacacagtgcctggtcaaataattgggtggatccaacttcggtatagcgatct

SEQ ID NO: 54254 - DNA, 221 bp, Gossypium hirsutum
  Clone ID: uC-gsflnu33B016a05b1
ttgtatgaccctagcatgctgctttgtcttagggggcctaaggcaccccttaataccgagaacgggtagcctggattattaatggatttactgtcgctgtctaccaatccgcgggaccactatcctatgctacatgcttggggtagcaattacattaatgaagaacgcagatgagcttgaaactaaatcgactttgtgaaaaaaaataagaggagtaggat

SEQ ID NO: 54255 - DNA, 510 bp, Gossypium hirsutum
  Clone ID: uC-gsflnu33B016a08b1
tttgggtatgctcagaatgctaagcctagagaagcattggagtttttcgagaggatgctaaatgaaggggttgaaacagatgaggttactttggttggggttatttctgcttgtgcacaactaggtgctgcaaagtatgcgaactggattcgggatattgttgagaatttggggtttagtcctactcgttgtgttgtagtgggatcggctttgattgatatgtactcgaagtgtggtagtgttgaggacgcatataaggcttttaaggtaatggaagaaaagaatgtgttttcgtacagtttgatgattgcagggtttgctatgcacggttatgcttatgcggcattggaattgttccatgaaatggtgaaaattgggatcaaaccaaataaagttacgtttattggagtgcttacagcttgtagccattcaagaatggtagaacaaggtcgtcaaatatttgaatcttatggggagaaattcgggatttctccaggtgttgatcattat

SEQ ID NO: 54256 - DNA, 454 bp, Gossypium hirsutum
  Clone ID: uC-gsflnu33B016a09b1
cccggggggcccctgtgcggaattcccggcgacgacaccacgcgcgtgtgttgagtgcgagaagcatgagaaaggcgggggtactgtaattggagtattggacacatactatgatgctacagaaaaagctgaggctcctgtaataacataacattactaagccttcacgatgctattgacagtggaaaacagtgacttacacaccagggccgactttagagcatgcttgcccatagtaccggtcctcaacaatgtgaacgccgtcatgaatgtgatagccaatttgcacaatgagaatcatatgaatctctttgatgtcatcaattctagcttgggaattgcttctgaagcttgcaattagatcattattggctacattattttttgatcgtacattgttagctgtcttgtctttatgcggaagctctcttttttagtgttattatatgatgaa

SEQ ID NO: 54257 - DNA, 470 bp, Gossypium hirsutum
  Clone ID: uC-gsflnu33B016b08b1
tttttgggaaagcttttttttttttctctttgggcaacttttagatttggaaatggtataatctcatcaagccttctatatccaaaatgcatttacaaaaaatccagctaaaaatcaaagaaaaaaataatctacgaagaagaagacgaagaagaagaatgaaagtagagtagctacttagagcttcaaagacaagtcaagcttcaactcatcttttttattgttgaaatggttaactgtatcccaccaatgtccattcattccctccgtggctggaccaaacttccctacactaccttggaatttagcagtaccatttatcccctgcagatcggaaacatgcccgactgcccttgtgtgatcaacagctcgtctagaccatacattgtgcccataaacatgcgccgatggaactaacgatggctcgtggatcatggagtgctcgcgaataccatgtgccttattgaaag

SEQ ID NO: 54258 - DNA, 463 bp, Gossypium hirsutum
  Clone ID: uC-gsflnu33B016b12b1
ttcacgcgtacgtgacagcagtctagccggggtaactctcgacgacgttttgggacacgctaaacggtctgaaccgccgcccagtcataaccatacgcctccggagactgtacgagatgatccagctaacaaggacaagaagagttggaaattgtttcgtgagaagcttaagctcaggaaaaccggttcgggttggacctcctcgatttcgatcccggcatctgatgttaacattcaagctaagaaaccccaaaacccgcggagtgtttgctttgctgaaaccaaccgcattgccgaaataggtgatcgtgctccggtcaggaacctcagggcggagcaattgtgtcggaggagttccgtacggtacgcacaagatcaccaagatcccgtcgatactcgtatgccctgcgacggtccaccatcaagaagctgtaagccacaaaatattcatgacgacgacgat

SEQ ID NO: 54259 - DNA, 420 bp, Gossypium hirsutum
  Clone ID: uC-gsflnu33B016c04b1
ttctctcgtccgttttttgtttgtaacgggccgggcaaatttggcccactacaagtaaaattcaaaataattaagaacctcaaaatgaagttaattttttgaaaaaaaaaaaaaaaaaaaaaaaaaaaaaaaaaaaaaaaaaaaaaaaaaaaaaaaaaaaaaaaaaaaaaataaaaaaaaaaaaaaaaaaaaaaaaaaaaaaaaaaaaaaaaaaaaaaaaaaaaaaaggggggggcgtttttaagggactaaaattatacgccgcgggcaaataaaataaaaagctttatttaaggggaccaaaaataaaataatctgccgcttgttaaacaacgatataaatgggaaaaccccgggggtaccccaattaaatgccttaaaaaaaaatgcccttttaccgaaggggttaaaaagaaaaag

SEQ ID NO: 54260 - DNA, 316 bp, Gossypium hirsutum
  Clone ID: uC-gsflnu33B016c05b1
gttcaagtcactttctaggtggcttacaaaatgatttatttatcctctgttttcatcaagttgtttattgttgatgaaaccaggaaaaaaccatcagtcttagaaatgtaaaaagttattgttgttgattcaatatataggctacttaattcttcaaaaaaaaaaaaaaaaaaaaaaaaaaaaaaaaaaggaagacttaaaaaaaggaaccaagttacatccgcatacatgcaaaaaaaaacctttcaaatagggcaacctaaattaaattcactgtcaagggatttacagggcgtggactggaaaaaccttagag

SEQ ID NO: 54261 - DNA, 526 bp, Gossypium hirsutum
  unsure (1)..(526): unsure at all n locations
  Clone ID: uC-gsflnu33B016c06b1
ttttgacttctttttattctaaaatgcaaaagggtgaaggtaattgcaaggaaaaaaagaaataaaaaaaataagggaacaaattgaaaaaaacccgaaaaatcacccttcaagaaattcgtttcgaaaatttttgtactcttctctgcgtatagtgtgcttgcgtaagtatctgttttgtgtgcgtaaaaaattatggattacatcactggcttttatatccatatttccaaaataaataaaatctaaaaaatcctattttcctactgtcatttgctgtgaaatctgttattgactccttctaatgtcttcttttgcagtctcagttgtacggagaagatgatccggggatctcgcgtggaaaaccatccctttggtattcttccagtatattctaggagctactgctgaaattctccttcttttgggttcttttgggtttaggctaggatatggatttattagagttgggttttaggacatgggttattttgtattttgaacatngtaatggacctttttagtc

SEQ ID NO: 54262 - DNA, 369 bp, Gossypium hirsutum
  Clone ID: uC-gsflnu33B016c12b1
tgtacttttacttcacgggtcccattgttaggcagttttcgagctcacaatgctgttagaaaatcaatggtagggtgagataaatattaattatggggagctaacctgtgctcataaaggcagcacccttgtttgagcctagtgagttgacctcatggtctttttaccgagctggaatcgctgcggtcggtgctactttacttatcttgtctatctcgggattgactgtgatgggagttcttatggacaaaaccaagtgtacaactggtgcgattcaaggcattgcttgggcttttgaagccctgatctttcctcttgtatactgcactgatggtatctcatgtggtcatatgaatccatacgtgacat

SEQ ID NO: 54263 - DNA, 225 bp, Gossypium hirsutum
  Clone ID: uC-gsflnu33B016d12b1
cggacgcgtgggtttatgttttgtatgagctcctagagcatgcatatgtgatatcattgctgtcttggttgtatgaaaacagtttattggtacccatacaattttgcttaagcgactccagctgcgtgtattttgtgttcgttagtttcagtcaatacattctacctcatcaggacttagggtgggtttggatgggagattggtgaggtgcggtgcgtttagctt

SEQ ID NO: 54264 - DNA, 555 bp, Gossypium hirsutum
  Clone ID: uC-gsflnu33B016e04b1
gttgttggttacggtgggttaattaccttcaccctggtctcaaaagggaaaagatgtctccccaagaacagcgccttgtccttgaacttcatgccaaatggggaaacaggtggtcaagaattgctcggaaattaccagggcgtactgacaacgagatcaagaactactggaggactcatatgagaaaaaaagctcaagaaaagaaaaaggctatgccaaagtcattgtcaccatcatcatcatcatcatccatcactctttcttcatcatcatctactaccactaccaccactactactaccaccgtggattccttgcccttctcaggcactgggaaggtcagtttttacgacacaggaggaccaaaaatggctgctttgggagacaaaagcagtacagatttcaaagatgaaaaggggtactattccatggatgacatatggaaggatattgacatgtctgaagaaaacatgataaagcctttgtctcataactacagtgaagaaggttgcaacattttctgcccttcaatggctttctcttcattggattact

SEQ ID NO: 54265 - DNA, 413 bp, Gossypium hirsutum
  Clone ID: uC-gsflnu33B016f11b1
tttttgagaagttcttggtatcgaaattgaacggggataattcacttatgagctgtgcctttgctcaccagcacaacgccaaactcgtcctcgatgcggctttgtgtttgataacagacaacatggataagctaactaaaagggaagaatatattgaacttgtggaaaaggatcctcggcttgtagtggaaatctatgaagcttacctctctaaacaggttaatacagctgctcataaagattgttcaatgaaatcgtagtcatttctgatcaaatgatattgttgttcattgatattggatgaaattttagtatatgtatgtagaagaagagtttgaatgtttgatggtattgggttggggaaatatgtgatacgaagttacaatgaattccataaccatttagtttttttt

SEQ ID NO: 54266 - DNA, 256 bp, Gossypium hirsutum
  Clone ID: uC-gsflnu33B016g02b1
tttggaaagggtctgcctgcaatatctaaggggtttttctaaacaaatcggggtgtctatgtgaatgacatccctgattttattagttgacgggtgtcagtgattcccacagatccaaaataaagttttagttatgcctattagtattctttatctcgtaatagtatatcgctttactaaatggcatattacttgacaagtaaaaagaatgaaggactagtgcctttcgggttaattgcatataaagggcaggaaa

SEQ ID NO: 54267 - DNA, 478 bp, Gossypium hirsutum
  Clone ID: uC-gsflnu33B016g06b1
ttttaacctaagaaccctaaatcttatttcctgggggtctaagaagacagacggtgacaattcttcggttttctttccccgagagaaaatatatcgaaaacgaaattcaaaatcaaattatctgatctccaaagcgctgcgtcatgtttcctaatccccaacgcttgacggatcgaagttaaccgatcaggccggtttacttatttgtttatcttacgactgttctgccagttgtgaagggaaggggggttgataaggtgatcggacggtggaagagaatagaggatgccatcacagggagacctagaacgtcagatcgagcagctgatggagtgtaagccgctgtctgaggcggaagtgaaggcgttgtgctagcaggcacgaacagtgctggtggaagaatggaacgtgcagacggtgaagtgtactgttacagattgtggagatattcacggacaaatttatgatctaatagagc

SEQ ID NO: 54268 - DNA, 473 bp, Gossypium hirsutum
  unsure (1)..(473): unsure at all n locations
  Clone ID: uC-gsflnu33B016g08b1
ttcacgcgtccgcacaaatgttgcctatgaagggctgcccttggaagaggatggccaactgcaggtgcaaagtggcggtgctgggaataacatgtttgctgattcgggagctggtccagggggtttgcctttcttaaacttgccacttaatatgcagcctaatgtccagttaccgttttgagaaatttgggtcaaaatcttgatgaggaaattcaagctctgttgagaaacatgattcttgcatataaaggtcaggaaaattcatggaatcgtcatgcttcttcttcctcctcctctgatattaatgttaatttaggtttttcctcctccttttaatctttgttttagtagttattatcttcttcttaattttcggatgtatgggatctaagatttctggaaatagttcttcattgttcatggtggtacaagtaatttctttntctatttaatactttaatgttgtgtaaaaa

SEQ ID NO: 54269 - DNA, 480 bp, Gossypium hirsutum
  Clone ID: uC-gsflnu33B016h05b1
tctcacgcgtccgcccacgcgtccgatctcgaggggcaacacaaaatacacaggtgaatttcgaattctcaaaatcaaaattatttaccatttccgatcccatcatttcccttcctttccacttctcagttcggtctgaatcaaatcccaaacgaagatggaacttgacatggtgactatggcggcatcgatcggggtatcggtgccagtgattcggttccttttatgcttcgtgacgactataccggtgagttttctatggcgacttgttccgggtccactagctaaacatctttactcagcctttacagggagcgccgctttcctatctgtcatttggattttcttcaaatctgcactttttggtgcccatgttgatggattatgctgcactggctctttatcggcccaagtgtgggattatcacttatttcttgggtttcggttgtttgattggctgccatgtatattacatgagcg

SEQ ID NO: 54270 - DNA, 430 bp, Gossypium hirsutum
  Clone ID: uC-gsflnu33B016h10b1
gtgtaataccatgcacatgatgtctaggatgggggggattttcaggtcggaccgtggcaacgattatgatcctaatgcaatccttggtatacaaaatatcaattttcgcgacgtcagtgccgataatgtaaccatggcagctaggactggacgggaattccagtccatccattttctgggattggcatatacaatacaaccatcggattaacacaaaagccaaagaacatttaatggaattgcactgagattgctggtgtatcaagtaaatgtacacctaagccttgcaatgctgcatgaccgatcaagggccagataatgcctgcaattaaccagaggacagcttcacaagggcacatagagtagtctatatgtgtttatacagaaaatttgtgattagatacacgcatgatattaatttctattatgt

SEQ ID NO: 54271 - DNA, 413 bp, Gossypium hirsutum
  Clone ID: uC-gsflnu33B018a03b1
tcacgcgtccgttctacgatcaaaagccaaaaatgatgcatatgacgttttactggagccgacaggtgactctgttgttcacctactggcgaaccgattcatggccgagttacgcgttgactctcctagcatgttttttggcttctgctttttacccgtacttggagtacgtaaggtatcgcgtcaggcgtggcgggaagccgacggactggacgactgaagagcctttcttgttgcggccgaggggagccgggatggttgtgaagatcggttcacttgggttacttgtcatcttactcggatgtattgtatattttcaggtacggatttattttgagttcacttttttatgacaattatgactctgtcactaattatcgttttcgctttgaatatggtttaaacacctcttt

SEQ ID NO: 54272 - DNA, 505 bp, Gossypium hirsutum
  Clone ID: uC-gsflnu33B018b02b1
tttcacgccaccaactgaatccacacttgtaattactgggcaacccggatacatggagatctatctggcagatgtcaccatatactgaccgattactaggcgaagtttgaacacatgttcatccattggacatcgatctaattgacagaatgaaaccatttgatcctaccagaaggataactggaaagtgctacattaacaattaggctgttattaatgactaaatggcatttattcaatacaattatctgacctatggtatagaagaaaatgaactttggaagataatcactatgaaaccgctagctattgtgtacgatgtgagcgtattgccgcgacgaattacacaattcttatacttggtttatacacagatgaagaagcattggcacattcttacctcgaaagattacacgacatatcttatgaaccggtctgccccgaaccattttctttcgattttgagcagcaaccattgggagaagaacagatgaaggacatgatt

SEQ ID NO: 54273 - DNA, 380 bp, Gossypium hirsutum
  Clone ID: uC-gsflnu33B018b04b1
tctaattgtaaacaaggagtgggaatattcttataagaagggatggaaatgcacattcgaacgtggaattgtgcatgcatgttttaacttcaagcgatatcgctaccgtaggtaatatgtggttgagtgaacaacttcaactttgcaagcttgagctgcctgccatgaaactatactccgataaccgttaaggtaacttcagggctttcttgtattacttaaaaaaaaaaaagaagaagaaaactgtgaagtaggaacttttctcatattttaacctgtagtgttttcctcaatgctttcaatttatgaccaatatatttgccttggtctctggcactatacttttcacactaaaatgttgcacttggtacaatgaagaa

SEQ ID NO: 54274 - DNA, 331 bp, Gossypium hirsutum
  Clone ID: uC-gsflnu33B018b05b1
tgcttttggtcgcgtacagtctcagtcctaatcacaccgctgcttcctagtctaaactaatctcaggatgggtgaaatgtaatgttgatactgcaacgtttgaggctaatcaggccaccaatttttgctactatattacgtgatgatcgtggcaattttatacgtgctttatcaggtcatttactcgctatattggaaccacatattgttgattcgagagacactctcttagtttatggacgatggcatcaataatgttatggtagagacatcattaatgctcttgcttcttcaaaaaaaaaaaaaaataaaaataaaaataaaaaaataa

SEQ ID NO: 54275 - DNA, 267 bp, Gossypium hirsutum
  Clone ID: uC-gsflnu33B018b08b1
tgcagtggcagcagcagcagcagctgggcaaagctatcaagcaaagaagaagaagaggaaaagatggtttcaggctcagggatatgcgcgaagagggtggtggtggatgctaggcatcacatgctaggaaggctggcatcgatattggccaaggagttgatgaatgggcagaaagtagtggtggtgagatgtcccaattcaatagtttattgtagatttttgaggcagaggtctgattgcttcacactggtttatgcttctttggaa

SEQ ID NO: 54276 - DNA, 519 bp, Gossypium hirsutum
  Clone ID: uC-gsflnu33B018c02b1
ttcacgcgtccgcgtcaagtgccggctttcagattttttacacgatccacttcctcaacaactcaacaaattgtacccttttcctctcgatgatgctgcggagttgcccatggggatccaattcaatactttcctttgtggtggaatcgggattggtgtgtgtgtttcacataaaatcggcgatgctttatccttttttacgtttttgaatacgtgggcagccattgctcgtggggatacgaagagcgtggtctggcctgagttggtatcggccaagctttttcccccgcggaacgtatcagtgcctgaaccagtaatggaaaaaagtgaaaagaatatagcgacgaagaggttggtgtttagtgcttctaaaatagaggaaatcagagccaaatacgctgtcgatcatgaaatccgcccttcacgtattgaggccttgtctgctttcatatggagccgtttcattgcttccactaaggaaaaaccaagccctaatgcattctacgtgattttcataca

SEQ ID NO: 54277 - DNA, 278 bp, Gossypium hirsutum
  Clone ID: uC-gsflnu33B018c06b1
tccacgcgtccgcaacagagaagaagaagaaagccaacccagcaagtcattcaaattcaaccctccccaaactcctaacttatatccctttcccttcccttcacttataactttccctattttgtaacatttcacatgcaatccattcatttttttttcatcaatcatcaatcatttctgcgattaaaaatcatatcttgctattcaaagtcttcatcttttttttcttttgatatataaaaaagaaagctctctttgtacttttttttgtgaagatc

SEQ ID NO: 54278 - DNA, 417 bp, Gossypium hirsutum
  Clone ID: uC-gsflnu33B018c11b1
ttaatcttccattctttgcatctaggatcaagctcggaaggaatggggttgaggcacttattccatctgacctcatagggttatccgagtacgaagataagacattggaagctcttaagccagaattaaaggccagcatcaagaagggaattgcattcgtgcagaagcaaccagttacagcttaaaaacccaagttttcgacataccaaaactaagcctcctctcgagagagagccaggcctgcatcagtagtttcagttttgcagaatcgaagttttttcggtttctttttccaattacatcacagaaatacaaaatttagaagggcgtatcgatgttgtaaacgacaaaaacataaacatttctgaatcagaacttttgaaatctaaaataaaggctacatttcaactttctttt

SEQ ID NO: 54279 - DNA, 460 bp, Gossypium hirsutum
  Clone ID: uC-gsflnu33B018d04b1
tccacgcgtccggcgtcatcttcttcagctgccaacattgccaccgttgccatcgattccaaatctcccacagccaacgatgcccaccctgccgcaaccatctatacccaaccccgtcgctcttcctccactgcctaccattcctaccctgccacccttgcccagcttgccttcaatccccactttgccaactaccattccatccttctccccaccacctgctagaactaccccttgaagttttccacttccaccaaagtgtttggactgtgcacctttgctctaccgtgcctcttcgctttttgcatattgggcatatattgtgctcctcttttcttttctttttttcattttttccaccacacttgtttgctgcattttcctttttatagagtttcctatatggggtttattgtacgaccagcaatcagtttatgttaatgtattaaatgtaattctt

SEQ ID NO: 54280 - DNA, 446 bp, Gossypium hirsutum
  Clone ID: uC-gsflnu33B018d10b1
tcccacgcgtccgtgagaaggttgagaatgaacctgaaatgattgaagattggccaccagtgcctggatcaaaaagaaggcttgttttgacaacacagcttttgcagcaactaatttgtgctcctccaagagtagttctttctgcagatgccagcaaaaactatgagactctggcctattttgttgccagatcagtcttaggagatgcatgcagcacagcatatatacctgaaagtgacacagctgtacctcctcacagtggaagcatcctccctgaaaagcttagggagcagcgaaaccaatccatcttaaaggctgcagaagagtttatcgtcagggcaaagatgttggaaaatggtttacaaagtctggtcaacagagcctcaatcttggacttaagactggaatgtcaggatcaagagaaggtttcagtcattactcgtttt

SEQ ID NO: 54281 - DNA, 294 bp, Gossypium hirsutum
  Clone ID: uC-gsflnu33B018e04b1
cttcgttagacgcagctgaggtgtttgaggacattggtcctaagtaatttgagattttattttcggactttaattgcaattatagattacacgctttttattcttttcaagaactttaatagctttgcgtcttggaatttgggtgttttttttttttatatatatctggatacgagaaacacaccatggctgctattctaacgctgtgatatgagtctctgcttgtactacaagaagacaaaaccaaaccagtatcctagcacttcatttatccaaattgccggatttcacacc

SEQ ID NO: 54282 - DNA, 284 bp, Gossypium hirsutum
  Clone ID: uC-gsflnu33B018h12b1
tccacgcgtccggccgttgattagtgaagaaaatcttgtaaccatgaaaaatatattataagaatggttaaaattactatggaaaaaaaaaaaaaaaaaaaaaaaaaaaaaaaaaaaaaaaaaaaaaaaaagggcggccaaaattaaaggaaccaaaatatacatcacttaaaatgaaaagaaaaagatctattatagtgtaatcaaaaaacaatttaatggccgtcattttacaaattttagactgggaaaaacttggaaaaacccaaattaaatgacttgta

SEQ ID NO: 54283 - DNA, 503 bp, Gossypium hirsutum
  Clone ID: uC-gsflnu33B019a01b1
gttcctgctcgttcaccaaaaatcaatgatttaagttgggcttttacaccatcatcaccagctggaccatttcgagatgaaataactcccacacctactccaactcccacatccacttccacacctactccggatcctgctgttacaccaactcttactcccactccaacgccaacgccaacgccaacttccacatccacacctactccaacgccaactcctacacccacacccactccaacgccttcatcatcatccaactcttcatccaactcctcctcctcctcaacaggtggcactcctactggtgttaatactgcttcctccttctttttctccttctccactttctctgcagctggcgtggtgactatgttgctggtggtattggcttttgtcgctcctcaataaattgtgtgtgtgtgttcttttccaacttgtcaaactcaatcatgtattgacttgatccctactggctttcggtcggttggattggaaacatg

SEQ ID NO: 54284 - DNA, 554 bp, Gossypium hirsutum
  unsure (1)..(554): unsure at all n locations
  Clone ID: uC-gsflnu33B019a02b1
ctacgcgtccgcggacgcgtgggtgcaggtagcaccacattctctcgtcatggcagtggatagtaagtttcaatctatggatattgatgtaaaaataaagaagttcacatggaggattcagaatttctccagtcttgaagttaaaaagctctactctgaagtttttactgttgatggctacaaatggcgaattcttatcttccccaaggggaaccatgtggatcatttgtcaatttatttagatgttgcagattcagctactttgccttacggatggagtaaatatgcccaagtcggattcggagtcatcgatcaatttgatcgtgaaacttccagtacaagagtcactcagcattgtttcaacgcgagggaggctgattggggcttcactacattcttatgtcttactgaattacacaaccctaaaagaggctatctccttaatgatgaatgcttggttgagtatacgtttgtactgataagactctagatnttatttcccgtgatttatagtcgaaactgaatgggatgacctaatgccaaggaagctgatt

SEQ ID NO: 54285 - DNA, 331 bp, Gossypium hirsutum
  Clone ID: uC-gsflnu33B019a03b1
gtgggttgatgatgatgatgaattgtagtcatatataacatgtactcgcatgtcttggttctggctttgtttccactttgtatgatataattggtatataaagctcttgttttgtgttgcgtcaaaaaaaaaaaaaaaaaaaaaaaaaaaaaaaaaaaaaaaaaaaaaaaaaaaaaaaaaaaaaaaaaaaaaaaaaaaaaaaaaaaaccaaaagaccaaacataaaacatattccccaaatctacatctaaaacgggcggccgtgtaaaataccaatggatatcgcaaaccaactttcagaactggatatccttctatgatgctccccaaa

SEQ ID NO: 54286 - DNA, 499 bp, Gossypium hirsutum
  Clone ID: uC-gsflnu33B019a05b1
ttttcaccagaccaccagggttagtgagagtacaaagaggtatcagctacaacatctttgtcgacaataaagcatgccgagagttcttgaactccaagttcaatgcaacagcaatcgacatggagacagctgcgatagcccttgtttgccaccaacaaaacatgccttttattgcatttaggtccctgtctgatttagctggtgggggttctgccttgtctaatgaagctgcttcatttgccactttggctgctcaaaatgctgttgatgttctacttaggttcatttccctattatcttcataaaacatataaaaacaagtttctttcaaggcataatctctcttggaatttaaaaattataaaatttgattggtaattgctagtttattgatacgataatggaaaatccaaatttgataggaatattgggttatattggttgtctttgatcacgatgaatatttggtggtatagaatgcattttatagccttctttc

SEQ ID NO: 54287 - DNA, 362 bp, Gossypium hirsutum
  Clone ID: uC-gsflnu33B019a07b1
gtaaggcggccaggcacaccgccgcccacgggcgcgcactatggaggtgatcgcgtcagttactccacaaaaaaagtgtggatcaggaggacgtaccgtgactacaagcagctgtcacaacaactgagcacacgactggaacctaagagaaggatatgcgcaggagacaaccagcaatgataccaacgtgttacatgtagctaacggaaaaaagaccgaaggaggaccagagaggatgagtactcatggaagacatgctagcaggaggacaagatacggcggtagtgaacgatgcaagggtagaaaaggtagacgacagcaatggtttatgagaaagagaacggagcaaatataacaggact

SEQ ID NO: 54288 - DNA, 355 bp, Gossypium hirsutum
  Clone ID: uC-gsflnu33B019b04b1
tttcggcgacgctcggtcccattcattatcccatgaatctttgcctgatactttgggggcttggttagggactgcatatgattctgcgagagatacgacgaggacttctgctgagaatgatggatccattgagggatccctagtgggtgactcagcagtcgactattcagtcttctaagatgtgtgcagagaggagggcactgaggaagtggctgcagcaattgatatcaacagctgtatgactagagagacgtctaatgagccgtacaatggacagaacgtggaagagagcgtgggaaagggcacttgattgggcttttcattaccctatgcactgccatgtacgctgcaaagg

SEQ ID NO: 54289 - DNA, 445 bp, Gossypium hirsutum
  Clone ID: uC-gsflnu33B019b10b1
tctatatttggtggttcaattgcagggttgcactctccttctcagctgtttctcctggatccttcggaggagaaaccatcatggaggacactgaatgttcctgggcaaccaccaaaatttgcttggggacatagtacatgtgtggttggagggaccagggtgttggtgttgggcggacacacgggggaggagtggatactcaatgagttgcatgagttgtgtttagcaagcaggcaggactcggactcaagctgaggtaatttctcccatactattgaatcatatttttgacatgtttcgcctgatgcattgcgttttagttcatattgcataaatttcatttggtggcgccagttctggttgaacaatgtaaaacataaatcgagtgttgagtgattcatcattacttgatttatgtcatttacaaatcaaaatgcccagtcat

SEQ ID NO: 54290 - DNA, 175 bp, Gossypium hirsutum
  Clone ID: uC-gsflnu33B019c01b1
ctacgcgtccgcccacgcgtccgcttaaactcaatttttatggtgactatggctgtgcttactgttttcccattagaacctagcgttagaagagcacattggatgcttctttaacttgttgagacatgaaagattcaaaacctagttatctggaatgttccgagttttctgattt

SEQ ID NO: 54291 - DNA, 412 bp, Gossypium hirsutum
  unsure (1)..(412): unsure at all n locations
  Clone ID: uC-gsflnu33B019c04b1
ngtcacgcgtccgattttatctaatatatattgtccaaaatgaaagcaatattcctcatattatgcattctcttggcttccattctcgcgtttcccacttccacaatggctcgagaactggctgagaaggaggcaatcccatctccaactcactgtgcactagatcctaatcggagctgtattccaaagagtactccagctcctaagtgcccaacttacagtcgaaactgccattgatattatgttctggaatattatgtttaataaatttgccaacttttgtgttttattggtaaaggaaattagaatctaaagtttcatgtatggtttgtgtgtttgattgatgtgattgtgatgttatttctactgcttgagatatgaaaataataaagaaaagcttgcatattaaaaa

SEQ ID NO: 54292 - DNA, 381 bp, Gossypium hirsutum
  Clone ID: uC-gsflnu33B019e03b1
gtcacgcgtccgaccacgcgtccgctctatccgtactcataactgtcactgccgccccactctgaacagaaccccgcattgctatgcatgaaagaagacagtgatgataccaaactaagcctaaaccaacatgcagctggtggccgacagacgcacacaaccacagaggaagatgccccacacgtggaccaccacgtctacatgtagcagccgactaaggacgacctgagctagatgcctccgttgaactttgctatagctgacaatggcatgttgacgtctggctcccctgaccctgccaacttctatgatcttgaaacgcttaagctgacctccatgatgtatctgcggccctgaaccatacccagaagccagacactg

SEQ ID NO: 54293 - DNA, 514 bp, Gossypium hirsutum
  unsure (1)..(514): unsure at all n locations
  Clone ID: uC-gsflnu33B019e06b1
gtagttgcaagcaaaaattaaagagctgaaggaagagaagaacgagcttcgcgacgagaagcagaggctgaaagcagacaaggagcaattggagcagcaagtcaaagccatgagtgcacagccaggcttcttgacgcaccccccttcaatatctgatgcattagctgctcaaaggcaagctgctggaaacaagtagatgcctgatatcggatttccaagtctcgccatgcggcagttcatgacacctgctgcagtcgatacatcacaggatcacgttcttcgccctccagtcgcataatatgaagcttgttgattgatgatttgattcttgtcaccagtctctttatgattgctgcttgttttacttattgctgtcatgatctttggtatattgatataatgttatgtgtgaatgtgagattgtcgagtagccgcatattctatcacgaaaaccggaacttntgatagtatcccttactaagatgcaaattcattaaaccatatttcatgacct

SEQ ID NO: 54294 - DNA, 423 bp, Gossypium hirsutum
  Clone ID: uC-gsflnu33B019f02b1
gtacgcgtacggcgaatcacgaacggtatctggtgggctgatctaatgagaacgcatgaggtgagggtgggaagagagaatcaaaagacgggctctgttatttaataacgctcggagaagaaggaattttatggggggttaaagctgcgctgtcgagagagatggtgcagattcaagaccagtacctgcgagctctcctccagccaaatcgccgggcggtggtgcatcgacgaccacaccatcgagctcgggctttccaccggatattgttgctgtaccaactactgatgaggatccagtgccagctccaagccagagcaagagctggagcaacaaaggcgagacacaccatgctcgggctgctgcacatgatatgcttggaccttgcggtacaccaaaagaagctcctggacctagccttta

SEQ ID NO: 54295 - DNA, 243 bp, Gossypium hirsutum
  Clone ID: uC-gsflnu33B019f03b1
gtttttagtagtagggaggtctcaagggcaaccctaaagcttgatgatcctcaaactggggactctgaagagctgcgaggatctactgagcatacacgtactcagagcaacttggactggctcatgacttcttatggacatagcatgaaagcacaacaggatccatatggacatgccatcatgctccacaggtactataagaggatgagggcttaatatggcccctatcatgatgagagtgct

SEQ ID NO: 54296 - DNA, 363 bp, Gossypium hirsutum
  Clone ID: uC-gsflnu33B019f07b1
tcagccctaatcgggcggtaaattccgtccaaggctatatacggtcgagagaccgatagctaacaagtaccgagagggaaagatgaaaaggatctacgggaaaagagagtatggatgctgccgagttgttacatgaaggtgaagagggcaatttttggaggggaggatcggattcagatgcgaaaaagaggaagaaaaaggagaagaagctcaaggagaaacattatggtggtgctgatgagaaaggaactgttgaaaaggtggggaagtgtgaggaagtcaatgagatgtgggaatgggttaatcctgagaatgatcaagacggtgctaggactatggatgatgaggatttgatagatgaca

SEQ ID NO: 54297 - DNA, 380 bp, Gossypium hirsutum
  Clone ID: uC-gsflnu33B019f12b1
gtcattaccgcgtcgactctttcttaggttcattgcctttaaataactgaaacgtaccttagttgggaattaaagtaaactatggtgctataaaatatcaattactgaagcatgagtcgtatacgtttacatgcaggttcttgagggtcaaatgtattatagcggatatggggttcccggggatgcccaaaagggaagaatggggatgacatgtacaggaaccgatgttaccttctgtttggaaagacagcgataagctttcatggtgtaacgcaagtgaattagattgggctgaaattaacggcgattctagagggaaacatactgggtctctgaatttagaacatttagaatacatccacatggtggagatgcctgat

SEQ ID NO: 54298 - DNA, 360 bp, Gossypium hirsutum
  Clone ID: uC-gsflnu33B019g08b1
ctcacgcgtccgcccacgcgtccgaaaaaaaaaaaaaatttaaaaaaaataaaaaaaaaaaaaaaaaaaaaaaaaaaaaaaaaaaaggtcggttttttaggaggaataaaactttcgttcgcgggggggggaggttttgaggtattaaagttgggcacccttaatcagactaaactgtcaattgggggggggggtttttaggggaaaaaacttggcgccccctgaccgagttggcttgtggtttattttggggggagccagatgattttcgggggggggggtttgcccctttggggcttggaaaaagttggggaaccccgatttatgttgtttcacacaattttttttttaattaagggg

SEQ ID NO: 54299 - DNA, 420 bp, Gossypium hirsutum
  Clone ID: uC-gsflnu33B019h11b1
ttacctgaaccgcacgctcataaagattttggtatgtttggggatacgagtgctgtataagaagctacgtcatcacagagacgctcggaaccatagccgcaaatactgcttgatagaggcattcaacggctgaactgcctataacgaaggatggtgttgatctatggcttacagatgggatgagtgctgagcgttgcggaacatgagcttacatacacatagccgccgtatttgaatgtggtggctctgtgggatgagagctagatttgatcgtcatcagatgccacatgagatcctagatgtgtccgcagaccttgcagcttgacgtgtggaaccacatgaagacacacacgctaatgtgacatgtgactatcacgaactgtggtgagatgacaaacatacacaggctcttagtacata

SEQ ID NO: 54300 - DNA, 504 bp, Gossypium hirsutum
  Clone ID: uC-gsflnu33B022a12b1
acatcgaagggtaggcgggctcgatcagacatgatggacaaacgtgaacgaggcgtccagcaggtcacactgcttaacaagaatcgtcatttctcgacgtggggatactccggaagctaaaccgaaaataagcaaattatggatggttgatcttggagggagtgaacggttactcaaaaccggagcaactggacaaacccttgatgaaggaagggctataaatctttccctttctgctttaggcgatgttattgctgctctaagaaggaaaaagggccatgtgccatacagaaatagcaagttaactcaaatcctcaaagattccttaggtgttcggttcgaaagttttgatgctcgttcacataagcccgtgtcaggaaagatctcgaggaaaccatcttgtttttgagctttgcaaagagggcaaaagcagtggactcttgcagaagactacctgaggacttgaagaagctaagagaaaaacgggatattgagcttggagag

SEQ ID NO: 54301 - DNA, 278 bp, Gossypium hirsutum
  Clone ID: uC-gsflnu33B022b04b1
gtttcacctcatgcgatgctcaaatagaaggaaagaagaaaaagagaggaggaggaagaagaagaagaagaagaagaagcaataggtttcattgttgatggatttaactgaaggagttggagagagttcatcgccgccgagaagcttcggtaactttaacaactacgatatcagaactgacgttttcaatcgcttagttgaaatcggctacgaagaagctatttcgaactctgactttcgcaacaaagaaacaacaagtttcacctcatgcgatgctc

SEQ ID NO: 54302 - DNA, 538 bp, Gossypium hirsutum
  unsure (1)..(538): unsure at all n locations
  Clone ID: uC-gsflnu33B022b06b1
ggacgcgtgggttttcccctttgattctccttctcttccttattctttgtttcttttttttttgattttggggttcctctatttcctgtaaagcttgaatttttagaaccaaaaaaatattactatatttttttgcataaacaaataaataaaagagacagctttggagcagaagggtagagagaaagggagtttttctgcaaagcatcatgaaccagaaggctaatgtttctaaagaacttaactctaaacacacaaagatattggatggacttcttaagttgcctgagaatcgagaatgtgcagactgcaaaagcaaggcgccacggtgggctagtgttaatcttggaatattcatttgcatgcaatgttcagggattcatagaagtcttggagtacacatatctaaggtgagatcagccactttagatacatggcttccggaacagatttcatttattcaatccatggngaacaagaaatctaatatttactgggaaagcgagttgcctcccaactatgacagggtnggaatcga

SEQ ID NO: 54303 - DNA, 440 bp, Gossypium hirsutum
  Clone ID: uC-gsflnu33B022c04b1
acgcgtccgaaaaaaaaaaaaaaaaaaaaaaaaaaaaaaaaaaaaaaaaaaaaaaaaaaaaaaaaaaaaaaaaaaaaaaaaaaaaaaaaaaaaaaaaaataaaaacacgaaaaattaaaaaaaaaaaacaaatataaaaaaaaaaaggggggggctctttttagggggtatccctgatcattccgcccccgcctgttttcaaacccttacattttttcttctgcttggggccgccgtaaaaaacactcctctgttttggcgatttccacgtactggtgtggggccccccttgcgttccccttttttaggggtttaaccggcctctccccctttttcttctgggctttaaaacgaacctgtcccccccgtgggcctttttaaaaatgcgccccgcccggctggtttttcggcccccccccgttccgggtctttttattggc

SEQ ID NO: 54304 - DNA, 425 bp, Gossypium hirsutum
  Clone ID: uC-gsflnu33B022d03b1
acgcgtccgcccacgcgtccgaaaaaaaaaaaaaattaaaaaaaaaaaaaaaaaaaaaaaaaaaaaaaaaaaagaaaaaaaaaaaaaaaaaaaaaagaaaaaaaaaaacaaaaaactaaaaaaaaaataaagaggaaaaaaaggggggggccgttttatggatcccgattttcagtccggggccttgccgccgacattgttttttttggggcacctaaaattaattgcttggcccggctttaaaacgaagggcttgggaaacccccgggtgtgccccacttaattttctttgcacaaatacccctttatgcaggtgggtataataccaaaaggtcctcgccaaatcccttttcaaaaaattggtcaacccgatagggtgatgggcccccccccttacccccgcttaaaaggggggggggggtggg

SEQ ID NO: 54305 - DNA, 284 bp, Gossypium hirsutum
  Clone ID: uC-gsflnu33B022d05b1
tgacttgtcggtctcagaatatgtctgaccattttggaattattgctgtgtctacgctcgttaaaatgttgggggttttcatgttcttatgcttctagcaaactttgtcatttgttcttgtagattaagaatcattgataaaattctcactttacattgaatgccttggccgatggaaaaatacaatgttatccccaatctcgaggccactcctttgttgatcgtctgtccctctgctagatgaatagaactgggcgtcctgactatgcgagccagtctttctg

SEQ ID NO: 54306 - DNA, 286 bp, Gossypium hirsutum
  Clone ID: uC-gsflnu33B022d09b1
ggataccgtcttaataattcacgacggtatccatcaggccgcgtgggaaagccaagaaagaggtgatcatgcaaagaacatgttcaccatacaaaggattctatagtagtggccttatttataacttaaaagactgatgcaaaaaacaggggatacaaattcacgaagcataaatgttttagttagctgccgaagagctgtgaaattaactgaacatcaaatatggatgtagtctttcttatcgttaccatattgaaccatgacccttttcttttttatgtaccaa

SEQ ID NO: 54307 - DNA, 232 bp, Gossypium hirsutum
  Clone ID: uC-gsflnu33B022f05b1
gattggctctgctcagcctcgttagacagcattcgaagttagttttattattgtcctcaattgtgccagctggggcagtccacttcatctgccttttatctttatctttcattttgatgtatgatgatatggttcagattgaaattatagattttgttgtaactgaataccagtggaaactgaattttggggatgaaccccacacccaacactcataatttagtctaattcc

SEQ ID NO: 54308 - DNA, 328 bp, Gossypium hirsutum
  Clone ID: uC-gsflnu33B022g03b1
tttcggacatatcgataatgttttggttggtgatatgtagttcggagccctttagctcactccactgaaggaaccaccggaaaccctagtccctacttcctttaattgtaccattgtgagagtatgccgatgatcgttgaaggccgcggtacgtatagactatgttaactaacatgctatacccaagtgttgaaccgaatagcttcaatgaaatatatctctcgtttgtggactcacgaagacacaaccctgctaagcttagcgacatctctgatatttgaggtcaagagctatggcacacccatgaatatcatcccttgccctattg

SEQ ID NO: 54309 - DNA, 362 bp, Gossypium hirsutum
  Clone ID: uC-gsflnu33B022h10b1
aaaaaaaaaaaaaaaaaaaaaaaaaaaaaaaaaaaaaaaaaaaaaaaaaaaaaaaaaaaaaaaaaaaaaaaaaaaaaaaaaaaaaaaaaggggaaaaaaaaaaaaaaaaaaaacatatacatgcggcggacagggagcaagctatctcttgttggagccgccggggaaagcccaaagtttgagccttgttggaacagacgatagctccgggtgagggcgggggctaccgaacctgtgggcctgggtgatcctgcgctttttgccactgtggactttcaagaagaatcccctggtcgtggtccataaaaagccatagtaacgccgcttactgatgggttcaccgctggactggctgtatttgt

SEQ ID NO: 54310 - DNA, 248 bp, Gossypium hirsutum
  Clone ID: uC-gsflnu33B023a06b1
ctacgcgtccgggaactttgtgcagcccacaattgttgagatttctccagatgccaatgctgttaatgaagaagggttttgtgagccatatagatggtttcaaaaagaacggttatacgatgttttagcttttcactttttattccccttatttatctatgatttttctttcttatctttgtttctttccctaactccaaacctaatcctaaaccaaaggcaaaccccactcttttttttattctatt

SEQ ID NO: 54311 - DNA, 298 bp, Gossypium hirsutum
  Clone ID: uC-gsflnu33B023a07b1
gtcataattctgagtcctagagaatttggatttatcaattcttgtgccgaatgtagttttagtgatgattcttcaaggaacaccaagcttattttttttgcataaatttttatgccatcagttggcatgattgtttccgtctttgaagcttttgtttatttcttccctgcaccttgtgtttttacctttctaacttccttgtgcagaaggcatgtcgtatactaaatgctgactttgtgctgctcatcaaatttattggttggagtttccccaatccatatttttccaagtttcggtt

SEQ ID NO: 54312 - DNA, 261 bp, Gossypium hirsutum
  Clone ID: uC-gsflnu33B023b09b1
tgttagcacatttgtgagcaagtaaaaatactgccttgttctgtcctgtatttcttcctctgctccgttcctctgctgtcaaaaatccccaacaatagctaaaagcttgaacttcaagcatttttccttcatattttatccgggtataatacgttgctgctggtgctctgtttgaaattcttactttacccggataaagtgtgtcaataacccaacagtctggatgcacaggagaaatcacatccaattgaggcgaggaac

SEQ ID NO: 54313 - DNA, 380 bp, Gossypium hirsutum
  Clone ID: uC-gsflnu33B023f01b1
atttggtgttttaccttgctgagcttggccttatgcaatattcgtcagcagtttcatactgtccgtccatgttagctgctgcagctgtgtatgctgcaagatgcacccttggggagagccctctgtggagtgaaactctgaagcaccacacgggatactcggtagagcagctaattgagtgtgcaaaactcttggttaaattccactcaacagctgcaggaagtaagctcaaagcattgtataggaaattctcaagtccagatcgcaatgccgtggcccttcttgcacctgcaaaaagccttttgcccgtagcaattcatgatggagagtgttaagctgatgattctagacaaattatataacctaatggtttttgttag

SEQ ID NO: 54314 - DNA, 501 bp, Gossypium hirsutum
  Clone ID: uC-gsflnu33B023g01b1
tgtgcttatctaccggaaggcgaagatcgagaccatccggcttgtaacccgttcgggccaagaggtcgaacccttgaaggtctcaagttcccgaaaagtctggtagtcgtggcgggtttggatctgattcaagactggcaattggcatacgttgaaggacttaaaaaatcgggtcaagaggtgaaactccttttcttagagaaagccactatcggcttctatttcttgcctaacaacgatcacttctactgcctcatggaggagatgaacaacttcgttcattccaactgttaataccactcaccctgcgtagttataacctctacttaaccatacgtaacaaaagttccttttccccctttaaatgtttttttatcaatggtgggtagttataagacttgttttgggttcttccttgattactacctttcgatttttgcggtgcctgtgggcgttgagcaccaaccatatacaaggaaaagggctttctctagttagctt

SEQ ID NO: 54315 - DNA, 237 bp, Gossypium hirsutum
  Clone ID: uC-gsflnu33B023g07b1
ctcacgcgtccgcccacgcgtccgattttaataaactcaattcataccaggtgtttgtggaattttcttaattgactgaataacctggcgttttattcttgcttgtatgctctgaagtgtatacaaacaaattgattgtctcaaacttctatgtgcatggcaagacataacaaattgattgaatatatcaaacaggttgttttgttaattaaaaaaattttttcatatacattttat

SEQ ID NO: 54316 - DNA, 469 bp, Gossypium hirsutum
  Clone ID: uC-gsflnu33B023h04b1
gtatccctgaccaaggaaagtgctactagcaaatcagtgtattttgcacattgtacatcagaaatgatatttattacccatttgttggctgaagaaccagagaagctggcaggccctttgctggctgacacttatgtgacattgttaaaaggtcgtaatgcatggtatggccaaatgttagccaaaggagaactaagtcgagatatgggtgatagcatcagcggaaaaggaatgattcagggagtgtctgcagtaggagcattttatgaacttctgagtcaatcgagcttaagtgtgttgcatccagatggaaacaagcctgttgcccctgttgagttgtgccctttattgaagacgctctacaaaattcttataacaagggagaagacggctgaagcgattctgcaggcactgagggatgaaaccctgaatgatcctcgagagcgcatcgagattgcccaaacacatg

SEQ ID NO: 54317 - DNA, 218 bp, Gossypium hirsutum
  Clone ID: uC-gsflnu33B024a01b1
tatggaagccaaatggatggtttctcttcatagtgccggtaatgctgttggcactggccaactgcccgtgaatcgttgtaagccatttgttgatgatggcaaacgggcatcgaacgctgtgcgacatagggtgggaatgtaaagggtgtccataagtattgctgcaaccataccatttctgattactttccaaaacttacctgttttgaggacctttt

SEQ ID NO: 54318 - DNA, 106 bp, Gossypium hirsutum
  Clone ID: uC-gsflnu33B024c03b1
ttttaactatgtcagaacatctcattttctcattcatgaattgttttgatattccctcatttattataagattgccgctttctctcacgcgcatcagaataataaa

SEQ ID NO: 54319 - DNA, 110 bp, Gossypium hirsutum
  Clone ID: uC-gsflnu33B024e05b1
aggatagtagtataaatcatagtcaaaactcttttttatagcacagtgaaacttattgtatatatacattttacagaaaacagaaaagatattggaagtaatgtcgacgt

SEQ ID NO: 54320 - DNA, 103 bp, Gossypium hirsutum
  Clone ID: uC-gsflnu33B024g03b1
gtaggtctcattcatgccaaccatggtgagggcattaagcaattccttcgtgaaagcttacgcggcacgaatgttgaggatatccaacatggtgcatgctaag

SEQ ID NO: 54321 - DNA, 228 bp, Gossypium hirsutum
  Clone ID: uC-gsflnu33B024h08b1
tcagtcttatctaccgacaaccatcaaaagctacgcatcgcccaaaatttgataaagaaagtcccactccctctgtcatcagtctccagcaccataactttcgtactcaccctttagccaacagagcagtttgtccccggtcctagcagtactgtcaagcacaggtgtcttgtaccctttggcgtaaatcacccaatgaccccctctgtctacttcttttaatgcttt

SEQ ID NO: 54322 - DNA, 228 bp, Gossypium hirsutum
  Clone ID: uC-gsflnu33B025b06b1
ctatagacggaccagagactccaagggggatttcaaagaccacctttccccaaacgccgattccgctgtaatggtcccacgtgcctattacccaccgaccttagccaatggagccgcaaagatgttttggcgacccgtagccctctcctaaagaggcatattactacaggatgatttatgagagaatatactcaataatgaaaatgtggtggaaaacctctaagggag

SEQ ID NO: 54323 - DNA, 250 bp, Gossypium hirsutum
  Clone ID: uC-gsflnu33B025d11b1
tttgaaaatgaattttacaagggaaaacaagattttatcatctgctgtgcctctttcaattgtcagagaacagcctagcagaatacctaatgattctgatccttctacatcttctaaagaatctttaccagaaccaactgtaaatactgaaagaaaacgacagtgttcaagtggctctgatgggcacggcgatgtgcaaataagaaagagtttgaggagcgaccaaaaaaggaggaagaaaggtgatgca

SEQ ID NO: 54324 - DNA, 213 bp, Gossypium hirsutum
  Clone ID: uC-gsflnu33B025e10b1
tccacgcgtccgcatgttacactctaacaccatttgttcaagcaaatccagtatgcagatccgagaattttagtactgttcatgtgaaacatcttaaaattgggagtcagcatcgcaatgcggtgaaggtttgtgcaacccggaggagaagggcagcatattcaaggactgaaacctatgttctattagaacccggagaagatgagaagtttg

SEQ ID NO: 54325 - DNA, 196 bp, Gossypium hirsutum
  Clone ID: uC-gsflnu33B025e12b1
ttcaaaaaactaaagaaatccttgaagtcctagcttggctcgctggcggtcgtcgcatggcctcggcaccctcacacgcgctccgactccgctacatgacggcggattgaaactcggtttaccatctaacatttttcctattgagtattgactgtgcatcatatgaaatagaagttgaaacgacagatcacccttt

SEQ ID NO: 54326 - DNA, 218 bp, Gossypium hirsutum
  Clone ID: uC-gsflnu33B025f09b1
tttgaaagctaacctaattccaccctttcgattcttactagagagaactgggtcaaacatacaccacaaccactaacatcagtcttaaccacagacgcatgaaggacaatatggactatgcatggacggacaggaaggaactctaaccaccatgacacatgtaagcatatgcatcatccctatgactgccggtatgcggctaccagcctagtgccttc

SEQ ID NO: 54327 - DNA, 167 bp, Gossypium hirsutum
  Clone ID: uC-gsflnu33B025g06b1
tgccttcccttcctagatataacatttctccagggtacctaaggcatgtatccaccatcttcgccacaaaagcccatgggacaatccggcctcacccgtcacagttctgcttccgggccctttatggccaacgcctggtgattccctcatcggagcagtcaccaacc

SEQ ID NO: 54328 - DNA, 105 bp, Gossypium hirsutum
  Clone ID: uC-gsflnu33B025h08b1
tgcagaccggcacaaagggaatctggaaccgggaggtcaaagaaataacccgaacatcaaagacgaacacagacataacagttttggtcaaaccagagtacctag

SEQ ID NO: 54329 - DNA, 263 bp, Gossypium hirsutum
  Clone ID: uC-gsflnu33B026a05b1
tttctcacggacttgggctgctgatcgcaacggtggcgttaaaaggaagccaaatttacggcaagggactccgatatcgaacaggccgtcaagcctggctgagagagaacaggtcatacgtacgactgacaatgcgtctcagatccaccaccagatatggctatttacccagcatatccagctatgttggcatgccgcactcaaatgctcctgtatgggattacacatctcttgctgagacgcagttcacggtggagcatctt

SEQ ID NO: 54330 - DNA, 580 bp, Gossypium hirsutum
  unsure (1)..(580): unsure at all n locations
  Clone ID: uC-gsflnu33B026d04b1
tccacgcgtccgcttccctgcaaaccattacctgggtttcaatcctataaatcactggcaatgctgtccgggcatattggctcagtttcttgcttggccttatgtggggaattcatcttaagtgcatcacaaggcaaggatattattgtgtggcaacagcctgacttgaggcagttcacaaagtttggccaaggtgatggctcggtgaaggcgcttgtcaccgttagcaacaaggttttcactgcacatcaagatagtaggatcagagtttggaaggtgtcaagaagcacagagaatgtgtttaagcttgttgacacacttcctactacaaaggactatttggggaagttcatgaagcaaagcaattatatccaaactcggcggcatcataagcgtttatggattgaacatgcggatagcatttcttgtctggcagtctataatggcttgatttattctggttcatgggacaaggaccctaaggtgggaggatatctgattcgagtgtatggagtcaataaaagcacatgatgatgctatcaattgctggtagctngtagggatagtctactagcatcag

SEQ ID NO: 54331 - DNA, 291 bp, Gossypium hirsutum
  Clone ID: uC-gsflnu33B026d11b1
tccacgcgtccgcccacgcgtccgggagaagtgacttccggagataagcgctgtgattcttgagaagatctgtcaatatttttattgggctcttcaatattcaaggggtaaagagactgagtttcacattgaacccgaactgactttggagctgatgatggctgctaattatctccatacatagctgattgctttttctttgattcttacgtaagatgttctgtagcaattaaccaataactttgttattttcttacaagtgtcattgacaggtaattgtcttttctcatt

SEQ ID NO: 54332 - DNA, 526 bp, Gossypium hirsutum
  unsure (1)..(526): unsure at all n locations
  Clone ID: uC-gsflnu33B026e08b1
cccacgcgtccgacaaactccagtaaaaatcatccattttgagggagatttatcatggctaacaaccagcttggagttcttaatgctctggatgcagcaaagacacaatggtaccatttcactgccattgtaattgcgggaatgggtttttttcactgatgcttatgacttgtttggcatctctcttatcacaaaacttcttggtcgtatttactacacaaatgaaaaccatccaaagcctggaacattgcctcctaatgtagcagctgctgttaatgggacagcctttgttggcacgttagctggtcagcttttctttggctggcttggtgataaattaggccggaagcgggtttatggactaaccctcatgctcatggtggtctgttccattgcttctggactttcctttgngaagtctcctgctggtgttatgacaacactntgtttcttcaggttttggcttggtttcggaatcggtggtgactatcccttgtcagccaccatcatgtccgaatatgcaaac

SEQ ID NO: 54333 - DNA, 158 bp, Gossypium hirsutum
  Clone ID: uC-gsflnu33B026h02b1
ttgctctacataaaaagccaggccgccaaagggggggccctaagagacgtgggcgggacgctacccccaaacgtgaacatcgggataccggcaggcacaaacaccgaacgtctcgaaatcaaaaaccaacaccaaaaggaaaccgggttcagcatcac

SEQ ID NO: 54334 - DNA, 523 bp, Gossypium hirsutum
  Clone ID: uC-gsflnu33B026h09b1
ttttaaaatatggtatggtgggatctattgattgccgtgttaacctcgactgaagcatttgccagggtgttcttcctatatacaccctgcagttacctgctttacttcacttcattgtttctttacacgaatttcgcacgttttggtttgctgaagaaaacaataaatgcccagtgcatcgattttctccattgatgtgtggataacttgaaaaactttctctttttttgaaacctttgaagttgtagaagcaaaccggttgagctacttgtttttcatgcacaaaataggactctgggaataggatttccagggtccagctaaatcatctctttcgtttttatattcatgggtttgctataatcactctcctcttgcttcttcagtagttcgtcggtcttcacttgctaactctctgtttcctttattcctttgtactgcactggagttttatctgcgagagagatggcatacatattgagtgttttcgcagtgagaaacctgctggttttgcactggctct

SEQ ID NO: 54335 - DNA, 380 bp, Gossypium hirsutum
  Clone ID: uC-gsflnu33B028a04b1
ttgttttgccgccctttttatcaacaacaacgagttcatgatccatctgcctgataatattgccaacacccatattttttatctcactttggccaacaacaaattcaatggtccacttccaagaaccattttcaaagctttctcttcgttagctgaggtccttcttttaaacgaccagcttacaggttgtataccctatgagattggtttgcttaaggaagctgtcgtttttgatgccgggaacaaccagttgactggtcatttacctttctcattagcttgtatggagaaatttggaacagctgaacttcgctggtaatcttctgtttggagcggtccctgaggtggcttgtgagcctgggaaactgatgaattttcat

SEQ ID NO: 54336 - DNA, 550 bp, Gossypium hirsutum
  unsure (1)..(550): unsure at all n locations
  Clone ID: uC-gsflnu33B028b04b1
tctacttgtccgaacagctgtaaaatcatggcatgagacttcaaaagtggatcctagagtctacttccttcttgataaggagaagagccaagccgataaatatgctccagttgtcaatattgacaaggcttttgaatcacctcatacgcacagcagttgtttttcatttcttaggcaatatgctgaagattctttctctagagcagcttgtttagttgctcctaaaagtatcatagcttatccacaggtctggaaaggtcagggttcaaggaagtggaagcatgggcaacatgatggtttctttgttcaattcgagtcaccactcttgcgaaaactatggtttatttcgagttccaatgagatggggaagacactgtgcagggatccagaggttctagatataggtgcacatgaagtatttccacgccttttcaaagaaaagctatccagntcctcatgagctttattctaggctgaaggaaattgctaggcatgccggtggactttgatgcgaggttacatatgaaaaaggtacgaacacatagcgcgc

SEQ ID NO: 54337 - DNA, 334 bp, Gossypium hirsutum
  Clone ID: uC-gsflnu33B028b10b1
cgaacatcgactcgtgtgttaaaaccgagatattcacgatgagtaacgcgaagaattatcttgaagatcatatattgtggttcgccttgataccactgtctgaagtaatactcaagaatgggaaattggagggagagtccttcctttcttccacggatttgtttcatttgccggctggttttagtcaattgatggtcgagcatataggatcatctcccgacgtaatgactattcctaatgactggtgaagacgaaaccgttaaggatttagaaaccttggagctcagaaagatttggctgctggattcgtaaatcgtaggccagaaccaaatga

SEQ ID NO: 54338 - DNA, 314 bp, Gossypium hirsutum
  Clone ID: uC-gsflnu33B028b11b1
gcgtgcattgattcgtgtcttagactcgagatcttcacgtggcgcggcgtgacaaattctctacagaaggactgatcggtgtgcgcggtgagcatgccgtcctgggcaatgctcaccgttgacgggctcggagcaggtgtactttctcatgcctagactacacattcagacctggtcatcttccattgactaactgcttgtggatctatcattacacgtcgctggttgacatttcactcagcagttgaccgaagacttcttccatgtgcagctcgaagcatgatgtagccaaccatacttctcaccttatggac

SEQ ID NO: 54339 - DNA, 435 bp, Gossypium hirsutum
  Clone ID: uC-gsflnu33B028c04b1
attccctcgatcagcaagtagtggaaatcttctgatttgctagagtctgaaaaactttcaaacgaaataaaagatcgagcgatgaagattgttaagaaaagagaagacgaagctgtcaatggagaagacagtcgcctcggctatgacattcttggatgacttgtagatgcctatcatggttgggaccagaaaagcagactgtcattggatgacttgatcgctgaatgcacaacattctatatttctggacaagaaactgttaaattcttactctcatggataggcttgtatatggttattcacggagcttggcaagaaatctgggtatagtagtttgtgacaaatgcggtaaccaaaaatcgcatctataagcctctacttaacataatagaacgaccattatcatccatgaaaccctaccttcttttatgtgtt

SEQ ID NO: 54340 - DNA, 108 bp, Gossypium hirsutum
  Clone ID: uC-gsflnu33B028c12b1
tcttttcatccgaacaggtcgttgaataggaaacaagattactgacggggatgcgcgaggatacaaccttcttatggtggtggagagccaaagcgggaaatatgctgc

SEQ ID NO: 54341 - DNA, 467 bp, Gossypium hirsutum
  Clone ID: uC-gsflnu33B028e11b1
ttctacgcgtccgatcgctcgtatagagccccggaagtcatccttggcctcccgtatgaccagaagattgacctgtggtctctcggatgtatccttgctgagctatgttctggggacgtcttgttttcaaatgatgcggtcgtgatgatccttgcacggatggtcggaatgcttggtcccatcgatatggagatgttggagaatgggcaagagacatacaagtatttcacgaaagaatacgacttgtaccatataaacgaggaaacggaccaactggagtacctaatttccgaggagtcttcgttggagcatcatcttcaagtatccgacgtattgttcatcgatttcattagacatttgcttgagatgaatcctcgaaggcggccaaatgcgagggaggcattaaaacatccctggctatctcactaggactaaaccggaactcgccgaatggctggaggaacgac

SEQ ID NO: 54342 - DNA, 360 bp, Gossypium hirsutum
  Clone ID: uC-gsflnu33B028f02b1
tgctacgcgtccgcccacgcgtccgcccacgcgggcgtccgtgttgtgaccaatgctttctcaaaatccatatggggtatctaccaacacttcttttctacggggtcacctttgtgtttcaaacccagaccccctgggtgttgggagtgcatataaacatattctcggctcgccctctatgtgaccataggtttctctctcggggggggatatcttgcggagatgagcgcctcgacatttgctggggggggaaagcgcacgaggggaggacactttatatccgcaaaagttgagagctatacacgctgtctggaggtaatctgtgtgtggggctcctaaacttttggcaggagtgtagac

SEQ ID NO: 54343 - DNA, 546 bp, Gossypium hirsutum
  unsure (1)..(546): unsure at all n locations
  Clone ID: uC-gsflnu33B028f03b1
cggacgcgtgggcagagcttgggtacccatacgaagccattcatgttaccactgccgatggatatatccttcttttagaaagaataccaagacgtgatgcacggaaggctgtctatctacagcatggtatctttgattcatccgtgggttgggtttctaatggcgttgatggttcttcagctttcgcagcatatgatcaaggctacgacgtcttccttgggaatttgcgtggtctagtctctagggggcatgtggataaaaatatctcctcacggaaatattggtggatcacagtaaatgagcttgggacaaaagatattccggccatggtagagaagattcatgaaattgaaacggacgatataaaaatgattcaacctgatgaagaaacaaacgatgagcagccatacatactgggagcgatcgctcatagtctgggtggagctgctatgctgatgtatactgtgacacgcttgattgaacaaaagccntacaggctctcaagattgacattactatcgcctggcggcttccatgatgaaacta

SEQ ID NO: 54344 - DNA, 219 bp, Gossypium hirsutum
  Clone ID: uC-gsflnu33B028f04b1
cttactcgtccgtttttctttttcttcttagaaatgctttgtacgccattgacagttttacttttacagacagcgctacatgataatgttgctgtagaattatgtaaaaactgtactgatatatatagtgtactcagtggtaaaagtttgtcttttttgatattgcttccttctgctgctgatgttttattttacataaaaaaaatcagattggaagtt

SEQ ID NO: 54345 - DNA, 357 bp, Gossypium hirsutum
  Clone ID: uC-gsflnu33B028g10b1
tttccacgcgtgcggatttgacaaaggtgtcattaactagttgattgaaaatgtatatatatatatatatcaaatatgaagaataagctacaagatatgtatagaacttatattttatgatgtatacctttgttaataaatcaaatgatgctattttactagaaataagtaatttgaatttttttttaactctgaataatataataagttattaaaatgatgtatcggtatctcaaagtttaggtttgagtttggtattaatatttgatcgggttgattgcaatgtgaatggacccaaacatttactgtcgtggtgctggaactggtgctgacacaaaggcagtaactgaaatgggc

SEQ ID NO: 54346 - DNA, 236 bp, Gossypium hirsutum
  Clone ID: uC-gsflnu33B028h12b1
tgttatttgggaatggctgccttctatcgatccatatatgtcaatgatgactctcttgctcttgcattctatgagtctactatttgtcaaaatgctttttttgtttagttgtgtacatgcaacacgtgagatactaaaaagcaagaatgatgaaccggaaagctgctaggccaggaaaagttaagaagtctatctgaggctaggaaatgtccccaaagctcaatggggattgcttt

SEQ ID NO: 54347 - DNA, 308 bp, Gossypium hirsutum
  Clone ID: uC-gsflnu33B035a11b1
ttcctgcttagatccaaagaggaagcctcgattgctgttaattaatggcggtttaccatctcttacacaaagacgtctaacgagcttccactcaatgggctgacattcatagaaagcttgggaatctacccccaaagcctccatctttcaagcctgaccctttagaacccgcacctgaccctgattccgtccctaaggacaagtctaggatcgatgaacagactgaagaagagcttgaagaaatcgaagatgatgtcgacgattatcgattccttgaagaatacataatgaagaggctggctgagatg

SEQ ID NO: 54348 - DNA, 432 bp, Gossypium hirsutum
  unsure (1)..(432): unsure at all n locations
  Clone ID: uC-gsflnu33B035a12b1
gctgaggaagcactatcacaaggcttggaagctttgaatcagtctctgtctgatatcataatctctgattcacttagctgcccgcctaatatgagtaactacatgggccaaatggctatcgccatcaacaagctctccacccttgaaggtttcgttagacaggcagataatctgaggcgccaagccattcatcgactgcatcagatattgacgatccgccaagtagcaaagtgtttgttggcgatagctgagtacttccatcgcctaagagctcttagctctctgtggttggctcgacctcggcaggaacaatagaaaccctagctagctaggtcttnttttaagttgactttgattattaatgtcttctttgatattttcatcaagatttctacatatatagatagaatagatttgaaaaaggtcataatt

SEQ ID NO: 54349 - DNA, 316 bp, Gossypium hirsutum
  Clone ID: uC-gsflnu33B035b01b1
tcgtataatcaaacaggctgatagtggaaacccggacagttcataataaccagataaaccctcataagccggatcagctcttatgggtttgcactaactgatcagccagacgacgttttagagaaagccgaaggcctgtggagaaagcacgaaataggagagcccattttgccaccgagtatttgccacctttcaagcactagggggtgacctaagtgctcacaacagatagcgtctgatcgctgggggtgcccagcttcacagcccataactcatgatatcatccggacttgtgtttagctcccactgcttaagg

SEQ ID NO: 54350 - DNA, 260 bp, Gossypium hirsutum
  Clone ID: uC-gsflnu33B035b06b1
ttcttttatagactggctagaattgacacttggaggggtgtccatagttgctccctggtttggcaccgcatggcctacaacctatgggagggccatttactgctgtttattttgctcatagggtgaaccccacagtttatgaacattttgacaatataacccctagagtgtagcttctaacttatgaacataacatagacgacctatgaactacacaagaacatgcacgtctgtgctgcccttagatgtcaacaacaccc

SEQ ID NO: 54351 - DNA, 274 bp, Gossypium hirsutum
  Clone ID: uC-gsflnu33B035b09b1
cgcagtcctttcatgcgttgggccaccagagcggatgagggaggtaaagcttatgcctgggatccaaatatatcagaaatggcaccccgacaaagatttaatgtagattggcaccatgaacaaggcttaagggcagactgcttgttctttcacaaacatgtcacctgtgcacaacaccccctattactatgttgacctatttccatcctacgagacatgtgaaagacatgatcagggcagccacatggctggatactttaccgataatacatgg

SEQ ID NO: 54352 - DNA, 317 bp, Gossypium hirsutum
  Clone ID: uC-gsflnu33B035c01b1
tcctacgcgtccatgggtacgagtgtccaggggaaattgtaaaacgttagcgggtattcacccctcctgagacgggatatgctgaagctaccaattgcccgctgtctgaagcaaacgaacacaagcccagatggactgctgtttctgacaaaggctcaagtactcttactgatgagactgcacttgcaacaccaccacgcgatggacaatcaatgagactgcgcatacgcagacacccagctagaaactgcgcacgctgccattgccctactgcctagaagccgttgagcacctggccctccaatgacacgtttcac

SEQ ID NO: 54353 - DNA, 195 bp, Gossypium hirsutum
  Clone ID: uC-gsflnu33B035c04b1
gagcagctggtggaggacacatgccgactaactagaattggatatactttacaacgtaattatggatagtgcgacaaaaatagttgagaaagagaaagcacaaacctgagaatggagaagagactccctatggcttcgacatggatggaaaacgtgaagactgctataacagtaacaagacgagaaaagccacgt

SEQ ID NO: 54354 - DNA, 204 bp, Gossypium hirsutum
  Clone ID: uC-gsflnu33B035c10b1
tcgtccacacgtccgatggcgtgttctttctttggaacaattgaacttaggcagaaaccagatattcactaaatacacactttcatgtcaaaaaataaatattttgctaatctaccatctaagaaactaacgtaccgtatatctcattgcaatttcaaaaaaaaaaaaaaactaaaaaccctggctggtaactctagatattcc

SEQ ID NO: 54355 - DNA, 494 bp, Gossypium hirsutum
  Clone ID: uC-gsflnu33B035c11b1
tttttggaattactgatagttaattcagcaacactgtatgagatgaaagggaaagttgtatttttttttttagattgaactcggctagttgaatgtatctggtactcttgattgttgcagaaaggagcaattagtgcatactcatgtttagaacgagctctgtaataaatttggttgctgtcttatggtgattctttgttgattaaggagtttcatcatattagtgttgaatttgttgatggcatcaattagaagaacactgtctccggtgcctcgaccggggactcctgttacaggggaggctgaacgttcagttccttctcctctgtcgaagtcgacaacgccgcagactggtggcttgttatcttctcttataggtttatcagattctcaagcattgtgttcggtgttttttcgccgataactactaggcctgttgataggccgaatccgaaacacaaggacatgtatggaggagggctctttttcatttc

SEQ ID NO: 54356 - DNA, 445 bp, Gossypium hirsutum
  Clone ID: uC-gsflnu33B035c12b1
ttaggcaataagaatattttggcgattccttcgagctgataaagatgcgaacattgtgaaccgtaagatgaggaaaggtgctcaagtggaacctacagagcctgatgagcttcaacttctagcaaccgttcaaactagtttacaaaagaaggataagaaacttagagaaatagtaaggagtgggaactgcatattaaggaaattgaagaagaatgaagaggagaattcggatcaagtgcttcacttcttctctcaagtggatttgaaattagtggcaagagttttgaacatgtctaatgtgacaagagaccaacttttatggtgccattccaaattaagcaagattaactttgttaataggaagattaatgttgaaccatcctttttgcttttcccatgttgatattttctgaattaatacagcatgtatatctattcctctcgc

SEQ ID NO: 54357 - DNA, 407 bp, Gossypium hirsutum
  Clone ID: uC-gsflnu33B035d05b1
ttcttggggccgcgtgaaagaaagggcgctcacaggctcaccattcagacacgggcgatgtggctggactcagagcatatgcttagtaccatggcagggggcgggctggagctaagataagcacactagactgtgtcgaagaacaaccttgcaggatcattgaagcgcatggctgaaacacgagccataatctgtactattgagcggtcgagctaagtgacagtccaaaagaacctagcaatatggaaatatgaataagggataaagaactgttatggatgcatacttcagcggtgaggctgtcgaccgagctaactaactgttcttcaaaggatacagcacctggggatgaatgattgatgatcgactatccaatggaatgagatacgctaaacatgctatttccc

SEQ ID NO: 54358 - DNA, 325 bp, Gossypium hirsutum
  Clone ID: uC-gsflnu33B035e05b1
ttctttcgtccgcggacgcgtggggtttgaatcgtacatgcttttggattctggagcttgacgatcgaggtctcaagggcggacactctggaataacatactgctaggatgccagacaacgatagagtacgaacatacctggttcttacgtagaataactaccatactctatccactaccttaccgtagctcttctacaacgttcaaaggcatacagcctttactcttggactgattcatggagaagaagatctgtttcttcgataagacgcttaccggaaagacgatcactctctatgtcgaaagctgggccgccatcctcaac

SEQ ID NO: 54359 - DNA, 305 bp, Gossypium hirsutum
  Clone ID: uC-gsflnu33B035e07b1
ttcttttacggggaaaacggagaatgcatggagcagggttccacaagaaaggggggattccgctaattttggcttcaaacatggagcatagtatccccgtacatgtattgtccaatatggatggctcagccctcacaaaggtacacctagcatccttagaggacaccatctggagtccatgcaacattggattttggagattatgcctgtgtcggccttcagtacaaatgggtgacccagagggatcatataacacgcaccgaatgcagtaactgatcaaatcaacctgaggctataaaccatgg

SEQ ID NO: 54360 - DNA, 307 bp, Gossypium hirsutum
  Clone ID: uC-gsflnu33B035e11b1
cccacgcgtccgtgagctggtcatgaagaaaaaaaaatgaaacccagaatttttgttctttctattgggcgtgggggggggattcttgtatggcatatggcttaattgattctgtcgggatagcgatagaaagtagagagtaaagaagaaaaactctatgggtttttttgaccagtttgtatatagaaagaacatggtgttcttgcctgcatagaattaaaagaggtcctttgtcattttagattacatgataccatttatgagactctaccacctaaagcctggtgtgctcaatctaagggatcca

SEQ ID NO: 54361 - DNA, 352 bp, Gossypium hirsutum
  Clone ID: uC-gsflnu33B035f07b1
ttctctcgtacgaaagcttcactgagctctctctcggtatatctatacatctctctctgtctcccatttgcctccatggccgtgtctttcaaaatgggcccgagttgcgggctatatgagggccttacagatgccgggactggtgagctcacataaggacgatgagctccttcaacctgcttgggctatggaccattgcatctatgaaggagtagccccataagatgaaactcgacaactatgctggtgctggctttgcatcaaaaagcgaggaactacctggaaaagggaccatgcagattaagccatgacaaaggcgagtgtgcagggactgctaccgataattatatga

SEQ ID NO: 54362 - DNA, 356 bp, Gossypium hirsutum
  Clone ID: uC-gsflnu33B035g01b1
tcttccactcgttcggacctgcacaagagggagaacttgaatcctatcctgcttgtaattcacttccaaagtctcgtgcatactaagatcgactattgtggtaccttatcgagacatgaatctgcatcttaccatgccgatcttttacaacgatgtgactggtaaatcacaaaataggacgcaacgtaatcggctagcggctcaggatatgttggccaggcggtgtaactgagtggtggccagatacaggctcccttgcgaaaaaccttgcaggcggattggcactgcttttatgggaaaacaatgtccctccacaggggccacaccgcgggatataccatggtaaacaccatttt

SEQ ID NO: 54363 - DNA, 293 bp, Gossypium hirsutum
  Clone ID: uC-gsflnu33B035g08b1
ttctgttcctaacatgaatactgctacggaggatgtagatgatcgacgctggatccttatggatgacgaaagagttaaattcgtcgacaatgcaaatttttggataagacccgtactactgccttgaccgcattccataggaaattgatgccaacgattaagctattggggacagtataccaagggacctgcttgaacaaagacggaaaggaatgtggtaacagtatgcaagggaaccacaaatactaatactaaaagcttgaaacatattgactctccgagatgataactac

SEQ ID NO: 54364 - DNA, 435 bp, Gossypium hirsutum
  Clone ID: uC-gsflnu33B035g09b1
ttctctcgttcgtccacgcgtccgcgcctctccttacaccgccgacttctcctcttcccttgaaaggtctccaagccctcttaatctctttaatttccatctctttcacgagcattcataatgtctgccaccgaacactaccactgctcccaccgtcgagaaggtctaggccgcaccattctagaccaatactgaaggcaccagccagctgagcccgctggtgaggctcctgctgcaacagcaacccgccttgaggccccactgaccgaggaggctcccgctgctttagcttccgtcgctaagaccggctccgaaaagaagaaggaagaggcagcccaggaggatgccggaaagaagagccctactattcttatcaagctcctttttccctttaagggcaacaaggtgaagggaccccatttaccaaagtccccc

SEQ ID NO: 54365 - DNA, 242 bp, Gossypium hirsutum
  Clone ID: uC-gsflnu33B035g10b1
tcgtcacgcgtccggacggccggacggtctggattatgatggaacaggatattcgtcatcagccaaacgaacttcatgccgaaataagcaaaagatagcttaacagatgacgatttacgggcgtagggagttgattctctattgattgattcaagtccaaaagagattgatcaccacaatccattattgtgtcttctcaaggaaagatcttacgtgaactagctaccgcatgaaggctggtt

SEQ ID NO: 54366 - DNA, 289 bp, Gossypium hirsutum
  Clone ID: uC-gsflnu33B035h03b1
tcgttaacactaaccatatcaatgccacctttgattttgtgctcatggcatatatatcccaataccaaaacttccggctaccatgactccatgagaggactgtggtgtcgtgcaaagatcatactctcatgtttgctacaatcgatgctttccatcaacctaataaggacacagctcgagtagaatccaagcccggggctcacaattaggtactgtcggcatcggcatttaaggacctgacgggtgaaaaagcacttggagagatcggcgctgactgtaagtacaatgg

SEQ ID NO: 54367 - DNA, 392 bp, Gossypium hirsutum
  Clone ID: uC-gsflnu33B035h05b1
gctcgcccgcctgcacgcgcccgtgccttcctggctggacccacccagcgcgtcctctcgtacgcgcgagcggccatgcctttctttctattagaactttattgagcctttatctgcactgctgcatattggtttgcaatcagaggtcacatcaaaatgagcgtatcacacatgaagaacgcccaaattggcagcagattaattggctgttccaagctgctttatgttttctaccctcaaagtttgttgaacaaaaaaggttggttatacacgctgctattccatctgaacaagtagtgcttcattgcttgaatggatttcagctgacataatgggtggagctgacatggtgtagatgatgaataactagcatcgtatcacacagacaagct

SEQ ID NO: 54368 - DNA, 364 bp, Gossypium hirsutum
  Clone ID: uC-gsflnu33B035h08b1
tcgtttacgcgtaggcgattgtttaccaggaaaacttaggagagatccaaccatgtcgtgcacctttgaaaaaaggtggactttgttagagaagagacttgtaggtttgcccatttcatggtcccattatacctagtgatgatgcatgataccaaaccaataagagctcttcaatagatgatacaaatcctggtttaggctctgatttagcagagcaagtagcaaaacaagctgtgaagaatgttaaggagcgagataaaaggatgcgaggaagaaataacatgataagcagtcattacagcgggataagctagcatgagttcaggagcacattgatgctgtgcttcgagatgctgcaatagct

SEQ ID NO: 54369 - DNA, 463 bp, Gossypium hirsutum
  Clone ID: uC-gsflnu33B036a05b1
agctcgttttgggtgctgttttgttctatatcatgatggaggcccgtgattatccattaccagcctgattgtgacatgaggtgttgacatgcgtccctaaagcaacttatgctgaatcatttcaaaggcactacgcttattcattagagattcatccacatggttatctgcctgctatctattgatcgacattaacaatactttggggtcaggaccccttatatgctagaggtatagagtgcggactttgacatgagcttgtgtatcagcaactatggcatatggcgctactctttaacgattcgacactataaagtgactaaagataatgccagacgtgctagaaggaacaagcatacctacatcagcgctcttggacatagaaattaagatgatgatcactaataacctgtgatgttcgtgagcttacaacaaaaagtgtgacatgtcatgagtcacatga

SEQ ID NO: 54370 - DNA, 399 bp, Gossypium hirsutum
  Clone ID: uC-gsflnu33B036b08b1
gtgatgtgaagatatgtggatgagcactggaggggcgtaatctaaggcacttgtcatttttgcctcgccatcgaactctacgatggctgactgtggtcccaaaggtcgaatttcctttacttcaaacaagaagagattaatgccattatgaatgattttgttcaacgtgcgttacttgctccacctggattgtaccttggtggcacatatacatatggtgttaccaaggcaaacccgtacttgttattatagggtagaagggatccggatgtcatactattagaaagcacaatatggctatgttgactggatgctatgataagccaatgacagctgttcaaggctatagggttgtggatcggtgtggcgattatttcattgaacaggggtttcgacctt

SEQ ID NO: 54371 - DNA, 526 bp, Gossypium hirsutum
  Clone ID: uC-gsflnu33B036c02b1
gtagtaatcgctcattggtcagctgtctcgagaacacgtcgtaaaagtatagttcccaaggtcaagacggttgatgccttagccttcgcttcggttccctttcgtgtatgctgatgctttggttttgattaaatgttttaaacaacaatttccagtttcgaatttcaagtacttcaactgaaaaataaaaaaaacacgatccattagagaaattaaattataaaagcagcgccaaagcttaagaatccttcacctattctctctcgaaatatcaaccttttttatttttgttgttggaatcgaagatctgataaaaaatttgtaaacatttcttaagctctggagagatccaatttctttactgatctcaaatccatggcgtttccacgatcgaagctactttttctgctgttcgctatgtctatcgcgatcgacgccattgcagggaagagttaatacgacatattgcacgtgccgaaaggagcatccgatgagcagatcaaagagcgttatgaagctggcattg

SEQ ID NO: 54372 - DNA, 424 bp, Gossypium hirsutum
  unsure (1)..(424): unsure at all n locations
  Clone ID: uC-gsflnu33B036c08b1
cttcncaacttcccacttccaccaatcccttcgcttctcttgtttttctttctttgggtaaccatggaaatttttcttgaattcatgtttactatttctttttcttttgttatttccttccttctggctaagcttctttccttttcgtctatcattgatcaacatctagagatcgtgtcgagattatatgcggaagtcaaaactgaatcagaaaaacatgaatttgaagaagttgatgctttatgtgaatccgtggaagaaattggtacccaggaagagtcttcgaatggtggtgaagaattaattagagaaacagagggaactgttgaaggaattagtttatctgaagagaattttgctagtgaaaccactgagattgaactagctaaagaggatgaagaagggattgaggatttggtgtgtg

SEQ ID NO: 54373 - DNA, 361 bp, Gossypium hirsutum
  Clone ID: uC-gsflnu33B036c10b1
ttcttggcgcacgaactaaacggttaggatgaggggaaatctgtcgggtgctatgaaagggtttagtacccaaggttctagaagcagttgtcctatgactctgcgatgcgacatcatgctagctgaggccagaggggagtcagatccgtgctctttaacccctcctaacaactcttgaaggccaaggtaagtctcccttcctttattctttttagggcggcccacataggcgcacctagataacaaaccgaagcttgaaataatcaccttaaaaatacgggtgaccgactatgaattctctgtgatctccctttacatttttacagaagaccgaaccgttgatagcctaacactaacctat

SEQ ID NO: 54374 - DNA, 169 bp, Gossypium hirsutum
  Clone ID: uC-gsflnu33B036c11b1
ataatcaagcctcgaattaacgcaccaacggggtttgtttaaaagcacggcggtatttccaaaaaagagagaactatgatggtaggactacacggtactatagctggaggaagcaaggggtcaagagagcatacccatgttgacaaaccgacttgtagaaaacaatgat

SEQ ID NO: 54375 - DNA, 240 bp, Gossypium hirsutum
  Clone ID: uC-gsflnu33B036d12b1
gtgagactgccgcaattatctcacacccttcagggttgattgttaggagaatctcattcaagtcaaaaagaatggctcgggtttaacattaaaactgtcctccaaaacttcaaacaatattgcttcctcatgatcgcgtggatgtctattctaggtcatttgggagcgaaaactcttttattcccattttgtttataaataatcagctctaattatgataagaataaattgttttggtgt

SEQ ID NO: 54376 - DNA, 487 bp, Gossypium hirsutum
  Clone ID: uC-gsflnu33B036e04b1
catgttctgctgctcggtttttcatcctctgtcccagctgcgtcctttagatcctcatctgttcccattgcaacgagagaaacagagatccgactgtcgcactatggaggtaaactcccctccttaagcctatctttttctttgttctatgtgttcgcacgctaagttccaaaaaggaaaagaaaacagtgaaaaacgaaggaaaaaaatggaatatacctcggaaatttttctgttttttttcaatctttttcgtattcaatctgtggatgccaaaaagaaaaattcttttacagtgttttttaatcggccttatatccgaatcgaattgaagagaaacaataaaatgccaaaataaaagaataaaaatcccttttttctcttattttctgctatttttgttgtcgttttctgccttttctgatttgatgcgttgttttctgatcatttctgcaggtacggatgtgcgcgggggtgcgtccggagt

SEQ ID NO: 54377 - DNA, 406 bp, Gossypium hirsutum
  Clone ID: uC-gsflnu33B036e07b1
tcctacgcggacgtcaagagggacgccaattaaggggtaaatcatggctgcatatggagggaatcatgcaggaggtgtattggagacaatctgaaacgaagaaggagggatcaggttctgggaagggaacctaaaagagaacgctgttctctaggtggagaagacaaatatagatgccctgatgtaaggaacgctctcaccatggagcaggagtaacaactcaaagaggcttgaagatcgagaccaggtgctaaaggagacactggacactctcaaagggacaccacattatgagaggttaagagatctaaacggggatacgaaacctagattacaccatgcgcatacatcgcaaaaccatagtgcctgaattactgaaaggctacccacggtagaagtatgggat

SEQ ID NO: 54378 - DNA, 359 bp, Gossypium hirsutum
  Clone ID: uC-gsflnu33B036f01b1
ccctcgtgtgcgcccacgcgtctagtcaggacaacatgccatttaatgctcatattgctgggcaagttcataagattatgcaatagggaacattcgagggagagtactacttggagaatgcattgtaccacaagagcctccgcaaattgcacgatccacttgttgcagcatttaactctgaacaacatgcgtaggctggagaccaagaaagggactatataggatgctggaaagctttggaactcgaatatggatgctgtatcgtattcggaatggaggtgatcatgcagccgtctcgggaaagtgcatcctaaggctgtagcaaacaccctatatagctagcttcagctaaaggcctt

SEQ ID NO: 54379 - DNA, 343 bp, Gossypium hirsutum
  Clone ID: uC-gsflnu33B036f04b1
gctttatggtctctctccaccacctagttattagggggtgtaacaaaagctttgcgaggtcgtatagaggtcaaattgcaactatgcaatttactggcaagagtcaagcttggaatctggtcgaacgatctagaaacggagtgatgggcattgccgggatcttaagcttggatgacttggagaagcaagatgctcaacggatgcacaataggaaggggttgaaaagataaatgaagtgagaaagtaagtactcacagaagcttcgtgcatgctatggtgggtcagacgaggataactatactgctaaattggatggcgtgacagatagcgcaatgtttaatct

SEQ ID NO: 54380 - DNA, 126 bp, Gossypium hirsutum
  Clone ID: uC-gsflnu33B036f07b1
gtaccatcaacctattggttctttgtgttaagggtgttatcaatattttgtagtggaagttaaccatgaatgagaatcttcccttttgttggtgtaatagcaaaaatgcttcagttcttccgcttt

SEQ ID NO: 54381 - DNA, 329 bp, Gossypium hirsutum
  Clone ID: uC-gsflnu33B036g04b1
cctactcgtaccaccgacatgccggtgtggatgagaggccacctaaagacctcgaggccgggtccgaacaaacggatacggaagagggcgagagctgcagcgaccgaagccccgagagagcccacgctcgcaagacctaaccccatgtggccgacccacatgatgcacgctatgacgctgaccgttgctaggccgcacgtaaccaccacaagtaacgcatcgagagccaggcggagtccaaccctgaccagagagacactatcgtgaacccatcttatgtaccaccaagcatactcaggaaagtacattttgaggccagagaaggcgca

SEQ ID NO: 54382 - DNA, 328 bp, Gossypium hirsutum
  Clone ID: uC-gsflnu33B036g05b1
cccatgcttacgctcaacttgctattgttgatgggaggccagtaaaagaccttgaggctgggtccgaagatacggatacggatcatggcgagagctgcaggaaccgaagctactagagggtcatcgttcgcaagacctaaggcaatgtgcgcgacccactgattgaaactatgcgctgaacgtgcagccgcttgtaccacctcaatacagcatcggaggagacggagtccacctctgacatagaggctctatcgtgaacccatcttatgtaccaccaagcatactcaggagagcacattttggggccatagaaggcgcacagtacata

SEQ ID NO: 54383 - DNA, 413 bp, Gossypium hirsutum
  Clone ID: uC-gsflnu33B036g08b1
ctacgcgtccgcccacgcgtccgcggacgcggggggtcttttgcaaaaatctgtgatcccgccgcccactactactaccaccaccaccaccaccaccaccacctaccagtggtgctcttccaatcagcgatcagccaccaccacagtcaaccgcaacaacccctcaaatggcgaccactgcagcaacaacaacagttgcctccgacgcaacaaccaccactttctccgacggtccagtccttagtctcatcaacaaacgcatccgtgccttacgcaagaaatacaaccgcatcctccagatggaagaattcgggtcccagggcaaacccttaaacaaagaacaagaagaagtcctccgttcaaaacccttcgtctccgcccttatcgacgaactcgagaagctttcgcaccct

SEQ ID NO: 54384 - DNA, 256 bp, Gossypium hirsutum
  Clone ID: uC-gsflnu33B036g09b1
gtcgtccatggctgcccaatctcaacctggaccactcattgtttgaatgtatgtttttttttttatcataatttttttattatttgtatcggattggatcatgccaatcattgagatacatttgtgtttgtgaaactttttgtgtgtatgcaccaatatttgatagatttctcaaattacatgataatatatatataatgaaattttcataaaaaaaaaaaaaataaaaaaatatacaaataaaaataataaaatg

SEQ ID NO: 54385 - DNA, 271 bp, Gossypium hirsutum
  Clone ID: uC-gsflnu33B036h02b1
gtatcgtattatatctagtttttaatggaggactccagtatgggcatatacactaaggctaacattgctacgcgatttacttatcctcctgctggagccgcaaccagcactggtctggtgggcgtttaaagttaccaggatactctgatctcagtcacatacgatagcatgtgcagattccaggttgatatctgcaaggaaacccgttggggtgacgaaaagtgagacttaaaggtctactaaggacggagtattggcaatggtagaggct

SEQ ID NO: 54386 - DNA, 203 bp, Gossypium hirsutum
  Clone ID: uC-gsflnu33B036h06b1
ggctatttaaggcggttacactttccctctctctggtgcagatagttgcatggcttgtggcagcgctggtgatagtgatcaatgggtaccttttacttgacttcttctcctccgaagtcactggcgtaatctttaccaccgttgtctgtgcatttacaggagcttatcttgcatttattgtttaccttgttaatggggggatt

SEQ ID NO: 54387 - DNA, 389 bp, Gossypium hirsutum
  Clone ID: uC-gsflnu33B037a02b1
cccatgcgtccgggaaaaaaaaaaaaaaaatagaagaagaaaaatacaaacataatgttcaagaacaggaagggcttgctgagggctccgaggtttcgtccgctggcttgcaaggcagtagcttttctattgtgcccgctaagtcctgtcgattggcgcggcgttgttcaacgtctggtacgtgactaccttggggtgtcccatgttcttgaagctccatctcatccgcgttaccgacgctggcctaataccgaagagggccgcccgtgacgtgcttttacacatttgtggattgtgattggcgaatggcacgcgccctgtatcgcctgttcaagcgctgatgacgttttggttaccggccacttggcccgtcccatgggcagatgcct

SEQ ID NO: 54388 - DNA, 368 bp, Gossypium hirsutum
  Clone ID: uC-gsflnu33B037a10b1
ccttctcttcctttcactcattcgatcacgattggggacatgcattatggatttctgaggctttatccaaaaagagctgtctttagctggtgggttttgtttgcaggaggctataaaagaggtgaatggccaaaggatatgaagccagcctcaatgagagcaagatggacgctcccctaagtacatgggtccaaatctcgaggtttctgtggggttacactgttcttcgaatgccgaacgggactaccaaccttcacttgacgtaggcaatcgatcgatccgagcctgcgcatgtgtacccattggtaggagctctcactctaagagcgcgtattgatcgtgccacaagccgacttgtgagagtttac

SEQ ID NO: 54389 - DNA, 326 bp, Gossypium hirsutum
  Clone ID: uC-gsflnu33B037c12b1
ctctttatagctctcggaactgctagagggatggcgaactttcatacggatggtggcggttctatccacccatggtcacattaagtcctcgaatgtcctccccagcgatgaactcgaggcttgtgtttccgacgctggcttgacccctataatgaatgctcctttaaccacgtcttgcatagttggatacagagctccggaggtgattgaaacacgcaaaataactcaaaagtctgacgtgtacagcttgggcgcccttctcttagaaaagccgactgcaaaagctcctctccaacctttagggcaagaccactttgccgatcttc

SEQ ID NO: 54390 - DNA, 421 bp, Gossypium hirsutum
  Clone ID: uC-gsflnu33B037e09b1
tttttctcgtccgcgtggtagtctattgaatgccttgcttcgctcacccgagaaaaaaataatgtcctcaggtggcagtggcggatccagccgcagctgctgctctggctgctattgcggtgagaactgctcagtgaaccttaaccttgcttactgggagaagacaaccagcactcacaccatcatctacggagttgcgccagtgcagatgacctctgagggaccagaggtgggcactactgcttcacggcatggatgcaggtgaggctcaagctgcaagtgtcatgcatgcacctgtgggccagctcgttgaacgcccttgattagtgaatatgaaggcggcaacctcacaggcctgtgtaatgatttattttcaaggacggatgcctgcaaggtctatagttcatggtctctctgtctt

SEQ ID NO: 54391 - DNA, 316 bp, Gossypium hirsutum
  Clone ID: uC-gsflnu33B037e10b1
gctcactctcgatctgaaggcggtgggctccgaacgccatttgatgctctgattacagtgtgtaattcaaaaagtgggacgcaacccatggcaccgatggggctatatctctgcctgaactcgttttaggaatgaggaagggatgcccattagagtagcagatgggcattgtcctaaggcctatgtattctcatttaagttaaattagatcgcgataagctgactaggactgggaaacatgtcagaacccaaaacctatgttgatgaggtagaactagttaataggatttctgctttatcatttctttgggcgggc

SEQ ID NO: 54392 - DNA, 394 bp, Gossypium hirsutum
  Clone ID: uC-gsflnu33B037e11b1
tgtagtatttgaagccgagtaatatattacttgaccagaacatggaagcccacatttctgattttggacttggacggcttgccaatattgctggagggtctccaaccacacaatctaaccgaatactttcagataaaccgctagagagactacaaaagagtgcttcctccgaagctgctccactctactcgaacttgggatctttttaccaagctcctgaagccctgaaagtggtgaaaccatcacagaagtgggatgtctactcatatggtgtaatcttgctagagatgatcacgggaaggtcacccgtggttcatgtaggtacctcagaaatggatcttgttaattggatccagctatgcattgaagagaagaaaccactttcagatgtttt

SEQ ID NO: 54393 - DNA, 344 bp, Gossypium hirsutum
  Clone ID: uC-gsflnu33B037f12b1
ttatgcgttcggaacccaatttcaagcaaaaggtaatatatcgcgtgtaactgtttggttctccgctagactaatttacttattccctaaagcaacgagataaaatgcacaccctttaccaatccctcattcaaaagagtcttccactttaaccaggctataccactcccaagtgagatgcctatacttcgcaaagaacctgaaccggtagggccggccctttaaaagggcccagctttgataccccgggccggcgacgacttagcttttctaggggggcccctaaattcaaccaatgggccggggtttaacaacggcgggactggaaaaacccgggggaaccc

SEQ ID NO: 54394 - DNA, 390 bp, Gossypium hirsutum
  Clone ID: uC-gsflnu33B037h05b1
atttcttgcagcagacgtggatcctcatcggattttgcatcaaacggcctgctcctaccgttggtctacatgaactttatcggtttcatggacatatgccagttcagcatacaacatacctgtatctttaccagatgttctccacgagccagcaacatgcaggcaatggaaacagagaaatgtattggcaggagtgtacacatttaacaccataaaattccacccacacctttgccagagacccacaatcttctatttaaacagtgaatactctaccccgcacggactaatacagactgtgcacaatcaatatcacgaagattgcacgcttatcatggatccgacccgttaactggacgatatacgagtcttactaacaaactagacctt

SEQ ID NO: 54395 - DNA, 283 bp, Gossypium hirsutum
  Clone ID: uC-gsflnu33B046a09b1
atcctcacgcgtccgtatatcaccgttttgcagcaatgagaaagctgatgaggttgaagaatttttcgaaagccgtgtgacttcttcatttgcaatgaatttgaagcaaagcattgagcaggttcggatcaaagcaaggctggttgaaagcataaagcaggagcggcaacctcttcaagacctactcaagcaattagtttgtaagggatgataacttcagctgttatctcaatgtataatatatttatatgtactaaagcataaaggcttgacattttgtctg

SEQ ID NO: 54396 - DNA, 465 bp, Gossypium hirsutum
  Clone ID: uC-gsflnu33B046b03b1
gctctttcgtccggagatgaccgctgagatgctcgattacaagatccacgctgtctacaactctttgtacagcacacctacatgttatgggattcatatgtgcggactgctgtttgaagaccttttgctgcagggaggactggaagaggtcgacaagaagaaccacatgaaagccggtgtcttgtacaatgccatcggtgaatgcagaggattctacaggagccctgttgagaaatctgtgagggcaatgatgactgtgccattcacattgtagaagtctgagttggaggctgaggtcttaaaggaagccatgaaggagatgatggtgcatctgaagggacataggtcgctggcaggcatgcgagctgccatgtataatgctatgcctgtggcgggagttgagaagatgaatgctttcatgaaagattatccggcaaagcatgctcgatccatgtcaattgctat

SEQ ID NO: 54397 - DNA, 524 bp, Gossypium hirsutum
  unsure (1)..(524): unsure at all n locations
  Clone ID: uC-gsflnu33B046c02b1
catagcttcgtcttccactgtttatccccattaagcttctctgtttcttttaatcgtaatatttagggtaagtttcgatttttggcggggaaatatgtctggaaaaggcgccaaaggtttgataatgggcaaaaactcggcttctaacaaggacaaagacaagaaaaaacccatctctcgttcttctcgagctggtctccagtttcctgtgggtcgtatccaccgtcttctaaagttaaggaccactgcacacgggcgagtaggagccactgccgcggtttattccgctgctattctcgaatacttgactgcagaggtgttggagttggccggtaatgcaagcaaggatctcaaggtgaaacgtattactccccggcatttgcagctcgccatccgtggtgacgaggagctcgatactctgatcaagggaaccattgctggcggtggtgtgatccctcatatgcataagtcactcatcaacagatcatcccaggagtagactatataacgngtatatatatgta

SEQ ID NO: 54398 - DNA, 253 bp, Gossypium hirsutum
  Clone ID: uC-gsflnu33B046c03b1
agtgcaaggaattgcaatggaggtgcattgagggatacaaagaccgtcttaacttctttctcctgaactgttgtgttatggtagcttgaactttgtagtttgttgtattggttaccatatagtgtttacttaatttgctgaataaaagatggattgtgtagggtaaggggagtgagttgtaagaaacttttttgtctttgtcatgtggtgtgtgcttttcactcggtcccttctgaaaaaaattaactgtgtg

SEQ ID NO: 54399 - DNA, 452 bp, Gossypium hirsutum
  Clone ID: uC-gsflnu33B046c04b1
atttcacgccttattgcagttgccacagatgcgagatccaatatggacggcgcgctgaagtccttccatatgttgatcaggagcagatatctttctaatgacttaccaacgccacctacatggaacagcatcgcctgtttagacaaactatcaacgctgagatgaaaataccagtgcccataaacagctgtacaagcctacaactttaattggcgacccttacaagtacaacatctttcctactgtaccagctcagcagaatgtgactccaccacccacactataccatacacatcctgaatgcgtgacagagaatgacagtctgacaagattttcctttacaggctcccaagaaatcaaccgccacagcacatcaaaccgtgcacatattagcgtctgatattgcacattattattgtgtgctcctacattcatgatgcccatactccatt

SEQ ID NO: 54400 - DNA, 345 bp, Gossypium hirsutum
  Clone ID: uC-gsflnu33B046c07b1
ttctcgcgtgcgcccacgcgaacggcctgaagacgcttttgtgaggaataagacccaactcccccttagagactagacagtacagcgctgatgtaagcctacaatacccattttattggagctaacaagaagctgtctaacccacggagggagacaaaagttcaaaaacttgacctcaacatttacataagtgaaagtgctgaccgtataacccgtgccgacaaggtcaagaaacaactaaaaggacaaacccgcgcgcacttaaaaactagttacaatgctagatggttcctaagacgggctcttgagaagagtgctagctacatgactgttagtggagagaaa

SEQ ID NO: 54401 - DNA, 613 bp, Gossypium hirsutum
  Clone ID: uC-gsflnu33B046e01b1
cttactcgtgcgcccacgcgtgcgcccacgcgtgcgatatactagctatggcgagtacataggttaaatttaattgtgaacataagtgaacctaattgtagaatctaaatacttttgttaattttataaattttattaaaataaaatgggtttaagatcaaataacccatatttaattattcttaaattctcaaaatatcaaaatgtaaaacagtatcgataccagaataaagatatcgacactttgataaaggtatcgatactttaagcaaagtcaagatactttaagtaaacatattcatcaaaacagtttggatagcagtagtggtccaaatttgaaaattcaccaaaaatcgtagagatagatatagaggttgaattaaatatggaattagaacttaatgagtctagtttttcataaaagaaacggtgtaagcaatagaattgtagattatgagatatatggattttagtgagacaatatcagaattattttgggttctcttgttctagctttgaaaattatagtaaattgtacaaatattttaggagatgaaatcatttgaataaagtttagcaaactatttttaggaaaacaaatggaacttaataa

SEQ ID NO: 54402 - DNA, 199 bp, Gossypium hirsutum
  Clone ID: uC-gsflnu33B046e11b1
tttttcacctcccagcgtgcaaaggcaaccaggggagacatgctgacaacgaagggggccctacccaaaacaatgactaaaaacaaggcttccgagcgaacaatttcaacacaaggactcctataaaaacaaaaaaacccgacccaaaaattacaaggttgagaactgagaaaacctcggaccaaccgaaattaataaa

SEQ ID NO: 54403 - DNA, 108 bp, Gossypium hirsutum
  Clone ID: uC-gsflnu33B046e12b1
ctctcgcgcccgaacacgcgtccgacatagggggagaactattaggataggcccgattaccccaagactaataccctgccaaagaattgattgaacgatgaacaaaac

SEQ ID NO: 54404 - DNA, 335 bp, Gossypium hirsutum
  Clone ID: uC-gsflnu33B046f07b1
tcctatcgtgcggaagggaaagggaaccgagggtccattgtaatgaggtggcttgatgaccattcccctcaaatagagttccaaagtaagatatttactgctgtgaatatactctatggacgaaaaacttgtcaaattattagccttagtgtttatggattgttcagaaggctggatatgacacttctagggattcagcaaatcttgctactgggcattaccattgcatctctgaatgtaccaatctctatacttgacggagatcatatataatgtctagcactttttgaagtgaagaagctgatgaagaaacacaagatgcactaagtaatgat

SEQ ID NO: 54405 - DNA, 387 bp, Gossypium hirsutum
  Clone ID: uC-gsflnu33B046f08b1
ttctttaaccctctgaaaaaacaatcctcctgccgacagatactaaagtcttgaatttgctcgcttggggcttgtaacgaaggacaagaaaaatatcgcctatgacagaacagctacctgcatagatatcctcacagacaccattttgcctactgtcggtgtcttcctcaactttgcatgccagctacaattctggatatcccatgctctcaccctgtgtgggtacattcctggctttatttatcctatctatgccatcaccaagtacacctctaatgccgtacttgtgatatgtggagaattgctgtccgattctcggtatgattgaatttgattacgcgatagtattttatgcccactaatatttaggatgttcatttgatggcg

SEQ ID NO: 54406 - DNA, 494 bp, Gossypium hirsutum
  Clone ID: uC-gsflnu33B046f09b1
catggatgcccctaagagttgtacgcctgaagaagttgccactgtgaatgtaatatctgcaaaagatttgcttggatcaaactactgctatctggatgtgaggacacccgaggagttcagtaaaagtcatattgaccatgctttcaatgttccttacatgttcatcacacaagaaggtaaagtgaaaaatccagagttcctgaaggaggtctccttaatcttgaaaaaggatgatcacataattgtgggttgcaacagtggaggacgaggtgtcctagcttgtgttgatcttatcgaggctggctatgagaatgtgagtaacatggaaggtggttattcagcttgggtcgacgctggactcacatttgtcggtgagaaacctgctgaagagcttaaaagcaaatttcgcccttaattgaaattaaattccaccttcgtatcaatgggtgggaaaataaataaatcaaaatcatgtccaatttgccatactatat

SEQ ID NO: 54407 - DNA, 370 bp, Gossypium hirsutum
  Clone ID: uC-gsflnu33B046g09b1
gttgttacgcgtccgcgcacagagtgccatgactggggagaacaagatccgttcgagaacatatggagcgaaccacccagagatgcatacttgaattgaacatcaacactggtagtagcagtccacgtaagaatatgtttaaagctgtcacaacatataaacctatctatatttcacaacatccatgaaatggatgttgatgctttctatagaataattgcttatgaatgagctgatcatgttatgaccatgtttgatacaaactccattggtgctctgtgctttatagggaagaacatcgtgatgcgcttcaaagattacagttaatgctaatttacctattttctgttattgcacgtatgaaatgtct

SEQ ID NO: 54408 - DNA, 369 bp, Gossypium hirsutum
  Clone ID: uC-gsflnu33B046g11b1
tgttttactataccataataaaaagaatactaggggaaattatcaacaaattatgctacttcagctaacaaaatcaaagtttctttgctcgtacgcaaaccatgaaccctttcttctaacccaagctacctatacttcataaaccttggcttcaaactttgtctcttgcactctccttgctagcctctatagcaagccactgctactacactctccttcgtctcagaaccgatctatcagacaacgactttcccaccttccatagccagaaacagggcagcctgactgccaatacggacgggaaactcctcctacaacgataacattgggcgtcagctcaacaaaacccttaacccaaactcctaaaga

SEQ ID NO: 54409 - DNA, 254 bp, Gossypium hirsutum
  Clone ID: uC-gsflnu33B046g12b1
ttttttgcgcatgaaagtaaaaaaaacaataggggggcacatttaggttagacccctgtactacaagcaactctaaccctaaaacaggccgtagaagcccttaaaacaaacataacttttacatgcaatgctcccttttatttccagacagagggcatgattacaattaagcatgccatgggttcatgtttgcaatcagaaatatttagcgcccctgtctataaacccttaccactttactaaagagatgattg

SEQ ID NO: 54410 - DNA, 427 bp, Gossypium hirsutum
  Clone ID: uC-gsflnu33B046h06b1
tccatgcttgcgcccaggcgtgcggaccatgcgggccgttttaatgagtccagcttgcttgctctcccttaaaggaccgacattgtgaagaccgttgaacccatagagccgccatcctgtgcccctgcatgggactaactcagagctgcttgcatgggatggcaaaaatactagaggggagttcttggtgctgatccctttctggggatctgctgccgggctaaaagaaaccaccgtgacccacgccacggtactaagatcaaagctaccagagtcacccacatacatgcactaatcgcaggtagccaacaatgttgatattgagcctactggtggtacccaaagaacaacagaccctcaaggggacctagaccaagtagcttgacgaaggggtgtgctaactaaaaaatttacctttccttattgc

SEQ ID NO: 54411 - DNA, 296 bp, Gossypium hirsutum
  Clone ID: uC-gsflnu33B046h07b1
ttatttggcgtctgaccaagccctggatcctgggggcgcttatctagatctacctggtgttactcatcaacaacatattcttaattttacataatgcctgacgataatgaattttttcacccctgctcaaagatgtcaacggtccagtctctacacggaatccatgccacaaaaaaggttgcgaaaaaagagagcaaaagcagaccatctgatatatggaagctctcgtactcggccccggaacttatgagattgtttaccaggcaaaatgcttgaaaacgggagagactgtttta

SEQ ID NO: 54412 - DNA, 305 bp, Gossypium hirsutum
  Clone ID: uC-gsflnu33B046h08b1
ttattgtctcattgagcatgtattaagcaacaggggaacctctataaggccggctgttgttcccacggatgattatattttgagtttactagatgaaggggcaaagagcaccctttcaggcaactataaaaggcactgggggatgtactcctttgatggccaggctaaatacacactagacctagaatagagaaacaggaggcccatctaacggatccaatgttcacgaatctcccggctagatggcgtattgccaacccgaatagggatcaatgtgaagtggcagaccacatgaaacaacgctt

SEQ ID NO: 54413 - DNA, 313 bp, Gossypium hirsutum
  Clone ID: uC-gsflnu33B046h11b1
ttgtatcgcgtgggaaaaaatgagactaaataggggggctttattgggacaaaccaacttcaaacggctgctactgctaccactgagtgcactattacaaatgatgcctggtcagaatctagtcttggctctggcgaactacgaaactgctgcggaaacgaacaagattacagaatcagagactttaacgctgactatgccaggcatttatctgaacggacctcttgtgtatcaagccaaccatagccttaggtggatcatcattggggcccctgctaattaggactctactgagacggtctatactaatgac

SEQ ID NO: 54414 - DNA, 334 bp, Gossypium hirsutum
  Clone ID: uC-gsflnu33B046h12b1
tttgcacccaacaaaggatcaacaacggtcgggggcctcttttagggccaacaaatttcccacaagtctcggagcacaaagaatagggcccgagaagacaacaaccgagccagactgtatcgctctagccgacaccatcgcggccagaggcagtaaacacgaatccgcctgcatggctgagcaagagaaatgcaacccaaaggacttaggcctcaaggcaattaggggacaccagatgccagtccaccagattgaggcaagtggaaaaccagcagatgccgaatacgggaggaacccgacaaactgatacaagggtttaactggtacaactcca

SEQ ID NO: 54415 - DNA, 507 bp, Gossypium hirsutum
  Clone ID: uC-gsflnu33B049a01b1
ctttttcaaggtgctgaacctggacctccatatactacaggggaccatcttataaccaatgctggcaaaatggttctcttggacaagctactgccaaagctaaaggagcgtgattctagagttctgatattttctcagatgacaaggttgctggatattcttgaagattatttgatgttccgtgggtacctgtattgtcggattgatggtaatacgggtggagaagaccgtgatgcttctattgaagcctttaataagccaggaagtgagaaatttgttttcttgttatcaactagagctggaggtcttggtattaatcttgctacagcagatgttgtcatcctttatgatagtgactggaatcacaagttgatctgcaagccagaatcgtgctcatagaattggtcaaaagaggaagttcaagtgtttcgcttttgacggagtacactattgaggaaaaggtgatagagagggcctacaaaaagcttgctctagatgctctggtta

SEQ ID NO: 54416 - DNA, 226 bp, Gossypium hirsutum
  Clone ID: uC-gsflnu33B049a05b1
gtcggttcagagccgtgtacgatatgtcgttgggggtacgtgcgagacggattaagactcgggtgtacccgatccgaagatgggagaccgatcagtgctggtaggccaaaaaaaaaaagaagaaaattagggattattcccccctttttttgcaattgatgtttgtacacaaatgttttgtttcatcggcgggaattgagtgaatatacattttttatccccaatt

SEQ ID NO: 54417 - DNA, 279 bp, Gossypium hirsutum
  Clone ID: uC-gsflnu33B049b02b1
aatttccatagttttctgtaaaaattcctaattccggtctataaaataatagtagtagaatccaagcaaatttcatgtaatagcttgtaggcactcctaacggagaactcccctgtcaactcccctctccatacttaaaaatcttcgtgtgctgtctccgctagccgggatcttcagaattttttccgctacatccattcggaaggtattccttatgacctctgttttccagcttctattagtggcttcgattaaatttgaaactaacttagtattaag

SEQ ID NO: 54418 - DNA, 248 bp, Gossypium hirsutum
  Clone ID: uC-gsflnu33B049b05b1
tttactcatgcggggagatatgctcatagtcactacttaaagatagttgattgcttgaaagacctcttacagaggagagaccatctatagtggcagatagggaattgaatcaattaagctactactcagaagtaaagtatgaattagcctgaaactaaatcagcatgtgatatatccatctaacaaagtctaattagagtgtatagaagcattgaacccatgtagtaaacagcggatgtatgcaacct

SEQ ID NO: 54419 - DNA, 282 bp, Gossypium hirsutum
  Clone ID: uC-gsflnu33B049b09b1
ttacccttaaccaccaaaacggatctttggaggttcctttggataaaagagagcgaaggcggcgtgctgactgaaccccccccttaacgtaggatacccttaacccttatccctacccccttatccctaccccttatccctatctcctctttcttctcgttttgaaaaaaaaaaaaaaggaaaaaaaaatgaaagggaaaagctaaaaaatttgttttgtttgagtctagacgtcatcagttgaaacccacagtgctttgctaacctagaatactttttgac

SEQ ID NO: 54420 - DNA, 158 bp, Gossypium hirsutum
  Clone ID: uC-gsflnu33B049b11b1
gatttgcattgagctttttgcgtaagtgaggtttgagtatggggagttgtagggttattggcgctgcgttcttggttttgctccttgtagatttagcttttgctgctaggtcatttaaggctgtaggaaagggaggtggtgctggaggaggaggagga

SEQ ID NO: 54421 - DNA, 440 bp, Gossypium hirsutum
  Clone ID: uC-gsflnu33B049c10b1
tcgtctacgcgtccgaagacgatgggggaaaataaagctacaagggatgcaagcatttgtaggctataaaaaaagagcaaagtagtgaatgcatttcatcactagatttggaaatggagctccttaacgtacccaaactttccatcaatcctttgatttcatctctgattctccttttctcccttttaatttggcttaaactagcaaaaaggaaaaccctgaatttgcctgcatcacctccaaagttaccacttattggcaacatccatcaacttggcaaacttgcccaccgttctctctgggaccttgttaggaaatatggatctctcctacttctacaattggggtataacccaactgtaggggtttcatcacccgacatggttagagaaattgtgggagaccatgacattgttttcgccacagaccaaggaccacag

SEQ ID NO: 54422 - DNA, 134 bp, Gossypium hirsutum
  Clone ID: uC-gsflnu33B049d10b1
atattagcatcccacatatgaggcacaaaatggcactacctatactatgccgagcggactaaggtccataaaccgatgagtttgagggcgcggcggtcgtcgaaaaacccggagcgcgagcccgggcggggcgg

SEQ ID NO: 54423 - DNA, 334 bp, Gossypium hirsutum
  Clone ID: uC-gsflnu33B049e03b1
cttatttgtacggaaacataggggttctaattaggactctgccgaccgttatctaatcgcagttatgagcatccgagagaagaaccgcagggagatgtcagagaatgtttttcacagagggttgtttgctacgccaaaaaagatcacaacttggcacaaacacctagaaatcagaagtggcatagctccaaggaatacagctggtgcacagttttaaatgcaaggaatacggaatggagactcttgcttgtatgcatcattactgggaccataccaacgacggcatagaatctttaaggacataccttagatgactccatgggattgactctgc

SEQ ID NO: 54424 - DNA, 460 bp, Gossypium hirsutum
  Clone ID: uC-gsflnu33B049f01b1
ttccgtttacgatggttacctcaacggacaacttaatgtggctcgtgcattaggggattggcacattgaaggaatgaaagatgcaaatggaggaccactaagtgcagagcctgagcttatgactgcagatctgacggaggaagatgaattcattatcataggatgtgatgggctttgggatgttttccgtagtcaaaatgcagttgattttgctaggcggagacttcaagagcataatgatcctgccatgtgcagtaaggatctggtggatgaagctttgaaaaggaaaagccaggataacttgactgttgttgtggtttgctttcaatccaatccgcccccaaacttggttgccccccgtgcgagagtgcggaggaagctttctgcaaagggattgagagagttgcaagcttgttggatggtttgggaaactaaaatggtgacaaaatgcttactctat

SEQ ID NO: 54425 - DNA, 384 bp, Gossypium hirsutum
  Clone ID: uC-gsflnu33B049f10b1
ctgttgtagagagcgccatgaacaagggtgtctgcaagtacggaaaggtcgatatcatgtacaaccatgccgtcactcttgaagccaacgaaacgcgagtgacacaggctagttccgaagacaacaagagagagttcggatcagtgagtgggcgcatatcgagggccaagactgttgacagggccatggtgccattcaagaaaggcggaagactattcactatcagactgggttcaagaataaggttcgggcgcgtcgaggcatacagagagttgaatcaagcgagtgtaacaaagacgaagagcattggcgggctgttaggagagcatggcagatcagtgaactatatttcacgtcatgcgacaatgagtgccaggttgcaaa

SEQ ID NO: 54426 - DNA, 495 bp, Gossypium hirsutum
  Clone ID: uC-gsflnu33B049f12b1
gtttaatcgaaatgcaagacccgacgggttttcaacaaatgaaggcaccggtttttccagagcaggagcagctaaaatgcccgcgctgtgactcaaccaacactaaattctgttactacaacaactacaacttagctcagccccgccatttctgcaagagctgccggcgttattggaccaaaggcggagcccttcggaacatccccgtcggcgggggtacccgcaagaactccaaacgctcctcctcttcctcggacagtagcagccaacccaaacgccagtctaaccccgctccggactcgatccgaaaccaaaatcttcccgactcgtctccgccgccgacgattccgcagcaggttcttctgagctcggcggttcagaattcggtttcgaatgccgaccagacccggatgtatgtcttgtcccttgatcatcaagcaaggaagatgacggatagtggtgggagttttagctcgctgctggcatcgagtgggc

SEQ ID NO: 54427 - DNA, 395 bp, Gossypium hirsutum
  Clone ID: uC-gsflnu33B049g10b1
tcgtgaattcataggtttgatgggtttagtttctcaatctttctaccactctgaccaatacttgatagccttatccataagactatagtttagtagttggcatttagcacacattacacctttttcatacatactttttggtttctctaccttacctcggttagactggtcaaagtttatagagctagcctattgatggtgtatgggccatacccacttcctaggctgtagacgggaggcacagatcttagttctatcgggataactaggtagaaggactatcatccaattatcaaggtgtgcgagccacccgactactggaagaggcggtagcccccccagaaagaaaggaaatttctgtgagaaagctcttactttgtgggacttggattagc

SEQ ID NO: 54428 - DNA, 428 bp, Gossypium hirsutum
  Clone ID: uC-gsflnu33B049h03b1
atgcgtttgctagttctcccatttctacacgctaccaaagccatgtatccatcatcttcgtctcaaaagcccatgggtcacaccgtgctcacccgacacggtgctgctcccggtttccatctggccagacgccgaccatatcaccatcggagcggaccctaacctcgtcggccactacttctacgacgctgactcctcctctttaactacagagtcaacttgccaagccagttcatccaacgatccgcgagagcctaaatcagctgctgctgctgctcctgcccctcctcatccttctccgcatcatccccatggatcttaccctgcaccttcttcttcctttttggtcagacaacgcatcttccccgccggattccttagtcacctcacatcggaaaacggattttctgttacaatgggcaacagaa

SEQ ID NO: 54429 - DNA, 504 bp, Gossypium hirsutum
  Clone ID: uC-gsflnu33B049h08b1
tcgtttacgcgtccggcttgatcaagcaacactggaagatctcctgatacctaatttctcctgttctatggaaacactatataatgttgactgtgtgcagcaaattcttgaacattttcttgcaatggaccagatcactggtggagcctctccatctttggttgatgatggtcagattaccgcctcgccttcattaacaccagttacactggtagccaagctaattgatgggtaccttgcagaggttgcctatgatgttaatttgaagcttcccaagtttcaggctcttgctgcttctgttcctgactactccaggcccttggatgatggtctgtattgtgcagaagacatttatcttaagtcacacccattggtgtctgaatctgagaaagaacaactatgccggctgatggactgccagaagtttttcttgaaagctgcactcatgctgcacaaatgagaaacttgcattaaaatagtggtccaattctgtcttttgacatt

SEQ ID NO: 54430 - DNA, 197 bp, Gossypium hirsutum
  Clone ID: uC-gsflnu33B050a04b1
tttcccacgcgtccgcccacgcgtccgtatcttctctctctctttatccaaagtctgatgattgattccagttgggttaccgcacaaaccaactggtttaaagtccaaaattttggtttcaagattagatttttttaaaataaataaaaaagttgcagtcttgattccttttgatctaaagcctttgagtgtaggtt

SEQ ID NO: 54431 - DNA, 453 bp, Gossypium hirsutum
  unsure (1)..(453): unsure at all n locations
  Clone ID: uC-gsflnu33B050b05b1
gagctttccaagatttttaatcgaatgcttcaccatggttttgctcctaatactataaccttcaatgtcatgcttgatgtttatggtaaagccaaacttttcaggaaggtcaagaaactattctggatggcaaaaactggaggtttggtagatgtaatctcttacaatactattatatctgcttatggtcaaaataaggacttcaagaatatgtcatcaaccattcgagaaatgcaattcaatggtttttcagtttcccttgaagcctataattgcatgttggatgcatatgggaaagaaggcgaaatggagaatttccgaagtgtattgcagaggatgaaggaatcaaattgtgcttccgaccactatacttacaacattatgatcaatatttatggngaacgaagatggattgatgaagttgctgctgtgctgacagactgaagaatgtgg

SEQ ID NO: 54432 - DNA, 230 bp, Gossypium hirsutum
  Clone ID: uC-gsflnu33B050c06b1
tcccacgcgttcgagctaacaattaatgaggaaggttttgcgggtttattgggagtaaacaccacacaagttattcctgaatctccccaccccaggcctaagaaaccttctctttcaagaactacttccctgaggcatcttcaacttcaaatattctactggagctccctcatcttatttaggctgggtgctaaacaatgggtatttatagtttatacaaatacattaaa

SEQ ID NO: 54433 - DNA, 394 bp, Gossypium hirsutum
  Clone ID: uC-gsflnu33B050d08b1
aaaaaaaaaaaaaaaaaaaaaaaaaaaaaaaaaaaaaaaaaagaaaaaacaaatacaagaatccaaaactacacacctccaacatgctacctcttatatattgtatcctgaaacctatattctgggcgctgcccttcaaggtaccccactttccaccccctgacctctcccattttccttttttttcggctcaccccactttcaccttttggccgctggtttaatagcgtcgagcccggaaccccttcgcactttcccccatttactgcacttgaatggttcccgctttgcgccctgtcattaagcactaagggcgccggccgtactcccttcccgaaccgtgccctttccagttgcctaatgcccacccccctctctttgcgcctttaccccc

SEQ ID NO: 54434 - DNA, 446 bp, Gossypium hirsutum
  Clone ID: uC-gsflnu33B050d11b1
tccacgcgtccggtctaactcgaccaactatctcaattcaaagttatttggacaggatttataagtatgcaaattgtagcccttcctgttttatcgttgcatacatttaccttgatcggtttgctaaaaaaaaaacccactttgcccatcaattcattcaatgttcatcgcctgcttattacaagtgtcatggttgctgccaagttcatggatgatatatattataacaatgcttactatgcaaaagtgggaggaatcagcacaatagaaatgaattaccttgaaatggattttttatttgggttgggttttcatttaaatgtagcccccaatactttttacacttacttcacttacctacaaagagagatcatgttgcaaccaccaccaagtattgcagaatcatcattaagtcttgataggtcattaaaagtccacttatgttt

SEQ ID NO: 54435 - DNA, 350 bp, Gossypium hirsutum
  Clone ID: uC-gsflnu33B050g02b1
ctgtcgcgtgggtggtaatgttgtaatggcaactgctgtaaggaacatgggacgtgttgttgacaataagaacagggagaatgttcaagggtagttttgagacaatccatgattctaaatccttgttgacacgagtttgtatctcgtttaggtattgacatttattatctcgtaaaggtacaatcatcatgggtaaattgttcctaagggttttgacaggtaaatttaggttttttacaatgtttgccctactgctacccacttttttaagccatacggtcggggatgctaatgtctaattcaatgttaactttgcacttttattaaacccaattacaaaatatttgtaa

SEQ ID NO: 54436 - DNA, 455 bp, Gossypium hirsutum
  unsure (1)..(455): unsure at all n locations
  Clone ID: uC-gsflnu33B050g09b1
ttccacgcgtccgggaaataatagattcaagaaccagcaacaccctacaatgcaaggccttggaccatgcagattcattaggtcttgtactaataagtagcagaacaaggagcttgattaactggctggtgaatgcattgatgagtctccaacatccacattcagaaactggaatccctgctgtcaaaatctatggtccaaaagtaatgtttgaccgaggtccagcagtggctttcaatgtatttgattggaaaggggaaaggattcatcctgcattagtgcaaaaactggctgatagaaacaatatttcattgagcattgggtgtttacaacacatctggttcagtgataaacatgaagaaatgaaggaaaaagataagtttcagcctgngatagatgttgttacagctgcaattgggtaccttactaattttgaagacatttataggctttgg

SEQ ID NO: 54437 - DNA, 421 bp, Gossypium hirsutum
  unsure (1)..(421): unsure at all n locations
  Clone ID: uC-gsflnu33B050g12b1
acccttcctccaggcatggataacatgcaaaagtaggatgtttcagttggagcccagtatcaaaagtttaccccacttaagggctaatgagcaccaggaccaagaccctctggttggtgactcgggtagtactggtacatgttcgtgaaggaagaacttaagaaggtttaaccgggtttcaattgggccttcattaaaaaaccaggaaagcccccatgatcctgcaatcctggtaccgatttacaaatagaaagggaatggctcaaaaataaggtaggggtatatatttaccctgggttttatttcaaaaaaaaaaaaanttaaaanaaaatataaattaatttataaaaaaagaaaaaactataaaaaaaaaaaggggggcgccctctataggggcccaatttttatacccgcgcatgtg

SEQ ID NO: 54438 - DNA, 276 bp, Gossypium hirsutum
  Clone ID: uC-gsflnu33B050h10b1
ttttaaatgctactttttcttcctctccttcctttctttttcttaactttcgttagtataatgttataagtcgaaagaagtaagagcatttctttctttgtcttttctgccctctggtaccgtaccgtatacattatgttgttccagtcccttttagttctttctttggggatccatatattggttttgctgaccccttttgttgcaatggaattttcttccgacttaattttaaaaaaaaaaaaaccctataaaaaaacaaaaaaaaaatgggcc

SEQ ID NO: 54439 - DNA, 376 bp, Gossypium hirsutum
  unsure (1)..(376): unsure at all n locations
  Clone ID: uC-gsflnu33B051a01b1
tgtcgatagcgattcgagctccgatctgttcgagctccaaaactacgatttaggtatctattcaggtggtttacctgtgtatgaaacaacacatatggacagcatcaagagaggagcaccaatttccaatggtgcactatgaaactatacattttcaacttgttgatgatgggttccatttgtttccattgccattgtaggcattagattttgctcgtcttttttttcttcttccctattgctagcttctttgaaagttcgttgaatgctttttccccttttttttattttctctgnatgtacagtttggaatgttttgttggcttcactttctgaatcttcttttctttcttttgaggctggcatggattaagcc

SEQ ID NO: 54440 - DNA, 183 bp, Gossypium hirsutum
  Clone ID: uC-gsflnu33B051b06b1
ggtacgtatcgcacatccagagaagtataccgatgaagggaagccaactcctactgagtttgaggaccctaagctttatcattatgcgattttttcggataacggacttgcagcatcagtggtggtgaattccgtcacgaataacgccaaagagccctggaaacactgttatccatgtagtga

SEQ ID NO: 54441 - DNA, 212 bp, Gossypium hirsutum
  Clone ID: uC-gsflnu33B051c11b1
tgatgagcagagcgtcgagagtagacttgaagaagtttagtctctagatggtctttatacagccatagttcaaccaatgcagaccaagaaatataattatcactgccttgaagtttgacagtagtaatggctggataactagaaattgaagaaaaaaaaaaaaagaaaaagaatagaaaaaaacaatgaaaatattgagaaaaagtggaagc

SEQ ID NO: 54442 - DNA, 238 bp, Gossypium hirsutum
  Clone ID: uC-gsflnu33B051d05b1
ctattgtttgttaaataaactacgcgagatcttagccggtttaaaaccctccaactctttttcatcatcatcatcatcatcatcatcttcttactttgttaactgaaaaaaaaaaactcaacttagggctaaaaaaaccagatctctctcaatcgggatcaatggaagctcaatgcaatggattgttgcaataagaaatcggattcttggacggatataggagccttttgattgattg

SEQ ID NO: 54443 - DNA, 467 bp, Gossypium hirsutum
  Clone ID: uC-gsflnu33B051e02b1
gtccatgggagacgcggttgatggaactgtcaacacgtaccgacccttcgaagacttgcttagagtccctctcgggaaagaatgaaagatgttcggaaccgtgctcaatgaaagcgaggaagaacaatgtcaccactagggtatccgcaaagccgccgcctcatactaggcaagttactcgatcatcttcaagtccaagttctgaatttcgattcgacgaaagctcgggttcatcgtcaatatgcacttctacaacaccagtttccggaaccaccgtcttgccatcggatgcgacgggggacagtggcaatagtaggccgaactacatgaacatgacggtgtctaccaaggcgaaacaaagaagtggcaatcacggattccaaaggcagtccatggatgagttcgagttcaagaggtcagcttgtttcgataacggagattcaaaaagctcaaagagaggaaattgt

SEQ ID NO: 54444 - DNA, 390 bp, Gossypium hirsutum
  Clone ID: uC-gsflnu33B051e07b1
gtaaactttatcacccgtctctgagttgaggaactaaggacaactctggttcgaagtttgaatctcaatggaggagcgcgactggtagcccaaatttgactgctgactgctataccagagctaatgagagaacgcaatgcagaacgggaagtctgacagtaacaagggcacgagtagggatgatgccagtaggaactccaagagaaccctatagagttgcaggtgacggaactagataagggtgctgatggagggaaagcactatatcaagagcgcgctatttgcattgagcaacagatggatgatgtattaatgacctaaatagtggcagcaggggcatacattgatagtatagatgattagaacaggcaaaatgaccacagtgatggg

SEQ ID NO: 54445 - DNA, 196 bp, Gossypium hirsutum
  Clone ID: uC-gsflnu33B051e12b1
tctttcaacacaccttaaatcatccataattccacaccagaaaacagagttaaagccaaagtttctcgatggagaatttgctagggttgttgagaattcatgttcaaagaggggtgaatcttgctgcgagagatgtttttaccagcgatccttatgttgttatcagaatgggaaaacagaaattgaagactcgtgt

SEQ ID NO: 54446 - DNA, 276 bp, Gossypium hirsutum
  Clone ID: uC-gsflnu33B051g02b1
attattgttaccgctgtggaaacatggcttctatattggaagttgacgattgcaagagtcacacattcatccagtttgagccagctccaaggagaggtgaacctgatgttacccgtagaacaccggattacttcctgtgaagcagctatatgccacaacttattcaagatactcaacttttgttcctctccgctctccccttacatagttaggtagttgtggatcctttgcagcgtctgttgcatctactgcctgccattcttacatatctttttt

SEQ ID NO: 54447 - DNA, 267 bp, Gossypium hirsutum
  Clone ID: uC-gsflnu33B051g04b1
gattttgctgatacaaattttgccaaaaaatgtactatgctatatttactatactgcccgcatcataaacacgtactgcttttatttaaactgcactcatgactatcactgtaaattaacgcgacataacctacaacggccataacccacagaacgcaacatcagacattgtaggttcaccacaatgggggagcaggaccatttagacgggccaagattactttcgagacctggccatgtcatacgaccccattaccttagacaaca

SEQ ID NO: 54448 - DNA, 393 bp, Gossypium hirsutum
  Clone ID: uC-gsflnu33B051g07b1
tcggactggtgctaccttctgattctccacttcgcactagtctattaacggagttccatttgtcccctgttggcggccactcaggcatcacccgtacgtttcatcgccttactacaaatgtttattgaaagaatatgcatcgagatgtccgctcttgccagatctgtcaacagatgaagtctgctacaatttctccagctggcctccttcaacctcttccaatttcgattttcatctttgaaaatatttccatcgactttatcaccgagtttccaccttcaaagggtaaaaccgtggttatggtggtcgttgatcgacttttataatatgggccttttgtgggtctgtcaactcatttttctcagcaaatagttgctttttgcttttggcaag

SEQ ID NO: 54449 - DNA, 499 bp, Gossypium hirsutum
  Clone ID: uC-gsflnu33B051h01b1
agagaactccgacgacgtaaccgtgaggtgatccaagtaattttcttccttcttcttttttgttttcgtttacatatctaaataaaatataaagtaatcaaataaaaaagaaaaaaaagaacaagaatttaaaacgaaagtaaaaaaacctttgaagcttttctctgttttttttctgttttcgatttctttttaaaaaaaaatctgtaatacaatattttttctttttaaaaaaaaaaacccctttacatttctgttctttggctatatagccgaatccccccttctattactggtctctctactttgtattatttctgcctctgttctcttttgttttgtttgctgctttggttttgcaagtgtcagaggagcgatgggatggtggcgtgctgcaggcatggccaagagaggggtacggcgcacatggggctagggaggcgcggcgccaggatgagctgggtttttgcctactgaaagtttgttaggtctggcctgt

SEQ ID NO: 54450 - DNA, 187 bp, Gossypium hirsutum
  Clone ID: uC-gsflnu33B055a05b1
cctccgctcacgctagcgtgttcagttctgctggcaacgttacaatggaaagaaccggcgagtcatttcgccgcgcgtcaacagaaaatcgaggatacgctcacggccaaacaaatccctattattactttggtgccccccaaatcgaaccccacttacccagagtttccaacccgcctcacttcga

SEQ ID NO: 54451 - DNA, 376 bp, Gossypium hirsutum
  Clone ID: uC-gsflnu33B055b05b1
gcaagactacttatttctccgctggcgatcttctaattcaaccggagtgccctaatagccacggtaggcaagaactgttcggccattgacagagaacggagactcggagtacaactccaaactatcgtcacctatttccagaggattgataaagcccacgatcgactgttacttggcttttccggcctcggcaccggtgctcaaaccttgtatcaaaggcttggctctaggtacaaactgactgagctcagagatgaaagagacacgaaacctgacactattgctaaccttgactatgcgattctttacgagaaaaggttggggccatacttgagccaacctgcaattgctggattaggagatgaagacatggcct

SEQ ID NO: 54452 - DNA, 527 bp, Gossypium hirsutum
  Clone ID: uC-gsflnu33B055c02b1
cccacgtgtccgtgggattgtgtaccagttgggtattgctaatcacagtaccagtattgctgtatacttgctttcttggatctacatttttgtggcatttggaatttatctggtaatctcatatgctcgggacaaatatgcagctaaggagcatatatatttccggatggttcagttcctggtcatcattcttggaatactagttattattgcactgcttgagtttacagcctttaattttgttgacattttcaccagtttattggcttttattcctactggctggggacttatatcaatcgctcaagtacttagaccattcctgcattctacctggctttgggaatctgtggtttctgtagctcggctgtatgatataatgtttggagttcttgttatggtccctctggcatttttgtcgtggatgcctggatttcagtcaatgcagacaaggatcttatttaatgaagcatttagcaggggcctgcgaattttccagattgttactgggaaaaaatcaagtgact

SEQ ID NO: 54453 - DNA, 163 bp, Gossypium hirsutum
  Clone ID: uC-gsflnu33B055c08b1
tgtttgtcctggagttgtttcttgtgctgatatccttgttctgtctgctagggaaggcatcgcttccttgggaggacctaatattcctctcaaaacgggaagaagcgaccgatgacgtatccctgcaacaaatatgcaggtaaagaacatatacatttcccga

SEQ ID NO: 54454 - DNA, 432 bp, Gossypium hirsutum
  Clone ID: uC-gsflnu33B055c10b1
cttacgcgtccgcccacgcgtccgattcgattaggcgcggttgtcattaccgggatcatcttagccaccatgttttggaagctagacaattcaccgaaaggcatccaagaacgtttaggtttcttcgcttttgccatgtcaacaacgttctacacttgcgccgaagcaatcccggttttcctccaagaacgatatattttcatgagagaaacagcttacaatgcttatcgtcgatcatcgtatgtattagctcactcgctaatctctatcccatctctagttatcctctcgatggccttcgccgcaataaccttttgggcggtcggactcgctggtggcctttccgggtttttcttcttcttcctaaccatcttcgcctccttttgggccggaagctcgttcgtaacattcctttccggcatcgtctcccat

SEQ ID NO: 54455 - DNA, 269 bp, Gossypium hirsutum
  Clone ID: uC-gsflnu33B055d07b1
ttgcctacgcgtccggattcgccaaatagttatagtaatttttgaaggaagttgtaaaccccataattttttgtaaaaatttgtagtttcggtttgtaataagtaattactaggatccagattagccccttgtaatagtttgtaggtatttcgaactgagaattccccgaatggttcttctttccaaacttgaatatgttcatgatccgtctctgcaagtgggatctgtaaaattttcttcgcagttttccggtgaaaaggtatcatat

SEQ ID NO: 54456 - DNA, 317 bp, Gossypium hirsutum
  Clone ID: uC-gsflnu33B055f07b1
ctacgcgtccgaatacactcaaatctacctccaacttccttctttgatttcttttttctttctctcatggctaaacaaaaaatcccagatcgaacaaccgaagacaaatctaaagacgagttaccagcatgttgtcctccggtgaccaaagctaagagcggaggcaggaagagaagctgccttgaaggatgtctctttgctttgtgctgctgctggttatgggaggcatgctgcgacctgtaggaataatggagcaccctgatggcaatgattacgacaaagaaatttctaaccctaattatgaaaatcacatattg

SEQ ID NO: 54457 - DNA, 508 bp, Gossypium hirsutum
  Clone ID: uC-gsflnu33B055g05b1
gcctgcattccccctcctctgccactccagtctcctcagccaccgattacaaccacgattcggatgtggcgcagaagggcatcgacggcgctgccaccggtaagaactcctccccttttcgtctattttctaaagaaaaacaaccaataaaagaaaaaaaacagtaaaggaaagaaaaatcgaaacacgagattcaccttcaaattttgtttttttttctgatctcttttcccttgtattttatttttaattttcaatacagaaatttgctcaccccctaaatcggtttacaattggccttttataccgaaaactaataataatcaataaaactcctatctcttgcttgttgtgctgtgattcgtggtttgtttgcaggtggagcgagcgttgtgcgcgtcgacgtgcgcgacatgcggtgcgacatgcaggaactgctgcggcgcgagtttgctgcaatgcctagggtttctgctaaactttttggtttttgggctagcaggctagg

SEQ ID NO: 54458 - DNA, 295 bp, Gossypium hirsutum
  Clone ID: uC-gsflnu33B055h07b1
tttattctaccaccaattcatcttgagggcaggagctgctaatgctcttggttcattcataagccaaacccatgtttgattcattttcctttcctcgatgcttttctagaagaaccctccaaaaaaacacatatataaattgtgaaaataatgtgggaatttgcttgttatgatttgtgtatgtttaaccgtcccttcagagccctcccttttttcttcaaagtttcccttcgaggaagttggaaaattttatagaaattggtttcatgaaaaaaaaaaaaggactaaaagcaag

SEQ ID NO: 54459 - DNA, 258 bp, Gossypium hirsutum
  Clone ID: uC-gsflnu33B056a06b1
tgtcttcgcgtccgggaaaagatggctatggcaaagtcctccaatgctccaatactattgacaaagaagtataactgtcagaatcgtagaccaacatgggcccagtctcctgctaccaccgcgaaagtccttgcttttatatgcccggatgtggaaggtcgaaacagatctatgtcagcaacagcaaatagagaagcccgtactgacatcatcgcacacacctactcctgaaagccgtggagttcgtgcacagaaatt

SEQ ID NO: 54460 - DNA, 345 bp, Gossypium hirsutum
  Clone ID: uC-gsflnu33B056b01b1
ttttgatgcaggagggattggcatacttaccagccggaatctgcatgtcaacaatgggacgccatgtctcatatgaacaagcagttgcttggaaagtccttgaagctgatgaaagcactgtccattgcttggctttctcttttgtaaactggtcttttgtgtaaaaacatttgactgtaatttatatgttctacacctcaggctttccccagtagagaaggaaaaaaaagaagttttgtaatggcttaatacacgatttggcctgaagtatacctattttcttactttgtacctaattttttttttttggtctcaatctggtatctgaagtatcaatcacctctc

SEQ ID NO: 54461 - DNA, 504 bp, Gossypium hirsutum
  Clone ID: uC-gsflnu33B056b11b1
tcgggaaaacatcgaggaatatgggagattgtgtcgagaaaggacaaataagtccatgatcaagaacaggcaaatacaggttatagataatgacagcggagttcacatgaggccaatgcctggaatggttggcttgatttcgtccaaccccaaggataagaagaaaacaatgccagttaaacaatcagatgtgaaaagaaccctaagggatcgtggggaactggaagatataatgttcaagctgtttgaaagacaaccaaattggactttgaagcaacttgtccaagagactgatcagcctgctcaattccttaaagagatactgaacgagctctgcgtgtacaataagagaggcgccaatcaaggaacctacgagcttaagccagagtataaaaaatctgcagaggacactgcagctgaataagtcagatatagctgtattttacgtttcctttttcttcagttaatcggaatatgtctgaaaacaaccctcatgaagacgac

SEQ ID NO: 54462 - DNA, 230 bp, Gossypium hirsutum
  Clone ID: uC-gsflnu33B056c02b1
cttttttttaacctgtaaaaaaccaaatacagtttctctcacttaggatcgcaggtatacgctagcaaatcataaaaaaaaaaaaaccccactactttcttcatgccgcagatctgagctatgcataattgtacatccaaaaaaaaaaaaaccagagttatgtgatccagcactattatgtaatcgaatgttagtttttttttctcaatacaactcttgaagttttttat

SEQ ID NO: 54463 - DNA, 405 bp, Gossypium hirsutum
  Clone ID: uC-gsflnu33B056d04b1
taatgaatccccttctactgtcagatttcaaaagcccaactcctcagccaccgtcactgcttggagcctcagccaccgtcactgcttggaggcatgttttcacttccatcgtggtagtgtctgtgttaaaggggttgtggtaagtacacagtgccaaaataagtccttcactatctctgaacatgattcccataactaatttaagcaaataattgttgtaagctgcgtcaaaattgcatttgatcgtgtttgctcttggtggtgaccacattctgttatataaccctgcagatgttgctatttcttttactgtactggtactctctgccttgtatgctttgataaatgttattaccctgtctgtattcatcttttcgccctgatggtggattttatttcttttct

SEQ ID NO: 54464 - DNA, 443 bp, Gossypium hirsutum
  Clone ID: uC-gsflnu33B056e04b1
tccttgctctctccccctttccttctctttgattttctgctagggtttcaaagaaacccatgattgccgcccttcaaccaccgtaccaccaccggactcgatggctggcgatacaccaaaatgggctcctttagctctccccttttttacttgttggaggctagttccaaaaacgaaaagacaagggttcaaccccctttttagactcaaccacgccgaacggaggggaaggctccgataacgcggctatgggccggatctgatgttggagaggtggaagtggtagacagcatgggagagtgggagcggcgcttgtggcagacaacatgggagaatgggagtggtgctggtggcaaacagcatgggagaatgggaagaggcaagtgggagtctagggttttgggaatgggcttggatggtgggctaggttgattttggttttg

SEQ ID NO: 54465 - DNA, 522 bp, Gossypium hirsutum
  Clone ID: uC-gsflnu33B056e09b1
tgcaaagtagatggttcccgtattttctttctccatcgatcaattgtgcatcttactcaaggtgatgctactgtttcctcttatttcacgcaattaaagttgctttggaatgaatacactgctcttgtctctttttccgattgtgcatgcgaggttgcccatcaaaattcgagtcacattcatcaacagtgattattccaatttttgatgggtctaaatgagacctatgctgcagttcgaagccagattctcttgatgcagcctttaccctcgataaatcaggcatactctatgattgttcaagaagaagcttagaggagtttttcttctgttttgtcgcatgtttccgatcctgtggctttatcttccactgcatttggcagccgtaagaaattcactgagtgtcactaccttcactcctcaatagtattcacagatcctggacttgctgaataagagtcaagctactgttgcacctgctgtgaattggcagaattcaaatcagtagtcggaacgaggaca

SEQ ID NO: 54466 - DNA, 234 bp, Gossypium hirsutum
  Clone ID: uC-gsflnu33B056e10b1
ttggacgcgtgggttttatgccaaatggagatcttaaaagataccctttggggttatgttttttagttcggatttggattctcttgaaaagctctatgataataaactcacggattcaacatgatgtttaatgattattattgcataatgtggattggtattttcagttgctaaaagacaaggaatcaaccccctttttagactcaaccacgccaaacggaggggaaggctccg

SEQ ID NO: 54467 - DNA, 286 bp, Gossypium hirsutum
  Clone ID: uC-gsflnu33B056e11b1
ttttgaaacttcgcgaaagcctcacaagggtttatgtacaaagaacgggcaagcccctatgggttgtatccgaagacatggaaagagatgtttttatgtcagcaacagaagcccaagcttatggaattgtggatcttgtagcggttaaataagttaaataacaaatagcaatagcaacgatttaacaccaatccacaatttaattaagattgatttaatccctcttcttcctttccttcttaacttaagcctaaagcctaaggggttaatattttattaatctatt

SEQ ID NO: 54468 - DNA, 533 bp, Gossypium hirsutum
  Clone ID: uC-gsflnu33B056f06b1
ttcttaacaaagcttgtagcactgaaacctgggaaacccgtccaggaaatgataaaaaatgtaatgctagggaaagatgaaggtgcagactactctgacactgatgaagaagctaatgccagtagtacgagaccctggggaattgcaggaaggggcactgttacagggagaaaaccacttcctgttcgccccggcatgtttcttgagactgtgacaaaggttttgggtggtatatataatggaaatgtctctggcataacggcacagcatttagaatgggttcatcagaaaacacttcaagttcttctggaaattgcattctaattcttcaagctacttgtaccaaaaattggattacatcataatccgcagtttacatcaaaggagagagatgattccataagtagaggttagagaatcctgctcccaactatgaaatatttatgaaattatgtcatttagaaattgagcaatgttacatgtacatttgttagaatgaactgcagtttactattttgtattttgggtagtct

SEQ ID NO: 54469 - DNA, 286 bp, Gossypium hirsutum
  Clone ID: uC-gsflnu33B056g05b1
ttttttttagaggaaaaaaagaatcttattgaaaatgtcacaagcccaaaaaattaaaacaattaaaacaaacacaatcaatagtcgtacaggtggaatatggttgtcatctcaggtttctttttgaattttacttaatcagttgtgtatatatatatatatatgaacacgtagatttcacagtagtctgcataatggaaactgtatatgattagctagcacttttggagaacttgatgtaggcaacttttaatgattcagagtgttattgttttcttttcttttc

SEQ ID NO: 54470 - DNA, 445 bp, Gossypium hirsutum
  Clone ID: uC-gsflnu33B056g06b1
tttttagatcgcgagcggacttccttttacaggaattgttttattgaaatttgcctttaccacaaacaaaacagcataggtttatattctcacttggaaaaacaaaactggttaacattaagactattatgcgcgcttgtcaatacagtaaatatggcggaggagtctgctatcttaagcaagttgatgttccggttccaattccaaaatatgacgaagccttgatcaaagaagaaacatatattattaacccaattccactggaaacttcatgacggtgttccttcgaacatttttaacctcggaaatttccctacattaaatgtgactttacttgtattctgagatggttaacttctatgggttaatacggaagtaataaaactttattttctgtgaatggttcgttatcaatatttgcttaacaacatttgttctatcaagt

SEQ ID NO: 54471 - DNA, 479 bp, Gossypium hirsutum
  Clone ID: uC-gsflnu33B056h01b1
ttgcttccggaagaaaccgaagaatttcttgggaatcctacaagatccattcgttcttttttctctgatagatggtcagaacttcatctgggttcgaaccctactaagaggtccactagagatcaaaaattgttgaagaaagaacaagatgtttcttttgtcccttccaggcgattggaaaataaagaaatagttaatatattcaagaaaattacgtatttacaaaataccgcctcaattcatcctatttcatcagatccgggatgtgatatggttccgaaagatgaactgggcagttccaataagatttcattcttgaacaaaaattaattttttgatttatttcatctattccatgaccagaacatgaggggatacacgttacaccatgattttgaatcagaagagagatttcagaaatggcagatctattcactctatcaataccgagccggatctggtgtatataagggattttc

SEQ ID NO: 54472 - DNA, 189 bp, Gossypium hirsutum
  Clone ID: uC-gsflnu33B056h03b1
gcgtcctctcgtgcgatcttaggggcttaacaggcaacgtctttacctggcgaactggtgaagtgataaccttgaacattcaactattgtgacttttcacccaacagatgtgggagctctcgaagggaacatgttaggcttttactgagataaatgacgggtgttcgttatagcataagcgcttttggg

SEQ ID NO: 54473 - DNA, 356 bp, Gossypium hirsutum
  Clone ID: uC-gsflnu33B056h09b1
ttccacgcgtccgcccacgcgtccgattcctcttccgtcccgtagattccgccagatccatccaagggttcaatctctgagactgagtcttttttaaactgttatggtgcctctcaggggacatgttaggcttttactgtgataaatgacaatgttttgttatagcattagtgcttttgatcaaaaaaaaataaaaaaaaaaaaaaataaaaaaccagaacaaaaaataaaataacttaaaaaaagtaaaaaaagggcgggctttgtcgaggttccattttaacgctcgcgtgcgggaaacaccaaagttttcctttagttatagcttaatcaaattaaccggctttggccggtcg

SEQ ID NO: 54474 - DNA, 486 bp, Gossypium hirsutum
  Clone ID: uC-gsflnu33B057a02b1
ggttcacatccaatggtccggcatcgagtgaccgtccaagctcgactggctcggcctctactcgccccccgactccccccatcacaacttcatcggttacaagttcctttcatcttcttcctcaacttgggaatctggagcgggctccatttctctccccctcaccttcctccgctctaactacaccttccggatcttccgctggaccgaatccgaggtcaacccggaaatccacgaccaggatcataatcccctcccgggcacgaagcacttgttggcggaatccgagacggtgggtttcgaattgggtcgtgggccggagcagatccacttggcgttgaccggtcgggaaggggagatgcgggtgatgttcgttgcggaggacccagaggagaggcaggtgaggtacggagagaaggaaggagagtgggaaggtgacgtggccgtggcacgtgtggggaggtacgagaggggagacatgtgtca

SEQ ID NO: 54475 - DNA, 322 bp, Gossypium hirsutum
  Clone ID: uC-gsflnu33B057b04b1
cccacgcgtccgggagatatgtcagggcagttgctttggccacaaagcaggtgtagccctgagtgttctcctttacctagtcccagaatgacgagccctggtcccagctctaggatacacagtggtgctgtcacccctttgcatccgcgagcagcaggggctgctgctgagtcacctacaagtcgacctgatgatgggaaacagcaaagccacaggttgcctttttcccccaataccaatatctaaatattggccctttttcttcctgggtattctggaggaaccattttcatcaattaacccgaaagttcctggtaggggc

SEQ ID NO: 54476 - DNA, 457 bp, Gossypium hirsutum
  Clone ID: uC-gsflnu33B057c02b1
gttgatcgtctcacgaagtacgaccacttgtttgctttgctgagacactttgattgcaaatccattgccaaaataatggtgcaaggtatggtgaaacttcatgggataccccgttccatcgttaacgaccgagatccaatttttgtcagtgaattatggactgagctggctcaactccagggcactgatttgtgtatgagttctgcataccatctacagacggacggccaaacggaggccctaaattgatgtttggagatgtatcttagttgcatggcaggagatgatctggaaaagttaccttgtgtaagccatgtattggtataacactgcttatcaagattcagcaggcatgacaccgttcaaggcgttgtatggttgcgaacccccaacaatagtaagttatacggatggtggttcctcaaatacccagctcgaccatgacttgaatgaacgt

SEQ ID NO: 54477 - DNA, 463 bp, Gossypium hirsutum
  Clone ID: uC-gsflnu33B057c04b1
cggcgatcctccatgcccatgccacgaatcggggaccggtactacacgaggtgggctccctttggtcctcctccgaacggaggtcgaagacggagccttcgcggcccaccacgacggaagagacgaggaaaggccccgggaggttcgtcggagcacctcaagcagtgtatcggaggtttcagaggccgacggttggctggtgagaaggcgaggcagcgcgtgtggaggaggccgaacggcgcctagggtttccctcttctcctttggctgaaaaatgtttaggatagttgggctagttgggcttcagggttttcttttaattgggtattgggtaactatggtattttggcgtatgtgttaaatggactcttggacttttattttgctcattgtgtttggacgcttatgttggattggtggcatgggccacaacttgctagtacacttctttgttctgttgcac

SEQ ID NO: 54478 - DNA, 487 bp, Gossypium hirsutum
  Clone ID: uC-gsflnu33B057c08b1
taacaaacggatttaattaatactgtttaggttaggactaaaatttcaaatttcaaaaattaaaaagaatggaaactaaaattgatcaaattaaaataaagatattaaattcacaactttcataaagtacaagaactaataacagaatttaactgattatcatgggataacgaaaattgtttttttttttagttggaattaccatcgaattaatcatcctgttcttaatttttcgatttataatttaggaattgtgcctgattcttctgttggctcctccttggaagcagcaaattctgaagtggagaatgatggtaatcctcctcctcataccctgtttcagggtcactttggaaatgatctccacaagactccataactcaagttaaacattaattagccatttatgtcgtgtcccagccttctatttatttcttgtcattgtgagaatgtttctgttttcccattggttgccattggttgctgc

SEQ ID NO: 54479 - DNA, 496 bp, Gossypium hirsutum
  Clone ID: uC-gsflnu33B057c11b1
ttaaaaaaaaaaaaaaaaaaaaaaaaaaaaaggaaaaaaaaaaaaaaaaaaaaaaaaaaaaaaaaaaaaaaaaaaaaaaaaaaaaaaaaaaaaaaaaaaaaaaaaaaaaaaaaaaaaaaaaaataaattaaaaaaaaattgggggggcctttttagggatccaatttttctttcccggggttggcgagctaattttttttttttggggacaaaaaaataaaaatatgggcccggttttaaaaaccgtgggagggggaaaaacttggggtttcccaatttaatttgtttggtaaaaatccccttttttcacgggggggataataaaaaaagggccctacctgtcccttttttcaaaattttgtacacttaaatgggaaaggggaccccccctttttggggcctataagggggggggggtggggggtgttcccccaaggggtccttttattttggcaggccctttaggcccggttttttcggtttttccccttttttt

SEQ ID NO: 54480 - DNA, 260 bp, Gossypium hirsutum
  Clone ID: uC-gsflnu33B057c12b1
tttaccactcattaataaattccatagcgggggcttttttaaaaaatcaggggttatcctaagtgttcttctttacccttttccataaaaacgagccccctgtcctagctctaggatacacagtggtgctgtcacctactaggaatactcgagcagcaggggctgctgctgagtcacctacaagtcgaccctgatgatgggaaacagcaaagtcacaggttgtttttttccccaataaacaatattaaataattgccctt

SEQ ID NO: 54481 - DNA, 489 bp, Gossypium hirsutum
  Clone ID: uC-gsflnu33B057d06b1
tcctcacgcgtccgcccacgcgtccggatttcctgatgtttgggggtgaaccaagctgcagttcatctgatggtagctatggcaaagagatgaaacaagaagatcatatgggttttcggggttttggtgcttcattagactatggtaccaacaatggagttaaccaatggattgagaaacaaagtgggcatagtggagaatgcccattagattataaccctgaagatgttaagagactgattagctctaataataactgcttcttcatagatgaaaatgacacacaagataaagctatgtactgctattactactagtgatggaactgcttgcaggaaagatttgatgggtaaggcccaaagctgagggattgaaaagaaaaaaagaaaaaagactttcagtttctggggtaatgtgtactgaatctgatgaaatgaaacatattttaaaatttgccttttttatatggatttgatgcatttctttttg

SEQ ID NO: 54482 - DNA, 476 bp, Gossypium hirsutum
  Clone ID: uC-gsflnu33B057d10b1
gacccacgcgtccggggaagttcttggcatcacaagatttggaatccaaaaaatggacaaaagtatattgatgctggcttcatttgagaagacaggtgatcacctttttaatgcttctgttaatgggagggatgacaagattgagggggttaccgagtgcatcatcatgggcatcccgatgcaattaggcactggaatactcaaagttatgcagagagttgatccccttcctctgcttcaatacggagcggatcctgttttatcttgaagaggtcatcatcagcacacctcgttgtggtactttccgtatgctgttcaggattgatttttttattttcttttctccgagcttatgtatttagtaattcactggagttttatagatatttcctttacaaatttgaatttgcacaatgttaaataggaacacttttataaagattgattcatttaaccttattaatctgaccttttct

SEQ ID NO: 54483 - DNA, 314 bp, Gossypium hirsutum
  Clone ID: uC-gsflnu33B057d12b1
tcccacgcgtccgcttgtgttcagtgattgatgaaatgaaagtttggaaagctctaattaggagtaccttggattgaatttaatcttcgttgaaatccgtatcattttgttatctgatctggttttcgatttctatcatctctcttctgttgtttgtttgaatgttcaaagtacttggatgcttccagtcactcaattgaagtacagcacatagtctcgtccaatgctgaagtactcttattcccaggttttttcttctttttaattaatccttttcttttaaaaatcgattatgtttctgtttggttcaatat

SEQ ID NO: 54484 - DNA, 496 bp, Gossypium hirsutum
  Clone ID: uC-gsflnu33B057e03b1
tcccacgcgtccggaatgagcctagcaaggatagtttggatacatttagggaaaagaatgccagtgaaacagtattggaagctactaggttgaaagagctggcaagtgagcagctaaaattggcgatggccgagaatacctatgccgaaaaggctagactagaagcgaagaagcagatagagatggctgagcttgagtttgcaagtgctaaaaggataaggcaacaggcccaaggtgaactggagaaggctcaagtgttgaaagatcaagcaactaagaagataagtgctactatcattcaaatcacttgtcaagcttgtaagcaccaattccatacatcaactgctgcggttccagctgatgagacctcacttgctatgagttacatgtcttcagccacaactgaaggagaaggagagtgacggtaagttgagattatacaacgataatgatccattcttagtctccaaagtctctttggtttgatgtacatgtt

SEQ ID NO: 54485 - DNA, 464 bp, Gossypium hirsutum
  Clone ID: uC-gsflnu33B057f01b1
tcccacgcgtccgctgttgtggtttcgattgtgatttttagaaatccagtttccgttactgggatgctcggttataccctcacggtcttcggggttatactctacagtgaagccaagaaacgaagcaaatgagacatcatcctgggattacggtattggttgtgattgtgatatattttagtgcaaggatatcaacaatgttcaaagaggcaaagtttcggtagcatacaatgctgcggatttgtatgctgcggattttgcgccatagattcctataattttcccatggaaacctgggaagctgctttttcttttgtatcggcaacagctgcgggattttagtcaaaaattagaggaaataccattttatgttcattctttcaggagaaaaaaaggttgtagacatggtctttatacattggttagatttcccatatttcattaattaatggaaaagaaaactc

SEQ ID NO: 54486 - DNA, 491 bp, Gossypium hirsutum
  Clone ID: uC-gsflnu33B057f05b1
cttctcctcagccataacctgtgttttctccctccaagagaccagcccgcctcaaggtatggtgaccgacgctcgcaggcttcgaaacagggtttctttcagccaccgaattccctttgaaccccgatttcgacgaagtaaaagggaatccgcagcctaaactcaaggtaagatctctttttcttttctttttttgaatgtaaaatgacaaaaaaagaagaaggaagaaatagcaaatagaaccgaagaacaaagatcaccttctcaagaagtagctttctgattttcaagcaatgtgtattgcgtatgtattgcgtgtattcgcttatattgccttcgtgaccattacaaagattaaatcgttggctttatagccgaaaagaaatcataagataaaaaatacaaacaaattcctattggctgccgttctcgctgctgttatttgtttcctttcgcggtacaggtgcgtggcgtgtgtaccaggctgtact

SEQ ID NO: 54487 - DNA, 423 bp, Gossypium hirsutum
  Clone ID: uC-gsflnu33B057h05b1
ttccacgcgtccgcccacgcgtccggtgagcgtgatgatttgctgagcaagccctcacttaatggcatccctcttctggtactaggcaacaagattgacaagcctgaatctctttcaaaacaggcattgactgaagaaatggggctgaagtcgattactgacagagaagtttgctgctacatgatatcatgcaggaactcaaccaacattgattctgttattgattggcttgtaaagcattctaaatctaagagcggaaaaaaacaactctttcttttttattcaaataaaaaaaaaaatcatctttgctgaatctgtgttttataattcgagtttcccatctgtaatcttgtggatgtttgggtttttatcatttatgtcaacgctttctgttttgatgatttaatggtaagatgtatacag

SEQ ID NO: 54488 - DNA, 183 bp, Gossypium hirsutum
  Clone ID: uC-gsflnu33B057h08b1
gtcaccagattagggttacagatgatggcggtacaaatcaaaacatttaacatctaaacagaaactaatatgtaatttaaaatttaacaataaaaaacttaatttaatcatagcataatactcttataagccttaaaccgagtttaagaggccctaaaagtaacttgggaacactgagggacc

SEQ ID NO: 54489 - DNA, 424 bp, Gossypium hirsutum
  Clone ID: uC-gsflnu33B057h12b1
tcccacgcgtccgaaatttacaaataaattgtatcttatcccttaataaaataattggaaaattttcatataattcttttaaaatttacctatttattatttataataaaaaataaataaataaataaataactacaaacatgtatatcattggagaacctagctagaacttaagaatattgcattgataaggttaaaagggaaggaaatgatttaagatatgatcattataattataataattattgattgttattattagctatttctaaaaagctgtgattgccttgtgttttgtgaatgtctggttgaataatcttggtcttaaaagacactgcaaccatttgtcttgttgtctgtatattatttgcctgtaatttggtaatagttataataatattaatctcaatttttatttcaaaaa

SEQ ID NO: 54490 - DNA, 354 bp, Gossypium hirsutum
  Clone ID: uC-gsflnu33B058a09b1
ttggttctcatagctggcattgctgcttatgtaaagagggtttccccagaggtgaaggttattggagtggagccttctgatgcaaatgcaatggcattgacgatgcatcatggtgaaagagtgatgttggacaaggttggaggatttgctgatggagtagatgctaaggaagttggtgaagaaaccatctgtctatgtagagaattggtcgatggcgtaggtcttgtaagacgtgatgctatacgagcctgtataaaggacatgtttgaagagaagagcgagcatactagaaccagcaggtgccttacttctagcatgagctgcagcatattgcacatattatggagtgaacgg

SEQ ID NO: 54491 - DNA, 191 bp, Gossypium hirsutum
  Clone ID: uC-gsflnu33B058a10b1
tcggttgctcagtgcttgggtgcaatctgtgggtgggggttgttgaaagatgtgaaagatacttactacaatagttatggaggaggtgccaaggagctgccagatggtggtaacaagggacgcaccttggacaaggaagacacatgtgcctatggatgttgtttacaaagaattctgagacaaagctctcc

SEQ ID NO: 54492 - DNA, 369 bp, Gossypium hirsutum
  Clone ID: uC-gsflnu33B058b11b1
tcgattaatctaaggaagttttgtgaggctaaggataatagcttgaatgctaaagatgaagaaataaagatgctgatgaaaaaggttgaagcattctcaagagccatggaaatggagtctaaacgagtgaagaaggaaacacaacttgttaaagaaaagaagaatggatcacccaaaatggaggataccaaaaaggtgaaaaacaataactgtagaaggtcttgaagattggcaatggaattcatttgattggttggatatgattgagagtgtaaatagtgacttataatgttgttttttggatgataattagcttacttaaaataaagttggttgcgaatgatgaaaattgcgtttgtgatgctaatt

SEQ ID NO: 54493 - DNA, 275 bp, Gossypium hirsutum
  Clone ID: uC-gsflnu33B058b12b1
ttgattaagcatgatgggaatcaatgacaagtgtggggatggttaaataattaaccatggatccaccatacaatagtgatgtatgattaacaactacatgggttgacttgattgaatatgttattacggactataacaacacagacacgcttatactagctcacggaaatgaaatggacatatcctgacactaattactacaagtggtatttgttaaagtaaacatattaacatcacataacattcataggcatgtccatcataacaccaacatt

SEQ ID NO: 54494 - DNA, 269 bp, Gossypium hirsutum
  Clone ID: uC-gsflnu33B058c07b1
taaaaagcacaagaaagttatattgtgaagataaaactcaaagagttgaaaaactttattcaatgaatgtgtttaatgaataatgaagatacctttatataggctagctaattaatcaaaataaagctcttaactataatgaaactttaattaatctaaacaagaagtagttctaatgaactaaactttcttattgactaagaaacataaaactcctaaacaacttcaaatacttgaaaatttcctaaaatttggaataaataagttat

SEQ ID NO: 54495 - DNA, 323 bp, Gossypium hirsutum
  Clone ID: uC-gsflnu33B058d06b1
ttatatttttctttttagattttgtggtgttaaaatcgtatttgttcatagttttttgcagcaggcaacatgtcgctcacaattcctagccttctcggtggcccaagaaccgacgtcttcgatccattttcagtatgggatctttcagatgaattcttcaactctgcattggcaaacactatgtcatcatcatcttcagtacgcgaagcttcggccattgccaacgcaagggtagattggaaggaaacaccggaagctcacgtgttcaaagcagaccttccagggctgaagaaagaggaggttaaagtggaggtatgaagaag

SEQ ID NO: 54496 - DNA, 219 bp, Gossypium hirsutum
  Clone ID: uC-gsflnu33B058d08b1
tcgcctcacgcgtccgcccacgcgtccggggagattaacgttgagccaaacagtgatgtttggaaacataagttaaggccaagactttccgatatcatatacgaaacggaagcggtgcatgtttcagaataactttagttcaaagccgagaaccgccggtcggaaaagattgatctcggtggctgtaatatatatttacttaataatggtttttgtctt

SEQ ID NO: 54497 - DNA, 478 bp, Gossypium hirsutum
  Clone ID: uC-gsflnu33B058f01b1
cttactcgtacgattattgagaaattggttatgtgtattggcttaagataaaagcccttcattttgtattaagcctagataatcgctattatttattttggtaaatgcatatgatgatccttctatgaatgaattgatgtcttttgggatagaattagtatattgaaatgatcttgtgcaggttgtgcaaaatgagtgacaaaatgggctggaagataccctagtttgtccacatgggcaagacacatgggcgtgtgtctaggccgtgtgtgacacacggctcacccccatgggtgtgtgttatggccgagcgtaccctgcacttaaacttttaagtcagtattgtccaccggtaggccacacaggtgtgtgtcatgggtgagccctaaagacagggttgcacataggctaagagcatgggcatgcctcaagtcacaccggcgtgtggaaccctaaagcatgaattttttccagtttt

SEQ ID NO: 54498 - DNA, 495 bp, Gossypium hirsutum
  Clone ID: uC-gsflnu33B058f09b1
tcgctttacacgcgacatcgtttagcgcgtatcagcaagatcaacaccggatttatgttgtactatacatcacgttgaaaggaccttttcgtaattttaactcaacctccattctcagggtaactaaaaaccatttttttccctctcgttctgaaaaccagagagagaagagaaagagaaaaaaggcaaaaaggcgcaaatccaacaccgttactctttgctttgctaacttacgcttctgctattctacgcacctttctgttcacctttttcccttctttctctctctctctctctaggatttttttttcctttttttctttttttgtcgttctctcactaagacctccgcaatgaggaggagactcgcggctctcttcttcatttgcgatctctttgtgttgttcggtttcgccgtcgccttcgacgcccagaccttgtcggctgtggagttcaatgccaccgctgccttgaccaatgtgtaagacccgagat

SEQ ID NO: 54499 - DNA, 445 bp, Gossypium hirsutum
  Clone ID: uC-gsflnu33B058g03b1
cctacgtttccgaagaactttgggtttcttttgtttcttagataaacaaaaaatatggaggagaatatgtgaaaaagtgtatggagaagaagaaagagaatttaatttccatggcgaatttaaggttttccgatgagaatccgtcggcggtggcagcagcagcagcagcagcagcagcgaccagtttcggtggaagcatctttgacatggcaactggagcaggggcatgtgatggagatactaagtgggggtcttctttaggtcatggacttgcttggcatccatcaagatttcattgccccttctttattcgatttctttcagccaccaccgattttttcaccaccacctcccttaacatcatctgaaccactttttcaccaacaactggacaccaagcagcttaaagcccttccatcgccggcctccatcgtgccggaatctt

SEQ ID NO: 54500 - DNA, 481 bp, Gossypium hirsutum
  Clone ID: uC-gsflnu33B058g12b1
attgcgtatgatcccacggcgaacgtcgtttacacgggttgtcacgatgggtggatcaagcgagtcaggttgagtgactcggtcgtggaaaattttgttaacacccatggtagacctctaggtctcgctcttggtcacaacaaggaaataatcgttgctgatgcatataagggactactgaatataagcaaggatggtgaagtggagctgctaacagatgaagctgatggccataaattcaagcttacagatggtgtagatattgcagataatggaatgatatatttcacagacgcttcttacaaatataacttaaatgaagatatatgggatatcttggaaggcaaacctcatggtcgatttatgagcttcgatccggttacgagaaaaaccgatgtgctagtcagtcatctatactttgctaatggagtcgcagtgtcacctaatcaagatcatgcattcttctgtgaaaccgttatga

SEQ ID NO: 54501 - DNA, 373 bp, Gossypium hirsutum
  Clone ID: uC-gsflnu33B058h02b1
atcttttatcgcgtccggattaaaatggtgggggtggcattttttggaccctacgctgcggcccctcacgaaaatacagggcaaggtgcctgggatcctgaagaagaggaaccctatttggatcccacgtgggcacatttacagatagtatacgagcttctcttgagatatgttgtgtcctcggatacagatactaaagttgcaaagaaatatattgatcattccttcattttgaagttgcttgatttgtttgattcggaggatcccagggaaagggagtttttgaaaacgatttttcataggatttatggtaaattcatggtgcatcgaccatttattagggagggcgataattaaatcttttatagggtta

SEQ ID NO: 54502 - DNA, 446 bp, Gossypium hirsutum
  Clone ID: uC-gsflnu33B058h03b1
tcgtttaagcaaagaaaaagaagatgcaagagaagagcaaatcaaagaaaggaaagggtctgaatcattgaagtcaggctatgatcccgacgtataacaagttccagcttttcaaaaggaactccagcaggtaccaaacaggaaatagtgtttcattaaatccattgaaatgaaaatagggaaatagataattggagctgtgctccattcccttctatcacaggaaaattccattgtgggggcataaaacaggtggaaagaaatgtgatttggttgggaattggggggatgctacaatctttggattactgatttatatattttacttgtgactaacttttggctacatacaggtacctatttttggcactgatattgttagtagccatcgaaaaatctaatacgaatgacttgttattcactaagagtcttggccataataggta

SEQ ID NO: 54503 - DNA, 277 bp, Gossypium hirsutum
  Clone ID: uC-gsflnu33B058h08b1
gttgatgtaaggaccaaggtgaaaacctgcaggagggcactttgagtaaaaaaaaaagatgaaaaaaaattaaaaacaaggaaaggaaccacgaatcctgaagaagaagaaccctattaggaagccccggcggcccatttgcaccaagcctacgagcccttcccgggaaatggagggctctcctatacgggcacctaaattaaaaacaaagatcttggtcattccttcattttgaaggaaaatgcatcgcttgaccccgccgaacccacggaaaggg

SEQ ID NO: 54504 - DNA, 421 bp, Gossypium hirsutum
  Clone ID: uC-gsflnu33B058h09b1
gtttctttatctggatataaaatttgtcatatgctttgcttcccaaggtcggggcctatcaaggaaattgcatagagttgttaacgacataattgctaaagccatggctgcatttgctgccacagggatggatccatatggagtgctgcctgacgatgagtggttcaacgaaatttgtcaagatgcaatcgaaagattaagtggaaaatcgaaagccgaccgggatctgaacagccccactgcctccgtatcagcacaatcaatttcatctgtaagatcacatgggagatactagctgctgtttctttcatttttgggtattttgataggcaacataatttagtaatgaatatggatctttctgactataatttatagggaatcatattttttggatctgctgctgaataagattacatga

SEQ ID NO: 54505 - DNA, 295 bp, Gossypium hirsutum
  Clone ID: uC-gsflnu33B058h10b1
tgttttcgcgtcctgccacacgtacgtacgggttgggttgtgtaaaggcctcgcttgttcaactaataacaactttggaggtgagaggaggcgcacttggactggccatagctatacaacaagttgacaagtgatgcaaccctatatcccgatgggctagtcgacattgctgtttgccacggatatggtatatttgttgcaggggttatcggagccaacatctgaggagggcatgtcacccctggagtaacgtattgggttagcatattgcaagggcagattcactcattacgtc

SEQ ID NO: 54506 - DNA, 292 bp, Gossypium hirsutum
  Clone ID: uC-gsflnu33B058h12b1
cttggagcaacagacggaggcgcacacgtgtgggggtgcagcacgcgcgaggagagctgtgattttccttctgcagcgactgaagggttctagaaaccctaaggtttctggaacactcttccgaagtgggctaattgggctgagttgggttttgggctttgaatcgggtttaggtattgtattgggtttgggtatttaatttaggcttaatgtaatctgggttttgggttaataacttgtattggactgtattatttggacagtttttattggatttttaattttatttttc

SEQ ID NO: 54507 - DNA, 299 bp, Gossypium hirsutum
  unsure (1)..(299): unsure at all n locations
  Clone ID: uC-gsflnu33B059a10b1
ggggnnnggggggaaaaaaaatcaagaaatctaaaacatatttcaattatagtactcagtttgactggttcgatggaaaattttcatttgtgcgcctgccccataacttcgatagatatatgcttcggttgtttttatggctaagaacaggggaaaatgtaggcccttggttcaactttcaggtaatttataattacgttgggtttgaagttaaaaagcattacacttaacagtaatacagaaaaaaagattacaccataaaagaagatgccatatttcaacaccactggaaaacgaac

SEQ ID NO: 54508 - DNA, 467 bp, Gossypium hirsutum
  Clone ID: uC-gsflnu33B059a12b1
cccttgcgtccgcccacgcgtccgatttggccagctttttatcttctcctttatttctcattttccaaatccaccaaaccttccaaattagtcaacagatcaaatctggaacccaatttgcctttctcccttatattcattttaatcagattattattccgagaattgctctatgctttccttttgaccaccatccatggcccgtaaacaacgccttctcctcctttccccacctccgtcggagtaacattcatttggtccttctccggtgcgagctccgattgcagcgaagcacataactccttagtatgaccgtgcttccagcatgtgaagcaaatagtcggcaacgcttcatattcaactctctggttcatgccattcacaaggacttgagcaatcaaaggcttgtcgaagttgatgtaaacaaccatcctagcaaagcggcctctaatcttactatcggagag

SEQ ID NO: 54509 - DNA, 443 bp, Gossypium hirsutum
  Clone ID: uC-gsflnu33B059b09b1
ccctcgcgtccgagaaaaaggaataaatatagtgataatttgattcttcgtcgacggagtaaataggagagattatttctttcttcgtctttacaaaaacaaaaaaatatattttaaaagaattaaaagaaaaaaaaaaaaaaaaaaaaaaaaaaaaaaaaaaaaaaaaaaaaaaaaaaaaaaaaaaaaaaaaaaaaaggggggggccctttatagaggaaccatgtttactcgcgggtgtatgcgatgaaatattttttttatggggccacaaaaaaaaaatacggggcccggttttaaacagcggggagagggaaaaacccggggtgtcccacaattaaatcgtttggcaaaacacccctttttccccaggtggaaaaataaaaaagagccccacacaaatcccttttcaaaaattttgcaccccctaaggggaaaggggc

SEQ ID NO: 54510 - DNA, 455 bp, Gossypium hirsutum
  Clone ID: uC-gsflnu33B059b12b1
ttttcgcgtccgcccacgcgtccgttctgagcttgatatcacggaccaagatgtcactaaaatagcagatatgattgatggggaaatcgcatctttggtaccagagtggaagaggggcttgggcatagatgaaaactcgatatgcacgggttctagtttttgtcaaaattgtgctttgaatggccacctttcggatttcttatcatcgagtagtgcaggtgccaagaacctgcaagttctcgagtgttggaaacacggttgcaccactgtccatggccggtttgaagagatcacgtaccaagttggagagcctgaacaatgtgtttctgaaggtgtagaggcttccttgagccaaccagacggtatccattatgccgacatttggggtcaacgggaagggtcagaactaattccgccaggaccaaaggacatttgctgcacaaagtgaacgaaat

SEQ ID NO: 54511 - DNA, 568 bp, Gossypium hirsutum
  unsure (1)..(568): unsure at all n locations
  Clone ID: uC-gsflnu33B059c01b1
ggatgtgtatcccacttctttcatcgagctatcaaagcttacaatactgggactcggaaacgtcgaaagatccatggtgatgattttggtgatgtccgctggcacaagactggtaggaccaaaccagtctttttggatggtgttcaggaaggatgcaagaagattatggttctctatatgaccactgtcaaaggtggaaaatctgagaaaacaaattgggtgatgcaccaatatcatctaggaactgaggaggatgaaaaagatggggagtatgttatttctaaaatatttcatcagcagcaacaacccaaacagggtgataaaactgagcaagatttacctgaaacaactgatacaatgattgttaaagtagatcctgtgactccaaagtctgtgacacctgacccaccacgaacagggaggcaatgcgatgaatatgaccaaggacaggagtataccattccttgcatcaatccctctgctcaggtattttcagcanagcaccctacaacgcagtatgttgaagatgaagctcaagctgaatgcgaaaattcagtcttaatgatct

SEQ ID NO: 54512 - DNA, 459 bp, Gossypium hirsutum
  unsure (1)..(459): unsure at all n locations
  Clone ID: uC-gsflnu33B059c05b1
cccacgcgtccggcctgcttctttggctgtttcttgttcaagcatgcaatgtaaaagcagcaatctcatgctagggaacgttacagtgcagcaaagtagtgctggatgcaatgtcacttcttgtgcttatagtggttatgcaaatggcaccattatcacttcgttgtcatcatctctccaacctcgatgtccaggaccacagcaatttcctccccttgtagccccacctacatatgtaactcgggattcagtttttgccccagcacctgcaccccagtcagatggtgccaccaccgcaacagtgcccaagacttctacagtgcccaagacttctacagtgccatctacagggtctcttcctggatttcccccaggaggtgccccttttggaagcttatctaatgcttcgacattgatgaattcagctgccgnccttcctgccgcacttgtgatatactt

SEQ ID NO: 54513 - DNA, 392 bp, Gossypium hirsutum
  Clone ID: uC-gsflnu33B059e06b1
atcaccgcgacccagtgtagatccactgttcatccatgcatggccttatgattgatcgcttagcccaaagtctgaaccgagaatgtgacatgcaagaccatggctcatgcctgattgaggcacatggttacagatcatgctcaccgatggatccctgaaaaccactgtgatggtaagacgatgtactcgaaacgctcttctaagaccaagccagagtgcactgagcgttcccccatgggggtaccaaatgtgaggtgcatatatctggatgctgtacaatcgcgcattgatcgccttgcacagagaaggccagatatggtgcctgatctctgaccatgctttatgacatggatacacacagtgatgctgatcgtgtgcatggcactgagcgc

SEQ ID NO: 54514 - DNA, 316 bp, Gossypium hirsutum
  Clone ID: uC-gsflnu33B059e08b1
cttgtcttcgaggaatgagaaagatagtggcaagccgaaccccgtaagaatgaccgtggcactagtaatcttgggtgtggtgtgtcttgtcggacttttgctgacttattttcttacacgggaaaccacgggaaggtcccttgaggacaatgagatctatgaagatgaacttatatataatacatagaatttctaataaagtttttaaaccccacaagtaaattttaggaataaaatattaaaaaaaagacacacatcataatgtttaaaagttatcaatgtatcaaatactaatcaatgtatgtgttaatataat

SEQ ID NO: 54515 - DNA, 389 bp, Gossypium hirsutum
  Clone ID: uC-gsflnu33B059e12b1
ttttcgcgtgcgtccacgcaatcgctgctgcgctatgtatttgtctatcccatagtgttcacccatctttgaatgcatcgctcacaaaactatggatgggaaggaggaatgctaggagcatgccctgaaagttgacaccctaccggacgacccttcgagtgacgacatgctcattctctatggactgtacaagcaagctactgttggaccagggaataccaggaaatgaaagggaggaagcattgggggattatatcacgcaaagtcaaacaactgtgtgcggctggtggaagatcttgaagcgtgagtgtatgactcaatgaaactggtgacattacaagccctagacggatacttgaagatgacattactatagaataagggatgga

SEQ ID NO: 54516 - DNA, 290 bp, Gossypium hirsutum
  Clone ID: uC-gsflnu33B059f05b1
ccctctcgtccgcccacgcgtccggaaaatccctaatttgtttacttgctagcttattcttcttcttgctgccgacaaatcgagtttgggatttgggaatttgcgattgggaatttcaagttaccaaatttccggccaaagcttgggaaaaaatgactgattacgaagaaccgcggtatcaaggaaacggagataatctcgaaaacagttatggcggaggttcttctcctaagtctcgttccgacgatcaaaacgattctaaatatcaggattatgagagagagtcttct

SEQ ID NO: 54517 - DNA, 437 bp, Gossypium hirsutum
  Clone ID: uC-gsflnu33B059f06b1
cgtttgagcaaaggagaatcaatcttgaagcaagtaatcagcaaggtcagatgggatggttgtcatggggaacttcattggtgagtaacgccatctctggggtttcccaaagtgttggggaatacctgagtgggccaaaggctagggatccgtatctggatcaacaactgtgatctcttggtgctcgatgtgtagctgtttcaagagattccagtagccaaataagagtagcttagcaactacaagatttgtgtatatatgctctgtaataatgaggataccccggatatacatgcgtgggagctgaatagacgcaatgtgatttgtgtatagtggcttcaaagccgtcgttgggtttggctcctttaagctgctaactccaaaataaataggttgttttcttaaacttgacaatgtagttgagtgtttttattttc

SEQ ID NO: 54518 - DNA, 471 bp, Gossypium hirsutum
  Clone ID: uC-gsflnu33B059f12b1
tgttacgcgtccggaacccaatttcaagcaaaattgaatatatcgtgtgtaactgtttggtactttgctagactaatttacttattttctaaataaatgagataaaatgcataaaaaaaaaaaaaaaaaaaaaaaaaaaaaaaaaaaaaataaaaaaaaaaaaaaaaaaaaaaaaaaaaaaaaaaaaaaaaaaaaaaaaaaaaaaaaaaatggggcggccgttttaaaggaacaaattttactaaccctggcttgcaactttatagtttttttataggggcacctaaattaaatcaactggccggcgttttacaaacgtgtaattggaaaaaccttggcgttaccaaattaaatcgccttgaagaaaatcccctttttccaatttggattaaaatcaaaaaggcccgcaccaattgcctttccaaaaatttgcccaacctaaatggaaatatggaacccccttttatcggg

SEQ ID NO: 54519 - DNA, 530 bp, Gossypium hirsutum
  unsure (1)..(530): unsure at all n locations
  Clone ID: uC-gsflnu33B059g04b1
ccctcgcgtccgcttatcttcttcttcttcagttccttacccctcagttgctgattggtgggacactgtgaggctctacactgaccaaacaggatcaaacattacagctaccatttccatttcgggtgagttttatgattctgggtactcccatggtgtttacttaagtcgtttatcgatgcaatcgatcatcaaagctgcggttacatctcatttgaggctattgcctctcaatcctcacaatggactttatttggtgctaacttcacaagatgttcaggttgaggatttctgtagagcagtgtgtgggtttcattacttcactttccctatccttgttggtgtaacggttccttatgcttgggttggttatagtggaactcaatgtccaggtatgtgtgcttatccatttgcttggcctaagtactcggngaagccacccccgaatggaggtaatgacataacacatgcgccgaatggngatgcaggggtcgatgggatgatcagtgttatcgctcatgagttagcgg

SEQ ID NO: 54520 - DNA, 318 bp, Gossypium hirsutum
  Clone ID: uC-gsflnu33B059g06b1
ctttctcgtggggttgggttgaattacatatgccgttacgagcagcagcaaaacgcattgttggattgtgcaagcagtttcgatttcgaggactgcatggaatggcagatgaaatatggaaatttgtacattgattaattacgaagttcgaatattacaaatacatgtagagatttgtagactatttttcttgaccctcgtagttcaacaagatgttaatatctcagttacgcatggaaaggctttccctgtaatcaaagcttgaaatagattaatgtatccacttttgaaggtatgggaaatctttacttctttagt

SEQ ID NO: 54521 - DNA, 353 bp, Gossypium hirsutum
  Clone ID: uC-gsflnu33B059h02b1
ccccttcgttcgagcatttcgtatatctgctactaaggaaaagagcatctcagacgctggctaaactcttcatgcgcaagaggatgcgcaagggatgcacatactagaatcatatgacagtggggatccactaccatgctccgagaagaatgatgctgagctctgctcttaaggatggcaagccggaccacagaagcggtatgatgcgcaatccgtggggctgactatacagacgccgactatcatcgctaactctacgtataagtcctggcatgacaagaacataatgtctcatagcgctgacgacacacgtactgcagacgacagctgatagcatgactggaatgagagga

SEQ ID NO: 54522 - DNA, 367 bp, Gossypium hirsutum
  Clone ID: uC-gsflnu33B059h04b1
gctttttgtgctggaacgagagctgggtgagaaccgtgaggagaacggtactgatgaccgtactgaaggacgaattgaacttattactaaaggtaccgcgagtggaaacaatggttcatacagctgggcataaaactcggtggaacagacataccggccactgtaccatgagcgagctcatgtctgaacgaatctgagctagaagcgaggctcgaagcgatggacgcactggcgacccgaatgacgagcctctgtacgggactgtgacccgcaagggcgccagtggtcggtgcagaggacgctatataacatacacgctcacgcaagcgtgtatgtgacgtattatgtcacctatagtgaaacctat

SEQ ID NO: 54523 - DNA, 519 bp, Gossypium hirsutum
  Clone ID: uC-gsflnu33B059h08b1
tttttgctttagggctgaaaggccggcatgaaggtccgatcatggctagctacatgcacaaccagcagctgcgccactttaacccacgactccaccatcccgttccctaaaaaaccaccgcgcttatcggaacattaggtttccgatagttcctccgataatcgagggagcgccacctcatcttcagcttcttcaagtgacacgagctacagcagcctccctagcaacccttccctccagactctgccatctgtaccttccttacagcttttccctgataccttagtcttttccgtctctgacatcagcgtttcttcaattatgcctctacccaaccacccgatcacctgcgttgcggttcagggtaactacttgtatgttgcttctgttaacgaaattagcgtctacgatcgccaaacatacactcttgtcgatgcctacaacggcaacgattcatcctacggttccgttaagtctgtcactgtctgtgacggaaacgtcttcactgctcaccaggac

SEQ ID NO: 54524 - DNA, 169 bp, Gossypium hirsutum
  Clone ID: uC-gsflnu33B060a07b1
tttttattagttaattaatatagacaaccttctcataaatgctccaacatatagttatagctttaatagatgcacttccactttaacacatgctataccgcttctccacgaggctgctcgatcttctcgatgtttttcaataccctaaatgatataagtgtagaagcat

SEQ ID NO: 54525 - DNA, 142 bp, Gossypium hirsutum
  Clone ID: uC-gsflnu33B060b03b1
tccttgcgagcgctccaacactcgcaagactatgtgtgtttttaaaaaagcgcgaaatacaccacaacacccaaaagcttgcgcagaaatccatggccactgcagaggtcgcaacacgcaagactgcaaaccacgaggccaa

SEQ ID NO: 54526 - DNA, 228 bp, Gossypium hirsutum
  Clone ID: uC-gsflnu33B060b05b1
ctcacgcgtccggtagcatgttcagcgtgggaggtattcaagctagaaatgaagagtggcacgacgatatcgttaccagagaaggaaggggctaccctaaccattgcagttctacttgtctctgtctctaccgacggtatcattctaatatttcctcttatcttccctctcttcttctccattcacttgccctccttcgacccctgtttccatctttaccaccacctt

SEQ ID NO: 54527 - DNA, 214 bp, Gossypium hirsutum
  unsure (1)..(214): unsure at all n locations
  Clone ID: uC-gsflnu33B060b08b1
tancgaccctccgaagtcatctctcactgatttttcaacctttgcggatttgaatctttgcttgagggatagggtgtacagagacagcaaacactaaaacagctctagatgctatcgacgagaactaacattgatccttcatagcgacaccaagtaaaccacaaacttcaccccctgcaccgatcaacgtacccccacaatatttacccccacc

SEQ ID NO: 54528 - DNA, 242 bp, Gossypium hirsutum
  Clone ID: uC-gsflnu33B060c06b1
ctcacgcgtccgcccacgcgtccgcccacgcgttcgtccacgcgtccgggtatttagcagagcttaaggacggtgatgagaggaaagctgaaactgtggacagaattagctctgacaaggtattaaaaaatttttcatttggcgtttaaatagaaaattagcaaaactcaatttggagcttataagaaaaaatgcaacatacttggaaccttgattttatattagcatagcaaatccaagcg

SEQ ID NO: 54529 - DNA, 298 bp, Gossypium hirsutum
  unsure (1)..(298): unsure at all n locations
  Clone ID: uC-gsflnu33B060d12b1
taccaggcgtagagcggacgcgcactacgtggtttgtttttatgcgggcgcgattatcattggaaacaacggtgaagttatgcctggtcaatgggaattacaggttgggccatctggaggaatatctgcaggcgatcaaatttggatggcacgagacatactaccgtgtatcaccccaatcncaagacctgggcaanaatttgatgcctaanncaaaacccctgactggaatgacggtgtggcgcgttctgttctccgcccaatgtcacatcagaaacgaacgtcggatcaatgttat

SEQ ID NO: 54530 - DNA, 469 bp, Gossypium hirsutum
  Clone ID: uC-gsflnu33B060e06b1
tcccacgcgtccgcccacgcgtccgcccacgcgttcgcccacgcgtccgaaaggattaaaacttagatgtataagtagctatccgaacatacgacacacctgagagattcaggcagacatcacccttccatccatagcttgtgggctggctagcatggttgaaacactcaagagcattgtttctgcacgaggtgactgaaaatttcatttgaatttgcttctgtcggtataatatctgtcaaccgagccgatcatttatgcaggttatttatggaaacgggagatctagtataatagatgtcgggttatataatttttactatggcttggctatctcatacatgattgagacatttttgctcatgtttttatgagttgatgtctgaatgtcttaaagccgagccaagctttcactaatgtctagaaatcgttgcccagaaagttttggactgatgctgctactggattc

SEQ ID NO: 54531 - DNA, 124 bp, Gossypium hirsutum
  Clone ID: uC-gsflnu33B060e12b1
tcgattattccccagccgataggctagtggtggtttttttaacccccccaggcgtttgtaaccgacgaaacaaggacctacaacagtgcgagcacaaagcacggagcgtgagcaagcaccgact

SEQ ID NO: 54532 - DNA, 469 bp, Gossypium hirsutum
  Clone ID: uC-gsflnu33B060f02b1
ttgattccaacaaaaaaaccttccaattttcctcttcacccatctcaaatcttcaatttttctttgccttttggtgatcatcttctccactcacacaaattggtagctttaattgtatagaatgaaattaagtgcaagtgaggatgatttagggtcagacattcatgttccagcagatatagattggcatatgcttgataaatccaagttcttcttcctcggtgcagcttttttttcaggtgcatcagctggtctttaccctgcaatggtgttaaaaacccgacaacaagtttcatccactcaaatctcttgcttcaaaatgtctttctctattatgagatgtgaaggattaagaggattctatagaggtttttggtacaactttaatgggaacaatcccagcttgagcactttacatgggagcccttgaggtaaccaagaccagtgttggcaggagcactgttaggta

SEQ ID NO: 54533 - DNA, 150 bp, Gossypium hirsutum
  Clone ID: uC-gsflnu33B060f07b1
tagcttatctcaaaagaatctttcgtgacctctttatttgtgaaggcttccagtctgattatggattagattggaccatgttgcggggaaaacaggggcactagaccactcctcctgctcgagccctgggaactggtggtggaacaagca

SEQ ID NO: 54534 - DNA, 200 bp, Gossypium hirsutum
  Clone ID: uC-gsflnu33B060h08b1
ctttcttgtacgcgtgggtaaaaaagcaagcgtgtgttttttttctccattaggcgtgttctctgcttaaacatccgagcaccaccccacccatacccaaagacgggggccttcttttacgacaaaagctcctgtacctgcaatccttagacatcaattcccacaaagctgtgaacttaaaccctttcctccggtccacc

SEQ ID NO: 54535 - DNA, 266 bp, Gossypium hirsutum
  Clone ID: uC-gsflnu33B061a05b1
tcccacgcgtccggattcttcactctgtgtgctacccatcaatcaatcctcacccacctcctgttttcttcttttccttccttctcttttcttcctgtcatacatagtaagccgttcctcactttgtcaagccttcacttttctttgctttgctttgcttttctgtgttcctcactgtctctgtgtatatagccccaaagtgcatgtttcatccaatcccaccactttccacttcacccctcttcttggcccatctaagggttttc

SEQ ID NO: 54536 - DNA, 132 bp, Gossypium hirsutum
  Clone ID: uC-gsflnu33B061a11b1
tctttctataagctaagaagctccttttgctgaccaaaccttctcctgtcatccttgaacttgatcctctttatcctctgtgcagccgctcttgcttacattatccttgtcaaaatgccaccaacttcactg

SEQ ID NO: 54537 - DNA, 166 bp, Gossypium hirsutum
  Clone ID: uC-gsflnu33B061b05b1
accacgcgtccgggttagacaccaagatagactaccatccacaccacggaagaacagggctagtaaacatactccgttaaccaacccggcgtattaatacaagtttgcgaaggtgaacgaacatgatcaggagataacaacttattaggcaagttagaactatgcg

SEQ ID NO: 54538 - DNA, 189 bp, Gossypium hirsutum
  Clone ID: uC-gsflnu33B061b06b1
taaaaaaaaaaaaaaaaaaaaaaagggagggaaatttaaaaaaaaaagggagtaaacaaaacaattgggcggccggccttgcggacccaaggttactgaatccgggcatgcgacggtgtaagtacaaaatcgtgcgacctcaactcattaagctagtcgcagctatacggggtccaaactggtaaaccc

SEQ ID NO: 54539 - DNA, 248 bp, Gossypium hirsutum
  Clone ID: uC-gsflnu33B061b10b1
ttattaaaataagcttttttctggttttcccttattttgtcttgtttttgtttcttggtgtgggatatgagtgttttccattttgcctcgtgggtttttggattgaactttaagaattatgcgttgaacggtcgtaaatttttggcgaagagagaagaaacttgtttcttcattgtttatcaaagcagagcaggcttgagttttctttatgtttgcagggagagagtggaattccttttattttcgct

SEQ ID NO: 54540 - DNA, 262 bp, Gossypium hirsutum
  Clone ID: uC-gsflnu33B061b12b1
ttttgaggcaccgtggacgtggaacggacgaatttgggcaaggacaggttgcaacttcaactcgaattggcaaccggcttgtgaaaccggtgactgtgatggaaggctccaatgcaatggactaataggaatacctccagccacactagtccaagttgcacttcaaggtgataaaggcaagccaaatttctacgacgttagcctggttgacggctacaaccttcctgtctcggtcactacacgacctttttcacccaaatgc

SEQ ID NO: 54541 - DNA, 521 bp, Gossypium hirsutum
  Clone ID: uC-gsflnu33B061c02b1
tagaagacggagttgccgacattcaaagaagcctatggagaacatctagttctcgcgtagaagtgtgatatacttatagcacgaccttgaccatggcataatctggttctcgatggataggttgattgtgcataatgggaagcaaccggtttctagtctatgaatacatgcaaaaagggaacctacaagatcacttaaatggtacggttttctactcaaatctgtttccagtgcagctgatcacctattcaacatctatcaaagttaaactgctccaataggtattggggaaacaaaaatggattggccctcaaggctcaaattggcacttggtgctgccaggggacttgcttatctccactctagttctgctgttggaatccctatagttcacagagattttaagtccaccaatgttcttctaaatgccaactttgaagcaaagatatcggattttggactagccaaactgctgccagagggtcaggagacttctgttactgccagatttctcggcacat

SEQ ID NO: 54542 - DNA, 194 bp, Gossypium hirsutum
  Clone ID: uC-gsflnu33B061c05b1
tcccacgcgtccgaacccttcaaacttcttaggtcccaatctgcaattaaaccctttagtatatggtactatctatgccttcccttttatgtcttccctttatggctccagttttctcttcgtttcttgctttaactctcattattccattaagcaatgctcaaggtccaccttcccctggattctccccaagc

SEQ ID NO: 54543 - DNA, 165 bp, Gossypium hirsutum
  Clone ID: uC-gsflnu33B061c06b1
ttctttccacgcgtacgcccacacgtccgaggggttatttgttggcggtggcatatacagggaagaatcaggttccttgggaatgcaggtcctaggaataatgataatctgaagctttgtatgaccacatagagacgagctcggttcacactattgctcatggat

SEQ ID NO: 54544 - DNA, 510 bp, Gossypium hirsutum
  Clone ID: uC-gsflnu33B061c07b1
cccacgcgtccggttccgaagttaactgagtatttgcaaaagcattggagggatttcaggaagcctgaaagtgcagtgatgcgtcctctgtatgacgaagtggtgtacttgaatgagcatcataagagaaaattaaggcaagaatttggagtggtgccatggtcatttgaacagaatttggggcaagctgtctttctccctgctggttgccctttccaagtgaggaatctccagtccaatgttcagttagggcttgacttcttatttccagaaagtgtgggggaggctgtaagattggctgaagatatccgctgtcttccaaatgaccatgacggaaaacttcaaattttggaggtggggaagatctcgttatatgcagctagttcggccattaaagaggtccagaaattggtgctggatccgaaattgggtgctgagcttggattcgaagatcctaatttaacctcagcagtatcggagaatctggaggttgtgaagcgaagtcaaata

SEQ ID NO: 54545 - DNA, 412 bp, Gossypium hirsutum
  Clone ID: uC-gsflnu33B061c08b1
gccgccgacttacgctagtaccagcaggaacagcaggagggcgagaacgtacgctaggacatccaagcccccgacgaatgcaccaactttacatcccttccacggaagcgagcctttattccacaacgaaggcgcaagtgttcccacggatagaccataccaagattcgaccgcttactgcctaccaggggcacatggatgtaatgacacatccttgtcctagaggacaaaggagcctaatgtatgctcagggcgaaggagacatgaggagatgcaactacgcttgatacaacacctagggggaaggagagcctagttggatcgccactgacaagatgacatgctagatcaccgaacacaagctggaggccactgctaaaactggcaagaatggctatgtcttactgaagca

SEQ ID NO: 54546 - DNA, 418 bp, Gossypium hirsutum
  Clone ID: uC-gsflnu33B061d04b1
ttcttgacaaacccagagccaaaagaccggccaaggtattgctgcccatcgcgctatgagaggccccatgacttgactgtgctacacgcatggtgaagaacccgccggcggttgaaggtcaagaatactgagaccatagccgcgctggcacagaaacaccaagaactagaaacatggccggtgccaaggtgaaggtggagggcatcaaccagcagaccgctgatagttacaaccatgaggaaggacacacatggtgcaaccggacaatacgagatgcctgtataacgagaaacatgtggaatacagctgtgacgcatgctcatccttagagctccacagcgaagggcgctaacatgccaacaggacacgaacggacgctcgtggacataaccaactacatcggcatcgcatagaacac

SEQ ID NO: 54547 - DNA, 422 bp, Gossypium hirsutum
  Clone ID: uC-gsflnu33B061d12b1
tcctacgcgtccgaaaatgcaccccttgccagcagcaagtcccatctccgccgccaccgtctccaccgccgcctgcatcttcgccacctcctcccgctaataaccccaactactgcccaccacctccatctccacccacctctagtggtggtggcagctactactactctccaccaccaccagctcaatccgggggtaacaacaacaacaactatgctcccccaccgcctggtggtgtcattggcggcatgtactaccctccaccgacgtacaaaaactacccaacaccgccagctgagaaccccattgctccttacttcccattttattaccacactccatgacccccttcagggtctgaaaagctgttagcttgttgggttgtaacgatgttgggttttttcccttatgtcttttgacat

SEQ ID NO: 54548 - DNA, 503 bp, Gossypium hirsutum
  Clone ID: uC-gsflnu33B061e02b1
cccacgcgtccgaaagatggtagtgaaggttaccatgaagggcgagaaatcccggtctaaggcgttgaaaattgtagttggtctctcaggggtggagtcggcttcgttgaaaggcgatgacaagagccaaatagaggtaacaggggatggtgtggatgcagttaagctaaccagtctgctaaggaagggcgtggggtacgccgagctggtcagcgtcagtgccgctgataagaaggatgataagaaagacgagacgaagctaccgccacccttctactattatcagtgtcaaccggtgcctccgtacggatacgtcgaaaactatggaccctcttgctacatcttgtaatcacagacacacgaaattttacacttcacagtcgacaacaacatatatatattacttggcttaaattcctcagttcctgttcatctcaaaattagacctttaatgtctgtgtttcctatgcaattgattttgatggtgtgttttcattattgaa

SEQ ID NO: 54549 - DNA, 455 bp, Gossypium hirsutum
  Clone ID: uC-gsflnu33B061e03b1
tcccacgcgtccggccacactaatggtcgagggatcaagggcacggaccttgagtgacatgaatgatgagggactcgaggcgtacaggccatcggcgagacagatgtacccaggtcgacccatcccccgagcgttgaaaggctgtgaaaggggctgactggccctgcttgtgttcttataagaattgatggtcggtaggtagctgggggattgatccaaaactggcaggggagttgcctccaaagcgcatgctcccaatccacataatacggcatttttaggaaagggccattggtgacatatactgaaacctgaaggattacagcacatctggggcatgaaaggtttggcaccaactatatatacaagagaccaagtataaccatgcattattgccatatagctgaagacaatcgacatatatgcattagggcacgcatccagaacagcatgaa

SEQ ID NO: 54550 - DNA, 492 bp, Gossypium hirsutum
  Clone ID: uC-gsflnu33B061f04b1
atttacggatagtcaattgggactgaagtcttgcgaactgctatctatgatatagaggtagattatacggacatcaaagaaagaactttgttaaaggtacctagttatgaaaagccagtggagtttggagtgttgacctcctttgcttaccctttggagggagaattgggtgaaattgttgttgccactactagggttgaaacaatgcttggtgacacagctatagctattcatccggaagacaagaggtacagtcatctgcacgggaaatttgccattcaccctttcaatggacgaaaacttccaataatctgtgatgcaattctagttgatccaacttttggaactggtgcagtaaagataactccagctcatgatccaaatgattttgaggtgggcaagcgccataaccttgaatttattaacattttcactgatgatgggaaaataaatagcaatggtggcgcagattttgttggaatgccacggttt

SEQ ID NO: 54551 - DNA, 379 bp, Gossypium hirsutum
  Clone ID: uC-gsflnu33B061f06b1
ttcttgtgcgtacgatggctgcagtggctagggttttatcatgggccgcacggctgacggaaccgcaggggcttgcggaagagaagaaaacggccatggctcagaaatattcacttgctcatatgcttcgtcgtccgatgctatgctgattttgcgacgggaaatgagaactcaattatggttccgcactaatgaatggttactccagccggtacacaatttaatggcatttgaacatctcatgttggcttctctattcctgcactatttcattcatagactggaaatttgtatcttgcagcataggactaaccaacacaaaggtgtccaaatgttgcatctgcgcacagagcgaagacttatttttcgcacaatggat

SEQ ID NO: 54552 - DNA, 243 bp, Gossypium hirsutum
  Clone ID: uC-gsflnu33B061h08b1
ttactaaaataaaaaaaaaaaaaaaaaaggagggatataataaaaaaaacatttattaaaaaagggctgatgggaaaaaggaggctaaggtatatctgatggtggtgccgaggggcattttatggtcctaagggttaacatccaaggggtgactaagccgggcatccggcgtttggctccgcgtggaggagttactgactttagtgggatgggctttattttcccataactgggctgggggat

SEQ ID NO: 54553 - DNA, 293 bp, Gossypium hirsutum
  Clone ID: uC-gsflnu33B062a01b1
ttgcccacgcgtccggcgatgtgcaatttgactgttccaatttccttttcaatgttcaattaaaaccctagcctcttccttttgcttctattggggggggggaaggaatcatgtattccgatctaatatgctgaagccttcctgcaaataatacgcatccttccaagctctggacggttgaggaccaaaagatgatagaggatgacgaacccgtgagttgcccgacaccttttctgcctcctttattctttacaactttccaggccaggctttcaatttatacccgatccccc

SEQ ID NO: 54554 - DNA, 468 bp, Gossypium hirsutum
  Clone ID: uC-gsflnu33B062a09b1
gttcacgttcgggatcgcgttcggatcaaggcaatcttttttcttcgacagttcgtttcagttgtctccttgcgaccgccgcctctctctctccaactccaattctcctgtcgctctctttagacctaaagttgacgagatatctctcctcaccatcaacgggtcttccttctctccggactccgttggtgggtatatggttgcattttctggtcgaaaatacgctgcaaggtccctgcccgcttttgtcgcaaacagttcatacactgtaacaagcttcactcttgtgcttgagtttaagaaaggaaggttgcaaaacttgttttggaaaagggatgggatgtgctcaatgctcaggaaattcaattttgtgtgtttaaacaagcaaaactgtgcaatcaacacgagcagctgcaaaaaccatggagggtctgtcgattgcagtctcgggatacagctagcattttt

SEQ ID NO: 54555 - DNA, 490 bp, Gossypium hirsutum
  unsure (1)..(490): unsure at all n locations
  Clone ID: uC-gsflnu33B062b02b1
aaaaaaaaagttatcatacaaagatgtgtaacaacatgacttggagcccatctcatcccatcttagtttcttcaaagagaaggcatagatcaaaacaaagtaaagttcaaatctacaggctttccaggaaaaggtgtgaagaagaagatgtgaagaaagacatggaactaatgaacttgaagctgtatttggagaatcgaagcattatagaagagaatgagaagttaagggagagagctaatcttctacatcaagagaacttggctttaatgtctgagcttcaaaacaagtttcctcatttggatcgtttttccactacccttttggttcttctgcaaaaacactgatatgaggtttcaagaaacaacaatccgaaccctcttctctatctactatatatataccctnttagtctcttaaagcttccttgcctttttttgatgatgtctgttagcaatctggaaattggagctatgacgtttggtttaac

SEQ ID NO: 54556 - DNA, 513 bp, Gossypium hirsutum
  unsure (1)..(513): unsure at all n locations
  Clone ID: uC-gsflnu33B062b03b1
accttcacgtctgctcattctccttccctgttgttctcttatttcttgctgtcagttgagttgtttgctacccatttttgacaaagcaagggtctgtaatggcatcacctgaggttggcagagataaatctccatttatgcttcaacccaaatctctgccttctccggtctcaaaatcctcaaaaacaagctcctttaatgctcaaataatcctcagggttttcgctgctgctttcacattggctgccatctgtattatgaccacaagctcccaatccttccctctactcggcttcactattaaagctcactatagcgactcatctgctatgaggtttttacttgtgacagacgctactgtatgcgccttctctgtacttnnngcgctctttggttaccgtttgagccgctcaggatcagatctgaagtattgcttctatctttttcttcatgacatggtgattatggggctggcgacatcaggatgctcggcggcgactgcggtgggatata

SEQ ID NO: 54557 - DNA, 374 bp, Gossypium hirsutum
  Clone ID: uC-gsflnu33B062c02b1
aaaaatgtccccgggggaggttttggctgtgcagtttgtcttacctcttctttcggacttggcaattttcaaaagggaaacaaaaatgattatcaaagaaaactaaaggcgggagtggaaacgaaataattgcttttatctttttcattttaaaggtcattatagcatttttaatagatataactgtggtttcaggttttgagtgctccatatcttcaaacctcgccgacaaataatatgcaggcaagcattaaaccggcccaggtacagaaagaagattaattatgccttgaactgctccttacttgggtttacttctcgtgttaaaaacactagtcatccctatttatggaaccgattttagttcgatgtct

SEQ ID NO: 54558 - DNA, 445 bp, Gossypium hirsutum
  Clone ID: uC-gsflnu33B062d02b1
acgcccacgcgtccgaccacgcgtccgacgcgagcaaagagtcaacgcttggattaacgcataaacacctcggagaacatggagggggctagagaactaatccggcaatctcactgttcttgcttctacattgactcccaaccgatgtcacacactggaggagaagtcagctcacaaaacatgacccaaacggacgatattggttacgatgcgattttggttcttctctccatggctgttttcattcttggtgtcgtcctcatcatcatcatctgcaggaagaaaccacaaaagcccgatcagaaacaattagagctccccgccaagttttgtgccagctcctatcagttaaccgacatagatgcagcgacagatggctttaaccctagaagggatcgtcgggaaaggccgcttaggtaccgtttatgcagccatatcgccgagc

SEQ ID NO: 54559 - DNA, 186 bp, Gossypium hirsutum
  Clone ID: uC-gsflnu33B062d09b1
ttttacaccgtttttaatttggagagaaactggcggggcgattggagatcttaatgggttcaagggcacaataaccgactctggaattgcgactttttgctcgctctaatgtattgaaactgcagatgcttactggtggcgggtctgcaaagggggatgccaaaaggctggcatggcttggaaaat

SEQ ID NO: 54560 - DNA, 444 bp, Gossypium hirsutum
  Clone ID: uC-gsflnu33B062e01b1
ctgactttctctatttgggtagctatgataacgcctctcgctctgagcttctcaagactcaaggaattactcgcgtccttaataccgtccctgcatgtcaaaacctatacaggaattcatttatctatcactgcctgcaagatgacaaaattttacaatttgatgatgcaatacaatttttagagcaatgtgagaaggataaggctcgagttcttgtgcattgcatgtcaggaaaaaataggtcaccagctatcgtaatagcttacttgatgaggtctaaaggatggaggcttccgcagagctatcaatgggtgaaagaacgtagatcatctgttgagttgagtcaagctgtctatcaacagttgcaagaatatgagcagaagctctttcgatcatctggaagtatcaatccttctttgcctgcattcccaccaacggctggag

SEQ ID NO: 54561 - DNA, 354 bp, Gossypium hirsutum
  unsure (1)..(354): unsure at all n locations
  Clone ID: uC-gsflnu33B062f02b1
ccgttatatcttggactaccatcatatcagcacttgcattccatggacttggcacacaagctctcgacgtgttctctcggatggaaatggctcaagttaaaccgaatgatatcactttcatcgcagtcctctctgcttgtgctcatgtaggattggtggacttgggtcgatattatttccatgctatgaaatacaggtacgggattcaacacgagattcagcactatggttgtatgatcgatttacttggtcgagccgggtatctagcagaagcactcaaactagttagtgagatgccgtttcagccaaatgcagcttnttggggggccacttcttgctgcctctaatattcat

SEQ ID NO: 54562 - DNA, 259 bp, Gossypium hirsutum
  Clone ID: uC-gsflnu33B062f07b1
caactatgtaaagttttaaaattgtaactcaactattcaattttgcatttttttcattgccaactggctaacagtgacagcttttaaaattggtataatactaactttaaccttcaagatttataaattgtattaatttagttttgatttttttaaaaaaagtctaaccctcatcatttacacgtgtaatttgttattttttgtaattttgcttttctttgtaccatgttacttaaaaaaaaatgaacgaattaatagg

SEQ ID NO: 54563 - DNA, 140 bp, Gossypium hirsutum
  Clone ID: uC-gsflnu33B062f09b1
acgcccgcgcgtgctgtcttttttttgaagggaagctatgataacgcctctcgctctgagcttatcaaaaattaaagggaggtttccgcttcatggtacctggccctggatggttaaacctcatccggaaattatttatg

SEQ ID NO: 54564 - DNA, 471 bp, Gossypium hirsutum
  Clone ID: uC-gsflnu33B062f12b1
tcggaccgatttaaattttaaaatttctttcacaatttgaattttttaaataattttttactaataaataataagttgattttatataattcatgctaaatgatttttttattctaattgagattcatggattttatattaacatttatgcaaataatatatttagtatattacaaataattagattccactaacacatttttatctatgtgtaatttagaaaagtgtatatatatatcatataataatttaagaaaatatttttatcaaataaaatattgaattacaaaatatattaaaaattataaaaaatttcaacgtattcataatcttcatcatctacgccaatgtatacaaaaattcaaaaataattttaatatattctaattaatacatacaactaaactcatgtatcggcaggtaagaaaactcgaatatcatatagaagataccgaagacatgtatgaagac

SEQ ID NO: 54565 - DNA, 389 bp, Gossypium hirsutum
  Clone ID: uC-gsflnu33B062g02b1
tttaccacgcgtgcgtccacgcgtactgttgaagcctgagtagctggtcaacagctttaagaccactgatggtcgaggggtgattgtacatattgagaatggtgcatgtatcacaattgcactaccctaccaatgtgattgtttatggtcttcatattcatgacttgaagcgcactggcaatgccatggttagaagctgacccactcactctgggatggggacaatggctgatggggatgcaatctctatctttaggtgaggccacgttcgagtttggtcacaagtctctttctaattgggccgatggtcaggttgtagcttacatgggctcaactgccattaccatttccaacaatcaaccttacccatcacaatggggtgatgttgc

SEQ ID NO: 54566 - DNA, 383 bp, Gossypium hirsutum
  unsure (1)..(383): unsure at all n locations
  Clone ID: uC-gsflnu33B062g07b1
ttgccttcctttatccaccatcactggagtgtttggaatgaatgttggtggtgttccatggaccgtgcaaaaggaccctgcattgaaagacggattccgaaacgtcatggtactatgtttagcgatgctgattctagtgctgctatgctttatttttccggctctttattcccgattgtacgcctggcgtcagagacggtctttgctgaaaatactggtcgtataaccggaagatcgttcctcaggagaagtgtaggaattcaagaanagtggcagcggtcggataccttaagatttgatgagtttgaagaaagtcgatgatatcatcgtatttgtcatcggattaaaggctaatcggatgttcaactgtttggcgatcatgt

SEQ ID NO: 54567 - DNA, 318 bp, Gossypium hirsutum
  Clone ID: uC-gsflnu33B062h01b1
atcagcttttgccattctgatctttggccaggatttgccagatgggaattaccaaaggctgcaaaattcagggaataaacagaaagataaattctctcgcgtgttctaccatgggatcacaaattacagaggatggatcttggccttgacttatggatattgtttcggggtgggagttgacagtggacaacatcattgccgagtacttttacgaccggttcaatctgaaactccatacagcaggaattattgcggcaagctttgggttagcaaatctagtttcacgacctgcaggaggggtgctgtctgatatgaggc

SEQ ID NO: 54568 - DNA, 208 bp, Gossypium hirsutum
  Clone ID: uC-gsflnu33B062h09b1
tcgcccacgcgtccgaactcgggaggaagcgttctagttgatcgaggattacgatggcttgcctgctacgctatggccatcttatagagtcttgaagatgctattcgatgtaccctttgctacaaaaccgtgacttggaaaaccctacgtagatcaaactcagtctgattgcgagacatttacgaattgtctggtaactttataggca

SEQ ID NO: 54569 - DNA, 384 bp, Gossypium hirsutum
  Clone ID: uC-gsflnu33B062h11b1
tttcggatatttaggtcctcttgttgtgaaaaaatggcagggctgccttcaatcgtcaatagtgttgtgttagctatcagcagctgaggagcaccaaagactttgacatttgttgtatttggagtttgcatatttggtaactaaaaaggatcattgaatccatagctaaaatagtgctttttggcaatgttaaaacgggaattttattttatttcgctgattctttgaagagtgttccactcagacatctattagaagttccttcgctcgataataaaggttatccttaagagttgtaaatgaacattacgttcggttcaatgagtagttttgtttttgtccatttatcaaattaaattaataataacaaaatttgaaggctta

SEQ ID NO: 54570 - DNA, 194 bp, Gossypium hirsutum
  Clone ID: uC-gsflnu33B063a01b1
ttctcgcgtccgcccacgcgtccggaagcccgtggcctgaccggaggcaccgagggttcggctaactgaaccgggcagcacgtcgccgccgtaagacagcggtaaacaaggcgaaacgggcggccgatgctgtatgctggccgcccttttttcaaaaaataaaaaaaaaaaaaaaaaaaaccatagttaggaat

SEQ ID NO: 54571 - DNA, 316 bp, Gossypium hirsutum
  Clone ID: uC-gsflnu33B063a03b1
tttttaggtatggaaaacctgaaagggcgaatgaggatatgtggacacggtccacagaatgggcccaggatgctggtgttcagaccctttagatggccaggatccaatgaattgccaccttacgctgggaccaacgatatcggtgtctatgatgactgcatggtaattggttcactccacacggacttcgcccacatgttctaccatggccgtactgacagagtacattacgttacctatggcaacgacgtagttgaggccaacacgcaggttggaggcgggcttattgggattcagatcgatggctcacatgaac

SEQ ID NO: 54572 - DNA, 482 bp, Gossypium hirsutum
  unsure (1)..(482): unsure at all n locations
  Clone ID: uC-gsflnu33B063a04b1
tttctctttttccgacgaccacactcaaagatttgtttcttttaatccattacccaacgaagcagctcatccgccgtctctcccgcgtcgccgatgcttcctcccagtatagccttctcagttccgacaccgactccacgcgccatcgcatcacgcgtcgggctgaatctttccgtatcgcggtcgcttccttgaaaaagccggtgcgccgttctgtccccgacggtcacgtgccggtctacgtgggggaagagaggacgcggttcctggtgaacgcagagttgctgaaccacccggtttttgttagcttgcttaataaatcggctcaggagcacgggtatgaccaaaaagggagtctttatattccgagccacgttctggttgttgaacgggttatggatgcgttgagactggtggctgacctacgtgaccctcaggacctnctttgttcttcttcgaccactggtttctcgatttataag

SEQ ID NO: 54573 - DNA, 305 bp, Gossypium hirsutum
  Clone ID: uC-gsflnu33B063a06b1
ttctttctccctagaagaacactacacgagtgggtttgtactgcaaaaggagatcgatttcaaagccttttcaccatgagagctaagcggtagaagaagcgtatgaggcggctgaagaggaggagctgacagatgaggcatggacctaagtccttcaattgtatcttccagcacgcaatgtgatctatgttgctttagatatcctgttgcttgacggatactttactatataaggatttaagttatctatatcgtaacctttgtgatcttctggacacttgctatttcgtattaacaacttatgg

SEQ ID NO: 54574 - DNA, 295 bp, Gossypium hirsutum
  Clone ID: uC-gsflnu33B063a12b1
tcctctcacgcgtgcgaaaaaaaaaacaagggtgggtttactgaaaaagagagatggattacaaaaaccaattattttgataggggggggtcgtccttaaggacccaagcttgctacgcgggcttgcagactgatttctcttttattggggcacctaattttaatttactggccggcattttacaccatgttgactgggaaatcctggaggttgcccgattttttacgccttgaaggactttcgccttctgtctgctggcgttatagctatttaggccctccccgttttttcctt

SEQ ID NO: 54575 - DNA, 266 bp, Gossypium hirsutum
  Clone ID: uC-gsflnu33B063b09b1
tcttcacgcgtccgcaaggtttagtcaagttaatgcatgtaaaccgctcttaagaggttacgttcaacaagtgtagagttcggatcctggtttttgcaacatcaaggcagagcatggtttcacttcaaatagaaaattacaggttttaagaaaaggtcgccccttgttaatattatgtacatttgctatatgaatgactacgcacgttaatatagaaaagaaaagaacaaaaaaaaagcacaacaagaacattaaaggcttataag

SEQ ID NO: 54576 - DNA, 222 bp, Gossypium hirsutum
  Clone ID: uC-gsflnu33B063c06b1
tgcctaggaagaatggggtgtggatggttatgggtcgatgaaagggctgattcggcttcgatcaccagaagctggtcatgatgacgaggaagatgacgatgggggaaatggtgggggttcgagtgatcatcctgtggattcacatgtggaagcggcgaggcattttttctctgagttggggaattatgaaggagaatcttcccttttttgggtttacaaaaa

SEQ ID NO: 54577 - DNA, 368 bp, Gossypium hirsutum
  Clone ID: uC-gsflnu33B063c12b1
tccacgcgtccgggaagacaacagaatgtatgaattatttaataaaatgtggtggtgtataatataggcgatgtttacgagtactaagagatgccgtgatcgtcggatcatctttggttgtcatcaacctgttgtttctttaagctaagtgtgcaatcaatattttgtagtggaagttaattatgaatgagaatcttccctttttttggtttaaaaaaaatgtatgataaaaaaagcatcaatttagttgggaggacctaacattactcttaaaactggaagaagatacggtagacggtgctgcaccaatgctgtggaggagtatcttccgtaccacaatgagaccatctctggcgttatcgacaagt

SEQ ID NO: 54578 - DNA, 432 bp, Gossypium hirsutum
  Clone ID: uC-gsflnu33B063d04b1
acttattgtgcacaaaataacctaaacgagataatatgatagacatctaataaacggacgagtgatggatactgtatgttcatcaacatgataactcatttgcaaacatattagcttcagcgctttgcatattgtattgttgtacgactctactcccacttctactgctggttatgatgcgctagatccaactggaactatcactatcaaacgggacgcatgcagatggaccccaaatggctatgtagctgttgttacaatgtacaatctacaacagtagtcgggtattctggcacctggttggacattgtagcgtgacatgggccaaaaaggtagtaatctgcagcatgatgtgaagccataccactgaacaaggtgatcgttcataagacaaaggaaacgtccctgattgctgtcaaaaggatcccacag

SEQ ID NO: 54579 - DNA, 397 bp, Gossypium hirsutum
  Clone ID: uC-gsflnu33B063e04b1
tatttataaaaaaaaaaaaaaaaaaaaaaaaaaaaaaaaaataaaaaaaaaaaagaaaaaaaaaaaaaaaacaaaaaaaacaaaaaaaaagaaagaacaacttcttgggggcggggcggctttgggggccccgcgttccctcccgcgtgctcgcgggatctttttttttttcgggggccccctagattcatccccgggccgtgttttacacccctggggatggggaaaccccggggtttccccccttttttgggtgtggcgccgcccccctttttcccgagggggaattttgtaaaagggccccccccttttcccccttcacaggatttgggccctctgttgggcaaggggccccccccctgctggggcctttttggccgggggggtgggggggtcc

SEQ ID NO: 54580 - DNA, 292 bp, Gossypium hirsutum
  Clone ID: uC-gsflnu33B063f04b1
ttcttacacatcagtggtgctgacgtggaaccatctgggtcctcaacgggtggagtgtgagacaggtcacgaacttgatacgggctaacgagcaccctcacttagtcatgtggtgctcgttcaccgaccagaagatgaggcaaaccatgctcaatgaagcaagtgcacccatttagctccagatgaatgtgtacatgtggccgaagaacctctcagagcatggagctactgtagacctagatcagctagtgactaaccgaaccaaactgaccacagatcatcgatgcctaca

SEQ ID NO: 54581 - DNA, 559 bp, Gossypium hirsutum
  Clone ID: uC-gsflnu33B063f12b1
tctaatctcattaaacatgacaggccctccccacaaatgagaaaaaaaatggtctaagtggatctccctgacgaagtcaccttgatggttgaaagctttctcctatgcatctgtttacaactaagtaggagaccgttgtcaaacatttcatcaaaattccgatcactctcttatgaaaccccattcgtgccatcatttcttttataaaattcactcaacccccgtcgtatgctttactcatgtccaacttgactaccataagacctttatttcccacttctcttttgtttaagagtatgaagaatttcatatgcaagtagaatattttctgagatcaatctgcctcgtacaaacgcactttgagccccatcaatgtattgttgatagctcctctgagcttatttgcaattgtttttgctttaattttataaagcacattgcacagactaataggactgaaattcatcatagtagtaggattatcatttctagggataaagattatttgggtcacattaatttgttgaaaatgcatacctttattcagattttgtaatag

SEQ ID NO: 54582 - DNA, 385 bp, Gossypium hirsutum
  Clone ID: uC-gsflnu33B063g09b1
ttaatgaaaaagacatcttaaaccctatccttgaggttcatactgattccgtagccggaatacaatgaaaaggtacaactataacaagagccatatccacagcggactcatgaacggcaagggaggtacctacattcttaacaacttgttgcgattcacaatacgtgcggtcctaacccccaaagccaaccaaactgttcgtgtgaggatcccattcttcatacctatatgaccctcaaaaccagaacccattgcgatgcttagatgcgtaaatggccaaacatcacatcgaactaaacaaggggaagaaaatgacaccaccatgaccatcaatgaggatgaaagtgaaaccgaagaaggggaatccacatgggaaaacgatgaa

SEQ ID NO: 54583 - DNA, 538 bp, Gossypium hirsutum
  unsure (1)..(538): unsure at all n locations
  Clone ID: uC-gsflnu33B063g12b1
tcttccataaagagacctatctgtcgtccggcctccgttcaacccaagattaggaccgaaagattcgcctctttctcttctttctagttctccgattagctttctcgaaaggcttactgaaattttgaaaaaatttcacaatctttagaatcttccaagcctcgatctaaaaacccggctgttgaatcatcatggaagttcggtcgtggcttgtcgtcaccgctttcaatgtcttaactactgttcgggttttagaatgatgcttgaacctagagaacctagaaacgcgaaatgggtcttcgtgttgattttttttctcgtcattttctatttgtttggttgcgtgttgtaatggattgatgagttttgtgatttttgttgcgttcatttcagtaaataggtttagttgtgaatggctaaagaaattggttctgggagttgagaggtaatagcagtgggcgatgttattagaaaaaaanatcnnntctncttcctctttcttcacttactcaccccccattcttttatataacccccc

SEQ ID NO: 54584 - DNA, 457 bp, Gossypium hirsutum
  Clone ID: uC-gsflnu33B063h02b1
ttctgttgatgaggaagatgatgaacagggtgccacttgtggctcatgtggggatagctacggcactgacagaattctggatacgctgagatatctgcgagagatggttccatgggacttgcgttcctgaggcacctgcacaggctgtgcatatcactcagtataagtgcccaagttgcagtagcaagcgggctagggtttgaaagtaggtccagaaattggactcacatcctgttgaaacgaagcaggcatggttcatagaatagctgttacggcttggaagtaaaacagagtagcccgttttagttgatgaatgaatgtggctgactgcagctgggattcttaagttttgctactctagcatccactctgtttaatttcattgggaattgcgtttcaaactcatgctggcagctagaaatataccatatatatatatgctgcatttctttggttt

SEQ ID NO: 54585 - DNA, 274 bp, Gossypium hirsutum
  Clone ID: uC-gsflnu33B063h05b1
tcttctcgtccgcccacgcgtccgcccacgcgtgcggcgaacaagtaccgcgagggaaagatgaaaaggactcattgggccagacatggtaccaacaagtttgtcactatcaggtagagagctaaaaggatggtatcgacagcgggtctgcatcgcatgtatatatatctcggcctcctgtggagatgtttgttgcctgtgtagtttcatgaattttctcagtcatgattatgtagtaaacacttgaacatgatatttctagccaaccttttta

SEQ ID NO: 54586 - DNA, 318 bp, Gossypium hirsutum
  Clone ID: uC-gsflnu33B063h09b1
tcttttacacgtacgaaagatgaaaatgagcggcggttgtaacgaatgtgctggcggaagcaaacggtagaaaagaaggaggatgataaaaagaaagaaagtgatcatattgctgagcttgttaaggcttacaaggcccataatgctcacatgactacatattatcgagtcgtaagtgcggaagaaaatcctttttccagttttatcaggtaaatccgctggacttataaaggatgcaacacatcagctgaatgaaatgtaaggagatgctgtatagagagtgaataaattttgatcaatgttttgtagagcttattg

SEQ ID NO: 54587 - DNA, 486 bp, Gossypium hirsutum
  Clone ID: uC-gsflnu33B063h10b1
tcttttttttttttttttttttttttttttttttttttttgattaagttacgtaatttatcatctcttatagtaagaacaaacttatcttccaattctttctcttaatacataaatcaatccataaagctaatgaatgggtaaaaaataggagggtctttattgaataaacccccaaccaaagcaaaaccttctctcctgcctgaccccctttggtgaaaggttaattcacttctttgctgtagctaacttaattcaactcaaacaacactgtctttcctcccttcctcgggcaattttagcaaggcgaaccttaccaatcccgccaacgaaacatattctaaccgtacttgactgtacccaacgcttcacttggctggcttggctgatgaatacccaccaaagttgccccatccttttattttcatgcaaacccttcccacccattcattgctttaattgtcctcccttacattaaaaccactgc

SEQ ID NO: 54588 - DNA, 331 bp, Gossypium hirsutum
  Clone ID: uC-gsflnu33B064a02b1
tcacgcgtccggcgaaaggttgggtcactggtaattctgatggcgttggctcatgggttacaaccgcgatagactttcagatttcgatttcacacttttgagcaacctccggttagtgcatggagagtctcaatggttcttctttgctgtaattttgttagtctttctttcagtctttgactgagcttttcttttaccaaaaaatgtggtgacgttaaatttttataaatagatgaaccataagtcgtcctcttctagtttaaaaaaaataaaactacactatcttacaactactaattcctatctaaagaacaccaatcctcctaaaacg

SEQ ID NO: 54589 - DNA, 438 bp, Gossypium hirsutum
  unsure (1)..(438): unsure at all n locations
  Clone ID: uC-gsflnu33B064a05b1
tccacgcgtccggcaaaatcttcggcttgcttatcttcgtagtttggaatcattagaccttgttaaacaaatagaagtttcagagttcctcttttcaggagatattgccgctcttatctacctatgtaatcctttcacgatagttgcatgtgtgggcttgtcgacatcaccaattgaaaatatggctgttattctgtgcctttatggagcatgttcacgacttattcccttggcggcttttgggtgggtcattgcaactcatttgtctctttatcctgctattctgataattccggtgatctttttattaggatgtggtccagattctcctcctaggaaattgtttctgcaaaggcaccaacanaaagaagtgttgaatcagtcgaagctcccttcctcgttctcatggggaccagtcattcattttgcattttgggc

SEQ ID NO: 54590 - DNA, 180 bp, Gossypium hirsutum
  Clone ID: uC-gsflnu33B064a10b1
tccaggcacatctgaagccataatttccaacgtgtctgtgcttcatggtctcaaaatgtgtagccatgcagcagtttaatcatgtatgtacggcggctataatagtattagattagccattagctgattttacattgaagaactgcttggctttgcacttcataatggtggtgagagctt

SEQ ID NO: 54591 - DNA, 118 bp, Gossypium hirsutum
  Clone ID: uC-gsflnu33B064d06b1
tgatttgttgctttacacccaatggagaatgaattgttttaaccatagagtcttattacttaccctattgctacccatagttgttattttagtggaaggtcaaggcactagagttggg

SEQ ID NO: 54592 - DNA, 160 bp, Gossypium hirsutum
  Clone ID: uC-gsflnu33B064d10b1
ttcctttcactgtaaaatgtaaatcttcttgctgtgttttcccccctacttgttggaggttcgaggacagattcttaagttttaaatgactctgtcatatgtggcttctgagcgaataaaaaacagtgaaaaaaaatgacaaaaatcgtatatgttgaat

SEQ ID NO: 54593 - DNA, 398 bp, Gossypium hirsutum
  Clone ID: uC-gsflnu33B064d12b1
ttagtttcaccgccagcagtggggtaaaatgagcagcattgaggtggctaggtgcggggaatgggagccgtgcactcagctttgttggagggaatggtagtagtaaaagtgttagcagtgctggcaggattggatcattgggttcttcgagtccgagtaattcaatgactaatacaaattttgatgggaaaggaacttatttaatcttcaatgtcagtgattctatttttattagtgatttgaattcgcaggataaggatccaataaaatctatccatttcagtaattcaaaccctgtctgccatgcctttgatcaggatgccaagaatgggcatgatttgcttattgagttgaattccggtgatgtttattcagtgtcattgagacagcagttgcaa

SEQ ID NO: 54594 - DNA, 316 bp, Gossypium hirsutum
  Clone ID: uC-gsflnu33B064e11b1
ttactcgcaggcagacaggctcagctatatgggtgagttttaatggcacatctctccggtgtgaccaccggtcttacattgacggaatctattagtatggtggctgcgaaaaggtcaaaacagatccacatgcatgggcatcacgtgaagtgccagacattaaacaatgctttaatgatcatatccgatagaacacaaactgtacttagccaacttccaacatgagacaagctgtcatggctttcaatcctagctgctgtcatgactgttacttatgcttccattggcctaggactctccattgataaagctgcac

SEQ ID NO: 54595 - DNA, 109 bp, Gossypium hirsutum
  Clone ID: uC-gsflnu33B064f02b1
ttcgcataactagccagcatatcttttcattccttgtatgtaaataaatccagcccaaaaatgcaccaagaaataagctaccagcaagcatgatcaataaagaatatgg

SEQ ID NO: 54596 - DNA, 368 bp, Gossypium hirsutum
  Clone ID: uC-gsflnu33B064f03b1
gttcacgcgtacgcatacgtgtacggaacgggtggtcgttgaagctaggtaagatgacatgattaaggtgttgaagattgggatactgtgcgcagtcaagctggcaaatttgcgccctactatgagtgaagagaccaagtttctcacgcatgctgacgacagcattagtatttatgcggggcacgtaaatgaaataaccgggcgcaggtttttcaaggtgctgactgagatatctcaggtgttaccaaacttaacctgctggaaataaatccccttttagctagctggacaatatactgaaaaggcccgctaccaatcgtctttccaaacagttacctaacctgaatgcttaatgggaccctccctga

SEQ ID NO: 54597 - DNA, 292 bp, Gossypium hirsutum
  Clone ID: uC-gsflnu33B064f08b1
ttctgggacatgcatcggcattgagatgagagctagtgtaagacatgtctgggacatgcatcagcctcgcgatggacaagctagtgtaagacttgtctaggacatggcgtcaccttactgcgtgtcagtgtaaaacctatctgggacatggcattggcatctatagatgagagccagtgtaagaccatgtcatggacatggcgtcggcatcttagcccatgttaaggctatcgagtatccggcagtattccaaatggtttaaaataacggcttacgatttatatcgcactga

SEQ ID NO: 54598 - DNA, 135 bp, Gossypium hirsutum
  Clone ID: uC-gsflnu33B064f11b1
taacaccctcccggaagtgtggcgagcgaggggccgtatagcggggaatacgcgacatcccctggagaaagacagggcgaagaaagcctctacttcaaccagatgcactatgatggggatagccaacaacatggg

SEQ ID NO: 54599 - DNA, 239 bp, Gossypium hirsutum
  unsure (1)..(239): unsure at all n locations
  Clone ID: uC-gsflnu33B064g04b1
tccacgcgtccggacaccgatatggtcgacgatttacttgctttttacagtgaagaagctaaagtaaacgaatccgaggatctacanaactccatcaacctcaccaaagataacatcaaagctattatcatggatgtgatgttcggcgggacggagacggtggcatcggcgattgaatgggccttgacggaaatgatgaagagcccggaggatttgaagagggtacagcaggagttggc

SEQ ID NO: 54600 - DNA, 390 bp, Gossypium hirsutum
  Clone ID: uC-gsflnu33B064g07b1
cttcactttaacggatttcgacctttcacgcagcttaaagaagaagcaattatcagaaactgtagctgacctcaaaatggatccgaatttatcgcctgccattccggttcgacgaaactttatccgatgggtccccgccgtagctgataacaaataccgcaaagcttataagaaaccaaaaccagcccgagtcagcccagtgagtcgaaggaaacctagtttctcaaacggggaacgttccaactccttcgtgggcaccgaggaatacgtgtcacctgaagtagtacgtggagatggacatgagttcgccgtcgattggtgggctctcggaattctaacctacgagatgctctacggtgcgacacctttcaagggaagagcacgaggaga

SEQ ID NO: 54601 - DNA, 314 bp, Gossypium hirsutum
  Clone ID: uC-gsflnu33B064g09b1
tcacgcgtccgcaaagaggcagcactaccttgtcccataagaaaaattttggcaaaggaaaataagaaccggtatgtgattaatttgcctgcttatgccgggccaacaagttattcaagcacttaactacaatcctggtgatagctggaggttactcaagcaagaggtacacttattagactaccacatgggatcggagaaattatgcaaattattctactcagcaggtatactactggtggtacagggttgaggttttggtggagacataatccaagattagctaaattcatgcatggggacaacttggttga

SEQ ID NO: 54602 - DNA, 427 bp, Gossypium hirsutum
  Clone ID: uC-gsflnu33B064g11b1
tatttggatgctagggacccacagggcaccagatgtttttattcagagaggcttttgaaacagcattgcattcataaacacatgattcttctgttaaacaagtgtgatcttgtttctgcttgggctacgaaggggtggcttagagttctatccaaagaatatccaactctagcgttccatgctagcgttaacaagtcttttggcaagggttctcttttatcggtactaagacaatttgcccgcttaaaaagcgacaagcaagcaatatttgatggatttattggttatcctaacgttggcaagtcttcagttatcaacacactccgcacaaaaaatgtctgtaaggttgctcccatcccaggggagactaaggtttggcagtatataacactcactaaaaggatttacttaattgactgccctggag

SEQ ID NO: 54603 - DNA, 515 bp, Gossypium hirsutum
  Clone ID: uC-gsflnu33B064h06b1
ttcctttgttctttggggctactcttttccttttatgcagctttgctaatgctcagccacctgctcttactttaacaatcgttaacaactgtcctttcaccatttacccagctatccaaaccaacgcccggctacccggtcctcgaacgcggcggttttgccctttcaacactgacccaccgcttcttccccgcacccactgcccactggtccggccgcatctgggctcgaacaggctgtacctacgacaacggccttttctcttgtgccacgggagactgcggccaccgcatagagtgcaacgggctcggcggcgcctccccagtgacgctggcgcagttcagcttccaccacggaggcgaaaaggacctgtcttcctacgaggtcagcctcggggacggtttcaacgtcccatgacgttgacaccgcacgagggcaaaggcgtttgtcccgtggtcgggtgcagggtcaatctgctgagacgtggtccgaggtgtgaagctgaggtcggagcc

SEQ ID NO: 54604 - DNA, 186 bp, Gossypium hirsutum
  Clone ID: uC-gsflnu33B066c03b1
ttatgcctcgttgtcctggaacctagaaccagtagaaggatatagttgtggatttacattatttttaataaactaatggatcaaattttattcgaatttctgttaataagattatatggaaatgtaattttataatagaattgtgatcgttgtaaggatgattttatattggactattatttcatc

SEQ ID NO: 54605 - DNA, 121 bp, Gossypium hirsutum
  Clone ID: uC-gsflnu33B066c08b1
cgtccggcacatttctagggtgtaccaagggtgttgaagggagtgcccctttctgcaagggacatggaggggggaaaagatgtgcattcgaaggaggcggggtttgtactaagagcgtgta

SEQ ID NO: 54606 - DNA, 395 bp, Gossypium hirsutum
  Clone ID: uC-gsflnu33B066c12b1
accttcaagtagtaatgggagaacagctgaagttgcgaggaactctttccggccacggcggatgggtcactgccatcgccaccactcctgaggaccccaacatgatcctcactgcgtccagagacaagtgcatcatcgtgtggaccctgaaccgcgaggaggacaactacggcactgcccgccgctctctgcgcggacacaaccacttcgtgtcggacattgccatcagctccgatggccagatcgctctctctggctcttgggacaccaccttgcgcctgtgggagatcaacactggcaagtgcacccgccgtttagtgggccacaccaaggacgtcctctccgtggcgttctcgtctgacaaccgccagaacgtgttcgtcttcagagaccac

SEQ ID NO: 54607 - DNA, 217 bp, Gossypium hirsutum
  Clone ID: uC-gsflnu33B066d05b1
atatccaatcattttaacggagtgtacatacagttatcagccttccatacggtgatcatacgtattattcagccatttgcagagatgcattgctggttctaagaccaggaaagagatggcttttgatttggtcctctcggaggtatcttgccgtttgcgaatcacaactgcatgtaggtctctaaattatcaattaaatgcaatttatgcatatttt

SEQ ID NO: 54608 - DNA, 465 bp, Gossypium hirsutum
  Clone ID: uC-gsflnu33B066f08b1
aattcctttaatgtcagaaattttccaagctttggcctttttatgttcttttaatacttggattaattcctctttctccttgggttgcagattagaagtaataataactggtgatgtagaattatttccaaggaatatgtattctaagtggtttggtaattgtttaagttccagtttgggaggctcctcaatagagggtttttgcttaagttcatcgtttatcttaattccctcatattctacttgtcttgacgaatggttattaggttcttcacctatctccttgccttgagctagatacggtttcatcgtctcctcttgtacaatttcctgaaaagagtcttgagtaatatgatcaatagagtcaatgaaataacatgaatcatcctgttccctagagaatctcatagcatcgtaaattttaaacataatctccttgtcacctactctaagtactaacttacc

SEQ ID NO: 54609 - DNA, 341 bp, Gossypium hirsutum
  Clone ID: uC-gsflnu33B066g10b1
aatactacgagagtttgcaagcagaggaggcaacacagcaaccagctgctgtatcttcttagatgcataatttagtagtagatcttgcagcgagttttattacatgtgtggtaggcttgtcctatggtgtcaagttcctaatggcagcagcaccagtaatggattcaacatctccatctctacttttatgcctttgttcaactccctggtgattggagttttgtttttaagcggataatattgtagcaagacaaacaattgatgctggtttgaaatctcattcttttctcaaaaaacaaaaacattcacataaaaaataaaatatacaaaaaaataatatg

SEQ ID NO: 54610 - DNA, 249 bp, Gossypium hirsutum
  Clone ID: uC-gsflnu33B066h02b1
cgtccgggcttggccatctgctgaaacttgaggacatactggatatttgacattcgcaaggaagtgtaccttgaaaaaagtataactttgcaatcaatgcaaacacttagttttcatcctactattatgattgattcttagctatgacacattcccgagtattctgtattattacatcttcagttgatttagcaaataaagtgtgaatgactaatgattctgtattattacatcttcagttgaactttt

SEQ ID NO: 54611 - DNA, 373 bp, Gossypium hirsutum
  Clone ID: uC-gsflnu33B066h09b1
ggtagagaaatgacttgtgggatatgtttcgaaaactattcttatgataggctgcacgctgctgcatgtggtcatcctttttgtaaatcttgctgggcaggttatattagtacagccatcaatgatggtcctggatgtttgatgttgcggtgtcctgatccatcctgtgctgctgttgttggtcaagatatggtaaatgcattggcttttgtagaagacagacagaagtacttccgttatttcattagatcttatgttgaagacaatagaaagaccaaatggtgtcctgcaccagggtgtgattatgctgtggaatttattttgggcagtcggagttttgatgttacttgtcactgttcatatagcttctgtt

SEQ ID NO: 54612 - DNA, 188 bp, Gossypium hirsutum
  Clone ID: uC-gsflnu33B066h10b1
gggggtggggaatcaacagaaccctgagcaacagttagctcaggaagacgccaagaggcaggcagatgaacggaggcaaatgatgcttagtcagattctgtccagtgaagtacgcgaaagacttgctcgaattgccttggtgaaacctgagaaggctaggggtgtggaggacgttctactttgacctg

SEQ ID NO: 54613 - DNA, 129 bp, Gossypium hirsutum
  Clone ID: uC-gsflnu33B068a04b1
gtacaattctgggtgattggaggtgtaatatgacatttttcagccaaatacccagtctctgttaatggtctaaaactcttcttatcgagtctccatggctaaacttgagcacactaataactgataaaa

SEQ ID NO: 54614 - DNA, 379 bp, Gossypium hirsutum
  Clone ID: uC-gsflnu33B068b02b1
tcacgcgtccggtcaaaacaacagaaaacacgcaagaaagatcgataatgaacacgttaacgatgctccacgattacgaaaaaaatatcaaacaagatcctcagagcttagaaagagctgaagcattggaatcattgttggagatttgtgctagtttacttaaacagcaaagacttgaggaacttgcaggggttttaagaccatttggtgaagaagctgtttcatcaagagaaacagcaatttggttaacaaagagtttgatgaatgctaaaagcaaaatcccagtagatcataggaattgaattgtaagtttttaacaaaagaatccagcaataggtaactcaatgatgttttctttctgtgtgtatttctttcaatt

SEQ ID NO: 54615 - DNA, 402 bp, Gossypium hirsutum
  Clone ID: uC-gsflnu33B068c04b1
ttgattgaaattcataatctcccaaaaatgatcagttaatttttcgtcattgaggtgtttttagggtttttattcttccaacttttaattgaagactatcattcattcattttagttgatccttctgaagtaacaaccaaaagagcggtttaatcgatttttaattcgtttagattaacttcatggcagaggctccccggggccgtgttactattactctcggacgtagtggccaggttgtgaagaggtccggagctgcatcggatgattctcttcctgttgctggaactaagcggtctgtaagggatagattaggaggcaatatagatagttccttgttgaatggcggtcagctcaacaacaaaagacaaagaggcgatggtcaaagagcaagtttgaatg

SEQ ID NO: 54616 - DNA, 278 bp, Gossypium hirsutum
  Clone ID: uC-gsflnu33B068c11b1
tttgcaacccaaagtaccacaacaacaccactttgttcaccatcactagtaattccatcacactttgactggcatgagtacgggctaggacacagctgtgtgcctcacatccaatgcccacacagcttacgacacgggcatgtcacttggccatgtgtgccacattcacactttgactggtatgagcacggtctaggacacagtgtgccttacatccaatgcttacacggcttaccacacatgcatgtcactcggccatgtgttgcatcaatcacact

SEQ ID NO: 54617 - DNA, 403 bp, Gossypium hirsutum
  Clone ID: uC-gsflnu33B068d06b1
ctcacgcgtccgtgctcattcatggtgacttggtttatggttttatctgttgctgctaaaatcttataaaaatatatatcggttgctgctcttggtttgtatcaaaaaaaaaaaaaaaaaaaaaaaaaaaaaaaaaaaaaaaaaaaaaaaaaaaaaaaaaaaaaaaaaaaaaaaaaaaaaaaaaaaaaaaaaaaaaaaaaaaaaaaaacggggcgccccttttaaaggacccaagtttccttccccgggcatgcaacgcaaaagtttttttttggggcccccaaaattaaattcattgcccgcgttttaacaacgtcggaactggaaaaaccctggctttccccaactaaatccctttgaaaaacatccccttttccccagttggcttaataccaaaaaggcc

SEQ ID NO: 54618 - DNA, 174 bp, Gossypium hirsutum
  Clone ID: uC-gsflnu33B068f08b1
ttgacgcgtgggcggacgcgtgggctctgtcttttatattccctctttaccaggtccgtttctctatcacaccagcaacaaccttaagcttgaggatgacttactcctactcttctcaaaatccagcgattgagcagcatagagctataatttcaaacaagcttggataaaagc

SEQ ID NO: 54619 - DNA, 148 bp, Gossypium hirsutum
  Clone ID: uC-gsflnu33B068g03b1
atactacttaaccctagttttactttccctttatcagtatatatatactacaactgtaacttatttttgtcatttcaggtgttaaagtttttgtggatgatgaagtgctttgttgctttttttttctgttattctgctgtttatggca

SEQ ID NO: 54620 - DNA, 237 bp, Gossypium hirsutum
  Clone ID: uC-gsflnu33B068g07b1
ctctcgtcggttcttatctcaaaagacccaatttccttctcctcctcctttgaaatggtttttccccatgtgggattataacaaaccagttaatgttaagcaaaaccctggggttttgccatcttcgttggctttacaaacgatgggaactttatacagacttgtgacgaaagccatccccgacctcactgacatttcccgtttttccaagttttccttcctatgcatcttacattg

SEQ ID NO: 54621 - DNA, 394 bp, Gossypium hirsutum
  Clone ID: uC-gsflnu33B068h03b1
gtaaacttagcgacttgctactcgctactcgctactctttaattggctaaccgggtcaatcttagcgtagtcgccacgaccgaggaaaaaacacaaatttttctcgtgtccacgacgcgttcgagaaaatgccacaatcagtatcttgaccattcactttccacgaaattgtctgccccccaaaactaagctcttcacagtataaaaatcatcgccattccccgcaaaattcatcatatttctttataaactttccccgtttctcttcggttccccttaaaaaagaaaacccagaaattctcctttcttcttttcctttaatatttacttaaatttgctagttcataatttttcgcagatgacgagtttaataaaggtgcttgttgttcaagtt

SEQ ID NO: 54622 - DNA, 121 bp, Gossypium hirsutum
  Clone ID: uC-gsflnu33B070c09b1
agaaacgaagtgatatggtccatggttggggctcaaaccaccgagcaaggcgactgttccaaattcaaaggaaatgtgccccactgttgattgaggaagcctgttgtggtggatctacctc

SEQ ID NO: 54623 - DNA, 253 bp, Gossypium hirsutum
  Clone ID: uC-gsflnu33B070d05b1
tctacctaactctatatctcagatactgtattcatactacctcttaactctatgacagctgtacaaacagcaccctactgccctccttttgctgatgttgcagaggaggagtaagaatagaggaacccaaaggcttttgtatgattaaattgaaagcatttccattattttctttgcgtgtagttctgagagtgggaggtgccttaattgatttttcttacccttcacaactcttctatctatgttttttttt

SEQ ID NO: 54624 - DNA, 333 bp, Gossypium hirsutum
  Clone ID: uC-gsflnu33B070d06b1
gcgtccgcccacgcgtccgcccacgcgtccggtcactacctatacataagatgagagaccatgttctgatctaccttctactagcatggctcctgcttatacattatcaactccagggatccgatatcagtgttcgagctattgactcagtgccagcagttcacttcaagttcagcacacctagaagcctaatgccaagggcacgtgttagaaatgcattacctacctgggttgaaatgaagaagattcataaatccccatccagccccaacccagtcaaaaatcgccggtcaccatctaaacactaaggtgatacataacagagtggtagtc

SEQ ID NO: 54625 - DNA, 346 bp, Gossypium hirsutum
  Clone ID: uC-gsflnu33B070e03b1
tatactcggaggcagataggatgctggacgtgacccaggcctatccactcgtgaccacatgtatgcctgcgtcacgaactgatcactccacatgcactatggatgctgatctgatcggcactggcgtgatcgcacttgaatcgatgacccgtgtgagtgtaggatgagtaacccacgctatcttcatggttactcttcaccatagaaagccattcatactcaagctccacgttactggatgacatgaacagtctcacctctgacactcgaattcaccttcatgatctgagaactgcgtgtgttaactatcactgcgagggagaatcggcacttcatggtggcagac

SEQ ID NO: 54626 - DNA, 105 bp, Gossypium hirsutum
  Clone ID: uC-gsflnu33B070g08b1
gcgtccgtgttgagccagctcaaggaattaaaagctgaactttctctacttcgtgtcagcgaaggtcactggtggtgctcccaacaagctctccaagattaagga

SEQ ID NO: 54627 - DNA, 118 bp, Gossypium hirsutum
  Clone ID: uC-gsflnu33B070g11b1
agaacaaacaagagagatagaggaagtctcaaatttcaacaatatttggcagcatcgggatgcttgaaacagcggcagaaatgtggggcgaaaaacatgtatgcaacaggtagtgtga

SEQ ID NO: 54628 - DNA, 351 bp, Gossypium hirsutum
  Clone ID: uC-gsflnu33B072a06b1
gtttttcagaaaaacagaatccccctccctccctccctccatttgcacacctatgtttcttcacttccaacaaatctgaaaccatctccaaaattaaagaccaaaaaccgccatgaccgatcaccaccagcgggtcggccagctacggtccacatctgagatcctgaaaaagttcgacgagcatttcaccgctcaccctttcacattgctcttgctttctttcctcctcctctctttacggtgcttgggtgaatccggttcccttctcctcaactccttcatcgaccgggacccttctttcaaatgcctcctttctcggctcgacctccatcattctcatccccacgcgcg

SEQ ID NO: 54629 - DNA, 470 bp, Gossypium hirsutum
  Clone ID: uC-gsflnu33B072b09b1
tctgtaaattggtggcattcttcaggtaggtgctcatggaactggtgcaaaattgcctcccattgatgaacagattattagcatgaaacttgttactcctgccaagggaacaatagaactttcaaaagagaaagacccagagttattttatttagctcgctgtggtcttgggggccttggagtggttgctgaagtgaccattcagtgtgtggaaagacaggagcttgtagagcacacaactgtctcaaacttgaaagacctcaagaaaaaccacaagaagatgttgtccgagaataagcatgtcaagtacttgtacattccatatactgacaccgttgtagttgtgacatgcaaccctgtttcaaaatggagaggtccacccaaattcaaacccaaacatactacggatgaagctatgcaggatatccgtgagctctacaaagatcttaaagaagacagggctagagata

SEQ ID NO: 54630 - DNA, 333 bp, Gossypium hirsutum
  Clone ID: uC-gsflnu33B072b10b1
tttgaaatcctctttcaatcaagggtgatgatgttgaagtagcatgtgtgtgattttcagctctaggatcagttcctggttgtgttaaaaccctaatcaggtctgtgcaagcatttgtgagaggaagtggttctttgttcatcatataacatgaaaaggaaaagcaagacaacagggctggccaggtattgtaacaggacaagctgggataatttatggggatgaggtgtgggaaaattttctccaaccttgcatattattatttatgttggacattaggacgcgtttaatggcttgagctctccattgcgatggcggaatttcaggcgactc

SEQ ID NO: 54631 - DNA, 446 bp, Gossypium hirsutum
  Clone ID: uC-gsflnu33B072c05b1
ttcttcttcttcttcacctcctccttcatccttctctaaagaagaggaaatagctaatgaaactccatgtaactacacctatggcagatgggtacatgacaagatggggcctttatacaatggcacaacctgtggtacaattaaggaaggtcaaaattgcatcacacacgggagacctgacttgggttacctttactggagatggcaaccaagccaatgcaatctcccaaggtttgatcccaacactttcttcaacctccttagtaacaagcatatagcttttgttggtgactcgatggctaggaaccaattggaatcacttctttgcatgctagccactgcctcctatcctaacctggtttacaaaactggggaggataacaagtttcgtagatggcatttttcttcttataacattactgtatcagtttattggtcaccatttc

SEQ ID NO: 54632 - DNA, 494 bp, Gossypium hirsutum
  Clone ID: uC-gsflnu33B072d03b1
ccttttcgtccgctactctagaagagaaacttagacctcataaggaatgccacagagtagagttagaaagtctatgccagtcctgtgaagaaattttcagaaaatttcgggaggataccaagaagaattttagtgatgctctgtttgaatggagatcaaatcttattctacatgcccaagtggctacaagtcctcttgatcttagtcacgtaaatttcaactgtctcagggacatttcttctgtgtctcttaattttaaagtttaccatcctgatggtgaagagtgagaagcatttcaaagagagtggaaacagtttgatgattttttcattcccactacacccaatgttgcagacaatgaagatagctcagccacaaaggatcaaaatcttgaagatcctccaactaaaagggtaccaactaaacctactaattagcctaatgagggagaggattgaaatttcttttgtaaatttgattttactttttcgtag

SEQ ID NO: 54633 - DNA, 486 bp, Gossypium hirsutum
  Clone ID: uC-gsflnu33B072e07b1
tgtttcaggttctaaattgtccaaggctgtaagacgacgccttttgtttggttaagaaaatgataaacttttggctttgatgatttcaacaccaagatctgaagggtcctccgagatgtcagaatcatcaaagccacaaggtgttcaattaagtatcaccgaattttaccgtacaaccaaaacaccatcccaggaaaaactaggggaagatttagtcaaacagtcaagtagtccaggtgttgggtcatcaaaacagaagaggaaagtttcaggttctaaattgtccaaggctgtaagacgacgccttttgtttggttaagaaaatgataaacttttgccttttttgatgtacaagatatcccaccttaagatgtaaagtcatgtttaccttctggtcttataatcatcaaaaactcagcttatgcagcactttggattatatttgagtttgaatattctatagcttagagtgaagattgtttggtt

SEQ ID NO: 54634 - DNA, 310 bp, Gossypium hirsutum
  unsure (1)..(310): unsure at all n locations
  Clone ID: uC-gsflnu33B072e09b1
tcncacgcgtccgaaaaaaaaaaaaaaaaaaaaaaaaaaaataaaaaaaaaaggacaaaaaaaataagggataacaagtttaataacacctaaatacaaaataagggctttcgttttgggggacctaatttcacttccctggccttcggtcttactgctttttgttttgcaaaccccttactggaacaacctgggcgtgtctttccttaattgcgccttggaacaccccgtttttacccgctgtggtcccccccgatagcccttcccttcagttgccttccctaattggcgaatggctcacgccctttgg

SEQ ID NO: 54635 - DNA, 344 bp, Gossypium hirsutum
  Clone ID: uC-gsflnu33B072e12b1
tctcacgcatgcggtaaatcatggaactatacctgcaactatggtgggtgttagggcgcatggtgttacatgcagagcgtgattcatagcgaggcacatgactaatcaggagactaggtgcgacactgtgggacaacatgcgttaacagatcctatgaatgatgggctgcatgatgggcatgctgatgtatttgatctgacctgtgatatgactagaggagggattagtgaggtatatagtggtgtcaacattagtgcagacatatactccagattgaagtacagattcaggccccgtcacatctccaatcatgaatacatggaaggagaaaagggaagagacc

SEQ ID NO: 54636 - DNA, 383 bp, Gossypium hirsutum
  unsure (1)..(383): unsure at all n locations
  Clone ID: uC-gsflnu33B072f02b1
tnttggttcagacaaacgcacgatgagtagatggatggctcttgactatgagccttcgtaagaatggctgtgccagaaccagcgaactgtagaaaagacaagcttcaagaacgatagcaactgagatggacgaactggaaaaactacgttcatgaagaggcatgtcactggagagtgagaaaagaaatacacaaccaaccatcgatgaggaggtggactccttggactaattcactaactgcgggagaaacggccaatacagctgggatactggtggacaggagaagaaggcgcgcactagagatggttacaacatccatgggcaatgcgcccaaaaatggttcgatggaactgccccgaatgacatacaagcatgttccaac

SEQ ID NO: 54637 - DNA, 410 bp, Gossypium hirsutum
  Clone ID: uC-gsflnu33B072f08b1
gcttccatggcgaaaatgaggggttgcatagtcactgtggctttactcttgctgctacttctttgcttacaccaaacacctgtagagtgcaaagaaagactcattagacaactgtcttctcagccttcttcagctactaagcctcaagaattcaagattgggttcaaaagggtaattctcagcattgtgctgggaattttaactggattgattggagctattctttttgctttattgatcaaaattgctgttcagtacatcaatcaaaccccattccttaaaggtcctgttatattttctcccaaaatatcttccaagactctccaatcagcccttgcaaatgaaaaccagttgctaggttcaagctccaacgggaagtactataagacgggtcttgataacgggctcac

SEQ ID NO: 54638 - DNA, 399 bp, Gossypium hirsutum
  Clone ID: uC-gsflnu33B072f10b1
cttacgcgtccgttccccttgggttgcaaatcaatgccattgccagaatgaagaacaagcagagccattaccgaagaagcatgggagatactagggccattgaagtttggattttaagtacgccatctttcattggtcacttacagcaagatgatgatgctaatatgggaatgctcctttgcttgtggacacaacttgtgtattaatggatttttgtaatttttttccctttccttgtgcaagtgccttgtgtaacatggttatatttatgtatgtatatgtacatgtaaaaaaattgtgaattcagtcataatgttgtagtttgatttacacaatttgtttagtgaatttagctaaacaattaaatgaaaagaaaaagtcaaatatatgtttgttttc

SEQ ID NO: 54639 - DNA, 321 bp, Gossypium hirsutum
  Clone ID: uC-gsflnu33B072h01b1
attccatatgatggtactggtgtctatagaccacccaaattcgctcctgcggttgtggaagaggaccaaaagatgtcgagagaggagaggaatgctttaaggagggaaaaagaaactttgcgaaaagcttcaaggagtggttatattagggaaatgatggatgatttagaaggaaaacctgaagaggttagagaaattattggaactgaaagtagagaactcactagatatatggaaaagatggaaaggcgcgcgcagcaagaggaagaacttttcactcgtgctcccgtcacaaagaaggacaaaaagatcgagaaacac

SEQ ID NO: 54640 - DNA, 227 bp, Gossypium hirsutum
  Clone ID: uC-gsflnu33B072h06b1
ggtattccacatgactgccctgactggtcacagtgttttgtgctaacagatgggggccctgcaggatctacaaaccggcatggggacaacaatcattatcattaatcgcagatatcatgactattgttaactatcggaataaaaatgaagaggatggaaccaaatccacttatcgagtctattgcaccttctacaggcaaaagaccaaactatcatgcctgaccatg

SEQ ID NO: 54641 - DNA, 312 bp, Gossypium hirsutum
  Clone ID: uC-gsflnu33B073a03b1
ttttattcgtcgcttcttctatcttcatctacatcttcattttcatttcagtgctttagggtttgcttttatcctattgttagggacaataattagaagcacgagataaccttggggggggggcggctgattggagaggaacaattctgaaatttactttcacttttgccggcggttgcaaaatgaagtgtatcaaggcttatcaaattggtcactgttggtgacgtgtccttctgcaagacttgcatgctaattttctacatcagcactacttttccctactgaaatgagccaaattgcttttataacttt

SEQ ID NO: 54642 - DNA, 303 bp, Gossypium hirsutum
  Clone ID: uC-gsflnu33B073a05b1
cgtccggtcatttgcccttttaagctttggagacatattaaggggtcttgccagtttgggacaaaatggagatcatcgcttataattgatttttgtatagtcaccggaatccttctacattccaacgtttaactagtttctatctttaacgctttctcttctttatggaagactttactttgatcagaagaaatttttcatggctgtatttcccggcgtgcattttttgaacctttttctaaaaatcattaactttggcaggatatattaacatttacctttggataaaataacaactggatg

SEQ ID NO: 54643 - DNA, 476 bp, Gossypium hirsutum
  Clone ID: uC-gsflnu33B073b03b1
tttgtattgcagatagcttatgttgaaggagctggttgaggtgcaatcgcgatggaagatattgaagttggggacattgctatggagactcctgcatctattacaatctctgaggatcttggctctaaatttgacacgctttaagtattatagaagattgctggatctgaccttctgagactatgtcattgttatcgtgcatgaaggagtggcacaactgtaatactcagttcacgatgtgctttgatacactaccagtatattttaatacaggattgagctttggagttgtagcaatcattgcttcggatggaaacttcgctttttgaggagatcattgctagcaaatgaactatttctgtgtgcaatatgaatgagttatttcctgtattatccaaggatcatttctgacatattttcaccctcatctataatcttcgcgagcagtctttattggtcttgccaagctctgtatt

SEQ ID NO: 54644 - DNA, 410 bp, Gossypium hirsutum
  Clone ID: uC-gsflnu33B073b08b1
tctttagcagatttacttgttcaatatctgaagaaattcgttgctcctgatgtgtctattcttagttcagattctgccattaatgattttgttgaagcagctggtactttctttcctatatacataggttttggcttgaatgaaacagtgatatataatttagctgttaagtacaagaaaaaggcctggttttcggtggcaaaggatttctctgatgatgccatggtgttgtatgactttgacaaagttcctttctttggtagctcttcatccaagctataagcagcaaagcgttttctatggcccatttgaagaattctttttgtgggattttggaaaacaaaatttgctttctctgggggtgcccttgaaccacgagacattgaagctattgaaagatgaggagagga

SEQ ID NO: 54645 - DNA, 270 bp, Gossypium hirsutum
  Clone ID: uC-gsflnu33B073c11b1
acgcgttcgactggtaggtgcttttgaagaaactacaactggtgttaagaggctttatcatgatgcaagccaacggaaccttgatgttcccttgcattaatgctactgactctgttactaatagcaagttcgataacttgtattggatgccgtcactcacttcccgatggttttgatgagagctactgatgtgaagaatgcagtcaaggtcccctatgttctgtggatatggtgatgttggaaagggcatgtgcttgcttcctttgaaac

SEQ ID NO: 54646 - DNA, 202 bp, Gossypium hirsutum
  Clone ID: uC-gsflnu33B073d02b1
atcgttttttgatccctttggatgactccttgcgctgagagcttctcagcacgttagctgttaggtcagaagatgccaaggttgaatgatgaagttatagatgagaggggacctccttgattcaagaccagagaactgtccagttcgataagctctcatatataggtccattgcatggccaaggttcgacatgctccctttt

SEQ ID NO: 54647 - DNA, 215 bp, Gossypium hirsutum
  Clone ID: uC-gsflnu33B073d06b1
tttttccgaggcattatctagcttctgaagggcttgactttagcaatctgaataagatgaagaagaatccagtggagggcaatacaatcactgacataagtggttgttgcatgagatgattttgatggtcatttttgttggggatgaagaaggcgaatgcattgttttgtaataactatacttttgggatggtactgcccgtgattttttatatg

SEQ ID NO: 54648 - DNA, 373 bp, Gossypium hirsutum
  Clone ID: uC-gsflnu33B073d10b1
tttttctgatgcacgaggactgccgacacctgaagcattgagcattgtaattcgaaatgcagtacggtttctcaacagtcatgctattggtgcattgactcaatattgcaaaacgtttagagcaagatagggattcttctgatcctacagtgagggggcaaattcaaacagaatcagcacaagcaggtcttacaatgcagtacttacgttcccttcttttagagcttggccgaaccataatgacgctgcgtatgggaaaatctcctgcagaattttcatttaatgctggacctgcagtttatatatctccttcagggtcgaaatcctataaatgggtcaagcccttttcccacttcaaaccagaattcctttt

SEQ ID NO: 54649 - DNA, 165 bp, Gossypium hirsutum
  Clone ID: uC-gsflnu33B073e03b1
tttatcatgcccatttccaatctacagctcccaaggcaaatatgcctatcagaaacatttcggctggccgggccgatgaggcatctcaccccgatgctcttaaggctgctttggctgaacctcatcgtaaccctgatcttcgctttcgctggatcgggctcagga

SEQ ID NO: 54650 - DNA, 263 bp, Gossypium hirsutum
  Clone ID: uC-gsflnu33B073e11b1
tttttaggaaaaggtctagttctggtgagaaattctccttccctagcaccccgaaccaagatcttgattcggagtttgaattcgggtgttttaccccggattcaccttctcaagatccatgttgaaccttaccagctgatcatttattctcaatggtcgacttttgccacatgcctttactttacaacctggaacaatgattgcaggcagatgttctcttgggacaagcagaacaagcagcattaacagtatggattcatttg

SEQ ID NO: 54651 - DNA, 339 bp, Gossypium hirsutum
  Clone ID: uC-gsflnu33B073f03b1
cgtccgcccacgcgttcggtactctcatcgaattgaccctataaaatgtttaaggaaaagctttttctttgtctatcctcaaaaaggggaaacttgggctttcttcaaagactgggatattaaatgggtttcagagccagaaaagcataaaccaccataccggtattattttgtagaggtcctaactgattctgacgaggaacttgtcattggggttgcacattagggtaaagtgaatggatatgtcagcatttttcaacaaaattaaccgttgacggggttatctcatttcaagtctattcacgggagctatataggttttcgcatcaagttccccta

SEQ ID NO: 54652 - DNA, 373 bp, Gossypium hirsutum
  Clone ID: uC-gsflnu33B073f06b1
tttttgacagcaggaacagactacccacaacattccgatatggtagcaatattcacacactaaatcacgatgaggaagacagccgtttctcggatagaaaatccttctggaatggaaattctacgcagtatggtggcaattgctacaacacataattaaggttctgctaggttttctaccaaggtgtttcattctggagggttgaaggtaaaaatatgatccttgctctattatattcgcctgttatctctgatgttttaagtatctggttcaataaatcgattgtttgtgagtaatttcaaatccataaattgtgcataccttttgcacccttattagctttatttattaatatataatatcttttccatct

SEQ ID NO: 54653 - DNA, 345 bp, Gossypium hirsutum
  Clone ID: uC-gsflnu33B073h01b1
tttgtatgagctccccaatcttttgtttattgcaggcatccttattgtagttgttttgattggagaattcaagttttttgcctcagcctctcgtgatatgaacatgtactacgatgaatacgttgatcggagtcgtcaaagacttgggaattcgtccactctggagtggagaaccagaagaaaatgaaggtgatgaataaatggtaagatgggttccataaagaatggaaaaattgggatgttttggctagtgaggaattaaagaaaagagctgatgatttcataaccagggttaaatggcaaaggaggtttgaagattggataccactttaaaagaaccttact

SEQ ID NO: 54654 - DNA, 321 bp, Gossypium hirsutum
  Clone ID: uC-gsflnu33B074b04b1
ggaggtgccgtacttgcatggatcgtcttgcatttggactcctagggctatgggcaagcacaagtgggcagagaggcgattgatgtatataggggccgagagaggcatttcgaaggccttgccgaagtcaacaggacgactatgaacattgatggaactgttggactgtacggtgcatcaaatggcctgtgaggagcaattacaagagaccgtcagctgtacaagctactgtacgctgctcatgtagcaagtggtgcctgtctgtaaaggagcacaccgggacctttgctagctgggagatggggtgcatcattacaaacg

SEQ ID NO: 54655 - DNA, 181 bp, Gossypium hirsutum
  Clone ID: uC-gsflnu33B074d07b1
caagtgaatccattgccacaccgatttgttttgctgcatttcacaaatcattttagagaaggaaaaaggtcctggtcagagttaggcttaattacaaaattagccctcaaactatattactttgccactcaagtatctcaagctttctttttgtatcttatcaaaattatatttaaactat

SEQ ID NO: 54656 - DNA, 341 bp, Gossypium hirsutum
  Clone ID: uC-gsflnu33B074e03b1
gtccgcccacgcgtccgttttttttttagcataagccaggttgccttctcttgatgttggtcatgggcgtagtggatgtagggatggatgtaatgtatgtatgtagggacggcgaatcaagaccttgacaatcgggaccgagggcttattgtaggcagggaaacaccacaaggtcaaaaggcactcgtagtattgacagatgtgtatgcgcatcggggctctgtggaccggatcatatgcttcaacctctggcctgccgagctataacaacttgatggcaatgcctaattggctcagagaattttgtgcgttaatggtatgtaccaattgtgtgaggcaac

SEQ ID NO: 54657 - DNA, 447 bp, Gossypium hirsutum
  Clone ID: uC-gsflnu33B074e07b1
tgctgcgataccaggctgtgaatatcgtggcagctcggcttggtcgggctgaaccacctctcaggagagaagtaattgaatacatgtctgatgcaaatgctcatctttggagcatgaggcgcagcaaggcaaactttttgcgcctgacatcggttttctcaggattatttgaagttggaaaatggtttggtgaagtttgcaagtggaagaacccaatgacaacagtgctggtgcatttcctatttgtaatgctggtttgttttccagagctgattttatcaacagttttcctatacatgttcctgataggggtatggaagtatcgttatcggccaaggtaccctccccacatggacacaagccttttttgcgcagatgcagtttctcctgacgaactagatgaagaatttgagtccttttctgcattaaggagcttggatctagttc

SEQ ID NO: 54658 - DNA, 415 bp, Gossypium hirsutum
  Clone ID: uC-gsflnu33B074f12b1
cgcgtccggaccgcccatacctggcgcgaggattgagcacgctgtcgatctaacccatgcgcccatcgtcaggcctgaatcggacatcatttactattctacgggcacagggacgacatggctctgaccaagtaggggccagctacacagcggggagagggacttgaactactagcagattcatggctgtggactgaaccactacccgaatggctacacagccacctgtggtgggctgacgaactaaaacacgcatgatcaataacgcattatttggcaatggtgcctggagcagggctaacaacggcgggcactgatagtacatggggggggacacacgtgtagatccaaggccagcaccctgagatgattttggattatcacagagctgagtgcttacaggactagtgcgggg

SEQ ID NO: 54659 - DNA, 366 bp, Gossypium hirsutum
  Clone ID: uC-gsflnu33B074g03b1
acctggaggaattgagattgcggtgaagcgcattttatatgaaaatgatggaatgaaagagttcttggcagagatttcgagtctcggccggttaaaacaccggagcctcgtcgggttgaaaggttggtgcaagaaagaaaaagggtcattcatgttgatctatgattacatggaaaatggaagtttggataagagggtttattatgactgtgatgagaccaacatattgacttgtgaagaaagaattagaatcttgaaagatgttgcctcagcgttattgtatttacatgagggatgggaagctaaggtcttacatagggatattaaggccagcaacgtattgcttgataaggatatgaatggaag

SEQ ID NO: 54660 - DNA, 455 bp, Gossypium hirsutum
  Clone ID: uC-gsflnu33B074g06b1
tttcttaaactatatttctaaaataaaaggggtgttttagaagtatcatatggaaatggttattttatttgtaggtcttttttttaatctatttatgtagtattagccttagaaaatatataattggatgttattcatgtttaaatccaataatttcttcagagaaaagacagcaacattagtcaactttgtttacctaatgtcttaatgatctacagatgattgcatatatgactctgatcattgtttgaaaatgtttatgtcatgttttatatgtacatagatattttctttcatcctttgaaattcattgtggaaatgcttaatgatactatttagttaatcattttttttcatttgaggtttatattacatttatgcctatatacatgtaacttctgtcccaataaaaccttgtttggtttttaatcacaagttctttcatgcattgattt

SEQ ID NO: 54661 - DNA, 428 bp, Gossypium hirsutum
  Clone ID: uC-gsflnu33B074g12b1
cgcgtccggacattaggaaccagagactagggatgtttgagcataagcagtatcaggagctatacaaaaataacattagaggaaaccatacatactgggctgggcgacttggagagcctaagctgatgggccttatattgcaacaacatatccggtaccatgcgtacttaaatcgagaaacttggccgtcttgtaataacgcggcttaatgacaacccgtgaacgtggacctatttatagggagcttggaggaattccatgtctcaaggtggtcgaagactgaaacggtgattagtgtggaacatttcctaccagtggtccatttgaacgcataactgagcacacgttggaggaaaactttaatctcgaaggctgggaggtgtacgggcttggaagctgctacacatgctggtgccgtagaaaccgat

SEQ ID NO: 54662 - DNA, 478 bp, Gossypium hirsutum
  Clone ID: uC-gsflnu33B074h02b1
tggtacctaattgattaattaatgtcttaatatcgtaaattgaaaagttttaaaataaattttaaaatacgatccctttttatgaatgtcgagtttaaaagtgcttgaattggatcaaaacgattgctaaagatttcctcgtctcgagacatcagagaatcacatcccgtaagttaggacgcgataccttgaacttccgagcgcaagtttatctttaattttaattgaaatttcatgtgttcttaaaactcgaaaggatatttggctatttagaatcaacgagagaatcgaaatcccgtaagttagggcacaattcttcggtgttccaagacgcgaaacattgtcttattttcaagattttcttttggtttaaatttggatctaaaaattttagtgaagtatttaagaggtacgttcagaaacaaatcacgatgaataattaaaatgatgaaacaaaaatgtaccataaaaaggtcat

SEQ ID NO: 54663 - DNA, 423 bp, Gossypium hirsutum
  Clone ID: uC-gsflnu33B074h06b1
tcactaattaatatgggttctttgatcaaagcgactgtttggtcaacctgttttgccgcattaatcattgcaatagcagctcaaatggacatgccgcccggcatggtaatgccaccaggctccgtcatgccctcggcgcccacgcccaatagaagcggccacgttgtatctccatctgtggtgcttggactccttgctttcatgttttcaatttttgttttcaaccagagagcctgatcagcctctctctacataaatgcttggtatttcgattttcatgctttttttttttttttaaatgtttttggtgtctccgtctgttgctacgctggtttgtaatacatttctctttcttaaattactatctatgatataaatcttctttctcctggtttgaggaagaatattagattaaatatttca

SEQ ID NO: 54664 - DNA, 481 bp, Gossypium hirsutum
  Clone ID: uC-gsflnu33B074h07b1
gcgtccggtccttcatttcccttcacctcaaagcactaacacttcctcttctaaacctgttttatcctatgcaccgcagacatccttaacctgcgctcatggggaaagaaatgacactgtcaattctataacaagcggtgacccagaaggagaaggagaggaagaggaagaagagttgtctttgatggctttggttgtgacccttttcaggaaatcattggctgcttgtaagagtatggaaagaagagagctttgtgctatggagatcggttggccaaccaatgtcagacatgtagcacatgttacttttgataggttcaatggcttcttgggtttgcctgttgagtttgagcctgaagtccccagaagagctcctagtgcaagtacaactgtttttggagttttcacagaatccatgcagttgtcgtatgacttcagagggaacatttgttccacaatacttttgctattgcaagacgtc

SEQ ID NO: 54665 - DNA, 426 bp, Gossypium hirsutum
  Clone ID: uC-gsflnu33B074h08b1
agagagagaggagaaaatggagaagcaaagcaaatcttatggtgttgttttacctacaatggatgaagatcatgaagaatttgttttcattgatgaagattatgatgttgatgatgatctttcccattgggaattcattgattcctctgttaccgattctgatgatgccgatgatgatgtctcgtttcatcgtggtgaattattgagaagaaacgtagagtcgtttatccctttaactttcccctttccccctataacggaggtgaaaaagtccatcccgattcctgctccgattcaagatactgatgatcgtgatccatcacttgatggatctgatgatcaagatgatgatgttgatgcatcatttcatcgcgacgaattatcgagaagaagaaacttaacgttcggtatgccctttcctttccc

SEQ ID NO: 54666 - DNA, 461 bp, Gossypium hirsutum
  Clone ID: uC-gsflnu33B074h12b1
tttgcaaaggatttgtgatggcatttggtttaatatgattgaggaattgattactgtatttgaagcagccgcatctgaccgtaatggaaatattactttccataagttggttggccggcttgacaacagtgccgtttctgctgttggtgcgaggttggcattcaagtccaatgaagaaatagcagttcaagtgagatccatccttctcgatgaagttatcccagagtcagagccagtgcttctgcttaaaattgatgtacagggatgggaataccatgtattgaagggagccaaaaagttgttatcgaggaaaaaaggtgaagccccttatctaatctacgaggaagatgaacgactgttgcaagcaagtaacactaccgccaaagagatacgggattttctaagtggtttgggttatactcattgcacccagcatggtacagatgcttattgcaccaaga

SEQ ID NO: 54667 - DNA, 249 bp, Gossypium hirsutum
  Clone ID: uC-gsflnu33B075b09b1
tcgtacacacgcccgcacacgtgtacagctctagagggattgtgggcggttttgtcgacccaagattatgggcaccagaatgcgacgacatggcctttgtatagaggtatctacattcaattaactcgccgctctcctacaaagttgtggcggctaaaacactgcagttacccagcataattgctatgcaaatacacagacagttgcacagacggagtcatagccgataggtccgtaagctttgccact

SEQ ID NO: 54668 - DNA, 149 bp, Gossypium hirsutum
  Clone ID: uC-gsflnu33B075c04b1
ataagggtatggctaccattcacaaagtacttcccactattgagatcattttcagtgtattcaatgtaacgtcttattataatgggggtgtgaagagcctcagcccaaatgcttgggaaaggaagttctggaacagcctacaatgctct

SEQ ID NO: 54669 - DNA, 286 bp, Gossypium hirsutum
  Clone ID: uC-gsflnu33B075c09b1
ttgtttctttcttttttcccttctcaccaaactaaagcttggctgagaaaatgaagatcttcaactgggtgcaaaggaggttccatcataacgtcctcaaagatgggcttgcacgaaatgttaagaagactgattccattgcaattgactccaatacaaaagctttactggaacaagtggcactggttgacatgctggatggttggcgagatggcgctttaacaattggcaccttcggttttcgatcttgacaaatgcttggttgtagaacatagtgtctacctag

SEQ ID NO: 54670 - DNA, 434 bp, Gossypium hirsutum
  Clone ID: uC-gsflnu33B075d10b1
ttaacaaagtgtggtagaaggagcactgaagggtatttccgagttctttgaactgacaaatcaggaggaaaggagagagtacttaaagaagaatcctatggataggataaggtggggttttagaaactatgcaggagaaaagcgagagtatctaaacgatagtggcggatgttaaaaatcattgccctagcaaaccggctagctttagaggtgccattgtgtagtactttaaacggatgcatgaggttgaacttggtttatctaatagcaatatcgaaattcttggtatactaagaagcctacattgtgaaggtatttaagctggaagaatgttttgacgccgtttccatgaattttatttctaccttcttttctatccaaatgtttcattttttttctgttccatactgtccttactttcttttgatttgtta

SEQ ID NO: 54671 - DNA, 408 bp, Gossypium hirsutum
  Clone ID: uC-gsflnu33B075d12b1
tcggatgattgacgcgtggagaaaccaccaataccctggtgcattttttcacaaatccagccgagggtaccataatcagagcacctaatgagcttatagatgatcaacattctcaacttttcaaagacatcgactttatggacttcctatcttttttctttaccgagcaagtaaagttcatcgtctcccctgaccagatttactcatttgcttctctcttactgccaatttccgatcaaaagcatggtagttaaaaatctcgactttgatctttaaattagtcgtgcggatcgtattcctatctcataatccgtgtgttaatatcgtatttgtatgttctaattatgcgcaactgcgtttaaggtatcatttgttgtcaatagattgcaccttgtcaatcatatttgt

SEQ ID NO: 54672 - DNA, 346 bp, Gossypium hirsutum
  unsure (1)..(346): unsure at all n locations
  Clone ID: uC-gsflnu33B075e11b1
agcgacagtgcttngtgagcttaaaatccggcacgttgaactcactttccgacgaacaaaaagtagagttaatccaattccatataatcccaacttatctctcttcagctcagtttcaaaccattagtaaccctttaagaacccaagccggtgatagcggcgacgggaagttccctctcaacgttacctcgtcgggagacaccgtgaacattacgtcggggttgactaatactagagtttccggctcagattattccgacggtgaacttgacgactagcagacagattgatgttgttagcctttacagatattcgatcctagaccttcggcccctgttgcctgttc

SEQ ID NO: 54673 - DNA, 498 bp, Gossypium hirsutum
  Clone ID: uC-gsflnu33B075f08b1
ttttctagctaaagccttgctagtcaaagaaaaaatgatcgaagatcaggagaagcagaaatctcaatcagaagcagaattcagtgcactaatggatagattagatctcactgagaaagagaatgcatttctcaaatacaagtttcatgttctcgagaaggagcttgagatcagaaacaaagagatggaatatacccgtcgatcagaagatttagcacataaacaacatttgcaggatgtaaagaacattgctaagttggaagccgaatgccaaaagttacgtttacttctacaaaagaggctgccaggtctggctgccgtgatgaaaatgaagaatgaagtcgaaatgctgggaaaggacaagtcagagacgagaagaagaaagctgaacccaactagagatttgatcgtcagaggctccactgctgacatatctcctgaaaatccaatcaagagtatcaatctcttgttggagcaattacacaatgtggaagaaga

SEQ ID NO: 54674 - DNA, 363 bp, Gossypium hirsutum
  Clone ID: uC-gsflnu33B075g04b1
atagtcttgggccgggacattgcggatgctcattacaaagctcgtctatatgctggaatcagtgtcagtgggatgaatggagaagtcatgccaggacagtgggaattgcaagttgggccaacagatgggatctatgacggagatgagttatggcttgcgcgttacattctggagaggatcactgagattgctggaggggcgctctcatatgatcccaagcgcattcagggagactgctatggagccagggctcacaccaattacaggacaaagttcatgagatgtgatggacgctatgaggatatcaagaaagcagtcgtaaagcttggggcgaggcacacacaacacatcgttgcctatgga

SEQ ID NO: 54675 - DNA, 416 bp, Gossypium hirsutum
  Clone ID: uC-gsflnu33B075g09b1
tggacgcgtgggctacactgcatatgctaagttgattgatgagaataggtggtatcattttgatgatagtcatgtttctcccgtcaacgaatctgacatcaagacttcagccgcttatctgttgttctacaagagagtgaatgaatcaaagatggagataggggagtcatcatatagtcattccacctcttaatagtctagttgagagcattctgcaataccattgttttttggagctacttccatttgaggttatgccgtgctcacctgtgacagtacttggctgagcaaagctgacctgcggtcccacattttatggaagatagatgacactagcatgggaccaaattcactccggaacggtggcaagaattcaaggtaggggcaaattttagttccaaatttcattttgaaag

SEQ ID NO: 54676 - DNA, 463 bp, Gossypium hirsutum
  Clone ID: uC-gsflnu33B075h08b1
tcttgttctgcaaaccagaatgcttcctcaatgtccattttcatggcttcaacgtctgctcttgcaggaaatgcccaaaaccagtcagggttctccttgattggctcatccgaattggaagggatcacccaaggacgtcccatgaagccaaggagcactgaggcgctgttgcagtccccaatagacatggacattaaacaaagagaggcacgccacgacgttttcatcaagtatggcaaagagggctactgcttcatgggaaccgataccaacttcatgggaggtttcgggcaatatcctatcgctgaaatggcaaggctagatgcagaacacttcactccaaggtttcctggtaatggtgcatcactcactcttggacttccccactgcgaaaacctatatttgcctgcgacttaccaaactctcttccaaaccaaaccctgcagatggggagaaggctcga

SEQ ID NO: 54677 - DNA, 183 bp, Gossypium hirsutum
  Clone ID: uC-gsflnu33B075h09b1
tgaaaatgagaagcacgaagaaactactactcagaagacaaaggaaaatgtggatggttgttgtcagggtgctaatgggtttacctgttgcatgactgctagttaggaagcatatgaaaaagagatatgtgaagagccaacagatgtgtgtggaaagattggccttgtttcaatccccaagct

SEQ ID NO: 54678 - DNA, 300 bp, Gossypium hirsutum
  Clone ID: uC-gsflnu33B075h10b1
tgagtggcggaaacatatttgaagatggtggaatgatcaagtcactgctctagtagagctttctgaataggaagattaatggagcagtaaatgaagtaattggtagcaataacttatcctccgcacatgtataagatatgcttgtctagaaataaatatgaactttattaaaagtagtagaaaagtggtagccatatagactgacacaaccattcttcattgtaaacttcaactgaatatcatttctttcttattagatgaataccaatggttaatatattaaaaaaagttattaacgtc

SEQ ID NO: 54679 - DNA, 325 bp, Gossypium hirsutum
  Clone ID: uC-gsflnu33B076a05b1
gttgttttttttaggatgacaaatactacctggtagtgtatttacctgtctgcattatggcctcacctactctaggaaatggaggagtgggttgttccatggaagtttagggttacacaagctactgtatctgtgttgagtgactgatcagagagatgcttgaaatgagactgatagacaaggtggaccatgatcaagacagagatggcgataccgaaaaagaatgtggatgggttgctgaagacagagtcttgtaattggaaccaccgtgggtggatgcctaggccaatcgctacagcaggtactaattatggcgacacgtgca

SEQ ID NO: 54680 - DNA, 300 bp, Gossypium hirsutum
  Clone ID: uC-gsflnu33B076b04b1
gctaccacgcgtgcgcaaacgcgtacgcccaggcgtacgtttacgcgaacaaaggtgtaccgctctcttggcaatgccatggctagaggtgactataactagaaaaacaccgttttcttcaccagcacctaataccggctgaattgcacatgaaggggagaatgagtgctcaaacagaacgtgtaggacccaacctgacgggtgaagaataatgcggttatgactcgtgattcagacatgagaaggctcaactaagatgcggatataggctgctgattcgtggagatctaggcacagaag

SEQ ID NO: 54681 - DNA, 156 bp, Gossypium hirsutum
  Clone ID: uC-gsflnu33B076c04b1
cactccgttctctactggaaagacaggatggatcttcagggaacggatacggcaccacgagcgctgaggaaagtggaatgattagtggattcacaacaggtacgaaagggactgcgaggaagaccaatccgacaagacaacgtgcagtaggagaac

SEQ ID NO: 54682 - DNA, 123 bp, Gossypium hirsutum
  Clone ID: uC-gsflnu33B076c08b1
gctgaaatatcagctgagtccaaggacacggtgcgtttattagaaagccccctaaaccagggacgcctgaatggttatcgggagcccactgctcagttaatatagagacttcatgaatggatt

SEQ ID NO: 54683 - DNA, 102 bp, Gossypium hirsutum
  Clone ID: uC-gsflnu33B076d08b1
acctcggacgcgtgggtggagacagaggcggtttaagcctgtttacgatctggttcagtttgaccactgagaagaaggaggtagggtccagtagaggtaaga

SEQ ID NO: 54684 - DNA, 441 bp, Gossypium hirsutum
  Clone ID: uC-gsflnu33B076e01b1
ggtaagatgtgtatccatacatgcagacagtgttggagtgggttctacatgtgacggttacgacctgaccgaactacacgctgacggcggaggtgatcctgaccgccggaaaagggctctagctgatgcctatgctgactggggggatacactctacggagatgcatatgcgccggataccctaggatgcgacctgaaagaggatgacgctgttagacgatagggcggaccgaacgctgatccgagggtgaacttggccagatcgagactgaccctggatgctgaacagctaagagggcagaagcaagtgctattgatgattaccaactgaactgggtgggatgacgcaatgtaccactcaggagatgctgaggacactgcctatgactgcatagggcgaggcgcactatgagagagatgcgaggagctggaggcagacct

SEQ ID NO: 54685 - DNA, 210 bp, Gossypium hirsutum
  Clone ID: uC-gsflnu33B076e04b1
aaaaaaaaaaaaactggatgctggtgttcatcggatgtctaatgtgatccatgcagcggatcctgatatatttagggagtgtaatactttgtcattaccatagaagtgccctacctttattatgccataaagcttcttcatgttccttctaaaagattagaaaaagacattaaagtattttttgctatataaatactagacttttaagct

SEQ ID NO: 54686 - DNA, 244 bp, Gossypium hirsutum
  Clone ID: uC-gsflnu33B076f02b1
atcacgcgttcgggcaacaaggagggctgatggcaagtttaatgcccaaggaagagtattctcctaaggcttaatacacatttgacattggccaaaacgatcttggagaagggttcttctcaaacttgactgtacaagaagtcaatgctactatacctgatataaccaacacagtctcagcaaatattaagaatatatacaatttaggagcaagattcttatgggtccacaacaactggaccaa

SEQ ID NO: 54687 - DNA, 173 bp, Gossypium hirsutum
  Clone ID: uC-gsflnu33B076g07b1
tcggacgcgtgggcggacgcgtgggttttggctactcgtatacctgcattgctgcaggttcattgggatcaccagaggaaacccatggtttgggtggatgcctcatggcgtccgcaagcgcaaaaggttgcatgaaggcaatccacgaggaagtgacatacaaaaagtacaag

SEQ ID NO: 54688 - DNA, 194 bp, Gossypium hirsutum
  Clone ID: uC-gsflnu33B076g11b1
acctggaatttggggcatgtaatcaagacaatacactttcagtgggtcagctctgagtaagctaactggtgtcttaggacgtgggggataaactgtcgggtacaaacgactgatatttccactaagccgaaatacatgggaagatgtgcttgacactaagtgagagatcataacgagcagtcagtgcaaatcta

SEQ ID NO: 54689 - DNA, 226 bp, Gossypium hirsutum
  Clone ID: uC-gsflnu33B076h05b1
tagcaaggtgtggcgacaatgcggggttgaggggaatatgaacaatctgaaaggtcttgatcccaaacggataggtgagcttttgctgcccttcggaatagagacgattgatgaagcacagtagggcacttaatattacgaagacctaatatagtggatgctgaaatatctgacgcaacagatagtgtagtactatgctaccctagagacgtacttaagtaccaaa

SEQ ID NO: 54690 - DNA, 293 bp, Gossypium hirsutum
  Clone ID: uC-gsflnu33B077c03b1
tgtcagagtagaagcttgactaagcttactccctccctccttgcctctttctggaactgccgcgttccatgactgtgcttgtttaaaatgcctgtcgctgagggtgactaagtgggcctcatgatgctggggacggttagctgtgctgagggtcatagacgctttttcaacctgttggggcaaacgaacattgcatctatgaaagagagctgtgtatgctcagacttggtaaattttctggagctgggacagcgtcatactgcaggtacacggacggataagtatgcatgcaa

SEQ ID NO: 54691 - DNA, 140 bp, Gossypium hirsutum
  Clone ID: uC-gsflnu33B077e11b1
caatctctcgtcccacgtagcaaccaaagactcagatccgctaggatggcgggggcctagaactagaatggaaacgctcatcattcacatcagattctgacaaccagggacactcggacaagcaggttcacctgcacact

SEQ ID NO: 54692 - DNA, 379 bp, Gossypium hirsutum
  Clone ID: uC-gsflnu33B078a01b1
gccgtgaactgccaaaaaaacaataatgtccattccaacgaaaggccatgcacaatcttttcacacccatagccaagatctaacgtggaacattcacacagcattggttacagcgcatagtgctttgaagagtcagaggaaagcgggaattgggacggggctgtctatgaggatcattatcaaggggccactactactactactgcagccagcagtgatgctagaatggctgctcttgcatcattgcgtgccactacatcccatgcacttgaatgaggaagagacgtggttactatggcaccacagccaaaaatgagcactaccttaactagatcatggcatatgtaccagagagcatgcatagggttttgaaacatta

SEQ ID NO: 54693 - DNA, 403 bp, Gossypium hirsutum
  Clone ID: uC-gsflnu33B078a09b1
tcgttcgcgtgggatcacatatcaatgatttcgattatgaatacagtcgaagggtttttggggcaacatgggatagcattagtcgccctatgtcacgtcgctatgacacaagtgacccaatttcatatcccttttactgatatttattatgacagctacatgagggtaaaattcttacatgatgcacttaaaattggactgttgtagttattcaaacaagataggctgtagagttgttagtcagaaggggtaaagctagcattttttgtaagttatgtctttggtcccagcattgttcgtttatcatactacaatttcattgtgtggtgctatttcatattttcacaacctttcaaatattgtatttttgtatggttatgactgcatatttgctagtagattg

SEQ ID NO: 54694 - DNA, 389 bp, Gossypium hirsutum
  Clone ID: uC-gsflnu33B078c10b1
ttagacgggcggttgctttgctgctaaaggatatcgctgcgaggcgagttaagaccttacatggatcacaacactgccgcatgagctgctctaagacttacctggaactggccgaggttcactgctgtagctctacgtgcatgccatggccacgcacctccgatgaccacacatgcctactggcacaagcaccaaccattggcacactgtacagccagcgacttgaccaaaagatgcactgacactgggcaagagcgctgacttgtcatgatgaacacgcggacatactgtaccgagatggaccatgagctgctctctaataacaggaatgactgagctgaacgctcgtgtcagccttaggactgctattaaagctaatgtgctggggg

SEQ ID NO: 54695 - DNA, 552 bp, Gossypium hirsutum
  Clone ID: uC-gsflnu33B078d04b1
gttgtctatgaagccgatatagatcccgttaaaatgatcttgcctgatgaagaaggtgaaccggagaagctcactacggtaggtgacggtgcagcgagtcaacaagtggagcagcattacatccgttcaatcgaatcaacggttgtgattagacaactcccttccgaagggctttcattccagctttggccagctgctactaccctcgtcacgctcctcgataactacctccgtcaccctagcaaaagccctctaacagccaccctatcaactgaccggaaactaaaaatcttagagctcggctccggtaccggtctcgttggaatcgcagcggccgtcacgctgggagctaacgtgacggtaacagacttgccacacgtcatccccaatttgaaattcaacgcggatgcaaacgctgacgtggtgactaaaagaggtgggaccgttgacgtggcaccgttgagatggggagaagatgatgacttggaggtaatcgggcgggaatttgatctcgttttgggttctgatgtggtttaccatgatcatctattt

SEQ ID NO: 54696 - DNA, 300 bp, Gossypium hirsutum
  Clone ID: uC-gsflnu33B078e02b1
gcgcattgataagcgagattaggttgattattatgcctggggttctcttgagttgtccatgtactgcaaaaccgtgaaggaaacactgaacactccggatgctttgttaatctaataacatggattagcgatggattgcgtattatggcaacaatggtagaaaaagattattacatttaaaagtaaaaatgtcatctttactgctagttttttcttgatatgacctcaaatggattattaccgtgcttcaaaaacactaataaaaaaaaaaaaaaaaaaaaaaggcacggagctggggac

SEQ ID NO: 54697 - DNA, 507 bp, Gossypium hirsutum
  unsure (1)..(507): unsure at all n locations
  Clone ID: uC-gsflnu33B078e08b1
atttccctagggttttgttggttctcttactctgttgcaggcaaaatctagagttttcaatcgacaatggtgggagttttcgaagtaggcgctgttccgtttaaccctgacggctggggtccacccgattccgccgccgccgcatcgatcaccactactctccctctccatgttcccttcgctcctttctcccgctccgacaagctcggccgaatcgccgacttcacccgctcttttccttcctcaaacgctaatccgtccaaccgcccttcgtcgaggcacggggctgggaaccctgcggactcgccctttgatttctccctcgacgtcgacgctttccccttggctaaccccgaagacgattcctcattccgtttagtcgatgccaagcctccgccgcggcctaagttcggtcctaagtggcgtttcaatcaaaacagacctcaactccctcaaaggcgagacgaagaagttgaggcccgcanacgggaagccgagaagaacgtg

SEQ ID NO: 54698 - DNA, 530 bp, Gossypium hirsutum
  unsure (1)..(530): unsure at all n locations
  Clone ID: uC-gsflnu33B078e09b1
tcggtttgatcatgccttaacattacctctatttatttggggacagaccattgtgattagcaaaatgcgaataatgaccaaggaaggactaaagtggactgacaggagagtcagctttatgaacgaaattttagctgctatggacacagtgaagtatggttgaatttagaaagcatttcccttggattttcaatatatttttttccatttgatattgcttattggtcctatgcttggaaaattttcagattttatgcatgggagaagagctttcagacaagagttcacagtatacgaaatgatgagctgtcttggcttcggagagctcagctactatctgctgtatgatatttgaaattctagtccattttttctttgcatgtgtctttgccatatgaaatgccaaaatagagtatgaagttgccagttgccatgtaaaatcaacgagtgtacttccttttgcaccgganaatgtaacaccaaccataaaatntacaagtatgccttcacaacttgatttgagggaaaat

SEQ ID NO: 54699 - DNA, 410 bp, Gossypium hirsutum
  Clone ID: uC-gsflnu33B078e10b1
gatccactcatcatacaatgcactaagatttgtttctggggttacaaccacatttacccccaaagcaggtcttaaaataatacagttgtacatggaaggctaccgacaagactggaagctttcttttgaggaagacactgttaagagaggtggctggcagcaaggtggaattttagtagcaggtcctggaaaaaccaacattttatacattcacaaggacaaagaagcaggggatgatccagatattgaagacattttgaaagcttgttgctcataagaaatggggcctataatctcagtgaaatttcgtgtttataatctatcatagtgtatatttgggaattttcagtaaactcttctgttcttttccgattatgtgtgatacaacagaaatagaaaggagttttatc

SEQ ID NO: 54700 - DNA, 268 bp, Gossypium hirsutum
  Clone ID: uC-gsflnu33B078f01b1
cttcgcttccgaatagagtgcctacccgtctttcatttctagtggggaaaacaagatagattaaaatctatgatctgtttcctggtatcggaaaatttatacttgcacacattggtaatgtaatttggagtttatgttgtgccctttgtgatttatctgatattttcagcattcctgataatcaaaggctcattttttgctaccgagcttaatcctatttgcccaacaacaataatcaaataaagcgttactaatgatttcgtgaacc

SEQ ID NO: 54701 - DNA, 546 bp, Gossypium hirsutum
  Clone ID: uC-gsflnu33B078f06b1
cctactcgtccgggatttttgttttaggatctcaggcagtgccagtttccttttaaccgattttatttatcaaattgtaattaaaagaaactttgaaaatatatgcggctcccaattgagcgattaacaatttcatttcattaaatagaaaaaaggaagtgattatttaattttgatttgaaattgaacattcaagtctgaccgttgatttcatcggttgttttctccgtgatcgtcgtgatggaagtccggccaaatcaagcggtggacaattcatcaacctcacctcaacagcatcggcgccgtgcagctgccgctgcatctaaacaaccagtttccgctaccaacgccgttgataccacttccgttactcaaaggctccaaaaggaactaatggctctcatgatgagcagtggagatctcggagtgtccgcatttcctgaaggtgaaagcatttttacatggattgggacgatcaagggtggagagggaactatgtacgagggtttatcgtacaaactttccttgcgtttcccgttggactac

SEQ ID NO: 54702 - DNA, 383 bp, Gossypium hirsutum
  Clone ID: uC-gsflnu33B078g05b1
ctgatgcttgggaaaaaaaaaaaaaaaaaaaaaaaaaaaattttttaaaaaattattgaaaattctttcaaaaaggtcaaaactttctaacgcctccatgctagccttcccattcttgggggcggcccttttaggggatccagctttccttccccgttcttccgacgttttatttttttttttgggccccctaaattcatttccttgcccggctttttccaacttggggcctgggaaacccctggggttccccaacttattggctttgcacaacatcccctttttcccagttggcttattaccaaaaaggccccccccgttcgcctttcccaacatttttccaccctgattggcgaatgggcccccccctgtatcgccccttt

SEQ ID NO: 54703 - DNA, 493 bp, Gossypium hirsutum
  unsure (1)..(493): unsure at all n locations
  Clone ID: uC-gsflnu33B078h07b1
tttaatgtctgtgctcggttatcgtattgggaagtcaaaaatcaagcatggcatgaaatacatccaaatcccgggattaccacacgatgctgttcgagtattcattcgttttttatatacttcatgctatgaaggggcagagctggaaaagtatgcactccatctataggagttgtcgcattgatgctcagtcacgctactgaaacgagtttgcatttgttatctcgagcaagactttcttaccactgaaaatgtgattgatacccttttgttagctcggaaatgtgatgcaccaaggctcgtcctcatttgtgttcgtttggtcgtaaagaatttcaaatccgtatcttcaaccgaaggatggaaattaatgaaacgtatttatccagatattgagcaagaacttgtcgagtctgttgttgaagcggattctaaaagcangagaggcaaaggaaaatcgaagagaaaaggtctatacgcaattatatgaagc

SEQ ID NO: 54704 - DNA, 441 bp, Gossypium hirsutum
  Clone ID: uC-gsflnu33B078h11b1
tctctttcgcgtccgcccacgcgtccgaccacgcgtccgtccacgcgtccggccaaataattattcaatgtctgaagcaaggtcctatcttgtcctttcccgatgtagcaatgacttaacaggtggatctcatggcggttcttctgatggatggtccatgcgcacattttcagagcttgaggcctcttctcaaagagaaaggtggtcttttgacagcgaacacttaggttctggttatggcaagataagtggatgtagcagcagattctcatactctccttccatagatgcacgaacttgtggtgcttgctccaagcttttagctgagagatcctcatggagtagcaatgagatttcagtggtttctgtgcttgtctgtggacatgtttatcatgctgaatgcttggagctgatgacaccggaggctgacggatttgaccc

SEQ ID NO: 54705 - DNA, 406 bp, Gossypium hirsutum
  Clone ID: uC-gsflnu33B079a02b1
ataacacggccggaacacggggagataaaccggcagagttcaggcagacactacaccggaggctgcagaggagaggagtacagacacggagcagtctacgatgagctaaaggacagggcgaagagaaggggaggcccgcaacggaggaaactgccgggaggagaggtcatgggggttcgaaatgaaagctaagaaaggagagtccgacattatagatacataactaggggacagggaactaaagaagaaggggagagagacggatggaattgacagccaaagcaaagagcaggaagcaaagacaggaccctcaatcgctgaagttgatgcatggaggaaacgtattggaaacaacgaggatgcacgataaacatacgatgatgaggatgaggaaaactgggaagga

SEQ ID NO: 54706 - DNA, 379 bp, Gossypium hirsutum
  Clone ID: uC-gsflnu33B079a07b1
gtcatccctcgagagacgggcgcgtacagggggcaagtttaaatgcgcgtgcctgcggcttctttgatccttgatagcgtcacttaaagtcattttacgggtcgtcgcattacagctgaatgactgggaaagaccttgcagcttacgaactgaatcgatttgcagcacattcgcctttggtcagttggccgatgtaacgaatagggctcttaccggatctgctcacacgaacatgaagggcagttctgtatgggaaggtgggacagagccctgtatgcggcgcatataaatctagaggctgatggtggtgacggcgcatcgtgacacggtagcacttgccatgtgtccttagcgccctgctcctttagatatttttcct

SEQ ID NO: 54707 - DNA, 338 bp, Gossypium hirsutum
  Clone ID: uC-gsflnu33B079b03b1
atcacgcgtccggacagtgagcacaaacgcggcacgattggccgcggtggctgatcgctcttactggagaggtcaatctgctggtcaagatccggagcctaaccacaccggcatgtggtaacaaacgccacaccggggctccgatcgggatagcatcccaccaccgactatgggcgttagagccaaagacggttgcagcataccacaagaccaggatgacctcacatgctacatgccgggcgcgcactacaatgctgacaggaacaacaggattacaccgtccagatcgaccgctattattctgagacatggagagggatgccaaagcgcatctagat

SEQ ID NO: 54708 - DNA, 350 bp, Gossypium hirsutum
  Clone ID: uC-gsflnu33B079b10b1
tcacgcgtccgcactaaatggccaccaaagctgagaaataggcagccggaccgaaaccggcggtggagaaaaagaccaccgatgcaccaaaagccccggaggaaaagaaaccgaaggccggcaagaagccaccagaacaaggcggagccaccgttgacacgaagaagaagaaggccaccaagagcgtggagacgcacaagatctacatgacaagggtgctcaaacaagcccaccctgatacgagcatctcaagcaacgctaaggggataatgaacatggtcagtaacgatatcgacgagaaactggctcacgaagctcccgaggaccgcgaggcacaacaggaagcccac

SEQ ID NO: 54709 - DNA, 271 bp, Gossypium hirsutum
  Clone ID: uC-gsflnu33B079d12b1
ttttaatgcacatggcacacgctgttataacgaagaaacttgactctttgttgaaagaggggctggtgatgaggcaaagataactacgcgcctaagctagttgctactgtcttgagggctctcgttgtcatctgcagagaggtagacatcaggatatggcactcatactgacatggaggttatcattatgatgacatacattctggacctggaagtgttagggcttaccaatatacatatgagagcacaacgaggtgtatccagacacaat

SEQ ID NO: 54710 - DNA, 313 bp, Gossypium hirsutum
  Clone ID: uC-gsflnu33B079f03b1
ataattttttttgagaaaaaatggtgagggcaatggcattgagtggaacgtaccagtgggaagtttatgaggaggtacaggttgcctgagaatgctatgatggatcagatcaaggattgcatggaaaatggtgtgcatactgacactgtttccaaacgggacgggaaacagcccggagataaggctatcggcagtcatggctatacgaatgaacgttggattctaagcagtgtgttttaacacctgcagatcagagctcagttcctactatgctcaatctatactatacgcgtgttttcctatgtgtgtgtta

SEQ ID NO: 54711 - DNA, 290 bp, Gossypium hirsutum
  Clone ID: uC-gsflnu33B079g07b1
tgagctcccagcagctgctgtcaacaggcgaagaatgttggaccaaactggcgacgcctgcgcgccggcatgcatggcaagacagggaagaggactgggatcaggccgcaaactgctgttaatagaggaaaagcgctgcagccttgatgatagtcctgttgggaaccagtgtgcagagtgcactcagcctcgcgcacgaaggctgaaaacatggtgaccagatgggccgtttgctggattgtgagctctgcgttcgctagtacatctagctgatggaataaccgggaaat

SEQ ID NO: 54712 - DNA, 249 bp, Gossypium hirsutum
  Clone ID: uC-gsflnu33B079h01b1
ttcacgcggccgaccacgcgttcggtgatgggggagatatagagccacaacaggggcagaacttggttcagactctaaccggcaagacgatcactctggaggtcgagtgctccgacgcgatcgacagcgtgaggaccaagattcaagatacggaaggcatccctgcagaccagcaggacctgatctagaccggaaaacagctggaggacggccagacacttggccgataacaacatgcaagaggagtaa

SEQ ID NO: 54713 - DNA, 455 bp, Gossypium hirsutum
  unsure (1)..(455): unsure at all n locations
  Clone ID: uC-gsflnu33B080a01b1
gcaggccccgcccccccacacccgggacgtcccacccccccgaatanatcacataaccccccccccccccacagaggggccgagaaacaacactacggccccaaaccccaaggacacccacgacatgacgaccggagcgcagcccgccggacggacagcgaaggagccacccgcagacagcacacctcgcactgcggagaacccccgagccctccgcactggcgagaaaggcgccggccgcagcggaaagcccccccactacaaaagccccaccgccccaacgcgggacccccaacacaacgagccaaggaggcgaccccaccgccggaaacggcaccggaggcgaaaccaccccccggacaaaggccgcggccaggaacagcaacaagaagcacaccggcccccgaacccacccaagggcaacgccggaccgggaaccaccgaaccccaacccc

SEQ ID NO: 54714 - DNA, 184 bp, Gossypium hirsutum
  Clone ID: uC-gsflnu33B080a03b1
acctttttatttctttcataaacactcaaatgcccaaggttcttattcaatggtgtttctcatgtcgagaatttcggtaacacaattcccacagcgagatacccacaaacatcttcttaatccagcatactaccattctatatgggatgccgcctaccagtatgcgttttcgctcactccttta

SEQ ID NO: 54715 - DNA, 209 bp, Gossypium hirsutum
  Clone ID: uC-gsflnu33B080a06b1
cccgccccgagccaccgcgaaaagggggcggcccaaaaggcgaagacccaactcacccccgacccaaggaacaaggcaccaccgaccgacccacagccggggccaacacggccacagacagaccggaggacacacgggcaccccaagccccaaaagccaagccaaaacaacaccccacgagtgaccggcctcaagagccacaagccccg

SEQ ID NO: 54716 - DNA, 374 bp, Gossypium hirsutum
  Clone ID: uC-gsflnu33B080b08b1
ctacttaatttttcccaccaacaaacctagccaggggaaagttatctaaagacacgccgatacaacacacaaacgaagcgcgcgccaatagcatgatgatatcaatgagcatgacatgccgaaaggagagaccttgcctagcgaaagcaccagaaactcagcgtcatgcatggcgacataggaaggacgattacgaatttagggaccagactcgatggattgcagtccctgtggtctagacctactgggaaaccctaaacagataaggagaggaaccggcacacagacatggatgcaacattcgagatctaaagcaaattagatggcttgtgcaatcaacatgcgaaactttgcccacagagagagcatgctgg

SEQ ID NO: 54717 - DNA, 492 bp, Gossypium hirsutum
  Clone ID: uC-gsflnu33B080c07b1
caggcacccccccggaacccccgggacgacccacccgttcgtcacgcccccggagacggacaaaaacaggggcggtgtggaaaccagagcaccacacccacccgacgaaagacccagacgcacacccgagtcggagcacgagcccgccaggagggagacaacgcgacccgcaacggagaccgacagcgggggccacccaggcaagcggcgcgaccagaacccaggggccgaggaccaagccggacccgacgacgacccagacggcaaggtggcgagcgcaacaagcgcgaagaccaacatggtgacgggcccggggggaaaaaccacgaaaacaaaggaagccaatgaggggactgagcgcgcacaggccgcccaccggaggcgacacagaagaagcgggccacgacgccgacaaccgcaaggcccgggccaaaaaagagcagcagagcccggcaaccgcccagggagcccatggccaccagaccaagcgcc

SEQ ID NO: 54718 - DNA, 491 bp, Gossypium hirsutum
  Clone ID: uC-gsflnu33B080c09b1
tgaaacatttggtcgcaaatcaaaaaccagatggatcctttaacacaatctttgtctttggtccgaaaaatagaccaaacaaagtaccgaaattgaacccaaaaaaaaaaggcgtaaatatcactgggaaaaaagctttaacgaaaaatcatggcgtgatatgatcgagcaattactgttttctcccccgatggtcatttattccaaggggagtacgctcttgaagccgtccgtaaaggtaacgctgccgccggagttcgcggcactgatatcgtcgccctcggtgtcgagaagaaatccgccgtcaagctccaagattccagaagtgttagaaagattgtgactctggatgaacacattgctctggctcgcgcgggtttaaaagccgatgctcgagtcttgacaatagggctcgaaccgaatgtcaaagtcataggcttacagttgaggatcccgaactgtcgaaatattacacgatacattgccggttt

SEQ ID NO: 54719 - DNA, 386 bp, Gossypium hirsutum
  Clone ID: uC-gsflnu33B080c10b1
cgccccgccattaccgggtggacccacccccccttcattattttctccacggtcactctgcgcggaacgaaatcttatgcgaaacgaaatcaatcaagacagaaaccaaacgccctcaggtgcttcagaaatcactcacttttgggccgaagaagcatactggaggtagaccacaggccccgcttgccaggtcctactctcatgagtatatgcaccggttctacctttaatccgactttgtttgagcaagacccccatctttacggaccgactgctaaccagtgggtagtccggggacagcataaatgggtcttagttggtttgggatcgatatgaggctgggagcctgcaaacacagctgaggctgccttgaggaactgcccacc

SEQ ID NO: 54720 - DNA, 204 bp, Gossypium hirsutum
  Clone ID: uC-gsflnu33B080d01b1
gcaccccccgcaaggaggatacttactagcactagcagtccatcacagattccccatcttgaagaatggctagcgctaaaatcgtgttctcaatgtactctttctgctgaaagaggaaaggactcataccgcccgtagatttggaaatgcggagcgggataatgtttcaagcttaagaaaacttgcaattttcctgttatctag

SEQ ID NO: 54721 - DNA, 329 bp, Gossypium hirsutum
  Clone ID: uC-gsflnu33B080e04b1
tactacttttttgcccacgcgtccggagaaagaggaaagaaagaaactgattaaacagatgatggaacgagatattgaaactagaaatggtgaatcccttgacaaagcagcttgtttaggaacagaggacgttgatttaggggcagagcaatcgagtcgttcgcgtaagaagagaaagaggaaagaaaattcttttgtggagtcatcgggattgaaggaagaaccgaacttcgtaatgaatgattccgtgtcaggtagagattcaaatgtacagactccggggaataatgtttcggagagtcccttgaaaggacaatcggctgattcag

SEQ ID NO: 54722 - DNA, 494 bp, Gossypium hirsutum
  Clone ID: uC-gsflnu33B080e12b1
ccctcctaattttttctgcatggccctccccatgaaaaaactcattcatcccaatggtgttctcttcacgggagctgtaacccgtcctccaaacctttcaattgtaacagaatatctccatagaggtagcttgtataggataatccaccgaccaaacaatcatttggatgagcggaggcgttcgaggatggctctcgatactgctcggggaatgaattacttgcacaattgcactccaatgatagtacaccgggatttgaagcccccgaatcttttagtagacagaaattgggttgtaaaggtctgcgattctggttcatcacggatgaagcacagcacatatctatcatcaatgtcaactgcaggaacggctgagtggacggctccggaagtactacgaaatgaaccttccgatgagaagtgtgatgtttatagcctttgagttatcttatgggagctctctaccctgcaacacccatggaaagggaatgacc

SEQ ID NO: 54723 - DNA, 177 bp, Gossypium hirsutum
  Clone ID: uC-gsflnu33B080f04b1
actcagtttttcttcaccccataataactaggaaagaatagagtgcatgatcccgcgaattactcctgaataaatttttaaaatcatattatagaaccatagcatttcgtgacgtataacttaataaattcaagttcaagatgcataaacttcacttctttacaataacaatgccct

SEQ ID NO: 54724 - DNA, 321 bp, Gossypium hirsutum
  Clone ID: uC-gsflnu33B080h05b1
cctacgttttttttccataaccaacatcaaagtcgaattttttaataggtttactactgcctaccctatcacggagtagaatattgaagtcaggttcaatgagaaaggatggaccaccatggaatccaacacctacattgggtactattacaatggttacaatgaggccttgttcactgaataagggtggagaactaaggtaaaccagaatagtatcagctattacaatggtgacattgaggtcatgtttactgaaaaaggatggagtgctgaggtacaccaaatcgacttccacttttacaggggtgacaattgagttcc

SEQ ID NO: 54725 - DNA, 379 bp, Gossypium hirsutum
  unsure (1)..(379): unsure at all n locations
  Clone ID: uC-gsflnu33B080h09b1
tacacgcgtttttcaccccaanctctactgtgggatttttgaaaaacttatcaaaactttgaaaannnctcacaatctttagaacttttcaagccccgatctgcaaatctgactgttgaatcatcatggaacttcaaccatggcttctccccaccaccttcaacatcttggccgttcgaatttctgagacgatgcttgaatctcaagtactcaaaaacccgaaattgatcttagtttctgtttgcttctcatcattttatttttgtttggttctgtgttctggacttatggttttgcttgtgatgttaattattctcgacttttcctctcgcgaaatggttcagggtcaataataaaaataatagcagtttacaccccc

SEQ ID NO: 54726 - DNA, 238 bp, Gossypium hirsutum
  Clone ID: uC-gsflnu33B080h10b1
tgcctatttttcgggacaagcgcggcaaaggggggattttgaggggaattctctgtgatgcccacaaggtggctgaagtttgggggggtgatggacaggctaaagggggagtcgtaacgacggggtaaccacccaaagggccaacctggaagaccgagactacggatatccacagcactgccatggacgcgcttgggcattgggaggtcactaagaccacgaggacaggggcctcaca

SEQ ID NO: 54727 - DNA, 396 bp, Gossypium hirsutum
  Clone ID: uC-gsflnu33B081b06b1
attacatttattaggacgatgcagcgagttgttgttggcatcgccaagtggatcatagatcatggcttcgactttccttctcaaaatcgtggatttgttcctttcttcttcttcttttttgctttattctcctaatcaattataattggttctccccccccccctttttttaattccactttatttattttgtcggtgcactatattgaggtgtaccattcagccggaaaacaggggagggaagaaatgtcggactctgtatttctattgtaaaatgaactttgagtaccatttaacaacccgtaatagaaaattgctttatttgtaaaataaccttgcttcccccaccacagctattgttggagcacatgctggtatccgacaaaccaggggcgg

SEQ ID NO: 54728 - DNA, 278 bp, Gossypium hirsutum
  Clone ID: uC-gsflnu33B081c06b1
gatcccttttgcacttaaggaacataataacatttccttaatttccattgtttatgtgaatttgaagcatagttgttcttccacaagcgaaaaagataaagtactatgtaaccatcccatcccatcccatccccctccccccccccctatctcagattctctgcatcaaagtaacttgagtctttatatatatcaccttttgattgtcaaatattaattactaaaatgtatcttatattagcatagggggggcacattctagaggattcaaatttagg

SEQ ID NO: 54729 - DNA, 450 bp, Gossypium hirsutum
  unsure (1)..(450): unsure at all n locations
  Clone ID: uC-gsflnu33B081e04b1
cttacgcgtccgcccacgcgtccgcccacgcgtccgggcagatcccttgtccagtacaaccaattatggctttggccgatatgtttgagtgttgatggaataagtaaagctgtcttccttgttggagctaatgtgagtccgtccttttgttggagtcagtttgtgctgttaattagatttatgtaagggtgtcctaatgttatgtggagtctgctgaattgggatttttggttttgtagaaaccctttggtgtgtttccgttttctgtactcgtggatttctactatggaatgttagttttggatttcnaaacaaaaaaattaaaaaaaaaataaaaaaaaaaaaaaaaaaaaaaattattaaaatattaaaaaaaaaacttatatttaaaaaaataaaaatttatttgataaacttataaaaaaaaaaaaggggggggcctttttaagg

SEQ ID NO: 54730 - DNA, 569 bp, Gossypium hirsutum
  unsure (1)..(569): unsure at all n locations
  Clone ID: uC-gsflnu33B081e05b1
gtctcagtaaaaacaaactgtataaaaccatgtctgatctcgaagtttcgagctgcggttatgacaaggtactcgtggatgcagaatgtacgcatgatggatcggttaaacatatccaaaagttcgaaaattggggatggacaactcttcaacgccgtgtattggatgccgtgagaacagatagtttaactctacttcagttaaaacttctaaggaacggttttagactgctgaaagtcggggggttgctggtttacagcacttgcagtttgacagttgctcaaaacgaagacatagtagagcagttcttgaaggaaaacgcttctgcagaactacaggaaataaacgaagcagaagagtggccccgtaaaagtgggaggataccaaagacattacgatttgatcccttgacatcacagactagtggacttttcgtagctaagttcacaaaactcgccacttaattaagatttacattctggggtgcagagaatcgtctcttcgttgctgcacttcaaccttcgatctcggctnggtgtctgttcactactttggtaacactggttttt

SEQ ID NO: 54731 - DNA, 469 bp, Gossypium hirsutum
  unsure (1)..(469): unsure at all n locations
  Clone ID: uC-gsflnu33B081f10b1
tcggttcaggttgttgacttcggaagttatatcgagaacggctttcggtagtaattacttggaagggaagaagattttcgacatgttgacgaaattggcgatactagttagtcgaaattatttcaaaactccgattcctggcatcagcaagatatggaaaactgcggatgaaatagaatcggagaaacttgccaatggaattcatgattgtgtgatggaaatggctaagagaagggaaaagaaagtagagacaggagaatctgacggttttggcaatgattttctaggattacttataaatgcttatcgcgatttcgacgagaaaaatcgattttccatcgaggatctagtggatgagtgcanaacattctactttgccggtcacgaaacaaccaactccttgcttgcgtggacgatcctttgtttagcaattcatactaaatggcaagaaaaacacgcaagaggtgtt

SEQ ID NO: 54732 - DNA, 252 bp, Gossypium hirsutum
  Clone ID: uC-gsflnu33B081g02b1
tcgccttcgcgtccgtccacgcgtgcccccacgtgtgagaaagctggatattatgtttactagtttcgccaaaagaaaaccgaatatatcgccgtaagacgacattactatctttgaaggcctaccgctgtcttaggggcgaaaaacagggtgggggcctaaagctgaggtaacgggtctgagcttcacgagcatttgtattacaactgtcgaacgtgcatgaactatgatagacagaggatgctccggtga

SEQ ID NO: 54733 - DNA, 236 bp, Gossypium hirsutum
  Clone ID: uC-gsflnu33B081g04b1
ttttcctttaaatgaagaagccggctgaccgagccttggggacttgagtaattaggctcaggtcttcaacaatgagggaacaacctgtggagactattgtgggcccgctaggtacttgaatataagaaaagttggtggacactccttttacttgtataactttcctggaggtcattgatgttttagggttatggacgccatgggtaataattggcctttctggagggcgctggttt

SEQ ID NO: 54734 - DNA, 573 bp, Gossypium hirsutum
  unsure (1)..(573): unsure at all n locations
  Clone ID: uC-gsflnu33B081g05b1
ttttcgttaccgcccacgcagaccgacatcagcgacggggcactgagaagaatgcacgcagattcggcagaggacagcgttcatcaacagacaagagaacacgaagctgaattggaggcaaagcatatggaaatggaggctttggtctatgaactcaagggtgaaaacaacaccaagttgtcaacagaccgcgaaaaccttcttggatttgttacgagcctaggtgattggatcagcgagttctccggtgaagacgctaagctgatggggattttggggaggatgntgcagtcttttgacaattgcatttcagacatgaaaggtaatgatgaactttatgacactctcaaggaaaacaagaagagtcttatttcttctccagcagctagaaaacctgattctcttgttgaagaaagatcaccttttagagagctcaactagaaattattgatttcattttccttttcggcttctgtatatggataaattcgtgcatgtattatctgccagtaacagtttaccacttaagattcattggttcattnttaaataacangatagcatgtntctaat

SEQ ID NO: 54735 - DNA, 466 bp, Gossypium hirsutum
  Clone ID: uC-gsflnu33B081g09b1
catattgtgacacaaaaacaaccacaactatttataaagcccatgtgccaacctccagattcttttaagagcataataaaaatttttataaaagccgaagcttgaacccaagacttcccagacatccctaaacacacctagctcacttaaccgacaaagcaaacatgaaatttgtgtcaaagcatgaaaaattacagaccttacatttttgaggcgtcacataatatatgaagaaattcgataaaaatcgattttctgacctaggggtaaaatggtcattttgcaaaagtctaggagaaaaatggtcatttcgcccaatttttaaagtgttgagtgcctaggttaataaaatgattaaatttgtgaattttcattattatagattaagaattacaaaatccaggcctagaccgtggaaaagtaaagcaagtagactaagctgaactagtcgtctacattttgcaat

SEQ ID NO: 54736 - DNA, 499 bp, Gossypium hirsutum
  Clone ID: uC-gsflnu33B081h04b1
ccggaccggacagtgccggctccgacccatcgcgtctagctacgcgtccgaccacgcgtgcgcccacgcgtgcggttccattacccttccgtgacgcagattctgatggctgaaaaagattgctaaaagtcagggaagaagtccctaaccaagcttacatagaaggcaatccagggatcaacatttgttataacaatgtggaagatctgatctcccccaccatcaatcacatatccattccaatttgtagagtacttaaagtgcaagaacaagtaccagcatccaaatggcaacattctaacttggatttgctggtatctgaatcaatctgatgtcttcagccaatactcaaagggcattcttttttctccctgtaagtctctgttggatatgatgaagaatgtaagtttagaattccttttctttttgaagtcaaaatgtatatttgattgtctgtataatgatgggaactattgatcatcaggcacattaaaatttc

SEQ ID NO: 54737 - DNA, 337 bp, Gossypium hirsutum
  Clone ID: uC-gsflnu33B081h05b1
tcgttcacgcgtacgatggtgttgtatgaatgtctggcaaacggggatttacaccgttggttacatgagctcccaacgggggcgcccaacgtggaggattggagcaccgacacttgggatatgcacaacggaatcgggtcccatacatcttcgccggataaaacgaattggctgacccgccaccgcatcgcggttggagttgctcgtggggtggcatacctgcatcacgtatgttcgaggcatggccacctggaggcttccaatattcttttgtctgacaacctggaaccttggatatcctgattcgggataagaaacattgggtgtagaaaagaaa

SEQ ID NO: 54738 - DNA, 262 bp, Gossypium hirsutum
  Clone ID: uC-gsflnu33B082a06b1
tcgattttttttttttgtgtttttgcttcctggtgtgcagatctaaaaaaagcacatatgtaatccgaccaagatcatcaaattcaaaaggaccatctgtgtcaccttcatctcaaaaacccaaaacctggtaatctgcatcttctggaagaactcatggatttgcagaaagatccacccacttcttgcagtgctggtccagtaactgaagacatgttttattggcaagcaacaatcatgggaccctcagatagcccttatc

SEQ ID NO: 54739 - DNA, 302 bp, Gossypium hirsutum
  Clone ID: uC-gsflnu33B082c05b1
aatcttaattcttaccaggtgtttgtgggattgtcttaattgattgaataacctggcgttttatgcttgcttgtatgctatagagtgtatacgaacaaattgattgtctcaaacttctatgtgcatggcatgacatgacaaattgattgaatatatcaaacagtttgttttgtcaaaaaaaagaaatataaaaaaaagaaacataaaaaaaagaaagccacctaaaaactgaagaaaacatagaacaataaaagcaatggggtggttgtaagcaccctaggactaaaaaaaaaagcgggggg

SEQ ID NO: 54740 - DNA, 363 bp, Gossypium hirsutum
  Clone ID: uC-gsflnu33B082c12b1
tgttacccgagggccgacccgtatgcgagacgacggccgcgaaacacgacatgccactgcataacacctactacagcaacatactggactacgaaggggtgtggcagaggcgtgctatcatcagacacgcagggcgacaatatggaccagacgcttatgtcaagaagacatgccaagagtccaagactatgtctgtagcgaggcatcaggggccagaactctcctgtgtgcgaacaagactttaactggaacaaaggtttagagcggaacacaatgctatctgctaaacaggctctaataaaaagcctgaatacagagagagctagctgtggctatataaactgtagacctactgagtttgta

SEQ ID NO: 54741 - DNA, 339 bp, Gossypium hirsutum
  Clone ID: uC-gsflnu33B082f04b1
cttactcgtccgggcgggaacctataacaggacgcgataagcttagccaccgagccagtctcaaactacattttagggtggcttcacaagacagcaggcagctcagtgccaacacaaggagtatagggatggtgccggggcccatgatgactgctttcccaatctcaaaattggctccactgagcatggtcatattgctagactagcattaggacacctaactttactggggcattgagacttggaccatatgtgcaacccttgaggatcagatacacatttgtagattaagaaccctaagaggccctcaatatattacggcagttggattggaattag

SEQ ID NO: 54742 - DNA, 438 bp, Gossypium hirsutum
  Clone ID: uC-gsflnu33B082f09b1
ttctacgcgtccgggggaggtgagtgcttgagctgcatatcttttacttgggctattattttcatatcaacatcgtgtttatttcatcaatgttattacttggagaaatgaagtattctttttcattctttttgcaggtccagacaatcaaacaaggatatttgttgaaacgttctagttcgaggggagattggaaaagaaggttctttgtacttgatagtcgaggaagtttatactattatagaaataagggtatcaaaccaatggtatgtgttaacattttattattatccttgattgatcatgtctagtaatataacttggagcattttgtcctttaactatgattatgggtgaaggggaggtatgcctgtacctagttagctttgatgctagctaatttatggttttgacacaattgatgatgcattgcagtgg

SEQ ID NO: 54743 - DNA, 400 bp, Gossypium hirsutum
  Clone ID: uC-gsflnu33B082g05b1
acccacgcggccgtctatttttccgcccacgcgaccgagctggaaggggggcttatatgggagttatgctctacatgttcgggaattattgagaatcttacaactccttcagcagtgccattgctaagctacccatatctggagacgagaaatgtgccttcttcggcctcgctctcaatcaaatggggctggcttgtgcgcagcgctctgctataaaagaggctgtagagttgatagaccgaagctcatatcatgcctagagcgggagttgtgggccgatccaccctggtacactcagggaatacagtaatctcgcatgcacttacgacgcagttggcagggttggtgatgccattgaaatactggagtatgttgttcagacgagggaggaaaaactggg

SEQ ID NO: 54744 - DNA, 310 bp, Gossypium hirsutum
  Clone ID: uC-gsflnu33B082h07b1
cttatccggtggaggttgatgtgcaaggggttatgcatatatatattatagtccgagatcattcaatagagaatacattcgaattgcattgctgtaacattaggaaatgaagatggggattaatggagcataataacaaagagagaagaaaactacaatcataagtaggcttgttcctacgtaggcatccaagtttaaaaaactgtagtaatgtttcatggtctccaactgcaatttatgcgcttcacgtcatacaagaagagatatcacggcggttaactgcgtagaggatctgctgtttttatcttta

SEQ ID NO: 54745 - DNA, 441 bp, Gossypium hirsutum
  Clone ID: uC-gsflnu33B083a02b1
tcgcttacgcgtccggaaaactatcagtcaggaagacaataattacaccattgtctgtcaggcatcctcacctagcccttctgattcttcaacaatgatacctcaactttctgcagcagcactttcaattgcacaattacaagcacggggatttgaagaacctgccaaacaaaatcaattatacaagaaacattatccgccaatgttgggagatgaagtttggcgtctagacagaattggtaaaaatggaattattcatgtaaggctggcctctgaaggcattaacacagtgcaagacttcttgagaatgtcggtcgtcagtcctggtgagcttagaaggattttaggccctagaatgtcagagagaatgtgggataatgcaatcaaacacgccaaacttgtgttatgggaaaccatattatgtttttcgaggctcaatta

SEQ ID NO: 54746 - DNA, 293 bp, Gossypium hirsutum
  Clone ID: uC-gsflnu33B083a06b1
tcgtttacgcgtgcgctggactacgctttggggagggcgaaaaccaatcctgacggaatattcagagtatacgagcatttgcatcatctagaaaagatggcggcggaacaaccaagatcggcaaccgatgacgtgaagatggatttgttcgaagatgatgactagtttgaagaatttgagagtgattaatagtgggaggataaggaagaaggaaaggtgtttacacagcaatgggaagatgactgggatgatgatgatgttactgacgatttctgtttacaactgttgaggga

SEQ ID NO: 54747 - DNA, 412 bp, Gossypium hirsutum
  unsure (1)..(412): unsure at all n locations
  Clone ID: uC-gsflnu33B083b10b1
gttaaacataggaaagatgaaatcaaacttcaattatgtaagtagtggctccaacactggtatttgatttgcaacaacatgaatgtcaatttactttgaattctgggatttgttttttttttttaatgttcctccattaattctatgctttagagctcgattggatacatatgtaattatatcattttcaacttgtgaggcgttttaatgtacaatatattacatgttgnaaaaaaaaaaaaaaaaaaaaaaaaaaaaaaaaaaataaaaaacaagcacggggtgtacagatttaaaaaatgcaattatttttgaaaaaaaaaggtagcaaaattttagttttagggggggcgttattttataggatggatgcctgcaagcccgttattgcggtttaatcttttttgtgtat

SEQ ID NO: 54748 - DNA, 228 bp, Gossypium hirsutum
  Clone ID: uC-gsflnu33B083c03b1
cccacgcgtccgcttgttagttaatcaggcgaggattctttcaaaatctccgctctctctctctctctctctctctcgctgtctctctgtcgctgtctctctgggtggcgcgctctggatggctgtggaagagggggggatggggggagggatccggctgggagaatggcggatctgggaagagggggaggtgtcggtgaaaaaagaaagccgggctaatgatgttgg

SEQ ID NO: 54749 - DNA, 402 bp, Gossypium hirsutum
  Clone ID: uC-gsflnu33B083d03b1
aggaagagccgcccgccgggacgggccgggaaggaatggccggaccgacccacgcgtttgtttacacgtgccaccgattctacaaagggggggggaacaaggactttgtcagccctcttagccacctactgaccagatacaaaataaccagtggcttccaggaaaacaaagaagacggagctggaaaattgagaataaagcaacggaagaaaggagtcgccataaggcaaaagaataaagaacgcaaacaaaaatcgaatgtaatttcttaaaatgggcagggaaggagctggtcaagaatcaaaattagaactaggggtaacccagtactggcaaatgccaagggaaaaaaaatatggtcaaaggaggttttctaaaaaacaaagccaaaaaaaaggaaaa

SEQ ID NO: 54750 - DNA, 346 bp, Gossypium hirsutum
  Clone ID: uC-gsflnu33B083e02b1
gtggttttgtatttgctcccttagagggtgggacagtgatggtaaaaatgggaatggagcgtaacgaaaggtggtggagctggagggaatcctaacggggggaatccatatcaaggtggcggtggtcaaaaccgccggcaaaatggcggtgattgctccttcgaacctcgggatcctaatgaggtctctcgtggtggaaacggcggcaaaaagggagcatctatcatcgttgtcgagaagctcactaccccctttgacttcgctaatggagggaacatgaggtaacaacaaatggatgctgacccttacataggaatggtccccatggggagcttaccccaaatgg

SEQ ID NO: 54751 - DNA, 394 bp, Gossypium hirsutum
  Clone ID: uC-gsflnu33B083e06b1
gttgtgcggcgtggaaactgaggccggggctagtgatgaatctctcgtctcaggtggcaacaaaggtctcacagcctccagcacggggggggctcggaactacgccggggaccacattatggacaggagcattaacacatgcaggaacactcggacacgatgggtgacatgcacacaggggctgtgctataggccagaccagcccagaaccttgacaggatgcatgcctgccaaacatgcacaaacacatacaggtaaagggagtcggaagagacgactaccatagctaactcgatacacagaggaggacggcttgtgaagcatgcttggagagaaggatcagaaaaagaagacagctgactggacgctcacccatggaggacttgtaaacaga

SEQ ID NO: 54752 - DNA, 452 bp, Gossypium hirsutum
  unsure (1)..(452): unsure at all n locations
  Clone ID: uC-gsflnu33B083e08b1
tcggggaccgatgggtccgaaaacgctgtgtaatgcgtgtggtgtgaggtacaaatcgggtcggttggtacccgaataccgacccgcctcgagcccgacgtttgtgtcaacggagcattcgaattcgcataggaaggttttggagattaggaggcaaaaggatatgcaacgagggggacagggtacacggtttcttagtcaaacttcagttttccccatatccaacggtngtgatgttgctgatgattttttgatccatcatcatggtgggccacgattttagttgcatgatttagttagagtatcaaataaaattgggtaaaaaaaaaagaaaaaaagagaagagcttaacaaaaatcttatttgtagcccatttcttaaatcttgaatatttaaaaaaaatcattaaaaattaatttaagaattaaatttaaaaaaaaaaaaagggcggg

SEQ ID NO: 54753 - DNA, 324 bp, Gossypium hirsutum
  Clone ID: uC-gsflnu33B083g04b1
tcgctttacgcgtgggagggactgtacggcggtgacggggaggggacgcgtgggagagcaggtggcggcagaagctagggcaagagcggcggctagctagggttttttctctcttttttttttagggctgtttgggtttggaattttaggcctgttactttattttgtaatttggggtagggtaatatgggcttgtaaaaagaattgagttttggcatttattattttttgtgttttattaaaaaaagcacaaaaacaatagctgcaaataaaagatgaaaaaaaaggaacagttccgctaaaaaataatactaataaaaacgg

SEQ ID NO: 54754 - DNA, 445 bp, Gossypium hirsutum
  Clone ID: uC-gsflnu33B083g10b1
cgcgcatcgatgatttagttgcgaattccatgaacattttggaacctgcttcagttgatgctgatggaaatgctcgtgaagatgtgatgcatgcgaatgatccagttgatttgttcattttgcctggacttgcttttgacagatctggaagacggttaggccgtggtggaggatattatgatacattcttgaagaactacaaggagcttgccaaggaaaagaattggaggctcccactctttgttgcactgtcttattctgtgcagataatggatgaagaagtaataccagtcaccccaaatgatgtactggtggatgctttgtttcccccactggagtgattcccattacctcagctgccttagggagaatgaagccttaatgctgtgcttctctgagtcagatccaagtgcttttcttcataggattctctgaaattgcagtt

SEQ ID NO: 54755 - DNA, 277 bp, Gossypium hirsutum
  Clone ID: uC-gsflnu33B083h01b1
atttgatcaaataatgatgatatctcattattggcactacctctgagacaaaccatatgtcagatttattactactaattcctccctttgcaagtctagatttttgggtttttgaatggtaggtttcaacgaaagggatttttcactttattgaatatggatttcttttgttctgtaggttttgcacttcatcgaatatggattttgcaattctttattgagtctatagggtttgtgctttgtatatattgctgtagttgactacttttttgctact

SEQ ID NO: 54756 - DNA, 256 bp, Gossypium hirsutum
  Clone ID: uC-gsflnu33B084a07b1
tcgttcacgcgtccgcccacgcgtccgcatggcagaattttacagagagacaatgcgagcatcctgatattgtaaatcttcattctttacggtgatctttgttttgtaccataaataattccatttttcgggagatttgtaactagtgcagatgttagaatactagtttagattctaggtttacaaatattgctacagcttcagcttcatattttttattttttttctctgtttaataaaaatatattcttttctt

SEQ ID NO: 54757 - DNA, 357 bp, Gossypium hirsutum
  Clone ID: uC-gsflnu33B084a08b1
tcgtccactcacacgaattaacaagaaacacccggcttcataggccttgatcgactatagaactacatccagaacggtgcacttgtccgggtacgagtcatgaatagctgttattgctcattgtagagtttggtgtgtgtttttagttatgttgataatggtgtgttcttcagtttgattgatttcattcattcttggggttaggttaaactagtgtttcttccttgtatttgtgtgcttgggcatctagatttgtgtgtttatggcgcatttggtaatgaggtaggatttcatatgttatatatgagttaattttttgcaaaacacttctatttagcgtcatctaacttcaattta

SEQ ID NO: 54758 - DNA, 278 bp, Gossypium hirsutum
  Clone ID: uC-gsflnu33B084a09b1
tcgtaaaaaaaaaaaaaaaaaaaaaaaaaaagagggggaatttttaaacaaaaaaagctattaaatcacaaaaaaaaaagaacaaaaaaaacacgaccacataataagtagatccggccgggcgttctcggggttccatctcccccccctgtcccttgaatggcccctcctctttccacggggtccctaaacttaaaccccgcggggccgcgctttcccaacctgtggcccggcatacccccgcggttccccaccttaatttcctcgggccccccccc

SEQ ID NO: 54759 - DNA, 276 bp, Gossypium hirsutum
  Clone ID: uC-gsflnu33B084c01b1
tattttaggaggaccaacacacagacgaacaaagggctgagtaaaaagaagctttgagcctttcagacaaggatggtgaaggctgcatcactacaaaagagcggggaacggtgacgagatccctaggacaaaatccaactgaagcagaaccgcacggaatgatcaaagagggcgatgctgatcaaaacgagcaccagagaacatagccgagaccactgaaatataaccgcacgcgaaaaagaaggaataccgaaactcgaggaggaacattaagga

SEQ ID NO: 54760 - DNA, 123 bp, Gossypium hirsutum
  Clone ID: uC-gsflnu33B084e01b1
cacgtgccaaaatgcaaaaatcatgaggaaattgttgaaacctttcagcgttattgcaccaactcgggaatgggttagtattcacaggctctaacctgtcaatggtctgtggctaagctttac

SEQ ID NO: 54761 - DNA, 494 bp, Gossypium hirsutum
  Clone ID: uC-gsflnu33B084e03b1
tttgttactctactccattggtggatattttcatgcaagcatgcaatgacatggtggactttcacattgccggattttttcaagcccttcattctgaagatagttatctccgaattcaggatgatacactctctcagcaaatgtcaactttggatattgctaccaaggaaaaccttgagaatcttgtgaaagtcggacaagaattgctaaaaaaacctgtttccagagtgaatttggagaatggtcaattcgaaccagctggcacggtaacaaatgaggacgctctcatcagattagcagaagttctttccatggagaagcggcttctagacatgagatcacctcttggaaactttgcgatgaaggagaataaaggatgcgctcagattaataacacaatgacctaatctagttagttttaacgtaagtggtcttcaatgcaaagtcacgtagaattgctagtagttaatgatgatgatctaagttgacggtag

SEQ ID NO: 54762 - DNA, 421 bp, Gossypium hirsutum
  Clone ID: uC-gsflnu33B084f06b1
ttttttctgagcttagtgtcaacaacaatggcatttgtttagatggtagtgaaatagaagatgatattggcagcgagataggtggtcgatcccctgccagcatgcatgcccgatgatggtcagggtgtaaagaccatgaggtatggcaatacattaattgtttttaattctacgatatttgacatttggcatagaaccaattcccaggaagaaccaccaatcgaatcattattctaatatcaatgtaaagctagttagatttgcttactgttttgtaatttgcaatcattgtattattagggaaaccaaggtagatgctagacatatttcttctcctattccgatttctaacacggtgggttgttatgaaactagctttgaaatggttaaatcttgtcaattgaaaaccagggtagatgct

SEQ ID NO: 54763 - DNA, 512 bp, Gossypium hirsutum
  Clone ID: uC-gsflnu33B084g12b1
tctttggagagcaggacaaggaatggagagaggaagggacacaaacaaaggggggctttaagcaaacactccaggaccaccaagcactctggagaaggaaaatctctttcctgcagggctataaccagatccctacatcgctaggtgcagggaaagggatgcagaccacctaacgcaacttcaaaggcattgacggaaaggaacaactaacccaaagaatcatcttcatcaaagatctggaaatgaagacccgagtccgcatataaggccatgaagctacaggcaggcgccagtagatgaacgaagatggcaactgaaaaccctcatagaaacagggagctagctctcaaaaggcagacctaaacagaaagcctacaagctaccacagagtatgatggcaaacaactaaactttacaaaaagcaaaagataggcacactgatgaaaaaaataaaacacgctagaaggaaggctaaactaaaaaaaggaagggacataccaaaaaagggaaag

SEQ ID NO: 54764 - DNA, 517 bp, Gossypium hirsutum
  Clone ID: uC-gsflnu33B084h10b1
tcgtgagcctctagagtcactatcaccaccagggggtgtcttacaagttcataattttttccctcatacatctttcctttgaaagagcatgagtagatccatttgttgatcaaggaacgaaggtaaactagacctccctaaactttctctgctcaatttttatgtcttgaataaaggtccatatttccgatctatccatagggcctgatttagctttcttgatcacagttaaggagtcaccttcaataaccacttctctcaaacccatctccactcccaacttgacagcctgaaggcatgtaagggcttcagccacgaaaacagatagtacatactcatttaaaatcacccttgtacctattattctagatctgtcgtctttaataactaaccccgaatatgattttgcgatgtgagccttaaaagctacatcaaaattaatttttaagaaatgagcctttggcgatcttcacccttacaccccacttttgaaacagttaaaccttcctccatttat

SEQ ID NO: 54765 - DNA, 393 bp, Gossypium hirsutum
  Clone ID: uC-gsflnu33B085a02b1
gcgctgtctcgcgcagaacatcgagtgctttaacgaggagtgttcagtctgtctctaccctggacctgcataggataggattacaagactcggatgacactactatagagctaatgaccgggcaaaggaccagtgtggcccgcaacggaagaaactgcctgtaggacagtgcattggcgtttgaactgcaagctatggaaggggagtccgccattattgctacatagctaggggacagggtactcaagatgaaggggagactcactcttggaatcgactgccaaatgaaagagcatgaggcatagccaggaccttcgcttgatgaagttgatgcatggagtgaacctattgctaacgacgtggatgcccagtgcacctacgttgatgaggatg

SEQ ID NO: 54766 - DNA, 290 bp, Gossypium hirsutum
  Clone ID: uC-gsflnu33B085a12b1
tccacgcatacatgaaaaaaaaaaaaaaaaagaaaaaatacataaaaaaaaaaaacgctgacctagaacaagacacccagaaaccgtccatggagcctaaggtgacttatctcctgttttatctcctttctatgttcggcggtgggccgattttgactgtggtcagggtacactcctggcggtcataagcttccctttcgtccgcatctgtgagtgtgctcctgcgtggccacgcccttatgacgacagtgacgacgctgttgcccctacgcttctgccatgcgtttttc

SEQ ID NO: 54767 - DNA, 386 bp, Gossypium hirsutum
  Clone ID: uC-gsflnu33B085b10b1
atcacgcatccgtactaaatggtcaccaaagctgtgtaataggcagcctgaacgaatccggcggtggagaaaaagaccaccgatgccacaatatccttggatggaaagaaaccgaaggccgggatgaagctatcaatagaaggctgagccaccgttgacactatgtaaaagaatgccacgaagagtgtggagacttacaagatctacatgtcataggttcttaaacaagttcaccctgatatgaggatttcaagcaacgctatggggataatgaacaggttcattaacgatttctctgagaaacttgctcacgaagctccgaggctggcgaggtacattaagatgcccacgattacttcatgggaagatcaagaccgctgttaggc

SEQ ID NO: 54768 - DNA, 224 bp, Gossypium hirsutum
  Clone ID: uC-gsflnu33B085d02b1
ttttcgcgtccgctttaatttattcgagcatagatatgtggccttgcgcatgattgatgaagctctttctatctatagtgggcatgcatttgctatctggcggataatttgatgtactatgggcactattagcaatttaagcatctatttgttccatttgcagaacgagtctacaagagatagatctatatttggggccaacatatctgtgatgaaatgggaaa

SEQ ID NO: 54769 - DNA, 267 bp, Gossypium hirsutum
  Clone ID: uC-gsflnu33B085e08b1
ttcccaggctttcgcacagccatgagcgccggtagagaacgcacgatcacttgttattttgacaccacacacaccggtaacaccgcgtcgtgcaccgccgcatcgggcccagcaaagatgccccagaccacactgctaagtcttggagcatatgcgcacgtgccgtctgttgatgacacaacggcctaagtgcatgtccagagacacttgctgccctgtactacaagggcgtgttggacatatacgctgccatatgtgtctgtacta

SEQ ID NO: 54770 - DNA, 389 bp, Gossypium hirsutum
  Clone ID: uC-gsflnu33B085e10b1
gcgcgcgtgcgtgccccggcgcggtttccgggtgtagacacacgcgtgcgcacacgcgtgcgcatacgcattctcccactcgtacggtcactcttccggtctgatgcataagaaacaatgggagaccaaaggccatgtacagctatgctttaaggagggaacagagtgaaaccattctaggcttgatctccctgcaagttggatctgcatgaaggaagattatctacattggtgaccgtaaagggtggaacgagccatttcatcctttgtacctatggtctagctgatggctccattatcattgctgctttttcctttggtgtcgacaggaaaagtgggccagtgatgcccgtcgctatcttcgtaggtttgtgggtgttgacatgatt

SEQ ID NO: 54771 - DNA, 416 bp, Gossypium hirsutum
  Clone ID: uC-gsflnu33B085f03b1
cgaaaaaatggtacatggcgatggcatctactgaaacgtagctgtgggcagcttatgtggcggttcaggttgcctgagaatgctgatacgtgtcagagcaaggctagcatgagacatatggttgcttgctgcaagtgttcccaaactggacgggaaacaccccggtgtcaaggctatcgacatttctggctaaacgattgaactgcggttcctaaaccgtgtgttttaacactggcagatctgagctcagtccccactatgcgcgatctatactatatgcgagtttacctatgtatgtataaacgttttaaagaacgttgggattagtaatggtcttggttttgcaggttggtcttttatgtatctggaatcaaaagtaacatctcaatttcatacaataataattaaaaacgggc

SEQ ID NO: 54772 - DNA, 390 bp, Gossypium hirsutum
  Clone ID: uC-gsflnu33B085f04b1
ttaccaggttcaactgtttatggtgggttgactggtgctggtgcggcgggtgggtctgttgtctaaagtggagggtcttgatatatataatgacataccaattatcatgttataccaactgaactgtattcatagactgattattatagcttgtctctcttttgtgcttattctagaaactttcaacaacagtctgcgacatactcattgccaatatttgcaattacaacattgactgcaaatataacacacttctacagtgaaccatgacaagaccgtgtgcgcaaacacttcttgctgtattctcaactgcctacatacagactatatatactgtatctctactattgcatgacctcacatcttatcatcagctttccaactttgata

SEQ ID NO: 54773 - DNA, 321 bp, Gossypium hirsutum
  Clone ID: uC-gsflnu33B085h09b1
gttgcctgcctggttgggattgtcctttgaaatttccagtcttcaatttataaagtactttcaggtcctatgaatgttcttaatcttttggtatgctctttcatttttcttcttctagctgggtgagtcatgtataccactatgtgtaaataccctttaaatggatttaggtaaggtggctgttgaaatcattgagtgcatgaccatagcaccctaagagcattggttggatatccaatcattactttgttttagatattcaacctcctacctcaatccagaaattgtaatgatgtattatcctacaccaacattgaaccc

SEQ ID NO: 54774 - DNA, 123 bp, Gossypium hirsutum
  Clone ID: uC-gsflnu33B088a09b1
ttgtaaatttctgtatactaactcaacctaatcttatgtcgctgtattggttattccttgtcaatattttaactacttgtttgtatgcattgttaagattgtaattgaaatgcccttttgctc

SEQ ID NO: 54775 - DNA, 219 bp, Gossypium hirsutum
  Clone ID: uC-gsflnu33B088b09b1
tctgatgctttgttcagaaggacccattaatgtcagatattctctcagtgattaatagtgaaacggtttccactcttactgaaagtgttcgcaaaccactctcctgtcatccttttgtttcaaatctctttggccgctaggaagctgagtgaagtggtgcaagaccagcctcagcttttgacatacccaaatggtccccttctttctgccaaattttcc

SEQ ID NO: 54776 - DNA, 400 bp, Gossypium hirsutum
  Clone ID: uC-gsflnu33B088c02b1
ttactttcctggtgttaaggaatacttacaaaatggtgggttcaagaaaaatgtgccttttttgcaggaactagttgtcatggaaggagtagcccattttatcaaccaagaaaaacctcaggagattagcatgcacatttatgacttcattaagaaattctaggttcttgcccttctcttgttttcaactcttcccttgaagcttgtgacccaataataaggccagttttataccattgcaaggccatttgcttggctctatttaatgctttccctgttttatttgaactactggaattaatatttttgcagtgctttgtgtacggttatcagcttatggaactcaatgctgttctgatttatatataagaaatacagacatccaacaacgttcttcaaa

SEQ ID NO: 54777 - DNA, 352 bp, Gossypium hirsutum
  Clone ID: uC-gsflnu33B088c09b1
tctttttttttttttggattcttaatcaacgacaatggattttgcaggtacatggaattgtagaggaatgtacaacatcgtctgttcattcaacagggcctaccaagaatttgatggtgcggcaactaatgttcttgaaactatggaatcttgagctgcccaaaagacggtggccaccgatgctgcctaggagaactctacggagaaatggcaatgatgcagagtgggttgagaccgagctgaggagttatgcaagtgcataaaacataggatagggtcctagtgcattgtagatgaagcgactggctatatacggcgcaaggtaatgatagtattgtaaaggatggatgcc

SEQ ID NO: 54778 - DNA, 256 bp, Gossypium hirsutum
  Clone ID: uC-gsflnu33B088d05b1
ttttatgcgtccggttgaatgtaggatatgccaagatgaggatgtagactcgaatatggagaccccttgtgcttgctgtggcagcttgaagtatgcgcattgcagatgtgtacagagatggtgcaatgagaagggcaacactacctgtgaaatatgccattagcaattcaggccaggttataccgcgccacctccctcgtttcatattgggcgtattccaatgaactttaggggcaatttgggagatatctaggag

SEQ ID NO: 54779 - DNA, 308 bp, Gossypium hirsutum
  Clone ID: uC-gsflnu33B088d06b1
tgcttccttagtgggtccctagataaatcggccaagctatgggacacaagaacattgactcttatcaagacatacggtactgaacgcccagtcaatgctgttgcaatgtctccccttcttgaccatgtggtgcttggaggtggccaggatgcatcagctgtcacaactaccgatcattgtgctggaaagtttgaagctaaattctatgacaagatacttcaagaggaaattggaggtgtgaaagggcattttgggcctataaaagctttggcttttaacccagatgggaagagtttttcgagtggagg

SEQ ID NO: 54780 - DNA, 157 bp, Gossypium hirsutum
  Clone ID: uC-gsflnu33B088d07b1
tgaactcaaagggctctttggtaagattagaaaaaaaaatgggatagagctaaagacaaagaaaagtcagtggatcaacatgatgctgcttactattagtttcatgtaggcattagaagggtttaaaggagggtgaggggaaaacatatgcacggta

SEQ ID NO: 54781 - DNA, 494 bp, Gossypium hirsutum
  Clone ID: uC-gsflnu33B088e04b1
ctggattatcaaattttattcccgtcctaattggggacaaggacgtttgttctgagatgaaggtgatacagcagggatttgatgcctctcttttttggggaggatcacagatttctgccaataggtcgtcatgtgaaacatcaactttgcgacaaaaagcatattctgaacttgttttagatatagcatggttattgagggagcctaaatcggagaattttcaagaaactatggcctcttctcaaattcagagattcaattgtttattgaattttctcatacaaaacaaatcaactgtcattttgaagaaagtcttacaaaatcttaagaatgtgatggaggaggctgggtttaatggaaccgatgatcctgatacaaggttattaaagaagtatatggattacggtagagatatccttaataacaagcttcaagaaggtgaaaggccggtgcttctttcagagtacatcgagcaagaaggaaaatggaattct

SEQ ID NO: 54782 - DNA, 451 bp, Gossypium hirsutum
  Clone ID: uC-gsflnu33B088e05b1
gcaggtacaaagtagattgtgaaggaaattggggggcaactgaatatttgaatagagtaacaaaaaggttctgctttggagttcataaaaatatccagaggaggacatggtgggcacccgaattctgatattaagattcatacttcaattcttttttgacagttaacttgttattgcttggttttcataggatcagtgatggacatcattcagcttcattgtttagtttctggcattggtgctcatgacataggcagagggaacgaagacaaaataaagagtatagagggactaaatggcagatctttggaaaggcccttatacagaaaacgaggaacaaatatgcctttatggtttttggagccttacaggaatcatgtgcttttggcaatttaacctccctggatagaattggcagagattgctttttcctctaacttgcggaatgctt

SEQ ID NO: 54783 - DNA, 245 bp, Gossypium hirsutum
  Clone ID: uC-gsflnu33B088e11b1
tccacgcgtccgaacactccctttttccccatttattctctgctagggtttcaaaagaaacccattcatgcgccgccaccatgaccgtcgctcctccgccgtggacggtggtcggagcggtaccaaaaggggtttttccttggtttaaaaaaacatgttttgaaggacatgccttctcagccggaaaacccgagagaaagggctcctcttccgtggacggttttaaccatggggagggagggctc

SEQ ID NO: 54784 - DNA, 332 bp, Gossypium hirsutum
  Clone ID: uC-gsflnu33B088f01b1
ttcatcgtccgcccacgcgtccgattcattcaatcagcgatgttaagctacttgtggcatcaactgcatcgggttctagctgctcaaccgtgtcattatcatcttctgctgattccatgtcctctcatgcctgaagaggttgggcttcttcttcgtgcattgggttatccttctaaaacaattatctacctggcaggatctaaaacttttggaggtcaacgtcttctgatccctctacgtgccattgcatgggaacctagttcatcgcactacattgtgcagcaaaacagacctgtcagacttagtacgttctgaagcacctttgcctgctg

SEQ ID NO: 54785 - DNA, 491 bp, Gossypium hirsutum
  Clone ID: uC-gsflnu33B088f03b1
tgttatatcatacccaactattggtgatgcaccacacatgaaggttattgcagacgagaatcctatgagggtgcgaaacgcaacacagactctggatcttcattatgaagcagtggcagatggcgtggctcaaccagctgagcagaggagagcggtgatcgaaaaggaacaaatggagaaggcatcagccgctgtcgctgcaccatcatgagttcagattagaacatggatgctcatacataattgttattgattcagaaatgggtattttatgaaaccaagagttgattccacttgcaggccattcaagtcattcattggctcatacgggcttgaaggtgatcaaaaccccaaataggtcaaggttcaaatgcatcgagattttgtgtgtataaagtacttttcatccgcaaaacacggggttagggaacttcgagtttgccagaattggcttgcctggtgagtccgcccaactcatccatcaggttctg

SEQ ID NO: 54786 - DNA, 384 bp, Gossypium hirsutum
  Clone ID: uC-gsflnu33B088f07b1
ttgttcacgcgtccgccccatagccaagaccttgcttcttctttctaagcaagcacctttaagccttaaccttcatccccttttatttgttcctttcaagatttttcattaaaaaggctaaagagaaagcatgggaaattctttttttttaggaatattggtaacaatatccctgtgccttcagttgtttggtggaggtgcttatggtcttggtgtgaattggggtaccatggcatcacataaacttccccccaaaacagtggttcatatgttaaaagacaatggaataaagaaagtgaagctttttgatgcagattcaactactatgaatgctcttgcatgaagtgatatcgaagtcatggctgctttttcctaatgattcat

SEQ ID NO: 54787 - DNA, 213 bp, Gossypium hirsutum
  Clone ID: uC-gsflnu33B088f09b1
tccacgcgtccgcccacgcgtccggtcgtgtgtggaattcgttttcagttattgcctccatgttgggaacttcttatttggctttgtcccactccttttccttttattttttttcgttgaagaagctgagccgcacgaaatatgtaaatttacaagtaattttagtattgtagacaaattttaactatctatcttatgttcttccttgtgttg

SEQ ID NO: 54788 - DNA, 210 bp, Gossypium hirsutum
  Clone ID: uC-gsflnu33B088g01b1
tttattcgttcgttatgtttgtctttgctgtcctgcctttccttactgattattgaagcgcgctccttttatatttataacgtgaacatgaaagttatacttactttgataaacaagaagaagccgattaagtggtgcaaagtctattacattgacaagctgtcacgttgaacgcatgtctttaattcaatatctaatctttaaccactt

SEQ ID NO: 54789 - DNA, 355 bp, Gossypium hirsutum
  Clone ID: uC-gsflnu33B088g05b1
gtaatagtcagatctcatctgcaccacacgacgccatggtttaggagacctgcagggtgttatttcctaaggaagaataagccatactccaaatcttgaaactgacgacgggtgccagatcctatgaccagtatttgtggcgaaaccatgaagaaacaaggttgtgacgggtaacttttttgtgttcacatttgaggatcgcttgaaagatacgaactcatgtgagggattgctagcttgcccgttacgcctcatccaagagcaaggtatacccatgtaggcatcgaagctttaaatttcccagggctggttccaccctaacgtgtatcccatttgtaaccgggatgcttttaaa

SEQ ID NO: 54790 - DNA, 240 bp, Gossypium hirsutum
  Clone ID: uC-gsflnu33B088h02b1
gttgatgatcattggtcaccggggctgctgtggacagagctcataatggattgttcaaacgactcagcctctgggaactaatgattgcagagctactagcaaaaggaccgagagatgctcagaacgctatgctttctggcggtgccgatggtggatagggtgtgatattgcactgtaacaggcttctggcgctacaacccgttactgctaaagtaaagtgcatgccagaagctggcttgt

SEQ ID NO: 54791 - DNA, 454 bp, Gossypium hirsutum
  Clone ID: uC-gsflnu33B088h03b1
ctcactcgtccgccaagctgtagccatggtggaaagggaccaagtaaggcctctagcgccggctgctgacgctccaaccagtgatgacggagaggctgctttgcaactcaaaaaagtcagacgcaagaaactcatccgatgttgcgcttgcatcgctgctttgttcatcatcttagccgtggtcattatagtgttaattttcacagtgtttcgagtcaaggatccgatcatcaaattgaatgccgtctcacttacaaatctggacctaatcaatgctttcatccctacaactggggccaacatatcattaatagccaacgtctgcgtgaaaaatcctaacatagcgtctttcaagtataggaacaccaccactactctctattactaccgcaacgaaatcggggatgcttgaggccctgggggcaccggaaaggcccatcgggccatacagatg

SEQ ID NO: 54792 - DNA, 368 bp, Gossypium hirsutum
  Clone ID: uC-gsflnu33B088h06b1
gatacatcatgtgcatttctttattagtctcacatgattctcactctgtgcctcctttttctctccaatgttagatgaatcgatccaggacgaaaaaccattcttatcagggatggtggatggaagcaccaatttgccagtcaacctttcttgcttagagctgaataaaccaagcttggatgagaccaaccagcgttgttctatttgatgtcttgtctattctactagaggaaacttgatttttagttagagaaaaatgcaggttaaacacttcacaaggccaggacgtttatcgcccttttgtgttgcctgaggaaggaagcatgaattcctgaggcccaccacatttaactcttttgagcactttt

SEQ ID NO: 54793 - DNA, 505 bp, Gossypium hirsutum
  Clone ID: uC-gsflnu33B089a07b1
tttgttatttgaaagttgctgactttggagtcagcaagctgctcaaggttgcaaacagagttaaagaagacaaacctgtgacatctcaagagacttcttgtaagttttctacactgggcaaaactctttatcctccatcgttatctatttatacttggggttttgcttgtgaattattggactagccatctgatttggcctttgttgagaaaatcagaggcaggtagcaggatttgttgttttgattcctaattaactgtttgattaacttgtttactggagaagtgtgttaaaatgatgactaaagatgtttgtttcatgtcatctttcaaattttgcattttaatttgaatcaaataattgaaagctaagtatcctttcttttttaatggtaaatacatcatgatgtatcaatccttcctgagcagggagatatgtggcacctgaagtttataggaatgaagagtatgatactaaagttgatgtgtttcatttgctttgatat

SEQ ID NO: 54794 - DNA, 135 bp, Gossypium hirsutum
  Clone ID: uC-gsflnu33B089a10b1
tcggtcctatcgtactaataaccgcatcaggttttcaaggtgaacagactttggtcaatggaacaatgtatgcaagggaggctggctaaatggactctgaaccttgggaaaaggattggctctgagggctgggca

SEQ ID NO: 54795 - DNA, 481 bp, Gossypium hirsutum
  Clone ID: uC-gsflnu33B089b01b1
agtagtgcaactgcaacgcctaattctagcagtacaaccatgactccacctccatcgaccactccaagccggtatgagaaccagaagcgtagggattggaacactttttgccaatacctgcgaaaccataggcctccactctcactttcaatgtgtagtggtgtccatgtccttgagttccttaggtacctggatcaatttgggaagaccaaagttcacaaccagacttgccctttctatggtctccctaaccctcctgctccttgtccttgtcctcttagacaagcttggggtagcctggatgcactcattggccgactcagggctgcctatgaggagcatgggggtaggtctgaagggaaccctttttgagctagagctgtgaggatttacttgagggaagtcagggatttccaggccaaagctagaggtggtagctatgagaagaaaaggaagaggcctaagctgaaggtacctgtcc

SEQ ID NO: 54796 - DNA, 169 bp, Gossypium hirsutum
  Clone ID: uC-gsflnu33B089b06b1
gcgtattgatgttgatggagggccagcagcaaaggcattgaagccgaaattcaatgtcttctcaaagactgtgacatctcacacaggggtgcaagtgccggaattcgatattaagtatttcgtggctggtgctgtggcctttaaaggtgatgggggtgcgaactgaaac

SEQ ID NO: 54797 - DNA, 450 bp, Gossypium hirsutum
  Clone ID: uC-gsflnu33B089b07b1
tttacactgtattcgatttgttcataatgtgagttattcgttgtttttttcccttgaatatatgttcatggtattccaacttgtaaaaaaaaaaaaaaaaaaaaaaaaaaaaaaaaaaaaaaaaaaaaaaaaaaaaaaaaaaaaaaaaaaaaaaaaaaaaaaaaaaaaaaaaaaaaaaaaaaaaaaaaaaaaaaaaaaaaaaaaaaaaaaaaaaaaaaaaaaaaaaaagggggggctccttataaaaaaccaaacttatcactcccttgaattcacataaaaagtttttttttgggccccccaaaaataaataaggggccgggcttttaaaaaccaggagatggaaaaaaccgggggttcccaaattaatatcctttaaaaaaaaaatcctttttttaggatggggttaaaaaaaaaaaaagcccctacaaaaacccttttccaaaaatt

SEQ ID NO: 54798 - DNA, 306 bp, Gossypium hirsutum
  Clone ID: uC-gsflnu33B089b09b1
tcgatcggaatattatactcaatgattggtaccataaaagcacttatgaacaagctgctggcttgtctgctattcccttccaatgggttggagagcctcagtcactcttgatccatggaagaggaaagttcaactgctctactttaactactccaagtttagacgctggtatttgcaatgctacaaatccagattgtgagcctttcagattaatcgcagtccctggaaaaacttatcgattgagaatctctagtttaactgctctatcagtcctcagcttccaaattgagggtcacaattatgaca

SEQ ID NO: 54799 - DNA, 114 bp, Gossypium hirsutum
  Clone ID: uC-gsflnu33B089c04b1
ggtgcattggaggtgatttggaggatatagagccgagcacagttctatgaaggacccaagggaatgcggcggagacccgaaaagttaccccatgagcgagaaaaaggcaagagc

SEQ ID NO: 54800 - DNA, 382 bp, Gossypium hirsutum
  Clone ID: uC-gsflnu33B089c11b1
ttgctacgcgtccggagagattgggaaaaaaaaccatctcttcgtggagatggaaaatcgattcaggctacgaatctctcgcatgtttcgatcctcgtttggctcctgccggacccggaacgtctccgacgttgctgaaaaagttgtcccctcacttgaaaaccacaacaggttccggtgcatggagtcatcgtcgacgccgccacctaaggttcgacccttaccttccatttgcaaacccagataccctgaatctcatcaaccaacccaaggcacaaggcgtaaagtgtctgcttgttaccctccttttcttctctctgccactgattttgatggccgcaagtgtccttccgcttcccctatatcgcctttgaaccttttt

SEQ ID NO: 54801 - DNA, 304 bp, Gossypium hirsutum
  Clone ID: uC-gsflnu33B089d08b1
ttggtacgccacatggggacgtgtaattttggcggggcagcctacgaagacacccaagcacttagtgcgtattctatcctcctgtgcctatataatgacgcgcatattaaaatattttgtgcatataaactgtaactaacaaggtccacgatcgggagacgtaacgagatgagagactaatgcaagcagacagaggtgcccatctaatagcgactgaaggaattaaaaatagaggtgttactgatctgaagaaccgaggtcctcctggggctgaggctgtggcggttgaggagaggagattgac

SEQ ID NO: 54802 - DNA, 465 bp, Gossypium hirsutum
  Clone ID: uC-gsflnu33B089f06b1
gttctttttgacataggtcatgaggaggacatggttatagagctggcaaatgaagtaaggaaggtgcttgcaacattggggaatggggtttccaaggagaagcagctagtaggatctcctctgaagatgccactaaaatcccaaacccagacctacatccctacaagtcaattgcttctgcttcccaaagctgttgcaatggactcctagcttttcaaagaactctctagtctctaacagaagagaaggccagtaacttaacgagaagggcgaaccattatatttctgtttctaacctattccttcagtctaaatctagttcttctagtagagaagatttttttgtccaagtatatatccagagcgacatctttagggtcttaccagtattactactactgatttagcctgattgtgatcttggatattaaccgttaaaaggtcttagtttttgtgaaagaaatg

SEQ ID NO: 54803 - DNA, 196 bp, Gossypium hirsutum
  Clone ID: uC-gsflnu33B089f07b1
ttggataaagtacattcctactgtattggctagtgggattctgcacttggaaaatagatctttcgaaattgattcttgggatggtaaaaaggttcctgatgtgcttgcaaagtgcaatttgattccagaaacgggaaaaggtgacgctttcccctttggtatactgtgcacgaaactgttcgaatattgatatgct

SEQ ID NO: 54804 - DNA, 344 bp, Gossypium hirsutum
  Clone ID: uC-gsflnu33B089f11b1
ttgcctcacgcgtccgcttcatctgggcaaaggcaaatctcattaccaggcaaaggcaaatctctctttctaagatggatcgtaatcaagaccaaaatgcaattgtcggagtcgtggcttcagttttagcttttgggctctctggattaaaaattaaaaactaggaaggaaattgcttctcaccctcgtgtgaatcgagattatgaaaaagaaaattatattaatagtattttatatagtggtgaccagcattgtattgatatgataaggatgagacccggtgcttttttttaatttgtgtgatattctttgtatgaattttttttgcttctgtcatcataaat

SEQ ID NO: 54805 - DNA, 225 bp, Gossypium hirsutum
  Clone ID: uC-gsflnu33B089h09b1
tggtgtgtgtgagtacccaaatgtatttcctgaagagttactgggtttaccaccaatacgagagcttgagtttggtattgagttaatgctgggtacaacgtcaatatcgataccttcgtacagaatggcaccgactgagttaaaagaattaaaattatatcctgtttgctgtactttaagcgtcgtgttgtctatttaaatgcaagttttgatcatattgttgtt

SEQ ID NO: 54806 - DNA, 397 bp, Gossypium hirsutum
  Clone ID: uC-gsflnu33B090a06b1
cttgctttctttatcgttgaagtgcgccaaaatcgaagccttggagaagcgagttgatatggagatgggcaaacatctcaacttagtccaagtaaacaagaccctgactttaaacacatctaaaaaactagccctgccttgtgcatttcaggctttaatgaacttctcgaaagcttctgttcaggtctttgaggccatccatggccatgctcagccagaaatcccttgtaatgaagcatcagagacctcagcaaactaaatttgactgaactgtgaaatttgtatgaaatggctctttatttttgccgaaaactgtcaaatacttgatatctaagctgtaaaggaaacaaggactacaaggtttttctttgcatatatatagatgcacatttaattg

SEQ ID NO: 54807 - DNA, 495 bp, Gossypium hirsutum
  Clone ID: uC-gsflnu33B090a07b1
tggtatcgtaacattcttcagcatgatcttcgagtttcgagtgattacgttagcaagcttgttgggcataaatccgaggtttgtggattgaaatggtcacatgatgaccgtgaacttgcttctggtgggaatgataatcagcttttggtttggaaccagcattcacagcaaccaattcttaaattgactgaacatacagccgctgtgaaagccattgcttggtcaccccatcaaagcaaccttcttgcatcgggtggtggaactgcggaccgatgtattcggttttggaacactactaatggtcaccaattgaacaacatagacacagggagccaagtatgcaatctatcatggagtaagaatgtgaatgaaatagttagcactcatggatactctcaaaatcaaattatggtgtggaaatatccatcaatggcaaaggttgcaactctaacaggccatagttttcgggtcctttacctagccatgtcgcctgat

SEQ ID NO: 54808 - DNA, 225 bp, Gossypium hirsutum
  Clone ID: uC-gsflnu33B090b08b1
tgctacgcgtccggaacgataaccgagcttccattaatctgtttaccgataaatgtggttactccaggttccgtacgccggccattttggttaacccggtgttcgttcatcgactcactgtttcaaaccaagttaccgtgatcgaactttccctttcccgacgccgtgttgtcgttcctcttcgtgtatacaccaataaattcaaccaagcgcgggtaaacggcg

SEQ ID NO: 54809 - DNA, 344 bp, Gossypium hirsutum
  Clone ID: uC-gsflnu33B090c07b1
ctttcaccgaactttccaccatttttaagaaaaataaaagcttcaattccgcaaggttcggctaagccaattcccatccatggtcatcagaaagctcaatcggctggaattgtgtcagagcacaatcacactatccctcaatccttttggtagcctttggttaaattagtaatggttataaatggcatgtaataggttaaaagttattcaagtgatttggcttgttttgagtggtgccaagcttgttgtggttaatgatgatagatgatgacatgttttggaatggttatttgctatggttggcataggtttaaattaagactctgagatggtgtctgagacta

SEQ ID NO: 54810 - DNA, 445 bp, Gossypium hirsutum
  Clone ID: uC-gsflnu33B090d05b1
cttactttgactgcaaataatattgctcagatatgttacttggatgcacttcggttcggccttaagcggatattttttgccgggtttttcattcggggccatgcctatactatggacactctttccgtcgctgttaatttctggtccaaaggtgaggctgaagcaatgttgctacggcatgaaggttttcttggggcactaggtgcattcatgagctatgagaagcagggtcttgacggcttgactgtgaataaagtaccgcagaggatccccatcagtgtatgctctgccggcaataagatttattgctcaatgaacggtaaatcaaatggcaacgaaagtattgagtgtactgtatacggcacatagagatacagcgtacaagacagggattcttgtggaatatctaggtaactgtccaagagaggaactctccatcggagaa

SEQ ID NO: 54811 - DNA, 360 bp, Gossypium hirsutum
  Clone ID: uC-gsflnu33B090d10b1
tttcctacgcgtccgtggtactctatatcgacaggttgtaggcagcttgcaatacttatgtttaactcgtcctgatttatcttttgcggttaataaagtgagtcaatatatgcatcaacctcatgatgttcattggacagctgtgaaatgtatcttgagatatgttaagggtacgattgatcataggttgttatttcaagcctctggtctgagcttaactggctttagtgatgctgattgggcaagctcacttgaagatcgtaagtctacttccggattttgtatatacttaggggataatcttgtaggatggatgtcaaagaaacagagtgttgtcatccggtctactacggaagctga

SEQ ID NO: 54812 - DNA, 121 bp, Gossypium hirsutum
  Clone ID: uC-gsflnu33B090e06b1
ctttgtcaacagccgaccctactaatggtactgtaagtggaccggtgaccgtagcaaatggagtggtatttggtggttcgacatacaaagatggaccagtgtatgcaatggatggtaagag

SEQ ID NO: 54813 - DNA, 495 bp, Gossypium hirsutum
  Clone ID: uC-gsflnu33B090e09b1
tgagcttgggcatattgttgagtctcctattattcgtacggctacttccattgtgcctcttggttggaatggtattcctggcgagaagagtacggaacaattgaaggttgatattactggattcaggttgcatatgtgcactctggttcatgctcaagtaaatggcaaatggtgttcaactaccgtggaatcatttccttcggcaccagactactcagctgggagtggggaaccacccgaattacaaaaaataagagtcttagtaggagctcccttgaggcgacctcctaagcatcagacactagctgattctttgatgaccatgttcccttcaattaattcagagacagttaatctcaataaagaacatgatatggcatcatctcatcaagaaaaatacgtaaggccagaaggtttgagtgactttttcattttctgtactagtgatttttcaactgcgtcaaaggaggttcatgttagaactcgcagggtgca

SEQ ID NO: 54814 - DNA, 369 bp, Gossypium hirsutum
  Clone ID: uC-gsflnu33B090g06b1
catggttatgggacaaacaccggaactttgagcacagctctgttcaccaatgggctcagctgtgggcctagctatgagattaagtgtgcgaatgatggcacgaggtgcctgcctggttccattgcgggcactgtcaccaatacttgccctacgaacaatgctcttacaaacaatgctggtggcaggtgcaacccttccctgcaccactttgaccttcatcaggctgtctttcaacacattgctcagcacaaagctggaatcgagcctgtaatttacagaagggtaccatgcaggagaaagggagggataaagttcacaatcaacggccacttctactgtaacctagacctcatcagaaacgtcagcagt

SEQ ID NO: 54815 - DNA, 322 bp, Gossypium hirsutum
  Clone ID: uC-gsflnu33B090g07b1
tgataaagctgggtttatatccggaggatcatgaatggcgaggaggctacagtctggaaagcgatgactaaaacccctgcctccattgtgctaataatctacaaaccagtctacatacgagaattttaggtaccggtatgatcgtcatgagaatccatacaacaaaggggtcatcaggaacttcttggaggtattctgcaccagtgttcctccatccaagataaacctcagggaaaaggttccaaaggaaccagtcattgcaccgagaacagtgagtggaggttttatcagtccattcaacgggaaagctatttggtgacat

SEQ ID NO: 54816 - DNA, 376 bp, Gossypium hirsutum
  Clone ID: uC-gsflnu33B090g12b1
tggttcttttattaaaaaagaaaaaaaaagaaggagggtataaacaaaaaaacaaagagaaaaaaaaaagacagaataaaaacgttaactaaagaaaaactattgctgctaactagctacacggaggtgatcctgatgaaataacaaaataggggggggctcgtttttggggcccaggtttttctcgcccgtttttcggcctctgatgcttttatttggggtgcgcaagttaaatacgcggggcggtgttttccacgtgtcgataggggagaacctggggggtccccaaatttatgtttttgagagcgatgtcctttttcccaggggggttctattttagaaggggcccctttggttgttttttcaaaaatttggg

SEQ ID NO: 54817 - DNA, 158 bp, Gossypium hirsutum
  Clone ID: uC-gsflnu33B090h02b1
accatccattaggggggaagcatgaaaatgtaacaaatgagggttttttttttgtcagaaaagtgaaaagaaaatcatgttttgtcttattgaattaatggatgaaagaccatgacactttgtttaaaaagatccgagtattggattcatcttacaat

SEQ ID NO: 54818 - DNA, 171 bp, Gossypium hirsutum
  Clone ID: uC-gsflnu33B090h10b1
ctcacgcgtccgaaagtcgtaaccgtcgttgaggaagaagctgacttttcaagcactcgatacgacttcgtcaaatgctttgaagaatgcctgagattttacacagtctactttgaaatgcttgaagaaagcttcaccccaaccagcaatgagaagcttatgctgtagagg

SEQ ID NO: 54819 - DNA, 445 bp, Gossypium hirsutum
  Clone ID: uC-gsflnu33B090h11b1
tgatatttctttattgggacggtgttcgacctgaacttgtgatttcagaacctgaactaattaaagaggttttgaaaaatagtgaaaagacttttcccaaaaggaagcctaccattttcattaacaagctactaggggacgggcttgtgaccgtggaaggtgaaaaatgggtgaagtagcggaagttggcgaataacgtttttcatggggaaagcttaaaggacatgagaccagcaataattgctagcgttgaaacaatgctaaagaaatggaaaggccaagtaggcaaagagatcgaagtgttccatgaattttaattattgacttccgaagtgatctcgaggacagcttttggtagcagttacttggaaggggagaagatttttgaaatgttgaacaagttgtcaatagttctgagccgaaatctttcaacactagaattccc

SEQ ID NO: 54820 - DNA, 216 bp, Gossypium hirsutum
  Clone ID: uC-gsflnu33B091a10b1
tccgccaaaaaaaaaaagcaaaacaaaaagggagaaaatcaaaaacaaatgggagcaagaaccaaggaccgaactagccttcgaaactatacacgccgacggagagcgagagatcatgtcttataggaatcccagtgctgacatgctgcagacaccagaggaatagaatcctgatcctaaaagacccatcaaagaagaccactacggagcaataac

SEQ ID NO: 54821 - DNA, 351 bp, Gossypium hirsutum
  Clone ID: uC-gsflnu33B091a11b1
tccacacgtgcgatctgcttgatttaaaagggaggcctttcataagatagtgggaacaaacaaagactgcggaacggcacatgggtgagtaaatcagctgtagctcgttggatgtgacatgctactccgataacgggcgtgttccgcgagcttgtacacgcatcgtaccctgccttttgtaatgaatggctttgtttcctaagaggtcctctttttcttgccgccagagctctgtgattcgtaccacctggtccattggagtgaaacctccttgttccagtctcagtgcattatgttcttcctatgggttgatggtgggagaccccttggtgagcacttaagagagctcgt

SEQ ID NO: 54822 - DNA, 393 bp, Gossypium hirsutum
  Clone ID: uC-gsflnu33B091a12b1
tctacacctccagctaccgttctagacgatggactcttacaaacccgtgactgcgaccagataactactgcataggggaacgtagatgcaatagacctgccggtgatccacaacgaccagactgggaagacaacggtgctacccatgtcaatgaacctgacctcatgccaacatctacaggtttagtaactgcgaaaaagcactcacaacgcgctcatgccaacagttgaccatgctcaaacgcctactgggacactggcttgaaccatacattaaacagtatcagtgcattatgtaccgcagatcactgcatggcggaagaccctagaggagcaccgtagcggtttctagtgatgctgaattgcactcgcctgaccggctgagcctaagctg

SEQ ID NO: 54823 - DNA, 484 bp, Gossypium hirsutum
  Clone ID: uC-gsflnu33B091b03b1
ttttaatgaagctattattgaagaacgagagcaggggatcaaagaagttcagcaacagatcagtgaggtgaatgagattttcaaagatctagcagatttggtacatgtgcaaggaggcatgattgatgacattggttcgaatattgaaaattcccattccggaactgtgcaagctatttcacatcttaaaagggcatccaagatccagagagcaaattcatcaacaaggtgtttgctggtgttaatctttgggatcattctccttattttcatcatagttgttgtggcttaagcctacagatttggcatctcgagcttaaaagttctccgaagcagtgagtcaggtggtatgccatccaaagcatacagtaatatgtataatctgtaatactaattttttatgctgtaggtaaagaccctctatggaggctctctgttttgcagcaaagcatgtaaaatagattgcctcgtgtaataaaatttc

SEQ ID NO: 54824 - DNA, 272 bp, Gossypium hirsutum
  Clone ID: uC-gsflnu33B091b08b1
tgtccaaacactagaccagtggtcctgaactgggaaaggatataagacttcgaagccttttcaccatgagagctaagcggaagaagaagcgtatgaagaggctgaagaggaagagaagaaagatgaggcaaagatctacgtaggctaactttatcttaaagccagcaattcggtctatgctggtatagactataggttgcttaaatgataccccaatataaaaggactgcagttatctttaaggaaactagtcgaagaaaccggaagctttt

SEQ ID NO: 54825 - DNA, 335 bp, Gossypium hirsutum
  Clone ID: uC-gsflnu33B091b11b1
tgtccacgcgtacgcccacgcgtccgcaacgggggctccgtactcaacgatccggaggaacagcgccgccgcatggtcgagcagctcgagcaggcgcatgcccgcggcgagaaggaaaagcagctcgacgaggaattcctcgacgccatggaccagggcatgccgcccgcaggcggccttggcatcggcgtcgaccggctgatcatgctgctcaccaacgccccgtcgatccgcgacgtcatcctcttcccggcccggcgcaacaaggactgaggcccggagacggaaaaggcagccggaaggctgccgtgtctgtcgaaaacctcttacttggc

SEQ ID NO: 54826 - DNA, 287 bp, Gossypium hirsutum
  Clone ID: uC-gsflnu33B091c03b1
ttttgaggatcgtctaatgaagtggacctttaaaactgtgaaacgctatcgagaaaggtggtgcatgtttaatgataacctacaagccactgctggagtggcacttgctgtattgttaggaactgtaagatacacaaggaggatctttggatgattttccaaaccacatgatagttatggagagagcccgaagtgcagggattgctgttctatagatggatgatcaagccgatgtgcaggatgacaggaaacgcatatacatgtggacataacaccttcactacttg

SEQ ID NO: 54827 - DNA, 231 bp, Gossypium hirsutum
  Clone ID: uC-gsflnu33B091c07b1
tgagcctcttgatggcaactggcctacaattcttaagaacacatttgtagaccgtgcttgatgcaccactaccaattatatacttctcactcagattctcagtcaccctcataatgtcctcgtatacatgaagtgccatattcatgtgaaggatcaccaatttcggtcttgagtaagtaactgccgtcaagaagtccatgaatcaataacaagggccataaatttcaatag

SEQ ID NO: 54828 - DNA, 479 bp, Gossypium hirsutum
  Clone ID: uC-gsflnu33B091d04b1
tttacgcgtccgctttggtctgggtaccaactttatgttttctttctcctttcagaaaaacacttccttcatcctaagtaatttgtatctgtttcagacaaagagaaaatctctagttttgaacaagggctgtgaaaaggagaaatagatggaaagaaagggcttagttttatgcagtgttgtcgcctttctgggagtattatcagccgctactggttttgctgctgaagctactaggatcaaggcttcagaagttaagtttgtatccactacacaatgttcttatccccgaagtcctgcacttggtcttggcttaactgccgctgccgcacttctggtagctcatataattattaatattccaactgggtgtatttgctgcaaaagaaccagtcgaagttggaactcctactggacaaaagctcttgtcttctatgttatttcttggttcacatttgttatagctttccctctcttgc

SEQ ID NO: 54829 - DNA, 337 bp, Gossypium hirsutum
  Clone ID: uC-gsflnu33B091d08b1
tccgatcgcagtgcaatgaacaacggtggcgccgagtcgtccggtgcgttaagttctcttcatgaacttcgttccgctttagcaataggattcaaaatccgagcgttttgttgcacagtttgtttttggacttcctcaaattacctttggtcaattttaactgaaatttagacctgattttgacttcctcaaatttattgttctcttatctttgaatttttatgttcggcgctctacttgcctaatgcctttctcggacctttcatttcatttttgttaaatttgatagtgtattttgcttttcattgagttgtattatccggaagaacggttcatt

SEQ ID NO: 54830 - DNA, 358 bp, Gossypium hirsutum
  Clone ID: uC-gsflnu33B091d09b1
tccacgcgtccgataaccgcctatatgcatgggcaagttaaaaggaccccgattccacacgctgcaaaaaataaatagtgcacgacaaatatatgctaaatacgaggacctgatgaggtatcgaaacttcatttcgaactaacaacagacattatagagcatacaaggaaccataggatactttcttaaaagaatgcgtgaaaaggctgcgagcggtaatgacaaactaatacccttaaaaggatatgatcattcaaacctaattatgtaaattgaactaacactgatttggcgcatcccgatggtccataacaacaaaggctcatactagaatggcaatggaacaggctatgaaatg

SEQ ID NO: 54831 - DNA, 272 bp, Gossypium hirsutum
  Clone ID: uC-gsflnu33B091e10b1
agaaacacacacactccttgacagagctcaactatatcaaattcacggagaggttgacaagtgtggcagctgcgattgcactgacaagagccagtgtgtgatgaaaggtaacagcttggtcatagagactgaggagagctacatcagtaccgacatgaagaagcctctgtcttagaacgatggcaagtgcaagggcggaactagctgcagctacacaaactgtacatgtggcagacactaagcagacacatagaatgatgaagttcgggagc

SEQ ID NO: 54832 - DNA, 245 bp, Gossypium hirsutum
  Clone ID: uC-gsflnu33B091g09b1
tccgaaaatgtgaaaacctctgcctgatttgtggggtatatttacatatccatgcaattaatggaccagcttttaatggattcttgatatattttaagacttgtgtttcctctgcaatgctgttatggtatattgagcaataaagctggcgggtgctggcttagagttttaaagagtagtgtggaaatgctctgtaagttaaaacattgcagaggcctgctaagtgatgcttcatatgaaaactt

SEQ ID NO: 54833 - DNA, 325 bp, Gossypium hirsutum
  Clone ID: uC-gsflnu33B091h01b1
ttttgagtatactaggttaaaggcattgaaaatggcttttagtttctttcgttcatttccaatttccagttttcccgtacactcaaaatcgaaacgcttctcatatgatgggtcaagctttcataggttaattatttcttttgcctcacaatgtgaagctacaaacaaaatttctattgaagatgatatcgtaattagacgatcggctaattacgacccatctatttgggattatgattatattcaatcactcagaaacgattttgtacaggatgaatcatacaaggaacgagcaagcaaactaaggaagaagtgagggatgatg

SEQ ID NO: 54834 - DNA, 227 bp, Gossypium hirsutum
  Clone ID: uC-gsflnu33B091h03b1
cctcactcgtccggcaaaacatgtcatagacatgttgtgttggtgcatcatgggaggaaacaataaaataaagagcatggacaataaaatattagtgttagtaggatgagaaacaaaaaaaaaaagaaaggatatgtgtgattgtacccccccttgccgtgagttgaaggaaagaaatacacaaaaataagataaaaaaggaaaaggtaagaacagataattgttac

SEQ ID NO: 54835 - DNA, 503 bp, Gossypium hirsutum
  Clone ID: uC-gsflnu33B092a01b1
cacctttatttaagtaaacccaaaatcttgattccgaatgagattaacgataaaagggagttgataaatcagcatcagaaacaagagtatatagatacagctatgcagcaagatagaggaggaagagggagtgagcaaggcatgaagcagaaccagcagcaagatcaaaggttgaagccgttgacgggcgagaatcagcagcagcatcctcctcaaaagtgtcctcgttgagagtatgttaatacaaagtttcgttactacaacaattacaggctctcgcaacctcgttatttctgcaagacttgtagaaggtattggactcaaggtggaaccctaaggaacgtgcccttgggcggtggttgcaggaaagggaagcgcacaaaggttatatcttacggtgaaaattgaaggtctcagacgatgatacctcagcagcaagcagtccagcaacacagcttgacatcaccgcatagtgtgatctgttctaatactatgatcagcgt

SEQ ID NO: 54836 - DNA, 549 bp, Gossypium hirsutum
  unsure (1)..(549): unsure at all n locations
  Clone ID: uC-gsflnu33B092b03b1
cccactcgttcggcaacactgttagcgtacctgttggaggatgggctgtcatcagattcgtagctaataatccaggttaattttccaacatccatcatttacttttttcttttcaactagtttttgtcaacctagtactctgggaaaagcaaggataattttttagtgttgaataaaatttttaatttttatagtttatatttttataaattttaaaggattaaatgaaatttttataattttaaaaagttaaaatataattttattttaattaatttaaaattttaaaaaaatttaaagaacttaaatgagaatttatcattttaggggcgggcccatgccctagaatcccctctgctagtatttgaactcaattgtttcaatgcatccgaaatgaacaggtgtttggtttatgcattgccactttgacgggcacatgtcaataggcctgtccactgccttcattgttgagaacggaccaacttccgacacaaccttgccttcnccgccaacggatcttncacaatgctagacattttttggtttatt

SEQ ID NO: 54837 - DNA, 400 bp, Gossypium hirsutum
  Clone ID: uC-gsflnu33B092b05b1
ggccaataggaatggcaacacaaaaaaaaaaattattttttttaaaactaacaatcattagtatgataaggggacagaactatttaaggttaaggactatttaaatttaatttcaaaggagacagaactagcatgcattggtacttccatgttgacaggcaacacccttttttcaaccaatctataaagggtaattgctatatcaagtccctgaacattttatataatcacacttcaattcagtaccgccaatttatcaagtgacaccactattttttaaaaaaaaattagagaaaacattgaccggtgggacaatcactttggaggttcaagagttacgcacgcttacatacgactgcatagaagatctaaggcgtggaatagattcacttaaattagc

SEQ ID NO: 54838 - DNA, 440 bp, Gossypium hirsutum
  Clone ID: uC-gsflnu33B092b10b1
tttattcccacgttactgctgagttctacaatgacgatggtgccatggttgcagttggtgcgcacactagcctcatctccacccaacatgatgagactgtttcctacgatgacatcgctgctgacctcacggagcatgtcatcaatcctgtcatccctgagaagtgcctcgacgagaagacaatctaacaccttaacccatctggtcgctttggaatcgggggacctcacggtgatgcaggtctgaccggacgtgagatcattattgacactcatggtggctggtgagcccacagcggtggggctttctatggaaaggacccaaccaaggtgggcaggagtggtccttacgttgttaggcatgctgccgagagcattgtaacaaatggacttgcccagagatgcattgtgcacgtctcctatgctattggcgtgccttga

SEQ ID NO: 54839 - DNA, 118 bp, Gossypium hirsutum
  unsure (1)..(118): unsure at all n locations
  Clone ID: uC-gsflnu33B092b12b1
aaatangggactatcaagaaatctagagtgtttttgagttttgctgctacaaattgcagctcaagcttttatatattgtgggatcatagaagaaaagctgtgtgatgctgatttacaa

SEQ ID NO: 54840 - DNA, 553 bp, Gossypium hirsutum
  Clone ID: uC-gsflnu33B092d03b1
cgccctttatttttttttttttttttttggagacaaaccaagagcagcaaccgatatatatttttataagagtttaaccaccaccgatgaaagcgtaaaccgagccaccatgaacgagctgtgaaaaaccttaggaggaaaggacagttcgatagccaccagatggttcacccactatgaaagcgacgctcgaagacaatctaccagaagatgaaccccgagacatggatatggccgtggctaggacaccagttaatacccaaccaaggaaagagaagcctgaaccaaagccaccagtgtatgaaccaccaaagaaggaaaagcctaagcctaagccaccggtttattcaccaccaaagaaagaaaaaccagaacccaaaccaccagtttatcagcctccgaagaagcccccagtttatgagcctaaaccaccaaaaccaccagtttatgtaccaccaaagaaagagaaaccaggacccaagccaccagtttatggaacatcaaagaaaccacgtatggtcactatccaggacacccttcattggggaagcct

SEQ ID NO: 54841 - DNA, 386 bp, Gossypium hirsutum
  Clone ID: uC-gsflnu33B092e06b1
gactctagtttgacgagaaatgatctctactgaactaggagatcgttaaaagagtgattcagacttgacttgggatcattgcaactgaagtaacacatgatgaaagccatactttaagaaaataaaagagctgccaaaagaacaggcatctgtagtgatatatgggcaaggatggatagccctactgtgatatacttgtgtctatgattgtaccctgagatagccattatgctggaggtgcgtttttaggttaccaatgcaatttccctccagattcatactttaaaagccttcctaaggtcaccgtttagggaccaaaggtctttcatcctaacataaacagacaatggaagcatttggtcttgatatccttaaagaacaattgg

SEQ ID NO: 54842 - DNA, 259 bp, Gossypium hirsutum
  Clone ID: uC-gsflnu33B092e07b1
ttactcgtccggaacaaggagctctaattgatgacatcggaacacatatcgaaaattcacaggctgctactgtacaagcaaaatcccatcttgtaaaagctgcaaagatccagagatcaagttcttctctggcctgcttgctcctggtgatattcggaatcgtgcttctcatcgtgatcgtagtacttgcagcctgatcaagaagagtaagttcaaagatcttgtcatttctagtcttggtatgtagtttgtggttatt

SEQ ID NO: 54843 - DNA, 445 bp, Gossypium hirsutum
  Clone ID: uC-gsflnu33B092f04b1
ctctcaccatgtgtccatcttgtgaaagaatcggcggtgttagcgatggcagttccaagaacccattttcagtattgccttcaaagcctcatttctataatcgcttcaccaatccttctgcagcatgttgattccaagttcgttaattacaacttaaaatcagtagccaaagaaaggacgagaatagaccctccccataacccctctattttttggttaagggcttgtagtaaatcaaaattagtgtggactataaattaatttgtagaaaaccaatagtaaaaattactgatcaatctcctcatccatctttaaatgttttttgtaaatattcattagaaattaagatatactagtatatctatctcttattattcattcttttgttccatctttaatgatacactacttggttccattgctttgataatatggaatgaataaa

SEQ ID NO: 54844 - DNA, 267 bp, Gossypium hirsutum
  Clone ID: uC-gsflnu33B092g05b1
gcagatgttttgacaagggctacttcaagatggaaatgggcaaaaacatgtgtggagtggcaacatgtgcatcataccccgctgttgcttgatctgagggagaaatcatgaactagttcaaagtgccggcttaacagcctacaataaggtccaagacatgtaaaagaagcaaatgtattgtacacaacaaagacaatactgcaaattttcttccattaaatgcttgatgtgtaactaatttgccaatattgaaaaatatatttatat

SEQ ID NO: 54845 - DNA, 383 bp, Gossypium hirsutum
  Clone ID: uC-gsflnu33B092h11b1
cttgctcgtcccttctaactttggttcttaacacagctcaaattatcaatcaaatcatgtaatttatcccaatttcagatttcaggcaatctttgttctaatggccgcaatcaatgtctctccactcttcacctcctcttcttcacttcgcactttctcttcttatgctccccaaaatacccctaccctttccttaaactcacgctttgccccttccctgtctttcccttccttttctctgagacctcccatttccacaaaaactcgctctttaataatcgcttctgctgtcaagaacctctcggaggtcgaacccattcccgtcccggccctcccgaggtatttgccgttaagctcccttctgatgctggagtctacgcccg

SEQ ID NO: 54846 - DNA, 344 bp, Gossypium hirsutum
  Clone ID: uC-gsflnu33B093a06b1
cttatataaaaaaaaaaaaaaaaaaaaaaaaaaaaaaaaaaaaaaaaaaaaaaaaaagacaaatctaacttcactagaaaaacaaacaaaaaactgcaactatagagaaccactatcaatttggcggggcagcattgacagaccccccttttacaaaccgcgtggtggggggtgcactctgggggcccccagctcccccccccggcgttgcccccggacctttcccaactggggcccccagaaaaacccccgggcccccccggcgtaccaacaggggaggagacccccccgtgcccgccccacaaattggttggggcccccacacggttttgactcggggcttt

SEQ ID NO: 54847 - DNA, 431 bp, Gossypium hirsutum
  Clone ID: uC-gsflnu33B093b03b1
ccctcgcgttcgcccacgcgtccgcccacgcgtccgaaaaaaaaaaaaaaaaaaaaaaaaaaaaaaaaaaaaaaaaaaaaaaaaaagggcggaacgttctgaaaggacccaagagttaggtacaagtgcatgaaaagaaataacttttatatagggggggggccgttttaggggatccaggtttatttccccgggcttgccaggtaatactttttttttgggggcccttaatttcatttcatgggccgccgttttccaccgttggggtgggaaaaacctgggcgttccccattttattggcttggagacaattcccctttttgccaggtgggttataaccaagagggccccacccggtggcctttccaaacgtgggtccactctgatgggccattgggcccccccttgtagggggtcattatccggggggg

SEQ ID NO: 54848 - DNA, 280 bp, Gossypium hirsutum
  Clone ID: uC-gsflnu33B093b04b1
tcgccctcgcgttcgcccacgcgtccgcccacgcgtccggttcactgattcttttctggtttcctttacattttttacatttgttaatttcttggtgttgttacctgcctatgtgtatacatatacatacatacatacgtacatggttagttttttagacttcgagttattttatttactgttgttatgtgatttgacattttatacacagcttggtctaaatatatattataagcgattttacttgaagcaaatacatgaatatctttcagtttttccc

SEQ ID NO: 54849 - DNA, 394 bp, Gossypium hirsutum
  Clone ID: uC-gsflnu33B093b08b1
gttgcggacagaataccacagaacatatgtgtggcccatagcacacagtactgacaaatcaagaaaagaaggaattgctggacaaatatagggtaataggaaacacagctacctcggattctggttagtgatccagttgcctaatattacggtgtgaagcggagacacgtggtgaagcttactcgacatagtgtgactgctgacacgtatgagacataccgatatgctggatgagctctttctttctttttaggggtcatgcatacggatgaaggccatgctcggcataggctactgaaaaaactactcaggctccacagatgatatgtggactgtcccatgcagctaataggcagctgggagtcatagcgtccaagactatatgcgtggttgc

SEQ ID NO: 54850 - DNA, 455 bp, Gossypium hirsutum
  Clone ID: uC-gsflnu33B093b09b1
ttttgatatcagatgcagtagccgatggtgatgatgcggaaaaagttccccagtcgggtcattacaaggaagaaagcacgcgggtggctgatcttcttgagaatgaaaagaaagcggttgaagaacttaaagtgcttgttcgagaagcgcttaacaagcatgagtttggtgggtttgcaatgccgcagcaacagcaacagcaacagcaacagcaacagcaacaaccaaaggatgattctgccaaagaagaaccaaaaccaaaagcagaagcagtcacagaaactgtggccgagacaaaggaagaaagcatcgctcaggctgaaacaggagatgatgaagagaaggttgctactgctactatacgatctgacgcagtggaagacgatggtgccaagactgtagaggccattgaagacactattgtttcagtctctgcttcagttcaaccagagcaa

SEQ ID NO: 54851 - DNA, 440 bp, Gossypium hirsutum
  Clone ID: uC-gsflnu33B093b11b1
ttcacgcgtccggttttccaagcaaaaatcatgccttactctgatgatcgcagcttggttacctgtgctgctgatggccaggttcgacatgctcaaattttggaacgtggtgttgaaactaaactgctagccaaacatcagggacgagctcataaagtggtcattgaaccagggagcccttatatattttacacttgtggtgaagatggattagtgcagcatattgatcttagaactgcagcatctaccgaacttttcacttgccgcccagtcgatgatagcagggcttacatgccatttatccatctcaatgctatcgctattgatccaaggaacccaaatctctttgcagttgcaggatcggatgaatatactcgcctttatgatattcgcaagtataaatgggatggctcacatgatattggtcaacctacagatta

SEQ ID NO: 54852 - DNA, 470 bp, Gossypium hirsutum
  Clone ID: uC-gsflnu33B093c02b1
gtttttgacagaatttatcttcttgaatgggcatggaacctgtatgaaaatgatcaaagcttgaacctggtcgatccgactttagccgaattcaacaaaaccgaagctttgcgagtgctcggggtggcactgttatgcactcaggcttcaccgtcaatgcggccactgatgtcccgagtcgtcgcaatgcttgccggtgacatcgaagtgagcaccgttacatcgaagccaagatatttgactgactatgatgttaaggatataacaggcactttcatgagtgaagaaacacaaacattcatggcatccagcagcaacgagaacacaatgaagagtaacaacaacgccgctacggtgacagatccgagtccctcccccgtaaatgtttctgggttcagtgacatcctcggagaagggaggtgaagagtccttggaatcagatgtaaatatcggatacggtgtatgctcat

SEQ ID NO: 54853 - DNA, 474 bp, Gossypium hirsutum
  Clone ID: uC-gsflnu33B093c03b1
ctttttcgtccggttctctcgatctaaagaagggattgctgtgtttgagatggagtacaaacattggatgcaagtacaaaacagacaattaggtgaactgagaactgctttgaatgcccagataagtgatattgagcttcggatagttgtagaaaatggcatgagccactattttgaacttttccgcatgaaatcaaccgttgccaaggctgatgttttctatgtgatgtctggtacgtggaaaacatcagcagagagatttttctcatggattggtggatttcggccttcagaacttcttaaggtgctcttggctcagctagaccccttgacagaccagcaaatttttgaagtttgtaacctgaaacaatcatgtcagcaagctgaagatgccctttcgcaaggcatggagaaactccaggagactgtatctgcgactttagcagctggtcaactgggccaaggtacatactt

SEQ ID NO: 54854 - DNA, 554 bp, Gossypium hirsutum
  Clone ID: uC-gsflnu33B093c04b1
gttctataaggaaaacatgccttgccatgggagctcagatataacgttgctgtcgggattgctgaaggcctagattacctacataatgagctttctcgacctgttattcatagggatatcaagtcttcaaatattcttctttcagatgggttcgaaccaaagttatctgactttgggttagcaatatggggaccaactgattcgtcatttctgattcaagctgatgttgttggaacatttgggtatttagctcctgaatattttatgtatggtaaacttagcgacaagattgacgtctacgctttcggtgttgttctactcgagttgctatcaggaaaaagaccgataagctttgagaatctaaaaggccagcaaagcttggtcatgtgggcaaagcctataatagagagtgagattgtgaaaggtatattggaccccaatttgaatgggaatatcaatgagactcatatgcataggatgattcgagctgcgacactttgcatcacacgttcaggtcgacttcggccaaagatgagacagatacttagagctgt

SEQ ID NO: 54855 - DNA, 542 bp, Gossypium hirsutum
  unsure (1)..(542): unsure at all n locations
  Clone ID: uC-gsflnu33B093c11b1
gtttttgcttgcatgtgcttctgtggacattttgtaaaaagagaatttgagaccttatatattcacagattctctgctgaaaccatgccaatcatgaacttatggaaaaactgcgcttattattggtcttttgcttttgttattgggtacattgtcaatcgtcctgattttgtgtttccaaggatgagctatgttatcaccggattaattgtgttccttatcagtgaactattgaatggcctcagtcacattcaactcagaaatctcagaagacccggaactagggacagaggcataccaacaggcctcctcttcgaatacgtttcctgcccaaactatacctgtgaaattactgcttgggttggattttccattttgacctgctcccttgccagtgctctgtttacattggttgggtttggacagatgcttgcttgggctcagaagaagcacataagatacangaaagaatttccaaactatcccaagtccagaaaggtccttgtacctttcatttactgagatcagattattctgatatg

SEQ ID NO: 54856 - DNA, 428 bp, Gossypium hirsutum
  Clone ID: uC-gsflnu33B093e05b1
ctttttcgtccggaaacttgcagcataggttactgaggaatctggtggtctggcagtgtagtgtactatttggtttctgctaagctgctgtgttcacaacattgcactgttttagaaaataatgaacggctctattggctggccgggctgggtacttgttttgttcatcatagcatccacaacattgactttttggcccattacttgtaatttcactgttcgcaacatatcatgatctatgtattttgctatatcatagatgtcgcataaggataaaaataaatgtattctaagatatgcacatgaagctgtatcatgtgctgcagtgaatagcatcaatatatgcattagcaaaatagctcgggtgctagcgctggagctacaggcgtcttcccgcgagtttaagcagtaaaaaaggaaataacgct

SEQ ID NO: 54857 - DNA, 516 bp, Gossypium hirsutum
  unsure (1)..(516): unsure at all n locations
  Clone ID: uC-gsflnu33B093e08b1
tttacgcgtccggttggcaccatttatagcaaaaacgagctcaaaaaattattggatatccatgcgtttcaccaagagagtggcgtaagccgaagagacgccatcatccttgcaggtgtgttggactttgctcaaaagaagttagagcagattatgacccctctcgataaagtttttatgctggatatagagtgtagtttagacgtccatactcttacatcagttgcagaaaatgggcacagccgtgttcctgtctatgagggcgagagaaacaatattgttagttgtttgtacatgaaagatcttgctttggtcaatccagaagagggaatcccattgagaactttcctaagtttttatggaaggcagattcctaaaattagatctgataaaacgttagattatgtgctgacagaattcaagagtggcaagagtcatatggcgatagtgcaaaggtgcgatggggctaattccacaaacgatgataacatcngtatagccactatggaggacgtg

SEQ ID NO: 54858 - DNA, 448 bp, Gossypium hirsutum
  Clone ID: uC-gsflnu33B093e12b1
gtcctagatcgcgagcgccgcccttccttttgtgttttttttttttttttttttgttttttttttttttcttttttttttttttttttgtttttccttgtttctgaaaaaccccaaaaaactccggagttatttttattaaaaatcggggcaacttcattggagggacaagggtctaaaacccaccgaagtggggacaccccccccaaagggctcccggaaaagaaaatctgaaccgggggggtcaagaccaggggggggggaaaaaaaaaaggccccccctccgaccccaaggaatcaaggggggcccgggcgtcttgggagggagcctcacccttaagagctttctcgaaggcccattaacctcccgattccatcttttgcattctacaaccccctcccaacaaacaaaaggcctgggggttatctccgatcaattttagagccct

SEQ ID NO: 54859 - DNA, 399 bp, Gossypium hirsutum
  Clone ID: uC-gsflnu33B093f06b1
cgcgcgatatcaaacggacaagctagaaataatgaggggagcacttttacgttgtattctgtcataaaccgcaaatcccaaggtcctatcagtgggtcgctcagtggagaattcagggggccaggcccactcacgaacccacatgaccgtcctaatcagcaatagccttttattgggagctcgtctccacaaggcatatgttctgaccgttttgcttctataattaggttgcgtgagaggattctgtcgtacccacgtccatggaatcgccgacaccggcagagtctagggttggtgcgtaaacatttgggattacgacagacgctcgttgatattacagggtgtgccgggagctgacagggagattcgaaggctctgatattgactgttgatgacccg

SEQ ID NO: 54860 - DNA, 321 bp, Gossypium hirsutum
  Clone ID: uC-gsflnu33B093f08b1
gcgttcttgcacacagaagagtgggcgtgagcttgggaagtttaaagcttgatgaggtcacctttacgctcatatgagggagaggattgagattaagggtgctgatctttaagcgagtcgaagtgaacagtagatggagggtctctgacaaccaatatatgatttggctaatcgaccgaatctgtgaggggggggaactggagaattgtagcgggctgtgatatgatcgactggggtttactggccactgggagggggagggactaggcatgcatgataggggtgccagatactaagggctggtggtgctagagactgtgg

SEQ ID NO: 54861 - DNA, 284 bp, Gossypium hirsutum
  Clone ID: uC-gsflnu33B093f09b1
tttacgcgtgggcggacgcgtgggcaagcacagaggcaacacccaagagagttttcatccgattgtagtcattggtgcctccctggggtgcctgacatttggaatgagatgttaagtgcaatggtctaagaatgtcaccaatggtgaattggctttttaactgtttctaccaaaaatgtagtctttaagtttcatcaagttagattagttgaggtttatgcattggttttggtctgaaaaagttttagagtgatggtatgtatgtttggcatattcaatttagt

SEQ ID NO: 54862 - DNA, 507 bp, Gossypium hirsutum
  unsure (1)..(507): unsure at all n locations
  Clone ID: uC-gsflnu33B093h03b1
gcggtttattgcattttcttgtttgtgttaccggctgaggatcctcaaacctcgcagaagaaagaagaaagagaagaatcatggaacacgataagttggattacgtactggttccattgggactgctgctgctttctctctatcatctatggcttctttgcaccattatcaagcatgctacaaggactgtcatcggcttaaatgcccattctcgtcaccaatgggttgtctccatgatgtctgatccgttgaaaaatggtgttctagcagtacatacaatacgcaacaacataatggcgtcgacacttttggccacgatagcaatcactctcagttcactgattagtgttttcgttagcagcagctcagactctggcaacacatgctccgaaatagtttttgggaacaagactcggctactgtcttcatcangtatttttccatcttgctgtgtttccttggtgcttttctttgcaatgtgcagtctattagatactacgcccatgt

SEQ ID NO: 54863 - DNA, 204 bp, Gossypium hirsutum
  Clone ID: uC-gsflnu33B094a06b1
gctagtccaacacgagtgttagacacctatactgggacataactgaagagcacaagcaacataagagattactatgccccttccctccctactttattattggctgtgattcttaagcactgacagctcaggtgggagtgtcgggtatgtgcacaagataggcctgattagtcttttttaaaggtgtccatgcatttggagact

SEQ ID NO: 54864 - DNA, 142 bp, Gossypium hirsutum
  Clone ID: uC-gsflnu33B094a09b1
cctttcgtaggctcgatatcccacctgctgcggaggctgtgaatgttgacaaaatggaggtggtggatgctgcattccctcttctaaagggtgttgacgctacaactgatgctgatgaggcatgcactggattcaatgatgc

SEQ ID NO: 54865 - DNA, 155 bp, Gossypium hirsutum
  Clone ID: uC-gsflnu33B094a12b1
tgcataatgggaccaaggcagggaaagctggggatgttacacagggggctaacgcgcttgtgtaatgaggagatataggcactgttgttaatcaataggatgagaaggttgaggcttagctaaccccatgacctccaagagagccaagtgagatg

SEQ ID NO: 54866 - DNA, 537 bp, Gossypium hirsutum
  Clone ID: uC-gsflnu33B094b08b1
tcggacgcgtgggttcaggttggtgatcttgcagtccttgatatatcagcaacaactattgagcaagatgagtctaatgttcaaaaagttccagctgcagagagtaaaggttttcagtttgatacagaagatgatgataaagtacttcccggtttccttgattcaataatcggtattcgacaaggtgaaaccaagtcctttccgtatgtatttccagaaacatggcaacaagaaaatcttcggggtgttgaagctcaatttactgttgaatgcaaagaactattctacagggatttacccgagttaaatgactctattgccgataagctttttcctggttgcaccgacttaaaccaggtcaaggagttgttattgcaaaagtgccaagaaatggagcaagctgtgaaagaccaaccaccgattatgcaattctagaccagctttgcagatggttgagatcatattccccaatccttgttgaggaacagggtagcagctttatgagctagacttttgagattaagcgaatgtaagtta

SEQ ID NO: 54867 - DNA, 241 bp, Gossypium hirsutum
  Clone ID: uC-gsflnu33B094c12b1
tcccacgcgtccgcccacgcgtccgcccacgcgtgcgtccacgcgtccggctacttgagcgagtcggcgtgcatattgtggagtgcgcttgtgttatcccaatggtccggaattgtttatggattatggtaaaatttgtattggaataccaacagtgagttgcttggaacatgactgctctccaaaccttgtaaaaatttgttaaaaacttcatttaaatgaaccttttcttttcttgttc

SEQ ID NO: 54868 - DNA, 330 bp, Gossypium hirsutum
  Clone ID: uC-gsflnu33B094d03b1
tctctttcgtccgctttgttacagagatgatgtatagtcaatatcagtgatgtttaccttttacttttcttcgctttttctttcttaatggaagcgatcttttatacttttattatatgtatgggtatcctctttctttctttctttctttcttttctttttcactttatggttttgcaattgtggtaatttccgttatcagtatgccccttgttgtgacgttgttcctctgccatcgccagcattagtgattctttcatgtactttgctgtcacccacattaccaaaagtcatcaattactaatatcatgacagctttttggtcttttt

SEQ ID NO: 54869 - DNA, 261 bp, Gossypium hirsutum
  Clone ID: uC-gsflnu33B094d07b1
cgggcccgggccgggaatcccgggggcgacccacgtttccttactataaaaaaagaccgagggataaaacaaagggcttggttgaagctgggagggaccataccaggccaacagctgtcgatggaaagaaggatgaaagggctcccaaaaggagagttacaggctagcattgggggagagtttctacctgaaagacccggcaggaacatagatgctgggactgaaaaacgctaccaacatttgaaagaagaagcgaggaag

SEQ ID NO: 54870 - DNA, 292 bp, Gossypium hirsutum
  Clone ID: uC-gsflnu33B094d12b1
tcccacgcgtccgctctaaaaaaaggtaaaaaggccgtctcaaaactaagaatagtgttgtggccttttatagccatttttacaatggttacttgctatttctttgctcacgtcgcaggtcatgaagacgtggaggaggaacgggcgtggggcgtgctacacacgagctgggacgaacgtgcgaggtggagtgcgtggtgactgccggtggctgcgttcgtgcggcgcatggagtagcctagggttcttttttgatttgggctattggagagttttgggctttagaattttg

SEQ ID NO: 54871 - DNA, 282 bp, Gossypium hirsutum
  Clone ID: uC-gsflnu33B094f02b1
cgcgtataattggagggtttgatcgatggactcggttgatattttaacaacaataaccgtacgtcaccaacatggactgatcttgaagggaggaatgacactgacgaggactgagagtgtcaagctattcgtgaagctcaaagctggaaatgaaattgcagaaggctggcaaggatccagacatgccaaagaggtctgatcgtgcctacgctgtgcacatggaggagtatcaggagccacacaagatggatgagcctataaactactacagagctgctgtgg

SEQ ID NO: 54872 - DNA, 279 bp, Gossypium hirsutum
  Clone ID: uC-gsflnu33B094g03b1
ttactatccagtttccacgtgcggaaaaacaacggtgagatcaaagtttattgagaaaaaaaaaagagagagtgttattgggactgaaaagttttgttgttcctgaggatggttgaggtgagtcaagagtggactatatcgaggactgttaagtcttcctctccatacaagcctccttctttgagctctagatttgttcatacgaaaggcgatttgaaagcgccatggtgacctatggctacctggcccgattcattttttctcgggcagactgtagaa

SEQ ID NO: 54873 - DNA, 343 bp, Gossypium hirsutum
  Clone ID: uC-gsflnu33B094g09b1
tcgtcacgcgtccgggcctgttcctcctccttcggtgaaagagtgcttcaaattctcactcaaaaaagcttcttaatggatctgggctgaatttgtgtagtcaaccatctaaccatagcaatggagatgggatggacttaacacttgttagcaacaaaaggaggaaagaactttttcggcatagaaacaatgatgattgctatttgcctgccattcctccatctgaccgaattccggatatggaaattcatcccagtgagccacactggttaaaagacttcagtgggataatgaaaaaagtgtatgggcccgtgaccgttgtaaaaactatctacgaagatga

SEQ ID NO: 54874 - DNA, 388 bp, Gossypium hirsutum
  Clone ID: uC-gsflnu33B094g10b1
ttgtcagtctcgagctcggattgaggagcttgagactgagcgaaggtcctcaaagaagaaactcgagcagttcttgaggaaagttagtgaggaaagggctgcatggcggagcagggagcatgagaaaatacgtgcagttgttgatgatgttaaagctgaattgaaccgggaaaagaaaaaccgacagaggcttgaaatagttaattcgaaattggtgaatgagctggctgcgaccaagttatcggcaaagcaatatattcaggattacgaaaaggaaagaaaggctcgagaactgatcgaagaagtatgtgatgaacttgctaaggaaattggagaagacaaggctgaagtagaagaattaaggcgagattcaatgaagcttcgagag

SEQ ID NO: 54875 - DNA, 319 bp, Gossypium hirsutum
  unsure (1)..(319): unsure at all n locations
  Clone ID: uC-gsflnu33B094g11b1
tancgcttttttctattctctatgcgtgtgtacagatattatatgcgtaaaaaatcaaggtacaaataatggctttttatagccaaatttatagaataaatggaaaaataaaaatacattttccctctgtcatttggctgtacatgctgttgttgcttcttctcgtatattcttttgtaggtatggagcaacggtcgtacggagaaagccactcatgaaagccgtgcgtgagttcgattgctgcactggtgtgttctagaaacccttaggtttctggcattttcaagcagctgggccttttgggccattcgtgtatagt

SEQ ID NO: 54876 - DNA, 331 bp, Gossypium hirsutum
  Clone ID: uC-gsflnu33B094g12b1
ttgttggctcttatttgggagttgcctacggtggggggacctaatggtatcgatcctctgtgtgtatactctgctggctacgaaattaatcaattacagtggtctgctgcgcaacctgattggattgccattgccttttccaacaaattgcaggttctcaaagtttgaggttttcacactgtattttcctgcttgaagtctggtcttctgtttcatagactgcttaagcttgtattcccctttgacttgaattgcggaatcagttttagataagcctgtcaattctgacttgatttgtggaatcagctttatgttagctgacaattctgcc

SEQ ID NO: 54877 - DNA, 263 bp, Gossypium hirsutum
  Clone ID: uC-gsflnu33B094h10b1
taataaaaaaaaaaaaaaaaaaaaaaaaaatagggaatcttaaaaaaaaaagggggcgatcactacaagaaaccggttggccgcttcggagatacgaacattgcgttctttttcatgcgtctcctaaagttattttatttgccctccattttaatttaattgcctgggaggagcctccgcccacccggctaaagccctttcgagactaaccttatttgcttgcttgatcatacacctttatgacgctgacttattgcccatgc

SEQ ID NO: 54878 - DNA, 442 bp, Gossypium hirsutum
  Clone ID: uC-gsflnu33B094h12b1
ttgtccacgcgtccgcccacgcgtccgatcgggagtgctttcgatagttcagatagtcggcttagcacggaccaggtcaaggaggttaacaggagaagtgcctcgcccctaattagtttagagtattctagtggttgggatcctttagacaaaggtaggagtgggaatgggttttcccaggaagtttttgagagctttatgttcaatttagaggaagtaaagcgtgcgactcagtgtttctcggaaacaaatttgttggggaagagtaatttctcagccatctataagggctccttaagagatagttctgctgttgtagtaaaatgcattgccaagacaagctgcaagtccgatgaatctgagtttctgcaaggtctcaagatattgacttcattgaaacacgaaaatctagtgaggttgagaggcttttggtgtcaaaggg

SEQ ID NO: 54879 - DNA, 282 bp, Gossypium hirsutum
  Clone ID: uC-gsflnu33B095c02b1
tgacaattttcttcataaatttccaccctgagaatggtggaaacgaagaaccccctccatctgatcaacctgttgaaaatgacggaaacgaggaagttcctgcttcaccaaatcaaaatgaggagcaggatccttaaagtttctcatttacagacatggctgttattcaaaatagataacctggtaactatttcggggattgaacctgaaatatgaaccacagtttggcaggggacgaagatgcataatgaagtaatgattcagaaatgctgggtttgattt

SEQ ID NO: 54880 - DNA, 276 bp, Gossypium hirsutum
  Clone ID: uC-gsflnu33B095d09b1
ttttatttatctttcgctccactgcactatccctattcttccacctttttcttttctttttttttaatgatcctttcttgccaaaaatacccaataattcctctggggaaaaaaaagattagttgagttcacaatcatgtcaggtgatattgccagagattctgctgaaggctcctcacggttctccgtcagccaccacattcaacctcaatcgcctccgatgagccggtacgaatcacagaaacggcgagactggtacacctttggtcagtattt

SEQ ID NO: 54881 - DNA, 489 bp, Gossypium hirsutum
  Clone ID: uC-gsflnu33B095d10b1
tttacgcttccgcccacgcgtccgcccacgcgtccggctaagctgattctgctttgtcttcttgctattttctgctttgcattaacaagtcatgcagcaacatatgttgttggagacacttctggttgggacataagcacagatattgattcatgggctactaacaagacattcaatgttggtgatgttctactgttccaatactcatcatctcacagtgtaagcgaagttaataaagaaagtttcgaaacttgcaatacaacaaatagtttgacaactttttctaatgggaacacaactgtaacactttcaaatgctggaaagaggtattttgtttgtggcaacaagttgcattgtcttggagggatgaagctttaagtaaatgtactagaagatgataaaaaatccgaaaccgttggtgctcccgaagctcaaccggaacctcatgctacgatttcccaagccttcttcgaagaccaacaatctttc

SEQ ID NO: 54882 - DNA, 538 bp, Gossypium hirsutum
  Clone ID: uC-gsflnu33B095e09b1
ttcaattagcagtgaagaagatatgttggcaacgccagttattcaaatgcccacaattactgcagttaaggctgtttccctctcaaatccgaaccaacatccatttcttcgcccacatttggttggtttttgtttgagaaaacccaaaatcccttccaccactcgaacagcccttttttgctgcaaatctcagcttcaagattttgcccctcttacttccgctgcctatggaacccttcttttctccggcggtctctttgcctttactaaatctgggagtaaaggatcgctctttggaggcctcactggagctgctcttatggcatctgcttattatcttatgcagtcaacagagacaaaagcaattggtgatgcccttggttttgggtctgccttccttttctcctgtgtatttgggatacgattggcagccactcggaaaccgattcccgcaggtcctttattaggtctttctatctgtgcattggttgcgtttacctcagcttatttacaagatcgtctttgacctttgtctttt

SEQ ID NO: 54883 - DNA, 289 bp, Gossypium hirsutum
  Clone ID: uC-gsflnu33B095e11b1
cctacgcttccggggaaacataggatacaagctgaactcaaaaggctagaccaagaagctagattcttagaggaagagctggagcacttggaaaagatggagaaggcatcaactgcatgcaaagagatgctgagtaaagtggaaagtacacctgatccactccttccaatcacaaatggtcctctaaatctgacgtgggatagatggtttgaaggtccccaggaatctcaaggctgcaaatgttggatactgtgacaatattgcttatttggatgactttttccctatt

SEQ ID NO: 54884 - DNA, 154 bp, Gossypium hirsutum
  Clone ID: uC-gsflnu33B095f03b1
ctttcttgacttatgtaaagaagactgttgataaagtatcaggagctatgaagaaccaccagatacccaaatcgcgtgcaaagattgatcactatattgagtcatctcagcggaaattgacaaaacttgtgatgggttatgatgataaggatgt

SEQ ID NO: 54885 - DNA, 112 bp, Gossypium hirsutum
  Clone ID: uC-gsflnu33B095g01b1
gagaagtttaatatcgctggctgctttctggcgtctctggcggggctaaacatagactcgcgtaacgtaccaaaacgagctggcgaatctgggagaactcaccctaacaaac

SEQ ID NO: 54886 - DNA, 174 bp, Gossypium hirsutum
  Clone ID: uC-gsflnu33B095g02b1
cccacgttttctcccacgcgtccgggaaatcaacaaaggtggggcttacactctttaaaggcgaatgacaaaaccaaaccattcttcatcatcagaagctgaaagctggagcagcaacaatactaataactccaattcatcattcccaacatcaacttctttggaaactgtctt

SEQ ID NO: 54887 - DNA, 126 bp, Gossypium hirsutum
  Clone ID: uC-gsflnu33B095g08b1
atgttgtgtaggataaaaggaagaccatagcacggaacattttacttaataacatggttgtgtacatatgacgtatggctagcatcggtgttgctacctctttagttcttgaatttttataatttt

SEQ ID NO: 54888 - DNA, 163 bp, Gossypium hirsutum
  Clone ID: uC-gsflnu33B095h02b1
ctcacatcctatcaactggatactgaattcaactcaacggtggattactttgatatctggaaacaatcttatttgaaaacttatgctgatgttgaccttgagcttaagcaccatcctggcattgatgctttccgtagcggcactacagctttgacgatcatca

SEQ ID NO: 54889 - DNA, 164 bp, Gossypium hirsutum
  Clone ID: uC-gsflnu33B095h11b1
ctacgcttccgcccacgcgtccgaccccatatcctctgtctctgagtaatacatacagaagaaaaggatgctgaattcagcccaaacatcttcttctcaatcctcagttttctgggttctggtttagggttatgggcgcacccgtttctttatatgaaacaatc

SEQ ID NO: 54890 - DNA, 159 bp, Gossypium hirsutum
  Clone ID: uC-gsflnu33B097a06b1
gaactgtgaactgcctgttcgggatctcgggggaggcttaattctaatggaccgttcatatacacaaccaccgacggggaaaccattcctatcatagcccgcccgtgacgaccctttccgaaaagcttccgctgaagaaaatcccaaggaattatggga

SEQ ID NO: 54891 - DNA, 341 bp, Gossypium hirsutum
  Clone ID: uC-gsflnu33B097a10b1
tcgtcttttttgaaagaaaaacccatccttgttggtgtctgctaaaccagaggcgttattcaacctccccttcgcctccatatcttcgaatcagatccccgaatcctcatcaaagcttcaatttcagtgaagcaaacaaagattcagaggctccttcaacaacagataagtctccctttccccttatagattcattttttcatgcaatagataaaaatgatgaaacagaaatgaaaatcaaggaagaacacgatctaaaatcaccttcaaactaatttcaaaatgatttttctttcagcattccatgtgtatttctgcgggaaaacaatgatccccgttac

SEQ ID NO: 54892 - DNA, 109 bp, Gossypium hirsutum
  Clone ID: uC-gsflnu33B097b04b1
acatcagatggttgtctgcctctttacctggttggagttaaatcaatagatgtcagtcgaaaattccgattgtatgtatcattcattttgattttactattagttctat

SEQ ID NO: 54893 - DNA, 107 bp, Gossypium hirsutum
  Clone ID: uC-gsflnu33B097c09b1
tcgtcccctttccataaatcttgcttcaaatgcaggcattgttaagggacattaacgttgggtaactactcatcaatggaaggtgctctttattgcatgcctcattt

SEQ ID NO: 54894 - DNA, 161 bp, Gossypium hirsutum
  Clone ID: uC-gsflnu33B097d05b1
catagttagaatccggcggatactcttctttagatgatgttatcacagttcctccttctaaaagagacaagatggagacatttttcctgggtgaaacattgaaatatcttgtcttgctttttggagattgctctgctatactacttgctttattttgcttt

SEQ ID NO: 54895 - DNA, 101 bp, Gossypium hirsutum
  Clone ID: uC-gsflnu33B097d06b1
catgccaagaaaatggatatggacttatctcccaagtttccttcgacgttcgtggcgacagaagatggcggatactataattggtcagttgccttttcttc

SEQ ID NO: 54896 - DNA, 165 bp, Gossypium hirsutum
  Clone ID: uC-gsflnu33B097d09b1
tcgtccacgcgtccgcccacgcgtccgcccacgcgtccggtctgtattactcatcgtacttcactgcacaaactctattgctacatggaccggcatttcttacataaagctgcgttttcatgttgaacaatggtgtcactcctacgacatccaggtggatccact

SEQ ID NO: 54897 - DNA, 448 bp, Gossypium hirsutum
  Clone ID: uC-gsflnu33B097e02b1
ttcatgcttccgctcctcctcccactttatgaggggggttatttacagcttctgcaccttcagctccaacttcttcacccagttttttctcctcccgcaacttcaccacctgtttctacacctccagcttctccacctcctgcatcttcaccttcagatttttcaccttccgtcactccttcaccagttttttcaccttccgtcacttcaccaccagtaacccctccacctgcaactcctcctgctacctcaccaccagcttcattggcttctcctccagccacagttccagctttctttccagtacaaacaccattgaccctcgcaccagcttcgcctaccgaggccccagcacctacccccggggctgcttcgccaggcccagctggcacagacactagccgtgccaatcaaaagtggaccgcacaaaagttgatgggacgcttac

SEQ ID NO: 54898 - DNA, 116 bp, Gossypium hirsutum
  Clone ID: uC-gsflnu33B097f02b1
ctcgtaagagccaacagaatctattggcattatgacggttgattgaagattaatcagtctaccaaaaatcacagggctgtcggtaaattgttctgtcatatccatcgtccacaatg

SEQ ID NO: 54899 - DNA, 119 bp, Gossypium hirsutum
  Clone ID: uC-gsflnu33B097f06b1
ccctcattgcatgcctctcacactggaatatgggaacactgtctcgcttgccccgacaaaggattatcaagccaacagattggttcctggagttcttcagctacccgaaggctcacact

SEQ ID NO: 54900 - DNA, 106 bp, Gossypium hirsutum
  Clone ID: uC-gsflnu33B097h07b1
ctcgctcacgcgtccgaaagaattcccagaaggtgcggttttaacaacaactgcgccttatgacactataaggtcaaaatcattgtggaccacctccccacttcct

SEQ ID NO: 54901 - DNA, 122 bp, Gossypium hirsutum
  Clone ID: uC-gsflnu33B098b03b1
aatagttgtgattaaatctcaattttcaacatagtagagggactgaaaccagaattagaccaaaactaaaaatgaccaatggttgccctttggtttctagtaatattctgtcgacaatgatg

SEQ ID NO: 54902 - DNA, 123 bp, Gossypium hirsutum
  Clone ID: uC-gsflnu33B098c11b1
aactccacgcgtccgcaaaatcgctccgcagcagggcttcttcgacgttccagtccccttccatgttcgaccagatgacgacgaaatgaggacgctttccgacgaatctcgaaacggtacaag

SEQ ID NO: 54903 - DNA, 122 bp, Gossypium hirsutum
  Clone ID: uC-gsflnu33B098d10b1
gcctgccacatctcgacctctttatgctaatcttcttcaagtagccccattcccacctactgcatcttcaggggtataggaattgcgatttcaatccactttacattctcggtctactccat

SEQ ID NO: 54904 - DNA, 240 bp, Gossypium hirsutum
  Clone ID: uC-gsflnu33B098e01b1
aaccctgacagacgaaacggaccagccgaggacagacggacgtgggacaaccacagggactatgggctcggaccattcgacggcgcagccaaagcagccaacgactatgaggactccatcaacggcccagacacgcacgaacagataaccactactgaatataaagatacatggcccgcttccatgtacttaaacaaggggtagaaagtagggaggaacacatcgggaaaaaaagccgag

SEQ ID NO: 54905 - DNA, 107 bp, Gossypium hirsutum
  unsure (1)..(107): unsure at all n locations
  Clone ID: uC-gsflnu33B098e08b1
gcctcnatatttcagaatttgcttcctttcctggtggcattattttctctcgacaccgctaacaacccaaaacgctctacaaggaagggcagtaccgaccaaaccag

SEQ ID NO: 54906 - DNA, 116 bp, Gossypium hirsutum
  Clone ID: uC-gsflnu33B098f12b1
gctgccacgcgtacggccacacgtgcgttaggcggcaggactctgactgtacgatcctccaagcagtatcctcaatccaatcatgtaaactaataaaggaaacttgaaaaaggaag

SEQ ID NO: 54907 - DNA, 112 bp, Gossypium hirsutum
  Clone ID: uC-gsflnu33B098g12b1
acctccacgcgtccggttctcttttgattgcacaaaaccaaatcatctttgctttgctattttggctcgttatgttaagaaactggattacgcacagctaaacattgaggag

SEQ ID NO: 54908 - DNA, 119 bp, Gossypium hirsutum
  Clone ID: uC-gsflnu33B098h03b1
tcgtgagaaacctcccaaggtttacccggctgaggatgtttagaaggcgcttcttaacaagcgcaaacctaaacccactcaactttgagtaagtttttcaccagggactgtgttgattt

SEQ ID NO: 54909 - DNA, 199 bp, Gossypium hirsutum
  Clone ID: uC-gsflnu33B099a07b1
tctttgtgcgacctactgtgagactcagctgggttgaaagggctgaagcgatctggcttcgcagctatgggaaacgttgaaggaggcgacaacggtgtatacgggccttatcttggtcactttttttacggctctagctctgtaatgggctcgttactatgtagcaaagggtctatttgggtaatccactttttcttat

SEQ ID NO: 54910 - DNA, 104 bp, Gossypium hirsutum
  Clone ID: uC-gsflnu33B099c05b1
atcactcagtccttcaagattctcaatgtctccacaactcaatagaatcaggtcagtgcatctcaatatgacccaggtggtcagagcttcccgaaatttctctt

SEQ ID NO: 54911 - DNA, 171 bp, Gossypium hirsutum
  Clone ID: uC-gsflnu33B099d02b1
cctacgcgtccgataatatttaataaataaataaattcatctaccataatattctactaatctgcatattattcatcttttatctacaactttccatggcttgctcaagcggttcatcatttggttcatcaaccttggtcacaatctcaggctttgatgatgtatttcaag

SEQ ID NO: 54912 - DNA, 114 bp, Gossypium hirsutum
  Clone ID: uC-gsflnu33B099d05b1
ttaggtcaagatggactgaagaatcctttggcggttcatttagcaatctatcaagcagtgtgactactcattctgtgcaaagttttaatgtagaaccattggttccttctaaag

SEQ ID NO: 54913 - DNA, 147 bp, Gossypium hirsutum
  Clone ID: uC-gsflnu33B099e03b1
tcatgcgtccggaggatttttggccaggatgcaaaaactagctcaacagcaaaatgagataattgaaactgtcaaccgtgaaagaaaatctcattagcaaatcactgcatatgagctcaacgctttgttctcccaatgtcaggagct

SEQ ID NO: 54914 - DNA, 156 bp, Gossypium hirsutum
  Clone ID: uC-gsflnu33B099e05b1
atagatcggggtcttcttcttgctcagatggaagcttgaagcaacaattagaggaattacagaaacagcttggaaagaaacagagattcgaggaggcagttatctttatcaattacttttttaaactccattatcctttagcttcttctatctttt

SEQ ID NO: 54915 - DNA, 257 bp, Gossypium hirsutum
  Clone ID: uC-gsflnu33B099f05b1
cctcgcgtccggctttaaatgaaatgtgggacattttacgcttcctcttccgcttaccttcctcagtctcctcttccttgctttcctcgtcatcttcttcattatcttcactttcgtgttctttgccctcgtcatcaccaacatcttcattttcatcttcatctctcatcctcatctttcaacatcatcctctcctttttcttcttccttttctcctgaatcattaccgcccgcttctctctaacttgctcttattt

SEQ ID NO: 54916 - DNA, 163 bp, Gossypium hirsutum
  Clone ID: uC-gsflnu33B099h02b1
gagtagcgtatgaagaagctcgaagattagtatgagcatcatttcgagactgattgcccacaccgcccttatggagagctcagagccaggaaatctacgcacaggctaatgcgaaaaatcgtcagaacccatagttctgaaaccttgggttgttgccgccatg

SEQ ID NO: 54917 - DNA, 370 bp, Gossypium hirsutum
  Clone ID: uC-gsflnu33B100a03b1
cgcgccgcgccgtgaattgccgggtccgcaccacgccttttgttattgtgtacatgtgacctatcttcggttctaaagtggtatctggattttgagccgtcaggagtgagaacattgacagcatcaccttgttatatggggagggcatgtacatgcttgagacaacgcgtcggggccggacccagaaacatgctctgggaataagggctatctcagatgtcatagggggagctaattggctgggacttacggtctttttattaatgtggtgacttgacttctgtttacactactggtacctaggacctgcttaaaaacacaatattcttgttagatggatgtatgaaaattatgtttcaaacctaaaatc

SEQ ID NO: 54918 - DNA, 324 bp, Gossypium hirsutum
  Clone ID: uC-gsflnu33B100c05b1
gtccgcccacgcgtacgaccacgcgtacgatcgtatacgagattgccccaagttagagcatcaaaaaagcatggctattgcaaattacagaagggattatttatggtctggtggtacagaggagaaatccgatttatgacattaagtgctctgaatacgctttggcttatatcaaacataaagaatgtaggaatgaataccttttacatgttgagttgtgggggccttaatgcaaatcgtgcttctttctttgacgtgaatactacgttcaattatggggaacatagaatgatgcgcctcattgatcgcttagtaagaggagga

SEQ ID NO: 54919 - DNA, 431 bp, Gossypium hirsutum
  Clone ID: uC-gsflnu33B100c07b1
ggaccggcccggaaggactggctggacccacgcgcgcgttactcttggggaaaccctggaactccaaaggtggaagcatttgaagaattgcactaactagaaggaaaaagaatgcgtgtcggaaacaccaagtgttaaaagacagaaaaaaggcggttcaaggcaaatgaagtgctcgtaaaaaaagggaggcgatgatgaaaaagagcagcttgctggaagtatggacaagataaatagcgagtgattttcttccggcttcaagaaaaaaccagtaatgatcattgatgacggaatggcagggagagggaaaacgacgacgctgcataggctagattgccatactcaagcttgaaataacacggggtatgtgatgaagatagaccccgctgaaatgaccctcacatgtgctgctgaaatagatataagag

SEQ ID NO: 54920 - DNA, 521 bp, Gossypium hirsutum
  Clone ID: uC-gsflnu33B100c08b1
cggcaccggcccggacttactggctggacccacccacgcgttttttatcgcttaaggtgactacattcacggtaaagaaagttgcataacgaaaagatgtggtgtgccaccgaataaacaagccactgacaatcatgtacgatgtgctaaagaggaagcaacagcagcacatgattggccgcttgctcaaggatgctatattggcacttgacgaggtgcagaggcacctgttcatagttggaaagaagattgaagaactcgaccgacatctatcaaaggtgtatttagcacatggatggttgaacaagggtacttcaaccgatgatcgtgtaagtatgctaactcgtgagaaagaaggactatctgaactgctagattcggaaaatcaactttacgacatggacaacaacacagtggaatacaaagatttcctaggcttggagcagtccttaaagaaaactgcttgggggaaaactccaaactacctccaacctattgcgatccgaatcgaaaaagctcga

SEQ ID NO: 54921 - DNA, 190 bp, Gossypium hirsutum
  Clone ID: uC-gsflnu33B100d08b1
tttggttcttgtccagcattgaataatgaatatgatatttatattaattaaagcaaagatatggctaaaaaacatggacacccttttcatcctaaccctctttgtttccactatatcctttgcagctggggctgctgctttttgggctccaagtttccatccccgtcattctcagggtttagtttttttt

SEQ ID NO: 54922 - DNA, 479 bp, Gossypium hirsutum
  Clone ID: uC-gsflnu33B100e10b1
ttggtttctaagatattccttccccttcctttcctttctatttcttcttctctccctctctttcaaccttcttctccactttcctttgttgctttttcaacaatggatgcatcttctacaagctcagtcaatgggttctataccttcttgactcgtggcatagatgatcttgaacgtgtttatctctctaataacttcatgtccatacaattccttcaaagggttctttcccttctccgatctttccactcccagctactcctcctcgtccaaaaactccaccttcccgtcggtgataagtggctcgatgaatacatggatgaaagttctaagctctgggaagcttgtcatgttattaaatcaggcatctccggcatcgaaaattattactcggctggctttaacatcatttcttcttttgataatcatcgccatcttactcaccagctttctagacaggtaatccgggcaattcggcg

SEQ ID NO: 54923 - DNA, 371 bp, Gossypium hirsutum
  Clone ID: uC-gsflnu33B100f08b1
tttatttttaaaaaaaaaaaaaaaaaaaaaaaggaaagatataaaaaagaaatatggccaatactactacaaaactattaaggcaggtcctcgggtggaaagagaatgacccgacttagctgggggtgcccctttttgggggcccaagtttatccccctgcgtttctgatagcttaggttttctttgggcgcccataattttacccatccgcccacggtttcccaccttcaatgggggaaaccctctgtgttgcccctatttaaacatttaggatggctgcccttttccacggggtgtacttaacattaaggggcgaccctactaagctttttgaaaaattttacgctctttttgggcttacgactgcccc

SEQ ID NO: 54924 - DNA, 464 bp, Gossypium hirsutum
  Clone ID: uC-gsflnu33B100g02b1
tcgttcacgcgtccgtcttcctatcatttctttccccctcttccctctctacacgcctaagatacctgaagatggaatctttttaattagttttcttttttaccgtcagcaagtgtttggagaaatgccagaatcatggccaccttcacctcctccacctatacttctgtctcgcctcattcgtttttaacgcacttccgtgctcgggttttcccatcctgtttctgcgggattaacccagggaacaaagggaattcggtgtctctgaagctgaatcttgttcgcgggttggtgtttggggaagataagaaaagggtttcttggtggtcttgttgttgcaagaaagggtgggacaacgacggggatttagcattggaggcagatatttggagttcatgaaaaatagtgacaaacctgaggctttttcagcaagaaagagctggctgatgctgggaggatggatc

SEQ ID NO: 54925 - DNA, 307 bp, Gossypium hirsutum
  Clone ID: uC-gsflnu33B100g07b1
ttgttattcgtccgtcacctatcatttatttgaggttttatccaagagatgagggtttgatcactcatgatcgagtacattacaattaccaatgaggagttgctgaggggtacgtaggtggaaattgattggtctacatgggagccatggctggtaacagaggcgggaaagctgtaaacaaacgagcggtatatattaagcttccgtgacatgaaatgacgcgacggggcatcggacgagccgatcgacaacattcggatactggaaggcgacagggaaggaacgaatggtgatggactcaagaaca

SEQ ID NO: 54926 - DNA, 391 bp, Gossypium hirsutum
  unsure (1)..(391): unsure at all n locations
  Clone ID: uC-gsflnu33B100h04b1
ctttttgccgcgtgccggtcgcaggacggactgggaattgggataggggagaaatggtttgggaaaaataaaacgaggaaaaattgagaagctattttaggatgtctttggggagcctcagatggagggacgccagcgactatattcacatcagtgaggagatcagattttgtaaatgaacggtacaggattcatgggaattctggagatcaatgctgtgacttgctgtgttttgcagtgggtaaacgtttctttaagctgacaaatccaatgtattacattgcctaaacaagcaatccttttgttggaagtcttcacttctagcatgcaaatttcatgactagattatcttaaacaagtgattttttttaatttctttgattttctgngt

SEQ ID NO: 54927 - DNA, 406 bp, Gossypium hirsutum
  Clone ID: uC-gsflnu33B100h07b1
cgttccggaattcctttgccgtcccacgcgcccggtcgatttcttttgcaggacaatgaccccagggtgtagtttttaagacaggtttagatggtatccgcctgcttgaccctagcaccagccgtactttgagaatatatcccattgagaacatcacaagatgtgaattgaccgacacatctacttttgcattttgggcttacagcctttgtcgacatttgaaccttttacggaacaggggtggaacaaaaccagtgaccctactaacagccctttattgtattggtgcagactctggttttcaggtccggggtattgggttctttagctgattctatttaactctttaaaagttctttctctctcttttgcagggatttgcaatacttttgtttttagataaact

SEQ ID NO: 54928 - DNA, 304 bp, Gossypium hirsutum
  Clone ID: uC-gsflnu33B100h08b1
tcgtttacgcgtccgtaactctattttcatgttatcgtgtttaggccagagcattacgccacacggcataaaatatgcatctcaaagactagatacatttgcatgtgttaggtatagaaaaaggtgcctccatttgggcgataacaacgtatgccccatagaggcttactggccttacactatgttgtcctttgaggcaaaaggcttaacaagcaattgaccccatcattgccctgtattggacaggaggattcttgggctttatggtccggagttatggattctctggcggttgaattgaaag

SEQ ID NO: 54929 - DNA, 540 bp, Gossypium hirsutum
  Clone ID: uC-gsflnu33B101b04b1
gtttattataatcggatcaatcattgagtttgttggggtttgtaattaggtagcggcgtacttgattaagaaacgaagaaaagctagatcttttgagccaatgcctatatatggtacccttcctttcggaggagcaagcccctatatcggaataagctcgaaatcagtcaacccccgccctgttcccaacttaaaccttaagttaaagatgccttttgctgaaatattagaggcaaccaataacttcgaggctaagttgttgattggggaaggaggctttggtaaagtctacaaagggattctaagaaatggtctcaaagctgcagtcaaaagaagtgagtccaaacatggtcaggggctgtccgaattccaaactgaggtaatgattctatccaagattcgacaccgccatcttgtttcactgatcggatattgcgatgaagggtctgagatgatactggtttatgagttcatggagagagggactctcagggatcatctatacaagttgggagggaatcccgagagatcatcttcact

SEQ ID NO: 54930 - DNA, 266 bp, Gossypium hirsutum
  Clone ID: uC-gsflnu33B101b05b1
tttattaccaaaaacagttagacaagttgaggaagaacccattcctgagcatgttcagaagatgtttgatgaagtaaaagacactgatcatcatcaccaccatcatcatggtcatgcccatggtcatgatcatgatcatgcagctggatttatggatgcatacggtcttggtcacacatggggaagttgagatgtgtttttccacggtcacggcgtgatcgcatggcccttggtcatgatcatgcatatagatttatggatgcata

SEQ ID NO: 54931 - DNA, 524 bp, Gossypium hirsutum
  unsure (1)..(524): unsure at all n locations
  Clone ID: uC-gsflnu33B101b08b1
aattaaccctctaactatatcgtatttatcacttaggtgcctaagatttttttttttgcaaaaatgatatttaaacggttaattttatcttattttaccaaatatagcatcatgttttattggcatcgtacacttttttagataaaatttaacgaaagtaatagtttaagcatatttttgaccaaaaaaattatgtacttaaattgagaaaattgacatagtttagacagtaattttgcagttaaacctttttctatttatttgatgcatatgaagattttcccatttattgatgttttatatttatatttatttatttatatcagtagtgaatattatttattaagtgttgtatttagttgataggggtggtactgaggtgctcatgagtcaggtcgagttcagattgagtctaagcgtgatattaacatatattatgcttgtccaaatccggccatcatgataaacaattntaatctttttttattattttaatatcttacatattntatgngntattatta

SEQ ID NO: 54932 - DNA, 519 bp, Gossypium hirsutum
  Clone ID: uC-gsflnu33B101b09b1
cgtagattttcacaccgagagctaaaagtacttcatcattacctggtacaccgattgcacattcaaaccccgagtccacgcacggggggcagaaaggagggatcaccggaccacccattcatcgttcgcattcagtgcctacacttaacaaagatggaagcataacgcaattggattcttttggcggtgtatttcgtgtaattcctacaactccacgagtagtcaaaggaacagttgtaacaacatcaaacatagttatcaaaagtgatatggatggaaacggtgatgatggtgaagatattcccgaagaagaagctgtttgtcgaatttgcttgatcgaactcggagaaggagccgagacccttaagatggaatgtagctgcaaaggtgaacttgcccttgcgcaccaagaatgtgccatacaatggtttagcatcaaaggtaacaaaatgtgtgacgtgtgcaagcaagaggttcaaaacttacccgtcactcttttacggattaaaacgctcagct

SEQ ID NO: 54933 - DNA, 402 bp, Gossypium hirsutum
  Clone ID: uC-gsflnu33B101b10b1
atctgggaaaaagcaaacgcagccgtaatgagcggatccactaccgcagcgtgtttagctagaagagcagttcacacagagagtgattaggattatctaccggcgagccctcaaagataccgtcaattggaccgaccatcgccacctcttctattaagatgcctttgatctttggggaacatgcgaaacccaccagccttgtgaaggatcttggcacaatggacataatgatagctgcaggccaagcaacctataataagtggcggcatcctgagccttatattgctccatgggctcctggcggttgcaagtgcactcacaacccttgtcctgcatttgagattgggattttatatgaatatggtagaggaggaaatgattaaacatgatctttctacccca

SEQ ID NO: 54934 - DNA, 259 bp, Gossypium hirsutum
  Clone ID: uC-gsflnu33B101c08b1
tttctttcccttaagctgccgtcattattgagggagcaacttgcattggagatgagggcaagggcacacggttttaaggaaaggactcatgagcataggcactgcggtgaagaggtagctggtactggaggtgactacgccactgtcacaagtgaccagaccggtcttacgggttcctcagactcccagttacataagcgaatccgtgtatgctgatgtccacaggactggcaaaatcgcagttgcacttatcggctgg

SEQ ID NO: 54935 - DNA, 281 bp, Gossypium hirsutum
  Clone ID: uC-gsflnu33B101d02b1
tttgatcactctctgggatatgaggggcgatgatgaggatcagctagcctgatgctgatgagatgtctactttcttgaagcgtggtagagagatgatgttgacatcaaaatcgaattagggtttggaaactcgtgttctttatcgaaggctttcaaaatttgaactgatcaagtcactgctttgttagtccaataatttcgatcagtttatttaaataaattatcaaaatcaaggtaagaaaaactcaatgaaccttctacagcatataaattgcaacaag

SEQ ID NO: 54936 - DNA, 511 bp, Gossypium hirsutum
  Clone ID: uC-gsflnu33B101d06b1
cctactcgtccggggagacagaaaaaatgctgaagaatggatgttagattatgcacttcaacaagtggttgctaaactaactccagaaaggaagaggcgagtagggctgcttgtcgaagcatttgagaccgtcattccggctataagttgaaatcatcaaaagtgctgatatacctcctccagcaacaaccagtcaaactggtgtcagtttacaaggtaagaccaaaagaagtggccatttcatgcggccaatctgaatgaaacagaagcatcaattcgttcgggtgaaacatcacagtaggaaaagaacagaaattaggaggtagcccttaagagtctgagaagttgcaagttccatattttttctgaaacctcaaagcatattttgagcatgcttatgatgggaaaaaaaataagaataccatatgtgtacttgtatcagtatggtgttgttagtcctttctgaaaactagagcaattgttctgataaatggttatggatgtcagagat

SEQ ID NO: 54937 - DNA, 457 bp, Gossypium hirsutum
  Clone ID: uC-gsflnu33B101d11b1
cttacgcgtccgctttccttctctctctttttccctttcaaatctctccccaaaagaaaaaaaaaacatcatggctatcgacaagaaaccaaacagattgcctcaaacagctgttatcaaacaaatcctcaagagatgttcaagtttgggtaagaaacaacaatgctacgatgatcaacaacaacaaggagggctgccattggatgtcccaaaaggtcatttcgttgtgtatgtcggtcaaaacaggagtagatacattgtccctatctctttcttgacccgacccgaattccagaagttgctccatcaagctgaagaagaattcgggtttgagcatgatatgggtctcactattccttgtgaagaagttgtgttccagtccctaacatccatgctcagatgatttttaaatggttagggcttttaatgaaaatgaagatgaagctgctccatttgc

SEQ ID NO: 54938 - DNA, 404 bp, Gossypium hirsutum
  Clone ID: uC-gsflnu33B101e09b1
tttgaaatgtcctttaacagatgcttgggctgacatacttgtgctgtttgctagagacggaatcaatgtaatgataggcccttactttaactgtcaaaactgaaacaagagacggcacaatgagcatggcacatgccggggcggagactattgcgtccacaatgtgaccatcattggcatactcgacaggatggccgtcatgggtattgacaccattggagtcgatgacctactaggagctcacacagtgagcatatctcactgggcgaagctgaagcttgggttgaactcagaggaggtcactgcattcagggcagaccatggaacacacatgctgcataaatgccctgatgaaatcccagaccgcaaggccgttcagtgtgtgagaaacgatcgtggtacac

SEQ ID NO: 54939 - DNA, 323 bp, Gossypium hirsutum
  Clone ID: uC-gsflnu33B101f01b1
ggatagtttattttattcgtgttttttaattaatttgtaaaaaaaaatagagaatatgatatgcattcttttcatggagttacctcatacactatcatccttttggtggaagctctccatcgcatgggggactccatggattcatgcatcaactattgtatttcctttttttgtctttccttacattcataaagtgtaatgtgagggaagttaaatgttggtagagcactgctctcgtacacaagtatgtcattgttggttgtttgtattgtttattagggctttgtaacaaaaaaaaatattagttccgaatttttaaccct

SEQ ID NO: 54940 - DNA, 449 bp, Gossypium hirsutum
  unsure (1)..(449): unsure at all n locations
  Clone ID: uC-gsflnu33B101f05b1
gagcttcctcttaagttttcattcaacatatatatatcttttagttccaaattttgatttttgatccatttttttggctttgtaaaggaagataaattctgggttttgtttgttctgattccaagtttcaatctttcattaagttttttttagcaaaatctgcttgttttcctagcagatttcaagggtttaaggtttgactgtggtgagggcttctggctattgatgaaatgaaaaagaacccattttgtgcttgtgatgatgctgaagatatatggtgttgcaagaacaatttgtcagggttcttggtagctctgctatgtgtttcattgacttgcagctctgttattattatgctgtgctaactactttgtttatgttcatcaattgccaagcttccagaaaaccagactgtagatagactnttaagactctatgaatttgatata

SEQ ID NO: 54941 - DNA, 373 bp, Gossypium hirsutum
  Clone ID: uC-gsflnu33B101f12b1
atttggcagagtctgttgggatccacaaggaagccctatcttacggtatcactggctacacaagtgccttcaccggctacagcttcacatgtagcgactgcacgtacaccaatgccggttccaaccatgaatatgactgtgaatagaagttggcccttcatctcatcaatacatcattatgaacgcactagtggctaccattagtgcaaggatctgcatgcacaaggtgcactgccatacctttcgagattgctgagggagttcccagatggaatacatatatcgacacctgtatctgatggtgctcaagcgactgatcccaaaagcttgactaatggtgcagcaccattgattacttttgcaactgcctata

SEQ ID NO: 54942 - DNA, 324 bp, Gossypium hirsutum
  Clone ID: uC-gsflnu33B101g01b1
tctgttttatttacacagggaaagaaaagcatcggtgcgggtgattaaatgaccagcgttggatcctgggactgggtggtcaactacaggcaaaaggttcacttgtagaggcatggtgttctaaatcaacacatgagggaggagttccatcgccgcgcttcggtgaatccctttcctctcccttcgtatcataagaatgtatgtgaaaatcataactacaaaaaataaacttatggttaaataaatatatacgacactcactttaaaaccttaaaagctttgcttctctattccacattatccgtataacaaacataccgctcg

SEQ ID NO: 54943 - DNA, 476 bp, Gossypium hirsutum
  Clone ID: uC-gsflnu33B101g03b1
accacttttccgattctctttccctttgtaaagaaagcacagtaaaaagaaccctcaaagccattaccaccattaggctagtgccaaaacttgagcaactctaccgccaccactgcgattagatggagactcacatgctcgcgcttcaactagagacttaactcaagacctatcgagttcagcccttagaaatctcatcccaaacttggattacagcgagggagacaagaattccactggcccattcacgacagtaaacacttgtcttcatatactagcctatatccgagccacatgcaagatccacagacagaaacacacgcatgagaaatggatcgagaatcacctttacaataattttgaagtcgactatggggaattcaataagtgtattccagtgtgcgtccccatataatgagaatgttgatggctttatagccagaaatatacaaggaaaaatacaagggatgtatttg

SEQ ID NO: 54944 - DNA, 358 bp, Gossypium hirsutum
  Clone ID: uC-gsflnu33B107a10b1
tgtccagtcttagatctcaaaagatggtccgcgctaaatttaccgaccgtaagcagactcgcgggaaggctcattaggaagcaacttgctaccatagactctcgtctttgtgcctcaaccactggtggtgtgaaaaagccgtatcaataccgttctggaactgctggtctcctccaattacgaaagttccatcaagagcactgtgctatctataaagaaattgccatttcagaggctagctacggaaagcttgcaatatttcatgactgatttgccttgtcatgagccaaaccgttcttgttctacaagaaagtcgacaaacatactttttgacctctcttttaagacacctaacctg

SEQ ID NO: 54945 - DNA, 482 bp, Gossypium hirsutum
  Clone ID: uC-gsflnu33B107a12b1
tttgacgcgtgggtgcgataggaagaacagatcatcaaacgatgtccaatgtttgtcctatgtttcttcggatggtaacctatgttaccatgtggcatgtatgaaagaagcatgtcgcgataactggaataagggttattttcgacctggttctgaaactaatgagcagagtaaattccttgcactacacaatctagctccaaaagaagtactatcaagcgttgggcaaacttcgaaagtttcgttgatcacatttttaaagctggtcgttaatgctatactgggagagccatttgattaaatggccctttatattaactttcttaaaacctggttagataaggctggtggttatgttaagcctgggttggtaaaataaggcttgaacctgttattgaccaagtgaggccaatttcaagggggatttgttttgaaacacttggtttgttgccttcaaaaaaaaaaaaaaagggggccctttt

SEQ ID NO: 54946 - DNA, 447 bp, Gossypium hirsutum
  Clone ID: uC-gsflnu33B107b09b1
tttcttgtttttatcccttcatttacccattttctgtcttttatttttcgattatataataaaatcacaatttattttaaaaaaaaaaaaaaaaaaaaaaaaaaaaaaaaaaaaaaaaaaaaaaaaaaaaaaaaaaaaaaaaaaaaaaaaaaaaaaaaaaaaaaaaaaaaaaaaaaaaaaaaaaaaaaaaaggggggcccttttaaaaaaaccaaatttaactacccggggaatgaaacctaaaagtttttttaaggggaaaccaaaattaaataaatggcccggttttaaaaaacgcgggaatggaaaaaacctggggttacccaaataaaaaccttttgaaaaaaatccctttttcccaaaagggcaaaaaaaaaaaaaggccagaacgaataccctttcaaaaaatttgccaaccttaatggggaaagggaacccccttttaag

SEQ ID NO: 54947 - DNA, 209 bp, Gossypium hirsutum
  Clone ID: uC-gsflnu33B107d01b1
ttctcacgcgtccgggcacgcctgcgctttatgttcactgcaacctatgttacgacgtgctataaaaatctcacattatgtgtatgcgaacattaccatccgaggtcatgaatgctgcccagattaagaagtatgtcaacttgacatatattagtgatgacacttatcttgatagttgtgtgttacaaagaaagaagacattggctagt

SEQ ID NO: 54948 - DNA, 530 bp, Gossypium hirsutum
  Clone ID: uC-gsflnu33B107d06b1
tttcatttccttactccttacaacaaccctgatcatcgccgtgttggccgccgaatcaagtggtgtgcatcacttgagctgggtgccgactacggtgaacaagtccggtggctgcaaggactcaacggcggagtgcatggctaacgtggacgaggatgagttcgacatagggtccgagatcaagaggcgcatattgcaaaccaccacttacataagctacaaagcacttcagagggacaccgtgccgtgttctcgaaggggcgcttcgtattataactgtcggccaggagccgaagctaacccttacacccgaggttgcagcaccattactcgctgccgtctttaaggttgttcgccgacgtccttttttttaaaaaaaaaatttgtaagatataggtatgtagcagcaataagtggacgtgttagaattatgtagcttcccctctggcgtgatgaatatatatgtatatatatgtatgtatgtgtatatatgttgctgaagaaattatccagatatgttgtcgttggtt

SEQ ID NO: 54949 - DNA, 475 bp, Gossypium hirsutum
  Clone ID: uC-gsflnu33B107e09b1
tgtccaccagtacgatcacgcgcgcgtcttgagggttctctaatgatgcctcctatgcccccctatggttctgaatcaacctaagccgattaacactttctggctgacgacagtggatcaacattgctggctgccaacgatgctactgttgccgctgttgataccttgagaaggaaacacggtcaggaggaagcttctgcaacgccgctcatgagacggacaaacaggatgcataaggccctggtaaactcaatgtaaatgggcctccagcgcaaaggaaaccactgatgcatccggatcatgaaatggatgctagagtcgagaaaggcgaaaactgatgttgttgctccatgagctgcttactgtcaggacactttatactcatgcatagttggcgagtgtattgcgaagattctgcaaacaacttgtatgacattgacggcaagaaccatgaaagaactttaggcgtgtgcat

SEQ ID NO: 54950 - DNA, 216 bp, Gossypium hirsutum
  Clone ID: uC-gsflnu33B107f08b1
tctccggctcggtgtctaggattaggattatgtttagaatcaatcttatccagatctgactgtcagatatgagtatgtattctaaggatgccactctttatgtgcaacttctatgtttatttgcttcatcatcatgagtaagtctattagatgatgtaaattacaacttaatgcgtgccctcattatgggcagtaaatgcatgtgatttgtgtcaa

SEQ ID NO: 54951 - DNA, 379 bp, Gossypium hirsutum
  Clone ID: uC-gsflnu33B107f09b1
tcttggacgcgtgggttcctctctttctctcctacctttaatttgtgttgtggatctgaatgggaaaggaaaaaaaaaggtacgtggagacgtgaagagggcgttcatgggcgtggacgcgcgaaccagggggtcgtgctcggtgtgccgacgcacgtggtggagggaagcagcaactgtttccttttggggctgtttgggctctagggttaggttcatttttgagcttataattggatttgatgtttttgtaatttttggatttttttgtaatttttagacttttttggatttttatgtgagttttatttattggttttttgtatgtgtatgggctcgggccaaaaattgagtctataataatgatattagttagtcc

SEQ ID NO: 54952 - DNA, 456 bp, Gossypium hirsutum
  unsure (1)..(456): unsure at all n locations
  Clone ID: uC-gsflnu33B107f12b1
cgnctgaataaaaacaaaagaaaagaaaaacaaaaaaagagaaaaatatataagagaaaagaaccaaatacaacacaaccaaaaaaacaagtcacgcgccgatttctccgggttggggctgctgggtactccttcacttactgtccgttactgggggggggcccgtttgggggcccccggttccctcccccggtcggggcggtgtacgtttttttttgggggcccccgaggccttttcctggggcggcgttttcccaccgtttgggcggggaaccccggggggtccccggtttttgtgccttggggggccttccccttttccccggtggggctattgcctaaggggccccccctgtcccccttccccacaggttctccacccgatggggcatggggtccccccccttttctggcccttttgcgcgggggtggggggggtccccccagggtggccct

SEQ ID NO: 54953 - DNA, 570 bp, Gossypium hirsutum
  Clone ID: uC-gsflnu33B107g03b1
tttccgcgtccgcccacgcgtccgaaaaaaaaataataaaaaaaaaaaaaaaaaaaataaaaaaaaaaaaaaaaataaaaaaaaaaaatatattattatatatttattataaaaaattatttagggggcggccttttttgaggttccaggttttcttccccttgcttgcgacgttttattttttttttagtgtcccctaattttatttccttggccttctttttacacctttttgcttgtgaaacccctggggttccccactttattttctttgcagcccttcccctttttccctgttggcttattagcaaattggccctccccgttcccctttcccaacattttcccatcttatttttcaatttggtacccccctctttccgtccctttaaccccggtggttttggtttttccccccagttttccctgttcttttgccagttcctttgcgccctttttttggtttttttcctttcttttttcccccttttcttggttttccctttagcttttattggggcttcctttaggttcctttatttctttcggcccttgccccaaaaccttttt

SEQ ID NO: 54954 - DNA, 562 bp, Gossypium hirsutum
  Clone ID: uC-gsflnu33B107g06b1
ttttacgcgtccgcccacgcgtccgcccacgcgtccggttggctcttcacgccgtcaacgaatattaccggctgccgtggaagccatcggtcaccaccaatcttctcggcgccaacactctgatttatctcaggccttcgttcctagattttttcctctcttttgttgatgaggtttggttcaatcctcatatttttctcaaggtatcttaggcacttgaatattccaaagttttccttgttcatctgctgattttggattctcatcgttaaattcaaaaaaaaaaaaaaagaaaaaaaagagagaaagggtaaaatgaaaatggcgtcggctcaggccttgccttcttcacggaaacaagagcatctagaagctgggaagcaccgggtacatctttttgttcttaattttttccctttatcgattaatttgatgttttctttctgttttgaaatatgattttcaatctagtaaatggtttgggtactatataatcagctattttggatattgatttcggaataggactagaattggcagtctatttggtattttcatattg

SEQ ID NO: 54955 - DNA, 540 bp, Gossypium hirsutum
  Clone ID: uC-gsflnu33B107h02b1
tttgtttctttggggttctcactttttcactcgctcaagccattattctatttttctcccatctataccgcagaaatgagagacaaaatggaaaagcttgttattcttcccttctcggttggttgtgtctctgattcaagcgtggctgttgcagcacagcggcaccaccaccaccaccagcctaggagatcaaagcctcctcctgctgctgctgacaccaattcaaatgcaaaaaaaaaggaagacgaagacagtttatcgagtgaaaacatgaagtactcattgaagttactgcctcttccaaagcctgacatatcaactgggtttaataggctcgtcaccaagagtttcaagacattatctcagttatttgcctacaaagacgagatagtagagtcggaaaatgaaatggaaatcggattcccgacagatgtaaagcatgtgacacacataggattggatggatcggcatctaccagccccagcaatggcagctgggacaatcgtctctctctcatgacttgtcactttcccagcata

SEQ ID NO: 54956 - DNA, 590 bp, Gossypium hirsutum
  Clone ID: uC-gsflnu33B107h03b1
tgctacagatgaagagctcgtcgggttttaccttcgacgaaaagtcgacaacaaacccctcacaatcgaactcatcaaagagatcgatatctacaaatacgatccttccgatctcccgaaaactggcatggtgggagagaatgaattgtatttcttttgtagacgaggaaggaagtaccggaacagcgtaagaccgaaccgggtgacagagtcggggttctggaaagcaacgggcatcgacaagcctgttttttcggttgaaggtggtgaagccatcgggcttaagaaaacgttagtgtactaccgtggaagtgggggcaaaggaactaaaaccgattggatgatgcatgaatttcgcctccccaatcccacaatgacggcacatgatgctgaagtatggacgatatgtcgatgtttcaagcggcatagaaaaatcaaacaagattggagacaaggtgctgctaaaccagctttaactggcaattggcaatgtgtacaaggctatgaaagtggcagtgtgtgatccagcagccatgaaaattacattacattggggtctcagaatgtttgaaactttgatgatgatgatg

SEQ ID NO: 54957 - DNA, 342 bp, Gossypium hirsutum
  Clone ID: uC-gsflnu33B107h06b1
tccacgcgtccgcccacgcgtccgcccacgcgtccgcttacgcgtggtcggacgcatgggccgtacgttgcgtggtgtccggtgcgcccaaggcggcccttgaaaatcctgaggaccgagtgccgatcgcgccaggaagtactgataaccggatcaaggctggactgtgcactaccatgtgctatgggaccaaaacatgcatgggaagtctgcgatacggatctctaaacctcggcataaggatcgcgtatgaggggtgcacacgctgggtctatgctgtaactcctgcctagacggcgcactgttaaagctgctcacgttgggagagcctatcgccagata

SEQ ID NO: 54958 - DNA, 508 bp, Gossypium hirsutum
  Clone ID: uC-gsflnu33B108a03b1
ttacgcgtccgcccacgcgtccgaaaaaacagagagaaggctttcaaatctctttcccttttcgaccaaagccaccttcatcggagatccggcgcgcccagactaccaacgacgggaaaaaaaacttaaaatcacctttaacgagttcatgggtgtgcatgtctctaacgtggcgtggtggagcggcgcacgttgtcgggaggtggcttttggtgcgtgaggtaggcgtgcggcgactgagacctttaggtagattagcgttttttcaaaaatgttaaggtgttgggctagaactttgggctagggttaggtatttggattgggtttcagggtttgggcctattgtaattgggtttggagtgtatttatttttgcttgtgtgttaaggttttttttaatggggttgggccgggcaattttgggccataacagaacgctatcgggcgttgagcaaaattccagaacattcaacgcatttgctcatatgagtgagaagattttttttcta

SEQ ID NO: 54959 - DNA, 508 bp, Gossypium hirsutum
  Clone ID: uC-gsflnu33B108a04b1
tccaaacagtccacaacatcctcggactcaggccgagtgccgcctctctgttccgattacgctccgtacccgaaattagaccccaagcacgtcgcttctacaccggagaattggactaacgattccatgggttcccagtcgcagcctaatcaagggccggcgacgttctctggcagcgctgctaccaccatgccggctgagtcgaatccttacgtttctcctgctccggttcgatcatctttcgtcaagacagataagatgggagcagtgaaagaggtgttagggaaattgggaaagaaagcggcggaggatactaagaaggcaaaagagatagctgggaacatgtcgcaacatttgaaaactgggccaagttttgctgatgctgctgtaggaagaattgctcagggtaccaaagttcttgcagaaggtggttatgacaagattttccgaacaacatttgagactgttcctgaggaacagtttcttgagacttatgcatgttacttgt

SEQ ID NO: 54960 - DNA, 486 bp, Gossypium hirsutum
  Clone ID: uC-gsflnu33B108b07b1
tttctcctcgacctaaaagaaagccagtacatccatatccccgcaaatctgtcgatttggtcaaaggaaaatcaccatcatctcaaccagagagatctccatcccccaaccaatttttcagagaacaagataacaaatcaccaacgtcagttttatctgatgcagtggggtcttctgccttggagcaacagaaaggatgttcttccccaacatcttgtactacaaatttgcagtcaatcaatacatcccctgttgaaaaggaaactgactatgcaacctctaacttagctgctgaggaagagaaaccctctttgtcatctgtgaaaatatttggtcaatcagatgcggagaacattctgtccatgaacctcaatacagatttaaggacttttgttttggtgagggcatgcagcacctgttataccttccactagttttaagcttttcgggaaaacagttcaggtgaaaagattccctaaccctttc

SEQ ID NO: 54961 - DNA, 364 bp, Gossypium hirsutum
  Clone ID: uC-gsflnu33B108c06b1
atttcgaataccatttataagaaaagtttaaattttatttaataaaacaaaatccagatgtttttatatataaattttcatgggggagttaaaatagagagggggaagggagagagagagagagagagagagagagagaggtgatcttttaaagatatttggcggtaaagccccctggctgtgatttgcagagagaatcatatggacatataggcggcgcatggtatgtataaaaaaacccaatgatctgcttaccctatgaaacatcaacaatactcttatcgcgtgattgggattgctcttgagcttgaatactgtgtcgtcatttttacccaaaatgaataccaaaattcattcccaattt

SEQ ID NO: 54962 - DNA, 363 bp, Gossypium hirsutum
  unsure (1)..(363): unsure at all n locations
  Clone ID: uC-gsflnu33B108d08b1
tgctttatttaaaacataagtttctatacttggagtaataaaaaaaaaaaaaagaaaaaaaaaaaaaaaaaaaaaaaaaaaaaaaaaaaaaaatagggcggnccgttttggggggtccttgttttggtccccgtgtttgcgccgcgggagctcttttttttggtctccttttttggattccttggccgacgttttgcgccgtgttttttggggaaaccctgtgggtaccccccttggttgccttgtttaacatcctcctttcgcctcctgtttttttcgcgggggggcccgcgccgggggccctttccaacagtttttccccctgtttggcgaatgggtcgcgccctgtgccgccccttttgc

SEQ ID NO: 54963 - DNA, 519 bp, Gossypium hirsutum
  Clone ID: uC-gsflnu33B108d09b1
tgtacgcgtggggttaaagattttttatgaactaaagctaaagaagactaatacaaagaggagcaatttgatctgtcaatcgccgcaacccattccacttcctctagtgcatcctcaatccaaaattttccttcaaaaaattggcctccctttttagccaaggtatgagctgcgttgtttgcttctctcctaatatgatgaaaagtgatttgtttaaagaaccccaacttatgtttgatatctgctaagatcaggctgaggactgatctatcatttgtatttgcatacaacttttttatcaccgtcaataagtttccttaaatctggacgcaatgaaagccaatctcctaagcaaaccaaatcacctacttgcacgctcgggcttctgcaacaaagtgtcgacaatattaaaatgaaggtaagtacacaccaccatgatcagtctattttcatttctttttataacacctaagatagatttcttttcttgtaaattaaaagctgagtcaaaattaattt

SEQ ID NO: 54964 - DNA, 394 bp, Gossypium hirsutum
  Clone ID: uC-gsflnu33B108e04b1
ttcctgcgtctggtctctacgaatcagttgaactttaatttgttcttatgttatcatcgcagatctaacccaccgtcgggtgagctgggtttatgcggatctgacccgaatcccgtgtcgacacggataccgaaccccaaattgaccagcacggggaacgaagcctaaatcttaaggaggtcaggcggacccttcattagaaattgtgtagcgtgacgaaactgcaagcttgggactatcaccataagtgaatacagcacttagctaagagggggacactagtagtaccttacgctatactgcttgcctcacttacccgaagcttccatcctgaactacaatctcagactgaacatattagcgctcgcatttacgtatgtgatcaatacccgtg

SEQ ID NO: 54965 - DNA, 497 bp, Gossypium hirsutum
  unsure (1)..(497): unsure at all n locations
  Clone ID: uC-gsflnu33B108e05b1
ttcacgcgtccgttggaaaacagggttttctcttcttcttttccttctatttaattgattaattttctgtttgaaagatctttagatttggtttgtgaaagtattgttgaatgctcagactgctcacagtagttctctttcaccttagtattggattataccatcacattcttagctttttaattacttaaagtagttcaccttctccttaattgctattatactgttgaagatctgtgttttgtcttcattagcatagattacttgttacatatgtaagttgttagatgttttctatggtcattctgtgcaaagaatgctattgcagaaaagatatttgtgttatatatttgataatagagaaaaactatttgcttgggttgtgtgnntggttttcttaattgttatcaacaggctgtctaaagaggtctttgagagaaggcccctaagaaacctgcctcaaaagctactgaaaagaaaggggaaactgttgaagt

SEQ ID NO: 54966 - DNA, 384 bp, Gossypium hirsutum
  Clone ID: uC-gsflnu33B108e11b1
tctcccttgaccactcttagcatcacagtaaccgaatcagggccttcttctccgtccggttccaagtcgtccggtgactctatgatcccatcatgggtcgatggggcgacacgtgggcctagaacaatcgggacgacgcaaacaacagcccaagtacatcctcaattattcacaagaactctgctaaacacagccgtcgagaaatatggtgttgaggtggtgattgggaaactggagcagctacgtgttgaggaggggagagttgtatctggttgtactcgaagggggacgaggtattgagtcggactcggtcgttctatcactggggcctaggactggaaagttcgagatgttagctacaatgttcagagtttctgggcttag

SEQ ID NO: 54967 - DNA, 520 bp, Gossypium hirsutum
  Clone ID: uC-gsflnu33B108f03b1
ttttgcatatgcagcaatttggctggatgatgatggatttgttgctgaagggcctagtatgaatgtggctttcattacaaaggaaaaggagatgctgatgccccaaaatcgacaaaattttgaatggttgcacggctaagagagttttgactcttgcggagggactggtgagagaggggaagcttcgcagaataagagtggataacgtgagcgtcgatgaagggaaaagcgcagacgaaatgatgcttattggcagtggggtccttgttcgccctgtaatacagcgggatgaacaggtcattggcgacggcaaggaaggtccaataactaaaactctcttgaattttatcctggaggacatgaaatccggtccttcatcagtccgagtacctgttccttattgaagcaaaagctttgattcattctcttgctctcagaggctctgtcaaagaatctgcttctcgcttgttggctctgcatatagacataactctgtaatatcttataatgcaaagcacta

SEQ ID NO: 54968 - DNA, 246 bp, Gossypium hirsutum
  Clone ID: uC-gsflnu33B108g01b1
tttatgcttccgaggcagcctggactgaaggggagctgttatgcgctactacgcgactgccagacaacagaaatggtgcttacgctggctgagattttaacacaaagtgcatgacgatcaggtaaggctcttaggaaggaacgaaagccattgaaaagatgtgactcaggtataactaacacgatgcttactatgccgatggctatggacaccttctcataggacccaccattgagatggttatca

SEQ ID NO: 54969 - DNA, 437 bp, Gossypium hirsutum
  unsure (1)..(437): unsure at all n locations
  Clone ID: uC-gsflnu33B108g04b1
ttctcagacaacaacgaaaggaaaacccgatccaaaactctctccgaaaaaggggaaaaaggtaaaccgcaaaaaatatgttgcagagacccgctcgacgctgtgaaggcaccgctatgggcgccatcgttctcgacctccgtcccggtcttggcgtcggaccgttcactctcgggatgcctatatgtgaagcttttgctcaaattgaacaacagcctaaaatttacgatgttgttcatgtgaagtattatgatgaggagccattaaagcttgatattgttataagttttccagatcatggcttcattttccgatttgacccttggctcaagagattgcgcctatcgaaatttttgatataaacgtcttaaatgcgctatgcacttccttgatggaggaccatctactctgctacgttgnagctgtctagccttttt

SEQ ID NO: 54970 - DNA, 363 bp, Gossypium hirsutum
  Clone ID: uC-gsflnu33B108g09b1
ttttgaatgctactcttcactatgcagacaaaaaaaacaagcatccaggttgcgattgcgggacgacttgcaacagccgatctggctaaatgagcgaaaagaaaccggtaaatgaaccgaaacatgagatactcgagaacgacaaccagcactaacacaatcacatgctgagcaggaccggactagatgaccttggagggacctcagatggacactactgagtcaggacaagcatgcatatgaagatccagctagaaaagtagaccatggacctggaaacaagctagatgaaagccaaactttatggcaaaagtagtgcttataacaacacccatgcgttatgacagagtttcaaagagggat

SEQ ID NO: 54971 - DNA, 293 bp, Gossypium hirsutum
  Clone ID: uC-gsflnu33B108h01b1
ttcttgcttccaagggctccgggccctagaggcaggtgttttgcgctcaaacgggactgactgaccacgacaatggtgctctttctggcagacccactcacgcgaaagtgccacaagagcagttacggttttgaggaacgatacactaccatcgatgagatgtgtgacaactatgactaaaacgatgttttctatggagatggggaaggacatcttcagttaccacctgccaatgggatgctgtgcatatcctggtcacccgccattgccaggaaaatctgctgcccaacagg

SEQ ID NO: 54972 - DNA, 522 bp, Gossypium hirsutum
  unsure (1)..(522): unsure at all n locations
  Clone ID: uC-gsflnu33B109a02b1
ttctattaaaaatgatcctcaaaaggtacttgtcatggaaaaatatcctccccaattgcatcaaaccccaggtgccatcctcagggcaaaaagttcatccttccaaacgaagtcctagccaaaggctatctctctctgatattagccactttggctctccgttgtcactaaacgatctgtcgaattctcttataagccttcatgtgtttaccctcaaggagctggaactggtaactcacaagttctccaagagtaattttctgggtgagggtgggtttggacctgtttacaaggggttcattgatgacaatcttaggcctggcttgaaggctcaatctgttgctgtgaaggtccttgatttggatggcacacagggacacaaagaatggctggctgaagttattctcctggggcaattaaagcatccncacctggtgaacttaattggatattgctatgaagatgaccacaggcttctggtatatgaatacatggaacgtggcagcttggaaaaccaactat

SEQ ID NO: 54973 - DNA, 526 bp, Gossypium hirsutum
  unsure (1)..(526): unsure at all n locations
  Clone ID: uC-gsflnu33B109a08b1
tttctcgtaagcccgtatatgggacagattgtatgtgaaaagaaaagtttttaactatttgagatttcatggccctatttagtatgaaagtgttagtaaaagtcaggtaccacctcgaaccccgtcccggcgtcggatgcaggcgaggggtgttacaaaagaagctcgaccagatctaaaaggacttggtaagtacttttccccctttcttctttatttgaaaagcaactcaaatctcatgttattttcttaaaaaaaacaagaagaaattcataaaatacaaagactttcaacattgcttggcctctcgccctcacatccgcatagcaggagtatttggggctctcatcggctttcaatcgcgtaaagaaaatgagcaaactaagaaaatcaatttagaacagtaaaagaaaagcaaaaaaaagtgaaatcacctctattaatnttctattgcttttcttctattctttgtaagtgtgcacaaatacagtatgcatagagtgtgcgtaatctcttcgtgaaaaat

SEQ ID NO: 54974 - DNA, 372 bp, Gossypium hirsutum
  Clone ID: uC-gsflnu33B109a10b1
tttttcacgcctctgactgtgcagctggtgagtagactgatgaactcatgggcattacttgtgcatcagcggaagatagcagaacctttatgcagctgatgcaagaggtcgctggatgacagataccaagggcggccatcaaggtggcatctgttgctgtgggccagcttgagaagttgggctcccaagatacagtctgcgtgagggcatgcgctaagaaggcagtgacggaatcaaaggctgttacggacctggctcgttcggtgcacctggattgtgcgtcggcttcctaaactagaagggggtccgggtcggaccttcatgccataggctagggacgaatgtgctgagattagtcacttgatcaacctc

SEQ ID NO: 54975 - DNA, 438 bp, Gossypium hirsutum
  Clone ID: uC-gsflnu33B109b02b1
tttatactctttccttttttcagacagtgattgctgtttaaaaagaatgggtgaaattcgtttgttctggttattgtttgtttgggtgttgggaattgagaggggtgtatctggtttggcctgcaactgggggttgcaatcgactcatccattgccgtctaacatagtggtgaagctacttaaagacaatggattcgataaagtgaagctgtttgaagctgatccaggtgcacttaaggcacttgggaaatcaggaattcaggttatggtggggataccgaatgatatgttggcatcgcttgctggaagtgctggaaatgctgaagcttgggttcaacaaaatgtttctaattatgtttccaaatatggaactgatataagggttgtagccattggcaatgaaccttttcttattcttacaagatatgttcaccaaac

SEQ ID NO: 54976 - DNA, 257 bp, Gossypium hirsutum
  Clone ID: uC-gsflnu33B109b12b1
atacaccctgatagaacccaggacgagaacagctgagatcgcctcgaagaaacatgtgatctttcaacaggcttgaaaacgtgaggaagcatgccaaaattggatcaacatttgaacccatgccacaactgagaggaggatggtgcatacgctcaaggccaaaccttatttcgaataaagtgctgtgaacacgctgactggcccaatgatgttggacagaacaacaggtcacaaggtttctttttggtaattggttt

SEQ ID NO: 54977 - DNA, 474 bp, Gossypium hirsutum
  Clone ID: uC-gsflnu33B109c07b1
ttttgcagaccaaacttgaagggactgaagggcggacaggagtgaaactcggcatagataagattcaaaatggggactggtagtttagcaaacatgatgactagaacaactgatttgctattagattacacgacaggcttcgtcttgagcataaatacatactaatgagcagcggcgctaccgtgagcggtaaggatggtgacgatgcctgcgtatgtcaggatgctggtggaacttatgactctacacgcaactggattgaactagagtttgtgcctttgacacatagatacctcgtatgaattggctgaccaaagccattctgcaacagcgagaaatgcggacgttgttgctcttagagattcagacgaagagaatgaaacatggatatgtccctcgagctatgtatacaggttatgcacaaccaaaatgatggtggtggactgggtggtccggttgtacctcctggaattt

SEQ ID NO: 54978 - DNA, 500 bp, Gossypium hirsutum
  Clone ID: uC-gsflnu33B109d08b1
ggggcctgtgctgtagctgccataggcacgccatgattaccaaaacttctgcgatattctctggtctacctaccaaaaacatatatccgttaccttcaatggtatcactcatgtctaatctatacacaccctcgtaaaacaatgtgtgctggctccggcgatgggcgttaggtcgaaggctcaggatctatggcggaccacccaccacctaagctgacggagccacttccgtgcccttggcgcgactacagcaacaccaagctctgctactacaacagctacaacctttatcagactagctacatctgcacggcatgccgccactactggactcaaggaggaactatgcatcacgtgtccgtaggtggcgggacccggaaggctttcaagcgctcagcctgtagttctggctcgtgtatgacgtggcaggtgcttgttactcgagctcgacgcatgaagctggaaccctactgctgttaaccctgtccagttatgcctgg

SEQ ID NO: 54979 - DNA, 516 bp, Gossypium hirsutum
  Clone ID: uC-gsflnu33B109e02b1
ttggaaagctctcaatctatggagaaacctttgctgatgaaaacttcaccttgaaacactccggcccgggcctcctctccatggcaaacagcggccccaacacgaacggctgtcagtttttcatcacttgcaatgcgtgtgagtggcttgactcaaaacacgttgtttttgggagggtgctggaggggctgaagattgttcgaatgatcgaaaacgtgcccgtcgtcaatggcaaaccaaaaatcgaagtgaaaatcaccgaatgcggcgaactgtaaatacactctccatcagcaccattaccaatatctgtcatcaccatcatcatccatcatccatcatcaccattattcattaataacaattcttcatttatttcaatgattccgttccattccatgtatcatctattctttacatatttgacacctctcttcctctatataataatcaagtgatgatatcccacagcccctttccctcaccctctatataaaaagattgtttgatatcata

SEQ ID NO: 54980 - DNA, 341 bp, Gossypium hirsutum
  Clone ID: uC-gsflnu33B109e11b1
tcttaaaaaaaaaaaaaaaaaaaaaaaaaaaaaaaaaaaaaaaaaaaaaaaaaaaaaaaaaaaaaaaaaaaaaaaaaaataaaaaaaaaaaaaaaggggcggagggtttggcggtttaaagtttccaagcttgggcacgcgagcttatagcttttttattgtgttatcgagatacaataaattggccgacggtccacagcttaacaactgggaaaccggggaagttccgcaatttactagcttatgcgccttgccccctttccccttttggcgaattggcgaaaaggccaaaagggtcggccctttccacctttcgaacattttgaatggctaatgggaca

SEQ ID NO: 54981 - DNA, 447 bp, Gossypium hirsutum
  Clone ID: uC-gsflnu33B109e12b1
tctgagaagctagctgtacaccaaatagagggagctagatagagagagtgatgggttcctttaagctccagaaacggatctcagggagcgttctaaagtgtggaacaggaaaggattggctcgatccaaatgaagtcagcgagagcttcatggccaactctcgccagaaaatatggaagctggataaagatggtttgatcattaggaagccaaccaccattcactctaggcctcgtgcactccgcatgaaggaagccaagagagaggggccttactctggttatggtcagcgcaatggaaccaagggaggcaaggatgcccacaaagatcttgagcatgaagaggaagcatgttctgagacacttgcttccaaagtataggcaaacaaaaaatattgacacgtacatgtaccatgacatgtacctgagactgaagggtaacgtgttc

SEQ ID NO: 54982 - DNA, 523 bp, Gossypium hirsutum
  unsure (1)..(523): unsure at all n locations
  Clone ID: uC-gsflnu33B109f02b1
tttacgcgtccggttcggtgaaaagtgacctccagctccttgaagacattgctgatcgtgccttgaaacaagaatccatttttgtagtggtttcaaaaagatcaactctcgataaatgtccccttcctgtcgggattagactgtttgtttcagccgcccattcagagtccgacctgcttaaggcatgtgaatcactcaagcgagtcgcagctgcgatgcttaggtgagtgatacccatcatatatatatatttgtgtatgtatggattagtatctactgtcagtatagttttttttaactttgtaagcggagttgaaaattcaacatgttcttatattatatttgaaaaaaaactttactagcggtggatatgataaattatccattcaagattttgttttaaactgcattggaagatttttctcgtggaactgttcacttttcttaaattttctctagcangaaaacaaaatgtaactacaatttaaacgttttactttattttttataatttaaaataatg

SEQ ID NO: 54983 - DNA, 233 bp, Gossypium hirsutum
  Clone ID: uC-gsflnu33B109f07b1
ttttctacacatcccgaggggccagtgttgaggattttagtcttataactcgcagatccggcgctgtaacggtcgtactattgtgacctgacatcactgaagggcccgttgactgacatggccctgcctggtccaactatggctgtatccatcgtagacctcttggagggccttcctatttagggctcttgcgtcacaaaaaagagtcccatctgggatgctctttgccagca

SEQ ID NO: 54984 - DNA, 403 bp, Gossypium hirsutum
  Clone ID: uC-gsflnu33B109f10b1
ttaacggcctgcctcaagaggctgcctctatcattggtccacatatggctgcgcttcatgccatgcgtcacggtctggaagtctgttcagagtcggcctggctcccacatttgtataaatctggtggactggatagcgggtcagacgaagggttcgatgcacgagagcagggccacctgaaaaggccagtaaccgttagaggtatcacgtacgaacagacgcgttaataccttttaccttataagattgcatgtttgcccgttatgctcattgtcaagcgtactctaaatgatcaatgctggggagctacatatctagaatggatgcatctactataggaagggtgtgattttgggtcattcgatattttaaccaatgatgagggacgacagggattgaaagt

SEQ ID NO: 54985 - DNA, 363 bp, Gossypium hirsutum
  Clone ID: uC-gsflnu33B109g04b1
tgttaaggcaatgcaagaaagggtagcagttgcagtaaagcccttctctggcttaccaggtcaatggattttatggtagctttgtttcaaaaactggtgaaggatcctgggcagaacatggaacaagcagttgaagaatcctataatattactttgaagcctaggcatggatggatttcgacggctgcttttaaggtggcactaaaactggtaccagataacaaaacattcattagtcttctcatggcaaaagatcaaaattgcgacaaccttaaagaggaaatgcagacattgattacgttacttgtgccttttttagaacagatccatttcgtcatgaggctttaccggttggataggttg

SEQ ID NO: 54986 - DNA, 438 bp, Gossypium hirsutum
  Clone ID: uC-gsflnu33B109g08b1
ttctagaggctctctacccactgtgcctctctctgctcatttcggctagggcatgaacatccttgatggccgcctaaaccgtgctgccaccacaggcggcggtcggggagcaaaccggactttcaagcccatgtttcaggcgaactcaatagcgaaaactggctggaccaaagaggatccaaagatggaaccccctactacctataaagtgggaatccgacgacagaggagcgatctccgacgacggtcacttcgattggggtaagtcacccttctttgattttataccctttaagattttatagatttggagtgtaaataaaaagaatattaaagagatgaaagaaccaaatcaaaacatagaaaaaaaaataaatcagagatcaacctttaaattgtggtctgttctctgattcaaatgtgcgagtaccctggtta

SEQ ID NO: 54987 - DNA, 517 bp, Gossypium hirsutum
  unsure (1)..(517): unsure at all n locations
  Clone ID: uC-gsflnu33B109h05b1
tttacgcgtccgaacgcttctactcctattacaggcaaaatgagtccgcgcatttggttttactccattttgctcactcttcaatacggagcgcagcctcttatctccaagcgcttcaccagacgggaagtaattgtaacgtcgtcagtcttgatatgtgaaatagcaaaggttgcatgtgctataattctcatggcgaaagatggtagcataaagagactggcgaaggaatggactttgatgggttcacttactgcatcgggtcttcctgctgcaatttatgcacttcaaaatagcttgttgcaaatatcttacaggaacctggattcgcttactttctcaatgctgaaccagacaaaaatatttttcactgccttatttacatatatcatactgaggcaaaggcagtcaattcaacaaactggggctctgtttttgttgatcatggcagctgttcttctaagtatcggtgaaggttctagcanagcttctagcactggtgatcctgagcaaattc

SEQ ID NO: 54988 - DNA, 168 bp, Gossypium hirsutum
  Clone ID: uC-gsflnu33B109h08b1
ttcaaggacaaattatagcctcccataaatacaaatcttcctctttaaatactcactgcatagatcaaatcagttttcttcacttttcgttatcgaaatcatctgcttctcccttctccctttctctctcggtgacccctttctcttctgttttacttggggtcgcct

SEQ ID NO: 54989 - DNA, 212 bp, Gossypium hirsutum
  Clone ID: uC-gsflnu33B110a05b1
tttacgcgtccgaacacccggacttccacgggggcagtataacggctaccagatacaaatcccaagcccagctaacgtggctgccaaggaccatgagcagaggaccattggagcagtgcccttcattaaggaccaggtggtaggtaagttacttcgcacgatatggcaaaacgttcacatctccagaaatggtacgccttcagggatgatgg

SEQ ID NO: 54990 - DNA, 501 bp, Gossypium hirsutum
  Clone ID: uC-gsflnu33B110a09b1
tatttgttggccgtgagggaaagtatgttactagcaggaacctacgagatcgactctattgcgagcttgagcgaaatttagcaatgagagtagaagacggtgaaactgccgatacatttattgttagtgggcgtggtactttacatataaccatattgatagaaaacatgcgaagagaagggtatgaatttatggtgggacctcccaaagttattaacaaaaaggttgctgacaagttgcttgaaccatacgagattgccacggtggaagtgcccgaagaacacatgggggctgtggttgaacttcttgggagaaggcgtggacagatgatagatatgcaaggagttggggccgaaggtacaacacttctgaaatataagatcccaacacgtggccttcttggattgcggaatgcaatcttgacagcttctcgtggaacggctatcttgaacacaatatttgatagttatggaccttgggctggtgatattgttacccggg

SEQ ID NO: 54991 - DNA, 385 bp, Gossypium hirsutum
  Clone ID: uC-gsflnu33B110b07b1
ttccactcgtccggtttctacaagcatacggtcaagccaggctcttatgcatggaaataccacaggccacctcctcgcagatccaatgttatagatatggactcaatttttgatgtcttcgagcacttaattgcagaagatgaaatgaatatttttgatgctgaagatttggaaaacgatgatatatctatggagatggccttatttttaatgcagctagattatgattcaagtgactcctcaagtgatgaggagaattttcactattaaattcctaaattaagttttgctcctttttgctcgaattatggaaatgttggagtgctttgggtgttcatgtaggctaccacctttttcgttttggagaatattgctttggagtgtg

SEQ ID NO: 54992 - DNA, 178 bp, Gossypium hirsutum
  Clone ID: uC-gsflnu33B110c01b1
tgttgacgcgtgggcggacccttggggaaaggcgagcgttaaaatgggtatgcagcataccacggagtcaggctggtgctagtgactttgagcacagtttggcacagacttcgacagaggaatacatgcataggctacctgtagcgggaaacagttcaagcggaataaagtcttgggc

SEQ ID NO: 54993 - DNA, 289 bp, Gossypium hirsutum
  Clone ID: uC-gsflnu33B110c05b1
ggtgcgcccgctgggccgcgcgcatactctcgccgggacccacgcgtccgtgacgtcgtctgacgagaaagcatctagaggggcatttgggagtcaaccggagagcgacgccaatcagggaagaggagggatgctgcgagaatctcaatcagacatttttgctggagaccttgctacacgactagacctcagtggaactgctgtcgaatatggcgcaaaaaaaggtaaagaccatcgctttgttgtgaacccaggtggaagcagctgtggataagcaggatctcttagg

SEQ ID NO: 54994 - DNA, 511 bp, Gossypium hirsutum
  Clone ID: uC-gsflnu33B110c08b1
tgaaaactaaaaaaacctccagtcagatatagccaaagaccctaaatcatttcccaagcattctccgatggtctccatttccaaaagccgcagttttctaaaaaattaaccagttgctgcagtcatcatcgtaggtcgtttccctcaggctcagtccggttctcgtggccgacctcctcgtctgggatcagtggtggagcctgggacacctcccacctggtttcgttgtgccgctcactactgttgtctccttctccgctccaatcttcaactgtctccgtcccgccgctggtcaatctcatccaattccaattagcatcattaacattgagaataagttgagtaggcaactgccagaactgtatcttcatctatttgaaggtttaatcaattatgcaaaaaaaaaaagcagggacccagttttttcgaaatcaattatttctgaagatatatgaaaggtctcggatgggagctttagtaaatacatggtcaagcatccattttctccagc

SEQ ID NO: 54995 - DNA, 210 bp, Gossypium hirsutum
  Clone ID: uC-gsflnu33B110d02b1
tctgtctgacgcaccagctatgagcaccactgagggacgccataggggcatgtgcggaataaacagctcgtgaaatccaggcatccgtctcaagacgagacgaaagacgtagataatgaaaacagagagtccgacaagctacgggcacctacagggataaaatgacggggatgatcgcctgcaaggtgaatgactataataatgtgtctg

SEQ ID NO: 54996 - DNA, 238 bp, Gossypium hirsutum
  Clone ID: uC-gsflnu33B110d06b1
ttcacacgtgcgatgacgcgaaggctcaggggggtgttatgagggcaactatgttcaaatccaaggccgatccaaaggcatcgggaaggagcacgagcagaagacaactggacttggggccatcactaaggaccgtgtggtaactgaaacacacggaaccatatggtacatcgaatggaaagaacagagagcttgtgtcacaggctaagatggcggtagatcgaaaccagctcaaagg

SEQ ID NO: 54997 - DNA, 189 bp, Gossypium hirsutum
  Clone ID: uC-gsflnu33B110d07b1
tgccacgcgtgcgaaaacgccaagggcgggggacgtaacaggagggctacgatatattcatccaaagcccagctcagttggcagtgagcgagcacgagcagatgactattggagcactgtgttacattaaggaccaggtggttgggaacttgctcggaacgagagggcaaatggttgacagcagaagaa

SEQ ID NO: 54998 - DNA, 256 bp, Gossypium hirsutum
  Clone ID: uC-gsflnu33B110e01b1
tgtttggcgtacccgctctgttcaatcctgagtgacgattgagggcatcatacagaaacctcagatgttgacctctgtatcactgttccaagaagacgagaacgatgtacataatgcttacctagcgccagacatgtatgggtgccgtcatggttaaaacaatggtaatgaacgcctgaatggggaagaatgctattacggtgtctgactgtatcttacattctataaaaaccgtcatgcgaggaaagtacgatta

SEQ ID NO: 54999 - DNA, 252 bp, Gossypium hirsutum
  Clone ID: uC-gsflnu33B110e02b1
tgtctggagcacccgctatgatgaagactaagtgatgatagagggacccatacagaaatctcagatggtggcctctggatctgcgtcccaagaagacgcgacacatgcaaatgatgcttacaaagcaccagccatgtttggggccggtcagggagaagaacacggtaatgtacgcccgaatggggaagaatgccattaaggggtagggctggatcttacagtctataaaaagcgagaggcgaataaaccatg

SEQ ID NO: 55000 - DNA, 336 bp, Gossypium hirsutum
  Clone ID: uC-gsflnu33B110e05b1
ttcacgcgtccgatttttttataacacaattacaaactgactttggttgttttcaaaaaaaaaaaaaaaaaaaaaaaaaaaaaaaaaaaaaaaaaagggcggaacatctaagaagaaccaaagcaaaaaaacaggggcggcccgattagaggacccaagtttgcgacgctacatcaatgactggcccttttatagcaccccctaaactgaaaaaactgggcggtttccaacaacaaggggactggaaaacccccggctttccccagcttaatcactaggcaaaagacccccatttatccagctgtgcaacaaaagaagaggccgaaagggaacggc

SEQ ID NO: 55001 - DNA, 505 bp, Gossypium hirsutum
  Clone ID: uC-gsflnu33B110e10b1
tcttagcaattcgagtctctacaagcaatgatgccatggtactcggtcggtcacccttccatgattcaaccagcggtgatgaggtacatcaaggaggtgtggggtttcaacaagaagcctctgctagtggtgttggaccctcaaggaagagttgtgaaccctaatgcgatgcctatgatgtttatttggggaagcatggctttccctttcaccaagctcagggaagaagctctttggaaggaagaaacatggaggattgaactattggcatattccattgacccctccataatcaattggttaacggataggaaattcatttgcttgtatggtggagaagatatgaattggatccggaaattcacaacaactgcaaaagccgttgcgaaaactgccaatatcgaattggagatgctttacgtgggaaaaagcaaccctagggagagagttcgaagaaacatgaccaacatcgagttagaaaatctcagccatacactgtcagaca

SEQ ID NO: 55002 - DNA, 262 bp, Gossypium hirsutum
  Clone ID: uC-gsflnu33B110f02b1
tttttcgcgtccgggcacgacgagggccacggtggcgataaagaggaccttgtgggaacctcagatgtccaactcagtttgaggggaccctgcacgagatgcaggatgaccggcgcgctgacatggaccgctacaaggaaaggtggtgtcatgcttaaaaccatggcaatgaaggtgtccgtggagcgcaaaacaatcacggggacaagcggtgacccttaggctgagaaacattatcccagcgagtccagaacgactatga

SEQ ID NO: 55003 - DNA, 182 bp, Gossypium hirsutum
  Clone ID: uC-gsflnu33B110f05b1
tctacgcgtgcgaaaacgcggaggttcagggatgcgataggtgggctactagatatacatacaaaggacatctcagttggtaggcagtgagcatgagttcaggagcacttgagcgctgcgtttcattaaggacctggtgttttagcagttgctacgagccatattgcagatggctggcatca

SEQ ID NO: 55004 - DNA, 251 bp, Gossypium hirsutum
  Clone ID: uC-gsflnu33B110f06b1
tgtcacgcgtgcgaaaacgcctagttccactgaggcaatatatgggctactaggttcacatacaaagcacagttaagtttgcatggagcgagcatgagctcaggacgactggagcaatgccttgcaccaaggacctggtgttccatgatttgattcgaacgataccacagaagacgggcagcacctctaagggtgtgtctttcacaaagatggcattagagtgtaggctgttattgaacagcggttaactg

SEQ ID NO: 55005 - DNA, 162 bp, Gossypium hirsutum
  Clone ID: uC-gsflnu33B110f07b1
tgccacgcgtgcgaaaacgccgaggtcgggggacatgacaggacggatacgagaaacaactccaaaggccagctaagttggacggccatgagcactgggtacaggagttcaggggcactgtcatctaccgaggaccgggtggttgataacaagcttggaacc

SEQ ID NO: 55006 - DNA, 190 bp, Gossypium hirsutum
  Clone ID: uC-gsflnu33B110g06b1
tccacgcgtgcggaaacgcggaggtacagggaggcgttagaagggatactaggtttacacccaaagcccatctaagttggctgcgaacgagaagtagcatatggagcctggagcaatgcgctatattaaggaccgggtggttgatcactagcttcgaaccatacggaataaggttggcagcaaccgaaat

SEQ ID NO: 55007 - DNA, 379 bp, Gossypium hirsutum
  Clone ID: uC-gsflnu33B110g09b1
tttccacgcgtccggtcagagatcaagatagggatcagctcaacaactccagcaacggtgccagttatagactgataaacacaaaacctgacagcgctcagcactgatgggaagctagagagatgctaggctccagaagaatgggcggggctcagaaggatacagacatgatctgagccctaccggaagctaggaacggcgagaccaggagctaagctggagaccgggaacgtgccgtaacagaccaaggaactgagagccttcgacaagccgctaggggagtaattcaatccttgataggcaccgatatacagcttgacgctggaagatgctccgatagctggaaccaatgaacagtggctgacgagcactttacgga

SEQ ID NO: 55008 - DNA, 518 bp, Gossypium hirsutum
  Clone ID: uC-gsflnu33B110g11b1
ttctaaaaagaatagtgagagcagaagaagacaatgggacgccctgatacagaccctgaacaaatacaagccgaatacgagcttcgccctcaagaatacgacccgacccatgaaccaactccgaatgtggccgatgaatatccaccgccaccaccttatgaaaacagaaatcaacaaggccaacaacaacctcaattcccgccgcaacaaccaccgcaatacccaccacctgctcagcaacagccaccgcaatacccactacctgctcaacagcagcctccgcagtacccaccaccatcacaacaacctaaccaagcctatcctccaccgcagcggcccgcgccgtacccaccgcaacaaaacatgcaatacaatccagcgtacccgaacgggacaaaccagcagccagcggcggcggcgtatccgccacagccagtacagtatccgcaaaaagtccagcggcgaatcagatgtacgcaaatgtaggaccacaagcgacgcagcctcagaccgtttac

SEQ ID NO: 55009 - DNA, 122 bp, Gossypium hirsutum
  Clone ID: uC-gsflnu33B110h05b1
tttatcacgtgagaataccacgaggaatggcaccagaatttgtggcacccatgttatgtgcacgggtgacagttctcagcccattgagtcactatggtttcatggggactggggcgaggcga

SEQ ID NO: 55010 - DNA, 180 bp, Gossypium hirsutum
  Clone ID: uC-gsflnu33B110h07b1
ttctacgcgtccgataacgccgagggtgggggatattataggagggatactagatattaatataaagtccaactcaggtggatgtgtgtgagcactgtgtgatgaggtctggtgcgatgtgattcacctaggacctggtggttgagcataagcttggaaccattttgctgaacgtgggca

SEQ ID NO: 55011 - DNA, 253 bp, Gossypium hirsutum
  Clone ID: uC-gsflnu33B110h12b1
taccacgcgttcgtgaaaagctaataatggggctttttcaaggttcagatccgaaatcccacggaatggatacttaaaagaacatgtgcatcattgatctgaatgtggaactgtataggctaagttctatttgctggatgaaattgaaactcaatgtgataccgcagctgatgacctaacgaaaaccacagtctgacttaaacacactgtcacttaggtgttactcactcacatattcttgcatcgaatttgt

SEQ ID NO: 55012 - DNA, 511 bp, Gossypium hirsutum
  Clone ID: uC-gsflnu33B111a03b1
tcctttttctttcatctttttagcccaaaaattaaaggaaaaaaatagagatagaagattatgccttcatttccacagcctggctctgttaccatctgcgaaattaaccgagatttggttacagccgatgccctttctgatagtaaagctaaggatacttatggaaagcttcttggaatggtgttcaatccagttccgtttcagtccttagaggatcccacgcaacctccaccagcttcaaatgctgccgtctctcaacccaaaggatttggaatgataacttcctccctcaaacacatttttctacccaatgatattgatttgttaccagaagttgctctccaaggtgtgagctggcatcagcacaaacatatactggcatttatatccggttctaatcaggttacggttcgtgattatgatgattcagggaaggagccttgcattttaacaagtgagtcacaaagagatgttaaagttctagagtggaggccaaatggtggaaagtcac

SEQ ID NO: 55013 - DNA, 330 bp, Gossypium hirsutum
  Clone ID: uC-gsflnu33B111b04b1
cgcgtttttatcagcataagacaactgaaaaaaaccaggggaatagatataacagatgcgaagagttggagtaacgggaaacgggaaaaaacggtctttgttggggcaaggcacattattgggggccttatctcatcaatggggctggctgagccaagatttcaaggagtttactccggcggggcagggcaaaatgcacatgtgaccttttccggaggatgtgatgcctctgggaccatggggggagcttgtggttatggaaacctgtactgccaaggtgacggagtaaacgcgggagccctgagcacagcattgttgaacaatgggtta

SEQ ID NO: 55014 - DNA, 549 bp, Gossypium hirsutum
  unsure (1)..(549): unsure at all n locations
  Clone ID: uC-gsflnu33B111c06b1
gtgtttttaggggccaacatgttggtggaagaggacacaagatgcagaagtcagaacccaaatttattcaggtgttattgctcttggtccaacatggagcgaatggtctaaatctgttagaggcacagcatgttattcttgtcgaaccactactaaatcctgcagtagaagcacaagcaatcagcagggtacatcgaatcgggcaggataagaggacactttttcatcgttttatagttaaaaacaccgtcgaagagagcatatataaactcaacagaagcaggaactcaagtggctttgttgggaacaccaagaatcaagaccagcctgttttgacacttaaagatgttgaatccctcttcgccacagcaccatccagagcacagaaaaccgatgaagataaggccgaaagtgaaaatctgagatacctgcctccttccatggctgctgctatagctgctgagaggagactcanggaaaatctaactgcatgacattcatgctggttgacgatacgtataanaaaatccatagtgcaattgtagttag

SEQ ID NO: 55015 - DNA, 442 bp, Gossypium hirsutum
  Clone ID: uC-gsflnu33B111d11b1
ttttcttcatttatcatatttcataatattttgctaatttgtgcagtattctttttgtgactgtttgagtgaaaggcatttgacaatttcaagaaataacatgccggaaaagaggaggtaatttatctaattgctttacacttttaaatcaaaataatctcataattaatgcttatttggtgactgtttgaccctttgttaaacttgcaatcagaaagcatagacaatggacttgaggttggccaccatttgtgcacagaatatgaagtcctgccctgtgaaagtaattgtttctacataaataaaaagtgtcgataggaatagtaataatgcggctgatttgttgtgtaatattgctaatagcaatttgctattaataaaaagtgtaatgtgtgctttaatatggattgcccagtggaaacccatgatgtaatcattcatg

SEQ ID NO: 55016 - DNA, 188 bp, Gossypium hirsutum
  Clone ID: uC-gsflnu33B111f07b1
tttcacgcgtccggttgaatttagccattttcaaagctttcttattttacactatttacatttggatgacaccaggcaatagggatatatttataggttcctttgaattatgatgtggttgatgtacgccatggctaaacttgggctacaccccttgatatgataatataagaattgttttggatggt

SEQ ID NO: 55017 - DNA, 539 bp, Gossypium hirsutum
  unsure (1)..(539): unsure at all n locations
  Clone ID: uC-gsflnu33B111f10b1
ttgcataaagtctaccgagaaatgcgcaaaccatgaaaagcaaatagaagctagctttgttgaagcctctatgcctcctagaattccttctgctagtcttcaaaaggggatccttaaaagaaacccacgtggatgcagaggtatttgtacttgtctgaactgttcttcatttcggcttcatgcagagaggtcatttgaattctcaagaaatcagatgcaagatgctgaagaagtgggtttagatttgattaaagagttatcttacctacggaatatgttggaaaaatctgctttcgttgccaaagatcagaccaacatttgcatcgatcaggtcaaggaagcttggaagaaagcctctgatgctgaagaacttgccaaaacccgactcagtgaaatgaactatcatctaaacattcactgcagaatcccatgtgagcagcgaccaagcgtgagatttgccgattatgttgaagaacacgtcatccatccaatagcagactcatcgaacaaatagtttcaacataagagtntgtctttct

SEQ ID NO: 55018 - DNA, 490 bp, Gossypium hirsutum
  unsure (1)..(490): unsure at all n locations
  Clone ID: uC-gsflnu33B111g03b1
cccatgcgtccgatgatgcaacaacttttatctaaggagattcttcatgaacctatgaaggaaattggagaaagatacccacaatggctagaagagcacaaagctaatttgagtaaagaagaatatgaacgttactcccgccaatatgagctgataaaggagcttaatggagtttatgaaaatgatcctaataactttaccaagattgttgacctgatgcaaaaaatgcaagagtgcggtcagccaccaaatgatattgtgcaagagcttgctcctgaatttgatttatccaatcttggccagctatccccagagattctcaattcacagcagaactgttgtataatgtgaggcaatatcctgttgcagactatgtttctttctatttaatagatattctttctaagtttttgggaaataaagtatctttccttcaactttntaagttaattgatccttcaagaaatgacatgctcaatatttttatcct

SEQ ID NO: 55019 - DNA, 256 bp, Gossypium hirsutum
  Clone ID: uC-gsflnu33B111h05b1
ctcctctcgtccggaatttgtaaattccatagttggttgtttaaaaaaaaaaaaaaagaaaaatcaaaaaaaaaaaaaaggggctactaagctttgtggtatctcagtgctccctgggtccgctgctggggggtcccgccttgtcgtgccgtctcgttccgtctgccttgcgcgtcctacttggccacggtgtgcggcgtcccgtccctcgtttgctgcgcgggtgcctccgctttggccttgcgctcctcgtcgc

SEQ ID NO: 55020 - DNA, 174 bp, Gossypium hirsutum
  Clone ID: uC-gsflnu33B112a05b1
agcggtgtcataccgatcgtggtggaatgtggggcggaatgttaatgggtaacgaacgaaagccgtaaaaacaggctactgtatatagttgatctttacggtatgtgaaagaattttatgttaaatgaaggaagattgaaaccaaaggacaaaacgtttcagggtcgtggggtt

SEQ ID NO: 55021 - DNA, 479 bp, Gossypium hirsutum
  Clone ID: uC-gsflnu33B112b01b1
agcattatgaaatctcccgaactgatagagttgggtttgggcttggaggcctcgaacaagccattcatttggatcttaagaggaaataatgacgcatcgaaccaggtgacgaagtggattgaggaggatggatttgaggaaagaataaaaggaagaggatttgtcgttgtgggatgggctccccaagtgctcattttatcacatcctgcaataggagggttcctaactcactgtggatggaattcaacaatcgaaggcatttctgctggcgttccattattaacattgccactttttgcagaccagtttaccaatgagagacttgtagtacaaatactaaaaaccggagtgagcgttggggccgatgaacctacggcctggggagaggaaaagtctgggttcaagttgacgaaagaacatgttaaaaacgcaatagaccaattgatgaatgaaggaaataaaggaatagacagaagaaa

SEQ ID NO: 55022 - DNA, 476 bp, Gossypium hirsutum
  Clone ID: uC-gsflnu33B112b10b1
cccacgcgtccgatttttcggatttttgcttaaggtggaagctccctctgcctatgtctgtgctgatagcaagatatacgatgctactgaatggtatatttgtcagggaatgagatgtccacctaacacacataagccaagttttcatgtgaacactagtgtgacatccaagcatgctactggcaagggatcaagttcaggacagagaggtggcacaatgccaactcctcctaatctggaagaaacgatgaccgaagaagaattcttagcgtggttacagaatgcagtacaaggaggcatgtttgacaactttaacggtagcagcacctctgctgaaaatccatctacgaaagcagaaagcagctcgaagagcagcagcagcggtagtggaagcaagagaaagaaaaagggtaagaaacaatggtaagctgcagtcatcatgatttgtgtaggcccggattgtcgagagagaaagc

SEQ ID NO: 55023 - DNA, 405 bp, Gossypium hirsutum
  Clone ID: uC-gsflnu33B112c02b1
cataagttgatgctgtgatggctttatccaatctctcaacgtacaccgataatctcactgtcattattgaaaccgatcccgtcccttccgtggtcactttactgaaatcttcaaagagatcatcaaaaacggctgaaaaatgttgttccgtcatagaatccatggtggggttcgatgaaggaagaacagctttagcagctgaagatggtgggatactagcagttggtgaagtgctcgaaaacggcactcgtcaagctagggaacatgctgttggggctttattgacgatatgcgagagtgaccgatgtaaatatagggaactgattcttaaagaaggtgtaatccctggattacttgaacttaaaggacaaggaacaccgaaatcttagacgaaagctcaaacac

SEQ ID NO: 55024 - DNA, 431 bp, Gossypium hirsutum
  Clone ID: uC-gsflnu33B112c03b1
atttttataaaaaaaaaaagaaaaaaaaaaaaaaagagaaaaaataaaaaaaaaagagaaacttgattagaataaaaagaagggaatgtctcgctgaacatagcgaaaggcgtgcattttgtccctatacggggggggccctttttgggggtcccattttttggtcccggggtttgcaaagtatgtttttttttttggggcccccaaatttaattgtttggggggtgttttcacacgggtggggggggaaaaccctggggttcccccacttaaatgcttttgggggcctcccctttttccccggtgggggtaaaacagaagggcccggcccggattgtttttccaaacatggggcccccttagtggggagggggaccccccctttaggggccctttagggcgggggtgggggggggtttccccccgggggg

SEQ ID NO: 55025 - DNA, 430 bp, Gossypium hirsutum
  Clone ID: uC-gsflnu33B112c07b1
ataatgtgttcgattttggtaaattcagagatgcatttgacaaggcagcattgagtgtacctgaggtctatcaatggccatgaactatatatgagtatgcttgaaatttataaggattcaacgacagctctaatccttgaagggaaatgatgctgagttgtctgtaaatatttgcactcctgcactggaagatatgtttttagaagacgcaaacattatagtgcatagattttaatgaatggctaccatctattgtaatataaaatggtctccgattatattttggcgaccaacaactcttgcaccaaaactataaccaaaaccaataccaaagatatgaacgcccgcatcataatcgtggtttccagctccactgattttctatgtataacatctgatgaattgtctacccaaatcaaacgactgagag

SEQ ID NO: 55026 - DNA, 365 bp, Gossypium hirsutum
  Clone ID: uC-gsflnu33B112c08b1
attacgcgtacggttataactgatgatgaaaccaagactaagctttgcaaggttctatctgtccaatttggccagaagggcattacatacgtgagcacataccacgggcatactatgcgctaccaagacccgtagaacaaggcacatgacaccattaacctgaaccttgggagcaacaagaatgacggttaaatgaggaaagacgttgcgaatgttgatatgggcaccgggcgagggaatagaggtcatgtggcagtggttgaaaacagggcgaagcatactggtaggtatgagaccattcatgatcaagatgctggtgagcacgaataagcaactcagatcggtgatgtcactacaaacggaaa

SEQ ID NO: 55027 - DNA, 239 bp, Gossypium hirsutum
  Clone ID: uC-gsflnu33B112d10b1
cttaatggtccagaaaaacaaaaaaagagaaaaagggccttggtgtccctgggttgaacttgatccaactgttgactgccaaagccaaaacaaaaaaagagaaaaagggccttggtgtccctgggttgaacttgatccaactgttgactgccaaagccagcttttggatctgatcaatatataaaaacttcgtctttcagttttatcagtcaatgagacaaagatgtcaatttcacttt

SEQ ID NO: 55028 - DNA, 372 bp, Gossypium hirsutum
  Clone ID: uC-gsflnu33B112e05b1
cctattcgtccgctccaacttatcgccagaaattgtcgtaatttggtatctgtgaaaattagtgattgtgaaattttagatctcgtcggtttctttcatgctgctgctgttttagaagaatccaacggcggacctttctacgaccaacctgatgggtatgctgctgtaacattcccctcgaggttatgccgtttgggtttaacctacatggggaagaatgaaatgccaattgtgtttccttttgcacccgttgtttaaagaattggatctcctttatgcattactcgacacagaagatcactgcttgataatacaaacatgcccaactgcggaagttctcaagacactgaatgttatcggagatcgaggcta

SEQ ID NO: 55029 - DNA, 469 bp, Gossypium hirsutum
  unsure (1)..(469): unsure at all n locations
  Clone ID: uC-gsflnu33B112e07b1
tttacgcgtccgaccaggcgtacggactactggctcatcgtctaatgtatgcgttcaaactgaacctgatgtagagggatcgaatcatgacggctctgccattgcggttacctccgttgcaaagtcgcttgtgccgactcggcgacggctcacactcgatccatgctcatgagcgatattttccatatgaacctggcaaacaggagatcgagcgcattcacgatcaaaaacacaagctggtcatatgcagctatcaagtttcaaacaactgaaccagagagctgcaacatgcgccctccgngagccattctagcacccgacgagagcatcatagcaaccgtctatacgttcgaggagccttctgaggacaatgaagaacggatggatctgaagagcaggggtaagtgtaagatatgagtcttaacgagaaagcggcaatggactacataccagagctgcttgatgagca

SEQ ID NO: 55030 - DNA, 391 bp, Gossypium hirsutum
  Clone ID: uC-gsflnu33B112e10b1
tttgaggctcggagtcttgaggagaagcttgggggagccaccatggtaaacgtctgttctgttacaaggcgggagatatgacgcctggagttgaaaggagtataacgctgataacatgatggacactttacgcatctttcttaagatgggatccgaacagttgtgtggcggtcaaatgcgtgatatcaagggggtaagaatgactgcacaatgggcgaacactgcatcctactcataatatgaaaaaaatggagacgaagctgccagtgttcacaggagataatgatgacggacatggctgcaatgaaaagaataggaaccgtgatccccaacagaatgagatagagcttactgtaaatgcagaggtacttcgaatattatgagagctttt

SEQ ID NO: 55031 - DNA, 392 bp, Gossypium hirsutum
  Clone ID: uC-gsflnu33B112f09b1
tttacgcgtccgctgaaactgagcttgggcttgcagagcatcagggaaagtacatggctggtgtggtcaagaggctttgtcaagcttgacattccccacacttgagggtcgcatactttgttgattgttcattaggtgaattgtgtttgaatttgtccttggtcttgccatttctcagcatgagagatgtcacttatattggtatttatttcaccatttctttttgtcaattccattcagttgagaaagatgtacatgatttgatcttcttgtgtcttgtcttatcaaataagatgtatcatatgtggccatggattttttgcgtttgtataatttccattgggtaattcaccacaagctttgatttaataaaagaaatttcatttgtctgt

SEQ ID NO: 55032 - DNA, 425 bp, Gossypium hirsutum
  Clone ID: uC-gsflnu33B112g02b1
ggtgaaaatggttaaggggcatgtagggtacgaaaccaagggcccgtaaatatgtttctaactgtgcaccggcaatggcgcgcggcaaagtggtaaaggaaactgagggagctacccatagccagccattgagagaatgacgatggatacgtacgcaggaggtggaagctggactaccatcttaagcgggccacccaacagtaacgcatcgactacatcaaatcaagaccctacataccaatatactacaccttcaccatcacaacaagaactgcagctggatcaacatgatcagccactaccttctcactttgacctcttacacgatttcctttaataaaaaccataaccttatcactgtatatacgtacatttagttatgggtcagttggagagcagcagctggtcgagaatttgggtgatgc

SEQ ID NO: 55033 - DNA, 489 bp, Gossypium hirsutum
  Clone ID: uC-gsflnu33B112g07b1
ggtaaaaataattctgatgattcttactatatgtctttaaacttttgaacatttcaagaatttgtactcaaagataaacaatgatcgtttcagcatttttaaatacccagactatcttcacagtatcaatatcagatcttcttatggcatgcggttcttctaggaaacatacacttcttaattagactattcatctttttacccgtgaagaaataaaatcttattctcaagcattaacatttcattatattctaaacacatattccatacagattgaacaatcaagtcgaccttattcatctgtaattgatatttcaagaaattctctcttctagtcaacagaacgattcaacatgcatcattctaaattcactcatcatgccaattgaagaccataacatatgcattagcataagtaatattgatacctcatctgagtacattaactctgattaacttacttgagaaaggaaatccaccatacacatt

SEQ ID NO: 55034 - DNA, 465 bp, Gossypium hirsutum
  unsure (1)..(465): unsure at all n locations
  Clone ID: uC-gsflnu33B112g09b1
cgtctctgccctgctgccctgctgctattatttttttttggcaactgctttgttgcttcacgtctctgctctgttgttattttttttccagcaactactttgctgcttcaattactctacttcacatctctgccctactgttattttttttccagcaactgctttgctgctgatttgctttggtttctatattctctaataaaaattctatcttcacgtctttgccctgctgctattaatttttttcggcaactgctttactgcttcacgtctctgccctactgttatttttttccagcaactgcttcacaactgatttgctttggtttttcggcgtggctgctgcaatttattttacatngtttgtcttaacatttgcactgngagctagtcctggtctaggtctcttcttacttgaaagtttcccaaatcgaatctgcgcanaagctatggcattctgtatgt

SEQ ID NO: 55035 - DNA, 221 bp, Gossypium hirsutum
  Clone ID: uC-gsflnu33B112h04b1
aatttatatgccgggggaaatgtgttggattgagagggcatgtgattggtataattatgaacacttccttctaaatgcatttttttgtttccttttaaatgcctgataaacccctaattgaatgatatatacaggcttaaattcaccactgtttattttacaggttcaaattaaaccttatggaacaaaactgattaatgcatggaaacaagaagaaaatg

SEQ ID NO: 55036 - DNA, 484 bp, Gossypium hirsutum
  Clone ID: uC-gsflnu33B113c06b1
cccacgcgtccggggatctgtgtcgaggaagaagaggtggaagagtgtgggataggcggtggtgggggacaaatcttcggcggaggaagaggaggtggtggttcggacagtgaggataacgaatggggcttttgcgattcgaaaaacggaaatgatagtaccgatttgtattatcagaaaatgatcgaggctaatcctggaaatacacttctcctcggcaattacgctaaatttttaaaggaggtacgaggggacttcgtgaaagccgaggaatattgtgggagggcaatattgataaatccgaatgatgggaatattttgtctatgtacgccgagttaatatggcaaactcacaaagatgatcggagagctgaagcttacttcgatcaagctattaaatccgcccctgacgactgttttgtgctagcatcatatgcacgatttctttgggatgctgaagaagaagaagaagaagaagaagtga

SEQ ID NO: 55037 - DNA, 482 bp, Gossypium hirsutum
  Clone ID: uC-gsflnu33B113c09b1
ttccagaactatatgcacatgatatcaaatatgccatacaatttcaagtttaaacaaaatatattctaccttaccgccacacaccacattgggagtttccaagaactctaaccaccaacataccaaattgtggattaaccattaatagtttacagttttactactgataactgtgaacacacaacaatacatcgcaaatggaatctactatggttgtgggtgcacgacaaagtattgcaggtgaaatttgtcaatggctgtggaaacacaacatgctcataaatgataactatcagagggttgtgattgcacaacaaaacatcataagtgaaatctgctatggttgtgggtacacacaagaccatcgcaattgaactctactatggttatgggtacacaacaaaaataaatgcagatatactaccgattcttccttcgatcatatcgtcccaatcccatgcaatatgcaatatgaatgacaa

SEQ ID NO: 55038 - DNA, 344 bp, Gossypium hirsutum
  Clone ID: uC-gsflnu33B113c10b1
cattcatggcctaattagcatcctcccatgctagaaagagagaggccttgttttaaagtggtagttcttttcttcttcttttttttttctccattagtaatttgctagctcagtttcattaaatattaccattatggaacatacactgtttcaataaaaaaaaaaaaaaaaaaaaaaaaaaaaaaaaaaaaaaaaaaaaaaaaaaaaaaaaaaaaaaaaaaaaaaaaaaaaaaaaaaaaaaaaaaaaaaaaaaaaaaaaaaaaaaaaaaaaggggggccctttttaagggtcccaatttttcttccccgtctttgcaactaaaaattttttttttggggccccc

SEQ ID NO: 55039 - DNA, 132 bp, Gossypium hirsutum
  Clone ID: uC-gsflnu33B113d01b1
ttttatgtgctcaacaaaaatctgtcaactttattcatgtagtatttgagtatttgaatgatgatagttcatatcatatactcgaatatatgtcaaatgcagctattagatacctctaaaaaaatagtgtct

SEQ ID NO: 55040 - DNA, 309 bp, Gossypium hirsutum
  Clone ID: uC-gsflnu33B113f01b1
ggtgtcttcatgtacctgtcgataatggcacagagaatggaaggacggcaacatcatcaaccactaacacttcagaacagctacagcgatgaacgttaacgtcgctcccaatacctaacttgtaagtcatggatgtaaaatttgtaggtggttgaccattttgtatgtgtctaatcatgtatttgaacaaatagggaaaaatgttgagatgaattgaacaaggaaaatatagaggtttgtatgaaaaaaactagtaataaaaaataagttggaggcgcaaataaacgataaatcaattaaattgagaac

SEQ ID NO: 55041 - DNA, 481 bp, Gossypium hirsutum
  Clone ID: uC-gsflnu33B113f09b1
gtgaacatgagttataggatgttcaacttttatcccaattgacatgcaataatcattgaaaacttgggatgtaaactcaccaacattagcaagatgaattattttaactgcataatcaaaatttaatcatttaaacaagcaatcttgcaaatgacaggttgcgagttgataacacatatgtgattattttctagatgcatctaccaaaatcttataatatcaaaactatccacatggtggatgaacgggcccatatttgtttcagaaatgcaagacattaaatctcaactttagctagcgagtttctaattgtaatgccctaaaatacttatttatgtttctgtaaaattgtgacacaaatgtgtatctgcttcactggttaagtgttctgggagtgtctgagaggtcttaagttcaagccctagctttagcaaatatttttatttttggaattaagcactatctctatcgacgtcacacg

SEQ ID NO: 55042 - DNA, 483 bp, Gossypium hirsutum
  Clone ID: uC-gsflnu33B113f12b1
ccctacgcgtccgaagagatacccattattgatttgagttacctctttcattttctctgttgattttcttggcatccaagcaagggagactttagccctccactgctccttcattgatgccaccaccaccaccaccaccacaactcctttctcactttaatttcgacatttcccttcatttccgctctaaacccatatccaaatcatccccactatccatttttccgccgtcttcttcatttctcgccctccaatcccctctccccaaacaaagaaaccctgtacttttccttacccgtgccacttctcaaaacgacaatgaccaaccacctcaagggacaccttctcctcctccactgccgcaaggagctaaactcctccctttcctcatctgaatttcaataggcagtagcagcaggggaagaagaataagaacaacgagagagcaagaacttgaggcaaccctttggtgcttcaatagaa

SEQ ID NO: 55043 - DNA, 468 bp, Gossypium hirsutum
  Clone ID: uC-gsflnu33B113g12b1
cccacgcgtccgaaaaaatctcagagaaaagaaaaaaaacattctgctcccttttccttggccgaacgaaccaccatcggccccgccgtgtgcagtggtcagaggctcccaacggtcggtttttcaaccccgtttcagggaccaactgaaggcccaactttcgtgggctcaggactatggagcggaaccccaaacgccaccctcctagtccgatttcggtgacccgaaggaggacttcggcgacggcattggcggggcgattcaggtgtttggtggcgggctacaaaggcagagggtatgggcggatgggacacgacgaacggtggtggcagatagggtctaggatgcggggtacggcgccagaaaccgtagggtttctggcattctgtaatgattcgggctatttggggctgattgggttttgggcttatttcattgggcttcagatttttggggttgtaatgggct

SEQ ID NO: 55044 - DNA, 485 bp, Gossypium hirsutum
  Clone ID: uC-gsflnu33B113h04b1
cccacgcgtccggctaaattgaaatttcagtgcctgacccaaagccagtcctctctcgccttcaggtttctgacagaccatgaaattaaatcaggccgattccactgcggatgatcttgagcctctgttcgattaccgccgtgttcagccgctgaacattgtttgcttagacgatgactgttcagatacttcaccagttccatcaccaaaacggaggaaatttgctaatcccgatgttgcggaagtagatttggataaagatgttgaagtgataaaagtggtgaatgttgaagaggaggattggttggctccccctcctgtggtttcaactaaagcttatagcaagattggcgaggattcaaccataaaggagttaaggcgaaggaaacaggaattgctttcgtttgcacaatctgcaaaaatcatgttgcaagaagtggaggaatctgcaaagcaagaaccgagtggttcctcgaaaccttctt

SEQ ID NO: 55045 - DNA, 487 bp, Gossypium hirsutum
  Clone ID: uC-gsflnu33B113h09b1
tttgaaatacaaaaagtagagcaactaaattcttaaaaataaaattataagaactaaattctaaatttataaagagtacaaggacttataacatatttgtacctaatatttttagagacttttttttaataatttaattataggctttgattatatctgccttttttgacacaataccaaaaactaaatatgatctctcatcaacctataaataggagtacaattcatttttatttctaatactcgtattagaaagtgaagaaagtgaggtttttatagttgaaataaaatgagttgcatttttagttgttttgttaattctttcttaatcattttttttgttgattcaggaaaaagttgggtattggttcttgaaatattaatgatatatagaagaatatccatgtatatctttttaatgaaaaattttataaaaaaatagaatttccggattaatcgaatattcttgtttttactatttgcgaaa

SEQ ID NO: 55046 - DNA, 402 bp, Gossypium hirsutum
  Clone ID: uC-gsflnu33B113h10b1
tttacgcgtccgcccacgcgtccggaaaaagaaaaataagagagaaaaaatggaggaagaaaaataaaaggcaatgatggtaataacgggggcggcggtttgtaagtgtaaatgctttgagggtgggcggttttaaaggtttcatttttatattcccttccctgcaatgctataattttttttttgtttgccctgaattgatttccgtggccgttgttttacaaatttgattgtgtgaatgctttgccgttgcctagtttattggttttggaggatatacgtttttgcttatttgccttaatagcaattgggccgccttacttggccttttcaatcattttgattggctatttgggattgggtaccttccttgttgcgtcccattatccccgacgtttttgt

SEQ ID NO: 55047 - DNA, 482 bp, Gossypium hirsutum
  Clone ID: uC-gsflnu33B113h12b1
cccacgcgtccggcagttaatcgctacgtacaacccgcaatcgcgcggtagctacgttaatggctatcgcattggggtcaaccgggccgacttagcccgtgctttgaatttatctgtgaagaaggataaggataaggatagcatccttgatattgaagagtcaaaggaatcggtaggctttcttgaggaatttgtgtcaaattgggtgcttttgcacgaggatacgtggatgatgccagcggaggtgttgaactggactaaaatgattaaagaaggccatttcgagaagatagattgggctggtttgatttggtttatggtggagaaagagctcacgtctgcccctaaattagggaattgttactatgcctcgcacatgcagtgtttgataaaataccagaaagaagagctgctgctggagaaaccagaaaaggatgcttatgaggccaaggaggaagaggaagagcataacgttcctgagg

SEQ ID NO: 55048 - DNA, 272 bp, Gossypium hirsutum
  Clone ID: uC-gsflnu33B114a02b1
cccacgcgtgcggttgaacttctagggtctatttttacatcaatacaataataaggcccagtattcctctctaaacaaaagtatagagataagcacacgagggaggagaatattggccttggaatactctaacccttcgacgccagacaaaagatggtggattctagtggctcgcatgtgaaggtaaagccccttttttctttactttatttactctcgggtggtagggaaaaacacaagacaaggaacaagcacaagaaagggaacgcctg

SEQ ID NO: 55049 - DNA, 489 bp, Gossypium hirsutum
  Clone ID: uC-gsflnu33B114b03b1
ttgtcactgtaacaggatggccttggcaaggtggacccaatgaacctgatgccactgttgaaaatgctgggaccttcattaattatttgattcggcgagtttccaatgattcaggccctcccagtcggccaaatattcccatcaacacatacatttacgaattgtttaatgaagacaagagacctgggcctgtctctgagaagaattggggggtgctttatacgaatggcactgctgtttttcctttgagtttgagtggttctagtcagattatgggaaatgctacgacagttttctgtgttgcaaaagacgatgccagtgaaggtaagttgcaagatgggcttaactgggcatgtgggcaaggccaggccaattgcagtgttatacaatcagggcagccatgttatctcccaaataacaccaagaaccatgcatcttatgcttacaatgactactatcaaagaatgcataccgttggtgcaacatgtg

SEQ ID NO: 55050 - DNA, 511 bp, Gossypium hirsutum
  unsure (1)..(511): unsure at all n locations
  Clone ID: uC-gsflnu33B114b12b1
ttccactcacttgccaaagcgaacagataatgagataaaaaactactggaatactcatcttaagaaaaggttagccaaattggggattgatccgatcactcacaagccaaaatctgatgctttactctccattgattctcaatccaagagtgcagcaaaccttagccatatggctcagtgggaaagtgctaggcttgaagctgaagctagattggttcgagaatcaaagctacgttcacattcacattcatttcaacaccgcctgactcgtccaccaacagcagcttttgcttcttcagccggtgagcttgtgaataagacagcttggaacagtactgccgggtggagtaaatccagtgaagttaataatggtgttgtaaacaatggatttggtgacctcgaatctcccaaatcaacacttacttcctcagatnatggggttggattgagttcaatgggtatgccagattttgttggcactgcatcagcttcatctcagatcaaacaagag

SEQ ID NO: 55051 - DNA, 315 bp, Gossypium hirsutum
  Clone ID: uC-gsflnu33B114c07b1
tcgcttacgcgtccgtccactcgtccgcagagtgctgccgtcggtgccatcaagagtgttgagaagaaggacccaactggtgctaaggccaccaaatctgctgccaagaagaattgagagatcattggagagagaattatatcaggtttcattacagctctggacaattatcttaaatctggactttagaatttacttgctgtgagactttgtgatttgctttgtaaacaaatcctagttttatatttcaatatagattaatgttcttagaagattccaatatagaagctagagatgagagtggcttcactaatg

SEQ ID NO: 55052 - DNA, 422 bp, Gossypium hirsutum
  Clone ID: uC-gsflnu33B114d01b1
gtatatctttgatctatttggaaatcttcaaaacattcattggttgttataaataataaaaggggatttagagacattgtagataagagtgttttgaaaatttaatctcaggaatgaacgtagtaatgatgtggtaaatttttagcatctaatgcattatgcatctaacaataacaaagattgtttgacatttgctttacattcaaatgcatttccatggatgcataagatgtcatatggagtttggacattttactttaggatatatgttcataggttttgtcttgtgctggatgtccactatgttaattgtgtccttcattttttataaagtatagtgttcaatacttgtatttgatgcaatttttggatatggatattcggatatgatcatctaaaataggggaattttttctcttttc

SEQ ID NO: 55053 - DNA, 346 bp, Gossypium hirsutum
  Clone ID: uC-gsflnu33B114e11b1
gttgatatatcctggtctgacttctgtagcgagctcatttcaatatttcgttcctgcgttgaaggagtgtgccttgcctaccctatgactatgatgtttgaggacggccagcctcatctttggatcctgattgtatgatatgaactgtatatattaattgttgagctagatcaaatgagcttgcaaaggtgaagagttgaacaaagagggcggccattctgaatgttccactcttactttcacatacaggccactgaataagccttttatagggtcacctaagttatattgggtggcggatactttacaacatgttgactgggaataccccgacatttcccaactt

SEQ ID NO: 55054 - DNA, 306 bp, Gossypium hirsutum
  Clone ID: uC-gsflnu33B114f04b1
cccacgctttcggccaattgaaagaaacctaccttagggccaccatgaggagaatatgtctaagggtctgtcttccgtattttgaaaactttaccaaccgtgtgcatgttctagataaataaaaccaagaaactcattcttgttatccagctgcttattcaagtgatgtttcctattaaaccctacgcaaggattctgcttataaaactacccatactaagggagacaatggatatgatgctttttgttttatataaattatggaatttttttttcaacttaaatcatcgtatgttttttaggatt

SEQ ID NO: 55055 - DNA, 533 bp, Gossypium hirsutum
  Clone ID: uC-gsflnu33B114f05b1
cccacgcgtccgatctgtatttgcataaatatatatatctatatttgtatctgctactgagactgtatctattctgttttgttctgtttgtttgggttgagttacacactaaggttgttagctcaccctttttcttttatcccttcgggtgatcagcaaacctaggattagacgacgtgtagaagctttggattctctgaaataaaatggttttaaaagtccttgtgattgttatagaatttgtggactgtaaattattttgggactttattctccatttttgagttactttaacggatttaaccactactatatttctaaactgtaaaattatttgttttataaatcaaaccaagattttcaaaactctataacttagaaaatttctgctacaaaatgagatggtcactcaagtatttttctgtaataaaataaatagttttatttggtaattttcttaaaaattggaaaacggtctatcaaagttaacattgttatatttcacaatttctctttcaaaatctggttttaaa

SEQ ID NO: 55056 - DNA, 418 bp, Gossypium hirsutum
  Clone ID: uC-gsflnu33B114f08b1
tcgttttcgcgtccgcccacgcgtccgctgaaatattagcaaaaaagaaaaaaaaatagtgtaaacatgcatgtgaagaagattgttctactttttgtcatggtttcagcttttcttttatcaacttcaatggcaggtgggttctttcttcaatgtctctttttttttttgtgctgcagctttaatctggtgcaaaagtcatgcacgctttgtccacgaaatctttgtatcgggttacttaatgatcaatcgatttcatcactttaaaactacaaaaaacaagagttgtttagggtttataatacataaacagtttgacgacaaaattttacaggtcgacgacccaagttcctgaacttgttggctgaggaaacggatgcaagctttgaggatagtggtgaagcaagtgcagtccatg

SEQ ID NO: 55057 - DNA, 433 bp, Gossypium hirsutum
  Clone ID: uC-gsflnu33B114g08b1
gcttctggatgcaattagcaagttagaagtttatcttaatcgcaacctggagagggctatgaaggaaaatgacagggtttatcttatgagggttccttctcctagttccttacctcctctccctgcattttcgatggtgaagtcgatgcagatgaatgatgtgttggatgcaagcaaggagaagatgtttgcaagtcttgttcctgacagcagtgcaaaggctctttccaggtatactgaaatggttgatgatgtcatcaggacacaggctgagaaattgcagcaaggaagtgagctaacccgtgttaggcttaaggaaatggacttgccagattcaattcttgctctggaagggaattttagtcttccagaagatcttaagaatgaggttgaaaaggtgcacgctagtgggggcccagctggtctggaggct

SEQ ID NO: 55058 - DNA, 186 bp, Gossypium hirsutum
  Clone ID: uC-gsflnu33B114g10b1
gttgatgtgataagagttggaagacaatacatattttttctgctatatttgagaatttgaactgttgcatcctactgcaaaatgagatctgatgcgaccttaataagtcaacagctttgaatcttaagatgctctcaacttgtagtttgaccaagtatagatacatgattggctatttatatatac

SEQ ID NO: 55059 - DNA, 369 bp, Gossypium hirsutum
  Clone ID: uC-gsflnu33B114g11b1
gtgttaccgtggacctattgggccggacgacggcttaaaggtgggtgatgtacaatcgacgttacacagggctgcaggggctgccaatgccgagggcagacgctctgacgggcgcatcttgaagtggaacagatccatggccgcctgcactcaagcgtgcacagacgtatgtgtgatagtgcaaagagagtgattcctataagcttgaggcgagggcggagggatggccccctcttatctacatgtgggtggtgaaccttcggttccgcgctgttcgtccagttcactcccagcattggcatctgggagtggcggtgatcccaatcattatgataccgatgccaacactgatgcccggtttaatgttat

SEQ ID NO: 55060 - DNA, 216 bp, Gossypium hirsutum
  unsure (1)..(216): unsure at all n locations
  Clone ID: uC-gsflnu33B114h10b1
ccctcgcgtccgccatgagatgatgaacaaaattaaaagtggtgggtttcaagacattgatgttattaataatggcaaaggaggtgggggtgggggcggtgccnccgtttgcggctaatccttgcccctactcacacctcgggtaggtcagccggatctcgtggggtcttcgtgtggtctttttgtttatatcctgggccctatggcatacccttc

SEQ ID NO: 55061 - DNA, 228 bp, Gossypium hirsutum
  Clone ID: uC-gsflnu33B115a10b1
tatctttccacgcgtccgcccacgcgtccgtggttatcttaacagtttagaaacaagttctgcaggtttgctgtgggtgaaacgggaatcattgtagcggccttgtagtctctttcaaactcaatatatgcttgaggattttcttcccttctcttttccaaaaactaaagatgattactttaggaaatgtgtatgtgcaaagagatggccctacatttacaaacgaag

SEQ ID NO: 55062 - DNA, 514 bp, Gossypium hirsutum
  Clone ID: uC-gsflnu33B115c04b1
ttccacgcgtccgcttacacattgcttcctttggagcggaaggagttgtcattctaataatcgtcaagtactaatacagattattgtagttcttctataagaatgattatggttggaaaaatttctgagactgtcatgtttagacttttgtcaactcctaattcagtctcgttttgttagttcattggtagttggttagatagtgatggctgggttattcacttcttggtatcatttcacccttcgggttgtttcttgtattgtggctggttgcagcagttgattcactccttcctctgaatttctcgattagtggtatggaagggggcatttgatcatggggaaagattttgatactctgcgttatgcaagctatggaaaatactattatatgacgcttaacccaaagccgatcgggtttggggtgtctccttccttcaaaaggtccattcaagtgccttaaccttttatctttacatgcattacccttgtgtactgaaactattctatgctc

SEQ ID NO: 55063 - DNA, 506 bp, Gossypium hirsutum
  Clone ID: uC-gsflnu33B115c05b1
ttcaatctctgttatttgcttaagaacatatggggggagatatactgccgtatatcttaaacaggatggtcaatcccttactttgaagatatcaagtaacaataggagagtgtatatgcatgtgctgtcattataagttaatatagtaagtagtattgggtttaattgaggcgtgaaacttggtctatgtgtgaaggagctacaccctccaatgaagatgttgcttcccatatggaaggccttgtgtgctagcattgacaacaaagaaggtccagacacatgtggggaaggtgaaggtggctgatgtcaaggccgtgaaagtagaaagaggaatatatgaaaacacatcaattagcaaagaaaacgtatgtggattgcttgctgcaagcgtagagaagagataggggtaaaatgcattctcgtcagagtaaaaacaatttagtccttttttgtagaagaggatgagcattagagattatcagcaagctgtcttgtgttaaaggaac

SEQ ID NO: 55064 - DNA, 513 bp, Gossypium hirsutum
  Clone ID: uC-gsflnu33B115c11b1
tcccacgcgtccggaacaaggtccatacccttttgaacaagcattcgagtccttcatcaatggcgtttcacacttcggtccatttttcgaccacgttttacagtactgggaccaaagcttgaaatcccccaacaagatactgttcttaaagtacgaagacctcaaaaaggaccccaaaggtgaggttaagaaactggcttcgttccttggaaaaccattcaataatgagaaagaggttgaagacgtaatatggaggtgcagcttggagaggctgaagaacttggaggtgaacaagaatgggatcgacccttgggttgggatgcaaaacagtgcattcttcaggtctggaattgttggagattggaaaaacattatgagtaaagagttgagtgagcgtttggatcaaatcacgaggcagaaatttaaggattctgggcttcaccttgagatatgaacccccctttggacctcttctctcgttatcttttgcatcatggaataaaatcaataatt

SEQ ID NO: 55065 - DNA, 433 bp, Gossypium hirsutum
  Clone ID: uC-gsflnu33B115d01b1
tttctcgcgatcgctggaatgaaaccaggatccaaccgtttatcactatggcatacatgactgcaaaaaagtcagtcatgaggtcagagaggaggccttagcacgtgcctatggagcatttgacggaccatcttcggcactccataactcaaactaaaactaagactctttttaacagcctctggagcaatgatgtgagcggctatggggatagcttatggcataaaagaatacattatctccttgcagctccgtatacggatgagtatagctccgatgatcgctccaacgagcgagctacatggactgtaacagatacccgttttgaagacggccattaagtccatcatgatgttcaccaagctgatacccaacctgatagctagatagactgcttgagcacctgcatgagcctgatctgtgaatggagctt

SEQ ID NO: 55066 - DNA, 432 bp, Gossypium hirsutum
  Clone ID: uC-gsflnu33B115d07b1
ttccacgcgtccgttcaatgctggtggtggtggcactggttctggtcttggatctcttctcttggagcgtctctctggtgactatggaacgaagtcaaagcttggcttcactgcctatccttcacctcaggcttctacatcagggtgagagccttacaacagtgcgctgtccactcattcgcttcttgagcacactgatggcgctgttcttacggataacgaagcagtatatgacatgctcaggcgttctttttacattgcacgacccatttataccaactttaaccacctaggctgtaaagtcatctaatctgttaccacatctacaaggcaagctggacccctgaatgtacatgagactgagttccagactatcctgttcccatattcaacgatccaccaaatgcttttttcttatgcccctgtctttcc

SEQ ID NO: 55067 - DNA, 503 bp, Gossypium hirsutum
  Clone ID: uC-gsflnu33B115d10b1
tgttcttccacgcgtccggtacttatgtgttgatgtttcatattttatatactgctgatgattatggtacgaacttactaagcttttgaaagcttactttgtgtgtgtgtttgcattgttttatagatattaaagctactgtcagcttggggatcgtcaaggatcatcaccacactatcaaacctaattttggtactttgaaaatgtaaatattaaagtatggcatgtataggctagaagttatggaattatgttttgtgatgtatatatttagccatgtgatatggcttggtatggttgtggatatgtcatggttttggtataagatatgtgatgcaatatgatatatttgatatgttttagttggacaaaagaaatggtaaatgttggtaagttttggcaagttttagcatgaaattgaatgatgtatagaaataaatgtattgacaagcttttgacttatgttctgaataaattgtaaggcttttgagatatatttgatt

SEQ ID NO: 55068 - DNA, 367 bp, Gossypium hirsutum
  Clone ID: uC-gsflnu33B115e01b1
tttattggtggcatcacgatagtgaatgacgctttcaatgccaatcccgacagcgtcaaagccggcatcaacacgttgaaaaacatccattgcgatggacaaagagttgctattcttggggacatgtatgaactctgtactcatgagatagagtatcatgaggaggtattaaactattgtcttgatgcctgtattgatgtaattgccattgctgggcagaggtttcatttatcagctgacaatatgaatctaatgaagaagactaatgctgtacgtgctgatgaaacagaaaatcttattactaacatctagaactgtttgaatatgaatgatgaacacctagagtagggagggcgtcagatgcaaa

SEQ ID NO: 55069 - DNA, 469 bp, Gossypium hirsutum
  Clone ID: uC-gsflnu33B115g07b1
tcgtggacgcgtgggcaagtcatatatttcttgtagctaataagatcccagaaaaaaaaaatggttctcggagatctagcgagttctatcggtaatgtcgtcagcgacattaccggcatcaataaaaccaccaagaccgtcacaggcagtgttgttttagttaagaagaattttttggacttcacttccttgacctcaaccgaagttgatggccttttcgagttgcttggcaatggtgtcactctccagctcgtcagtgctgaaaatactgatcctgcaaatgaaaatggaggaaagctggggaaattagaggcattggagtattggaacctgacatatactcctacattggctggtagtgattcgttgtataaggtttcatttgaatgggacgaagagcttggaattcctggagctatcatcctacgaaataatcatgcggctagagtttttctaaagacaattactc

SEQ ID NO: 55070 - DNA, 510 bp, Gossypium hirsutum
  Clone ID: uC-gsflnu33B115h12b1
tcgtctgttacttataattcactcaaatattttaggagatatttacctgttacttataattcagaatatttaggaaatattcacctgttacttataattcgaggagtatcttctttttctttgaatttggttttcaactcatccgttgcttttctcaatctgcttggatattatcaaattcggttactgggtagtctgtttcagggtaggttcttcttttcttttgaactttacttcaaaattttctaagtaatgcttttgtttgcagtctctctttgcaacattttaacttaagataattttgatgcatcattaataagcatactgtgcatgcccatattttagcttctaggaatacatggctgctttcaacaaatagagaccaaaaagaaaaaaaacctttcttagcaagatgattgtaattacttaatttcttagggaatgtcatgaatgcattgcacgagattgaatcaatttcgaagtgatcaaagaatcctgttctgatccaag

SEQ ID NO: 55071 - DNA, 344 bp, Gossypium hirsutum
  Clone ID: uC-gsflnu33B126a11b1
ttataagagaaaaagttattgaagaaaggatgcaaatgtcaaactgacagatgctcaagccctataacacccgagggtatagaagaaggaggaaatgcgactgatatccctgctgatatttctgtccttaacaacctgcgacagggggggctttttaggcgaccgaagcaccttgctctgcgggcctcagcttgcactcttttttggggaacacatagctgatcttcgggcccagtttgatccacccgatgggggggaaaacccttggtttacccccgaagagatgggacggggccctccctccttatctcccttggaaaatgaaggaacggcgcgcccttgag

SEQ ID NO: 55072 - DNA, 165 bp, Gossypium hirsutum
  Clone ID: uC-gsflnu33B126b11b1
attcctttttccttttttggttctttccctttggcttttattttgagttattatgaattatatcactgtccaaaagaaaatcacacagcgggtaaaggtggtcatttatgaaaattgaagatattagtaattcttttgcattgccaaatcttttatctgcagatt

SEQ ID NO: 55073 - DNA, 439 bp, Gossypium hirsutum
  Clone ID: uC-gsflnu33B126c09b1
tcgttcgaccttacaacacttttgttatgggagctgaatggaaatggtttttcagtcttctttcccttacattagtctgcgtcctcctcctcgtactttactcgatctcacctttcagctcccctagacctttcccttcactagtccaactcggccttccatatccaccaccttttgggtattatatattcggtggaaaaggtgataaagatcggatctttaggttactccttgctgtctatcaccccaggaatcgttatgtattgcatcttggagctgatgccactgatggcgaacggtatagtttggttgtggctttgaaatctgcgcctgctattaggagcttttcaaatgcggatgttatagggaaccctgatcggcttctgtacatgggttcttcgtatattgcttccactttgcacgctgctgctatcttgat

SEQ ID NO: 55074 - DNA, 547 bp, Gossypium hirsutum
  Clone ID: uC-gsflnu33B126d12b1
tgttccttttaagttttgtctttcaaacgatgaagcaaaagattgtagggtttataagctttttgtcgttagcttttcttcttctttgttgctcctcaacatctgctcgtttgctcatgcagatcaaccatgaaacaggtgaaaaggaggttaaagcaaacgagatgatcattcaagcagatgctaaagatgatttctcaaatttgattggagcagaaaagtgttatgagaaagatgaagaatgtttggaaagaaggatgattgcagatgctggtctggattacatatacagccaaagtaataagccttgaacgagtggcggaggtcggatcctcgttctgggtataaagtagttttaaaattcgtaaatcaacatttactctattaatggacctacagaatatgaaatattaaatattgagctcgctttaatagatatattgaaaaataaaaaaaataaaccttaaaattatataataaaaattagccataattaataaaacacacaggaataattatatagttttacatgtagtcttgctatgat

SEQ ID NO: 55075 - DNA, 477 bp, Gossypium hirsutum
  Clone ID: uC-gsflnu33B126e10b1
tgttctttgctgcacaaactctagagaaattcttccatcgaactttgtccatgtgtcttttatcataggactcttcatcaggcaatgcatcggtgggttcatcaacaagtcgaaagcttgtttgtagagaaaaaaggtgctgcatgtaaatggccaaccgattgcttcttttgccttcgagatagagcctaagacctgtaactggtctcatacctacatcaacctggcatagaattggtaaccccacaaaagaacttttgcagcaaaagaaacaagaaacagcagaagcattgaagaggatgaaaaaagaagtttactggaaaggtgttaatataaagcttgtgacccatgaacttgaactgtaaaaacgaattgctctgtcgcttgtgctgtaaaccacggggaaaccttttgaaaactgtggcccacccccttggccgctggaaattcaaacacaaatggagggtctttaagtga

SEQ ID NO: 55076 - DNA, 313 bp, Gossypium hirsutum
  Clone ID: uC-gsflnu33B126f02b1
tccttgcgtccgaaaaaaaaaaaaaaaaaaaaaaaaaaaaaataaaaaaaaaagaaaaataaaaaaagggaaagccgatttgtagatctcggggttctctttttgtggctgggggggggcatctcgttgatccagggtttcgtgcgtcttattgggaggcccttgttttcttttgggggcccttaaatctcctttaattgtccgcgtttttcccctgttgggcctgggagaaccttggcgttgccccttttgactgcttgggcgctctgcccgtttttttcgtctgttcttaataccttttaggcctgtttgg

SEQ ID NO: 55077 - DNA, 551 bp, Gossypium hirsutum
  unsure (1)..(551): unsure at all n locations
  Clone ID: uC-gsflnu33B126f12b1
tccacgcgtccgcccacgcgtccgcggcctcctacccatccagaagctcatattcacagacccagttcaagccctaacccagctcaaggaaaaactctcatcgtccttcgctctccgagtcggctcggcggccctcgctgacgcgcttcagatctcatcggaccatgcgcgtctcatcctcgacactctctcctcggttctccactccgaatccgacccactcgttaccgcccggcccgaggatgtcgactccattggagctgatttgcgtgatctggtcctgtttttgtacattcaatcgtataagagacttttgccgcgctcgcacaaggactccgctgcagttgccgatgtttggccttccacgtcagctttcgacggttacttgtcggctctttcgcctttgcagcttgtccgcagcaacactcgtcggtttatgccatcacaggctgatgaagaggcccatcaattgtcctatctacaaaagcacttggctaacattctctctcttttgtcngagcatgtggagggggaaggcaaagagtctatgg

SEQ ID NO: 55078 - DNA, 521 bp, Gossypium hirsutum
  Clone ID: uC-gsflnu33B126g03b1
attattattaatcacgaggatttagtaacttagctgttgccgattagctcacttctttgttttccttcacactcttgcttttggatattattatcaagcatgaacgactttgatatctgggctgtgggtaatcttagctcaaactttctccctttttatggcctttttggctacttggtatatgcttttcaagcccaaatgtttgttcttttttccattagcttgagatgccatttcttttgctattttgagtgttgattttgctccgaccatatgaatctgtggataccattactattactcgcttcagtagacagccctgtggatagaacttgtctttcattgcattatgtatgttgacattcatcttcaattatatgtttatttattcatttgcatcttggttaagagatactgtttgtattgtcttctagaatagcttacctgggcttctgacttgccatctgataggtgtccaaaggagagaatggaaccggaggacatgtatgtattatcaggag

SEQ ID NO: 55079 - DNA, 463 bp, Gossypium hirsutum
  Clone ID: uC-gsflnu33B126g07b1
ttcaattacaattacaattaaaacagtttcgaagtcactttcaagaaaccaaactcttcaacacaaccaaacatgttcatctttgcagtcgccgcgtttgtttgcattggtgccatagtggcccaaccacctccaactcaaattccacaactcaacaatcgacctctgtttgaggctcttgaaaagagagcagacgcattggtggcacgcgctcgtgcggtcgcacaagagcaccgagttctgggaggaagcaacagacttttggactctttggatcgacaagccactctcgtggaggcactggcacttgatctcaaggccaaactgtatgtacctgatgataagcgaccccagcctgatgtgcatcacattcacgtaatcgaagaagagttgctccacctcgagaatcgtgtttcagaagaaattgaaattctggaacacattcgcaatggcggtgatcaac

SEQ ID NO: 55080 - DNA, 248 bp, Gossypium hirsutum
  Clone ID: uC-gsflnu33B126h01b1
ttctcacttacacggacagcgtgaaaggagctgaagaatgcctatttgaggggatcggtcgtgtggtcattttggccatgatgaatggtggagtccttcatacagcacttgctacagatgaatgcttgaagtaaattaaattgcttgacaaagccatgcttggtccatacagctcaacgcaacaaggaaaagcgtgtctcatcacacaagttatagaaccagaagctgatctaaggcttgcaccaata

SEQ ID NO: 55081 - DNA, 468 bp, Gossypium hirsutum
  Clone ID: uC-gsflnu33B126h05b1
cttgccccagcaattgtaatgggcgtggaaagtgcctgccaaatggggtatgcgaatgtgaaaacagttgtactggcattgactgctccacagccgtttgcaatgaacaatggagtgtacacggcggtgtctgtgacaatggagtttgagagttccaatgctgttactattcaggctccacgtggcagaacagctcgactcttttctcgagtttttcggtatgcaaagatgtattagagagggagttatccgggcaacattgcgccccaagcgaggcaagtatattacaacagctagaagaaggtgttgtcatgcctaattaccaccgtttattccctagcggtgctcgcaagatgtttaatactggctttgggagcagctactgcgatgcagctgccaagcgactggcctgttgggtaaagtagctcaccccgtagcttttctatatgcgagcatatgctttttcac

SEQ ID NO: 55082 - DNA, 340 bp, Gossypium hirsutum
  Clone ID: uC-gsflnu33B126h07b1
tcgtttacacgtccgcatatgcttaagacaatggatagagtgctgtgtggcccagacccggagactaagggagggagtggtgattggctgggtcatttgggatgtatgagctctgaaaagtgatgtttgagtgatttgactgaacacaaggcgtgtggtatttacagagctctcatagatgacaacatattcactttctgtttattgtatggcacatgagaataccgagatggggaggaagacacagcaagatgcatgggccggggtctatatgttgttgattggaagggatatgacagaggagatatctattgtggttgactgaaatggtggtatgtca

SEQ ID NO: 55083 - DNA, 295 bp, Gossypium hirsutum
  Clone ID: uC-gsflnu33B127a11b1
ttttctatggaagtgaacatactgtgagcccaggggtgcttgtactcacggctactgtggtccctctactggctatgcatgcttgctacttgttttgactccccgagaattaccacatgacatgctatttgtaccacatactttattggccttatattctttacctgttctacttctacaccagcctcataggtggctacatactactttagatgggagacgaaagcaccgagtggcaacaccacattacctttttcgtcgttcttcacacttaccgcaggcttggccttcccag

SEQ ID NO: 55084 - DNA, 422 bp, Gossypium hirsutum
  Clone ID: uC-gsflnu33B127b01b1
ttgttcttacacaccgggccaaaaagtaaaacattttgcaaaacaaaaaaaaattaaaatcatgtgttgtgatggagattgcaggccactgggcttcctccttggccttccctttgcttttctttccctcatcatctccattgttggcgttgttgtttggatcgtggggttgttgttgacactgatctgtccttgttgtttgtgcgtgacggtgctagtagagatggcgctggagttggtcaaagctccaattcatgtcatggaatggttcactgaacaaatcccttgttaattccacactcactgctttgttctggttttttttttctttagggggtacaattaattggctattttggatctctcgattataatgtacttgatgtagacatgggatttatgaggatttccaatttattgtt

SEQ ID NO: 55085 - DNA, 453 bp, Gossypium hirsutum
  Clone ID: uC-gsflnu33B127b06b1
ttcctcgcgtccggaagagggctttttggatctgatgccgcacttctcaacaatgcggagaccaaagcttacgtcttgcaagcttctcgtcatggatcgacttttgctaaagattttgcagtgtcgatggagaagatgggtaaagttgaagtactcactgggaatcaaggtgagattaggaaacattgtgccatggtgaactaattggagagcttttgaatttgattgtttggacttagtttaaaatgtgaattgtttggggataaaaagaaaaaagagatcattggaataaatttccaacaaaatttgtattgctttgtataatttgtgtatgaccgtttggtgctatacatacattacccagaagtggagatcaatgcttttgtcttttatttcacaccattccaactcaaatattcaataaatgcaactcataccggtctgcttgtgacc

SEQ ID NO: 55086 - DNA, 491 bp, Gossypium hirsutum
  Clone ID: uC-gsflnu33B127b09b1
tccacgcgtccgcccacgcgtccgcccacgcgtccgaatcactcactttcctctcctgcgccatttcgggcctctattctccatccgactctgattgcaatggagcagaaggaagatcggccaccaggtacagccagcctggaacaactgacggaggcacccatggggaaaaggttcacgcgcttgatagtgatgcacgcgcggagtctggatccactgttgcggcaccaacgaaaccctagaagcttctagggtactccactgattcgggctgagcttggaagatccgggtttggggtctgttggttctagtattttggggttttggtattttgagtcttggtatttagtaattgggcctattgtatcgggttaggtgttattaggctgttttttaattattttttggactattggacttttggactattattttattttatttagtttatatatatattttgtgatgtatatgggccgggcactaaaaa

SEQ ID NO: 55087 - DNA, 462 bp, Gossypium hirsutum
  Clone ID: uC-gsflnu33B127b12b1
tcgctttattcattggccaaaatcattgagaaatgggacttcagcaatggcggcaatggcaatgttggaagagagaatcaaaacggcggtgttttggtgggtgaggacactcaacatgacttcaacaacctgttgaaggttttaggtgaagatgaagagttatatgattgtattgatggaattatagggtatcaaataatggtgcttgagctacttgcacaatcctcatttgaaactcaatctataaacaattccaatcatttacatgaatcaatggaatgtcagcttttagaaattcatcctcctattggctgtgaccttttatcaaacactgaatatgcatctcaagctgctctatggggaatagaggttagcgccaatggaacgtttttctatttatgtgtaggctaaattctcgaatagggaccaagggattacttgtataatgtaaactttttaaaa

SEQ ID NO: 55088 - DNA, 496 bp, Gossypium hirsutum
  Clone ID: uC-gsflnu33B127c05b1
tttacaaacccttagaaacttaaccaattctttcctaattagaattcatatcttacctttcctcaaaatcctaatagaattagaattccaccatttctttctcttcttttcctaattagattttcatattgctccttttcaaatcccaatagaatttgctctccatcttgctatttaatctctctattttctttcccttttctttccatcatattttcatcctaattattgataattattttgctttcctgaatcaaatcatcctccattcgattgttccttctattggtttttctaatttctgtcaatagcatccctattcttgccaataatcgataagtacatcttgtttctgatgtttagatcccgaatttttgttatattactattctgtgctaatcttatgttcgattaatcaatctttttcttgccaaaacttttgacaatcttgtcaaatcttggaatcaaccattaattcatgtgtaaatatcgtttg

SEQ ID NO: 55089 - DNA, 415 bp, Gossypium hirsutum
  Clone ID: uC-gsflnu33B127d02b1
tccttcgcgtccgcccacgcgtccggtgatacttttttggtgacagatttcatcacgtaaatagaatccgtggcaaggtttggttcgttgacaagtatgatgcaagcaatgaatgttgatatgaatttgtgatggatttaaaggaggttgtatgttgagatttctagcttccaagtatatgtagattcgatatgcaatttgaattctccgttaaaacagtttcagctttctatttggtcataataatgagcatagggtttaggcaattctggtgtgactgtctccttatgtttattatattatgcagcatgattttagttggaaagactgcaaattatatgagtttgagctaaatatatgttctgtgtcttgttaataatctattactctctataaatttttgtttttttttttt

SEQ ID NO: 55090 - DNA, 514 bp, Gossypium hirsutum
  Clone ID: uC-gsflnu33B127d12b1
ttgaagttttttttggaacaaaatggatcgtagaagcgcgtttgctgttgctttgatctgcattgtggttgctggtgtcggtggtcaatcaccgagcgccgctcccactaaagcacccccggctgcgactacgccttctactgcacccgctactgctcctgtgagtaaatctaagtcaccagctcccactgctgctccaactactttaccaccggctgcggctccgtcagagtctgcggccgttccagccccatcaaaatttgctccagcttcttcccctccggctgctgctccagtgagtaccccaccggctccagttactgtgagccctcctctagccaaatcgccaccggctgctgcaccaacaactcctccagagagctcggcctctcctcctgctcctgttgcggctccaacaactgccgaggttcctgcaccagctccaagcaagagcaagagcaaaaagaagtcaaagaaacacggtgctcccgctccttcacctgatatgcttgga

SEQ ID NO: 55091 - DNA, 279 bp, Gossypium hirsutum
  Clone ID: uC-gsflnu33B127g09b1
tgtaacaaaagaaaaaaagaaacaaaaaacagcaacaataaaaaaaaacaatgagaatgaaggtcgaaatcgataatatgggggaggacatagccgcgtgggtccctcccaagggggggcgccactttgtaggaccagaactgatctccccttactgcactggcatttatcttttttttaccgccccaaattgaaatcgcctggccgtgttttaccagactggagcgggggaaaaccctggatttcccaagttgactccactggagcaccatccccttt

SEQ ID NO: 55092 - DNA, 483 bp, Gossypium hirsutum
  Clone ID: uC-gsflnu33B127g11b1
tcgttcagtcatatggttcaaatgtgcctccacagcagcagtatgcatatgcatcaagtgggccaacgcaacaaagctatcctccatatggctctgcaccacctagtgatgggtacagtcagccttcaactgagggtggccaggcttatccgcagcatggtagccagcctgttcctggttacagtcaaccaactgcatatgcacaagcaagtagcgctgctgggtatggtcaatacccaccatcgtaacaaggctactctgaacagacacaggctcctaacaatgcaggttatgggtatcaaggtgcgcatgattctggttatggtggtgcgcctgcagcaacatatggtgcgcccccagccagtggccaagcaacttatgctcaaacaacagctgatcaacctacctatgatcagactgttcctcaatctggtagttatgctgcaacgccaggtagtgcacctgctgggtatggaaaacagt

SEQ ID NO: 55093 - DNA, 292 bp, Gossypium hirsutum
  Clone ID: uC-gsflnu33B127h08b1
tataaaaaaaaggaaaatgaaaagtgtgaatggaaaattcttgaagaagctgaaatcaatcaaaccagttggttacctaaagccagatcgtgttcttcaagtgtttgccattgatgggtttattgattcttatacgaaaacacccaatcccaatgaacaagccaagttgttcaccaaagaatttgaggagcaagaaattattaaagaaaaccagcctgaaatcatcgatgtagaagagctaatgaaagaatttgaatttgacgaagacgaagatgaagatggtgaagaagaa

SEQ ID NO: 55094 - DNA, 169 bp, Gossypium hirsutum
  Clone ID: uC-gsflnu33B128a06b1
ttctatcgcgtccggaaaaaaaaaagtccccagaagcaaaagcgaaaagtttggtgttattttgtcataaatactgtaattacataccatttttttaatttttttttgtgtatgaatcattgcctcttattatataatgcataatgataataaatatgaacaaccttgg

SEQ ID NO: 55095 - DNA, 136 bp, Gossypium hirsutum
  Clone ID: uC-gsflnu33B128b01b1
ttgaaaaagagaactacaccctgaatttagattccgaagtgtttccggtgtcggaaattgtagagttttaagattagaggtggaaagcctattgaattgaaaatgaaattcttttactacatattcttcattagtc

SEQ ID NO: 55096 - DNA, 461 bp, Gossypium hirsutum
  Clone ID: uC-gsflnu33B128b07b1
cccacgcgtccggttacacgggagcaaggctcgtttgagtggttcaggggggtaatgaatgaggtagctgagtatgatagagataggatgattgaacttcacaattactgcaccagtgtatatgaagaaggggatgctaggtcagctttgatcaccatgcttcagtccctccaacatgccaaaagtggtgtggatattgtttcgggaacacaagtgaaaacacattttgccaggccaaattggcacaaggtcttcaagcacgtggctgttaaccatacggacaagagagttggagtattttactgtggagcaccaggattaacaggggagctaagaaggttagctcaagagttttcaaggaagaccagcaccaaatttgatttccacaaggaaaacttttaaaaattggtcctattgggttcatttaattttttttttttctatatattttgggaaatgca

SEQ ID NO: 55097 - DNA, 454 bp, Gossypium hirsutum
  Clone ID: uC-gsflnu33B128c04b1
ttttatcatcttcatcgtcgtcgtttgttcctcaggtggaattttctcgggaaacaagcagaaaattgctgtaaagaaaaggaaaagaacagaatacaagaacaaaaaaagaaaacatgatgatgatgtcatcagcttcatcatcagcagcgacagtagctgtagataaggcaacgagcgatcttctaatgggtcctgattggactatgaatatcgatatttgcgattctgttaattctaatcattggccagcaaaggatgttgtaaaagctgtgaagagaaggttgcagcacaagagttctaaagttcaattactagctttgacgcttttggaaacaatggtgaagaattgtggtgattatgttcattttcagattgctgagaggaatatattgtgggagatggttaaaatagtgaagaaagaaagcggatatgcttagtgagggataaaatt

SEQ ID NO: 55098 - DNA, 265 bp, Gossypium hirsutum
  Clone ID: uC-gsflnu33B128c10b1
tttctgccacccgtcccagaggctcctctaagagcgtcttatgttgcaccatgcctggcttaacgggaatcaagcctgctcatctattcccctttcccaattatactactcaacggagggacggagacattgggtagacaaccatacgcgggggtaccacagttctggctacagggcacacacacgtctatcaccatatatcaggactcatggcattttgacactgacatctcacattgtttatgtgcaccgcaatcagatttag

SEQ ID NO: 55099 - DNA, 459 bp, Gossypium hirsutum
  Clone ID: uC-gsflnu33B128d10b1
gaaggcctattctcctgcctctccttttgactcattcgagaatcaatcaaggcttcatcgaatcgaaagactcacgcgtcttgctcataaaccccgaatcgccactcgatttcgatcatggcgaagcaagcaagggtttgaaggcatcaaacgcaggtaagcttcgcttctcccttttttattataaaacgatgaagaaaagcccactgaaataagtgaagaacgagagttcaaaagggaagggaaatcaccttctcagttttttcgattgctttctattgtctctgtattcatacaatatgcgctgatatttcgttttttttgttgcgtaaccctttacaaagactgaaattctggctttatagtcgaaaaggaaaggaaaaatttacgaaaaataaaaaaaaacaatggttttctttttttgttccctttgctgctgttgctggtttgcctctttgc

SEQ ID NO: 55100 - DNA, 379 bp, Gossypium hirsutum
  Clone ID: uC-gsflnu33B128d11b1
cccacgcgtccgggatcgttaaaggatttactgccgaaagaggaggcagagaattcagttgggatagctaagcttctcgaaatcgcgatcggggtcgctcaagggatagaatacttgcacaatggttgcgaatcaaggattttgcatctcgacataaagcctcaaaatgttttgcttgaccagagtttgaaccccaaaatttctgatttcggattagccaaagtatactctcgagaccatagctatgtgacgatgacgagtgcaagagggactattggctttatcgctcctgagatattcatgagaaatctgggaaacccttcgcataaatccgatgtgtatagctatgggaagctgctgttggagatggtaggtggga

SEQ ID NO: 55101 - DNA, 309 bp, Gossypium hirsutum
  Clone ID: uC-gsflnu33B128e03b1
aaaaagaaaaaaaaaaaaaaaaaaaaaaaaaaaaaaaaaaaaaaaaaaaaaaagataaccgttataggggggaggaggtttgcgtccccctggtctcccccctttctagagtgtcccgtgcttgcgtcctacggtcatgcaacgtgtctcgtttttttctagtgtcccctctgtgcaatcccttggccgtcctttttcattgtcctggttgggaaacccctgtttttccccagcttatttgctttgcaggtctgccccctttgccctttgggccttttgcccaggcggcctggcccgtgggcccttccc

SEQ ID NO: 55102 - DNA, 300 bp, Gossypium hirsutum
  Clone ID: uC-gsflnu33B128e07b1
ggaggctggagagagacaccgggatgaacattgacagacaatcaggatcgaacctcgacaacaagggcggacttgagggatgactctattatgctcaatagggacgttatgctgtgcctacaaacttgttcggttgcagccggatgggcttcgattatttaggacgtattatgagtgggatatacactatctatatatgttctccgttgtgtttcaaaaaaaaaattatcagtaaaaaaacaaaataaaaaaaaaaaaaaaaaaaaaaaaaatcattaaaaaaaaaaaaaaagggggggg

SEQ ID NO: 55103 - DNA, 310 bp, Gossypium hirsutum
  Clone ID: uC-gsflnu33B128e10b1
tttgtgtgatagaagctgttgcgattggcgatggtacgaggatggagcgccttattgatgccgagcaaattatcactatttggtcttacaaaatccatgaaatcttagataaagctactgtgagtaactatgaggggaggacgctaagagtcctcatagaggctgctagggaagctactcaagttaacaatatgatggcacataatgatgaaacagatgcacgacctatatgaaccggccaaatgacagacctggagattaatctagccggtcaggaagcatacgcagctgcatagactgaaaaatgttc

SEQ ID NO: 55104 - DNA, 485 bp, Gossypium hirsutum
  Clone ID: uC-gsflnu33B128f04b1
gcttgtacaatcatgctgtcttgctttgtgcgaagatggaatttatggacctagtggggtgcttcttttacctgatgtagaatgggtttactgttcaaccatgccacctgtctctaggctgcacatagcaactttatccgccgaaacatctgatatatatcaatatgctactgtgtgattagtgtgggtgcatttatcgcctcttaaattcgagttgtactgagctacgccttagctttttcagaaaacatacattatttttatatttcttatcttaattttgaaggactttgagtgagtcttgccttgtgtttgtttggtgtaacaataaaagggttcaatgatacttgctaatagcccaaatttcttcaagacgagcttgtttgtatttaaggtctttttgatgtcctttgagggcattgaagtgactaatacatgatttaattggcactcctgagtttgatttgctatccggtacctctact

SEQ ID NO: 55105 - DNA, 480 bp, Gossypium hirsutum
  Clone ID: uC-gsflnu33B128f10b1
tctcatttgttccactcatagatccactcaattggcaacagccaccaactcatcaacaagatcaagttttcactaaagacaatcatcatcatatccataatcctcagcttccaccgccaccaccagctggtagtagtgttggtattaataggcctggttcaatggcggaacgagctaggctagccaacatgcaaaagcctgagaaagctcttaaatgccctcgatgtgaatcaacagacactaaattttgttacttcaacaattacagcctttcacagcctcgctacttttgcaaaacctgtaaacgatactggactagaggcggtgctttaaggaacgtgccgatcggtggtggttgtcgaaccaacaagagaagcaaaggaagtaaaccaacaaagtctccatcaataggccaaatgaacccaacaccgccacagttgcctctattattgcaccctttacattatcttggtgactata

SEQ ID NO: 55106 - DNA, 444 bp, Gossypium hirsutum
  Clone ID: uC-gsflnu33B128h02b1
tattatatcaatatgcttgtagcatactagattgtacaaggatgataatatcaactgtactatgtagtgattcattaaggatgcaacagcaaccattacccgcaagttaaaactttatatgaagggtcaaaagaatctgtctaaaggctattgcattcaccacaaaagaaaactatatcttttcataaggaatgccagtacttatcaaaaaaattgatattggttattatgcttttgcaaaaccgcttcaattgtcaccgttactggctttatacctctagatcttgggattactggaccaaaaattccacgaagaaaattgtactttagttgcggcttaactattttgatcaatacagtccatatctatattactcaatagatatattcaaggacgtgcttttattacattgtttcaatgataataatgcatggaaaatcatt

SEQ ID NO: 55107 - DNA, 224 bp, Gossypium hirsutum
  Clone ID: uC-gsflnu33B129a03b1
ttattttaaaagaaccctaattatttaatgaaatatatgcattatgaatgttgaagtactaagagaagggatcattgctacaagaaatcattagttggtttcttgcaagccttgttgttatgccaactcatagataaaggatttgttatgttttcaagaatatttacttcgtgaattttcaatctcatgtaaatttaaatcaattaatgtttatatgctttcat

SEQ ID NO: 55108 - DNA, 340 bp, Gossypium hirsutum
  Clone ID: uC-gsflnu33B129a12b1
aggcgtttcttaccatctcctacattaccggctcttgggtcctttctctaaaacgcctctcgaatatcgccatcatagatgtccgggatgatgaacggcagcctgatgggcatacagctgagcctttgcactatgccagcggccctttcactgataagaacgtcaatcttatccaacatgtcaaaggcaaagaaactcttgttcctcattgggccctaagccaggtccgtgggcccaacctgggcaccgcgggtaagcgttatcatcaaaaggagtttccggaagcatactgggatcaagaacatttggcttttgagcccggtttcaatggctgggaagc

SEQ ID NO: 55109 - DNA, 317 bp, Gossypium hirsutum
  Clone ID: uC-gsflnu33B129b05b1
tttttatagagggggaacgcgtggaaagtgatgagacccaaaataaagtaatggccgtatgggttgcgtccggctcgcttttgacatcagaaacttgagctccacttgatgcaacccttcccttggagatcaaaggagaggtcggggagtttataaaagccaactttactttctctcaagagctacattatacatttcttaaaatgaaccctaaaacgactggacgagggaaagccttacactttagacatgagaaaaacgctggatgaccctactgtaatcaagaacttcaacaagcgcctttatgcagaatgccc

SEQ ID NO: 55110 - DNA, 418 bp, Gossypium hirsutum
  Clone ID: uC-gsflnu33B129b08b1
tcgttaagtgcagctcatggttaaagcagatctggtgagcgcagatgcatctgtattacttaagcctccaatgtgctacgtgtgaaacctgctttgagggcgaacgagtggtagtgaccaaacaccagaacaagacaggtctactgtatataaaaggatgaagggcatgagagatccacaacaacagagggaggatcactgatgaagtacatgccacaccaccacacaaaacagtgttcatgagttctactatctatctacatctaatagctgacttgagaccgcaccagatgcaggataaggacaaacgtagggagcccccattcgcagcaggatggtagatgcacgagttacttctccaggagctacctaccttgaacaccaggtgtgtggcgtgcatgactgcagtggtccttat

SEQ ID NO: 55111 - DNA, 412 bp, Gossypium hirsutum
  Clone ID: uC-gsflnu33B129c04b1
ttttcagtaacctgaataacaacctcatgaacaacactctgcttgcttgtaacaacgggggaagagggggagcttgaaagtcgccgaggagtgccaagaacttgcctgcaagcttgctagactccccaaaggtaggactaatgccggatacaccatcaatggaagaccgtttcaacaagactgcacctactttagggaattgatctgaggaagagaaagctataacagacaaaggcttacactcagcatacatcaactatgtcaacacctagagatactgatcctgatgtgttaccactgtatcctgttactacaccaagaggttccagctctgattaaacatatgtgagtcacgcgagagagcagccacgtgggttttgagggagaacagagtgaaaaaaaaaacaagaag

SEQ ID NO: 55112 - DNA, 233 bp, Gossypium hirsutum
  Clone ID: uC-gsflnu33B129c07b1
tcgtgtagccctagcaacaaccttatctttgttgcccctttatgtaatgtaacgggcacggcttacaccttgatggcatataccagtgaggactttgactataagagcctatttctgtgcttgcatcactgcttactatctgagattgtgatttcacgcgaatcatcgagtggtttctctttccttgatggtttccatcctgtgagtggggttaagtcatcaagtccaagttc

SEQ ID NO: 55113 - DNA, 511 bp, Gossypium hirsutum
  Clone ID: uC-gsflnu33B129d05b1
tttattagctcaaactcttctttatcctacttctctgattctggttgttcatggaaaggggtgcactgtgataccaagaaggagagtgttcttggtttaaaggcttcaggtttaggcctttctggtttaattcctgataccaccatcggtaagctgatccagcttcagtctttggatcttagcaataacaaaatcactgctttgccttcagacttatggagtttaggctcacttaagagtcttaatctctcctctaatcagatttctgggtttctgcctaacaatattggcaactttggtcagcttgaagtcattgatctttctggcaataacttcactggggaaattcccactgctataagctccctagctagtttacgagtgcttaagcttgctggaaatggatctgaatggagaatttcaacagggattctaagttgccggtctttgtttcgctcgacctctcgctaagtcgctaaatggttccttgccagatggttttggtgcagct

SEQ ID NO: 55114 - DNA, 524 bp, Gossypium hirsutum
  unsure (1)..(524): unsure at all n locations
  Clone ID: uC-gsflnu33B129e06b1
tcctttcgtccgcggacgcgtggggccgccgcaaccacctcgacggaccagaggtcctccccggctccggttcggcagcaggtttcttcctcgcaggacgaacgtgcatggtgaacgcaagggatcgctgaacgtgggtgattgcgacgtggggtgatggggtcgttgctgcagatggagaacgtgcggcacgccctagggcttctacttccattgctgctgaaaacatgttgcgggctagggttaattttgggccaattgggccaaatgtatttagtcgctgttttattttggtaggctaaatgctgggactgatgtagtgtgggctttaggtttagttgggcccgagcaaaatttaggtcttacagttggaattgaggttgtgagcattcatctcatcatatctccaagtgctaatagggtattttccaaaatttttaatagaatgacatgtacttaggaagatcaagtgtgctccaagtagtangggactaaaatataagttatgaaaactttttttttat

SEQ ID NO: 55115 - DNA, 508 bp, Gossypium hirsutum
  Clone ID: uC-gsflnu33B129e11b1
tcttaacctttgaaactcttcatcattgaagtcgtagtgaggtctggtctatggaatcttccgtttgtcccttttgtcaccttagcgttccctcctcagaactccaatggcacgccaacagtcacttcgaggatgaggataaggaagctaatgacatggaattgggtaatcaaattcaaattgcctcttcttcaggctccactgacgttgttagcatttcttctttgattggtttacaaacaaggagcaatttttaccacgtcaaggatggtttgatttccttgctgagaaattgtctagaactagaagctcgacacaactcatctgtaaccatattgtctggccacgtggatcacttccaaagtcttccgtccgtcgatgttggttggggttgtggatggcgtaacattcaaatgctaagctctcatttgcttgctcacaggaaggaagctagaaaagtccctgttgtgagtcaggttttgtcctgatatcggtttcctcagcgttg

SEQ ID NO: 55116 - DNA, 251 bp, Gossypium hirsutum
  Clone ID: uC-gsflnu33B129f04b1
tcctcgcgtccgaaaaaaaaaaaaaataaaaaaagaaaatatttaaaaaaaaataaaaatcaaaaaaaaggggaggacgctgtgtgggctccttgtttgattccgggtggcgtgcacgtgatagctattctatagtgttgggttggtggtctttagtttccatgttttggccccggttttactgggaaaagcctgggtgttccggtgtttttccccttttattttgtttcgctttttacccgttttgtgtt

SEQ ID NO: 55117 - DNA, 343 bp, Gossypium hirsutum
  Clone ID: uC-gsflnu33B129g05b1
tttcggtggctgcagactttggtggctagggttgttgaaatgttttctttgtaatgggctagttgggctttagggtttctaggattctgggtctgaaatgggtttaggcttgggctggtttgggttttattgtttgggtcatttggattctgtgttgttgggcgacacatgttgtaaatggacttaaaatttggactttttatttggtgattcgggttttattttgctgtttttttttgcttgttggtctgggccaaaattggcttctacattcggtgtttcttctttttatcctttttaatcacaccatcgaccttttcgtttggcgtggccaacactacaa

SEQ ID NO: 55118 - DNA, 296 bp, Gossypium hirsutum
  Clone ID: uC-gsflnu33B129h12b1
tctttcacctgtgcgtaagtgcttcgacatccatgcgtccctttcgatttgcttcattagcaaaaacactggagagccggctaacatcgctgagtgcatagactggcctgggagggtaccacttggggctgtgggatgcagagcaaccatcgcggagaatgttccaagcatagcagggaccagatgtgtgggagaacagatgtgctataaaggagatgatattcactgatacagagagcgactcgaacacctgagtgaaagggattactattcgaggagacacatgcatcaggaag

SEQ ID NO: 55119 - DNA, 385 bp, Gossypium hirsutum
  Clone ID: uC-gsflnu33B130a08b1
tcgttcacgcgtccgcccacgcgtccggctaccacagggacgatactgggcgatcgaacaacccgggatcgttcaaacatacactatgatacacagtgtgggccaaagttggataactaactaccaatgattgctaatttgattgaaatggagcagaaatttgttatacaaatgctatctatggtaaagacaacgaatgcttacattatgaacactatggacgacgtgggagagcgggtactactgataggagcgaagcgtgaatgaccttataacaaagaaacaagtggagggcacttaatttcctgtagagccattctagcaaagggcggaagaggcaagcgaagatcattggagagcatacaacttggacacagactaccac

SEQ ID NO: 55120 - DNA, 465 bp, Gossypium hirsutum
  Clone ID: uC-gsflnu33B130a11b1
ttgttcacgcgtccgcggcataattcccccctccccccttctcttcgcctaataccagattcctgtattttcttccattttctttcaatccatccaaaaccctgctctccttgccgaaatggcgacgactctgatagcttcctctcaaacaagcttccaccacccactctctgtctctgactcatcattttcaagtccttcatcctcttcttcatcggtctctatgttcactctcacaaaacctcgaatcctttcattaccttcttacaaatccagtttcttcaacccaattgggagctatttcaagtgcattgagatggaaccaagaaaaatcaggagctcttcactagcggttcgaatgtcatgggacggtccactcgcttccgtcaaattaaacatacaaggccaaaatctcgaattaacagatacagttaagcagcatgttgaggagaaagttggtaaggc

SEQ ID NO: 55121 - DNA, 454 bp, Gossypium hirsutum
  Clone ID: uC-gsflnu33B130b03b1
tttcttgcgtccgtatgcatatggctcattagggaacaactttcattgataaaacctgcaactaaattccctacaaagaaagctaatctgcctgcaactgccatcgccaactttgccatttggaggagttcaaatactagtataccccagctggctgattcgacctatttatgtggaatgccatgccacgccattcgatccctttggtcgtgtgtactataatcgttctagtctgtccaaattgctttcttacaggggaatctggggggttagttttataatcttttttttttcttctttttttatcattttcctctattcttcttgctatgttttctcagtagaacattgacccctcccacttttcgtagaatgggcattttaattaaagatggaacaataagcaggctttagagaagaaaactgaatcaattcatttttagtcaataatatg

SEQ ID NO: 55122 - DNA, 488 bp, Gossypium hirsutum
  Clone ID: uC-gsflnu33B130b04b1
tttgtgtaattggtcatattttattgatgaaaggggttgggttggtattagtctggatacaacaaaataatttaattaggtctaatgtacttattcgatctaataagtatcttgtttcagaatttagaaattctatggctcgaatctttagtattctgttatttattacctgtgtttactatttaggcagaataccggcacccattctaactaagaaactgaaaggaatttccgaaccggaagaagtgggggaaagtgaggaagaaagaaacatagaaatagaaactatttccgaggggggaggggctaaccagaaacaggggaccgaagaaaatacttctttttcccttttttcggaggaagaggtggatccgagcaaagaaacagaaaagctacgagcgactggaaagaaaaaaaaaaaaaataaagggcgaattccactttcgttttaaagagacatactataaaaatagaccgggttatgaaac

SEQ ID NO: 55123 - DNA, 480 bp, Gossypium hirsutum
  Clone ID: uC-gsflnu33B130b08b1
tcgttgaaaaactgatactagatgaaatctgtatcgattcagctttttttttgcactgaaaactgagtaaattgaaaaaaagttgaaccctgttttttagagaagtggtggatgatgtctaatgagaggcacgcttcttccaatcctacatctcctcaagaaaatgatgctatgttccttgatatacttcatgaagctccattatttggtcaccggaaaccaaggagtatagttgggggtgttttttattgtttcatactggcgggttacgcaatcttggctgcagcagctccttggatatttcagcctcttgggcatttagtcttaccattgctttgcagttgtgatgttgttcttttaatagtcacaggcatttttcagcaataccatgtttatcaagtccagaagatacgtttacaaggttactatagtttcagtcagaagttgaagcatattgttcgtctaccattcgccattact

SEQ ID NO: 55124 - DNA, 403 bp, Gossypium hirsutum
  Clone ID: uC-gsflnu33B130b09b1
ttcgtgtggggtcccctccgctaatgggtgaggggtagtttacttcacgacagttcatactcactaccggaggattagcacaatcatacatcgcatttacgggtgaaggctacatgaaaagagtccaagatactgcaaagtcttggaaggaaattcacctaatggagttagctgtctacgccgataccatcactcaagattatcacatatggagaaaaccaccagtgaatagtcaacaagtctcatcgacgagttacacttttcggaatcctttctcagaataaatgccatccgagccgggagtagtgagacatgaattccaacatgacaaggccaagctgtcacgggatattagttatcttcaagagggaaactaccagctaaagaccgatgttcagattga

SEQ ID NO: 55125 - DNA, 417 bp, Gossypium hirsutum
  Clone ID: uC-gsflnu33B130d05b1
ttcattgcgtccgcccacgcggccggaggggatgggggggaatgccaggaaaagaggattctacgctagacagtattagtgaacaacagcaatccaagaccaacaagaagcatgcaagtattattagtagtgcatcatcaaaagcctcgactgataaagcgaacaagggagaggagaaaggcaacctgaaaaggagtgtactcacagtaccttttaaagcaaattcaaagaccgctaacttgggaggcggtttaagagggacagccaacatagcttcgatggctaataactggaggaggttgtcaatgaaagggagagaaccacaatatctggaatgccttgggagaccggtgaaactggaccttcagtgtttcccttgttcggaaccacctacttggctggtaccaagaaaaatga

SEQ ID NO: 55126 - DNA, 410 bp, Gossypium hirsutum
  Clone ID: uC-gsflnu33B130d08b1
ttaaagccccttattttcccccagaatcaagaactgtttttcatcttggtcagcccagaattcgaggcccccaccaagaaaatgcgtgcggctttgcccgccgaaattgggatgccgcaccacgtctggaattgcagccaagcgggtgcactggtagcatcagtgttggagggcgacgtcgtggggttagggaaagcattgtcgtcggacaagatcgtggagcctaaacgagcaccccttattccggggatggaagctgtgaagaaggcggctatcaaggccggagctttcgggtgtactattagtggtgctgggccgacggcggtggctgtgatagacaatgaagaggaagggaagaagattgtgcaaaaaatggtggaagcgtttttagaagaagggcatttgagatc

SEQ ID NO: 55127 - DNA, 326 bp, Gossypium hirsutum
  Clone ID: uC-gsflnu33B130d09b1
ttgtggtgagggaggggctttctctcttttgtaccggtgcttttttagcctgcggtcagtactgcatcgattgcgttctaggcccctcatattacaacgtcaagcaagcttgttgatctctccggtgggttcattttcgctgaaaagtctctaaacaactacaatcattattggtctttcttgcgccgcccaaaggagatctaaacctctgttaaagccccggacttctaacacactctatacaatctattcactgatatacaccaatggtggcggggacaatccttacattcttctcattcaatctcgaggaaatctcaccgtga

SEQ ID NO: 55128 - DNA, 339 bp, Gossypium hirsutum
  unsure (1)..(339): unsure at all n locations
  Clone ID: uC-gsflnu33B130d10b1
ggccgcccttttttttttttttatataacacgaatattattaatatgnaaaaatttatatcataaacacgattactacaaagcaaaatacacgaataggaatatatgaaatttcaggtctatcgtacatactcacagatcataggaaataaagaaaataaagttcatatgagagaaaaccaggaattattcaaaaacactacaatcacttcctaaacaaattgttgcttaaatgccctgcttatcaaatgaataggcaaaccaacccaggcttttgctggagacaaacgaggcggtgcggcaccgttgttagtactctgacatagatccccggaactgc

SEQ ID NO: 55129 - DNA, 275 bp, Gossypium hirsutum
  Clone ID: uC-gsflnu33B130e01b1
ttctactctatgcagctttttttttagtgaatttaggcaggaagatggaaaaccatttgttttccaccctaaccaacttcctttttctgtgatgagcaataagagaaaataatgatatcataattcaactgtaaattttaatttgtttgaacaaatttgatttgctcattccaactattgtaattttcttattcttatgcgtcatttttagaaataaatgccaggtaaccttttctctcaaaagaaaaaaaaaaaaataaaatatattttataag

SEQ ID NO: 55130 - DNA, 244 bp, Gossypium hirsutum
  Clone ID: uC-gsflnu33B130e02b1
ctatattataagctgctctcctgcatgaaccagtccgaattactgttcacccacacctcctgatgcttgacaccgctaaacaatctccttggggttaatatttgtcgattgatggtgacaataagggagatagaatttctatagagggcgcatggtgtgtttgggaaagggaaagaatatcttcaatttctgtatatcatgtcaggatttagcaatgacttctaaaaagttttattcctgcttt

SEQ ID NO: 55131 - DNA, 337 bp, Gossypium hirsutum
  Clone ID: uC-gsflnu33B130e11b1
tcgttttactactactacttactagtctagtattcggatactctgttgtgggatgcttaagggctgtactacaatcagaaggacctggcgttccaaagcagccaggaagcaaggcggaacatcagcttctgagcattcgaacaagctgagaataggaaacaatactggctatgaggaagagccggctgtagagaaaactgagcgtgagctagagggttccctgacagtgcatagatgtgacaagagacttcactttgggagctgactagagaacgagatggatgctagggtcattgagcaactcgatacagtggactttcaggataggatgtctacg

SEQ ID NO: 55132 - DNA, 371 bp, Gossypium hirsutum
  Clone ID: uC-gsflnu33B130g11b1
tctgtcacgcgtccgcccacgcgtccgcccacgcgtccggttcactaaacgattccgaggattcagcttgaaagaacgaatgggaatgggattaatagtatcttgtgtggcaacgtcggtggggagcaagcggccagccaccgcaacaaggtttggctcatcaatctcatgtatgcttaaatttgtagctattagtctctgtattctgctaaagttcagaattttttctactattccggttctgttaaactcagttaagttttgttattttcgaaaattgatatcctaaaattattatcgcgttgaaatatataaggatttggaattttaaaaaaaaatacaaaaaaaaaaaaacaaaataaaaaataatg

SEQ ID NO: 55133 - DNA, 502 bp, Gossypium hirsutum
  Clone ID: uC-gsflnu33B130h09b1
tcggtttcatctctatccaaatatgaatgcaataccaccctctgcacttcttcttttctcactcactgccccttcttcatcatgacttcacccccaatttcaatgacagggatgtgggaaatgttggcccaatctttgcccttctccttttcacaacgctcctccagcaaaggacaattactaatgcacaaacgagaaagagagggagggagcatgtttgggggcatggattggagcttgggacagctgtcgataagcaatctggaaagagaggcgaggtgttgaaaccccttgtactccaaactctttagatttggaagttgagagagccagagagtttcaagagaagagggaagcagatgttcatctggaaaacactccatctctacttctgaacccccgatcaacagatatgtaagagaagggagtgtatacaaactccattcccttttcctaatcaagctcccaattagtttatcactgcttccaattgtaaatgctt

SEQ ID NO: 55134 - DNA, 177 bp, Gossypium hirsutum
  unsure (1)..(177): unsure at all n locations
  Clone ID: uC-gsflnu33B131b02b1
tgttctctcgtccgctattttacctggatttgaaagtgagggataaaaatgttgttcaggtaatagagatgcagtgggcattgttttgatccttatttccaacttgtaaaaattccccaaatgttggcatctaaattctatttatttaaatgaaattcaccaaatttctcattgcnc

SEQ ID NO: 55135 - DNA, 327 bp, Gossypium hirsutum
  Clone ID: uC-gsflnu33B131b05b1
gggcgtgatggaatggctaaaaaggcaaagggagtggggggagcacaggaccctgctatgaattaggacagtttgagagtgatccagggagatctagtggaagagtctaaaacctttgcaataccgactcaagctcatgccatgatggagggcggtggcagcaagtggcactggactttggagctcgagaagctggacggggggattgcgcactctgagactatagccgcgttggttcaagatatgtctacagagattgacgcccaccttaccctagccagctaaagagtttcacaggtggctatcgctgccgctacttgaagcact

SEQ ID NO: 55136 - DNA, 147 bp, Gossypium hirsutum
  Clone ID: uC-gsflnu33B131e06b1
gctttctttcgtacgggctcctgttgaaactgtattggagaactctgagaacatcacactgagctggcacaccaatccctactctttatccctcggggggatgtacccagggcaatggacaccatctaatcttaccgattacaacct

SEQ ID NO: 55137 - DNA, 159 bp, Gossypium hirsutum
  Clone ID: uC-gsflnu33B131e09b1
tccacgcgtccgaggaagggtcttgagaatacgggggagatggtttagtcggcactatagatcaaatagacagactgaaagtctcagggcacggtagatgataatcctagatcctaacctaacatctactaagagaggccgctcgctttctacagcacc

SEQ ID NO: 55138 - DNA, 444 bp, Gossypium hirsutum
  Clone ID: uC-gsflnu33B131f03b1
tttctctcgtccgagacgctatggtttgctaggattaaatggttgtgggaaatccacgctgcttactgcaatagggttgcgtgaacttccaattccagagcacatggatatctatcacctgacgagggagattgaagcttcagatatgtctgcattgcaggctgtcataagttgtgatgaagagaggttgaagttggagaaagaagcagaaatcttggcagcacaggatgatggtggtggagagacacttgaacgtatctatgagcgattggatgccttggatgcatcaactgctgagaaacgtgctgctgaaattttatttggcctcggtttcaacaagatgatgcaggcaaagaaaacccgagatttctctggtggttggagaatgaggattgcattggcacgggctctattcatgaatcccaccattcttttgcttgatga

SEQ ID NO: 55139 - DNA, 404 bp, Gossypium hirsutum
  Clone ID: uC-gsflnu33B131f08b1
tttgcaaaattggttataactacatatgagggaaaacatgaccatgatttgcctccaactaggactgttacttataatataactggcttaaatgttgattcacaagctcataacagtgaatcaggcaccaaggtagaagaaagggagaccattaattctagttctggagccgagaataaaccgagcgagcaatcgaatggcgagtcaagaactaagttagaagtaagtggtactgttcatgtttgcacagttgatgcacctactttgggtcctgaaagtgggtcaaatgagcagcggagtggaaagttagatcacaatgaagagagtgaagtggctggctacactgctcatagtaaatcaagttctcagaaaacagaatgtgcagatcagcatcaaattcgaag

SEQ ID NO: 55140 - DNA, 399 bp, Gossypium hirsutum
  Clone ID: uC-gsflnu33B131f10b1
ttggagcttggtactttgaaatcaatgtggtgaagttgggggagacggggcatacacggcttgggtggtctactgataaaggtgacttgcaagcgcctgtagggtatgatggtaatagctttggatatagagatattgatgggagtaaggtgcacaaagctttgagagagaagtatggggaagaagggtataaagaaggagatgttattgggttttatataaatttaccagaaggtggatcatatgctcccaagcctcctcatcttgtctggtataaaggccagagatacgtgcgtgcccctgatgcaaaagaggagccacctaaagtggtgcctggaagtgaaatttcattttttaaaaatgggggtatgccaaaggggtgctttcaaggattttgtt

SEQ ID NO: 55141 - DNA, 288 bp, Gossypium hirsutum
  Clone ID: uC-gsflnu33B131f11b1
ttccacgcttccgcccacgcgtccgcccacgcgtccgttgggactctaggaggtgttctggatcagtgtgaaacaggaaaacgcccataggatggtcaccgtgcaatatacaacagatctgactgagaagctcatgcaaaagaaagatgcttaaaacaccattgaaaatggctggctgtccggcaactagtccttgaaaaatatataccctgcttttttctttttggctacccctatgccggtctaatgttagttgtgcttctagtgcttatggaacatgtaaaccca

SEQ ID NO: 55142 - DNA, 270 bp, Gossypium hirsutum
  Clone ID: uC-gsflnu33B131h02b1
ttcctttcgtccgggttcctagcagacaatccaggggtttggttcatgcattgccatttggaagtacatacaagctggggattgaagatggcatgggtggttaatgatggaaaaggccctaaacagaaactaatgcctccacctgctgatcttcctaaatgctgaaccattctttttctttagcttgaaattgttttaaatctctacttttgactacagaatgtaagagacaaaaattcatcctttacaaatataatttcattttttctt

SEQ ID NO: 55143 - DNA, 341 bp, Gossypium hirsutum
  Clone ID: uC-gsflnu33B131h03b1
ttcatgcgtacgcatcttttgcatgtcggttcgagtatgtccacaatgatcaatcttgtgagtcaagctctgatggcgcacaaatgctcagacatggtgctccgacaaagccataacacttctttgcagaatacggcatggacagagggttccagaacaaatgaatctcaaatacctcaaaagtgcaagatcaggacactgctgaagctaggagaaaggtctcaaaagcagaatgtatttgataaggccaatattttggagataataccagagcagacaatgatgctcaagttactttgcagaaattctgaggataaacagccatgtgcagtgctgatcta

SEQ ID NO: 55144 - DNA, 403 bp, Gossypium hirsutum
  Clone ID: uC-gsflnu33B131h06b1
tcctctcgtccgaattttgttgtcaatggatgatgtgcaaggtttctttcttagaatatcaaatgattcaagctttgatagtaatgttgctggtgttttggttgaatcaagggttgaaatccaacataagctaaaaggattctctcctgctcgaaagtttccacaagctgaatttgcaccctatcataacactaattatgagtggaacccaattggatctggaatcatgtggaaatcgtataattttcctgtgtttttactttctgaaagtagcacatcaaccttgcaagagattgcaatgaagaatgagaaaacagagcaagcttatactacaaatgttgcaaaatttgacgtggtgatgcaaacaactaaggttgggacccatgagtcagaatcatgtttg

SEQ ID NO: 55145 - DNA, 208 bp, Gossypium hirsutum
  Clone ID: uC-gsflnu33B131h10b1
tttccctctgattcaatcagatcttgagaaaatccctgaaattcacccatctcgtctgtatcatattaatcaatcaatagaaaaaccgaaagaacaaagaaatggcgggggcggcatcggcactattccttctagatataaagggccgcgttctggtgtggcgtgactaccgtggcgatgtctccgctgcacaagctgaacgtttttt

SEQ ID NO: 55146 - DNA, 182 bp, Gossypium hirsutum
  Clone ID: uC-gsflnu33B132b05b1
tcctcgcgtacgtctcaatgaacatattaacgggggtcaataaatgagtactggggatctcacacaaactacacattgctcgttttaaaatgggaggaggagtattatagggatacccgtggaaattatcaacaaacacaacattgtttatctcagcccagagatgaacgcacatattcttt

SEQ ID NO: 55147 - DNA, 338 bp, Gossypium hirsutum
  Clone ID: uC-gsflnu33B132c03b1
atctttgcctcatacatatggatcgggtatgaccttttgagtgatgccgttgaggttaaggccgatgacatcacggcggatgagcagatatcgctttttaaggacaaaatgggggatgagcggggcacgatataaccattttcggagcatgacaactagcgtggataagaacgaaaacggatttgtttgcttggaggacttctccagaatgatggtgctacagcgatcatcatatcaccatgggttcctatccgcatgagcttgacaatcatgtgattagatatacactcgatttgaggatatccatgcctgaaacaccgtggtgattggtgtttaca

SEQ ID NO: 55148 - DNA, 150 bp, Gossypium hirsutum
  Clone ID: uC-gsflnu33B132c09b1
tctgtccacacgtccgtataacaccccaatctaccggtcgcttacctggactgggcatagtttctcgggctatagggaatgttaaaccattctaccaccgatttaatgagggggtcgaggggggcgacatctataatcaatccccacatt

SEQ ID NO: 55149 - DNA, 108 bp, Gossypium hirsutum
  Clone ID: uC-gsflnu33B132d09b1
tccacacgtgcgactaagctaccaatgaagcgaccgcttatccaggaggaccctacgggcccctaatagagggaataatccataattcccctcatgttaataatgggg

SEQ ID NO: 55150 - DNA, 154 bp, Gossypium hirsutum
  Clone ID: uC-gsflnu33B132d11b1
tcgcccacgcgtgcggccaagggtccacagaggggcttgttaaaatgaattaacgttatacacacaatcaaaaaagagaatttaagcattcgacagatacaattaattaatatcttgctctttctaattcaataaaactgaaaattattattac

SEQ ID NO: 55151 - DNA, 183 bp, Gossypium hirsutum
  Clone ID: uC-gsflnu33B132e05b1
tcctcgcgtccggcacgggtggcctgtgagggggggcaatcagggccgtactggcggacacatgacatgttcaattaaggtacctatcccgaatgaaagctggatcagagcatctgtgtattacggtgctgaggtttatggttgtcgtgcttatattctagcacagactctttatatttacct

SEQ ID NO: 55152 - DNA, 126 bp, Gossypium hirsutum
  Clone ID: uC-gsflnu33B132f04b1
ttcttctcgtccgggatgggagacactatggtagggtagagtgtctgatcaaggacgctgtcactcttcctacttcgcatataattgcaaactgaaggaactggaggatttaatcccccttttgcc

SEQ ID NO: 55153 - DNA, 128 bp, Gossypium hirsutum
  Clone ID: uC-gsflnu33B132f05b1
ttcctcgcgtgcgggctgggggacattttagcgggagatcagggctgatcaatgagagtagcatgctttctccttttaatttagatgggattagaaggaataggacgagaacatttttcttttgcttt

SEQ ID NO: 55154 - DNA, 416 bp, Gossypium hirsutum
  Clone ID: uC-gsflnu33B132f12b1
tttttgtaatagaggccaaacttgatgcgtggcaatggctggtctgctctgtcaccaccggcaccgagtatgtaccgacatcataggcgccaaaccgcagacttttttcaccatcgaaaacaagttcgactccaacagggagagcatctgaacaggtctgctatgagcgttgatatgtgctctagggctaaactcgatcgttcgttgcgcgttacggcgttctcgaagagccgcttttaagactcccgacaagactgcagtgcgcttgtcgtcaaccgacctgaaaaaaagcgcgtggcggcaaattcctgcggccgtgaacggtaatgagatggatttaacggcctacaagattgttcgatttgattcggcgagttcatggttggagagaaagttaggggcttgcctaaatgtaa

SEQ ID NO: 55155 - DNA, 399 bp, Gossypium hirsutum
  Clone ID: uC-gsflnu33B132g01b1
gtcttgagcatctcaacagccatttctgccggaacagcactggctgtcacctctgctgtgattgatgctggaggtcagacaacaagaatagacacaggcaaagagtattacccatacaccaccaagaaaagacctgccgattcataactcttgcatatcattatcgaggatgcacttccaacttaattcgggataattaatcctttttaggatgcctttgctttctaagatttaatcacacactcagttcccagtttgttgtttgcatttaaagggagaatgttgatttgcatgatttgtcgtgtatcaaaataatggtgtagatgacagtctctgaacctattgaatttggggtacttaagacgagtttcttagagggaaaataaatcaccaatcaaa

SEQ ID NO: 55156 - DNA, 152 bp, Gossypium hirsutum
  Clone ID: uC-gsflnu33B132g10b1
tcgtccacacgtgcggccacgcgaacaatgaagggatggttaaaatgtgactataatatcaagacctaataataatacacacccagcagggggtagggggattactcgctagtcattaattaacgacttcaaaaaagaaagctaaatactgt

SEQ ID NO: 55157 - DNA, 476 bp, Gossypium hirsutum
  Clone ID: uC-gsflnu33B132g12b1
cccacgcgtccgcgtcgtaatccagcggaacgtttaacatttcaagagttctttaatcacccatttctctctcagggccaaccaaatgaaccattgaggagtcagggaattttaggaaatggttatccattttttgaaagcagacctggaagtactgatgaaagctttcaggaggattgtcttcccttctttctggatgatgattctagtggtcctgaagggagcccttcctttgaaaagaagaggtcctcaatgaaatctggttatggattttctcccaatgcaaaagatactagagaacaaacttctaatcctttgaataaagtcaaatttacatccaaatacagtggtacaagacataaattagatgattccagttttagacatgaaagcagcaaggtttctggtgaaactctgtatgaacctcacaaatccatggatcaaagatctacaagtactcattcaagagttgggga

SEQ ID NO: 55158 - DNA, 458 bp, Gossypium hirsutum
  Clone ID: uC-gsflnu33B132h03b1
ttttgttctgccttttctgcagtcaagacccaaattcgtcgccgccgccgccatcaccgccattttgtttttccttagatcgattttctgagtttgcacgtctttcttccgttctccccttcttttagcgtcaatagacattgggcgccgcaaccgccattggacaagacagtctgtgggcgcctgcctccccctttccgtccttcattctccacctctctctccattaaatagcccaaaatcaaggggtttggtagatttcatttaccaatctgatctgttgcaggtgttgtcttttgcttaactatggaggacgaaaggataaaggtattatcatttccatcggatagccctccactctccatcattgccgccgcaaagattgcgggaattgctttaccgactcagactttaacatctggaactctccctttgtctttctcaaatgggcttgaatt

SEQ ID NO: 55159 - DNA, 478 bp, Gossypium hirsutum
  Clone ID: uC-gsflnu33B132h10b1
ttcacgcgtacgcccacgcgtccgcccacgcgtccgggggattgctcctatgacggaaagaggcgataagatatcgataacggactttggtggtgtcggcaacggacagacgctgaataccatagccttccggaaagctatatatcggattcagcatctgagaaggagaggcggcacgctactttttgtgccttctggagtctacttaaccgacagtttcaatcttactagtcatatgacactttatttggctcgaggtgctgttatcaaagccactcaggacacctcaaattggcctttaattgctcctttgccatcttatggaaggggaagggagcgccctggaggaagatatatgagctttattcatggagatggactggaagatgtggtgataactggtgagaatggcacaattgatggtcaaggagatatttggtggaacatgtggaggcagaggactctccagtttacaaga

SEQ ID NO: 55160 - DNA, 477 bp, Gossypium hirsutum
  Clone ID: uC-gsflnu33B132h12b1
tgaaaaaccaatgaatgaaattcagtggttaatggctgagaaagaaactgatgagtggcttatgtaatttgttggttagatattttcacaaaaaaagtggtacagagatagcccttcaaaaaattttaaaaactcaaaatccaatgccatgattccatcaaatatccaaaactataaaaggtcacacttcaagagaaagtagattaagctttagtttctttttgcagttaataagccaagtaaaacaatgactcttcaagcaagtttctttaactttggaagcatttcttctcttccttgccctcccagaacttcccgtcaacgctttgtaatcagagctaaagtggaaccatcagagaaatctgtggaaataatgaggaaattctccgaacaatatgcacgtcgttcaagcacatatttctgtgtggacaagggagtgacttctgttgtaatcaagggactagctgagcataaaga

SEQ ID NO: 55161 - DNA, 404 bp, Gossypium hirsutum
  unsure (1)..(404): unsure at all n locations
  Clone ID: uC-gsflnu33B133a05b1
attttaatatctcccttcttttttctcgtttactctctctttttggttcttaaatttcgtttcttttttcctttgttcttgttatttgttcctttaaccacctttttttgtcaacaagttaatgtttttagatataggatcatatcagaattttacttatgattgttgggttcttgtatttaccttggatgttatcgntttttttttactgtgatcttttatgttagttcagattttctttttcactatgtaaatgctttctttggtatgacttgttgttttagttgctttcctgtttctgaatcagctttgaatggtgacttatatctggcagttaacctttgtattctttactatgatgtaatggctatgcttatggccctatctggttaatgaaagatcct

SEQ ID NO: 55162 - DNA, 400 bp, Gossypium hirsutum
  Clone ID: uC-gsflnu33B133a06b1
gagtatttttgtgataccggatcaggtactcgtgtttgcagcggtttgtattcttgcaaaggggtaactggaattgggttgccacaaaatgcacctacatctacctgttgtgtttatgactccttgatgggaataggatcaggctattctttggatcttccaaaacttcagtgctcatcgtacacatcgatatacgagtttggagatgaagaggatcccatgaaatggaaatttgggatttctttgctgtataatgattcatactacactcctgcatgcaaggactgtgaaaccaatggaggctagcgtggctttaatgttttggatgagtcattctcttgcattgccgagatggtgtgaacactaccacaaatttgttttgcccatggtacaccctgag

SEQ ID NO: 55163 - DNA, 189 bp, Gossypium hirsutum
  Clone ID: uC-gsflnu33B133b01b1
gtactgtccaccgtgtgagagtgtctgtagcacatgtaatgtaagtggtgatatcattgtcatcatatgttctttcccaaattatgatttggatataatgttagaaattttaagttgtaaacgtttgtttatagttgaatttattgaagttggaacttatttgtaaaaatgttagaaacgtttgtttct

SEQ ID NO: 55164 - DNA, 296 bp, Gossypium hirsutum
  Clone ID: uC-gsflnu33B133b03b1
cgtactcgtagctgctaacgggctctgctaccttcatgatgattgttccgctttgattgtccatcgagaagggtaatcgaacaacgtcctcctggactcggattttgtagcacatgttgctgattatggccttggcaaatctctgcaagattccggtacttgtgaatgcatgtgtgctatagctggatcatatggatacatcgctccataatatgcctacacgcttaaggtggatgacaagagcgatgttgatagctttggtgtagtcctgtcagaacttggtagtggcagaaaac

SEQ ID NO: 55165 - DNA, 343 bp, Gossypium hirsutum
  Clone ID: uC-gsflnu33B133b04b1
cttactcgtacgtagacacgctcgggatcatatacagggagcttaagccggataacatgttgatgagagaagatggtcatataatgctttcggagtgtgacctttctattagatgagcggcgtctaatactatggggggatcctggaactcttccgtggaatcaaaacattgcttgtactgagatgaacccgcatgcagtgggccaacttgtgtgcatccgccggataggtggctgcctgcatggattggaccacgttttgttgtatgcaagccgtataaagaaaagaagaacaaagtaaagatcgaaacgggccatgaagggaagccgttgtctgagctcat

SEQ ID NO: 55166 - DNA, 242 bp, Gossypium hirsutum
  Clone ID: uC-gsflnu33B133b05b1
cctactcgtccgtcagccctatcttcctttttgtttagtaggaaataaagagtagagtttgagttactgaagaagggaaaaaatgggtattgcaggtgcagagtgcattattgcgggttttatctcatcaatgtggatggctgatgcaagaatttcaggagtttaatccgttggggcatggcaaaatgcacatgctaccttgtacagctgttatgatgcttctggcaccatgggaggagctt

SEQ ID NO: 55167 - DNA, 308 bp, Gossypium hirsutum
  Clone ID: uC-gsflnu33B133b08b1
ttctcgcgttcgtgaaagtgctacataaaatgatagcgatgacggcagagactcacctgatgctcgaaggaacgggttgaagttactactacaagctaaccatgatctggggagggagcgcccagaattacacgagggctaatgttgtaactttgcatggaacatcacgaaccggtgcctttgatagagacaagatttggctgtgcatcttcaggcttcctgatcattgtcgttagtgcctcgagcactaccaccgctttcatgcttgtgaaagaatctgaacgaaaattgggccaacataggctaaa

SEQ ID NO: 55168 - DNA, 167 bp, Gossypium hirsutum
  Clone ID: uC-gsflnu33B133b09b1
tcctgtcgtaccgtagagagcgccaaaccaggggggctgtgtttaaaaagagtctttgcttgatataagggaaggactggacgagcgaaaatacgttaagcccgaccatgacggatacgctcagagtgagctcgatgctaatgatctgctctagtatgtcataatag

SEQ ID NO: 55169 - DNA, 362 bp, Gossypium hirsutum
  Clone ID: uC-gsflnu33B133b10b1
actaatcgtacgtgagagtgcgacataatcagagggcggtgacaaaaacgagtgattgattgccagcagagacggctgaaattgactacgacacgtcaaccaggaaaggggagggagcgcccatattaatgcgcgggctcgttgtctaattttgcgatgaacaacacgatacgggtgctcacaaaggcacaacactccgtgtatccatcttcatgcaacctaagcttgtatgatagggcctagcgaactaccaccgttaccaagcttgagaaagaatgtcaacgaaactaggtccatgatcggctaaagaagagcccggtgagagacgctaggtcttcggcaagaaccaacgtggatagaga

SEQ ID NO: 55170 - DNA, 415 bp, Gossypium hirsutum
  Clone ID: uC-gsflnu33B133b11b1
ttatattataatttatattatgtatttttctgagggttctgacctacacgagaaattcgtagccaacaagcatgtggaagattttgttacaatcgacaaactgatagatgcaggtgaagcatcttataatatgtggcggagtcccgatccttagatctgctccttgcgctactggtgcttacaagatcacttgaagccgtgacccaccttctgagatcgtgaccttgtatgattatggtcatgaatataacgactaaaccatgcatgtttaaaactttccacgaaatatagtcgatgctagtctaaaggatcgtccagtgtgtaacgagtgatctttgacagtaactaatgtgcataacttcacttgaaacgagatcaggcttctaatcacatatatggggattgtccattgcgc

SEQ ID NO: 55171 - DNA, 251 bp, Gossypium hirsutum
  Clone ID: uC-gsflnu33B133c02b1
cccttgttaacggatacacgcgcgcgactatgtccgtggatattattgcgcgtaacctcttgataattaacggtcacggcataacgaatgaggagagaatactctggtatagcctgactctagaaccaacattgtgggacgacttgagaggagtacgatacgaggagaacgactgggtgaactaagataaaccatgacgttacacgttcttctactaatccctcgcactgaaggcgggggaccgcccctct

SEQ ID NO: 55172 - DNA, 103 bp, Gossypium hirsutum
  Clone ID: uC-gsflnu33B133c05b1
cccactcgtacggtaatgcgcgccaacaaatgatggcggggaccttaaagtgtaacttcgtgttttcagacaaagacggcagaaagacacaccagtccacccc

SEQ ID NO: 55173 - DNA, 394 bp, Gossypium hirsutum
  Clone ID: uC-gsflnu33B133c08b1
ttctcgcgtacgctagtgcactccaccttcagagggctgcgtttgcaacgactgcctctatctttccgggcaaggactggataaaaactgacatgtaatacggctagttacggttaaacagaaaatgagtgggagctagccagtctcagccatgacctgatgacacgcaagggaaaaggggacgagtgctggatctggcccgcaagctgaagcaccgtggtcctgactggaggggcctctaccaacatggagactgccaagcgtgccatgaacgctcagccaaaattgatccagcttccggtgacgaacctgtctttaagggaggcaagtttttagctgagaacgaaactggagagagatccactcaatgcataactggtgtcgaagatgcacc

SEQ ID NO: 55174 - DNA, 117 bp, Gossypium hirsutum
  Clone ID: uC-gsflnu33B133c11b1
actaagcgtcacttagtgtgcgacaactataaggggcgaggtgtaaaacaaatgtgtgtataagagccgaaaagcggcgcagggtgagagacacgaacatcacgaagaggtaaggag

SEQ ID NO: 55175 - DNA, 313 bp, Gossypium hirsutum
  Clone ID: uC-gsflnu33B133c12b1
cggcgcctgacagtaactgaccgggcgacccctataaggggagctgttttgaggatccgcgtgcttgttaacaggaacgaacagcaggatattggcaccatcggccatgatgagtaccgggacacggattagcagtggccagtgactgagcttgtgtggcactgacatgctccacaaggctcgaagaaaaacaaaaagccgtacgaacgcacgacacactgtagaggcggagacaatggctaccgtgacactagctcggacccacgaaacgcacaaggactccgagatcacttccaatggtgacgcaaccaaa

SEQ ID NO: 55176 - DNA, 196 bp, Gossypium hirsutum
  Clone ID: uC-gsflnu33B133d04b1
cccactcgtacgcaaacacgcgccaaaaaaagatgggggggactttaaagagtaacgtggtgttaaaagaaaaagaccgcataaagaaggacgagagaaccccgacaggtaagggtggcccgaaacaaacgacggggggactgtgaggaaccaggaagggatcgcacgaacgggtgcatcaaaatggacaatggtg

SEQ ID NO: 55177 - DNA, 113 bp, Gossypium hirsutum
  Clone ID: uC-gsflnu33B133d07b1
ttctcgcgtccgatatgactttccataaaaggggggattgtatatagattattggatcttcaaccccaaaggacgacggtaatgataaggttcagagcttcaccagagggttc

SEQ ID NO: 55178 - DNA, 370 bp, Gossypium hirsutum
  Clone ID: uC-gsflnu33B133d12b1
actaagccccctatataacgcgaccaccactgggggcaatttttacacaaactctggctattactacagaaaaactagggaaaatgaccgaggcagcgataaggaagaagccaggaatggcgagtgtgaaggacgtgcgacttcttcaagatgggtctgcttcggatgggttcgttcccgtcagagacacccgtcggagacccaacacgggcccaagagctacggatatctatctagctgataacggtgccttgtcgtatgggatggaccaagtaggtcaaggaaacaagatccgcagggcactgaaagatgaaaagtttgctgcacgtagagcaatattgcctgcgcttcaagctgaagaagatgaaag

SEQ ID NO: 55179 - DNA, 265 bp, Gossypium hirsutum
  Clone ID: uC-gsflnu33B133e08b1
tctcgcgtacggaagtcgtgaaatactagggggggagatttagacatgcatgtgtttgtatgaacaaaaagagactgtggaactgcgaatgggtcattaaattagtaatagagcgtccgataaaatttgctgctgcgataacctttagaaatttagggctaatacgtgctgcataccccgaattatgaaaggggtgcacgtaatacataaaagatagacgacggttttggctgatgctctgatgaatcattgataactagacgga

SEQ ID NO: 55180 - DNA, 179 bp, Gossypium hirsutum
  Clone ID: uC-gsflnu33B133e11b1
ttctcgcgcaccataaagcgcgacaaccactaggggcgaggtttaaaacatctctgggtacaattacagaaaggctccgcagagtgacggaggcgtgcattacgatgacgtcaggaggaccgaatgaaaaggaggggcgactaattcgaaacggtactgcttcgaatgggctggttccc

SEQ ID NO: 55181 - DNA, 109 bp, Gossypium hirsutum
  Clone ID: uC-gsflnu33B133f05b1
cccactcgtacggaacaacgtgctacagcatgaaagaggggatgataacgtccaactatcaaggagacaaagactaccgcgaacagacaaacctgagaaaaacaataag

SEQ ID NO: 55182 - DNA, 148 bp, Gossypium hirsutum
  Clone ID: uC-gsflnu33B133f06b1
cccgtgcgtacggaaagacgtgctatacaatgaggggggggtttataaagaataattttgtgaaaacaaacagagaccgcagttggattgacgagtccatacttttgtgttactgccgcctcaatcattttgtggggcgacaaatagg

SEQ ID NO: 55183 - DNA, 254 bp, Gossypium hirsutum
  Clone ID: uC-gsflnu33B133f09b1
actacgcgtacgtaaagacgtgccatctcaggggggttgtttttgacgtgcatgattttaacattgcaaaaagagaccgcagttgtcgcgatgagaccatgacgttgactatcacgccgccctcatgatgtggcggggcgcctcatttgacatgctactggctcgaatgccctggttcccccaaaaggcccatcggggggaagctacctattctccatattgcgctaggttagttcccccgcatatgaatcgtt

SEQ ID NO: 55184 - DNA, 161 bp, Gossypium hirsutum
  Clone ID: uC-gsflnu33B133g06b1
cctactcgtacgcaaactcgtgcgatagtatgaaggtggagactattaagaataactttaagataaccaagaataaccgtattaggattgacaagacaatgactttgtgtaagagctgcccaaaataaactgtggggggccaaataggacttactagggga

SEQ ID NO: 55185 - DNA, 104 bp, Gossypium hirsutum
  Clone ID: uC-gsflnu33B133h04b1
cctattcgtacggattctcgtgcgataatatgaaggtggagattataaaggataacgttaagaaaacaaagagtaaccgcatgaggaacaaggagagaatgcct

SEQ ID NO: 55186 - DNA, 350 bp, Gossypium hirsutum
  Clone ID: uC-gsflnu33B133h10b1
gcccttaacggtcattcctactggggaatttttttaataaagtcgggtctatcgatctacttttcaaccttgtagccaagcctactcttggacttggctgcttaacgccaatcccactaacagagccgcaacagtagacgcctatcttactaacccctttggaaggcagttaaatatccattttaaaaaacaaaaaacctataaataaaaatcactgcaaaccattacctgacttcgccgtgttaaaactaataacaggttttgttcttgaaaaccttgggggatagaatgcctttcaacatataatggcttaaatccatggggtttaaaatttcggaactctacctctt

SEQ ID NO: 55187 - DNA, 280 bp, Gossypium hirsutum
  Clone ID: uC-gsflnu33B134a04b1
tgttattttcgtctctgctggatccgagtgcaagagtccaccattcccgtctattaaaagctttaacagtcttgtacgacagtgaactagttgtatgatcgcggttttcaattttcataaataaaatccgtatgattcaacatatggatatcgagttgatatatatatacacctaatagctgtatagggaccaactcttgaatatatgaagcataatcgaccgaataaactcaaaacatgtatatatatttgaatatatctacttaaattttacttggtg

SEQ ID NO: 55188 - DNA, 342 bp, Gossypium hirsutum
  Clone ID: uC-gsflnu33B134b02b1
ccttctcttccgctcaaacaagcggccttgttgccggtattgtagttgctgacccctatgaatattgcaaattcactacaccaaccacacacagggatttgaaaggctcaagaggcgaaatgatcttttttaagaaggaccctgttcttggagattttgtggaatccaatatcaagactactggtaatccaggtttacagggggggcctcatagccacacaattgcacgactagcagttggcttgcagcatgcgcagtcacccgagtacaaggcttaccagaatcaggtagtgtctaagtgtagagctcttgcagggcgcaagggtgaactgggatatacac

SEQ ID NO: 55189 - DNA, 205 bp, Gossypium hirsutum
  Clone ID: uC-gsflnu33B134b03b1
ccctcgtgttcgcccacgcatgcggtattctgtgcggaaatgaaacttaggaccgccaaccatctggcaacttcactatgccggccgcggaagtagatgtggctcgaacaagcgtcgcaatgatcattcttatgcacgaacccatcatcgacgatttgccgcaatcgcagagtaagatcaacggtcatccaggggtacagaggtg

SEQ ID NO: 55190 - DNA, 512 bp, Gossypium hirsutum
  Clone ID: uC-gsflnu33B134b08b1
tcttcgcgtccgggagtttgcactgcagttgttcgatgcacttgctcgaaaacgaaacattcatggtgattccatcgataaggctcatctgaaagagttttgggatcagatctcgaatcaaagcttcgatgctcgccttcaaactttcttcgacatggtggataaagatgcagatggaagaataacagaacaagaagtcaaagaaattattagtctcagtgcatctgcaaacagactctcaaacatccagaaacaagctgaggaatatgcagctttgattatggaagaattagacccagaccgcctggggtacatcatgataaacaacttagaaatgcttctgctacaagcaccaaaccagtcagtacgaggcgaaagccggaaattgagccaaatgctaagccagaagcttaagcctacatatgacggtaatccagttaggagattctgcaggaacaccaagtatttcttgcaagataactggcagagagcttgggtgacggttttatgga

SEQ ID NO: 55191 - DNA, 376 bp, Gossypium hirsutum
  Clone ID: uC-gsflnu33B134b12b1
ttttctacgcgtccgtccacgcgtccgattatcgtaagtggctcgatacacagtcccataggttccatgagccacaacgtgtcttaaatctagcttagccaaatcaatctcccactcctctgcaggcctttggttatcaacgtttctagaccaaacccggctcaggtgcttctccagctgtatgtctaagctttttaaatcaattttatcagctctaaaaatcatatctttgctactaaaacttccagtacccttcagcttacgatgcctgcttcctccctgatcatctgatttctttggtgtcttgacaccaccacctttcgactccacttttcaaatccatatttatagtatggccaaaaacaaaaaaccaacc

SEQ ID NO: 55192 - DNA, 186 bp, Gossypium hirsutum
  Clone ID: uC-gsflnu33B134c01b1
cttcggtgatcgcccacgcatgcgggattctgtgcgggaatgaaatgtatcactgctaacgaactttcaacttcactatggcgggcgagtacttagatatgggacgaacatgcgtacgaatgagcctgcttatgcacgaaccgatcatcgccgatttgtcgcaatgcatgagtaagagtaacggta

SEQ ID NO: 55193 - DNA, 187 bp, Gossypium hirsutum
  Clone ID: uC-gsflnu33B134c02b1
ctttctcttccgcccacccaggcggcctcctgggcggaattgaaacctagaaccgcaaaccaattgccaactcaaatatgccggtccagaacggagatatggcccgaacaggcgccgcaacgagcatgctggtgcacaacccgatcatcgccgatttgccgtcatgcaagagtcagatcaacggtca

SEQ ID NO: 55194 - DNA, 145 bp, Gossypium hirsutum
  Clone ID: uC-gsflnu33B134c05b1
ccatgcgtccgcccacgcatgcggtattctgggcgggattgaaagctaaaaccgccagcgatctcgcaactgcactatgccgggcgcggaaggagataaggcacggacatgcgccgcaacgaggatgcttgtgcacgaaccgaac

SEQ ID NO: 55195 - DNA, 187 bp, Gossypium hirsutum
  Clone ID: uC-gsflnu33B134c08b1
ctacgcgtccgtccacgcatgcggtattgcgggcggaatttaaagctaatactgcaaaccatctggcaagttcactatgcaggtcgaggaatgagatatgggaaggacatgcgcagcaatgaggattgttgtgtacaaagaaaacaatgacgatttggtgcaatggatgagtatgatcaacggtaat

SEQ ID NO: 55196 - DNA, 205 bp, Gossypium hirsutum
  Clone ID: uC-gsflnu33B134d01b1
cctacgtgttcgcccacgcatgcggtattacgggcggaaatgaaagctaagactgcaaaccaaaacgcaagttcactatgccgggcgcggaaggagaaatgggacgaacaagcgtcgcaatgaggcttcttgtgtacgaagcgaacaatgacgatttggcgctattgaagagtaagagcaacggtaatgaaggggtaaggaggtg

SEQ ID NO: 55197 - DNA, 210 bp, Gossypium hirsutum
  Clone ID: uC-gsflnu33B134d02b1
cgctctcttgtccgccgacaattgggttattctgggcgaaatttaaacttataattgcaaaaaaattcgcaacttaactatgcaggtcgagtaaggagatatgtgcaagaacatgcgccgcaatgatcattcttgtgtacgaaccgatcaatgacgagttgccgtcattaatgagtaagatcaacggtaatccaggggtaaggaggtggt

SEQ ID NO: 55198 - DNA, 188 bp, Gossypium hirsutum
  Clone ID: uC-gsflnu33B134d04b1
cttacgtgatcgcccacgcatgcggtattaagtacgggaatgaaatgtatgaatacaagggatatcgcaagttaaatatttaggccgaggaataagaaaagggaaggacaagcgtagcaatgatgattcttgagcacgaaacgaactacgacgagttggcgatattgaagagcctgataaacggtaat

SEQ ID NO: 55199 - DNA, 203 bp, Gossypium hirsutum
  Clone ID: uC-gsflnu33B134d06b1
cttacgtgttcgcccacgcatgcggtactatgggcgggaatgatacttaatactgccagggctatgccaactcaaatatgccggccgaggaatgagatatgtcctgatcaagcgccgcaacgatcttgcttgagcacgaagcgaactacgccgagttgccgccattgatgagtttgatcaacggtcatccagcggtatggagg

SEQ ID NO: 55200 - DNA, 228 bp, Gossypium hirsutum
  Clone ID: uC-gsflnu33B134d10b1
tctacgcgtccgaccacgaggactgtcacagcgagggtgttaaagacacgtgggccagacatactgggatgcaggcttgatagaacgaggggcaacaaaagacaacggagcagccagctaccaggcattctagggacaagtacaacaaaaaagactggatttagtgacccatcccaagaaacccacatcgaggggaccagaaactgacgagggggtgatagaagaaac

SEQ ID NO: 55201 - DNA, 476 bp, Gossypium hirsutum
  Clone ID: uC-gsflnu33B134d11b1
tatttatttatttatttatttaagtttttgttttttctttttctttttgaatctggttctttttctttcaaagtggatcaactgaattttgatccagtttcttcatctaggtccttttttattttcaatccaaattcagtccctttttttttcaatcttggttaactttggcagtttcaagtaaaaccagatatgggtggttgcctcacaaaaaacaaagatccaatgccccaacataatggctatagatcaggagcaacaactacagctgctgttcatcaacaaagataccaggaccctgttaggcctgcaccaattcaaccccaggtctaccacatccctcaaaagccagggactcaaacaccatggaagcctgctgttccagcaccaagtcccaagcctgcccctaatattgacacaatcctaggcaaaccatttgaagacataaggatgcattacacaattggtaaagaact

SEQ ID NO: 55202 - DNA, 184 bp, Gossypium hirsutum
  Clone ID: uC-gsflnu33B134e02b1
ccaatgcgtccgcccacccaggcggcatcccgggcggaaaagaaacggaaaaccgcaagcaaaatcccaactcaaaaatgcagggccagaaaggagaaaggacccgaacaggcgccgcaacgagcatgctgatgcacgaaacgaacaacgacgagttgccgcaatagatgagtcagagcaacgg

SEQ ID NO: 55203 - DNA, 144 bp, Gossypium hirsutum
  Clone ID: uC-gsflnu33B134e03b1
ccctcgtgatcgcccacgcatgcggtactatgtacggaaatgaaagctaagactgccaatgctatctcaactgcaatatgccgggtgaggaacgagatatgggactgacatgcgccccgacgtggttgctggtgcacgaaccga

SEQ ID NO: 55204 - DNA, 226 bp, Gossypium hirsutum
  Clone ID: uC-gsflnu33B134e04b1
cctacgtgttcgtccacgcatgcggtattatgtacgggaatgaaacctattactgcaagggatatggcaagttcactatttcggtcgaggaattagatatggcacggacaagcgtcccaatgaggattcttgtgcacgaaccgatctacgacgagttggtgtcattggtgagtaagagtaacggtaattaaggggtatggacgttgtctcacggagcatcgaagaa

SEQ ID NO: 55205 - DNA, 207 bp, Gossypium hirsutum
  Clone ID: uC-gsflnu33B134e05b1
ctttctttccgcccacgcatgcggtattatgtacggaaatgaaagctaatactgcaaacgaaaacgcaggtgaaatatgcagggcggaatatgagaaatgggactgacatgcgtcgcaatgaggattttggtgtacgaagcgaacaatgccgatttggtgtaatggctgggtatagattaacggtaattaaggggactatttgtttt

SEQ ID NO: 55206 - DNA, 157 bp, Gossypium hirsutum
  Clone ID: uC-gsflnu33B134e06b1
cttactgtccgcccacgcatgcggtactatgtacgggaatgaaagctaataatgcaagggatatctcaacttaaatatgtcgggcgaggaatgagaaaagagactgacaagcgtaccaatgaggctttttgtgtaagaaccgaattacgccgatttt

SEQ ID NO: 55207 - DNA, 180 bp, Gossypium hirsutum
  Clone ID: uC-gsflnu33B134e09b1
tcttcgcgtccgcccacgcatacggtactaagtatagaatttaaagttaaaattgcaaacgatctgccaagtaaactgggcagggtgaagaatgagaaatgtaaaggacatgactaacaatgaggcatctgaggtacaaggaaatgaacgaagatttgcagtcatgactgagtcagataa

SEQ ID NO: 55208 - DNA, 276 bp, Gossypium hirsutum
  Clone ID: uC-gsflnu33B134e10b1
tctacgcgtccggcgactcgatcctatctagagcgagatactcatcctaaacttgcccagcatgctggagctttgtgtggtgggccatattatggcgatcgtagctgggataataagcttgctggtgctcaggtgactacgagccgattgagaaagctcttgagttctcgagcataatatgcggaaatatcatgcccgtttcatcagctagcgagcataattataggctcattacttccggtcttcactacagttgcacagaactgaatggggaat

SEQ ID NO: 55209 - DNA, 195 bp, Gossypium hirsutum
  Clone ID: uC-gsflnu33B134f07b1
cctcactcgtccgtccacgcatgcggtattgcgggcggtaattaaagctaagactgcaaaccatctcgcaacttcactatgccggtcgcggaatgagaataggcactgacatgcgtcccaacgaggcttcttgtgcacgaagcgatcaacgccgatttggcgcaattgcatgagaagagtaacggtaatcaaggg

SEQ ID NO: 55210 - DNA, 246 bp, Gossypium hirsutum
  Clone ID: uC-gsflnu33B134f08b1
cctactcgtccgctcacgcatacggtactatggggcgtatttaaaaacagtgttggatacaatctgctaagtatacttggcagatcgcaggacgagaaaagtaaatgacaagcataccaaggacgcatcttatgtacaagttcacgaacgaagatttgatgcagtgacatggtccagagtaagtgagatctaattgtccagacgttgtcgaagggaggatagtacaaactgtaaagcaagaaactg

SEQ ID NO: 55211 - DNA, 183 bp, Gossypium hirsutum
  Clone ID: uC-gsflnu33B134g05b1
ccttctcgtccgcccacccatgcggcctcctgtgcggaaatgaaacttaaaaccgccagccaattcccaactcaactatgcaggtccaggacggagatatgggccggacacgcgccgcaatgagcctgctgatgcacgagccgaacaacgccgatttgccgcaatggatgagcaagagcaacg

SEQ ID NO: 55212 - DNA, 301 bp, Gossypium hirsutum
  Clone ID: uC-gsflnu33B134g09b1
tctacttgtccgatggcgcttacggggctgagtaggatatttaagggaggagggctctacactctgcatggggcatttgcgagagtaaatgtgcacaaaatctaatggaaggcctaccaagaatggatccgtggtacaagactgcgaatacagcactgaattatggaacaggatagggaaggacagactgtctggcccttctactggagaacgggggatatgtcaaactgtaaaacatggatgggaaggcccgcatggtagtatccactctgaacacgcagtataaggtacttacgacctt

SEQ ID NO: 55213 - DNA, 504 bp, Gossypium hirsutum
  unsure (1)..(504): unsure at all n locations
  Clone ID: uC-gsflnu33B134h02b1
cgtattacagnncactctaaatatgcctaaagatctcatggtttccaaaatggcaggggggactacggtggtcaacccatttaccaagtatgcattaacaatgtcaccagtggcaatgagtcttgaagagttgattccatcaacccatcttaagtctcatatctatgcaatcataattagaacatcgcttgtgatctcgaccttgattgttggtctcaccatcccattctttggattggtaatgtcattgatcggatctttgctcacaatgcttgtgaccttaatacttcctcctgcttgttatttaagcatcttgaggggtaaagtaactcgtattcagagaacactttgtattatggttattacagtgggagtagtttcatcagcttttggaacatactcagcactctccaagattgttgagaatttgagaagctaaaagttctttcccattttaatttttttgttaccttatttaaatcgacttgttgagcttcgttgttt

SEQ ID NO: 55214 - DNA, 185 bp, Gossypium hirsutum
  Clone ID: uC-gsflnu33B134h06b1
cccactcgtccgcccacgcatgcggtattatgtgcgggatttaaatttaatattggcagccatctcccaagttcacttttccggtcgcggactgagatatgaaccggacatgcgtcccaatgatgcttctgatgcacaagacaaccaacgacaagttggtgccattaatgagtcagagcaactgt

SEQ ID NO: 55215 - DNA, 339 bp, Gossypium hirsutum
  Clone ID: uC-gsflnu33B135a02b1
aatacattaatatcccatttcaaagaaagtcacatagctttaagagataatgatgaatggccacaaaacagagccggcaccgccaccaccaccgccatctgcaacgccgaggcagctgacggaggccaaggtgatggcggaggagaatggtcggcaagttgaaccctgtgtaaggtccaagactggaggaaccttgacgaaaggggatggtggtggtgcctgacactcaggctgatgtgcatggctacttcagttacagccatgtcgttcatggtcaccgcccgtcagatttcttgatggagtaacagtgactgcaacagcttactctttgcttcaatt

SEQ ID NO: 55216 - DNA, 221 bp, Gossypium hirsutum
  unsure (1)..(221): unsure at all n locations
  Clone ID: uC-gsflnu33B135a11b1
gatgagattgaatttgttttcttgggtaaatgaatcaacttactcaagcgtctctgaataacatttgtataagcattgctattttttctattattatgttctcttctttattgttttttggaatgaaataaaaattactgtngaaaaaccaaagccgatcatacccaagcgaggtcgttcgctcttgaggtccccaaggttaacaccctttggtgcaagga

SEQ ID NO: 55217 - DNA, 299 bp, Gossypium hirsutum
  Clone ID: uC-gsflnu33B135b05b1
tcgatttctcctgtactaaactactgccactgaaaagcaagttagctagctagggatttgtgagccagagagatgggtacaaaatgaacggcgtcactagccctatgatctgcactcaacatcctattgttttgcgtggagagtgcttgtggtatcctgctccttcccacatccgcaaacctaaacctaaaccaaagccaaacacccactacctcctcatgttatggtggcaagcgccctagagacgctctcaaactaccggtatgtgctgacttgctcggcggcttgctcaacggcac

SEQ ID NO: 55218 - DNA, 200 bp, Gossypium hirsutum
  Clone ID: uC-gsflnu33B135c11b1
cttacgctatcgaaaaaacatgcaggaacactggtggggcttaagtacaagctgagagcggaagcaagcgcaaaagcgatgctgtctgtagccactcatacagcaccagcggccactaatccaacatagaaccgcgaggcaggatagcatcgcatatctggggacctgagaagtgaatttactgtcgaagaatatggggc

SEQ ID NO: 55219 - DNA, 423 bp, Gossypium hirsutum
  Clone ID: uC-gsflnu33B135d02b1
ccctacgcgtacgcccacgcgtccgcttgaaagggtctccaaattagagcaggtgattgaaggagatgagacaaatctgaataaggaagaagagaaagtgatatgcctacctcagctccgccccttagtgcttgatgagctaccaaacctcgtgagcttcagccctgtgggttatcattttgttttccaacctttgaggtgtttaaaagtaaaaggttgtcccaacataaccacaagatttagtgatgattcaaagcaattagtgcatgccaaaacacaggtacactatccttccaaacttaagtataagctctagaacaaatttcatccattgaattattttctttatgtattctcccaaactctatatttactaagctgtaatttctatgcattaatgcaatatttttattttggatgcct

SEQ ID NO: 55220 - DNA, 143 bp, Gossypium hirsutum
  Clone ID: uC-gsflnu33B135d03b1
cctatgcgtatgttcacgcgtccagttgaaatggtgtcgcttaaagataagccgagagcggctgaaagcactaaaagcaagcattcgctgaagactgttacaggtgtaacagcacgtcattgtttattgctggctgaggcagg

SEQ ID NO: 55221 - DNA, 115 bp, Gossypium hirsutum
  Clone ID: uC-gsflnu33B135d07b1
catactcgtccggacaagcgtgcgcttgcatttttcgctcttacagagcgaccgagagcggcaataagggacacacgcatgcgttcgctgaacacgggttgaagaggaagagcat

SEQ ID NO: 55222 - DNA, 117 bp, Gossypium hirsutum
  Clone ID: uC-gsflnu33B135e05b1
cttatgtttacggtcacgcgtgcagtttattttgtgtagcttattggtaagttgatagcgtgagataggagtgaaaggataatttggctgaagactgttacaagggtaatagaatgt

SEQ ID NO: 55223 - DNA, 221 bp, Gossypium hirsutum
  Clone ID: uC-gsflnu33B135e07b1
tcgcctattcgtccggccacgcgtccagttgggttggtctagcttacagagcggccgatagctgcatttaggggcataagcatgccttcgctgacgacgggttcgggcggaacagcatggcatgtgctattgctgcctttggcaggcatgtaaatcagacgaaagatcttgacaggatactgatcttaccagggagaaagagcttaatatcaagttgggag

SEQ ID NO: 55224 - DNA, 101 bp, Gossypium hirsutum
  Clone ID: uC-gsflnu33B135f01b1
cctaataatagtagaaagcaggatagtgaaggatggcgaatgattagtcttggggtttagagaaagcagcagcactcacctgggtgagaagattgggttga

SEQ ID NO: 55225 - DNA, 316 bp, Gossypium hirsutum
  Clone ID: uC-gsflnu33B135f02b1
cttattataacgtccacgcatgcagttgaagcggtcagggtcaatggtaggcaggtgaatgcaacaaacacttaaacaaaaatctggcttgggaaccgtacggctataacgagaggcgattgtgaaccgctcgccagaccagacaatgaaacacatgatgccagagcgtaggagacccttctctccaagaccagtgggctgcaaacaagatgattgtggatgatgaaaacataataatgggggctgccaacagcaaccagagatccatggatgaggctcgagaccttgaaaaaggcatgggaggctctcaaccatc

SEQ ID NO: 55226 - DNA, 516 bp, Gossypium hirsutum
  Clone ID: uC-gsflnu33B135f08b1
tctgaatattgtccgttcacacctccactctggttggccatcattgaaaggagggaaaggttttaacatatacaaaaaaaaacactgtctctgtttctttgtttctcttgtaattgcctggaatacccagaactgcaccacctctaacattaaatccccttctttttctttgtcaatatcatcatttcattatagataaacagttaaaagcgcgaattgaatcattgatttaacagcaaaaagcacaggaaacgcccatgtctcggatctcctggaatcactttcctataatcacgttcttgagcttcgttctcgtcgtttttcttcatggggttacggctgcaaccttcacattcatcaacaaatgcgattacacagtatggccaggacttctagctaatccaggaagtccaaccgtggaaagtacaagctttgaactcaggaatggcggctctcgttacttccaagcccctaccggctgggccgtcgtttctggggaagaacaagctgcagttt

SEQ ID NO: 55227 - DNA, 359 bp, Gossypium hirsutum
  Clone ID: uC-gsflnu33B135f11b1
tttattatcagcccgcagtggaaccaggagttccagctggcggtcaaggacccacagcacgacctggtcaggttcagggtctttgatgcggacaccatcaaggacgacctgatcggtgaggcctcgtaccccctcttccagatcgccaacggccagccggtcgacacctggctctcgctgaaccccgacaaagccggcgcgatccacttccgcgcgcagctgaccggcccccagcagggcggcgcgcacggggctccccagggccagccccagccccagcccggctacggccagccgtcgcccggctacggccagccgccacccgggtacggccagccgccacccgggtacggccagcc

SEQ ID NO: 55228 - DNA, 301 bp, Gossypium hirsutum
  Clone ID: uC-gsflnu33B135g02b1
gactaaggacccatgatcattgtattagtttatgtgagaacaccagaaagctgcctcctcgcccgggatctgttccctagtcaatcattctcacccgttatggctcgaatggtgtgatacacatggagggctttcagcaacagctatggaagtgttgtggaacggaaataacgccttgctttgcgagttgagagatctaacctgtgtggatcacacatcacagcgcatgtgaacaggctctcacggtctgtatatttattcaggggaagaagatgttggaccaagagtataaaaaagtgca

SEQ ID NO: 55229 - DNA, 106 bp, Gossypium hirsutum
  Clone ID: uC-gsflnu33B135g03b1
cttttgttttcggccacgcgtccagttgaactggtcaggcttaatggtaagccgatagctgcagctagcactccaaggaagaattggctgaacattgttatggggg

SEQ ID NO: 55230 - DNA, 107 bp, Gossypium hirsutum
  Clone ID: uC-gsflnu33B135g04b1
cctatttgtccggccacgcgtccagtttaactggtcgggcttaatggtaggtcgatagcgtgagctagcactataagcaaaatttcgctgaacagtgttatgggggt

SEQ ID NO: 55231 - DNA, 373 bp, Gossypium hirsutum
  Clone ID: uC-gsflnu33B135h02b1
aaccctactatggaaagctggacgcctgcaggaccggtccggcaggcccggcgccagacccacccggtcgccttaagctataaacctagggattacaggcttagttgaggaaagacctgctggatcatgactaactggcattatggacactgcgatcgtgggagacgccatcgaccgtcggatccgtacccttctgagacctgctgctctagccgcttgcattgaggaagctggccttatcatctttaatcaaaagtgagatagatatggaacgtactggggacagtatgacatggctagttatgctcgcagcattggcactactagtggttgatcgagtctagtctgcacatgcttgtgggcaacctcacta

SEQ ID NO: 55232 - DNA, 107 bp, Gossypium hirsutum
  Clone ID: uC-gsflnu33B135h04b1
cttacttgtccggccacccgtccagtttacttggtcaggcctattggtagcccgatagctgcagctagcacttcaagcatgctttcgctgaccagtgttacaagggt

SEQ ID NO: 55233 - DNA, 375 bp, Gossypium hirsutum
  unsure (1)..(375): unsure at all n locations
  Clone ID: uC-gsflnu33B135h08b1
ttgatgtaaactgcatacactggccattgctgttttgaatgtttggaaacatgttttttttgtgtaagttacatttcagggtttttttattaccaaagttggcttgaggatcncanannaaaaaaaaaaaaaaaaaaaaaaaaaaaaaaaaaaaaaaaaaaaaaaagaagaaaaaaaaaaaaaaaaaaaaagagngcgaaaaaaaagagctaaaatatagaaaactaaaaataattaaaatgaaaaattaaatacagggggggggcttttaaagggataaaattttcctcccgcgatggtcgaaaagttaattttttttttggggccaccaaaatatattgggggccccgttataaaaaactttgctattggaaa

SEQ ID NO: 55234 - DNA, 502 bp, Gossypium hirsutum
  Clone ID: uC-gsflnu33B136a07b1
gaataatgcaaatgttcgagcacacctgcacttacaaaccaagtatttcattagcaaatcaacgaactttctaagcaagcaggtattattgcgtccacacgtcacggagagaattgcgtcagactcccttatacaatggtgaccacattaatttaactacgggccaacaaaaatgtgctactactattcttatttgatatatagaagggatataacacccaaaagaatgtaaaggtacatgcacatagaaattctgctcatttacaaatgcacatttttagacagggaacaacactcggaccaaagttgacctataataagcatttgaatgaagtcaactaccttacacaatcatcctgcgttaaatgatccaaaccccagatccaattactattcggtttgctgtttgcaaagtaaaacgagaaaaaaagttgagcctactataagacataccccaacctacgtgaaacctatattcacccgcttaagagtgactatcctc

SEQ ID NO: 55235 - DNA, 338 bp, Gossypium hirsutum
  Clone ID: uC-gsflnu33B136a09b1
tcctttcttgcgccaatgggatcgtttacaagggggttaggtttgcaaagacagctacattttcatttatcatcaagcaccggttcagacccttctagcacattaagggatgcatgcatagatactgtactcatctgccctgaggggataggggtcaagctcagaccactcaatgcccaggcaaagatggaaattggaggtgtgtagctgctggtgcttattaatcttacacgtatcgaaagtcacaaggcaggaactgtgaacgacattttaatgctattgtatgagaccgtaaaatacgctaagaggctcggcaggatagatactgtgattgagat

SEQ ID NO: 55236 - DNA, 473 bp, Gossypium hirsutum
  unsure (1)..(473): unsure at all n locations
  Clone ID: uC-gsflnu33B136a11b1
tttctctcacgcgtccgctaatttttttcttattcattcattctttttcccccttgtgtcttttatttcttccttttttcctacgattttgcttctattttcctagacattatattattaacttgatcaccaaaaatcgtctctttttgttgtccattattgcccctttcctccacttgtggtggtgccggttaggtctcatttctcctattttcctttcccttttgtgtctatttttgttgctattttactgttgttttccaccctaaaatcgtcccttccgctgtccacaaatctccttttctgccgctcaagctagcctcatttgttgctgtatgtggagccgtctgtcgccctttgaacatcacctttggttgctgaaattttttgcttttgttgcccttttaagcacaatttctcttcattattccactagtanaaaagcctcttacttcgctaatttgagtgcattc

SEQ ID NO: 55237 - DNA, 470 bp, Gossypium hirsutum
  unsure (1)..(470): unsure at all n locations
  Clone ID: uC-gsflnu33B136b02b1
ttctctcttcttgccagattgtaatcctggtgacagggttatgtttaatattaggtgtctaaaataattgtttgaatttatttgctcatccactcttgccttatatattgaattaaccgctctttatttaaatacaaagaggataaaggaaaataaatggcacaattttgcataaaatacatgttctgaagattgataacatttgaagcaatagacaatgttattcctggtagaatcatagctacggttcaatttaatttgatttagtgtagcatagtgattaaaataattctattttcaacctgttcttattttttcactatgttatgattgagcggncttgaaaaccagaactttaaaattgtaaatggaaaacacttgctattttagattttgttcatgacaaggcgggttttatacaccctatcaactaatgtcagggaattccagctgactggccattggacata

SEQ ID NO: 55238 - DNA, 435 bp, Gossypium hirsutum
  Clone ID: uC-gsflnu33B136b03b1
tctcacgcgtccgcccacgcgtccgagatgtcaaccaacatggctgccattaccaccaccacaaccaccgctaccaccggcgcagtcatcaccacctcctaccaactaaacccataattaactgcaaaaaattctagcttttgggggtattgcagcaaaacgaaaaaagggaaaaaaaaagaagaaatatcctttttttagtcccaaaaaaaaaggtttttttttggtcctggtaaatggggggaggtcctgcaagaccctgttgattttattactgaatcaaacctggatggactgatggttcctagacccagatttaaaaccaggccggtcaaaactctaggtgcaaaaaaatggcaggctgcttttcccttgaatgggcattgggatatgggaaaaactttccatggattccaccggggggggattcatcca

SEQ ID NO: 55239 - DNA, 451 bp, Gossypium hirsutum
  unsure (1)..(451): unsure at all n locations
  Clone ID: uC-gsflnu33B136b06b1
tcctttttcaactctgggtcttgtggggaggctatttttaatgacactttgcttacccggaagaccttgggaagttaatatcaaaagtttgaaggagataagaggtacctaatggagcgtacgctttggggacatctacccttgttagtaagagccaactccaaagaatcggtggaatatattcttcaaaccctttggagaacccggaagactggtctcgacgccgatgaccgtcgactcatctgccaaatgcttcagctccaaaacgagtccgaccttgacccggtaattatccactccctcactcaaatgctcatcgntgntagtaaagattatagtatttggtttttgctaaacattttgttgtacttcctattgccgttgttatttctgtaagatgctagcttttaacaatagtactactctttacaacaatgttgattaaagtagc

SEQ ID NO: 55240 - DNA, 294 bp, Gossypium hirsutum
  Clone ID: uC-gsflnu33B136b08b1
cactcactatatggaaagccggcacgccggcccggaccgggcactaactgccgggtccacccaagctttcttcttgttggcccgatggcgctccggcgacggggagctgcataaatgttaggggcaaaaacactaggaggcgtatctctggccaaggcctctttagcgtaataaagggataacctcgccctgtactttaaaaaactatagcttttgggggaattgcagaataccaaagaaaggaaaaaacagagacgaaatacccgtttttctggtccaaaacagaaagctttt

SEQ ID NO: 55241 - DNA, 472 bp, Gossypium hirsutum
  Clone ID: uC-gsflnu33B136g07b1
tcctttcttccgaaaaaagttgtagcaggcaggcaggtaggctcactcagatgtctaagtcaaggttggaaggtaaggtagctcttatcactggtgccgccagcgggattggtgaggagacggcgaggttatttgtggaacatggggcttttgttatcattgctgatgtccaagatgatctcgggaacaaagtcgcggcatccatcggcctagacaaggttagttactgtcactgtgacgtaagagacgagaagcaggtagaggcaacagtgagttacgcggtggagaaatatggaaggctggacattttgttcagcaatgctggtgtctatggaccgttacctgggatcttggaacttgacgttaatggcttcgacaacaccatggccacaaatgttcgaggtgttgcagccacgatcaagcatgccgctcgtgctatggtggctaaaaacatacgcggatccatcatatg

SEQ ID NO: 55242 - DNA, 464 bp, Gossypium hirsutum
  unsure (1)..(464): unsure at all n locations
  Clone ID: uC-gsflnu33B136h02b1
ttgccgagccgagccacgctttccttcctaccataggnccagaggaaaaaggggcggtgtgaattttcccaccacgggtaagtttaagactccaccgagcaagggtcatatggtactggccgccgcagttagatacctaccatggggtgccacctaggccttcttcaggttatgagctcaggtcctatagtgcttcctatgcacagtctcagatggctaacaacagggacttcaagttgaagaaagggaagagcacttctgcttcatcttcaaaatcatggagctttgctgaccctgagttccaacggaagaaaagggttgctagctacaagatgtacagcgttgaaggtaaggccaaagggtccttgaggagaagctttaggcggcttaaagtgaagtacacacaagtcgtttatgggggcggtgattatggcagcttttgttcatcttatgcttatctttgc

SEQ ID NO: 55243 - DNA, 373 bp, Gossypium hirsutum
  Clone ID: uC-gsflnu33B136h04b1
ttttatgctatgggtgatcatgggagcaatgagttgtacgcccctctatcgctatgatgaactactagatagcgaaaaagagaggaccctagcctttggcttagtgcgtggcagatgaagaagctacaacatctaccatgcatattataattcaacatagcacccctgtgtgaacaaaggtaagatactactacacagctaatgtatcacatgtatacgccaggtatctcaatactgacccaagatgataatcatagcgagtgctcactgatgtcattgtcaccatcaaggcaacatatactggactaatatctcatgagatccaaattagaacctatacgcactcacaacatgattacatcattccatatta

SEQ ID NO: 55244 - DNA, 323 bp, Gossypium hirsutum
  Clone ID: uC-gsflnu33B136h08b1
ttcccaccattttccttgaggaatatgtgtttgagatcttgccacaactttcactggaagactacaacagatcaaggtcatatggtactgggatgatgcagttagatacctaccatggggtgccacctaggccttcttgaagatatgagctcaggcgctatcttagttgctatgcacagtatcagactgttgacagcagggacttcaagttgaaggacgggacgagcccttctgcttaatcttcgagatcactgagctgtgatggccctgagccctagcgggagacatggagcgctagggacgaggtggtcactggcaaaggt

SEQ ID NO: 55245 - DNA, 301 bp, Gossypium hirsutum
  Clone ID: uC-gsflnu33B136h12b1
tcgttctggtggtgagaatttaataatacccgaactttttgtaacacaatcacgagggcacttcagcgctgctggtaaatgttgttccggcttgttgtcaaagcccacataccattgtgtggcacatagtcctcattgatgttgttggttcagacacattagggctgcctctgctcattctggaaacgcaatcaccggggcctgcttatctgacagaggcactggcagtgaccttgcatagcattaatcatggggggttgctgaccctgagttccaacggtagaaaagggctgctagctac

SEQ ID NO: 55246 - DNA, 468 bp, Gossypium hirsutum
  Clone ID: uC-gsflnu33B137a01b1
ttctatgcgttcgtccacgcgtgcgcattgctatatagagtatgcagatgcgaatattgcacgtactgtgcaccacaggtgggagggtgctgagacccctaactctggcgctataggtatgccactacaatatacccagaatgctatcggtagaaggaaagactccaatcatcccattgcttctgctgacgccaatggggctccactagctatgacttaccactagatgaggggctgttatctttatatgctccaacaaagacaactgctacatgctacgatgcatcatgcagctattgcctgcacccaatacataggcaccatggacattatcatcccttctcatgtctttgaatgcacatagcggtatcatgaacacaccatgagctcatgtatattcgaatatacctaacacatgcatgtgtctgcagcacgggatgataagcgtgatccgacacgaaaatgctg

SEQ ID NO: 55247 - DNA, 296 bp, Gossypium hirsutum
  Clone ID: uC-gsflnu33B137b01b1
ttatataaaaaaaaaaaaaaaaaaaaaaaaagaaagaatatttaaaaaaaaggatcggaaatcaaaaagaaacacaacttaagggccggccccatccaacgatatagcaatcctagggggtgccctcagggggtcccactcttcctggccctccaccgccctcgcttgggatgtccctctgttgttcccctaatttaactggcttgtcctccatctccctctggttagcttgggtaatccccacgaggctccccccggttgccctttcaaacatctgcgcctcccccatggccttt

SEQ ID NO: 55248 - DNA, 321 bp, Gossypium hirsutum
  Clone ID: uC-gsflnu33B137b02b1
ttggtattataaagagatttcttaaattaagtgcttgactttcattagctctcagtatctgaatcaggaaaaccattggtggtcctcgagaatcaaagggaaaactccaaagaatattgaagaatatgcaagctgaataagtggtgattcataagaatttcccatttgttttaaatatttcgtttctttagatagtaaagtttgtcatgtaaacaatcatgataaagtaaaaaaaaaaaaaagagcaggtactaaagcaagcactattcttgctactagtaagttgcatatgtgtaaatacatcagcaaaagcaagtgcac

SEQ ID NO: 55249 - DNA, 409 bp, Gossypium hirsutum
  Clone ID: uC-gsflnu33B137b04b1
tcattttcgtgcggaccggagaggcgatgactagttcatctatccaccaactggtacaggtgattgagaatgcatgattccgagacaccggaccgacaagttgaggtcttataaggtggcgcatgcttgtgttatctgacaccagcatgcgcaggaatgacactaacgagacgtttggaccgaaacggctaacaactataacgctacaaacccatgcgttatctgtgaagaaaccgaatggccattctgcttataaaggcttattacatcttaatttaacccatattgagaatgagggacggtgacctgttagtttactgttaaggttcagtgaagaaagctttggttgtaactggagtgttggtggatcaaacccatttccggtttgttcttttacaggttctccttc

SEQ ID NO: 55250 - DNA, 113 bp, Gossypium hirsutum
  Clone ID: uC-gsflnu33B137c05b1
ttcctcgcgtccggggacgcatggacggaggcggggtttaattaatatatcgtgagttaacttccagatgagacgaaaggtccaatacgtgtagaaattgtaaggagaaaagc

SEQ ID NO: 55251 - DNA, 282 bp, Gossypium hirsutum
  Clone ID: uC-gsflnu33B137c09b1
tgagggaatacagttttatattccaagtatgcagggaatgacttcaaagggaatgatggaactagttatattgctcttagagcatctgatgtaatggctgtgctttcttagttgtctgataaaacatatgctgctaggttcacaactgaaatttatggatgagttttcgatgaggcacaaggattttgtatttttcttttaatcttcgatataaatggtgctagctttgttgtttgccctggtaaaaaaaaaaacataaaaataacaaaaatatataaaaca

SEQ ID NO: 55252 - DNA, 495 bp, Gossypium hirsutum
  Clone ID: uC-gsflnu33B137c10b1
ttcttcccacgcgtccgcggacgcgtgggttcaccgggagtctctttttcagatggcaagcatgcaaatgctgctgagtttgcttcaggtgccagagcatttacggaagggcttgaagctcaagaaatatcttctgaggagaaagctcttatgacaaagctgactgaggagaaaaataaggcaattcaacaaagtaacaagcttcgccatgaactggatctgttcaagcgcgaaggcagcaaaagcggtggtggtgtgtcattcatgtttgtcatgttgatcggcttgctcggcataattatgggatatatcatgaagaagtggtaagcgaccctggtccttctgaatattttccctcaacttaccttcctctggacaagcatgatgaaggaaaaggaagaggaattagtagtcgttggactgcttcaccttcaattggttgttacttggtagctttgagcaaattagcagaactttttatggttggttcctatt

SEQ ID NO: 55253 - DNA, 463 bp, Gossypium hirsutum
  Clone ID: uC-gsflnu33B137e02b1
tgttccttgaaggaattagacctggatgtgcaccacgctagtgtatcagtagtgaaagacttgatgatccaacaagccaatgtgaagatggggagccggtttttcacgcaggagcaattaaaatcagccctaacaaccaaacttggagatgcaagatagagagtattgagcagagcttgattgaaagatcattgtttaaaatggctgcagggttctgggatattttaaggctcctggtagcacgagctctgtaaaataatgttctattttggtcttattactgtttagtgtagttaataatagtttgagaggtggtgttaatgaatcaggagcttaactggttagcaggtggtgggttgatttcccaataactttaaaaacactggtttaacaatttgttgagctccaatcaagtgaaaatagcccccccccccccttttttttgtggtaaatcttgtagtat

SEQ ID NO: 55254 - DNA, 495 bp, Gossypium hirsutum
  Clone ID: uC-gsflnu33B137e05b1
tgtttgtgttttttttttgtgatctaatctaaattttacagactcatgcctcaatgatgaacactgctaacatgccatttacacgacatggagtgacaccagcaaccaattcgatgaattttcaagggggagggttctcaattgaaaaacttaagcctcatatgatgattggtgccaagatgagcatcgctagcacttcatcccatgaagctatctctaaaggacaagtgaactactcggatcaagagagtgaagggttgcttaatcgtaaccggatgaatgattcaaggcggagtataggtattaaaagaagctcggaagctagagaaaaaggcacagaggaacaatcactagagccgaaaaataaaaaattaaccctcgaagagcttggagagagagatgggaagcaaataaacaagataatgacagatcggcttaacagacagatagagcaagacattaagtcagatatggaattagtgcacaccaagaaat

SEQ ID NO: 55255 - DNA, 269 bp, Gossypium hirsutum
  Clone ID: uC-gsflnu33B137e09b1
tggagagtcaaaaacccagctgccgagaaaaacagaatgccatgcagcagatattaagtgttgaatggtagtattgaaaaggaatgtctgcaacagatgtcattttggcctatacttcctaacatgctcaacatggtactagaggtaaagtagatatattttaatcttgaatgcgattccatccgttctcattgttaagcatatagatatagtaataacagttctgtagtgatattactgataataataataaacatcaagtcatattt

SEQ ID NO: 55256 - DNA, 319 bp, Gossypium hirsutum
  Clone ID: uC-gsflnu33B137e10b1
atccccacgcgtccgggaggccaaagggatgaccctatgcctttgtgtattgtacatagatggtaatgttggagagatgattttattaatgtttgaaggccaaagggcttctatttgtatgttattgttaatcgtcggtggaaccaaaaaaaaaaaaaaaaaaaaaaaaaaaaaaaaaaaaaaaaaaaaaataaataaaaaaaaaaaaaataaaaaaaaaacaaaattaataacaaaaaaagggggggcccgttttaagggatccaagtttccttcccctggcttgcaacaaaaaagtttttttttggggtccccaaaa

SEQ ID NO: 55257 - DNA, 227 bp, Gossypium hirsutum
  Clone ID: uC-gsflnu33B137f09b1
ttctttaagttttgagcaattttgtattgtttgaaatgaaaatggttgccctgtattatttattttttgagtcttgttacaccatggtcaatgattttggtttgaaatggagaaatgaaaaggattgtggatcttcttgagcttaaattcattttgtgtgtgtgttgaaatatttgtttacttggcatggacgttagatctttatgaatctttcttattgacaggtt

SEQ ID NO: 55258 - DNA, 354 bp, Gossypium hirsutum
  Clone ID: uC-gsflnu33B137g01b1
gcgttcttatgttacatggtgctgacgcaaggccttggttcatataagcgacttgatgatcacatcttattgtatcgatatcgctatctttaatctaattgtgattattcatgtcagtgccgattctaaatagttattgttattttaatctttaggataacttgacttctaacttttatatttcaattgtgctgtcaatttaatattttaaactgtaaatttgaattacttaactgtcgtatttagctttaaagttaaaattgtaatagagaattgttatatttatatccgagatattattcttctcaatactgtgatagtgaactttagatgttttatatctatcatgacctt

SEQ ID NO: 55259 - DNA, 422 bp, Gossypium hirsutum
  unsure (1)..(422): unsure at all n locations
  Clone ID: uC-gsflnu33B137h05b1
ttcttgaatcacttctacctcgggaagccaaaaaattgtggaagggacagacaaccaggttttgattatcggaaattgcgattaaaacttgtagctactttgttgatggtaagcgagatatgaatgttgacgagttcaatggatggttaaagggatttaatgaagacaacgatagaaggataagcaaatacgagcttgccaacaccgagaggatggtttgctgggagaagagcaagcatggaagtgatgtcaatggcaatgggtttattcatgacaatgagagattttgtttcttcttctaaagtgttttgattcgagtccacatccctttattccttccattcctttcttcttctttgatantgttatctatctatatgttgagttgaacaagttaataatccaaaatatcgactagtctt

SEQ ID NO: 55260 - DNA, 475 bp, Gossypium hirsutum
  Clone ID: uC-gsflnu33B137h09b1
aagctcgcccgccggcacgcgccgggacggactggccggatcgacccacgctttcttcggtgcggacctgccagcgcaggacgctggtgttgaagtccggcttgatgaccaccagctacggggcctagagcgcgatcgcgacggtgatggtggtgtccgtggccagcaccttcttctcgcaggcggtccagtccagggcgtaggcctgacggaccaggtccgcgacctcgggcgtgacgccgtcggtcggcggttcggcaccgagccgggccagtacgccgagggactcgtcccgggcgtcgtcgtacgtgcgcctcggcggttccggctcgacgacggccttcgtctgcccgctgaacgtcggcatgccgtgcagcagcaccgaggtgatcgagacggcccggagcttcgcgcggatgtgttccgaccgggcgctcacgacttgctccagcggacctggttgcccgtgatgctg

SEQ ID NO: 55261 - DNA, 408 bp, Gossypium hirsutum
  Clone ID: uC-gsflnu33B137h11b1
actataaaaggagagacaatttgcatgttgaaggaaaactaaggatttagtttgtttaagagttgtatcctcaagctcgagtttgctatatttgttgggtaatcgcactaatattggattaaagagaacgggagagcttgatccaaaggcttttaatgacacttgtaagttacgatttcctactgacgaagcggaaattcaggccactactctatgctcatcatggcaggagaatctgaagaatccagattgacatccaattttcaggagaaactaacaaatctaaagctggaatggggtgaagagatttataatgcagtggtaacagctttgaaagaacacttttgtagtaacttattgtagtatgcttgtagttgaagttttttatagtggacattatgttgttta

SEQ ID NO: 55262 - DNA, 509 bp, Gossypium hirsutum
  Clone ID: uC-gsflnu33B138a09b1
ttttaattgcattgactggtattgtttatattgaagatcactttggatatagagtaggctttggagttccagcaatcttaatgttgctctccgctcttgtgtttttccttgcttctcccttctatcttaagcagcaggcaagcaagagcttgcttactggctttgttcaagtaatcatcgttgcttataaaaaccgaaatctgacatttccacttccaaactcaactgcaagttaccatcataaaagggattctaacgttgttgcaccaacggacaaattaagatttttaaacaaagcttgcatcatcaaaaaccccgaacaagacattgctctggatggctcagccgcaaatccatggagtctttgcacggtagagcaagtggaagagctaaaagcgctgattaaggtcttaccattgtggtctactgggatcataatgtccataaatttaagccaaaactcatttcctgtgcttcaagctagctctatggacagagaccttacaaaa

SEQ ID NO: 55263 - DNA, 475 bp, Gossypium hirsutum
  Clone ID: uC-gsflnu33B138b10b1
cttacgcgtccggaactaacctaaacctaaagagggacagaagagagatatggagtggagatcatgctatttggacatggttttagtgccgctaagcttagcaatgagtttagcttatcattggtggctatggcgtaaggttcggtctcaaccgctcacaaccatcatcggaaccaatgcccgtggtcgacgcttctgggcctttgctatcatgaaggacaacgagaaaaagaatatcctagcagtccaaacgctacgaaacaccataatgggatcaaccctaatggccacaacctccatccttctttgcgccggtctagctgccgtcatcagcagcacatacagcatcaaacgaccgctcaacgattccatcttcggagctcatggcgagttcatggtgtctctcaaatacgtcaccatcttatccttctttctcttctctttcttttggtactctttttcgatccgatttatt

SEQ ID NO: 55264 - DNA, 435 bp, Gossypium hirsutum
  Clone ID: uC-gsflnu33B138c05b1
gttactttcacgattaacactcttttacaacggggggttcttctttacggtggagggaggtactgccgcctcagccaaagaaaactccatggctaatcctgttgctgcttcctccttggctctcactgccatctccatggttaaacctccggttatggcaccacatggacatggtggacaccattattataacaaacgttatggtcctggaagtcccaagtcctaccaatgtccatctcagtgcacacggaggtgctgccagacacagtgccatacaccatgcgtgtccttctgtcagaaatagtttcatgacatgcctctgtcgtccctccagggtattatgggatcgcacatgattgcccttggtacaacgactggaaaaccagggcaggaggccccaaatgcccttaaattactcaaaagaagacccttttt

SEQ ID NO: 55265 - DNA, 302 bp, Gossypium hirsutum
  Clone ID: uC-gsflnu33B138c06b1
cttactcttccgacaaaaaatagaaaaaaaacggggggtcatctttaaaccgagaggagggttataaccacaaaagcaaagcaagccagccaacgcagtccaatagcaactacatcattttgccttactttggggtcgatagctagaagacccggttttacgcaccttgagacgggagggaaacctgttttttatatggccctaagctccggccactccctgtgtagaaaaactgcacaccgtgaatggcctgcgggatccccaacctcagtgggaaaaaaaaaaagcccccttctgatgcg

SEQ ID NO: 55266 - DNA, 456 bp, Gossypium hirsutum
  Clone ID: uC-gsflnu33B138c10b1
cctacgcgtccggttgaaaggggatgatgttgatggtggtcttaacctggaagaagaatctgaaaagacggttctgaagaaagaatatcctgttgatatatcgttgcctgatatcaacaacgggatatatggaaccgatgactttaggatgtatacctctaaggtgaagccttgctcgagggcatactctcatgattggaccgagtgtcctttcgttcatcctggtgagaacgcgaggaggagggacccgaggaagtatccatacagctgtgtgccttgtccagagtttcgtaaaggagcatgccctaagggtgatgcttgtgaatatgcgcatggtgtgttcgagtcatggcttcatcctgctcaatatcggactagactttgcaaagatgagactggttgcacacgtaaagtctgtttctttgctcataaacctgatgagttgcgccctgtata

SEQ ID NO: 55267 - DNA, 411 bp, Gossypium hirsutum
  Clone ID: uC-gsflnu33B138c12b1
tttatctcccgttctacagggattcctacggtgcgggctcggtggacttcatatttggcaatgcagcagtggtgttccagaactgcaaactcgtggcccggaaacccatgaactcacaatcaaatatggttactgcccaaggaagattagatccaaaccataacactgggacttcgatccaaaactgtaatatactagcaagtgctgatcttgagcccgttaaaggctccatcaagtcatatttaggccggccctggaaggagtattcacgaactgttgtgatgcaatcctacattggtgaccatattgacccttcaggttggtccgtttggagtgaggatttcgctttgaagacattgtactacggggagtacatgaacaggtgaccagaagctgacactagcaagagag

SEQ ID NO: 55268 - DNA, 470 bp, Gossypium hirsutum
  Clone ID: uC-gsflnu33B138d03b1
tttgttagagcacccggacgagaaattggctgacaataccgaaagcgcttcagagttgcaggcatgaatggatgaaagatgctttagagaatggtttttgtaagtggcttgcacaaaacaagtgaagtcccaaggtttcaatcggaaattttaacttaaatgcagaagcatttgcataaaaacaaaatattagagatgtacactcagaagtgcttactttgtgtcaacttatttttccttcttaaattagaagacatctggtgtctgactgcacttttaatgtgttttcatttatgttactcgaacttgaattgtgtgatgtctaaacctttcaagatatcctgtatttgaggggttttggaggattatgtcatttatacttatgtctggataagtgtcggacataggtgtcgagacagcatttcagaaatatgaaaatgaagactcggagtactacccaccatctttgg

SEQ ID NO: 55269 - DNA, 184 bp, Gossypium hirsutum
  Clone ID: uC-gsflnu33B138d04b1
cttactcgtacgacaaagagtcctctcaaacggggggttttgacaaccctagggaaaggcaagaaccgccgaagccgtaataacgaggatgccaggtccaataccaacaacatcattgagggttacaacgtagcgcgggctggaagtcacggcatttaaacacgaatgaggggtaagactccac

SEQ ID NO: 55270 - DNA, 154 bp, Gossypium hirsutum
  Clone ID: uC-gsflnu33B138d06b1
gttatctcgtacgacttagagtgttctcccacgggggattttggtttcccgagggatgagtgagagccacctaagcgtttagtgcccaccttcttagtactataagtactccctcatggtcgcttacatcctgatccatgatagaacacccggt

SEQ ID NO: 55271 - DNA, 231 bp, Gossypium hirsutum
  Clone ID: uC-gsflnu33B138d08b1
ttgtcatcgcgcacgattgagatgctagtgacacagtgtatcttcgtttcctgagaaaacactgagagccattggagcatattcttcggactttctatggacgatgaggataccagcatggacgcttacattgtgaagtacgatagaggatacggttctgcgacccgtaaggagcgagggatgcttcatttcatggggacgaatgtgtaaggtaagtccctggaggaggtg

SEQ ID NO: 55272 - DNA, 305 bp, Gossypium hirsutum
  Clone ID: uC-gsflnu33B138d09b1
tgtcttagatagggttaggggtcgaaattaagtggtattttttacaatagtgaaaaaatgcaatttttcaccattttaatttcctatatttttatagtttctaaaggattaaatcaaaattatttatcattttaatggggccaaaatgtaattttacttttaccaatttagaattttaaaagacctaaatgaaaatttttctattttagggggtcggatccctagcccccgagctttgcccttggatggatacaaacatgatgctgtccatcgcttaaatataaaacacaaaacaatataaaatt

SEQ ID NO: 55273 - DNA, 505 bp, Gossypium hirsutum
  Clone ID: uC-gsflnu33B138d11b1
tttcttacgcgtgggcggacgcgtgggcggaggcgtggggatggtattcaagatttaaacaaagctgctggtaccttaagaggtgcaaaagaggaggatatatgatataaccaatgtccttgaaggaattggtcttatagaaaagaaactcaagaacagaattcagtggaagggggtttatgtctcgaggccaggggaggttgatgagaatgttgctgctttgcaggcagaggttgaaaaccttcataatcaggaacgagattagatggacaaataagagagatgcaagaaagattgagggacctaagtgaagacaaaaattaataacaagtggctttttgttaccgaggaagatatcaagagcttaccctgtttccagaacgaaatgttgattgccattaaagctccgcacggaaccactttggaagtccctgatcctgacgaggatgatgattctctccaaaggagataccggattgttcttggaagttcaaattttcaatgg

SEQ ID NO: 55274 - DNA, 404 bp, Gossypium hirsutum
  Clone ID: uC-gsflnu33B138e01b1
ccacgcagtgcgtgttgtttagatctcctgaacggaccctagtatggacttacttatgaagatcaagtcctacactggcttcctgggcaccatggtcctggggagaggggaaccgcctctggtgagcgactgagggtcctgacctgatcagaggctattggcctagatccaagactcttggttgaaggagttctcacgggccattactctcctctgtgatagcaactactgtaagtgtagcaagggtgagagcacgatgcatagcaatcttgctagcaaggttcactagaaatgccttgtcaatgagaaagccgagtgtggacgaataaaaagagtgtgtactcaggcacttttccaagagacgtgtttgttaatgtgcaggtgagaaatggtgcactggtact

SEQ ID NO: 55275 - DNA, 151 bp, Gossypium hirsutum
  Clone ID: uC-gsflnu33B138e05b1
gttacttttacgattaagagtgttctaccacggggggtcatcctttcccgaggagagagggagaaccacctaagcgttttgtacgccccttcttagtcctataaggtctccatcatggtcgcttacatcctggtgcatgatggaacacccg

SEQ ID NO: 55276 - DNA, 153 bp, Gossypium hirsutum
  Clone ID: uC-gsflnu33B138e06b1
gttactcgcacgactaagagtgttctcccacggggggtcttgatttcccgagggaggagggagaaccaccccagcgaagcaaaccacccttcctaggaccatgaggtctccagcatggacgcttacatcctggtgcaggatagaggacccggt

SEQ ID NO: 55277 - DNA, 164 bp, Gossypium hirsutum
  Clone ID: uC-gsflnu33B138e07b1
tctgttacgcgtacgagtaagagtgttctgggggggtgttttatggattccggaggaaaaagggagagccgtcgcagcattgtgtacgggcgttcttaggacgatgaggtgtccagcatgggggcttacattgtgatgcatgatagaacctccggttttgaaac

SEQ ID NO: 55278 - DNA, 155 bp, Gossypium hirsutum
  Clone ID: uC-gsflnu33B138e08b1
tgtctcgcgtacgactaagagtcttctaacagggggtattttggtttcctgagggataactgaaaaccatcccagcaaagagtgcgacccttcctggtaccatgagtgctccagcatgggagctcacactgtgaagcaggatagaacacccggtt

SEQ ID NO: 55279 - DNA, 355 bp, Gossypium hirsutum
  Clone ID: uC-gsflnu33B138e09b1
tcggtaaatctgatgcagtgtttattgtaacaccaattaatttttttttcttttaaaagattgttgcaacttgcaagtgtgtttctgtatcttccacaaaaaaaaaaaaaaagcaatcaagaattatatttgtctttggtcaaaaaaaaaaaaaatatacaaaaaaaataaaaaaaaaaaacaacaaaaaaaaaaaaaaaaaaaaaaaaaaaaaaaaaaaaaattaaaaaaaaaaaaaaaaaaagggggggcccttttaaggggcccaattttacctcccgggggattgaaagtttaaattttttttttgggggacccaaattaaatttacggggcggggttttcacaagcgggt

SEQ ID NO: 55280 - DNA, 499 bp, Gossypium hirsutum
  Clone ID: uC-gsflnu33B138e11b1
tttcttaattcaaacactaccaatggaggagggaatggtgcaccctcctttttgaccatggatcaataacaatggaaggcactgatcagtgttcaccccatcacaacaaaaaagaaaaaatgtaccatatgtaccccccgtgtgtgcagaagctgaaccaaaataccctaacaaatgtgtgctttttccccatttatcagtcctttacctcgtataccctttcttttcaaaccatttcatttcaataattcagtatcaccttcttcatgaatctcctcattggtttcaaattagctccagtcccattagctgacattggcagagacgcatttccacttttgcatttattgatttgatggagaataaggaaaatcccgttttcaaaggaaaaaaacgggatcagagattgaattgagcagcgagaacaaaaaaaaaaaaggcttgggtaaattaccagcatcaccaccaaaaaagaaaaaggcacaaacaaagcatagag

SEQ ID NO: 55281 - DNA, 163 bp, Gossypium hirsutum
  Clone ID: uC-gsflnu33B138f06b1
gctacttgcacgacgaagagtgtactaacacgggggatcttggtttgccgagggatgagtgagaaccacccaagcggagaaaacggccctgctaaggcccatgaggtgtccagcatggacggtcacatcgtggagcaggatggagcacacggttaagaaaccc

SEQ ID NO: 55282 - DNA, 511 bp, Gossypium hirsutum
  Clone ID: uC-gsflnu33B138f12b1
tgtttaattctctgatttttaattagcatatgacggtttggaccgtcttattggatctcagtttgctgctgcatagaccataaggtaccaatcatgttagtctccttcactttgtgcaagcaaacattgtctttaccacacaaacctcctggggagctcaaatccaatttctttaggccaaggctagaaaaagagaaggttgtgatcataatgggagcgactggaaccggcaagtcacggctttccatcgaccttgctacccggttcccggccgaaataataaattcggatgggactcgacataacgaccaagaagatcccgaggaagaacggtgtggggttccacaccatctgttaggtgaaataagtccctacacagatttcacggcaacggattttgttgacatggcttcacatgccatggattcggctttgtccggcggccgtgttccgatcatagcccggggctggaattcatacatcgaggccttagttgacgatgagggacttt

SEQ ID NO: 55283 - DNA, 507 bp, Gossypium hirsutum
  Clone ID: uC-gsflnu33B138h06b1
ccggacgcggagggcagtgatgacggtggggaaccgtacgagaacaacccggcagcacctccggaagcactgaagaaggacaagaagaaggacaagaaagacaacaagaagaagaagcacaagaaggataggccgtacctcccctgcaaactcgcctccgcggtgcccatatcgccggacaccaagctcttccgctttcaggtgccggccgaccatgcccaccttgtccgcgccctaccgagtcccgtggcccacatcaggtcgcaggtgaagttaccgcctctgcctcatgaccctaccaccactgagttgctcaagggacgcccctacacggtcttgcgtcagttcccggagcctaccggcgagacgatgtcggcagcggaggagaaggatcattatctgcaagtgatgatcaagcgttatgacacctttggtgtgagagcgcacctgcatttcctcaacgaaggcgacacagagcagatgcagcttatcgatcatgacaagcac

SEQ ID NO: 55284 - DNA, 575 bp, Gossypium hirsutum
  unsure (1)..(575): unsure at all n locations
  Clone ID: uC-gsflnu33B139a01b1
acctatttaaatatatccccttgtattgcaaattccttcatatattctctcttcaatgaaaagaaaaaccccactttgaaaaacatgcataatctcaagaagattgttctacttttgttcttggtttcaacttttcttttatcaacttcaatggcaggtcgccaatctaagttcgtcaatatgttggctgaggaagttgatgcagcttttgaggagataagtgtcgaaggcgaagcaatccatgaaaggctgcttagagcaaatactaaagactatggaagatatgatccaacaccagctcttgtgaagcctcctttcaagcttatacctaattaatcaatcatgttggtgcatcatgtagcaatatatatgggtataaatgaagctttgccctatgcttcatttgcgtacttgaagaaaatgaagcaatatatatatataattagatataatatatagtatttagcaataaacctatatatagagagataatgtattatatatatatgncatatattataatactaagcttccaggcttaatgcttcatgcatgtaaaagacaatgaaagacac

SEQ ID NO: 55285 - DNA, 551 bp, Gossypium hirsutum
  Clone ID: uC-gsflnu33B139b02b1
ctttcgtttgggcgacactccatcctctcctggtagaactgtgggggaagaatcctcaccatcaattactcctataccttctgctgaagctgatcaacagtccacattggcatctggctccagtgttcttttggtcgataatcaggggaattccttgaacaataggtctcccaatcaatctcctaatagtcaagatagagcaggaccttcagaattccagtcgttttcagaatcattaaaatcaaggtttaatgctgcttcaatgagatacaaggagtcgatttcaaagagtacaagggggtggaaagagaggtttttctctcgcaacacttccatgtcagatcttggttctcaagttaggagagaggttaatgctggcattgcaacagtctcgcgtatgatagagcgtttagaaaccagagatgatagaacaaacacggctactgtatcaaacagttcggaagacagctctaatctagaatcaaataatcaccagacttctgatgctggtgaagggaactcctcaattgaaaccagtgcacaagctccat

SEQ ID NO: 55286 - DNA, 278 bp, Gossypium hirsutum
  Clone ID: uC-gsflnu33B139b11b1
ttctacgcgtccggccacgctatcggtggggggggatttttataagcaacaggttgttctaccacaataggtcaatattgaaaccaataaggacgtataccgagctagtgatactacgaaaataatcctacatgatttggaatgtataggacgagtggaactcttacgcacagactgttggagcaacgacaagaatgagtagggcacactgcgctcaggccaaacacgagcaactctgacggaacaacaaattgtattttctgggggaagaaaccgga

SEQ ID NO: 55287 - DNA, 362 bp, Gossypium hirsutum
  Clone ID: uC-gsflnu33B139b12b1
tcccacgcgtccgcccacgcttccgctagggtgggagttgctttaaattcttatgcttgcttctaaagagggttacgattgcaatggtgagcttatcatatgttctttctcatcttacaacctatattgccttctttctgatcaaaaagaatgattgtgctggtgaacgaactttgttcatctctgatatatactgaaagaaacataatatatgatctggccaaaaaaacaaatttttccccaaatatttattgcacgggttttttggcaacaaactcagacatggctttgattatccttatagggcaatgtgccaatgtggttgcacgctaacactctcttttttttaaaccaaaaacatt

SEQ ID NO: 55288 - DNA, 488 bp, Gossypium hirsutum
  Clone ID: uC-gsflnu33B139c03b1
aattgttctcagtcggtattggtgcagatcgaattgtctgtgggggtgaagaaggtgttgttcgtatctggaacttctcagaagctctagaaattgagcagagggcacgggcactaagaggaatacgtttggagaataggatgaggcgacgcagacttcaaattgagatgaataataagggtggtcgaactgatcaatgttctgttgcagccaagaagaaaacagtcaatggtgataggaatagtgtctggcacagtaaacgtagcataagctccaaggtgaagacataacggctgtcagatgatttatgattatacttactttatgcctttaggcttccaacatattcatcttttttctattatgacaagattatacacaataactttgtgactgtatggtaactatgatatcttttagttatccatggattttaatctcatttgtatgatcttgtatttcaatcgtttagttcttgtgatattttt

SEQ ID NO: 55289 - DNA, 426 bp, Gossypium hirsutum
  Clone ID: uC-gsflnu33B139c04b1
aatatattctcgctttaccatgtaaacgggcgggcatgatctgatatgaatggcacacatgatacatcgggaggtgtaatctagatccacggactccaactgactgaacagatggtatgaggcccctaacggcggacgcctgaggtactgatgggtgatgcaccggtggaccgtagcaatgcaagcggtgcatgagggcagaaggaggcaccagcgggttgaccaggactacctgcagcgctggcaccattggcagactgcattacaacacgctggcctcgagctgattgcaattggatcggaggccctgctagggtagagagagagcctcgtctcatggattcttaccgtagtgtgcctgctgctgagaaacactctggaacggcaatggtgggaagacagtgcgtgacctgagtgattgcaaac

SEQ ID NO: 55290 - DNA, 196 bp, Gossypium hirsutum
  Clone ID: uC-gsflnu33B139c06b1
gatacgcgtccggagaaccgaaggttggagagggaggggtttatgcaaccggcggattgagcccaaagggggaacatcggcagcaagaaggacataagcagagcgaggggggcacggaagatactgcgacattgtacgcacaatagaggaacgatggacttgcccggcgcggaggcgaggaccaaccacacgcggg

SEQ ID NO: 55291 - DNA, 210 bp, Gossypium hirsutum
  Clone ID: uC-gsflnu33B139c11b1
tgttacgcgtccggcaaacccaaggaaagggggggctttaaaggaccaaccggtggatcccacccaaaggccgaaaaacggaaaccaaaaggccgacacaagaaccagcggaacacggagaatattggtacaataatcgcaccacataggaacaatggacattccacgaaaggagccgagggccaaccacaagcacgagcaggcaaacca

SEQ ID NO: 55292 - DNA, 314 bp, Gossypium hirsutum
  Clone ID: uC-gsflnu33B139c12b1
tattacccgtgcgacaaagaaaccgacggggggggctttgaagacccaagaggtggctacacaccaccggcgcaacatagcagccaacacggcccccgccagcccaagagctgccagtcaaataaggcaacagcccagggaagataaaagccaaaccaaaacacagggacttcaagccagaacagacataaaccagcaggagccaaccctgcgcgcggccaaggctcaagcaaggcatatggaagcagcccctggaaggggtacgcacaaacggcagagatgcagtcccacatcggggaccaaaaagacccacc

SEQ ID NO: 55293 - DNA, 480 bp, Gossypium hirsutum
  unsure (1)..(480): unsure at all n locations
  Clone ID: uC-gsflnu33B139d03b1
tctacttttccgtccgaatccactttcagttaagaagaaataaagccatgaaaacctgaatcgagcatctgggaaggaagttaagggtgatgatggcaatggtgaaaacaagaggaaaaggaaacggtctcgcagaggtaaaactgttgctggggcagatgtgtagtgcattaaggtacgagagacaaaaaaaaaaaaaactttattgtaactatgatggtacccattccccccccaaaaaaatatatatatatatgatggtaccctaactgcaacgcaatcaattgaagagatgctactgtggttttatgaggttttctctctccaaaaagacttgataacattttagatactctctagggggagttgagttgagctgagctaagagggatcaattttgtgtgtacttgcttatctcttttttcatggngtgttcggagaatgtaagcatgccgattcatcatttatttttttcacttt

SEQ ID NO: 55294 - DNA, 203 bp, Gossypium hirsutum
  Clone ID: uC-gsflnu33B139d07b1
tggatattcgtccggtgaacctttcggtaggggggggtttttttaaataactggttgatttagcccaaaggtgtaatatcgacaacaagaaggacatatacagagcaagtggtgcacggagcatattggtacattcttcgcataataaaggaacgatggacttctccgacagggaggcgaggaccaaccacacgcgggagata

SEQ ID NO: 55295 - DNA, 226 bp, Gossypium hirsutum
  Clone ID: uC-gsflnu33B139d10b1
tgattacgcgtccggaaaacccaaggctggggggggattttattaactaaatggtgggttcaacccaaaagaaccatatcggaaagaataaggacctagaaagagcagagagtacacggacaataagcctacatgaatcccaaagtagaggaggattggacttctccgacgcagatgcgagaaccaaccatacgcacgagcaatcatttctgcgctggacacaaaa

SEQ ID NO: 55296 - DNA, 156 bp, Gossypium hirsutum
  unsure (1)..(156): unsure at all n locations
  Clone ID: uC-gsflnu33B139e09b1
nttggtttttcgtccggcaaacctaacgcaagggggggttttttttaaataagtggttgattcaacccaaaggtgcaatatcggcaacaatagtgacataaaaagagctggtggggcacggacaataaggctacattgttcgcatagtaaaggagg

SEQ ID NO: 55297 - DNA, 242 bp, Gossypium hirsutum
  Clone ID: uC-gsflnu33B139e10b1
tggttacgcgtccggagaaccaaaggcaggggggggatttaaacatataagtggttgattcaacccaaagggaggatatcggaagcaataatgacatataaagagcgggctgggcatggacaatatggctgcattaatcgcacagcagaggaggattggacttcaccgaagcaaatgcgagaaccaaacaaacgcacgagaagtcaatcctgcgctggtgcaaaacttgcgcataggaaagg

SEQ ID NO: 55298 - DNA, 448 bp, Gossypium hirsutum
  Clone ID: uC-gsflnu33B139e12b1
aatgattacccgtacgctaaacacagggaaagggggggtttttaatggctatcctgttgatgccgctcgaaagctcaacatcgcaagccataaggccactttccgctccatctgtgcaacaaagatattccaagattattgccactcttggagacgagtgcacatgccgcgaacgaagtggaggcgaatgctacagcactaggacccaaccctgctctcaggcttacctcaagtgcctacctgggaaactacattaggattgttgccccaacataactcgaatgtgtggtttctaactctgggtcgtcctatgtatatatatagatatgcacactaatggagtgctagaaacttaaagggtagaaatgatggattctctaagctcacaacagtgatcaatgagaccttgaaccccaaaaaatcacgtacactacgatattgacaaggc

SEQ ID NO: 55299 - DNA, 145 bp, Gossypium hirsutum
  Clone ID: uC-gsflnu33B139f03b1
gctacgtttccggggaaacattacttaccatgggtgttttttttattggatggatcggcttcttaagggaaccaaaactgcgagggatctgaagtagacgcctgggggtgtgtatgtaccagatgctacactattatgcgacgat

SEQ ID NO: 55300 - DNA, 250 bp, Gossypium hirsutum
  Clone ID: uC-gsflnu33B139f12b1
atgattacccgtccggcaaacccagcgcaagggggggcttcaaacgaccaagcgggggatcccacccaaaagcacaaaaccggaggcagaaaggacgccaacggacctggctgtgcaccgaagaaaatgcaagctgatacacacagcagaggacgagcgcacatcacccaaaggaaggcaagggccaaccaaaagcactaggaggcaaacctgcgatgcagccgaacacaggaaacgacaggggaaacaa

SEQ ID NO: 55301 - DNA, 118 bp, Gossypium hirsutum
  Clone ID: uC-gsflnu33B139g04b1
cctacttgtccggtgaaacttagcttagaagagggggtgtttttatagatgggatcaacttctcaaaggtatcatatctccaacagaccagtcctagacacttcgggtgatgtatgca

SEQ ID NO: 55302 - DNA, 141 bp, Gossypium hirsutum
  Clone ID: uC-gsflnu33B139g06b1
cctacttgtccggtgaaacgttggttacacaggggggggtttttataaatggggggtttatcccaaagagatcatctctccaacaggcgtgtcctagacacctcgggtgagggatgcacaagatgcttgaattaaacgcac

SEQ ID NO: 55303 - DNA, 136 bp, Gossypium hirsutum
  Clone ID: uC-gsflnu33B139g08b1
tcgcctacgcgtccggagaagcataggttagggggggttttattgatataggtggggggttcaacccaaagggatgatctttccaacagtaaagacatataaagagcgggctggggatggacaatatggttgaatt

SEQ ID NO: 55304 - DNA, 157 bp, Gossypium hirsutum
  Clone ID: uC-gsflnu33B139g10b1
tatttcgcgtacggtgaacacaacaatggacggggcttttattatctagatggcggcttcaaaccaaagggatgatatcgcaagcactaatgacatagagagagagggcgggacatggactatatcggtgcatgaatgccatatcagaggagaatta

SEQ ID NO: 55305 - DNA, 288 bp, Gossypium hirsutum
  Clone ID: uC-gsflnu33B139g11b1
ttgttactcgtgcggaaaagccagagcaggggggggctttgaatatacaagtggttgcttccacccaaaggtacaataacggcgggacaagggaccgtcacggagaggtcgggacacggagtataacgtaagctgaaatccgtagcaaaggagtattagaattcactcaggccctggcggggatcgacacattccacagtgagtgaactgtgccattctgaaaaatctgggaaaggataagctgcaatagcatgaatattatgctagagccatgaattgaaaaggtgg

SEQ ID NO: 55306 - DNA, 279 bp, Gossypium hirsutum
  Clone ID: uC-gsflnu33B139g12b1
tggtttcatccatgaaaacacgcgctagtgcgggcttcttatttgcgggttgttgttcaaaagctatgggctaatactgggcatgcaaatgagatcaaaggacctagttttgtatcttcgaagttaatatcttatttacattggtatttaccgggctctttcacccataatgtattaaatattaactcgatattctatgtttaatatctatcatcgagcctaatatattttattttaggttacaaaatgacaatattagtttaaaagtctaagtacact

SEQ ID NO: 55307 - DNA, 302 bp, Gossypium hirsutum
  Clone ID: uC-gsflnu33B139h03b1
cctacgtgttcggtgaaccaaaagtcaaaaaggggctttgttctatgataaggaggtacgtaacaaaaatatcactcctgctgtagaccataactagagccctcgggggaggtatgcaacagagggtcgactaaaatgcccccatggggccggaaaagagtgcgagatcagctgcggaatagatatctgactgatgtgaaccaggttctccggagaccgcgaatgtggattaggggacgggaaccagactcaggacttggcattcgtttactggccgaaacgaagatgcttcaaggtggggc

SEQ ID NO: 55308 - DNA, 107 bp, Gossypium hirsutum
  Clone ID: uC-gsflnu33B139h04b1
cctacgtgtccggtgaaacgatacttatcaaaggggttttttctatggatgggatgggcgtctcaagggtatcacctctccaattatcaagtcctagagacctcggg

SEQ ID NO: 55309 - DNA, 136 bp, Gossypium hirsutum
  Clone ID: uC-gsflnu33B139h05b1
cttacgcgtccggtcaaactttgcttataaaggggcttttttttatagatgggatgagtggcccaaaggtatcatccctccaactgtcctgtcctagagacttcgggttatgtatgcaccatatgcttgcatcaaa

SEQ ID NO: 55310 - DNA, 121 bp, Gossypium hirsutum
  Clone ID: uC-gsflnu33B139h06b1
ccttcttgtccggtcaaacgttggttacataggggcttgtttttataaatggggggttcatcccaaagggatcacccctccaactgaccatacatataaagcgcgggtgaggtatgcacaa

SEQ ID NO: 55311 - DNA, 317 bp, Gossypium hirsutum
  unsure (1)..(317): unsure at all n locations
  Clone ID: uC-gsflnu33B139h09b1
ngttgcttactcgtccggaaaacagcaggctggggggggtttaaatcaactaaggggttgcttccacccaaagagacgatatcgcaagcaatcgccacctatcaagagcggacaggagctggccaatatgcgtgcactaatcccatcgcagagaagaataagaaatcaccggcgcaaattcggaaagcatcactacgccagacgaagaatttctgcgattctggaaaacttgcgcaaggaaaaggggctcttcagctgacttagcttactggcatagctagtaaaccggacgccaaatctaagaagtctgacgccgc

SEQ ID NO: 55312 - DNA, 514 bp, Gossypium hirsutum
  unsure (1)..(514): unsure at all n locations
  Clone ID: uC-gsflnu33B140a09b1
tttttaaaagacataaggccttatggcatcaaagagaattctcaaggtgctgagggaactgcaaagagaccctccaacttcatgcagtgcaggtccggtggcagaagacatgttccagtggcaagcgacaatactcggccctggcgacagcccctattgcggtggggtttttattgttaacatccacttccctacggactaccctttcaagcctccaaaggtcgtgtttagaaccaaagtgttccacccaaacataaacagcaatgggaatatttgtttagatattcttaaagagcagtggagtcctgcactcaccatttcgaaggttttgctatcgatatgttcgctgctgacggacccaaatgcagatgatccacttgttcctgagattgctcatatatacaagactgacaaagtcaagtacgaaacgattgctcgtagctggacttacangtatgcaatgggttgacccacacttgcccgtgtattttggtgtcactctactctcccccac

SEQ ID NO: 55313 - DNA, 347 bp, Gossypium hirsutum
  Clone ID: uC-gsflnu33B140a11b1
taaaaaaaaaaaaaaaaaaaaagaaaaaaagggaaattttaaaaaataaaaagataaaaaaaaaaaaaaaaaaaaaaaaaaatagataagtcgaagacataccgtattgtaataataatacaaagtataaggggggggggctttttgggggccccaggtttccttcccgggttctggccggttatagcttttttttggggccccctagtttaatttcttgggccggggttttccactcgtgggtggggaaacccctggggtttccccactttaattgcttgggggaaatccccctttttgccggtgggggtttttggaagggggcccgccccgtgcgtttttcccaa

SEQ ID NO: 55314 - DNA, 413 bp, Gossypium hirsutum
  Clone ID: uC-gsflnu33B140b06b1
ttaaataattgatctgatatgcacccttgtgttctccatcattgtgctgggaacaaccatcaggatgctacgaaacattttggaagttcttatggagagcacaccccgagaaattgatgccacaaggctagagaagggtttatgcgagatggatgaggttgtcgccatacatgaactgcacatttgggctataactgttggtaaggtgttattagcttgccatgtattaattaagcctgaagctgatgctgacatggtattgaacaaggttatagattacatcaagagagattacaatatcagtcatgtgactattcagatagaacgccagtgtgaatccatggcgcagtaagttttgtagttttaccgtttttggcttttggtatattttcaagatttcttcatattcctct

SEQ ID NO: 55315 - DNA, 405 bp, Gossypium hirsutum
  Clone ID: uC-gsflnu33B140b09b1
tttgccgccctttttttttttttttggtttttttttttttttttttcttttttttttttttggaaaaacaaacattggaaggacttaacatagcactatattgtcacctcaaaccattttcgtaacaacaactaaatgtcattatttgcattgctcgaagaatgtaaaattgatgatgttaagctcaaaaagaaagagacagacatggaaagttaagttcaacatatatttggggcataatatttgggtttttgtctaaaatattagtgtcaggggttcccccgggaggggcaccaaggtcgaatactcataggggaactgtgacaggccctcaagaaagaggtgaattctagaaccttccgccaaccggtttagagctttgacctccgccattgacgctgtgaa

SEQ ID NO: 55316 - DNA, 230 bp, Gossypium hirsutum
  Clone ID: uC-gsflnu33B140c03b1
tgccacgtttccggaaacaaagactcacagggacgggttcaatttgcaggggattgctgtccctaaaccagcagctgagggactaactcctcggaagagaaacagggacaacgacgaagaaggcgggcacagcacacatttcctgacgctcacagaagagaaagcccgtataaaaacccaacagcctagggcaaggacgagcccagcgagagcaacaaggccatgccggg

SEQ ID NO: 55317 - DNA, 465 bp, Gossypium hirsutum
  Clone ID: uC-gsflnu33B140c05b1
tgcacgattccatggaatggaaaatcaagaggaagaggaggatgtcaacttctatatctacaaagacagaacctaaaaggcagagattatttactcactgcttcctccccatgattcttttgctatctgctgccttcttcattggaagtgcatttataatcacagactataaagagaaaattctaggatgggggtcagctatggttttgcagtactcaagatctaagatgtgtgagactcagtgcagggcttacggaagtgaagcattacctagaggaatcatttctgaaacatctgacttggaaatgcggccattatggggtgcgcagaataagaagaagccaaagctgtcaatgaacttgttagccatcgcagtcggaataaagcaaaaagaaaatgtcaacaagatggtcaagatgtttccagagagtgatttctgtgtgatgcttttccattacgatggca

SEQ ID NO: 55318 - DNA, 149 bp, Gossypium hirsutum
  Clone ID: uC-gsflnu33B140d03b1
tgccacttttacggaagcaaaaactgtcagtgacgggttcaattagaaggggaatgcggtcattaaaagggcagttgaaagatatactcgtgggacacaacacagggaagatgacgaagaaggtgggaacaaaaaacatttatagagac

SEQ ID NO: 55319 - DNA, 156 bp, Gossypium hirsutum
  Clone ID: uC-gsflnu33B140d04b1
tgccacttttacgggagcaataactgtcggggtcggtttcaattacaagcaccgattggggtgctgagccggcaagaggtgaaatatactcttgggaaaaaacacacggaaactgacggagaaggcggatacatcagtcttttccagccacagcac

SEQ ID NO: 55320 - DNA, 503 bp, Gossypium hirsutum
  Clone ID: uC-gsflnu33B140d06b1
tcataatcatcagcaacaaggaactggcgggagtgaaaaccctcagcttccaccaccacctactcatgttggagctggtggtggaaccatagccattagacccagctcgatggcggatcgagccaggctagccaaggttccacaaccagaagcagtcctcaagtgtccaaggtgtgactccaccaacaccaaggtctgctacttgaacaactacagcctctcacagccacgccacttttgcaaggcgtgccggcggtattggaccagaggaggtgctcttaggaacgttcccgacggtggaggttgccggagaaacaagaaaaacaaaagcagcaccagctcaaaatcaccagcttgcacccagaaacaagctgaagtgatcactggtcataatttgccacagcaaacacctcatttacccttcatggcttctctgcaaagctttgctcagactggtttgggtaatatcgggttaaactatggtggaggcgggcaagctgata

SEQ ID NO: 55321 - DNA, 429 bp, Gossypium hirsutum
  Clone ID: uC-gsflnu33B140d10b1
ttccacgcgtccgcccacgcgtccgcccaggcgtgcaaagcctttcactattcaacaagctgaaacggagcaatgtgatgacaagtgcgagcaacgtgtgactgctctgacaagagccagtgcgacatgaacggaaacagcatggacattgggactgaaaagagctacgttagtactgtagcggttgcgggtggggctaagaacgaaggcaagggctagagtggcgacagctgcagttgtgcaaactgcacaggaggagctcattaagaagacatagcaccatgagggaggagctcatagaactattgggagctagaactaatgaaattgagtggaataaatgggtgctatgctgttgttggtggtgacattgagtgtgttttcatgtctgtctgtcttatgtctgagtctcattgtacacaatgatgg

SEQ ID NO: 55322 - DNA, 250 bp, Gossypium hirsutum
  Clone ID: uC-gsflnu33B140e03b1
tgccacgtgtacggccgccaagactgacagtgacgggttcaatatgaaggccaaagcggtcctcaaaggggaagcatatggatatactcctgggacaagacacaggcaagctgacggcgactgtgggcacaaaaaacatgtccagagactgacaaacgtataggacgaaagaaaaacggagagacttgcggagggaggaatcagtgagggtcaaggaaggcaatcaggggatccaacacttgtttgggta

SEQ ID NO: 55323 - DNA, 148 bp, Gossypium hirsutum
  Clone ID: uC-gsflnu33B140e04b1
tgccacttttacggaagcaaaaactgtcagtggcgcgttcaataagaagaccagagctgtcatcaaaagggaagcttatggatatactggtgagacataacacaggcaagctgacggcaacggtgggaacaaaaaacatgggcagaga

SEQ ID NO: 55324 - DNA, 300 bp, Gossypium hirsutum
  Clone ID: uC-gsflnu33B140f06b1
ttccacgtctacgaacacaagaacgataacacgggagttgatgaataaaacaccaagagtactgctaacaatcagaattagtgaagctgcggctgtaatacaaggcgaagctgacgcaaaatgcgagcaggagaagccagtgcttatagatgaagtggaagggcggccatgcgtagaaggaagaagctcggagtaggatagatcttgacgagggtatgtaccaactatgcttagatggggcatggtaaggaactaaaccctcccatttctcgcattctaagtcatgaaactcgatggaga

SEQ ID NO: 55325 - DNA, 425 bp, Gossypium hirsutum
  Clone ID: uC-gsflnu33B140g12b1
tccacgcgtccgcccacgcgagcgatcaaacaaagctattatgtgggttgagagcagaataaggtgcataatacacaatgccgaatgcatacaaaagattgtgagagaatatggagcttttagcagctgaatgtggggatatatgaatcataaacgccaaagtaacaaatacaagtgcccaagaaaggtacctcttagaaccccaaaagctgaagccattagcaaggacctattgaaacgaggattgcgattcgtggggccaggcatcgcgtattcattcacgccagctggcgggttgactatcgatcattatatctgatgtttcagacacaaagaaagcggcgcccttgccgagagaccttggagacacactgaataatctaggagtattcggataaggtatgtgtgcgacaagtgtacggata

SEQ ID NO: 55326 - DNA, 248 bp, Gossypium hirsutum
  Clone ID: uC-gsflnu33B140h03b1
ttgcgtgctcccacgcgtccgttcacatcatgctagaaccaaaagggtctagagtggaacatcttcggccaatagctgtgccaccgaccggcctcctctatccatatctcattggaggggtgcccacgtatttcaggtctctggtgacctacacgcgtgggctttggcccatgaaggtcacccactgtggctttttttcgggccatgtccccctacatacggatgccgtcttcctctaggaaacccct

SEQ ID NO: 55327 - DNA, 223 bp, Gossypium hirsutum
  Clone ID: uC-gsflnu33B141a01b1
gtgaatcttgagtgattttgcgccgcggggccttgctctttgatagatctggcttgttcttttcctcttcaggtgtgggattctgctgaggagggtttgcttctgttctgtgccgctgagaatatctcctgctacaagaagagaatgggttttgcggctatggttggtggatggagggggatggtctccaagccatgtatgcttgagcacctgaaggacccca

SEQ ID NO: 55328 - DNA, 425 bp, Gossypium hirsutum
  Clone ID: uC-gsflnu33B141a02b1
ttcacgcgtccgcacggtttgaagagaaagggggcaatttcagagatgtggaagagcaacgagaaatgatatgggaaaaactagcggatgcagcagcggaaagaggtggagaccatatggttacagtctaaccgattagtcggagttggattcaagcagactcctcaattttaatggtattctttctcttaaccctctctaataattattcttttcttctctccaaatttttattcaatttgatcattgaaatattgccagattaaggtggcatttgagtccttatcatgtcctagtttcattagaatgtgattaccgggaatctgattgctgtatattaaaatgttagaatcataaactttacagcaattaaagtaggcatttggtaccttatcatttcctcattttaatggaatatgattact

SEQ ID NO: 55329 - DNA, 381 bp, Gossypium hirsutum
  Clone ID: uC-gsflnu33B141c04b1
tcacgcgtccgcaacaaaacatccaaggagtagactatataagtgtgtgtatatatatattgcttgctgagatttgcctggtctctattctgagcttgccttagtgaatttggaactgtggattcattaggttcaactatgacagtttatatcaatggatttgtttttttaaaaaaaaaaaaaaaaaaaaaaaaaaaaaaaaaaaaaaaaaaaaaaaaaaaaaaaaaaaaaaaaaaaaaaaaaaaaaaaaaaaaaaaaaaaaaacataaaaaaccaaaaaaaaccaaaaaaaaaaaaaaaccaaaaaaggggggcccttttaaagggtcccagttttcctcccccggtcgggcctgttaaatctttttttttggggccccc

SEQ ID NO: 55330 - DNA, 510 bp, Gossypium hirsutum
  Clone ID: uC-gsflnu33B141c11b1
tggaggattgagaacttctccagtattaaagactacatgctctgctctgaaagtttcactgtcgatgacagtaaatggcaacttattatctacccacgggggaacaatgtgggttttttgtcaatttttttacgtgttgcagattctgcagctttggcttccggatggactagatatgcccatttcggatttgcagtcatcgaccaattcgatcgtgaaaattccaaaacaatagccactaagaaagagttcaacgcgaactaccctattcggggcttcggttcattcttacctcttactgaattacgcaaccctaaaagaggctatctcctcaatgatgcatgcttggttgaagcctacgttttcactggtcggactgtagatatgatttcacatgaatttatagtcaaaactgatttggataaacgtaagaccaaggaaggtgattgttttaaggcagccataggcaaccagaaaactacaaccaccaaaccagtagaagtcattaat

SEQ ID NO: 55331 - DNA, 226 bp, Gossypium hirsutum
  Clone ID: uC-gsflnu33B141d04b1
ttcatttcagtgtttttgggattgattgggggccttttgttatggacaatatttgaatcacgagataaccttgggggcggcggcggagggagaggaacatctctgaaattactttcacttttgccggtgggtgtaaaatgagcgcatcaacggatcatcaaatgtgtcactgaatggagacggagccgtcggcaagacttgcatgtctatttcttacaccagcaat

SEQ ID NO: 55332 - DNA, 527 bp, Gossypium hirsutum
  Clone ID: uC-gsflnu33B141d12b1
ctgccagatgccgccaacttagctgtgcccgccatgagaaatgtcgtttcagcgttgaaaaaggttggcctgcaggataggatcaaggtttcaactccactctcctttgtggttttatccaaatcctacccaccttccgatggggcgtttgacggtagccatgataatgtcttgggacctttgttggacttcctggaagagaaccaatcaccttttatggtcaatttatatcctttttacgctattggagattcttctttggatgctgttctgtttaagtcaccctcttccattttcgtagacccgaataccggttttagttacaagaacatttttgatgctcaactagatgctggtcatttcgctttggccaaacggaaatccagaagcataccgattattgttacggaaaccggctggcctacgagaggttcaggaagacataggttagcgatggctagtcttgacaatgatgacgactcctatgctagtattgacaatgcccagacttacaacaccaacttaat

SEQ ID NO: 55333 - DNA, 256 bp, Gossypium hirsutum
  unsure (1)..(256): unsure at all n locations
  Clone ID: uC-gsflnu33B141e12b1
tgaggaattagtgttggttgattgggtatgggagattttaatacaatgttgcttttttaaagngacagacattaggctgaatggcaaatatgattaaagtgaaatgtcgatggtgcttaaattctgcctaacttgttaaaatgacatgccggtgacacattctaccatgaggcaagctgtgaggtatttagatggagaggcccaactacctgatagggcgaggtcatcatcattattcgacagtgataaagggaat

SEQ ID NO: 55334 - DNA, 305 bp, Gossypium hirsutum
  Clone ID: uC-gsflnu33B141g07b1
tccacgcgtccgcccacgcgtccgcttgaccggcctaccaacagttacaaaccacagttccacgttgccaacctttctgcttccaagcttaacccagattctgggatcagtgtttaatctttacctactaaataaatgctgtatctttttgggcatattttaagcctaatccgtatatgtttatgttatacaaagctgtaagagcattgctctcaagtctggttacgtaatgagtgtgtggaatctgttcaaatcaaaatttctaaaaattccttctatcttaatcataaggggtggcctgtttt

SEQ ID NO: 55335 - DNA, 421 bp, Gossypium hirsutum
  Clone ID: uC-gsflnu33B141h09b1
tgctactcttccgtatgaagtctggcacgggcatgatctatccactcttactcgggagggtggagaacaggcagcccagtatcgaccaggggtatactactatgacggaaaccaagctagtttaggaagagagactatggaaccgaatcgaaacgagttgatagaggagaaacacgagactgagactctgccggcgaaacgatcaaatcggtcggtagagtaccatcagcaatatttagaaaaaggaggaggttactgggctaaacagtcgtactgaacaggatgctctgggcccgatagaagctagggctgaagaaagcccttttgaaatgtttttttttaatatcatgatggcacttaagctttttgtctgggaataaacaagttatcatgttttacttttgttgtggtctgaagacat

SEQ ID NO: 55336 - DNA, 459 bp, Gossypium hirsutum
  Clone ID: uC-gsflnu33B142b01b1
ttttacgcgtccgaaggcttctcaatggatggttcagattgggtggagctttttgttagagaaatgttgaatgcttccaacatcgatgatgccagagctcgtgcttctagagcactggaggttttcgataagtccatccatgctcgtgccggagcagaggtggcccaaaactatcaccaggaaaatatgatgctgaaagaacaactggaaacactaattcaggaaaatactattctcaagcgagctgttgctgttcaacatgagcgccagaaagaatatgaaaatcaaagtcaagaattacagcatctgaagcaagtaatatctcaatatcaggagcagttgagaacccttgaggtttggcttcattcaccggaagcatatatgcatactatgttactcaattatcagttggagtggttgctacctgatatgtgtagatacgaacatgcttaatttttt

SEQ ID NO: 55337 - DNA, 429 bp, Gossypium hirsutum
  Clone ID: uC-gsflnu33B142b10b1
tcggacgcgtggggttatggggttcttttttctctatctttcaaggagatttgaagatttgcagcttctgggggtgattaactctataggaacaagaattaggggaaggaatgggttttttttggttgtaataaatggttttttttaatattttatataattttatgaggcgtattcggatctactgcctctgaaattggggagaatattgtataaggtcgaaatgcatcactcctccttttgtgaaaaaaactttggaagaatatccaatgtctttgctgaggaaattctcagcattggggcactttaaatttcttttctttgaaacagatattattcattggttcataatatgttacataaatttgccacttttcaaaattacaatgctgttgcttttatcaagtcaaatcacctttctgtatatta

SEQ ID NO: 55338 - DNA, 463 bp, Gossypium hirsutum
  Clone ID: uC-gsflnu33B142c05b1
tgattacctcccatttatgattcctagctaaaactgctgttgtagctaaccccgtttcctatgaaaacgaagcatcaaaattaatcttgatgataccatcattcggtggcttccagaactctttcacagcaggtccaacaacagaactgaaattcgctgtatggaaacttagttctcgtgcatatccacgaataaaacctagggtttcctgttttgagaaaataacaccttcatggactaccttatttctacaatgccagaggctccacaatgaaatagcaataagatttttggtgctgttatcaaccgccaaaaaagttctaataaaactttctttatgctctagtgaatcgacaggaggatgagtctgcacttttaaatcgtcccaaatgtcttgcaaaatagcacacgtccacaagagatgagaagaagattccagttcagtcttgcacagtgggcagac

SEQ ID NO: 55339 - DNA, 193 bp, Gossypium hirsutum
  Clone ID: uC-gsflnu33B142d04b1
ctcacgcgtccgggcacacgtacgaacgggggggggctttagacactgtagcttttatctgcccgacaaccaaagacgaccgttagagtcacagtataataagttgaagagcatttcaggagctcagaaccaggaactaaggttggtcaagagggttccaatgtacagcacaatgagggagagcatagaaacc

SEQ ID NO: 55340 - DNA, 187 bp, Gossypium hirsutum
  Clone ID: uC-gsflnu33B142d05b1
ctcacgcgtccgggcacaattacaaacggggggcggcttttagacaaatcggattttatcagcccgacaacgaaagacgatagttagggaccgactatacgtagtggaagaccattcgaggaggccaggacctggaactacggctggtagaagaacgtaacaatgaataggaaaacggaagagcgca

SEQ ID NO: 55341 - DNA, 274 bp, Gossypium hirsutum
  Clone ID: uC-gsflnu33B142d06b1
ctcacgcgtccgggcacaagtacgaacacggggcggcttttgagaaaggatacttgttcaggccgaacacctcagtcgatagtgcaggacctactatccatcctggaagaggattctatcaggactgaacaaggaactatggatggaagaacaacgtgaatatggttttgaatcagatggagcgcaaccataccctgggtcagagcagtacagggaagcaaattaactaggatgagatgactacgcgcaacacgattgtgagaagctacaagcg

SEQ ID NO: 55342 - DNA, 273 bp, Gossypium hirsutum
  Clone ID: uC-gsflnu33B142d07b1
tggccacgcgtacgggcacatgtacagtcgggggctttcaactggaaacgcatattttaacaggccgacaacctgatactatagtccgggacatactatacgtagttgaagagctttctataacgcctgaacatggaactactgctggacgaagggcgtacacatgaaagataataaactatagcggaaccacagataggtactgacagctacagggaagaaaattatcgacgatgacaataatatgcgcgacatgattgggatcagtaagat

SEQ ID NO: 55343 - DNA, 145 bp, Gossypium hirsutum
  Clone ID: uC-gsflnu33B142d08b1
taccacgcgtgcgggcacaagcacagaggggggtttttgaatcaaagtgcatattattacagggggacaacgaaattagattgtgcaggacaaactatacgtcgttgaagacccttctacaactcttggacatggaattgccgat

SEQ ID NO: 55344 - DNA, 168 bp, Gossypium hirsutum
  Clone ID: uC-gsflnu33B142e04b1
tccacgcgtccgggcacgctttcgaagggggggtggctattgacactggatattggatctggccgacaaccaaagaagatcgtttgaatcaaagtattcttagttgaagagctttctaggggttcaggtacagtgactaagtttggtctataaggttgcaatgttttg

SEQ ID NO: 55345 - DNA, 164 bp, Gossypium hirsutum
  Clone ID: uC-gsflnu33B142e05b1
tccacgcgtccgggcacaataagagaacggggggcatctattgagaactcatatttgaactggccgaaaacgaaacaagataggtagagacaaagaatacgtacttgaagaccatactagcaggccagaaccaggaactacggatggaaaacaacaacaaaatg

SEQ ID NO: 55346 - DNA, 183 bp, Gossypium hirsutum
  Clone ID: uC-gsflnu33B142e06b1
tccacgcgtccgggcacatccacgaacacggggcagcttttgacaacgcagcttttaacaggccgaaaacgaaagacgacagggcgaggcccagtgtacgtagtggaagggcattccacaaggcctggaccaggaacgaccgatggtaaggaacaacactatgaatgcgaaccaggaagagcg

SEQ ID NO: 55347 - DNA, 165 bp, Gossypium hirsutum
  Clone ID: uC-gsflnu33B142e07b1
tggtcacgcgtgcgggcacaactacgaaggggggttttcaattgggagcgcttattataacagggcgaaaacgaaagaagatagggcaggacatactatacatcgttgaagggcattcgacaacgcaagaaccaggaactaccgatggagaaggacaaaaacatg

SEQ ID NO: 55348 - DNA, 162 bp, Gossypium hirsutum
  Clone ID: uC-gsflnu33B142e08b1
tgacacgcgtacgggcacaagcacgcccgggggctattaaatgaaagggcgtatctgaacagggggaaaacgaaaaaacagactgcaggacctactatacaaagatgaacaccaccggggaacacatggacaaggaagcgatgatggaagaaggacacacag

SEQ ID NO: 55349 - DNA, 247 bp, Gossypium hirsutum
  Clone ID: uC-gsflnu33B142f04b1
tccacccgtccgggcacactactgaacggggggcatctgctgcaacctcctctttaaactgtccgaaaaccaaacatgacagctcgaaacaaagacttcctacttgaagacgaccccagcgcttcagaagcagtacctaagtttggtacctcaacttggaatgttttgcacacactggaggagcaactgaccctattgatacccaacaacaagttcaagaaccccaaaatgaggactcttcagatgc

SEQ ID NO: 55350 - DNA, 116 bp, Gossypium hirsutum
  Clone ID: uC-gsflnu33B142f06b1
gtcacgcgtccgggcacaacctagaacggggggaggctgttgggaccggatattataactgatcgaaaacgaaacatgatagttagagtgagagtatccttagttgaaggggcttt

SEQ ID NO: 55351 - DNA, 234 bp, Gossypium hirsutum
  Clone ID: uC-gsflnu33B142f07b1
tggtcacgcgtccgagcaattccttgttgtcaccaaagcaagagggaaatcatatgaattcatatcggatacgctggaattcaagtcgggaactcatgtccggagcttaagggccttgaacatgaaatgcaacccgatggaatgatgcccagcgacaccactgtgggtgtagaaaatgaagcgttcaacactatctttagtgagactggttcagggaaacaagttcatagagct

SEQ ID NO: 55352 - DNA, 192 bp, Gossypium hirsutum
  Clone ID: uC-gsflnu33B142g05b1
tcacgcgtccggggaccttcacttgcggaagaagtcaaactagagctaacatcataactgctcgagaaggccacagcaaagggagtgtctctgttgctgtcctttaaggcgattgttgctgtcaagaccaaggctgtagttctcggaaaggaggtgccagtgtaagggatcccagaatggtggatgggcacc

SEQ ID NO: 55353 - DNA, 247 bp, Gossypium hirsutum
  Clone ID: uC-gsflnu33B142g08b1
ctcccacgcgtccgaagttgcagggatttgatggacattcaaaaacttatggaggaaaatcttgtggatgttatcaacattaaattatccaaatttggggttcttggtatccttgaaattgtagaaatggttaaaaaatctggattggaacttatgattgatagtgttgctcaaactagacttgctactggtgttgctggtcatttagcacatggcctttgatgtttcagatatgttaatatttgtg

SEQ ID NO: 55354 - DNA, 355 bp, Gossypium hirsutum
  unsure (1)..(355): unsure at all n locations
  Clone ID: uC-gsflnu33B143a03b1
tctatctacgagtggcgatgaggctgtccaaacgaaataaaatagtttgcactactactatttgcttttatattatggaatactatatttaaataaatntgacagccagcaataaaagattgccatgtgtgcttagtttgcttaagacaaaacaagcatattactacgggaagatttaagagaggattatccatcaaaactaaggatagattgactgcacaaggaggagctagtgtggcatgcaaaacaaaataaagctgctgggggggacgctgtctggaatcacacccttgacccttcgatccggactgccttggtgttttatctgtccgcttaagacacagagactgccctg

SEQ ID NO: 55355 - DNA, 183 bp, Gossypium hirsutum
  Clone ID: uC-gsflnu33B143a12b1
ttttctttataacttgcgtgaaacccttgattgggtcttgaagaaactgtgaaaccctttgtttcggtcaatgtaacaaacaggtctttggttctaaaatgaaatgctaggttcatgcaggcacaatcggtggcagtggtaactgaaaataattcaaagaataaccgagataataacaaaacg

SEQ ID NO: 55356 - DNA, 358 bp, Gossypium hirsutum
  Clone ID: uC-gsflnu33B143b11b1
taaagagagagaggagaaaatggagaagcagagcaaatcttatggtgttgttttacctacaatggatgaagatcatgaagaatttgttttcattgatgaagattatgatgttgatgatgatctttcccattgggaattcattgattcctctgttaccgattctgatgatgccgatgatgatgtctggtttcatcgtggcgaatcattgagaagaaacgtcatagtcgcaatgcctttaactgtcccgtttactcctataacggaggtgaataagtgcattccgattgctgctcctattcaagatactgttgatcgttgtctattactttgatggatttgatgatcaagatggagatgt

SEQ ID NO: 55357 - DNA, 107 bp, Gossypium hirsutum
  Clone ID: uC-gsflnu33B143c02b1
tctgatgatccagttcgccgtgcagtctaacatagagaatatgaagcattacgccacggatttttcgttggtattttaaggaaaatttggagatgtttaaacgtttt

SEQ ID NO: 55358 - DNA, 432 bp, Gossypium hirsutum
  Clone ID: uC-gsflnu33B143c04b1
ttcattcggtccatcaccagctaggggaccatctggggcttatatgggcgatgatgtggacgagcctacactcaggattacggtggtgaaactgagcgcgtacttgagcggccggaacatgccgcggatcgtgacgggcacggcggtggatacatttgacgaaactgctgaggaagaggcgatgctggaggctatcatggagggttaccgtgactgcgacggtgaatcgctctacaaatcggtgaagccattgggagaggctatggcagaagctattaagtacgggattatcgcatgtcgcgacgaactttgcatcactctcaagatatggtgcactgaagcgtatactgatgttgatcttgacgctgtcaaaaatgctctcaggatgcttcagatggagtactaggacctttatttgattcactggcctat

SEQ ID NO: 55359 - DNA, 286 bp, Gossypium hirsutum
  Clone ID: uC-gsflnu33B143c05b1
cttacacgtacgatcagactcctatgtacagcgggggtttttgaaaatgaatgggggtgtctacaccatgctagcttgaacacctcatagaaacggtaactccacgaacgaccccagtgctagcccctgcaactagatacaccacggcgagccagcttggctagaatctaaaagagactccggaccttgaggcccacgaacggagagggaataacagaacagtgcagcaccaagaaccaccacactggcaccaggctacacacactagaatgaaccagcagtacga

SEQ ID NO: 55360 - DNA, 412 bp, Gossypium hirsutum
  Clone ID: uC-gsflnu33B143d10b1
tccacgcgtccgaaagagataagatagagagggaagatgcccgaaactagagttgaggtaccagaaatggtgatgttggagattctgtcaaagcttccagttaaatccttgacacgtttcaggtgcgtatgtaagccttggtgttcatcttttcaaacccctcatttcattaccaaacatcatcaaaacaacctccacaacaacaaccttaatctcctcctcaaacgttgtcagggtaacacccgtgatgacatctactatttctctcaactttcaattgagaaaggccaaaacttttcggcacaacacaacatccacttaccctttttcgaggattgttggtatgctcctgtggtttcaggtccttgtaatggattattgcgtttacatgatgctgataaggtagcccttt

SEQ ID NO: 55361 - DNA, 207 bp, Gossypium hirsutum
  Clone ID: uC-gsflnu33B143e02b1
agtcaccacaaggactgctttctccccctctgtggcggttcaactccacctccagatcggccataacaacgatggcgcctcgacggcgcgctgccgccgatgtgtgcgcgacgtgcgcaggggagagtcatgctgcgacattcgaggaggcgagggtgaggctgcagttgggatgtgctggataaggctggaggctactagggtttt

SEQ ID NO: 55362 - DNA, 548 bp, Gossypium hirsutum
  Clone ID: uC-gsflnu33B143e04b1
tttacgcgtccggacagtggcagttgacatatagtattcacatatcatcaatatataatagtaattcaatcattaacttacaaattctagcatgttcataatatcagagaactcagttaagtgaataaaattgataaaatcaatctggggataatccaaggattaagctgaacaattcacaaaattttgtgcaaaactataaaatagtggccacatggtcgtgtggccaggccatgtaacagactgtggtagtgtggcaaatgtaaaaatcaacctacaggaaggacacgaccatgtggcaggccgtgtggaaggttggttcatgaactagcctagagtttgcagggcacatggacacgtgaagggctgtgtggtccacatgcctatgcgagagactgtgtgaccctattcctacacacgatcaccactgattcacttgggatagaatacacacctttcaccgagagtccaatcgacatttctcgcggccaaatctaatctaatccacctaaataagtcttttaacgataaatttgcacgaattaaca

SEQ ID NO: 55363 - DNA, 468 bp, Gossypium hirsutum
  Clone ID: uC-gsflnu33B143e08b1
tctacgcgtccgatttacaaatctaattgctgagggtttgtttagcattgcttcttagaaacactttttgggacaaaaaacacttttgagaaaaaaaccattgctagacaagatgctttgagtttttgaaaagcattgctaaactagccctaagtttgatttcatcatccaaatctccaattttaactttcaaacatggtttttccggactcagaaaaagcgagtttaccaactgggcttattacggtaggtttcaatatcccaagtaattcttaaacttgcccttattttcatctctccttcacaatcattttttttttctctcgtacatttatggattaaatgtgaagactctcagaaaagaggtataatacatatacatactgcattgaacatcagctggcctaactagcatttgagaacatggatggtataaggtaatttgatggaacacacacattcactaca

SEQ ID NO: 55364 - DNA, 456 bp, Gossypium hirsutum
  unsure (1)..(456): unsure at all n locations
  Clone ID: uC-gsflnu33B143e09b1
gtcttctccttcgccttgagcgaatatgaataccaagttgctttcagcatgttcatgcaccaatatcaaaagtcctatgatcacctcgaatttgccaagagatacaacatcttcaagagcaatttggactttatcaacgcccacaacaaggcaaacaagaccttcactgttggaatgaacaaatttggagatctctccattaaggaattcagcaaaatctacttgggaactagaatcactaaacaagtcccagctcacgtaagaaagacttccaccagaggacttcctgcatctgttgactggagacaaaagggagctgttactcacgtgaagaaccaaggacaatgtggatcttgctggtctttctctaccactggatctgttgaaggatgccactttctctcaactcanaaactctgttttctctctgaacaaaacttagttgattgctctact

SEQ ID NO: 55365 - DNA, 361 bp, Gossypium hirsutum
  Clone ID: uC-gsflnu33B143g05b1
tgtaaagagaagcttatctagaaaatgaacttgcgaatatgtgggttctcgttgccaaattaaaaaaatccaatggagttgatacttaaactgtagtttccgaatcaactaaagggaacgactggttcagttcagggcacagtttattcacaaacaataattcggcttcggctttgatttagtatttggtttcagagagtagtgtcctgagaatgttgtgcattgcatgtagaggggccattgtacattccataggagttttttcttattcatcaaatttgttgcatcttttgggttcttttatccattggggcattgtatatgaaaagcttcagtttttgtacatattagctttgaagca

SEQ ID NO: 55366 - DNA, 468 bp, Gossypium hirsutum
  Clone ID: uC-gsflnu33B143g10b1
ttcacgcgtgcgttcttcttcgtcttcataatgattatttggccgtcctattcggcgacatgctgcgtcagaccacgcttgtcgggcttgccctcgggctcgcctccgagtcgtccgcccaggtgtccagcgattgcgagagcggctggtaccagaccgaatggcccgtctacgcgcctgactgccaacagggcggcacggcgagcctcgacacgacgaccgcgcacagcggcaggaactcgatcagggtggactgcgccggtggctactgcgggcatgccttcttcggcaccaacaacattcccagcggcgatctctatatgcaggtttggatgaacgcgtccaacgccattggtgacttccacgtcacgttcatggtcctgccggaccccgacgagggcaccaacatgcaccttctgatcggcggtatgagcaacatcctgctgtacaaccgcgagtcggacgacg

SEQ ID NO: 55367 - DNA, 465 bp, Gossypium hirsutum
  Clone ID: uC-gsflnu33B143h07b1
tttacgcgtccgcccacgcgtccgccaaatgtgaaatccttcattgcttcatctgtccttgttctattcttagcaatctcttttagttttagcagaacaaactactacaaaatcttcaacctcaaatcaagtctcgcttcttaccaccctacattccttcaatctgttttctcatttatgctaaaaaccccaaaacccaacaaatcccattggccaaatcccatttccaggccccctcactgtgttctatggatggctcccttcctttcaggtggggggtatagttcagaagcatggtcttatgttttagcactcgatgaatacatgaaaagtcgagaaaacccgagttttaaattgggtattcaccaacatggtgatttggagtcactagagttttgggaggggattgcctaaaatgcaagggatttggcaattgaattgcaccgaaccgattgcagaataaat

SEQ ID NO: 55368 - DNA, 438 bp, Gossypium hirsutum
  Clone ID: uC-gsflnu33B144a01b1
cccacgcgtccgctacctgcgaattctgcgttcactgctgtgaccgctctgacattttcatgcactcacactctccgaccggagacaggaaaaaaaacatggagcaaccgctgacgtctcgaaggacccgtaaatctcaagcgaaatccgagctatactctacctttgtcattcattccggttctgaatccgattccgattctggcaaatctaaaccgaaaccgcaaccatctcgtgacccggacctttacgccacaatggtttacaaagacgttgacgaagaaggtgaagatggatcttccatccctcctcccttcaaatgtgcgccgaaactctttggcggcggagggggcactccttccgacgccgaagatggcagtggcgatgcaggagatttgggaaccatgatcgggaaaagggatcatgttcgtgaagctc

SEQ ID NO: 55369 - DNA, 221 bp, Gossypium hirsutum
  Clone ID: uC-gsflnu33B144a04b1
cattatgttttagatgagatagaagaagacccaaccgggggaaagataaaatgggaacagggaaggctcaatggagctcctaacaaggttgaggatattcgttagttacatattgtacttgtggcaacttgcttgcataaggcatatatgataccaggtggtggagcgtgcgttctatatggttcagtgataccttagattagcttagtaagcacacattc

SEQ ID NO: 55370 - DNA, 541 bp, Gossypium hirsutum
  Clone ID: uC-gsflnu33B144b10b1
taaataaaggaagatgcttcagaatatttggtggtgaggttgaagttgataaaatgttgcattatttatatatcaacagcactatactaaacacacatatgtgcaaatataaggctgataataatgggatttgtaacatattctatgttggcatttataattttcaggttcattgatgcttttggaagagtcgttgttcaagcatgtcaattgccagacatattgcatttgaaaatttattattccactttacatggagcttattaagagcttgattcatagtgggaaaaccatctgagtgttgaatgtgaattttcacttgcatagctgaaatgagtcgggagaaaatttacttaattaagtgaggatgcatcaattgtttgagggtttaagcttaaatcatttctttgactatgaagttcatagtggatttatctttgggcaaagccccgcagacgtaggacgaggtccgactttgtaacatcttaatagactcttattttcttgtgcatatatgaccacttagaaaaacacattttat

SEQ ID NO: 55371 - DNA, 487 bp, Gossypium hirsutum
  Clone ID: uC-gsflnu33B144d01b1
cccacgcgtccgcccacgcgtccgcccacgcgtccgcgttaccattgttgacacttcctcaagcatggagagcagaataaagcttattgatgagttgaagcgagctgatgccgtggttttaacatatgcttgtgatcagcctatgacactcagtcgtctgagtagcttctggcttcccgagcttcgtaaattagagatcaaggcgccagtgattgttgttgggtgtaaacttgatttacgagatgaacgtcagcccatgaacttggaacaggtcatggcacccatcatgcagcagttcagggagatcgagacctgtatagaatgttcctctgctactctaattcaggtccctgatgtattctattatgctcaaaaggcagttttgcatccaacagctccactatttgatcaagagaaacaaactcttgaacctcgatgtattagggcttttgaacggatatttatgctttgtgaccatgatatggat

SEQ ID NO: 55372 - DNA, 452 bp, Gossypium hirsutum
  unsure (1)..(452): unsure at all n locations
  Clone ID: uC-gsflnu33B144d09b1
aagtaacagggagagagctcatgaagtatatgtgcgtgtgaagacagaggttgagaaatgcatagcctacttgaaggaaaaaagagaagaagatccctacaggaatttaatgactcggttggtgtaccaggccatgcatggcttcaaagctccagtcccgacatttgagctttgatgcacagtatatataaaggttcatattgggttttctccttacaaggtttggcaataaaagctgcattgttacatgtcaagaaaacacagtatatataagctatagacaatatcaaagaaaggaatggtctacttttccttgcttttgtggggatgggtgactttttgttatacctattcactattggctntgattaactcaattgattatataataattgatatattatgtgtccttaaaggtgtatgtatattaatatttggaatataatatgtat

SEQ ID NO: 55373 - DNA, 571 bp, Gossypium hirsutum
  unsure (1)..(571): unsure at all n locations
  Clone ID: uC-gsflnu33B144e08b1
ttcctcgcgtccgcccacgcgtccggcaaaatgtgttatgtggggaaagcaacaaagatcttcatcttcatagttacagcgttggtggtattgggtcttgtcttgggattcgggctgcttcgtcaccataagtcgcactcacacaaatgctccggtggtgactcttgtccttctcctaatttcttccctaaccctatctccacccctaattcgccacccttttcttcttcctcctcctcttacaatcctcctcctcctgccattgggtctaaccagcccacctcccctaactcaccacctacctcaatccctactgctaacccaccaccaccagctgtccaggaccctacttctacacctncgtcgcctgacgctaacccaaatcctccaccacaatctactcctcctcctccttctgcagtgctttcagtgccttcctacaatcagcctacttccgttctggttgcttcaggtcctgtgcatgcttagacctatctggtagttccaattaaaaataaaccgtttttttttttactttcaaattcttgaactaagaaattttttagatggg

SEQ ID NO: 55374 - DNA, 396 bp, Gossypium hirsutum
  Clone ID: uC-gsflnu33B144h11b1
tgcttatgatgatatagacgagtatgactttgtgggattcattttggggcatataccaccttgttctagtgtttgcataggggtcctgtgtttattgcagcagcgatgtagaggcagttccgacggctctttttttttgtcttccaattcatggggaaatttagttgtctggtgaaaacatccataatatggaggatattattgttacatgaaccatgcaaaagtcttctagatggttttgggcagttttggtgttttttacctaaaaaatattcatatgatgttttggcaaaaggttaagaagtgttttcattgtaagagtatacaattaaccctatttgtttgtgcattataagaaccagttgtttcacatgattttaataagattgtttctag

SEQ ID NO: 55375 - DNA, 489 bp, Gossypium hirsutum
  Clone ID: uC-gsflnu33B145b01b1
tttacgtgtgggcggacgcgtgggcgagaatactccaaccacaaaagagggatactattacagaactatctttgagaagttttttccaaagaatgctgcaaggtcaacagttccaggaggtccaagtgtggcgtgcagtacagcaaaagcagtggaatgggatgcagcatggtcagaaaatcccgacccctccggtcgggctgcactaggtgttcatgcctctgcttatgaggcacaaaaaggaggaattgcgggaaagattgcaatagcataaatactgcatctttatttgatagctgactggcggatttatagacctagttcattgctgaaatgagaaggcatttgtttctttcaaatgctcaaaagtcatatgaatccaaatgtaatgttgtaaggtgcctctcatgtagttaagttcctatctctttcccattcctcccctttttctcccttttggtatttgactagtcagctcttgggttatgc

SEQ ID NO: 55376 - DNA, 267 bp, Gossypium hirsutum
  Clone ID: uC-gsflnu33B145b03b1
ttcacgcttccggaacctgcaacagcttcacacttgggttcaatttttttgatttaattcttctatgcagatggaagctggatggaaggtgtggtgtatatttgcattacacttcacatttacatttacccatatccatttgaacctcaatttgagatgttgaatagaatttggcggatgtcatgggtgaactgcaatttgcaatggaattggaacgttcaccttctcgtcccttgtggtacgagttggtcagtcggttggtagttt

SEQ ID NO: 55377 - DNA, 377 bp, Gossypium hirsutum
  Clone ID: uC-gsflnu33B145b06b1
acgtttcaatttttttcccaatcctccacccccaccatcgagacccacctcagtgtcctgcagaccccttttcaactgcaaaaacccgcaacaatacctatcaattacctgctcttcactgtcctgtacaccctcttgatctgcatcttctctctcttcgccaccggtttcatgactaacggcgatatccacggcttttatggtcgacccgtgaagatcctatccgctgtcaagtgagctttcacttattactagcccctcgtctccacttgccttgtaacggagctgatcatttctgggatcctttcaattgttgctctgatcttccttggattactgcaactaacccagctgttaggcttcgatgttgattacac

SEQ ID NO: 55378 - DNA, 324 bp, Gossypium hirsutum
  Clone ID: uC-gsflnu33B145c04b1
gttagtgttgatcaaagaaattaaaaaatgcgatacaggggggcgttgaaagtggctccgcttctgcttcttctgctaatcctttctacatttgcgaatgtcaagaagacaccccatgtgacctagttacagatcggagtcaagcataaccccaaattatgcaagttccaagctcacaaaggtggtcgactcaaagtgcactatcggcggcaactcactgatggaactgtcttcgattcaaggacagaaaggcgtgacccaattgaatatgagctaggtagtggaaaaggattcaaagggtgggtcctaggacaactaggcatg

SEQ ID NO: 55379 - DNA, 404 bp, Gossypium hirsutum
  Clone ID: uC-gsflnu33B145c05b1
attagactgactcaaggaatgggttgacaggaatttgcaacaagaggtctggaatccacaagctaatcaagaaggatatgcactctctgctgtcgaaactttgagaatcattgatgagactttagatgcatttttccagcttgcaataccagcacaaactgcattgctacctgatgtgatagttggcctagacaagtgtcttcagtattatgtgatcaaggcaaaatctggatgtgcttcacgcaatacatatatcccaacaatgcctgctttgaccagatgtgagattggatcaaagttccaaggtgtctggaagaagaaagaaaagtcacaaaatactcaaaaaagaaattcccaggttgcaactatgaatggagataagccatttgggataccacagctgt

SEQ ID NO: 55380 - DNA, 487 bp, Gossypium hirsutum
  Clone ID: uC-gsflnu33B145c09b1
tcgttaaaattgcaccgcattcaaaaagatcgttgaccgactcattaatataggcgttgtcaaatatgatgtggcctccagtgcagaaatttcgctacccaatcatgattgataatggagtgaatgcaatatatgaagaagtgttgggaaatgttcacatcaatgccatatatcaaaacacaattgaaaagggtatttatagatattcacccttatcaacttgaagatgttctacataattggactacggaggaaattcctatagtttttagagcttactcagagtaatgttcaaaacactcttattgcttttagcctataagtgataagaacaccttagtgaaataggttcatgcctgaacgttattattttagtgaaatacatttttgtgattgggttgaaccaatattttcattctttatgaataattcaagattctttcattcttttggattttctttcaaatcattcattcataatcatact

SEQ ID NO: 55381 - DNA, 332 bp, Gossypium hirsutum
  Clone ID: uC-gsflnu33B145d04b1
gtcagcctaagtaaattagaatcccaaaaaaggaaaaagtttgaggaaagtacagacgacctctctgaggtttctgcttgagatggattagttatcgtaataagttgcgttttgtgtatgttcttttcggttacatgttataggcttagggaattcgatccttgcttatctcaactgttgaaactgaaatctccaaaagcttaaccacaaaggcagtgtacgttagaaatttattgattcccttattgaaagaagaattttgatggggtcttcttttttatgtacgacacaattacaacaaatgaaatattggtaggtctgcttttcacttt

SEQ ID NO: 55382 - DNA, 399 bp, Gossypium hirsutum
  Clone ID: uC-gsflnu33B145d05b1
ttctcgtttacgagggaagcatctacttttactaatgaagagggatgggcctcacgacggagaaaaaaactgaatggtgattactgggaagagcgagcttctgcagcgtacccttgatggcctgatgctgttctgaggccagtactatgtctggatcatccaggcagggtcaacgaggcgctatgggatgatttgcggggtaacatatgcagaatgctgactgcggaaactgctcaagctatgggatgaacatactgaaaatcgcatgctttctcaaaaaatgacactgaagctgagccactgcgagtcagtgtcgccggactatgggggagcgtcactgtaacaacctaaagagaggatcaaggtgcacaattcttggcccgggtagcaagcggggta

SEQ ID NO: 55383 - DNA, 473 bp, Gossypium hirsutum
  Clone ID: uC-gsflnu33B145e04b1
atctaagtgggtatctaggcaatgatatagctaatcatcacttgagtgaatcactgcacctgataagcataggaaccaatgacttcctagagaactactatccttttccaacccgatcttcggtgtaccctgtcgataaatacgagatttttctaataggaattgccaacaatttcatcagggagctttacaatctgggagctcggaagatagcaataagcggccttcctccgatgggatgtttaccgttggaaagaacgacgaatatcatgcacggaagtgcatgtatcgaagagtataacgacgtggctaaagatttcaatcaaaagttgcaggattctgtcacggagctgaaccgggagctcggtggaatccaactcgtgatgtcgaacccctactataagctcttagaaatgatccaaaatccaattctgttcggttagtccttagcaatagttcatagtacttgcata

SEQ ID NO: 55384 - DNA, 477 bp, Gossypium hirsutum
  Clone ID: uC-gsflnu33B145g05b1
tttaattctttgagaaagaagcagactgagaaaatgttctccgatgatattatcaggttttatgcagcggaattggctctggctttggagtatcttcataatttaggcattgtttatcgagatttgaagcctgaaaatattatgatccaggaaaatggccatctcatgcttgtagatttcgatctttccacgaagctttctcctatgtcgcctgaaaaatcgattcctcccaactcggtcagacaaacgccgccggactcagtcaagaaaaagcgagtcttcccttttgttaggtgctgtaactccggaatctctccggacgacacggcatctcaagaaagtgtcaactcggaacgtactactgagtcagaatcattagagaaatcaaactcgtttcgtggaacagaagagtacgtcgcgccagaaatcatatcaggcaacggtcacgatttcgccgtggattggtggtctctaggg

SEQ ID NO: 55385 - DNA, 302 bp, Gossypium hirsutum
  Clone ID: uC-gsflnu33B145g11b1
ttaggttctctactaagaactttcaagctcctcgtaatcttgcaagatcaaatggaatggttgtcaacttgttcttacctgttaaccagataaattgtgtatattcttgtgaggtccgtcttttagccgtaattgcgctgtatggcttagtatagaagtgaagtacgagaattcaaagatatgtgtaataaggatcatgattctgccgtttgaatgtaggtagaaggatctccatgacaaaatatgatagatttcttatctattctcatattggtttattaaattataaccttagttatggc

SEQ ID NO: 55386 - DNA, 458 bp, Gossypium hirsutum
  Clone ID: uC-gsflnu33B145h10b1
acgtttacgcgtccgattgccagtaggctatcccaggagaaactggagaagctgaaaaagacgacatttggactgagatatggccacgtttctcttggaacagcaatgacacgagtcaaacttgctgcttcacttggggcttcattggtttggctatccggtggattaagcttagtccaatcattgattaaagaaacattaccttcttggttcatatgatcccatacacctgagctggaccgaggggaacctggaggcgtagtatccatgctaaggggttatgcacttgcatactttgctgtactttgcggtacattcgcatggggtgtggactcagtctaaccagaatcaagacggcgaccaaaagatctcgactcacacttggaatttgttgcaagtgcattagatgggaaaatatcgctcggatgtgattatgccacttggcgtgcatacgtaac

SEQ ID NO: 55387 - DNA, 278 bp, Gossypium hirsutum
  Clone ID: uC-gsflnu33B145h11b1
tatcgtttacgcgtccgtccacgcgtccgaaataaagatagtaatttaaaaaaagataaaaaaaaaaaagaaattagaacataagggcgggctttgttgtggcacccaattaagtcctaatggggtgcgggggctagctattatgtagggttacctgattttatttcactgggcgattgtttaacatcgtccttgcctgtgaaatcttgtggagttacttggatttatctttttggggtaaataactatttgggctggtggcgttatcacgaataggc

SEQ ID NO: 55388 - DNA, 363 bp, Gossypium hirsutum
  Clone ID: uC-gsflnu33B146b03b1
ccctcgcgtccgcggacgcgtgggatctcctccatataccatagcccccgccgcccgtggcagcaaccacctctttcccatctcctccacacaccaagcccaacaacttagccaatgtttaatcaagtcatttcagaattgaagttacacacacccaagttccaagattggattttatatctgggttcttttgaaaaaattgattctctttgttttctttgtttgtatacctgtgtgaatttttttaagacatgtcgcgttggttggtgtatattggttgacatgtaaaatcaataagatttatagaagctataaataaatctatactagttcaagttgctttactccattaatacttttctt

SEQ ID NO: 55389 - DNA, 476 bp, Gossypium hirsutum
  Clone ID: uC-gsflnu33B146b10b1
gtcttgctgaacggctcttgggtggtcatcgccggtgattcacaagcacgattgttcaccctctctttgctaaatctgattttgggtcctcaatctcaacgcatggattcagttcgagctgatttgttcaaaaggcatagcgattacagcgttttagttaacgaaaccggtatgaaattggatttcatttgggcaccttatgttatgaatttgaccaatttggtgatgaatttcaagacccaaaagaattgccctgatgttatgatcatgggtgctggtctttggcacatgcttcatttcaccaatgcatcagattatgatctgcacttgcatatattaaaaactcaagtagtttccttgttgccattttcaactgagttagccatgaatgaaccggtgactggctcagtccccatcaagtcatcccacctgttttggctcgggatgccggtgatgatcaatgggatgtcgaacac

SEQ ID NO: 55390 - DNA, 469 bp, Gossypium hirsutum
  Clone ID: uC-gsflnu33B146c11b1
ctttcgcgtccggccactcgtacgatccttaggatggggtttggtgataattacaagtttcatgctgctggaagagaagatattgatgtgatgaagttctagtttgtgttgattgtttgcttaaactggagacatttttgtcccccacaaaaaatcagtgagtattgtgcttatctatggaacctattgcaggtccgaatgttgggttcaggcaggccttttctgcttgagatacaaaatgcacgccaagttccatccgaagagactgttaaggaaattgaatcaaagataaatggcttggagaataaactagttggagttaaaaatcttcaagtagtaggcagtcaaggttggacactgatgcgtgaaggagaagccgagaagcagaagcaatattgtgcattagtgtggatttcttgtccacttgaggatgaagatgtgtgctccatattattgcttaatgacatgc

SEQ ID NO: 55391 - DNA, 486 bp, Gossypium hirsutum
  Clone ID: uC-gsflnu33B146d03b1
tgtttttgcaacccttgacatgcttttaaagactcctcaagctcaggcttgtgccgaggacattgccatctgggttaagaaatacatctcaacgcgaggtcatgagttctcttattaagtgggtggtttcaaatgcgggaaaaaggattatgacaatgcctcatccactggcatccttttttgtttgaaaaagagaacaattacaaggatgccataaaagaggattcggacaatgtattgtatttgttctttcgtgctaatccgaacttcaggtttgcacctcggtttccaggtttatcctatgccctattctcttctttttttgtaagatagaacttttttctgattgtagattagtgagttgactcagttgagttgatattacttgctcttgagtgctgcacaccacattgagattttgtcaatagcattcttttttttttaccctgtgaatataatgtactatttctagccaataggggtttt

SEQ ID NO: 55392 - DNA, 166 bp, Gossypium hirsutum
  Clone ID: uC-gsflnu33B146d05b1
gttaacaaaccagagaccactgcatttctttgtattctgattctgagaggtcatgggttaacccgacaactgaactagaaaaagagtaaatattcgcccgcgaaaatttgagtttcattttatttgattgttccatttttgtcgatctgaatctgatatgaatttg

SEQ ID NO: 55393 - DNA, 503 bp, Gossypium hirsutum
  Clone ID: uC-gsflnu33B146d07b1
ccctcgcgtccgattttttaacttataattgtaaattattgatttttattttttatatattttttacaattttataattttgtttctaatttttaataaattttagatgtttctaatttacaccttgattccaactatatttccaattccatcccttcatctctatgccatttgaccaattcgcagtcgttgcagcttgagagaaatcttttacatggttccatcccttcatctctacttcatttacctaatttattgtatctatccgtggcttcgaatcttttggaaggtcccataccccttgatattgagagtttgaatgccctgcaatacttagatctctcagacaacaaattgagtggaaggattcccctgcaaattggtggcttatctttataccagcttgatctaagccataacattcttcaaggagtgaaacctttccagtttgagaggtttaactcaatttaacattttaaattttagtcgggataatttaacgg

SEQ ID NO: 55394 - DNA, 315 bp, Gossypium hirsutum
  Clone ID: uC-gsflnu33B146f05b1
atataaaaaaaaaaaaaaaaaaaaaaaaaaaaaaggtaaaataaaaaaaaaaaaaaaaaaaaaaccaaaaaaaaaaaagaaatcaaaaataaaaaaaactcataatttcaggggcggcccttttaggggttccgggttttcttccgggggtctccgcccttttaccttttctttgggggcccctaatttttattgtaggggccctgtttttcccccctccgggcgggggaaaccccgggggttccccaattaattggcggtgggagcccatcccccttttcccggttggctttttatcaaaggggcccgctcctt

SEQ ID NO: 55395 - DNA, 466 bp, Gossypium hirsutum
  Clone ID: uC-gsflnu33B146f06b1
gcttcaatcatgcaaagatttctttcaatatcatccaaatcaacctctctcaaaaatcagaagcagcttcacctccccctcgtttcttcagtttcttctgccactccaaaagggcaatcctgttctcattatttcaatcaaaagtcaccttctttaggctccaggttaggttttgatcgggttttctcgtctgggtattttccaaatcgtgttaatttgagggaacacgaaagaaatggaaatgggtttttgaggtcgaagggattggttggggaaattaggaattatagcagtgaaactgacagggagtctatagattatgatgttgtcattgttggggctggcccggctggcttatctgcagctataaggttcaagcaattgtgtcaggaaaaaaatgctgatttctcagtttgtgttgttgaaaaaggtgctgaagtaggtgctcacatcttatctgggaatg

SEQ ID NO: 55396 - DNA, 429 bp, Gossypium hirsutum
  Clone ID: uC-gsflnu33B146f07b1
tttttatggggatgcatcagaagaaataatttcaactgatactactgatgaagaagctgttactgccattgaagcttaagtatgcctgtgactcggaacgaaaccccctttgttccccttacaggttcattcctttgctgattgaatttttcagtggacgatgactgaaggatttgaaggttcttcgattcacagcaaacattcaaccttttgccatacaaatagacaacattgtaaggtaaagtgtattaagttgtatttgttttgtacatgtatggtatagtggggtttgaatgtttttgtggttcaataggctgaagaattacttgatctttattgaaatctccaacttctctactggcatatgtccagccccatttaacatgttattgaggccaaatatatgttatatataggagtattttttat

SEQ ID NO: 55397 - DNA, 360 bp, Gossypium hirsutum
  Clone ID: uC-gsflnu33B146g01b1
tcttgcgtccggttattacaatgatttgacaaaggtggtttatggtaaagtaacacctgctacaaggcagattgatcatgacctttcaccgaacctttcctggccattcaaggttggatactccaaagggccatgctgcttttcggcgtgtgctagtggggtattcttttcgggattctgatgtaggttactgtcagggcttaaactatgatgctgcattgctatagcttggtatgaaaacggaggaagatgcattttggatgcttgccgttctccttgagaatgttttagttaatgattgctatacaaataacttatttggatgccatgttgagcaaagggttttaaagatttgtttac

SEQ ID NO: 55398 - DNA, 466 bp, Gossypium hirsutum
  Clone ID: uC-gsflnu33B146g07b1
cattgttctacaggttctcaaacgagttcaaacagttgtccggttaacatggttacggcatacaccatacgttgaaaggtaaactaagtacctatactataccccaggtttgcacttgatttacacttgggttgttttactgttcaatggaacaaaatattggttttttctaaaaataatttttgattggcatattaggaagcttctaataacacggtgcttaatgatgattcagatgataaaagaaaaagtaaataaaatggatattttcttaatgctgtcttatttttggaatttcaatcatttgaagctttttttgtgacttgataaaagtcgtataagctcattctgatcctttgtttgaaattgtttctatcaaaccctgttattgtcctcttccttcaacataccattcgttgtgaactccagtttgacgaggattctataaattcaccagttaaatact

SEQ ID NO: 55399 - DNA, 381 bp, Gossypium hirsutum
  Clone ID: uC-gsflnu33B146g08b1
ttctctcgtccgtatgtatctcaaggacacatggggcaaggtgggtatacaggagcttattagcaacctctccatagatcgagaaggaaaaatacttgttgaagatatcttcaaattagggggtgaaacagatgacgctgacactgctgaagcaggaagatcgtagggaactactgaaatttttgttgttaaaccctgtttaaagggtcattagtgcctctattacaacattattgtattttaacttagaaataatgtagcacttgacttcagtatccgctgattttaatgtacctactacaatctgaatatattacaagttgaggaaaaaagaaccctatggaatctttgtctcagtagttatagtgaaacactggctgc

SEQ ID NO: 55400 - DNA, 193 bp, Gossypium hirsutum
  Clone ID: uC-gsronu33B130d10b1
tctcccacgcgtccgatctattctttgccttagccttttgcttggttggatgattaatgattttcgtccattcaatcaatcaattgagttgaatgttgtaggggtcattgctgtatgcatgcttgtgccctttcgttaatgataaccgtaagttcatcgatttgattgttaattgcactagtgtggggaatgg

SEQ ID NO: 55401 - DNA, 216 bp, Gossypium hirsutum
  Clone ID: uC-gsronu33B130f08b1
ttttccacgcgtccgtccacgcgtccgggcttattgctgtaaacaaatgggttagtgaggctctttgggaacttgtttttggattctttttcaccattatagagccaatgagagatgtggaaaaaattgatgatagcctgcacagtttgacaatgagaaaaaaaaagaaaaaaaaaaaaaaacaaaaacaaaaaaagaccaaggagacttacacag

SEQ ID NO: 55402 - DNA, 187 bp, Gossypium hirsutum
  Clone ID: uC-gsronu33B132a08b1
agctcctgtaatatttgtgaatgaaataccatgggttgttgaaccaatttatttagcacagtggggtacgatgtggatcatgatgcggagagagaaaagagatcgtcgacatttcaagagaatgcggtttccaccatttgatgatgaggaacctccgttagactatgctgataatttgttagatgtc

SEQ ID NO: 55403 - DNA, 259 bp, Gossypium hirsutum
  Clone ID: uC-gsronu33B132e12b1
tttattcaccaaatcactttgataatggactgttaaggttctacatggcaccgatgagcgccagccggagaggtgggtcaggcaaaaccagggcaagcaatgcacattctattgcaaggaccttactaaggttgtactgaattttagattcataagttgtttttctttggtttaatgttaattttgctgcacttgttatgtaaccaaacatgcctctgtattttggtggttggttagattaaaacaaaagcatttcttg

SEQ ID NO: 55404 - DNA, 225 bp, Gossypium hirsutum
  Clone ID: uC-gsronu33B132h09b1
tcgtccacgcgtccgcccacgcgtccgcccacgcgtccgtagactttggagcatgtttgtacttgtttgttttaagtagatatgatttttatgtcaagaacacgcaaaaaaggataaaggagagaaccctatcagcctatcaagaattgtatttcttggagccttttagcaaattataaccatgcacaaaagttatccagtgcttatatttatggcttttctact

SEQ ID NO: 55405 - DNA, 359 bp, Gossypium hirsutum
  Clone ID: uC-gsronu33B141b01b1
tctcacgcgtccggtgttatttgatgatagtgcttaagagtttgaatgagacatgacacatatactcacaagttacttaagtttgactacaaaaaagatcgagttcagctcgatcattatcaagttgggcttgagattgctttgtggaactaatcaaattcgagtatcctaatgctttattcaaccagcttcttttgattgttttgttttcttattttgtattagaacttgagctcgaagtcgagtccgatcattgggtatcggctttcaacttgtgcttgagctttttatagcttgaactcaatttatttatttttcttttaaaaaaaaaacaatttaatataattaaaatttatttg

SEQ ID NO: 55406 - DNA, 369 bp, Gossypium hirsutum
  Clone ID: uC-gsronu33B141f11b1
aaagttgtgatcaagccaccccaaaaacagaaggagaagaagaaaaagccaagtcgaggatgtctaataaatgtcttctgcgggaggaactttgtgcctgctaaatgagacagattggcttcagtcaaaaatcaaatgcttgtgttcctcttgctacctagagattctttttagacaatcaggatcaagtcggcttgtttatcatgcaacgcttttagcatacagatttatttttaatcttacgctttaattcggatgctaatttactatagtgatttcttgtatagagttaaagcttaatggacttgtggttttatgcatgaaaaagaaaaacacaagtgtgctttgacttatgtcatcttacaattg

SEQ ID NO: 55407 - DNA, 482 bp, Gossypium hirsutum
  Clone ID: uC-gsronu33B141h10b1
gcaattagatccgaccctaagacctgatttttctgaaattatagacattttgcgacaaattgcaatggaggttggagacgaaggcgagaaccaccataaagtcgacgaccaccaacgtaaagagaaatctgccggcggattcttttctgtccttagaagaggcagccactgaggtaatatatatatatatatatatatattatacagttgatgtttataacctgatcagccatagcctttttgaactatgttggccattcccagcattagcactgtatagtatttaatcaagttttatgattgggtttttgttcattttggtatcgataatttcctcatttttctctcatgacaattaatgttcattgtttacttcccattccccttttttagctttaatttattaaatttgtaagaagggatgataaatgaggtttgtaacatgatatttctgccatggccttatagttcaatagtgattt

SEQ ID NO: 55408 - DNA, 285 bp, Gossypium hirsutum
  Clone ID: uC-gsronu33b023f12b1
ttaattttcaattaaggtttccatggttctggggctagaaaagtaaatgaggggcaaaaaaaaaatacatagtttttcgccataaggcattccttatgtcttcgaccgccatcactccatcttctcctcgtcatagtatcctttttggaaaaattacatttatatcttatgctcgttttttactcacaagaattctaaaaaataaaaataatcctacatagagattacagtctatgatctatttcttaagaaccacaaccttggaaaaaaaaataattatataac

SEQ ID NO: 55409 - DNA, 158 bp, Gossypium hirsutum
  Clone ID: uC-gsronu33b025g05b1
ttttctgctaatttcatgtacaatattgaagcggctgatattatttgcccttgaaattccaaaactatataatgacaacatttcttacaagtgtgcttatatatatatatatatatatggaaaaacagtctcttttcttgtacatctttttggtattt

SEQ ID NO: 55410 - DNA, 267 bp, Gossypium hirsutum
  Clone ID: uC-gsronu33b112h03b1
tcctcacgcgtccgcccacgcgtccgcccacgcgtccgaagaaataaaaagaacacctttcgaaactttctcctttcgattctctgatatctcgtttgtattcgttgtgttcaatcaatctttgtttcttccccaaaaatcccccttgacaaattggtttcgattcggttttataactgattacagtagaaaaaaatcgctactatttctcagttgctgctgctatctttcgctgtttgttgtgctgttttcttgctgtttgcaggt

SEQ ID NO: 55411 - DNA, 381 bp, Gossypium hirsutum
  Clone ID: uC-gsflnu33B071a06b1
ttatagaactggtaatgtatgggaggtatgatgagcaaatagatggctttgtttacaaaatgcttgatcagttccaaaatcactataaaaagttggattctggttttctgagcaagatccccaaaggaaagttcaagcttaagaaacatgactaggagcatttggtcacttccattagatccttagagtttctgtatcacatatatacatcaaacacttgaataaatggtgttatatttttgtgaaattatcagtttgaatattggaaatatctttgccaacctcaactgctgggtcgactaatgatctgctatgtcacattgttactcaaacttaggtgtcaccgttaatatggttatggatatgtttaatcgttctttt

SEQ ID NO: 55412 - DNA, 297 bp, Gossypium hirsutum
  Clone ID: uC-gsflnu33B071b04b1
tattggacccaatgcctcaatcaccaacgcccgatcttcttagcatttaaagccctgtttgtttttcttcttggaggaattggcttgtgctctaagtttcatgaactacgctagtttgttgctttgatttcttttattaatcttgggcgggagtttgctctaactttaaggtgtttgttttaaggtttttcttccttattttgtacagtaggaggattggtggggggtaatttctttatttttttttttcatataaaagtttgtcttcatcaagatgtactgctacttctactggct

SEQ ID NO: 55413 - DNA, 472 bp, Gossypium hirsutum
  Clone ID: uC-gsflnu33B071c10b1
tcgcccacgcgtccgcccacgcgtccgggtccattccttctgctagggggcgaggaaatcctcgtagtggttttgtttcacgagggattcagaggaaagatacgggttctgctactcagcaatcaaaggtcagagctccagcacaggcctatgttgtgcggacctatgaagagggtgatgctacagatgtcatagcagctattgacaatccggtttcttcaaaagcgaaggaaaaagctaaagtcaccgacgagtagtttgaaattccctgctaggtatattttgagattttgtactcagagttatcagcatccaaccgacaaatcttgaactcaaccaagttcgtatattttgttttgtttcaagttggcatgtacttggtttttagtaaagtcatttggctatagatatatttttgtgacaaaaacaaaataacttttggttgctataataatattattatcagttaatt

SEQ ID NO: 55414 - DNA, 150 bp, Gossypium hirsutum
  Clone ID: uC-gsflnu33B071d05b1
tttttcacgcgtccgtctcattttatgattggctagggacattattgctcggctgtctttctttacaccattcattctttttgtcattttttgtcatctcaagtttttcatggccaaaagcagaatgaatgtttcgtgggatttaacttc

SEQ ID NO: 55415 - DNA, 226 bp, Gossypium hirsutum
  Clone ID: uC-gsronu33B051a05b1
tcccgcacttgatatttcaaccccgcgcccgcaaaacccgggggcggggcaagattaaacagcaacaaccccccacaagcaaacaaaccacaacaccggccccgcgaaccccccccaaaaccccccaagcagacgggaaagaccgccaaggcacacaccagggaaaccgcacgccaagagagaaccagagccaccaaccagagcgcacaacaccaggggccgacgg

SEQ ID NO: 55416 - DNA, 210 bp, Gossypium hirsutum
  Clone ID: uC-gsronu33B081a03b1
ccctcgcgtccgtccacgcgttcgtgtaataagaaagagagattatagataaaagaatataaataatagataactgtaatgatagaaaatgggagtccgttcttggggatcccaggtgactttcggggtcttgctggctaggtgggcttcctttgtgggagccatatttattctgggggccgggtgtttccaaggtctttttttggtgac

SEQ ID NO: 55417 - DNA, 212 bp, Gossypium hirsutum
  Clone ID: uC-gsflmaxxa015a07b1
ctcggtcggtggtggtggaggggcacatggaggtggatatggtagtggagctgtgtgccgttatccgcccggtcaatggggtaccgagtttacgaaattgttattgtgactagagaaaaggacagaaactttttcgataaggagattggcttttacttaaaattttttattggattccttttgttaatacacccttccattgacatcaaggc

SEQ ID NO: 55418 - DNA, 113 bp, Gossypium hirsutum
  Clone ID: uC-gsflmaxxa027a12b1
ttctttatatctaagggtattatgattaccttattctactattctgtcatattacatataatgatcaattcatatcatgactaggcaaagtctcaagccataagaagtcacac

SEQ ID NO: 55419 - DNA, 218 bp, Gossypium hirsutum
  Clone ID: uC-gsflmaxxa045b01b1
acaatatgatcaacaatatccttcagatcaggaacagttgcagcaagatgaccagttttagcatgctgctggagccccgcatcacattcaatattacccgcctggggctgagccaatctccggttattattttgtaaaatcctaccaataacaacttggccaataatcatcctcaattggaccagaaaaagcccaggcctaatgattcccagtggcac

SEQ ID NO: 55420 - DNA, 214 bp, Gossypium hirsutum
  Clone ID: uC-gsflmaxxa045h03b1
acacgtcagttcaaacgtacgatggagcgaccgggactgagacaaaatgagtgaatatgggctgcaatgggtgcttccctgacagcgctgtaacctgagtttacaccagatctttcttcagcactgtaatgagcgttaacacactacctggtgggtagagcggaatctgtcaccaaatgctaggctcaagatgggacatttatctaccaatatt

SEQ ID NO: 55421 - DNA, 280 bp, Gossypium hirsutum
  Clone ID: uC-gsflmaxxa064d05b1
ttcgtctaactctaaggttttgattgttaagtgcaatttgaagacacgttaagatggtgatgccaacagcaatggagtcctacataaacctaacatcacctatcacatacaaaaacaatcatttcctttatcattatttcaatcacttcattaaattaataatgctactactcacctaactattatacatactatcaacactgcatatttaggtcataacttatctcatatatccacctcatattaataaattcataacattacaaatagtttacactca

SEQ ID NO: 55422 - DNA, 222 bp, Gossypium hirsutum
  Clone ID: uC-gsflnu33B022f09b1
tactagatatcttatagatagagttacctaaattcaattgactggccgttgacatacaacggactgactggaaaatccctggacctacctaacttaattggcttgaaatacatctttctttagccagctggcgagatagcaaagaggcacggaccgatcgtcctaacaaacaggcgcgcagactggatggtgaaaggcacgctgcctgtagcggtgcattaa

SEQ ID NO: 55423 - DNA, 158 bp, Gossypium hirsutum
  Clone ID: uC-gsflnu33B025g01b1
acattctctacacatcgcacacagagagactgggggggattttaacagaaactgcccccctcccacctcaccttcaggatagctggacccctaagtgagcatcaccggcacaagccaacgcaccataggcactctgaggcgcaacgccctcgacctac

SEQ ID NO: 55424 - DNA, 219 bp, Gossypium hirsutum
  Clone ID: uC-gsflnu33B058e06b1
gtttcttttccgaaaaagcaaacaacgataacgggggggggttattctaaaaacgacgaggaccaaaacagacgagggacgcaaatttatgtgggacttaagaagggcctactaagacgaaaagaagcccaatcttgacacagccaaatgctccactgacaaaaagaacaacacacagatggagcagcgcacaggaggatccacggattaaaggccctt

SEQ ID NO: 55425 - DNA, 173 bp, Gossypium hirsutum
  Clone ID: uC-gsflnu33B062b12b1
ttgcgaagttatccgtcaggatagctggatcccttagctagttctatcgggcaaagccaatgattagaggcatcgggggcgcaacgccctccacctattctcaaactttatataggtaggacggttcatccaatttcaagcttcattagacccgggtttcttcttcctttttt

SEQ ID NO: 55426 - DNA, 118 bp, Gossypium hirsutum
  Clone ID: uC-gsflnu33B073b05b1
ccaagggacgtgatttgccaggtagctcgcaagtataatgctgatgcgcttgtatatgggaagccatgtctattgtcttatatagagggcatttttattgtagtgtaagtaatatatt

SEQ ID NO: 55427 - DNA, 405 bp, Gossypium hirsutum
  Clone ID: uC-gsflnu33B095f09b1
tttttatataaaaaaaaaaaaaaaaaaaaaaaaaggaagatttaattaaaaaaaaaaggggtggacgatttaggggatcctggtggcccttcgcgtgcttgcccgttatagcttttctatggtgttccttaggttccttttcactggctcgtcttttccattgtttcggcctgggatatccttggcgttccctgtcttttccggccttgttgtccctcccccttccgtcctctgtcattttatttttctctcttctactttcctcctctctccgccttctttctcttttttttttttttttttttctcctctctctccttctttttctctttcacttttctgttctcttttcctctgatttcctttctctttttgttttccccctttctcttcttttcttccctc

SEQ ID NO: 55428 - DNA, 209 bp, Gossypium hirsutum
  Clone ID: uC-gsflnu33B095g07b1
atattatatttgatagagaaaacttaaaaagagggggagggtttgactaaaaggtggggtgataaactttatgatacacaggaatgcgggtgcaagcatgtatttatagtacttaccctgtgtgtctatctctgggtgtcttttggcttctctgggctttgttttttcatcttctttggttttggttctgtgcttggccttgtttttct

SEQ ID NO: 55429 - DNA, 232 bp, Gossypium hirsutum
  Clone ID: uC-gsflnu33B108d06b1
ccggtctcctgcattgcggcgccctgcttgtggtctcgggtcacctaactccagattctctggccgtcgtcctacaccttcgggcctgggaaatccctggcgttgcccacctttgttcccttgcggttcgtccccctttcgccggttgccgtattagcgaataggcccgagccgatcgcctttcccaactgctgccctacctgagtggccaatgggacgggccctgtaccgg

SEQ ID NO: 55430 - DNA, 182 bp, Gossypium hirsutum
  Clone ID: uC-gsflnu33B134h05b1
cctactcgttcgcccacacaggcgggatcatgtggggaatttttatttaataatggacgacaattgccaagataaatatgccggtcgggaactgggataagtgccggacatgcgccccaatgatgcttctgatgcaagaaaagatctacgacgaattggggacatgaaagaggcagagtaac

SEQ ID NO: 55431 - DNA, 323 bp, Gossypium hirsutum
  Clone ID: uC-gsronu33B004h03b1
tggcttttgacatgggggttgggcttgatgtgggtggggtttatttataaatgtgggggggagaattcaaatttttaaaatataaaccaaaaaaaaaattaaattaatgtttggcattggtttattccaaattaatatattctcactattaaacttatccaataaatactctattatgttaatttttataaaaattaaatttttttgacccattaattttaagctattttttataattttttcaaccttaaaccctatatttttctaatggattatcatttattatttgggggcccctttttttagaacccaaaattttacct

SEQ ID NO: 55432 - DNA, 122 bp, Gossypium hirsutum
  Clone ID: uC-gsronu33B005g05b1
ctctcgcgtacgaggacgcgtggtccgacgcggggagttctttaatactctgtgtggttctagaattcatttgtggtctggaagtttaaaacggttcaggcccttggccccttttgcccctt

SEQ ID NO: 55433 - DNA, 333 bp, Gossypium hirsutum
  Clone ID: uC-gsronu33B007g07b1
acccattccaccccatttatcttttcacttcctgttcaaatggtttgaggggaatgattatattgtttggtttttggacaaacattccacttacaaactataagttttgaagccctatagcttatcttatatgttactccagacttacttttgagtgttttacaatctggaatttaaccctggttcttgaagcaattgaattgtgcctacccgtgagtttcgttctcccgttattatgttaatccgaccttagccaaacccaatatattcctttcctttttttccttcaatgaatgaaaaaaccatgtcttatttttcaataaaaaccgtatt

SEQ ID NO: 55434 - DNA, 271 bp, Gossypium hirsutum
  Clone ID: uC-gsronu33B009a01b1
aaaaaaaaaaaaaaaaaagacacaataagaaaaaagacgcctttacacacacccaacggggggtcccaaggttccttgctcacgcacgcgaccttacaacttttttattgttctactctattacatatcaccggccgccggccgctatttcacaccctgttaaactcctaaatccccaccattttaacatttttgcagccttgtcccactatcccccttttgccggtttgcctttttaggtccaaaagctcttttcccttcccaccattcc

SEQ ID NO: 55435 - DNA, 181 bp, Gossypium hirsutum
  unsure (1)..(181): unsure at all n locations
  Clone ID: uC-gsronu33B009h08b1
ttaaaaaaaaaaaccatttntgaccccctagagaaaaaagcgcgcgtaacacaccaccaagagancagaacaccatatttgaggggaggaaatgatgactgtcacctcaaaagcctatcctgctgagcttcctattggggggacaaatcttcctttttcactcggttcttctaccaatgac

SEQ ID NO: 55436 - DNA, 252 bp, Gossypium hirsutum
  Clone ID: uC-gsronu33B014e11b1
gccattcaaaactggaattgaaatgactagaacagccctctaaaaaaaaacgggcgggtctatctatggtggtaactatattttccccccccctatagataagtgtttttattagtgagaagcccaaaactcgcccgctgtcccggctgtgcctccaatctctgggggaaacagggggggatataaaaaaaaaactcgtaacgggccccttcttttttttcaggttgtggatttgtaataagggcccccccc

SEQ ID NO: 55437 - DNA, 867 bp, Gossypium hirsutum
  Clone ID: uC-gsronu33B029f03b1
cctacgcgtccgcgacagtgtagatcttgagaaaggtcatgctgagtcacaggttcaggacgacgggtttcaagctgaggttgagacattagggaagattaggcacaagaatattgttaagttatggtgtttttgtacttcttcgttattgtatgcttttgttgtattatattattcttaattttttttttatttttttgttattttctcttatactattattctttctatttttcttattttctttttttattttctttatatatattttttttttttttttttcttttttttttttatttcattttcattttttatatatattttatcctcttattcttcttctttattttatatttctttatttatttattttcttttttaattttttctttttatatttttattatttcttatttcatttcttactctcttttatttttttattttcttctttattatttttttattatttttttattttttaattttatttatttcttatttttaaaatatttttatttttttctatttctttttttctaatctatatctatttttttctttttttttatatttctattttattttctttttattctttttttatttatttctcttattttcttcttttttttattctttttattttttttttctttttttttttctttatattcatttttataaatttatttattattttttattatttttttttttttatatttttctattttttatttctttatttattactttctttatttaatatttcattctctaatttttataatttattattttttatatttttattctttattattttctttttctgttttattatttttttatatttttctt

SEQ ID NO: 55438 - DNA, 224 bp, Gossypium hirsutum
  Clone ID: uC-gsronu33B044g07b1
gtgttttgaagagcaccggacgtcgcgtggtgtccggtgcgcccccatagggctttgaaaatacgtaggacctattgcgcgtcggacactgtcgtactcataaccgtataaggtcttcaaggtgaacaggctatggtcaatggaacaatgtatgcaagggaagttggagaaacggatccggaacctagggataaggattggctatgagggctggagcacggggg

SEQ ID NO: 55439 - DNA, 240 bp, Gossypium hirsutum
  Clone ID: uC-gsronu33B060h07b1
gttttgttttctttaacgcgtacgggaaaagtcggggggggtttctcttaatggtcccacttcccttcgtttccagggttgggttaatcaagcaacgaatttggcccgttttatcatttaaggagtcttgttctccccttccattacgtgggatcgaaagctcgatgtcttattttttcaccaatgagtggacgtattgtcaagtaccacccaaggttatcgctcagattcggctgcagc

SEQ ID NO: 55440 - DNA, 317 bp, Gossypium hirsutum
  Clone ID: uC-gsronu33B062d04b1
tatagggttagctggtacccccgcaggtaccgtttcctggaatctcccagggttcgacaccacagcgtcccgctttatttttatctcttaaacctctaaacacccaagcgggggggagattctcatattagcaagacgaggggctgtctatcggacctcacaaagaccatcatcctgcccacataacccccatggccctttcaatttctccccccctggaccgaaatccccaccaaaaagggccaccattcatcgcaacgcaatacccatggtcttcagtcattaaagagatccccaaaaacgccactcccttgaat

SEQ ID NO: 55441 - DNA, 247 bp, Gossypium hirsutum
  Clone ID: uC-gsronu33B079g03b1
cgcccaagtgccacagcatgatgatggaccttgccgctctggaggcgcttaaaaaacattttcgggtacacaaccccacaacaaagacaaggcgggcaccaaagccaatcgactcgccacatgctcacaaagccggaagcgggaaaaccctggcccaaccgaacaaagacgggcagaacaacaaggccttgtagccggcccccgcaacagcgaaaagccccgcaccgaacgaccataccaacaaccg

SEQ ID NO: 55442 - DNA, 101 bp, Gossypium hirsutum
  Clone ID: uC-gsronu33B086h04b1
gtctaactctcggatatatcaacgacgaatatttggtagatttatattacaaggatccactgtcacaaaattccatttccacacccacaaaatctctctct

SEQ ID NO: 55443 - DNA, 346 bp, Gossypium hirsutum
  Clone ID: uC-gsronu33B130a01b1
tcaacaaagtcctggctggaccgctcgctgctcttggctattcacctgaaaggcaatgtgcagggtcaacgcatattgcgaggtgacgctttactcaaacctataaatgcttgtcattggagagaccaaaaccatttgctggtaacggttgttgaatttggaactttttaagcatcagctccactaggcagatggttataactgttgctacaagggtaattccatggccatgatagttgaataatatacacttattgaagcaagtagaccctatatccaaataaaatgacctgtccatttgaaaacacctatgtaaatggtaaacccttggggttgccctctttaa

SEQ ID NO: 55444 - DNA, 244 bp, Gossypium hirsutum
  Clone ID: uC-gsronu33B130a12b1
tttaaaaaaagaaatatgaacaaaaaaaaatgccaaaatagcaaaaagaaatacaaaaactgacccaacgtggagtcaacctcacacatgcttcaaccgacttacctgcacctgacgggtcccctaccctaaagctcccggcattacttgcgggaacctgcatcctaatatttgtggtatcagcgggccctatacagaaccaaaagccttctgtaaccgcaacattgctcggaaaccccacatg

SEQ ID NO: 55445 - DNA, 468 bp, Gossypium hirsutum
  Clone ID: uC-gsronu33B130c08b1
tttggattatcatatcggtaatgatgaggaagttgatgatgatgatgatgatgatgatgacgatgatgctgaaagctaatgctgtctgccgatctgagagcaagacgaatggtcagatgctccgagattagggagaaactttcttctgaaagcaataggggtgtaaatttttacgttgatgaaatagggggtcaactcgtattggagccaatcatccgtgaattgccggctttgcaacaaaactccaaatcatcgaacaatctccggaggcctgctttacgtgcactgttaggaatgtgcaggtcgtgagctcagctggttaaaactgctgctgtaactgccaatggtgtatcgatagaccttcctcttctcgatgatccagactcggaaataagagaagttgccagaaaccttctcttcttattttctcaacacgaatcacaaggagttgtagaataccttcttatg

SEQ ID NO: 55446 - DNA, 398 bp, Gossypium hirsutum
  Clone ID: uC-gsronu33B130d05b1
ttttagagaacaggggctgaatgaaatactactgcctgggtgatgtagatgcatggtcaactaagggagacgagactgagacacagcattccagtcggactctgtgcaaacaaacagggctgaaccggcaccatggccctgaccaattctaactgtaccagtacgatcgtgtgtgagttccgatcactcctctaggcatttgagaagacatgtacaggcttacctaaacgcatacatgccgattgtggcgcggtgcatctttgctggaccggactactctggggggatggcaccaaccacttgatgacactgagaatgaacagtcctttcgaccaccgtccgccggttgggatgaggcgaaccatgaggcattgatatctgaagtgcgctgcgagtta

SEQ ID NO: 55447 - DNA, 528 bp, Gossypium hirsutum
  unsure (1)..(528): unsure at all n locations
  Clone ID: uC-gsronu33B130f11b1
tcgcacacgcgcgcggccacgcttccgcttataccttacacgcttgcacggatgctcatgcttgacgcgcatagggagcgcgagttttaaggtacaccatggttcacaatatgatgcgtaatcatccggcaaggccattatcatatgcggttcgctacgatgagcatgcagttcattgcccatgtattaatagatataaacatcagtgatcaagctctcaatgatctccaccttcggtaagtcttacatgtacacagactccgagatcgaacccactaatgacagctacttaaacgaaaccagatttctgttattgtagtagcctacctccgctattagtttccactcctagtactgtgtctctcccgaccgttagctccccaccaccagcttctcctcccccggctacttcacctcccgcaacttccccaccggcttctgcaacttcggctaccccaccacctgcttttccccttctgctactcctnctncagctaccccaccaccggttcttttggtttttctcct

SEQ ID NO: 55448 - DNA, 212 bp, Gossypium hirsutum
  Clone ID: uC-gsronu33B130g08b1
ttttggacaatctaggaaaagagttgaaaccacattgatactattgatactagaatgatcaatgaagaatgtttatttttgcttctctgaaaaaaagaaagacgagaataaaaagtataactacaaaaatagaaattgatgatgtgctggaaatgaataaatcagagtttaatcttgccaaatgacacgtaattttacaaatacaaattgag

SEQ ID NO: 55449 - DNA, 160 bp, Gossypium hirsutum
  Clone ID: uC-gsronu33B130h12b1
aaactcaccagttctacctaaaccacccccttacttaaggacattatcttataaatcattcctaaacctatctagattttatagcgaagatatgttcttaacaactatatcagcatacaccctaacacaataactgattaccacaagtgtaaaggcaaca

SEQ ID NO: 55450 - DNA, 435 bp, Gossypium hirsutum
  Clone ID: uC-gsronu33B132a09b1
tatgtatctcatatttgggtctcgaaagtgggtgaatacaggtgtaatgagtgccaaagcatgggataggaacctgtgcagtttacattgaggggtaactaatcgctgtgggcatggtcggtgtgcgctggaccatgacgcaggataatgctccttcttctagcaagtgtgctactcgggagcatgggctctgcatatgctcggttaagcactatactgactatatgctttcccatgatggcatttttaatggctatgtggggggatggcattaaaagcttttgaagactatatgacatgggctacccttaaaatcattctaactgtagaggaggagagacgccgctaagcttcttggagataatatttgggtgttagcaagctgcaaagtctgtatgcctaaagaggtagatactttgctttgctttttgggct

SEQ ID NO: 55451 - DNA, 328 bp, Gossypium hirsutum
  Clone ID: uC-gsronu33B132b06b1
gcgtttacgcgtgtgtggtgatcgaattattcgctgtggacgtgccagaagggaacaccaaggatgaaacttgttactttgtggaggctattatcctatgtaatatcaagtgattaagaaatgtttgatagaggatggtttagttcgaccaaacacaatctattgacgggtgctagatgattaggagcaattgtgcggactactaatatcgataggactaacgagattgcacattactttgtgcatccgatgcctttcttagcttttccttgtttaatgccattgtagttaaagtataatctgtgaggtttcaaatacttaatataag

SEQ ID NO: 55452 - DNA, 418 bp, Gossypium hirsutum
  unsure (1)..(418): unsure at all n locations
  Clone ID: uC-gsronu33B132d09b1
tcgtggacgcgtgggttgttgtgccagctgagatcttcccttcaagattgcgatcaacgtgtcacggaatatcggctgccgctgggaaagccggggccatcgtcggggcatttggattcttatatgcggctcaaagcactgatccggccaagaccgatgctggctacccaccaggcatcggtgtccgatactcacttatcatgctcggggtcatcaatttctttggaatgctattcactctactggtgccagaatcaaagggcaaatcacttgaggaactaacaggtgaaaatggagatgaaaatgatgaaaaacagattcaaatggatccttcaaggactgttcccatctgattttcaccactaatttgaagttcttatcaagtttcatattggttcctagntacttttggatcttt

SEQ ID NO: 55453 - DNA, 439 bp, Gossypium hirsutum
  Clone ID: uC-gsronu33B132g04b1
gtaggtggtggtagtggtggcggcggagctagtgcaggtggatatggtggtggagcttctggatatggtggtggaggtggagaaggaagctgaactggttgtgcatgagcagcaggaaggttatagcacgagactccaaccaaaaatcttggtgacacactcgattatatacaaaactgaatgcaaacaacaagttcgaccggaccgatttgcgacaagtaatcagaaagaaacccaacttgctcgaagtgctttatcttaacaacaaacaaactgggagtttacaatatgagaacggcaacttgagtcaagccaactaaaatcaaaataggtcgaataaagaaacagggactataccatactcagaccgggtgtttaaaaaagaacgatttttttaactaggccattaatgaaatttatgggtaagtaccggaaaacc

SEQ ID NO: 55454 - DNA, 141 bp, Gossypium hirsutum
  Clone ID: uC-gsronu33B132g12b1
taatggatcactagcatcacatctgggatgcatgccttgccaagagttacaacttagcttgaacacacaaggctcccctaggcgtagcccgcaacgtgtgatctgagacgcaacttaaagtggcgtaagtcttcaccatcc

SEQ ID NO: 55455 - DNA, 207 bp, Gossypium hirsutum
  Clone ID: uC-gsronu33B132h02b1
ttttaaaaaaaaaaaaaaaaaaaaaaaaaaaaaaaaaaaaaaaagacaggcctattgcaatatagaaaacaaaaataaccatccaagccatccgatgacatacatatagtggcgggtcacttaaattgacttgccttcacgtcccattacaaggactggactggctatgccgtggcgaacctaattaaattgcctggcgggccattt

SEQ ID NO: 55456 - DNA, 427 bp, Gossypium hirsutum
  Clone ID: uC-gsronu33B141b10b1
ggtgtagactgtggttgaccatgccctgagccgctaccttggctcacagatgcttcataaataccgagaacaaattctaaacggcagggcccaacaggatgggagaactcgatcacgggacgcctatggatgtggacagcatctactacaggaacactactggacgaccaggactggttgattgaggatcaccaactggtgttacagacagagcgaccggagccttatgctgggaataggggcatgagccaacactatgtgtgagaggagttgttacgggcctttactgtgctctaatggaccaagactctcactggtcgcacgggatagatcaggaggctacgcaatcttgcagacctgcttaagtgaattgcctcgtctaagagccagccgagagtgggcgtgtaaagggatggaacttgtttgt

SEQ ID NO: 55457 - DNA, 476 bp, Gossypium hirsutum
  Clone ID: uC-gsronu33B141d09b1
aaaaaaaaaaaaaaaaaaaaaaaaaaaaaaaaaaaaaaaaaaaaaaaaaaaaaaaggaaaaaaatataaaaaaaaaaaaaaaaaaaaacatgaaaagacgaaaatattatttttttatagctacatatatttaaatggggggggcctttttttttcacaatggggggtgccctctctttgccgccctttttttttttgttggggaaccttatactctttgtctggggggggagttataaggatggggccttgtcacttttttttttatttgctgttttttaattgttggtgggtatcgccctttccctctgttggttaaatattacccgttgcgggtgtgtgttttcttttcaaagggtccctttttgtgtgtggtaattgagcgccccctttttgggttttttaccctttcttcctggtggtgttcctcttcttttggcttttatttttttggggccttcggtcgcggttttttt

SEQ ID NO: 55458 - DNA, 171 bp, Gossypium hirsutum
  Clone ID: uC-gsronu33B141h02b1
cccacgcgtccgaaaaaaaaaaaaaaaaaaaaggaaaaaaaaagaatggcggaggatataaaagatccaaagattacatcggccggcctgctgactgtggtacctctcttatggccccacctcatgcagggttaaatgtgcacattttttcagcctaaagactaggaactg

SEQ ID NO: 55459 - DNA, 109 bp, Gossypium hirsutum
  Clone ID: uC-gsronu33B156d03b1
gatcttgcattgatccacacagcgaccttagtcttacaccgcacatcacgagaacagttagaagcgcaaaatttaaaaaccgtacacctctaaactattcacatatcta

SEQ ID NO: 55460 - DNA, 355 bp, Gossypium hirsutum
  Clone ID: uC-gsronu33b023a02b1
ttgttctccgtggcgctttcatgagcgatgaacctgtgggtcttatttaggggcgcagaagggcgggcctaaaatacccaaagcccagcttatgatggtactttttcagccactccagacccgacaattgggaacagtacctacgaaccaataagatgccggcgtttagattgtgaagcccttctaggtaaactatctttagaggatcgatttcctttttgatacctctatgtgatatttcttcggttatctcagcctgaatggaatggaccacccgcgtggtactcctttaaaagcattttgggccattgcactgagaagcttatacgaatacctgttaggttttccttcttgg

SEQ ID NO: 55461 - DNA, 231 bp, Gossypium hirsutum
  Clone ID: uC-gsronu33b023a03b1
tttttttggttgttgaggtagtagattcattgggtgatttgagaagtgaatgtgggacgcttaaaaaagatgattcttcgcgtttgcaacagcatagttctttttccttagcctcaccacaactggcatgagccatattgggagcctggatgctggctactggctatggctcctgtctcatcttaagtgtcttgaaaattctataatatataatgctgagtggattttctt

SEQ ID NO: 55462 - DNA, 221 bp, Gossypium hirsutum
  Clone ID: uC-gsronu33b023b08b1
tgtactcctgggtttcgattcaaatccggggtcttattaatggggttttgagtgtaacaactcattaacccaattccacacttttacccacaaaacctctcttatagccagttatttcctcttgggaacagcctccggttgtatcttcctcactctctccctactgtttactcccttctctatgtgtgtctcttctttatccttctctacgccatcaccat

SEQ ID NO: 55463 - DNA, 259 bp, Gossypium hirsutum
  Clone ID: uC-gsronu33b023c02b1
tatctttcttgcgatttcctcagcctctctcacgcttccttattataaccaattggttggtagcaccttccaaagtgaaaggcgaaagcatctcattcgtaggctgtcttcaacttcttgttttctgtactttcgaggcttgcgtagggatatttttggccatcaattatgaaaatgtgatcccaatacttcctctaggaggctttgttcatcatcatgaactttttgcccgcattcttctcaacttcttcttcttcat

SEQ ID NO: 55464 - DNA, 371 bp, Gossypium hirsutum
  Clone ID: uC-gsronu33b023c05b1
atcttggatgcctttttactgcacttgcaggtggagacatataacttaagcaacccattcaaccacagttgggggtggtaggttccttagcaaccattatctatttatgatcttcttgtattaactcttttgtttgtcgtttatattttatcctttttttgttttttttatttttttctttgtttaactttttttttttttttttggtaaattttttgcattttttattgattttttcttatcttcatatttctttattgtcatttttcttttactttttttgtttttaaattcttttttattatcttattcttttcaattcattaatttttttcttccttcctttttgtagtatttattattatttcttt

SEQ ID NO: 55465 - DNA, 184 bp, Gossypium hirsutum
  Clone ID: uC-gsronu33b023d02b1
tttttatcttcccggaagccattgctctcgggggtgcttgtggcatatcgacggcaagggatcggattctggcagcagccatgaatgttctggctgtagtgacaagcacaatcgccatttcttctaacatatatagccttataacaggaaatcagtcaagacgtgtatatagactctttttcgc

SEQ ID NO: 55466 - DNA, 169 bp, Gossypium hirsutum
  Clone ID: uC-gsronu33b023d06b1
tatatacttgttggctgaatatacatattggtgtgtttttagaaacatccacgggtttctacataaccgacgaatccacacaaccaactctcaccttagaatacacactttgtgaatacgccctccttaactaaggagcttgcaaatagcaacctcaccaacccttact

SEQ ID NO: 55467 - DNA, 384 bp, Gossypium hirsutum
  Clone ID: uC-gsronu33b023d08b1
tctttcacgcgtacggactcattaaacatgggggtatttttagaaaagctggcttgcattttgccaagcttatcttatttataatattataaaggtacgattatttttaccattttacaaaaaaagctccataaatgttcctctcttgagtacacccaccctttctctctcgcttgtcttttcccctacctttcatttgcttattcaaacgattgtgcaaacttattaacgttccttataacaagaagaagatgtagaagcatagctacagaacaagtggaagaagaaaagaaggaaaacatttttcagtgcttcatttagatgatactagcaggttgcacctagaaacagaataagctgggccttttattggcccttgaattg

SEQ ID NO: 55468 - DNA, 251 bp, Gossypium hirsutum
  Clone ID: uC-gsronu33b023d09b1
tttggccattatacaattggcaaagacaggggggatctttggtgggatcgtagccaaaaacttgctgataactgaactgggctccaaggcttcttggtttacaatgctgttggtggtggtactggttctggacatggatctctcatataggagcgtctctatgttgactatggaaagaagtctaaacattggattcactgtctatcccttaacctaaggttttctacatcagtgcgtagagccttacaaca

SEQ ID NO: 55469 - DNA, 192 bp, Gossypium hirsutum
  Clone ID: uC-gsronu33b023e06b1
ttttacccccttggttggcaaaatcaattgtgtgactttaaaaccttaccagctaatttaacataattcacttaacatgtctaccaccactgacacactacttaagccatttttactttaccctcctttcttaaaagcattgccattaacaagatcaccgaccactacttcatttgaagtatccccactcat

SEQ ID NO: 55470 - DNA, 261 bp, Gossypium hirsutum
  Clone ID: uC-gsronu33b023f02b1
ttgtattcgatcggatgaccccattgaattgggggaagacaaccctttaacctgccgtgaaacaaaagctgaaagctaaagaactggctgaagatgatcttacctaagagagctcttcaacgagagaggcgcctatagagctcactatttcatttaaatggtgattgctatggtgaatgcgtctgtgtacaattatgctcccaattctcttccttataacaatcattatcacaaatgtttcacttgatgggccttaaattt

SEQ ID NO: 55471 - DNA, 282 bp, Gossypium hirsutum
  Clone ID: uC-gsronu33b023h02b1
tgttttctattgccggattttaatctcacgcggtgcgcgtaaagctatggtagggggcccctcaactgcagccgccagatatgaacatctgcttaggagttagtgcttttgagcaccactgcattctggccctttccttgacccttttttacctacaacttaattctgacttttattacaaatttttactcttgctctcttataactgacttgaagtgattcgatctcaaagttaaataatgaaattttgaaaccacaagggtgtcccatccttcttttata

SEQ ID NO: 55472 - DNA, 321 bp, Gossypium hirsutum
  Clone ID: uC-gsronu33b025a02b1
tctactcgtacgggtatagttattttaagggggcgaatttaaattgccctatgtggaccacataacaactatataattccatgttaattgtattacacgctctaccaggtggtgttttcctttataagagcacttaaatgactaattgcaatgcagacgctatacttgaagttcaaaacattacaatatactcaccctagagaactccaaaatctgtaaactttgcagataaatgtgttatggcatactcaggaattcaagctgtcgtgagggcttaacaggggcggctgctttataggcactaggtttatcagccttagc

SEQ ID NO: 55473 - DNA, 205 bp, Gossypium hirsutum
  Clone ID: uC-gsronu33b025d06b1
atgttaccgaatggaaactctcctttggagtgcggagttgagtcttccaaagcacaagatataagcgagttggctccacccgacccaaatggctacattgacttggacattaatttcctatcttgagtttctggcgagtctctctaattaagggaaccactcattcccctattactctcttgactgcactaaaaaatgttcattc

SEQ ID NO: 55474 - DNA, 370 bp, Gossypium hirsutum
  Clone ID: uC-gsronu33b025d08b1
tctttcaatcttatgtaaagtactatgctcggggaacggtatagagtgcacggtggagacagttttagagtgcccatattttgcttgagggggatgtttcggcctttccgtatgttgaccctaccaggatcaagatatacatactaaggccaaatgatttaaaagaattggatggggctcttggcctactaaatctggatgcttctacaaaacaaatggatgctgctgatgcacaaactggaccaacagcctttaaaagtacaaagaggaaacgtccaatatctcttccactagcttttgttaagaagaaaaacaagaggtctgtcctacgaagactgtattgtaacgtttggcattcagcatagcattc

SEQ ID NO: 55475 - DNA, 171 bp, Gossypium hirsutum
  Clone ID: uC-gsronu33b025f03b1
gcgggaccggtccgttttcccgggactttccacgcgtcctgtctatcctcctttgtattttctaccctagtggggcattccatatccaacggggcttaaagatcccatccgctgctttggttgaagccttctattctgagactgatcacgatcctactactgaggaattca

SEQ ID NO: 55476 - DNA, 385 bp, Gossypium hirsutum
  Clone ID: uC-gsronu33b025f09b1
ttatgttgtaaaacctggaccaattatctgattatatttctaaatctttgtatctgtactgtagagtttattaaaaaaaaaaaaaaaaaaaaaaaaaaaaaaaaaaaagggagaaaaaaaaaaaaggaccagggaaacaaaaagaaaaaaaagaaaaaaaaaaactataggggagggccacctaaaggaaacaaacttaccaccgttagacaacgacgggacaggtaaaacatgggggaaccaaaaaaaaatgaacgggccgaagattaacaatgtggcaaagggaaaaacccgggaagaacccaaaaaaataggttggtaccaaaacctgcttattcaaaatggcgaaagagaaaagaggtctaaagggacattaattgcaaac

SEQ ID NO: 55477 - DNA, 190 bp, Gossypium hirsutum
  Clone ID: uC-gsronu33b025h03b1
cctataaagcgtctattaacacgctctcactgatctccttattacaacgttctgaatgataaaaccctatccttatccaacttaatctccttgcagaacatccccctatttacatgtggcttattaccaaatatgcccgctactatcaccctttctatcatttaccccaccaaaatggtcattggcaacc

SEQ ID NO: 55478 - DNA, 413 bp, Gossypium hirsutum
  Clone ID: uC-gsronu33b025h10b1
ttcaagatccttttgggcatgcagaagggcggatacattggagagtgggagcgcatttaacaacacagaacgggtgaaagaagcatggaactgaacctaaagttaggcatgtgcggggtgatcatctcatactaatgcgcaggagtgaaggctagcactagcaaaggactgcctacctggttgcattatgacagcgttgggcacatattgctgacaacatcagactacaataatggaccatgaagaatacactatactgaaagtagccatggaaagtacttggctttttatattgaggggattagatcaagattaaaactgctatgaattatgtttatgcctttaaagctaataatggcagtgcctatttatgtaatatggggactcaaatataaagagtgagcttatgatga

SEQ ID NO: 55479 - DNA, 322 bp, Gossypium hirsutum
  Clone ID: uC-gsronu33b112a03b1
taccacactgacaaaggcccgactcaaggatactaccatggcggaactcgctggggaagccagtccaccatattggctatcaacctccagaacgtatacgcactgacactcacccacgctcaacggacttatcatatgctccggccgacctattgtatgtgggaatcctacactatattcaacccagacttatggaaccccctacagaaacgccacattgaaaccttacctaaatggtcatggcaatggctgcagaacaacacataaacaaccggatgtgctccactcaagcatatagatccaaccatcacaacctccctgg

SEQ ID NO: 55480 - DNA, 575 bp, Gossypium hirsutum
  Clone ID: uC-gsronu33b112a12b1
tcccacgcgtacggagaaaacatagaagaaattgcttatgtataccaggacggttatcgtggtcactccgacgtatggtcccactttccaagctctgaattttaccggggtgatgcactttataatgctggttacctacgatgtgtgttggatcgcggaggacgctggtggcaacagcagcggaacggagtttgtatttgcgaaatcgggtttgaaatacttccacgctggattcaagtaaaggttgccgaattcctgggaggaacgacatatattagattccaggtttttatttcgagcttttagaatttttttagagaaaaatattttttttcttattttctttttctttttagcttttttcttttttcttttctttattttttacttttttttaccttttttccattatctttttttttatttttttattttttcttcttatatatttattttttttttattttcttataatattgttttaaattttttaatttatttattttattccattttctttctcttattatattattttatttctatattttttttatttttctctttttattttc

SEQ ID NO: 55481 - DNA, 407 bp, Gossypium hirsutum
  unsure (1)..(407): unsure at all n locations
  Clone ID: uC-gsronu33b112b04b1
tcccacgcgtccggtcaactattacgtggagagcctttcctttggggagcgagtctcaggtagactgttctttaagctaacagcttctctgcagagtcttataatgcatgaggagaaaggtcacatcaaccttgttgcaattgaccatgtggactctgtcaagtggaccactactggtcatttgatctacaggctaggctgtatggacaagcgtgtaatagataggatggggaaggccgctgttgaaacgaagcagaaaggatcaagagttagcttggagcttgacaagctacaggctgagcgtgaacgtggantcaccatagatgccccctatggacgatcgagccaccgaatactattgcaccgtctttgatgcaccgggacaccgtgactgtatcaagaacatg

SEQ ID NO: 55482 - DNA, 333 bp, Gossypium hirsutum
  Clone ID: uC-gsronu33b112b10b1
ttataaaaaaaaaaaaaaaaaaaaaaaaaaaaaaaaaaaataaaaaaaaaacaaaaaaatataaaagtaaaaaaaaaaaaactaggggggccgctctttgggttccccgtttctccccccgcgcgcgcgccgccttttctttttttcctggccggccaacccgtctgctctgccccgcctgtttattgcgcctgaccgggggccccctctgttgccccccctttgcatcctcggggtccatccccctttggccgctggtgctgctcccgcggggggccgcccccttggcccctttcacaaatttcgcttccctttggcgaatggggccccccc

SEQ ID NO: 55483 - DNA, 153 bp, Gossypium hirsutum
  unsure (1)..(153): unsure at all n locations
  Clone ID: uC-gsronu33b112g02b1
gctcttaggtactagagcgcgacctttccatgccctagcatcgacgaaagagacaaaacatggggtagagcgcccgccaaaaccagctaaacatggcgacatgagtgcatcaaaaaaaaaaaatcnctccttttctctcatccctgcaattca

SEQ ID NO: 55484 - DNA, 499 bp, Gossypium hirsutum
  Clone ID: uC-gsronu33b112g04b1
ttttaaaaaaaaaaaaaaaaaaaaaaaaaaaaaaaaaaaaaaaaaaaaaaaaaaaaaaaaaaaaaaaaaaaaaaaaaagaaaaaaaataaaaaaggaaacagattaaaaaaaaaataaatggggggtcagtttattagaatccagttatctaacggcagtttaatccgcccttaaatttttcttttttggggaccggtaaaaccttttattggcccgccttttcccccctgggggacttggaaaccccggcggttccccatttatatggtaggtggtaaaatccctttttttccagtggttgcaaaccctaaagggcccttgggattagcctttccaaaaattttgacagcgctcttgggaaaggggtccccccctttatgggttttttaatggccggggttttgggtttccccccctgggtttctttcgttttttccctgtacctttcgccggtttttccggttatgttctttccttggggacccttttgggggtttt

SEQ ID NO: 55485 - DNA, 288 bp, Gossypium hirsutum
  Clone ID: uC-gsronu33b112g07b1
tcggacgcgtgggcgtactctcaattggagaagctcttttgtattagatcgcgacttttccttgctcttttttagccgacattgccagaacatggggtagagcgcccgcgaataccagctaaatatggcgacatgagtgcttcaagttatgctcttactccattcaatcatcctgcaatcaccactccagaggaacaaagcttactcatttgcaatagggcactgcggtctagatggatccaagggttacatcacgctctcatacaggaatcaaagctactctatagg

SEQ ID NO: 55486 - DNA, 486 bp, Gossypium hirsutum
  Clone ID: uC-gsflmaxxa064c04b1
ctcagacaagatgggtcctcagggatctgtttatagcaagctgcccgtattctccccaacaaaacgacataccacttttaacatacttaacaaaagcttaataaaggatctaataacttaaactggcctcacatacaaaataccaatgatatcacaaaaaatgccgagcaatcaaaactagattccgaataatctacacttgaaatccctaaggagaggaatctccttcacggcactcagaaatggagcctcctcgaatgaactttgagaggctcggttttgcctttgcgctccttgatccctgctgcaacgagatgccccttttggctaatgaaagccacccaaaaggtgtgacttttaaccaaattaggctccttatggaaatacgcctgcacaaggtactgccaatcaaactgcttcacgcaagggcaggcttaacaaggctcgctataagaagcaccttggaagaggatgtagctaacacac

SEQ ID NO: 55487 - DNA, 124 bp, Gossypium hirsutum
  Clone ID: uC-gsflmaxxa090a04b1
cccaacaattcactgaaacatgtccagctcaaaaatgtacactgctccaaatcatttgaagttaaagatgactacccaactcacaagacctacccatgctatgttcttaacgaccgcacctaca

SEQ ID NO: 55488 - DNA, 131 bp, Gossypium hirsutum
  Clone ID: uC-gsflmaxxa090g07b1
acggtttttatcatactcgactcgactggccaagaggaggtctttttattagatcctggggcggttacatcacagccccatgtcaggcgccgggggcaaactcatgaccggtacccctaatgaaatcctcc

SEQ ID NO: 55489 - DNA, 143 bp, Gossypium hirsutum
  Clone ID: uC-gsflmaxxa097c06b1
atgaaccatatccaggctctttctattacgacctcaactcaccaccatgggaaacactccctttgctattgatcacaggacttttgctaggtacacagaacgaactgcttttgagaggcccctcacaagtggagtggcatatg

SEQ ID NO: 55490 - DNA, 395 bp, Gossypium hirsutum
  Clone ID: uC-gsflnu33B037h12b1
caaaaaaaccaaccccaaggaaaggaagggcaaacgggaacagtaaaacaccgacacagggcgcccaacacaaggaaagaagagcgcgaagcgacaaaacgcaattatccagaccccaagaaagagaccagaaggagccacaaacacaaacagcatgacctgggcggacaccaaaaaaaagaaaaaggccagaaaaacccaaagcccccaacaccagagacagaatgtctcgcacaaggccaaagaaatacgactgcccaaaaagccaaaaacaccctaagccaacgcaccgcacaacctaaacaagggcgggcccaaacaaccaatacactgcacccacagaacctcagagagcccaccgcgaaaaaaaaaaacgcgacccacccaacctaaaa

SEQ ID NO: 55491 - DNA, 419 bp, Gossypium hirsutum
  Clone ID: uC-gsflnu33B071a07b1
ttgtacacgcggacaatagtgcatatctaggagatgaccctaccaggtatgactatagagatcacgggccaatacaaaggtgcgatgaccgacgctacaggcactaaacaatgcacggtaggagtcacacacgcccattatatattgaactacgacgaaaagataggggaccgacggcccacaatcgaggactgcactatctataacgtactaaccttgattttgatatgaagacctaaagggagaattaaaagaggcttatcaggagaaaaagaatcggaaaaacaccccagattaagaggatgagaccacagtgctatgcttcgttggcacctatgggccgtgaacgggagggaacataaccgctgacacggatcaaaagcgtggctatttatagacatcaagaaagaaacatatat

SEQ ID NO: 55492 - DNA, 474 bp, Gossypium hirsutum
  Clone ID: uC-gsflnu33B071b07b1
tgaaaaaaaaaaaaaaaaaaaaaaaaaaaaaaaaaaaaaaaaaaaaaaaaaaaaaaaaaaaaaaaaaaaggaaaaaagttatagaggatccaaagttaaaaaacaaaaaaaataaaaaggaaaaaatttaatataatgaaatgtaaaattaaataaaactggccggggggttggcaatttttgtgattggaaaaatctttggcgtgtccgcgcttatttcgcctttgtagaaaatggcccttttaaccaagatggccccgtacttattttttttcgggccggttgctcttcccaaccgggtgcccgatctttatggcgattgggacgcatcctgttttggggctttaggggatgcgggagggggggattaccctttttgttttccgttttatttgccagtctctttggggacgggtcttttcccttttttcccttcctttttggcggggttggggggtttttcccggggggttt

SEQ ID NO: 55493 - DNA, 495 bp, Gossypium hirsutum
  Clone ID: uC-gsflnu33B071b08b1
tctatcgcgggggctgtgccttactatctgctcatgacacggcgcctcttctgctgatctgtggtggtggggctcacctcatcatctcggcctgctcttgtctatcggtcgagccgtgggtcttaccaagttgtgattttgaggctgccctacgcaatgagcagccacagacctattaaggtggtgggatatgctgtcggaggagggcatgttttacatggcatgcgatctgaccatggctgcggataatgctattttcggtcagactggacccaaggacggatacgatgtgactgctggatgtggacggagcatactgtggccggagcaaggctgtggaaatgccacacccatattgtatggaactgaaggaggcaacgagggggacagaggatgtgtggagcatagacactcagatcaatcaaaattgtcaaggcgaccataaagttgaggattgcatggattcacatgaggcatactattgaggctaccaca

SEQ ID NO: 55494 - DNA, 181 bp, Gossypium hirsutum
  Clone ID: uC-gsflnu33B071b12b1
tggttctctgctgtcgattataatagtatatgcaatacaaagtgaggccatgtctcctgataatattggaaaatacactgttactttttaagcatctgaaagctacttaccggtaaagagatttcttcattgagaatatagccaataaaaaggataaaaaaggaagaagaagaaatatgag

SEQ ID NO: 55495 - DNA, 438 bp, Gossypium hirsutum
  Clone ID: uC-gsflnu33B071c07b1
gctgaaaaaaaaaaaaaaaaaaaaaaaaaaggggaaaataaaaaaaaaaaaagagggggggccaatttataggatccaagggtttccgggctggcgggtccagggttcccttctcttggggggccccgttgagggggtcctaggtggtctctcgtgtcaccgtagatgtctttgattgccctcggggtttcccccgttaaacctgggggggccctgtcctccctcgcctgtgggggcttccccgttttgcccctttccccaggtgctttcaggcctttgcgctccgcccggggggcctttggcacccgcggcccggcctgtttgcccttcgggacggtgctgttttcggcccgttaggcgggtcggctctggtgggcgctcccgccccctccggtagttttgtttcccccctatctcgcgctttttcggttttttccc

SEQ ID NO: 55496 - DNA, 496 bp, Gossypium hirsutum
  Clone ID: uC-gsflnu33B071h01b1
gtgtttacgcgtacggactgtctttaaccaggggaattacactaaaatagaggggtgaatctatacaaaaaaaactaaccaaaatctatcttcatttcaatttggcactgaacccaaaaaaaccagaagtccctttctcagaaaagagatgggggggccccttgcgggagcccagattgtggggcgcgggctactaggtctatgtttattctgggtgcgtagcctggttcacacactatgggggcgtatatgcaaggcttggctggggaaacccgggcggtccccaatttaaaaccgtgtgtatgcgattgctcttttcacgcggtgcttacactcaaagggggcccgaccgttggtctttcccaacattgggcaaagcgtgagggggaagggaccgcgccttctggggggaactatgggggggggggggggggggatctgcccctgggaaccgttaaatttgcggagcgctaggggccggctcctttgggttttt

SEQ ID NO: 55497 - DNA, 222 bp, Gossypium hirsutum
  Clone ID: uC-gsflnu33B101d12b1
gacggcatagctattcttttgtgatagctaaacctaattcaatggccgtggccgtacaacgacaagactgggaaaggcatgacgttacccaactcaatctgattggagtagatccacatttcgctagctggagttatagcaaaaaggaccaggccgatcgccattgccatcagttgcacatgctgaatggtaatggggacgggcactgcagctgtgcattaa

SEQ ID NO: 55498 - DNA, 173 bp, Gossypium hirsutum
  Clone ID: uC-gsflnu33B145a07b1
gaagctgctgcgcctgccggtaccgaaccggaagttccggccacacccacgctttcgttctcgcgtcagggcaggcattaaagcgaggggtccaaccaagggtcggccaggttttaatggcatcagagctcaaaggaacttagaccccagaaaaggcttcactgctaccccca

SEQ ID NO: 55499 - DNA, 155 bp, Gossypium hirsutum
  Clone ID: uC-gsronu33B167d12b1
ttttgtctcatacccggagaaatgaaagacaggagagagtttattatcgagagcgtgcgagccccgtccggacggaaaagtactaggacgacaacgcttagcaacgaaaggctaggatgacgaaccatcccgacggttctgatgacaatccagat

SEQ ID NO: 55500 - DNA, 753 bp, Gossypium hirsutum
  Clone ID: uC-gsronu33b025g01b1
tttccacgccttccgttgattatgccgaatattttcaatgagatggaattttttaatgaggtgatgggtaagataattacatgtgaaaaataatgaaataaataaattatacattaaattaaaaaaataactcctaatttaaagataataaatgtaattatctaaaaaagtttcaatatgaagaatgcatgcatttgtttactaagaggtttaaaaaaaataattaattaatcaaacaaaaaaaatcttgaatgtgtgcattcatttcattttgaaaatttttttagataattaaatttattttttttaaactaagagttattattttaatttcatgaaatatttatttattttattattctttatatgtaattatttattgggttatcaaagtaataaaaattacatctcattaaaattttttacgtttgaaattttacattattccctttaaaaagtattacattttttttaaaaaacaatttaaaaaaaaaaaaagttttttttaaaaaaacgtttaaatacaattaaaatttttttgtccaaatttttaacacttaataactaatttaattaccttttgaaattaatccttttcacattaaaaagatattcatatttaattttttccccctggagggtatgcctcaactccaatttaaccaaaattttatcctcactctcaaaattaactcaaaaatatatccaaaattttttgtttaactcttttctcattaatttaccctttttttt

SEQ ID NO: 55501 - DNA, 454 bp, Gossypium hirsutum
  unsure (1)..(454): unsure at all n locations
  Clone ID: uC-gsronu33B132e10b1
ttttcacgcgtccgtttgcattttccatctgtgtgtttacattctaagacctattcttgcgtgacaaaacctggtgctcatctgctgttttaacgattaccgaatttgctaatgagaatcgatccgcgcgggtttagattaactgttttgtacaggggatgcacgatagttcatgaagggtgccatcgatagtcatcgatactcgggcctgaccagacacttcattcacacgagccgcgctcacactgtcaagtcacaaccactccatggggccaccttcggttgaaatcaaccgtcattgttggagcctatagagatggacatgatcaaacatcatgaggcatgccctggacgtgacgactgagactatggtgatgctggtatagcgganagggnggtgaatattgtcacaaagatttactgcggtgatgccagggataaaatatgtgaatct

SEQ ID NO: 55502 - DNA, 318 bp, Gossypium hirsutum
  Clone ID: uC-gsronu33B132f05b1
ctcccgcgtccgaaaaaaaaaaaaaaaaaaaaaaaaaaaaaaaaaaaaaaaaaaaaaaaaaggaaggacgatataaaggaagggggcttccgtatgccggctcccggcttccttaccttgggatggcgtgccttagcttttctgtactgtcaccttgattccatggcctggcctgggattacccggtcgtggctggctaagccctgtcgtaacccatttcatttgtcttgcgttgcattttcttttagtcggctggtttagttggggcttggcccgaaccgtttgccctcctggcgattgccctgcttgcttggggga

SEQ ID NO: 55503 - DNA, 158 bp, Gossypium hirsutum
  Clone ID: uC-gsronu33B019e12b1
ttataaaaccctaaaattcttgccaaaggcagcagacctaaatgtgctagggtagcaggcaagtaaattgatcaaaaaaagtatagtttttaggcattaataaaatagtaccacgtcattaaattttaaagataatacactatctatattcaatatct

SEQ ID NO: 55504 - DNA, 490 bp, Gossypium hirsutum
  Clone ID: uC-gsronu33B050a10b1
tgtgattctgttggaacttctaacaggcagatgcgcaggtgatgtaattccaggggaagaagaaggaatcggattgatagaatgggttcggttgaaggtagcagaaggcagtggcttgtcttgttttgattcggctttagctcaagaaatgggggatctggctgccgagaaaggaatgaaggaggttcttgaaataggattaagatgtgttcgatctctttcggagaggccgggtatcaagactatatatgaagatctttcgtcaatatgaatcagcatttggtttttgcattctcgtaaatgttaggcaagtcggggacttaaactagattcaaatgatcagggaatttaatctctcattgggctccctgtttttgcatctttttggtcgtttttggcgcatctggttttagcttttaatttctattcaaaatttgttgtacaatgaatgcacattatggaatggatagaaggtgtttctagattaaaa

SEQ ID NO: 55505 - DNA, 243 bp, Gossypium hirsutum
  Clone ID: uC-gsronu33B060c12b1
ccctcttgtccgtggggatgatcgaagaatgccagattgttttaacatgatctgacgtatcgaatcataatgatgttctgaggattatacaccatgggcgaggcgatccgttgctaactttgggttggataatggcgtggttaccttccacccaccactaacggaaaaaactttatgtgccattcagacagaaacgggtacttgtcagattttacttccagtaatcaactttttaattctctt

SEQ ID NO: 55506 - DNA, 488 bp, Gossypium hirsutum
  unsure (1)..(488): unsure at all n locations
  Clone ID: uC-gsronu33B111e06b1
ctgtatttgcggcaaccacaggaggcagcaggggggtgggattttcagccatctgaggggtattagtagtgtcgtcctcgtgctcttcgtctatataccgtaaacttcgccttatttctctacgatttctatgagctatactttcaatttcactgtcaaatagtagaggtcttgacggatttcttctagtcataaactataaaaaacctatcaaaagcaaataaaagaaatattagtaattaaaaaaattgcaataaaaataaaaatggctaaagtaataaaaattaagcgttcctaatatcttagtctccggaaacggcgcaaaaacttgattgtcactaaactaactaaaaaaaactagactaaggcaagcgcacctatcgaacagtagtatagttatggtgagaccgaanatatcgtatctacaaggactaaaagtactagtaattactatctttntattatctagcctaagaattaaagggatg

SEQ ID NO: 55507 - DNA, 512 bp, Gossypium hirsutum
  unsure (1)..(512): unsure at all n locations
  Clone ID: uC-gsronu33B145g06b1
gccatttctaagtagtagtggaaaagctaattatcatttggtttgtgaatgcttctttatgactgctagggtactcaacttgggcctcctaaggcattttcggactttaagcatctagtcaggacatttcaagaagtgaagacacacttgccaccttaaaagctatgcaaggacaggcaccttctccacaactggagcttgatatatcgaggcttgagaaggaaattgaattgtattcacaggaaaaattctgttacgaggctcaaattttgagggatggggcacttattcgacaagcactttcgttctatcgactaatggtggtttggttagttgactcggctggtggatttaaaatgcctctgccacctacatgtccgatggaatttgcttcaatgccagagcactntgtggaagatgctatggaactattaatatttgcttctcggattccgaaagctcttgatggagttgtacttgatgatcttatgaatcttattattatgtttatg

SEQ ID NO: 55508 - DNA, 510 bp, Gossypium hirsutum
  Clone ID: uC-gsflmaxxa090e01b1
ctcattcgtccgcccacgcgtccgcaaagaacgggggcatttttgtatcattcaaccgaacctgacggttccttgccctatcgccgttttgcttccatattttagctggcggacatcgtgcgaaggcctaatctggcctcgctggaacatgaatccgagagttttgctaggcttaacctcaatcctcatctaggctttgactaccacgaagcaaacaaggatttcaaagcctcttccagaagataagcatctacgcctttatttatttatttttacttacaataatgaaaatcaaagaagaaatagaagccaaatcaagagaagaaacgggacttaaaatcacctcttggaaactgtttttgaattcatttctctattcaaactttttgtacagatttgtatgcgtatccccctctttttacatcctttcattcggttttatagctgaaaatagaaaataaaataaataagagaaaatacaaattttcctactgtcatttgctattattt

SEQ ID NO: 55509 - DNA, 328 bp, Gossypium hirsutum
  Clone ID: uC-gsflnu33B088d09b1
tcgtggtccttgatgaatctgtagattacttgaagtctttaaagctcgaagccgagactttaggagtgaaccacttctaggttacactccttactttctagtaacttgttggctaagtggtgggaaaagaaggatgaaattgaaaaaaaagaaaagaaaaaaatccaacgtcttaaccaagaatgattgatgaatttgaaatcactacaccggctttagctctgtggggacggtttgtttgtcatcttttacattcataagggagccttatataatggggggccaacaaaggctgaaatgcagggtatgctataagttatttttgctt

SEQ ID NO: 55510 - DNA, 449 bp, Gossypium hirsutum
  Clone ID: uC-gsflnu33B091d05b1
tctcacgcgtccgacaccaaagggttctttttccccgagagaaagacgaaagatgtcggattggggaccggttttcgtggcggtggtgctgttcatactgctaacaccggggcttcttattcaggtaccagggaagtcaagggcgattgagtttgggaattttcaaaccagtggagtatccatactggtgcattccattatttactttgcactcatttgtatcctcctcttagctattggtatccacatgtatgttggctcatagctcactatcctcatctgtcttcacgcctcgtataagatgagtttctaactatctgggttgttggtatgtaatctgacaatttaaatctgttttttttttaaccaaatggttgtttttgcttggaatatgattttgggcttcaattaatcttgcaaatttgacaaataaatgtttatttttttct

SEQ ID NO: 55511 - DNA, 370 bp, Gossypium hirsutum
  Clone ID: uC-gsflnu33B128d01b1
tttccacgcgtccggagatatggcggtttactttggcatgcttgatgcccttttggcttctgagcagcttcctgaagaatacaggaaccgctgtcaggacatactgtgcaatgactgtgataagaagggaactgcagcatttcactggctgtatcataagtgtggttattgtggttcatacaataccagggtaatcaaggttgagtctgcaaataccatctgctcaacctcaaatatctgaggtatcttctcgcatgttattttaggtatgcaaacgcctcagagcgtccccttacgtgtaaggctgatagtctaaatccaattttatctattttcatcccaatagatggaagaaattagcccttttttt

SEQ ID NO: 55512 - DNA, 416 bp, Gossypium hirsutum
  Clone ID: uC-gsflnu33B132b03b1
ttcttcgcgtccgtgaaacgtagtgaccggtcctggactcgaataggaaagctaccaatatggaaagaaaaagcgtacgtgtatgcctagatgatatgaggccactcatcggacatgtacaggagaatggtcacccccatatattaatgatgccatgcatgtttgccgtgctgctagcaggaagctggtgccttgatgaggacatgcttgaaggaagccgcgtctgcctcacaagagtagaaaccaaagaagatgtatatttctaattttgttttcattataaagtctttctttcttttttcgttttgaccgttcctttttcacgagaattttgtaactgagtttattttcccccatttcagatattattcatcttttattccaagttgagaaaaaaaaatctatcgcatgagctg

SEQ ID NO: 55513 - DNA, 480 bp, Gossypium hirsutum
  Clone ID: uC-gsflnu33B145e02b1
tttttgttttaacaacactgatcaaagctttaaagtaggggaggcgtttgggttagaaaatcatcattgggaaggggaaaacttgagaatgggagaatgggacttagagggtttgatggataacatatcttcttttcctaatttccttgatttccaagttgaataactatatcttccattttcaattctacccaaagccacatatagaaaattttgggcagatattttcatacttgaagtccttgccatctcagaacctccattttttaccccatttaatccttgttattggttcattatactctcttttgttttttgggttttattttcaatttgttttagttttatatccggcagcttgcataaattgggacgtcgtcgaataagcataaaataggtgggagattagcagaggtgaagcttgttgtacgtaaatgtaagagcatgaggcatgcaagggggatcgtgcaagaaccgtcg

SEQ ID NO: 55514 - DNA, 166 bp, Gossypium hirsutum
  Clone ID: uC-gsronu33B051b05b1
cttgtgtttctcccacaccccaaaacaccagagatgtttggtgataacatactcccttgatggcgaacccaataatcaacatcgacctaccatttgctataggtctataaagccatctgattcagagaccttagaacgaaaccactgcgacgcatttcctacaagg

SEQ ID NO: 55515 - DNA, 306 bp, Gossypium hirsutum
  Clone ID: uC-gsronu33B051c08b1
tttacggcttttggttatcaaccccccgcaagaggaccatgaggagcggcattgttaatgactcccaacccacaatgtcagctaaagaaggaaaatgcactaaagcgtgaaggtgaaaaaccaactaaaaccgcttctttaaaagggtattacctctgcaagaaaatatgtgccaccatatcattgactggtggcaacacctcgaacaccatatgtttgggactagacctatatctatctagcgataataaagaaacagtggcagctctgctgagactgcaactagctagggcactgcttttgagg

SEQ ID NO: 55516 - DNA, 410 bp, Gossypium hirsutum
  Clone ID: uC-gsronu33B051c09b1
gctttttgtattccatatacctaaggcgacgcatagggaacatctttgttaacgcttaacctataccaaacttgaaagaaatgactgacgttgcaggaggccaatgtggtaaccaaattggaacacatgttcggttcaaagggctgtgcctaagaaagaaattatcctacaggaaagtacaatgcggagggagaatcatgaacacaccacgtgtggcgctagattgagaattattacgagattttcagaggacggtgcttgccttgctgagacttcattgaggttgagcctggctctagaggaaggatgagacttggtccctacggccagagctccatgtgtgctaatgaaccgtttggacaaactggggctttaaacaattgggccaaaggtcattacacttaaagggc

SEQ ID NO: 55517 - DNA, 371 bp, Gossypium hirsutum
  Clone ID: uC-gsronu33B051d09b1
ataggggccccaagtttcacacgcgcgcgtgtgaaacgatatatcttttatatgggggcccctatttaaaatacagtgcgcggttttacacaacggcgactgtgaaaaccctgtggtgacccccaactaaagcgttttggaacacatccctttttcgagaggtggtgaaatcgcaaaggggcccacacctatcgctcttcaaaacaattgcacactctaaagggaaagggacacgccctgtggcgcggcacataacgcgcggggggtgtgggggacacgcacagtgagacctacacttttgcgagcgctatagcccccgccttttgggtttttttctttcttttttgggacactttccgggttttcccccc

SEQ ID NO: 55518 - DNA, 286 bp, Gossypium hirsutum
  Clone ID: uC-gsronu33B057a09b1
atccacgcgtatttttttatgaaggaaatgaaaagaagcctgaaagggggggggtaaaaaaaaattatgaaggggtgattaaaacttaaaaaaagccaaaggcacttaagctatgcttgtgacaagccattgaaatgcaccctaataagctgaaggcaaaagacttaggtataaagaacttctgaacacaattattggtgaaaattagaaagatatagcgaattgtagtgaaaaaaaaaaaaaaaaaaaagaaaaaaagataaaaaaaataaaaaaaggggcggcc

SEQ ID NO: 55519 - DNA, 207 bp, Gossypium hirsutum
  Clone ID: uC-gsronu33B057a12b1
tcgggttcgcgtgggcaaaatatgcatagagctggggggacagaaaccaaattggctgaagttgctgacaaagagggtaagactttttgcgtcactcgtattgaagttggtttagatgcagttgctctccgggaagcggtttcacttgttattcaacaaaagggaatgccggttatggatttcagtattgacgaaaaccacaaacaa

SEQ ID NO: 55520 - DNA, 520 bp, Gossypium hirsutum
  Clone ID: uC-gsronu33B057b09b1
aaaaaaaaaaggggggttaataaaaaaagaggagctaactaaaacagaggtgaaaactgctaatgcagaaggaaccttaacctaggaaattcggagaagacaaccagcactcaaaccataatatacggagtcgcgccagagaaaatgaacctttgagaggaccagaagaatgagcaaatactagaaatcaaggaacaatggaatgacaagaagtgggatcaaaacatgttaaattgaagaaacaaatgcaacaaggttgaaaaagctttgaatgaaagcccataaaattattgaaaaaaagaaagcagcaaaaaaaacaggcctcaggaatgaaatatagtcaaggaaggaagcccgcaaggactaaaaaaaagtctaagactggggattggagaaaaaaaacaaagttcgtggggaaaataatggataaaccaaatggatgggaacaaatgaacatatttttaaaggaataaaggagactaattaaggggaacatggaaaaggataaaacggaggtggt

SEQ ID NO: 55521 - DNA, 186 bp, Gossypium hirsutum
  Clone ID: uC-gsronu33B057b11b1
ttcgtctttgcgtccgtagattggcccaattctcgggggggttctaatccctaagtgggccctaaaagaatcagcagacacggtgaaaactgattgtcgaggtaacatacatctgacgcttttctcatttgctgtatcggagcggaaaattcatgatctgcagccttccttcataaactaaaaatt

SEQ ID NO: 55522 - DNA, 401 bp, Gossypium hirsutum
  Clone ID: uC-gsronu33B057d07b1
gatttacgaaacatctgcttcattagtaacgaaagggatgaacaaaaaaggactgccgaaaaagcaatgcaatagcattctagaaagcattgaaatttgcaggcatagatgttggggaagcagcacgacaccttcagcagaaagacacgaacgcaaaagaaaccatctaaacataatctaacaacgccaaaccgaccataattctcaaggcctggggagatacctccacttactaccacatacacaacaggactgccccctatgccaagcattccctgagaacccacaaaaccaactgaaagaccaccctaaacctaactattaaacgccaatgccaattttccctaaaataccaaacaatggggagcagcctccaattacaaacacattgccaagaggac

SEQ ID NO: 55523 - DNA, 448 bp, Gossypium hirsutum
  Clone ID: uC-gsronu33B057e04b1
ctttcgctttgggaaaaataagtcactgtgtttgtggggggttttttgacacaggtcagttcgtttatcacatagacttgaatgacttgctagagattttcgtcttattcggccatcctaaggctttcagttcttcgtttttttctgcctgtgccgtaagtactttttcacgatttaaatatcatttgcctaatattaatgctcaatattctttgtcgaaaaaaatagacttcggatcgcattgtttttatgatactgcatcacttttcccgattctttgaaccgtcggagaaaatgttttgttgcccttttaaacgaaaaatacatgcatcgtctgattgaaacaacattatacaatttcgagacggaagacctttggctgctcgttggtttaaagggagttcgaagaaagattaccttctgagttgtccggaggaatgaagaaact

SEQ ID NO: 55524 - DNA, 449 bp, Gossypium hirsutum
  Clone ID: uC-gsronu33B057g05b1
gtttaagtttcacaatcggatcgagaatggagagggcaagttacaaaacattgcccaatttcttagttatatacatgggcaagcccttggtaaagcctctaccagtatgatttctacctaatgcatttcaaaaaaaaaaaactaatcataatacttggaaaatttaacatacaactatcttaaagtgaccaaaaatagaactttggcatttacttatcatctccttaggcatcctcaaccttgtatgtagatctactcattggagaactaaaggtaatctacaaatataaatagaaagttaaaaaatgaaaaatatacacaaaaaaacatataaaaataagtaatgtttaattaaaagaataaacacacaaatgggaaacaaaaaaatcaataatatatgggatgggcggtcgaatgaaaggaaacaagctaacgaacgcatgcaagca

SEQ ID NO: 55525 - DNA, 231 bp, Gossypium hirsutum
  Clone ID: uC-gsronu33B057g11b1
tttccacgcgtccgctaaaacactatccactggagaggttttgtttgagcggtcaatccaatcgcttggataatcagaagagaaaaatgggcgtattcacaaaaagaagcagcgggtagtaccccactgccaccagccaaggcttttcaaggcctttgctggagatattcgagaacctatatgcccaaagctgccccacatacagtcaagagcatcgaggccattgaagga

SEQ ID NO: 55526 - DNA, 490 bp, Gossypium hirsutum
  Clone ID: uC-gsronu33B057h04b1
ggcccgacccacgcgtgcggatgtttttcagaccaatgccaacagcaccgaaagggggggtttatatgaaaacatcggcgtttaatcctccaatatcgaatactcatgtcagaacgagaacgagatcactggtgctcacagttgctccgactgcaacgggagcagtaattatgacacatatacagatggtaacacactgattaatgccgaccctttttcatcgaatcatgaagtaaaagaaggtgaaactggtttgggaactttgccaggtgccacaagtgagggaaataaaagttgagaatgcaactgctgaatgaaattgataatggtttgagatttcagtatattgaactaattactgggactaaattttggctttttttccttcctgaggtgggatgaagaacactgtatgttcctggctacttgggctttgatgacatactagtgcctgaaaaattccatattagttaggactcgaagattttta

SEQ ID NO: 55527 - DNA, 235 bp, Gossypium hirsutum
  Clone ID: uC-gsronu33B057h05b1
actttgtttccgtgaagggcaagtttaggttcttgggtgggttaaagacaatatatctggctggttccaaatattagttttaggattatgtgaaaaggtgtattgactactccacgtcaagacgaaatgtacaccaaattggacggataaatgcccttgtataaaatgctatccgatactaataatgaaatattccctattctgactgatgtggaagaataggcatttccttgca

SEQ ID NO: 55528 - DNA, 298 bp, Gossypium hirsutum
  Clone ID: uC-gsronu33B060a05b1
acacgtgttgcggtcgcatgcccaaatgcactcaacatgatgtggctatggggaaattcagctttcccatttagcagagaaaaagaagacagtttttggacagctgaagcttggacccttgagcttctcgttgatcgcctcgagccaaacttatctacttgggcgagccaacagaaagtggcatggttctatggcggtgtacaaatggaatggatcgtaagtttcgctacccgaacaaatggtgttgcgatggctctcgacattggcatagaaatggtttatgctggcaaaaacaatg

SEQ ID NO: 55529 - DNA, 489 bp, Gossypium hirsutum
  Clone ID: uC-gsronu33B060b02b1
cgcttttatcatcctgatattacgtgcatcataccccctcttgagttgggaatgctattatcttctaaaaggctgtcgcttgctatcaaccggcgactcaagggcaagtgataacttgcagggccgcacgggcttatgagccgcacaagccactgcacattgaggacgtacaggcggctgctgcacaggccggggaggactgtggcaagatcctctgccctgctctctggcacactgatgcctacagctagccgcgagaaggatccaccacggtcctatgcccggcgcatattctggacatagaagcctgatgcaagtcgacgaaagtgtagtgacaagtggataacagaagccgcacctctatgagccatggtaatccgttgtgaccacagcactagagcccccgaacgcaggatccagcgaagcagcgagagactaacctatgcggcaaagttaggacagctcctggagctggagtcaagatgaatg

SEQ ID NO: 55530 - DNA, 438 bp, Gossypium hirsutum
  Clone ID: uC-gsronu33B060b05b1
gcgatttttgggtgttatctacacgcgatcaacgatgatgacgaaacccatttaccaaaaccagatatcatgttgtgaataacggtctgatataaccatttacagattagccataggatgtattcatcttctgtaagggatctgtacgttgctttgctttcgctgcgaaatggagggcttctagtatgacaaggtgctcgtggcgacccgtgaacctggtgctgatgctcttgttaccattaatggagcacagtctttgaactactggacccggcccatgagggtggacttggccaaggtctcaaggctcttgcgaaggacagcttggtgcggctgatcatgttgtgtgcagctggacaggctttctgttgaggcgtggatttgacggttgtacaagatgttgtgcaggttcgacgttaaggacccggagaccgatcc

SEQ ID NO: 55531 - DNA, 377 bp, Gossypium hirsutum
  Clone ID: uC-gsronu33B060b06b1
gcttttcattccttcaatccatcgaatgattaatagctgaaccagaatacttcaagatgcataactatagtacccagcactaacgaggccgttagggtgtgccacacagagggaaaacgccccgatgcaaataattaggacagattcttcaggaatgtaatgtagaatcaaccaactgctgtctgacgctgagtgcaggtaagacacgactacatgctatactacacatgcagaaaggctctattaaaagaagtgttccatgtgacgtgatagctatattttcatttaaaataaattaaaaaacacctatttaataagctatattttatgatgttaatgcataaagataggaccttgtgtacctacccttttgggtt

SEQ ID NO: 55532 - DNA, 258 bp, Gossypium hirsutum
  Clone ID: uC-gsronu33B060b09b1
tccatctccgaacggggcgttgagagactatggaggaccttcaaccgattggcatgtggtacaattgggccatcgctctacagggagcaagcttacacacgcaggcatgcgacttctgaacgttaatattgggaagcatagatgaagaaactgctgcagaagaacacaacaaaataggctgcatatgccgagaagacacgcaacttaaaggtatggcacagatccacgtatgagcgagcacattaccaattgataaag

SEQ ID NO: 55533 - DNA, 324 bp, Gossypium hirsutum
  Clone ID: uC-gsronu33B060b10b1
tcattggattatgagcaacaaaagcactgcacagaaagatcatatggatatactctaggggaacttggcacataaatgggaagttcgagcacataactaaagaactcattgtaaaaaccttaacatgctgatgacctactgctgtgaagtgctgatgcccgaacagactagtcatagactatgtctgaggctaacaagaccaaggaagacttggacagatgacagccacatctgtcatgtgccatgtataagagactgagtgtagcaccattcacggcctccatctcccagagtgacgactgcgagataaactgtactatcacc

SEQ ID NO: 55534 - DNA, 190 bp, Gossypium hirsutum
  Clone ID: uC-gsronu33B060b12b1
accgtctagcagcgtgttccctccgcaggggcactcaggataggtggagcccttaacgagcccgatggggtaaagccaatgattggaggcctcggagacgcaacgcccctcgacgtatataaatactgacaaataggtagtaccgcgcggaggcttctttgatccacggccacgagaccacagctgcaag

SEQ ID NO: 55535 - DNA, 250 bp, Gossypium hirsutum
  Clone ID: uC-gsronu33B060d04b1
gatcatagagattctatagagtgaaccaaattgatgtaagaggcccttattatacaacgaaccgactggtgaaacattgtctaaatcctaaccaaatcaccttgggtgacaggcctctctatgcagcaggtctaatagcacaagggccccacccgatagtgctttctaccagaggctcattctgaatggcaaatgggacgatccctgttgcggagcattaaacgcggaaagtgtgcaggttacgcaccaa

SEQ ID NO: 55536 - DNA, 424 bp, Gossypium hirsutum
  Clone ID: uC-gsronu33B060d09b1
tttttatacaaagagtgtgtgggttaaaaaaaaaaaaagaaatgatgaaaaagaaaacgcttatcctacataaagatgtatgaaaaaaacaaatcacaattatacatcgctcatatctactgcttttccgtttttttcccactttttctttgttgctttacaacttctatttggggccggcggttttagcgggcccagttttctcttccccgtcttgtccaccttgtgttttttttttgggcccccctgattccatttcctgggccgctgttttccagtgttggcttgggaaaacccgggcgtgtccccatttttttggtctgtcattcattccctttttttccgggggggttattggtttgggggcccccccttttggctttttccaatggtgccccttcctttatgggggtgggcccccccc

SEQ ID NO: 55537 - DNA, 441 bp, Gossypium hirsutum
  Clone ID: uC-gsronu33B060e02b1
ccctcgcttccgtgcaaccaatgtaaatgatgaagagaggatttgatcctaaaatccaggaaaacaaggaaggactagaattgttgaatacagccattgcttaagctggtttccctgccaaaggtgatatcgtaatggaggttgccgccctcgagtgggctggcgcatatgggacccacgacctgtactttggggggagaacaatgacgtgttacaggggatcccaggagatgccctgagggatggtttcttgacacgtctggccgggtatacacttgggttaaaccaagatccttttgaccaagatgcttgctagtactacggctggcttacacaaggaaatgggcgaccccgttccgtttgcctgaaaggatcctctggtgaccggcccagagagggcttcctaaggctcttgcctaaaaaccttgggttggccttttt

SEQ ID NO: 55538 - DNA, 306 bp, Gossypium hirsutum
  Clone ID: uC-gsronu33B060e03b1
ccgttatttacgttatataccaatgagaacaccatcaccgtggatacacaacatgcattgtatacataaaccacaataaaagtacgggtgaacagtgccgtcctggttagcacacttcattcagcacgagagtcgcataagaatcgatctctaccaggtctggagaggtggataccaacgtcatagatttgagccccaagggcggacttgctttgtcccttaagccttgagagcctagataaaagagaaagaagttgctaattttggaaagggtttgattagacttttaaagagttttgaattttc

SEQ ID NO: 55539 - DNA, 269 bp, Gossypium hirsutum
  Clone ID: uC-gsronu33B060e11b1
tttttatttacaagggcagtgagctaacaatgagcaggcatacactatggactgaccactgtacaggttgcagaacctagagcagtgacactaatcatgtcaccaggaacaaggaggatgtacagagccctcacaggataacaaatgatcatgctgaggcagaaatacttcaaaaggaagggtagtatgttactgccacatcactggagtagcagtgataggctagccgtgcatattgaaatgtgtacctcaacagagctgccggaggc

SEQ ID NO: 55540 - DNA, 340 bp, Gossypium hirsutum
  Clone ID: uC-gsronu33B060f03b1
tagttatttttaaatacactagagatagatatatgctcttaagtaccataagaagactgaaacagaatccattggacagaggagttaattgaagctgtttaataacattgtgtcggcttttcttggggaatattatttcgttgtgtaatttaattggcgaagctccttattattttatcctggcttgtcctttttcttttttaggcggcattgtttgaacatggggttgtgcgcccgacaattctagtcaaatatggagactttttgtttttcaagttactatctttggtaatgttacttttttaaacgcttatatgctcatttgcgaggctttctgatg

SEQ ID NO: 55541 - DNA, 301 bp, Gossypium hirsutum
  Clone ID: uC-gsronu33B060f07b1
taaaataaaacagtagcataggcatgctaagggggggttttatatttgacttccgcgcatttcttataaaaaaaagagatgcgaaacgcgtagttgagagtttcaaggaagcgagccccaactgcggagctcacgtagacagaaaggcaccaaggttacaaaggtgaaacaacaagagcgtggtgatgagaacagggacagaacctagcagagggtgggtaaacccaaaactgtcacatatgaaaccaagactgacgtccatgcccctaaagggtggaagaggctagtggcctggcggagg

SEQ ID NO: 55542 - DNA, 429 bp, Gossypium hirsutum
  Clone ID: uC-gsronu33B060f09b1
gttacttatccaagggagagtgtgatctggtcttctttacttcattccactaacccatggctgtatccgtgaagaaaaccgccgccggccgtgagtgcaaggtcaagaaacattcatcaagcagacctaggacggctagaaatcgactcggtcgagctcgtaatgcccggcctcatggcttgccgagccgaggtcggccctgtccaacctcttatgggagccaaaatcaccgggtcttattacatgaccaatccagaccgatgatctcatcgaaacccttaccgcccttggagctgcagcccgccggagctactgctatatcttatctacccaagaccatgccgccgcccccttttgcccgggactcgtaagccctgctcacctggagaggtgagaccctccaggaatactggtggacgaccgaggagt

SEQ ID NO: 55543 - DNA, 169 bp, Gossypium hirsutum
  Clone ID: uC-gsronu33B060g05b1
ccgcgcgacctttttatggtgttgcaggaagcataatggatgaccaattgatctatgtaatagcatatatatatatatatataaatgtgactatggtattggttacattagaaaataaggtgtgtgtttcaattttgtgctgggatgatgcacagggtgctgaacctat

SEQ ID NO: 55544 - DNA, 352 bp, Gossypium hirsutum
  Clone ID: uC-gsronu33B060g06b1
cccttgcttacgcacgcgagaacgctacccatacagatagcatttgttgccatgagcactccttgccgacgcgacgaaaaggtctacactggtcaagcttgtcgagcaagtcgagcgctaggaggagatggtcaagataatgaggaacgtcagatgggtcggacccgttgacgacgaactctaggtctgggaacgcaacctaatctatggcgcctacacgaacgacatcggagcccgccgtgcttccgggaggattcgaatgctgcatcgagcacaaggaggaaggccctgactgcgccgaccacgttttcgtgattcgtgactacagggccaagaacgaggccgaggttgt

SEQ ID NO: 55545 - DNA, 539 bp, Gossypium hirsutum
  Clone ID: uC-gsronu33B060h05b1
ccacgcgtcctttcttcgtccacactcgcgtaccaccacgcggacgctcttattctaaattctgtgctgagcattatcaaaatcagacctagtgtacgcgaggggtcacatttatcagttatcaaactctcttacacgcaagaagctaatcatgagatggatgatggtggctgactatgagtgtaaccaatcccttgatgacgtatttctatacagatcaatcttgtgcaggagagttgctgacatcgatgaattaagctctgtgggtggagaagaagactcattttggctacttaaaatgggtgttccctacttgaatgagttcctaataaaactcatggcacttttttgttggggaaaccctgcaacaaccattgaaggctggcagtactacttgtttgttttggccacgtgtggccgcctctataacccatttgaaaactgacttaattggggttttcttggcgtcttcattgtcccaaaagtctgttctgtttattccccatgtaactgttccggaaaatttgaattcacgtttc

SEQ ID NO: 55546 - DNA, 346 bp, Gossypium hirsutum
  Clone ID: uC-gsronu33B060h06b1
accttgctttacgaacgaccgtgcttgcgcccatgcgggggctttaattacaaaacagcctgcttttcatcaacggaggaacactccctacagacggggattcagtttcaatgaacataacagagctagtggaagcaggcaagcatggcacggaagatgctggatgatggaaacttaaaccacacgaattacgaggcagctgaatatgagtatcacttgtttgtcatccatgctggtagcggaggcgttcgcgctgccaggttctccgctaaccatggagcaccggtcgggatgtgtgagctcccattttatccaaacagctcagaagtcagtggacgtgttggtg

SEQ ID NO: 55547 - DNA, 136 bp, Gossypium hirsutum
  Clone ID: uC-gsronu33B072a11b1
ctgacttctcccccaaaaaagtttcttttctctgtatctttggagctctatacccattcttccacatttacactctcaaagctcctttgtctatgctcctcatatcccaattcctccatattctatttcataaacc

SEQ ID NO: 55548 - DNA, 105 bp, Gossypium hirsutum
  Clone ID: uC-gsronu33B072b07b1
tcgttcagccttactccggatccccggccaacttggttgctttcacggccgtcctccagcctcatgataggaccatgggactcgatttgcctttaggcggacatt

SEQ ID NO: 55549 - DNA, 118 bp, Gossypium hirsutum
  Clone ID: uC-gsronu33B072e09b1
tgttgcgagatacagaatttactcggcagaagaattgttgagtcgcctcttttaccgaggatgaaagccgataggatagtcaacatatagcactagtacatatttaaatactatcata

SEQ ID NO: 55550 - DNA, 114 bp, Gossypium hirsutum
  Clone ID: uC-gsronu33B072f01b1
ctcactcgtccgatctaatatgaaagggatcaaattattaggggatctaggattcactaatgacattataacaataatagagggatcaaattattgctaatttaatgcataaaa

SEQ ID NO: 55551 - DNA, 128 bp, Gossypium hirsutum
  Clone ID: uC-gsronu33B072f06b1
cggaccggaactgccggcccgacccacgccaccggtcacttgattcggcacgcgttcagaaaagcagaataggtctgacccagagcatacaagggaccgaaacacggcggctcaggggtgaccaaaag

SEQ ID NO: 55552 - DNA, 151 bp, Gossypium hirsutum
  Clone ID: uC-gsronu33B072h10b1
tttcgatactctctgaaagagaggagagggcagtcttgttttttttaaactcccattctctaaaccccacctaaaaaacttatcttctatattatcaccatcatataattcatacaacatctcactcatcaatcatcaaccacccttcata

SEQ ID NO: 55553 - DNA, 630 bp, Gossypium hirsutum
  Clone ID: uC-gsronu33B074h02b1
gcgtccattcgttcgttcacgaattggcagatcaagactggcctattgtgcaacttgcaagatgtgcaattgactttattagagaataaaaggcaaggaatggcaatggggaattaatttttagcggttgccattattgataaacaatcatattcttccttggataccatgaaatggctctaaggccttaaccaaggtggtttaagtttaatctttttttaactttaatgccctgtcccgggtcttaaaaggtataatttcctatttgtatttggtaaattcttaattgtttcaagaatggtatgaatcctttatatcaactcattttttttaggtttatattctaacattctatttagcttttttttggtatttttatataattttttgatttattcttttaatttaatgatactatctcatattttttctttatttcatttcttttttatttttttttttattttatattcattctatattactttttttttatcattattcattttaatttttctattatttcttttttattctctttttttttttaattcatattatattttttatattattatttctctatttttactttatattattattttttttttctattttttttctttt

SEQ ID NO: 55554 - DNA, 113 bp, Gossypium hirsutum
  Clone ID: uC-gsronu33B081b10b1
gtcattcgtgcgatcagtgtggggaaaagctagggaagataagatcttttgatcaaggggactgagaatgataaaaagatatactttatttcatagatgagagggatgttgaa

SEQ ID NO: 55555 - DNA, 114 bp, Gossypium hirsutum
  Clone ID: uC-gsronu33B081e06b1
gcttcttttacggtgaataggaggtaaaactagtgtggatgttatctcttgctccagaggacttacaatcttaaaaagttgatcttggcgttctaacagtgtagtgaggtgcca

SEQ ID NO: 55556 - DNA, 315 bp, Gossypium hirsutum
  Clone ID: uC-gsronu33B081e09b1
gtctctcgtacgatcagtctgaggaaaagctagggtagaaatgatcccttagtccaagggactgagaatactaaatagtcaaacttcatctcgtaaatcagttgtctgttgaatacaaactgtacctatggctattaattgcgcttgcctatggatgaatatgtgggaccattcaatctgaaatgaataccccgactgtggaactatgcccgtgcgcttgaatatttagaggacatactggacgtcgttctgatgacgtacccatattgggcagggtaaatgggactcttccgtgggcaggcaacatgccagctt

SEQ ID NO: 55557 - DNA, 312 bp, Gossypium hirsutum
  Clone ID: uC-gsronu33B081e10b1
gctattcgtacgatgaatctggggacactctagggtaaagtttatcccttgagcgacggtacgctgaaagagaactagatcaacttcgtctcataaatcagtgggctgttgaacacaaactgtacctatgactcttaaatgcgatttgctatggatgaatctgtggggacattcaacctgaactagacacctcaacggggggatgatgcccaatcactcgagtttctggtgcacagattggactttgttctgtgacgtacacgatacgagcaggagatctgtgcacgatctgtgggcatgacacctgcctgc

SEQ ID NO: 55558 - DNA, 177 bp, Gossypium hirsutum
  Clone ID: uC-gsronu33B081f06b1
ccgactatgcgggcggccctttggatttgactgcaaagggtttttctcttgtctcataggcctttaccttcttatattgctttacttgctataccaaaaccatgtttagttgccttttcatatacgacacgctttagctttctggctttccttcttgattactctccacaaaatgga

SEQ ID NO: 55559 - DNA, 144 bp, Gossypium hirsutum
  Clone ID: uC-gsronu33B081f07b1
tttcatgcgtacgctcaatcgttcgtcaaactaatgtgaatttggtctcacgctccaaagtatctttaattacaaacccttccttctaacaatataattcatttattttttactataatattcacttcattgactcttaatttt

SEQ ID NO: 55560 - DNA, 209 bp, Gossypium hirsutum
  Clone ID: uC-gsronu33B081f09b1
gccttgcgttcgttcaatgtagggaaaagctaaaggagagaagatccttcggtcaaagggactctaaatgaaaaatagataaactttatatcatagaatgacttatattcttaaggtcgaacagtacttaacactcttaaatacaactgaccatcgatagataacttagggaccccgatttaaagtaatactcactacatgcttatttt

SEQ ID NO: 55561 - DNA, 361 bp, Gossypium hirsutum
  Clone ID: uC-gsronu33B081g04b1
aaaaaattaaataaaaaaaaaaaaaaaaagaaacctaaacaccatggagaaccgtcccaagagtttccagcaagcatccggttgccacctcaagggtcactactctatggggccggcgcattgccccttactgggggggggcctactacggaacggcccgggtaccccccggggtttcccaacttaatccctttgtaatccctccccttacccccagttgggggccctcgcgaatagccccgttccgtggggcctcccctcggcttccccatcctgactggcgaacggtccccccccttttccggcctattaatcgcgggggatgggcccttccctggcccctttaccactttggttgccc

SEQ ID NO: 55562 - DNA, 231 bp, Gossypium hirsutum
  Clone ID: uC-gsronu33B081g08b1
tctataggtccgctcgatgtaagaatgaggtgcattatcttatatccctcgtgtgacgcgttccacaactgtcactgcacctaccttagccaatgcacgaaaatagtatacactatccccatgatcttggcgacttatatgcgctacatcaacaatgctgagatggatgctccagctgagatatatgttacttcaattgctctctgcctgcagctgcacagactgcaccct

SEQ ID NO: 55563 - DNA, 202 bp, Gossypium hirsutum
  Clone ID: uC-gsronu33B081g09b1
ttcatgggttcgatcgctgcagcaataagctacaatagcttagaaccttcgggcatagggattctatctgatcactcgatccaattttaaacatgattgacttatattcttaaggtcgcacattacttcagattcctatatacgactgcacatccatacatacattatgatcaccgcttcaaaataaagtcccctgcctgct

SEQ ID NO: 55564 - DNA, 219 bp, Gossypium hirsutum
  Clone ID: uC-gsronu33B082a12b1
tatttttataactcaaggccaagaaataagaagtaagaggcacaccaaccttaacaaagccttgattatcagtatagaggcgcactctgtgagggttattcggcctacgcatagcagtgttggctctgtgttcatgcctctatgaggaacccttcttggaatgtacaggccgcgttctgcaatgccctccctttttaataccccccggtgccccacttt

SEQ ID NO: 55565 - DNA, 580 bp, Gossypium hirsutum
  Clone ID: uC-gsronu33B082g03b1
tccgttgtttcacacattttagaacatagcaatataagagaggaaaagttaaataaaaataatacacaaatagaaaacacacaaacatgacacagcgggggtgccctttagagagggggggcttccgtactgctttcttgcgatgacatgcctttttggcgggccctggcatttttactcatttgcccggggttctccggcgggggtcttggtttttgtcgggctgccggtattctttcggggggggggggtttcccccgttttgggggtggggcccccggggtctgccccctttagggcggcgggtgccccccctttcttctcctcttggggttttggaccgggcccggtcgcggggcctcccccccacctggtgccccccccctcggggcttgggccggccccctttctgggccctttcttcccggggggggggggggttccccctctttttcttttctatttttcggtttcccccggcgcttttttttcgtgtctcccttttctcccgccccgtcttggttccccccggtggttccttcggggccccccttgggtcccgttggggcttttcctcctc

SEQ ID NO: 55566 - DNA, 242 bp, Gossypium hirsutum
  Clone ID: uC-gsronu33B082g07b1
gacttcactttagggcggaggagcctataaacgggacctcatgagaggcgcatggcggtcttgaagacagtgtacggacacttggaggacacccagacttacctgggaagtgtgaagcctaagtgggacagcccaacttagtcagccctgtgctgttcagtgctgttatcatagtactgataatatgcttgctgtacctatacttatttcaatccagaagctctaatctatcatatagggcc

SEQ ID NO: 55567 - DNA, 406 bp, Gossypium hirsutum
  Clone ID: uC-gsronu33B086d02b1
ccctcgcttccgatcatttcaggccgtttgatgggatttacggtaacacttttcagagactgaacagtttcaagggggattactttttaatattggatttccaacatgaaaagggactgaaaattgttttattcaaagcttaaggttcagttgattctatgttttattctctttactctcattttattcatttgttattgttttatatccttattatatttttctcattttcttattctttatattttttttcttttctcaattttttttttctatgtatatttatctttcattttctattttactttattataatcttttttttcatttcatcctcaatttatcatttattttactttctttttcttttatttatcttatttaatctttctcatatttatctata

SEQ ID NO: 55568 - DNA, 180 bp, Gossypium hirsutum
  unsure (1)..(180): unsure at all n locations
  Clone ID: uC-gsronu33B086g11b1
tctcttatcgtccgcagaaatctcgtgtggaacaaaaggctcatagctcgtttgctccccgctcaaaagnccattaccacaccttcaaattctttctcttatacaattatctaccttctttccctcccttcccaaccactttttacctaacccttttaccataattctttttcttactct

SEQ ID NO: 55569 - DNA, 477 bp, Gossypium hirsutum
  Clone ID: uC-gsronu33B099b10b1
gttgcccacaacatataaaagataatagagactaggaaagatataaaaaataaaaaaaaaaaaataactaaataaaaaaaaaaaaaaaaataaaaataattagatctcaccttggtgctgttgggggcgcccttttggggggtccccggttttggcccccgggttggggcctccgtttttttttttgggggccccttttttccacccccgggccggggttttccccgggggttcccgggcttcccccgggggttcccccccttttttgccctgggtggcattccccttttaggggtttggttttttcgccttggggcctttccggttgccctttttgcccatgggcccccccccctttgggggggggttcccccccctttggggggcctttttttgggggggggggggggggtttttccccggggtgcctcttccctttttttggccttttggccccgcgtttttggcccttttccc

SEQ ID NO: 55570 - DNA, 329 bp, Gossypium hirsutum
  unsure (1)..(329): unsure at all n locations
  Clone ID: uC-gsronu33B099d12b1
tagtttancaaataaaaaaaaaaaaaaaanaaaaaaaaaaaaaaaaaaaaagggggtcgggtttaggggccccgatctccgcacgcgaggggggggcgctatactgttctagggtgacctccattatatcccccgcccggtttttccaggggggactgggaataacactgtggggccccccctttttagcgttgtggcgggtatccctcttgcgccctctggcttaattgcctaggggcctacacctttcgctcttcatcacaggttgcactctcaggggggcactggggctctctctctacagttgcctctttaggaggggggggtgg

SEQ ID NO: 55571 - DNA, 358 bp, Gossypium hirsutum
  Clone ID: uC-gsronu33B099g05b1
cccacttgtcctcccacgcgtccgaaaaaacagcgtaggctacaatccaagttcaagattcgaagatgtcgggaagaggaaagggaggcatgggactgggcaagggagactctacgatttctattggcttttggcaattctatgttgtttaaatttggcaatttatctggtttttgctaaatggtatgtgtataaggataagaggcttgctgatgaagggattgaattggaagaatcggaacctaccttccactaaattaattaggtttcattaagattttgtgtttgtacctttgtataagtaccatgttaatttattgctgacagttaagctgtaaaaaaaaaaaaaaaaaaacaa

SEQ ID NO: 55572 - DNA, 128 bp, Gossypium hirsutum
  Clone ID: uC-gsronu33B100a01b1
ttctgtaacagagtccagttttctttctagcaagccagaaatagtgagtgagcaacccaaacgtattacaaaaagatttgcgtctgaacaactgtaaacagaggcaaagaaatttgtctttaaatttt

SEQ ID NO: 55573 - DNA, 186 bp, Gossypium hirsutum
  Clone ID: uC-gsronu33B100a10b1
ctcggtcgatataaaaggctttcatctttgagttggagtcgttccttttagagatctgctcctttggcacattttcccggcgttttcttgatccgaattgatgatcgatgatgaacttctgatactcctttacccatattcttttcttttctttttatctactttacttctttcttctcttctctt

SEQ ID NO: 55574 - DNA, 129 bp, Gossypium hirsutum
  Clone ID: uC-gsronu33B100b09b1
tgttcggtgatagtaccctttcatcggtatttgatggaagacccgttcatataattggagagatcaatgccttgttgaataccggagttagcgcccatgttttgacttacatctagcgctttgctctct

SEQ ID NO: 55575 - DNA, 145 bp, Gossypium hirsutum
  Clone ID: uC-gsronu33B100g07b1
tgcaagcgcctgcatggcaccagtgtccgaattgaccggacggacccacgcgtccggagatttgcttagtgatgtcatatatatataagaggagcagatgcttgacatcgagtgcttttctttgctgaaccgtgctcttgagatt

SEQ ID NO: 55576 - DNA, 105 bp, Gossypium hirsutum
  Clone ID: uC-gsronu33B100h01b1
gccctcctttctcatcttgtgatttgagcttcgtgtttgtgttgggataagcaattccccaagatgcataacgaagagggataaatcttggatcttttcatacct

SEQ ID NO: 55577 - DNA, 225 bp, Gossypium hirsutum
  Clone ID: uC-gsronu33B100h09b1
acggtctcgtgggttgactctgggcacttgtatatcaatggcaattccaagtttttttgtttcctttaccaagatccttgttgggttttgccttctttgtatggtacataaagattttgtggttgccggttttgaggaggttcgttttgctcatgatacttgtgatccttctaccattggtgcatttactgctgctcgaaactgttgaaacttatcatatatatt

SEQ ID NO: 55578 - DNA, 256 bp, Gossypium hirsutum
  Clone ID: uC-gsronu33B101c04b1
tgtacttttttgtctgtcagactctccacttcccgaaaattgttcctgacgttaaagtcaaagcagttatagggtatggcatttattgtaccctactttttttattgatttatttcaaacgctttctttttgttctctttcctctattatcaccttccttttaccatctccattattttgctcatctctgcaacatcaaatcctttttcttcttttttcagcttatcaaacacttttcgtttccaatttccttttt

SEQ ID NO: 55579 - DNA, 171 bp, Gossypium hirsutum
  Clone ID: uC-gsronu33B101e06b1
accattcgtccgcccacgcgtccggttaaattcagctatggctgcacaactcgtttggaccccaatcgatgttgtgagccaaaagacttatggttccaaggtttacaacaatagtaacagctgtatgaatgcaatttcaaacgtgctttcttgtctatataagaatggtct

SEQ ID NO: 55580 - DNA, 274 bp, Gossypium hirsutum
  Clone ID: uC-gsronu33B103d06b1
cccactcgtccgctagcaatcaaatgtcaaatagaaccttatggtctgaagtgaagggcctggttctggaagcaaaatcagtcgtaaagatcccatcatttcaaattatcgttgctcagggtgttactggttcattcccctggtctgcattgtcatttgcaccgatgtggttggagctaattgggttctcccacaagaaaactgcattcctgatagccatgtttgtgattgctacttctgcggggggcctttttggtggtaggatgggggatta

SEQ ID NO: 55581 - DNA, 170 bp, Gossypium hirsutum
  Clone ID: uC-gsronu33B103g02b1
accacgcgttttaccacgcgtacggaaacgaggaacgatcgcacatggttgcaaaggaaagattaaacaggctacagtgtatagctacgcgactctccgagagatatgagattagatgaaagactactcagacaagccactgtaacaatctgtgtagacatagacagact

SEQ ID NO: 55582 - DNA, 220 bp, Gossypium hirsutum
  Clone ID: uC-gsronu33B124c07b1
tcttttttgcgtccgcccacgcgtccgctcattgggggctgttaattaacatttggctgtgtttttcgtcatcctttctcttttttcaaattcaagtgtgttgcaagtttcaaattgtttatgtttgaatttctggcagaattttataaatggtaactctacctgccaaatgttattatatcttcaagtgtttattaataacactatgttcttgcataat

SEQ ID NO: 55583 - DNA, 344 bp, Gossypium hirsutum
  Clone ID: uC-gsronu33B124e11b1
ttttaaaaaaaaaaaaaaaaaaaaaaaaaaagaagaatttataaaaaaaagaaggaaaaattaaaaaaaaaaaaaaataataaaaaaggaaaacagcttattaaaatttctgtggggtcatcttatttttttggggtggccgttttggggcttccaattttcgtgctcttgtcattgggggtgctcattttttttgggtggccgctgatttacattgtttggggcgggtttttccctgggtgggccgggttaaatcggcctttgtgcccgcccttgtttgccttctgtgggctttttaatggatcctcaggttggaaagaagctttgttcggtgcggtttcccc

SEQ ID NO: 55584 - DNA, 404 bp, Gossypium hirsutum
  Clone ID: uC-gsronu33B124f01b1
gagcagcaaacaacacaaaaaacaacatgggagagatatgagaaactgtacgtgatcctaacaccagactgcgaaacatgcgtgtcgatccgtcctatttttaatattgtgcatcagacgatccgctacatttttgacctttaccattccctggaggagctatacaatgccttgtatgagttctgcttggacccaggctatgctgcccgcacccttattgcttaatgtaacaagcctggctccgagcgtccttgctgcttgagatgtatgctgccactgtatcactattctgctacatcttgcgcctgacgagtgcccacgttcttaccggctcacttggttatcgcttgtgttcattgtggattcatggcctgagcccgcggtgatcacatttaccttgttct

SEQ ID NO: 55585 - DNA, 400 bp, Gossypium hirsutum
  Clone ID: uC-gsronu33B125b01b1
gtccgtcctttttttttttttttgtatatgttgaagcccttcactcctttcctttatgagaaagagtggaggtaagaagggagagttgggtggtggatacggtgacggtctatctttatactcatgtggcgggggctcttgggcttgggttaaggcgttctaggattagtgtgagcttccgctcttattttagggtttaatgggtttgtttgctagtgcgtggattctatcgatctttcaccttgtctcatgaggagtttgtattccttaaaagagcaaggaaaaacttccctgtcttcacaagaaagcctgaagaggtcaatagcccggattcagccccagcaccatgagtcctatcaccaacaggagtctaaggaaaagaccggacttttgggggggg

SEQ ID NO: 55586 - DNA, 348 bp, Gossypium hirsutum
  Clone ID: uC-gsronu33B125b12b1
ttttaaacaccgacatgctgaaatagagggctgaccgtttgctaccacttactcgtcaatgctatgccattcaactggtacatgaagcacccgttcattcacagctcaaccatatgcagctaaagctagataacacttggagattggagagaggctagagctcactgataataatggcttaacactgcaacagcctcatgccaaacgataagacagaaggactctaggaccagcgctctcgtgtatggcacactcacggatggatcttatgcattaaaactgatgcttaggccgcgaactaggaaaaaaactggtggatcaactaagaatggacagagaccaaaaccc

SEQ ID NO: 55587 - DNA, 261 bp, Gossypium hirsutum
  Clone ID: uC-gsronu33B125f06b1
tcgccctctcgtccgggcagtagcagctgaaaaccaatctgagccttcccaaaacgatttgccctatgtcctcatcttgaaacccccggcagcattcagcatcttcggggaccatttgttccactcacccaaattccaattcctgaaagcgttcgaatccccactccctctttaccagatattgctcacccatgcacagggcgtacaagccattcttacattaactagcgggtttgtgaccggtgatactatacgcctttt

SEQ ID NO: 55588 - DNA, 339 bp, Gossypium hirsutum
  unsure (1)..(339): unsure at all n locations
  Clone ID: uC-gsronu33B125f12b1
tcggccacgcgttcggaataacttgggcaaaggctgaggaattgaaaaatttggaggaggagttaaggaagaccaaacctaattttagggaaggcaaactgaaggtggagaagggaaaatctgatttaaaagaaaacacactgagggtggaaaagggtaaatctgatttaaaagaaacccatctgactctggaaaaggacaaagctgatttagaagaaaacctactgaatctagccaggttgcagaagaaaccacggttngcgtaatgtgcttttaagaaaaacattctaaatggtttattgaggatgttgatcaactgaagatacaaacattttgtgt

SEQ ID NO: 55589 - DNA, 377 bp, Gossypium hirsutum
  Clone ID: uC-gsflmaxxa002f05b1
ctctttctttctgaaacgctatgtaaaatggagtatagggtacataggcacataactcggatacaccgtgctttgtcgatacagtcattgggcgggcggccgaataaaccaaaacctaataaggataacataatagaagaaaggggctgctgagatatgagagagcgaagcagtcaacataggttgaaagaaaaagaaaaactccgaggaagaagaagtttactggaaggggcaggtatgatgaaattcaagaagggaaggcccagactaggcgagcatgtctttgctgtgcatgacaccctatgggggcgagcaaaagattcgctgttgcaacacgatggaggccactaccgctgaatactagaaggctaggtatg

SEQ ID NO: 55590 - DNA, 398 bp, Gossypium hirsutum
  Clone ID: uC-gsflmaxxa002h01b1
cctttgctttcgcgaaagctacctccaccctcttggtcgggacatcaaacaagaaccggctctgacattcatccctcatattccttctttcgttcctgaaggtaactgctaaaaaactggaggaacgaccattccaataactctaggaaaatcgaagaggcctcctcgtttactgagcaggaacttagggctttgactaggtatttgatcttaaaattttgacaaggttgcctgtcttaagattttcttgaactccatcctttctgggttagagctattagctacccaatttgctccatacataaatcgttgcccagctgaagctttagttgcatttcaagaggtttggtaccttatccaatcttctaaactgaagaaaaattgtcagactctcaaat

SEQ ID NO: 55591 - DNA, 227 bp, Gossypium hirsutum
  Clone ID: uC-gsflmaxxa003h05b1
cggattgagagggttgcgcgggggtcataccaaggctttgagggggcttttgcaagctgtggataaaggggagcctaggtctcttgaacttcttggggagatttatgctaaaggagctggaggtgaaaggaattataccaaggcacttgagtggctttcacttgcatgcgaacatgggcttttattcagcttacaatgggatgggttatttacatgttaaaggctat

SEQ ID NO: 55592 - DNA, 175 bp, Gossypium hirsutum
  Clone ID: uC-gsflmaxxa004h09b1
cttttgctgcgggatcgttcctatagctttgttggatcttcatttctctgcaacgatgctaacttctgactttagaacgggaagtactgaagggaccagctctggcgtttactgctatgaagcctgggcgagggagccatactggaccttcacgagaagccacggttacattacc

SEQ ID NO: 55593 - DNA, 451 bp, Gossypium hirsutum
  Clone ID: uC-gsflmaxxa005b07b1
cccacgcgtccgtgtaatcatcattcaaaaaaattaatttattggaaaagtcagcattcgtcactacaaaggtcgccatatgcgcatttgaagcagatctgcatccaggtatatataagctctaaatcaagagcaagctgttggtgggctctgcatgctatgcacagcaccgcatactagtgcactgtcaggcatgccgaattctatcttgagagaaccactctggacatcaacattatcgtactggtgatgcatatggagctacctgttgctataatttactcagcttgaggctttactatcatcaacaagtgattagtaatgggtgcacgcatctaccttgagtctagctatcatgactcccaatatgatataagcttacttgtgtggcaggatcctagggaggtgaactggggtgcacaattcggtaatagctatgtgttgggttact

SEQ ID NO: 55594 - DNA, 496 bp, Gossypium hirsutum
  Clone ID: uC-gsflmaxxa005c04b1
ctttgtcacattttcccccatttcctgtctcagaactccaaaaccctaacatttcctcacagaaaaaaatagaaaataacgaaaggaattaccttaaccctaatggcattgatcgacctagcggtaaagctagaaaataagcgaaatgtcgtggctgaggacggctgtgaacaaagcggtggagctttttactcatctctctacaccctttctttcactattcttgttttttcctctattctctctactcttcatttttattttcttctatttctctttatctcccttcttctactcatttctattctaccattttttaattacttctttccttttttcttatatcacttattcttctatatttcactcttttactttctttagcccctatttcttcttctaccttatttactattttctttatcctgatctcgttcttactattttaccttttactttacttgcccaccctctcttattctccttctatattatt

SEQ ID NO: 55595 - DNA, 163 bp, Gossypium hirsutum
  Clone ID: uC-gsflmaxxa005c08b1
tcggttttatgtgtcaacataacgggtgtagagattacttacttggattcccctagtcacgacaagcgaaccgtgaaaaagcgaactaggaaatcggctgatagaaacagactaagaatgcaacaaatgcgggtcctagtgcacctagaagtgacatgtccaa

SEQ ID NO: 55596 - DNA, 144 bp, Gossypium hirsutum
  Clone ID: uC-gsflmaxxa005d01b1
atcggtcattgatcccgcagaacgaaaaaatagagggtttactgtgagctgcctcgcccttttgaacacgggcgacgtaccaagagagccccctggcgccggaccggccatcgtcctccgcgccggccaccgtacacggcggct

SEQ ID NO: 55597 - DNA, 182 bp, Gossypium hirsutum
  Clone ID: uC-gsflmaxxa005d06b1
ggataagtaagaaaagtcaggccacattgttgtccgcctctttcttttcaaagaatccctgaagggaaaactcagttcaaaaaacccagaagagaaaagcaaagaattaggcctttttctgggggggagggttactatgtttcaagagattctttttcatctctgtagaaactccttacttg

SEQ ID NO: 55598 - DNA, 108 bp, Gossypium hirsutum
  Clone ID: uC-gsflmaxxa005f05b1
tttacttgttcgtttgccctttagctgctgttaagggaaacattataataaacacaagcctttaacgctcgaaacgagcaaccttgaatcttaccctccagtctttcg

SEQ ID NO: 55599 - DNA, 118 bp, Gossypium hirsutum
  Clone ID: uC-gsflmaxxa005h09b1
aacgtaaactttcccttcaaattcgtttgatatggctcattgctcaagatgccttatcccatggactgcatccggcggaatatatctcccttgaagttcaccgcatatctcccccctg

SEQ ID NO: 55600 - DNA, 107 bp, Gossypium hirsutum
  Clone ID: uC-gsflmaxxa006c08b1
tcggtcacgcgttcgcctttctcactctttgacttcacttgaccctgcaggcttgcgttaagctaactctcttgagttcgtccctgggctaggagaaggtcccctta

SEQ ID NO: 55601 - DNA, 107 bp, Gossypium hirsutum
  Clone ID: uC-gsflmaxxa008d08b1
cccacgcgaccggtaaagccccgatgctctgcgatagctccgccactcgccctcaccgagagcgccccgcgcttccgccagcgcaccagagaccaggaagccaccac

SEQ ID NO: 55602 - DNA, 275 bp, Gossypium hirsutum
  unsure (1)..(275): unsure at all n locations
  Clone ID: uC-gsflmaxxa008g03b1
ccccttcggaaaacccggtgcgacccacgcgnccggtaatcacaacccatnacgccngccacagcagcgggccaaacccacggacagagcccacacttccccgaagacaagcgcaagaccgcgggcacgactggaaaaccaggcaacgctgacagagcagggaggaccacccagcgcaacaagcacgacagcgagagggaacaaacatccaggataagagggtgcgggaagcacagcaaggggacaagaaagcggatgacgcgcagaaggaccgg

SEQ ID NO: 55603 - DNA, 316 bp, Gossypium hirsutum
  Clone ID: uC-gsflmaxxa008h12b1
taattgctgtttctttctgcctctattgagttgtgttatttattgatcaaatcgcgtctgttttcacgcatccggatatcatctgtgatccttgatgattttttttcatgttgaatccaatcctgaatatacgatgagatctgaaccttatcttgggctacccgaaattagaggataaaccatgaaaccgatgtgacaaccattccaaataatcatctgcagatcgcgaataatcgctctttttaggcattctaaactggctgatgcagcaccgtccatcaagtgcttccaattaaccattctggactaccaattc

SEQ ID NO: 55604 - DNA, 442 bp, Gossypium hirsutum
  Clone ID: uC-gsflmaxxa009f11b1
ccacgcgcgctttttaaaatccatgtagcaatgcgttactgccttttagccggtggcagaaagggtccgcccgggactttgggtggctgactgtgaccgctgtagcgggagagaatgcatggcttcgccatgctcctagtgctgttgaacagccccacaccatggatttagtccacgatgatcctccttgcatggacacgatgatctccgtagagggaaaccaactaaccacaaagtctatggtgaagatatcgctgcgttagccggggatgctcttttagccttttcgtttgaacatataactggatccacagttggtgtcacacctgagaggattgtcagggcaattggagaattagcttaatctcatgggactgaaggttggcggctggtcaagttgtggatataacagtgagggtcttaccgatgtggggtgggtcat

SEQ ID NO: 55605 - DNA, 185 bp, Gossypium hirsutum
  Clone ID: uC-gsflmaxxa009h05b1
ttcacgcgtgcgcccacgcgtccgcggacgcgtgggctaggactgtcttcatgtctcaaccgactttgttcattttattttattcctggctggtgttagatactggcagaacacgctgttctctagtatcatatactgatggtagaccattaaatcgcataaccactgtttatagccagcgcaat

SEQ ID NO: 55606 - DNA, 169 bp, Gossypium hirsutum
  Clone ID: uC-gsflmaxxa010d06b1
cccacgcgttcgaagaaactttagaatttataaagctaaaggagatataatcattatggcaagttctgcaatagcatcttgttgcagagaacttagtgttgaactcccctatcaggagataaagtctttagagttggttaaaaacagtgttgacttttttctatttgga

SEQ ID NO: 55607 - DNA, 133 bp, Gossypium hirsutum
  Clone ID: uC-gsflmaxxa010h09b1
gaagtacatcagactcaaattccgcatccaatgggggaccgatgtgccgtatcagatccattatgtggatagaaatactatggtaatgcaaggaggggctatattgtctcatatgtctatcttttactatttt

SEQ ID NO: 55608 - DNA, 215 bp, Gossypium hirsutum
  Clone ID: uC-gsflmaxxa011c03b1
gcaattccctccacatatcgatcaggctatttactgccggtgatttttgtgggatgtttccttagcctactatgataacaacggtttatgatgctggactttcaaggtcttggtcctttgccatggttccgcattctgaaatctcatgtgttgtcattaggacctttagttttttatgtattgatcatgttcaatttcgatccctatcattgttt

SEQ ID NO: 55609 - DNA, 195 bp, Gossypium hirsutum
  Clone ID: uC-gsflmaxxa012a03b1
tgtacgcgtgggcaataatcttggataatggtaggagattttgccataaaatttctgtttttacagccatacctgagaattgtttgcgatagcttgagagaggtgatgcttttgtaagttattctactcgtttcttcgattggatttgcttgtcacaattcttttttaatctaatgttttttatatatttatctt

SEQ ID NO: 55610 - DNA, 332 bp, Gossypium hirsutum
  Clone ID: uC-gsflmaxxa014b06b1
ttttcttgttctgaaacacctagctcagcaggtacatccttaggagggacttgaccatatgagtctattgtctgcgagacatggacttttggcaatgaacagactgcaatcaatgaccacaacctgacaagggaaagatggagagatgccttatgaggtgagctgttatcaggggtgacaaggtactaaaggtgaatgagtattctgtgactgaatgatgtcaactgaagcagcgagaccgctggagggcaacatttgactatcttctactatactacaaactgcgcctgcatcaaaagatatttttttgacctcacactatgataacatga

SEQ ID NO: 55611 - DNA, 154 bp, Gossypium hirsutum
  Clone ID: uC-gsflmaxxa015c12b1
ttgatatatcgcttcctcctcagatctgatccaacccctcagatttcttaaccccctttgcaaaaatctcgaaaacccttcttagaaacttgatcactatgcttttttccaaaaaccccccttaagattacttgttctcagtcccacctttgaa

SEQ ID NO: 55612 - DNA, 107 bp, Gossypium hirsutum
  Clone ID: uC-gsflmaxxa015e04b1
aaataaggaaaaccctctctcaaatcttggctcgccagtcgcctatctttcttcttctgatactcccacttcattctgctggcagatgacagccgcttagataacct

SEQ ID NO: 55613 - DNA, 143 bp, Gossypium hirsutum
  Clone ID: uC-gsflmaxxa015f05b1
ttcatcgtccgaccaactttaccatggaaggtaaacgaaccagtgcagccttctgaaggacttactcgtcaaggaagtggaatcattggcacaatctgtccgttctagctgtttcaatttatcttattcctatcatttatttc

SEQ ID NO: 55614 - DNA, 494 bp, Gossypium hirsutum
  Clone ID: uC-gsflmaxxa026b07b1
tcgttaagagcaagccccggtgcgagagagctggatcagacacccacacgggctgaggctcttgatgtggctgccaatagtatgaggtcaatagctttgaacaaggctcactattcagttggagagcagcctgaacataaaaaaacggaggcttcatatgaggcttcttaaaaagttaaaggccaacatacggcctggggatgtatctctatgcttctgacattcgaacaaagctatatctgcaaaatctgtattccagagaggctcgcggatacgaatgtattttgccccaaaaacatcgacatttcctatcaaggtcatcaaaaaagcggtgggtggacatcattggtgactgttttaatctcaagcaaacctattacgatcttttcccttaaatttttatgaagatgttgttttggttctaagatcatactttgggatccacccattttttctgtgcatgtgatacaaacttgaacaattttatatttttt

SEQ ID NO: 55615 - DNA, 289 bp, Gossypium hirsutum
  Clone ID: uC-gsflmaxxa026d09b1
ggcgggtacagggatatatcgctaaggcttgtgtgaaaggaacaaggacagggtgggagaacatgagtcctaattggggacaagaaaaggcaggcaaacgttgggctggtcggccagtcgttttacaattagggtcacaagtagtgacagaagcacatttacccattggaacaatagcccatgcccaattggaaattggtcaaacaaattaagggcaaaaaattttaaaatcttaatcatcttcaaataaaaagaaaaatgaaaattatttaaccccataaggttggaa

SEQ ID NO: 55616 - DNA, 202 bp, Gossypium hirsutum
  Clone ID: uC-gsflmaxxa026f06b1
ttattatcaacggcttacaacaaagggagggtgtccatacaccgtgcaagctacagtctatctcaatgctctcaggaaacaagctcagacaggcctgcctaagtgtctgaggtcaatatccatatagatgaagaggggtgggtccatgatgcttgaatgcttaggcaggagcttgcgggaccccacagaccaatgtggggcc

SEQ ID NO: 55617 - DNA, 267 bp, Gossypium hirsutum
  Clone ID: uC-gsflmaxxa026g11b1
tcgttccacgcgtccggtacttttgcagtttctgccatgaatttggtgacaagtctgtttatcactgctctagttgtaaattggactttcatattaaatgtgctctgtttacatttaatattgctgagaataaacaaataaaacctattctaatggagacttaaaaaaaaaaaaaaaataaataaaaaaaaaaaaaaaaataaaaaaaaataaaaataaaaaaaaaataaaaaaaaaaataaaaaaaaaaatataaaaaaaaataaa

SEQ ID NO: 55618 - DNA, 372 bp, Gossypium hirsutum
  Clone ID: uC-gsflmaxxa027a11b1
tttgttttaccactacttttaacgttattatacttattccgtgaatcggaagcggggcactgccccttcttttggacccaaggtcagatccggccgtccgttccgggcggaagaaatcgtcaggtggggagttttggttggggagggacatctgttaaaagataacgcaaggggggtaagatgagtctcacgagaacattaaattcgtgtggaacataagggtataagctgcgttgatcatatttccatgtccagtaacaacccgtgaaagcgtggcctatcgattcttttttccttcggaatttgaagcctagaggtgttaagaaagctaccacacggattactggcttgttggaatcaatcgttcatagc

SEQ ID NO: 55619 - DNA, 277 bp, Gossypium hirsutum
  Clone ID: uC-gsflmaxxa027f04b1
tttctttgaaggagcagtggagagcaaggagcgagggttgtttgatttcatggggaagaaagaagaggtgaagcctcaagaggatgttgatcgtaaccgagtctgaaaaggttaatattcaatagacaaaggcagaggaagaaggtgaggagaagaagaagcatggtctactggagaagcctttaccgattagattgcaatcagcttcagcttctttaagcgactaggtaataatgtgaaggatcaagagaagacacaaaaacataaattaatatgg

SEQ ID NO: 55620 - DNA, 115 bp, Gossypium hirsutum
  Clone ID: uC-gsflmaxxa028e03b1
ttcacttcgtccgacatgatcgatttatttgtatgatgtccttgaacaagtttatagcattgtctatcaggaacatctttgtgaaataatattgatctattgtgtgttttgttcc

SEQ ID NO: 55621 - DNA, 446 bp, Gossypium hirsutum
  Clone ID: uC-gsflmaxxa028h10b1
tcgttccctttctctgtagtttttttttttatacctcctctctctctctctctctctatctctctccccaaatccctcccaccctagacccccggcgagaattcttgaagggaatccccggctccgccacccgcggtagatgctactctttccaccacccccaccactactggagccgcagccgttccctgtgccgcctaagccgactccatagactgttcccctcgctcccgcaacacggacacatgggacgaccctgctctccccactacactccacccaaagctacgcctcatgtgcagcaatggtggcaccaaagtccctggcccccatgacaaaaacttatgtaacgccagcggtgacactcgtatggccgttgatgaccgccacacttccctcatttacgtacaccaacggctctacctttcttttctccgggggtgccc

SEQ ID NO: 55622 - DNA, 187 bp, Gossypium hirsutum
  Clone ID: uC-gsflmaxxa038a10b1
tggacgcgtgggcttgttttgtgattaatggggtgaagatttggaatatagacggatatttttggagttttgtgaagagatcaatgatgagtgagaagaccggcatggaatggaagagttgctctacaaagcggagaatgttgagcttgttagctgttttgaatccctttatgagcctctgattaca

SEQ ID NO: 55623 - DNA, 124 bp, Gossypium hirsutum
  Clone ID: uC-gsflmaxxa038d07b1
cctcaaaagaaagccgtctcacatcaacatccgggccacattaatactattataggcgtatcctagctctccttgactccgccatcacccaaaatgctcacccaagatttctatacatatgcca

SEQ ID NO: 55624 - DNA, 350 bp, Gossypium hirsutum
  Clone ID: uC-gsflmaxxa039c01b1
ctgatacgcctccaggtaccgccccggcagtatttcctggacccacgacgccggttctagacaatggagatgaagcatttaaccctccttctcagcctcttatccttctctgcgtataccgcttcccctttagtagctttagctccatctccttccgatggtcacggccccacctgacaaagaagaccatgctctcgaacccgtgattgctaggcgtgtcaagttgaaccctaagcttaccgagatccgtcacgagcttgatatcccaaccgcttgcgaggctgtagatggtgcctaaatagaagaggcggatgctgcatgtccccttctttagggggaagttgctacaa

SEQ ID NO: 55625 - DNA, 240 bp, Gossypium hirsutum
  Clone ID: uC-gsflmaxxa039d01b1
acgacgaacaagggggactttttacaacgaattcaggtgtgccacccccaccctcggcggggacgccgtctactactccgacactccctcaacggagtatgatactctcggcacttctgctaaagcagccctcgatcaaacgcgacggtcctaaatctagcttgttcgtctagcaacggcgaagaaggccaaaaacgagcgatggcttccatccgtaccaggaaactatgaaggcaagga

SEQ ID NO: 55626 - DNA, 251 bp, Gossypium hirsutum
  Clone ID: uC-gsflmaxxa042a10b1
tgcttgggggaagttatatctgagcttaaggcagatggtgcttcctggattcagtttgatgaaccgacccttgactagaatcttgactctaaaaaatagcaagcattaaaaagtggctaataaagatttggaataaccctcttaaaggctggaatgtaatgaaaaggaacctcctttgttgatcttcgtggggaggggaaaaaaccactcattgggttaaaaactgaacccgcaatatggtttggatttgc

SEQ ID NO: 55627 - DNA, 160 bp, Gossypium hirsutum
  Clone ID: uC-gsflmaxxa042d01b1
caacagggggggaagaagaccccgcagacgagaacccccccgacccagagaaagacccgagagggggaggaaaagaagcagcccacgggcgaaagagaaaaaccaccacctttaacgccatctgaaccaaaccgagaaaaacggaggcggggcacggccc

SEQ ID NO: 55628 - DNA, 292 bp, Gossypium hirsutum
  Clone ID: uC-gsflmaxxa043c03b1
ggacccggcccgtaattcctttgcgaaccaacccgcccgttattttacactcacaccaaggcacctccggggatgctttaaaaaaaacagagggtcctaaacaaaccctcacatgtaataccatccccctaacattgcatagccctacctcggatcaccatgataaagacctacatcctaaacatggaacggaacccaaaccaccaacagactcttaatttaactgctaaacagattaatgatgccccgacccttgctgacttcacactccagaacgaatccccactccatt

SEQ ID NO: 55629 - DNA, 236 bp, Gossypium hirsutum
  Clone ID: uC-gsflmaxxa043g04b1
gtaagattcaaactcgtgctggccacgaacgctggccttggaggaggagccgcagatctcgaatcacgcaagccttggctgatgaatgttgtgcccacaatcgtcatggccaccttaagcgtgctctatgagagaggtctactcgtaatatatcatgactggctctaaagtttctatacgtatacaggagcatactaccttatgcacgctaatggtgtatttagcttgtatcaaca

SEQ ID NO: 55630 - DNA, 326 bp, Gossypium hirsutum
  Clone ID: uC-gsflmaxxa045a07b1
tttttcttcagagccgaccgatatcaatgaacgtattgtagtgaagggattcgtccacaacttctgaaccaacaaaaatttctatagaaaaaaacaatccttactttgtgactccgagttgccccttatcacatcgtcacatatacgagaatccctctattttttttcctggaaaatgcatatctttaacgatcgctatgtctctgacagtactagggcgtgcttagagaccattaatatggggagcgacgttttacaacctcaggattgcttgatcagacggatcacagagaccttcgacagggtgtgcgggacgcagatacggg

SEQ ID NO: 55631 - DNA, 361 bp, Gossypium hirsutum
  Clone ID: uC-gsflmaxxa045c01b1
ggctgctgcgccggctggagccgccggggcggaattggcgggtcgcacgcggccttcgttgggttcgtaggtactagccggagtgccctaggtcggacctgacacttggagtgccaactcacaccgacatgactggcataaccatattgaagcctaatgatgtccagggcctccatgcctgtcaagctgaccatagtgatgagggggcatacataactaatgcactcattgtttacattggagacccagtccagattgtgagcgaccgaaaacttagattgatgctttgataaaaaattctggagaacccaaccctttggattactaaaagcagcccataaaattgagttatttaagcgag

SEQ ID NO: 55632 - DNA, 382 bp, Gossypium hirsutum
  Clone ID: uC-gsflmaxxa045g02b1
gctggtgcgcctgctggtgccgccgcggcgtaactgggtggacccacgcggccttcgttttgctgtgcaccgacacgcctaacatgccgcaacattagagcatcctaaacatgctgactctgtgcactacaaagtagcgggacaagacgtgagccatttggagccactggcactccagaccatacctcgaggactactgctgctcaggtggactagtggccatgcaagctcctgtgttgatgcatcagaagcttcactggagcttggtccgataccagagctgagaggaatcgggtattgcaggacagactgcagtgaccatgaactatatgctgtgatggatgctgcccatggtatgtcgtgaaagcaaccgttggctatg

SEQ ID NO: 55633 - DNA, 348 bp, Gossypium hirsutum
  Clone ID: uC-gsflmaxxa045h02b1
ctgctgcccccgctggtgccgccgcgccggaattgccgggacccccgcgtccttcgttcacccggccggagtcatgactcgcggaccgattgctgctgcgacaacagccatggagttctctgcatgtatcgacgcggagcagactgctaaccggcttggaatcgccatggaagctcacaaagctgatccagcgccccagtcgggtaccattgctagcgctacagccggggtgatggaagcttgctctgctgaaaatgctgtgcagcgatcccttcttgttgatagaggacaggagggggtgctggttgctcaatacattgcatctattgtggctgtcattgccgaaag

SEQ ID NO: 55634 - DNA, 371 bp, Gossypium hirsutum
  Clone ID: uC-gsflmaxxa045h05b1
tgttatcggcgccttttttttttttttttttttttgaccaaagacaaatatcattctggatggcttttttttttttttttttttgggggaaaatccaaaaccacacttgcaggtggcaccatttttttaaaaaaaaaaaaataatgggttttccaataaaacctgcttcaaatttccaatccacttaaaaaccaaggggaaaggctggccttcctttaatgtccattccataatttaaggtccataaccctaccacccttggttttaaagaaagcagggttacccagaagggggtggagggttagagtgtcagacccaccagcttgctttaatgacagttgttaacctttttttgagcctcgaaatttttg

SEQ ID NO: 55635 - DNA, 321 bp, Gossypium hirsutum
  Clone ID: uC-gsflmaxxa048a04b1
gttgtgttcatagtacggaaccatctgtaatttgtttgctgagaaattaacatgagacctcaggcaaacacagagcacatttataagccttttattgctcataactgccatctgtgtttgccttaggtctcatgtttatttctgagcaataaacggcttataaatgttctctttttgtctcattatatatcataatattaatcaaaattgtcatgaatgagtactgttgggcaggtctattgaattctggtttactgacccgtgcattcgtgggattagctctttttttgtgttacctatttctttttgatggccctcttt

SEQ ID NO: 55636 - DNA, 374 bp, Gossypium hirsutum
  Clone ID: uC-gsflmaxxa048b10b1
ttcttttttcgttcatcattgaagttcatatcttgctatttagttacaacaagtgcacttatatggggctctatgatggatcatcattgggttcatcattcttttgccgcatgtggggcatgtggtccatgctaagggtatttccaaaacatgttccatttgttggaaagaacatctgctaacgagccgaggctgatgtatttctcctgacaccatggcataccccacatagaggaaattttgttcttggggatcaatatcatgcgtattaaaccgtcgcaagtacattctgctggaactctgtttcgacaatgagtccgcattacccatcaaaaggagcctacctcctactaactcgacctacagcatgttct

SEQ ID NO: 55637 - DNA, 505 bp, Gossypium hirsutum
  Clone ID: uC-gsflmaxxa048c05b1
taatcctataattttcagttcattgtttactgttcatcttcctccactagaaaacttgtgttttgatgactttctttgttctcatgctgaaaatctgaaatcttttgtgtgtttgaaattattactgtttcagtccttttgtttttgatttccttttgtttcagtccttttcttttcaagctaagtgttgatcatatatggattctcttcagggtttccaaacatcaaatataaacccttcttccaccaccaatttgaatccaaatttccctgcaaacctctccatcaccaccgtgggaaccaccgccggcgccaccaccaacacgatccctttatcagcagccgcggcctcctcctcctcctcctcttcttccacttctccttcgacactcagtcgctacgaaaaccaaaagcgccgtgactggaacacgttcgggcaataccttcgcaaccaccgcccgccgctctccctgtcccgctgcagcggcgcacacgtcctggagtt

SEQ ID NO: 55638 - DNA, 419 bp, Gossypium hirsutum
  Clone ID: uC-gsflmaxxa048c11b1
tcgtttcaaattcgcttaaaaattccccctctttggtccaatcctttctctaattacactaaacgccccttcaatatttgataaacttaatttattgttaaaaaattttcccattcttttttttttaaattcgagatttttccatggccgccgatgtagaataaaccatacattgattgaattattggggtttcgcttcagctgtatggggtttatgaaatgcctgagctgcgaaaaggtttttttagaggccacgccacgttagtacaacctttgcagccacaataaactcggaaacaaacgaggaatcaaggtcgtaaacttgctgttgtgacggttattgaggtaggcagaccaaggtctagattggccgccaagagacttacggatgcggaagaacaccctcaggttgttgcgat

SEQ ID NO: 55639 - DNA, 411 bp, Gossypium hirsutum
  Clone ID: uC-gsflmaxxa048d09b1
tcgtacgcgtgggcggactcgtgggttccgtgaatgtcaagctgaactttgtgaccctttaacctgaagggatcgatattgttaccatcaatcgtcccaattcacagaacttcttgaccccgacccatgatggtggacttgaccaaggctatcaaggctcttgcgaaggacaactcggcgcggatcataatctggtcaggagctggacgggctctctgttcaggcgtggatttgacggctgcacaagatgcatttaagggtgacattaaggacccgtagactgatccggttgatcagtatggagcattgccccaaacccatcataagatcttttaacggcgttgctattactgtcggcattgagatcgacctagctagtgacacgctggtcggtgctaagggagccacttt

SEQ ID NO: 55640 - DNA, 341 bp, Gossypium hirsutum
  Clone ID: uC-gsflmaxxa049e09b1
ttctttaattggttccctttgaggagtgtattgagctacattctagcgataatgcagttttgagagttcctgagtatcttctccttacacataatgggcgcaccttcaacataattgttgatcctatgaatcttcgtgatggtcttcattattatgaagtctatggaattgactgcaaagccccatggcgtggtcctcttttcagaatcccgattactataacaaagccaaaggctgtaatgaatcggccaccactagtttcattctcaagaatgtcattccttccaggccacatagaacgaaggtatatagaggtgccacttggtgctagttgggttgag

SEQ ID NO: 55641 - DNA, 267 bp, Gossypium hirsutum
  Clone ID: uC-gsflmaxxa049g11b1
ttgtctacgcgttcgaccacgcgtcctaacgaggggtcttaggcgagccttgacatattcgaaactggaccgtgataaccgacacttttctggatcttcaagataactgctggccttgcatgtttttattacatgggagtatcactcaacattcagcgtctgctttcgttcacctaactcttgaaggttcaaacagattattcaatggtattacgtgctaatttgggtggtagggcattacatgaactaccatcgaagtttattcgg

SEQ ID NO: 55642 - DNA, 336 bp, Gossypium hirsutum
  Clone ID: uC-gsflmaxxa049h05b1
tttttggattcttgtagctcccaactataaagggtgtgtttttgatactcattgaattgatctgaagctgcctttcattggtttaaagaggtaatcgtgagaactccaacgatatatgcatcaatcggacttggaaatttctatgtgctgccatacattacttggattttgactatatgaacaaataggaaatgcaggatccctaattgtataggtcttaggaaagctgctgaattcgatatccaattggaaaccgaatagtgtgttaagaactacaacactttggttaaagaaggagctaaaagagggctctttaagttgcccccggaacatcat

SEQ ID NO: 55643 - DNA, 350 bp, Gossypium hirsutum
  Clone ID: uC-gsflmaxxa049h07b1
tttttcacgcgttcggactatgtaagcttgtgcgggttgacggtagtcaatcacactacctgtggaacaccaaatggcagctgctgctgaggaccgtgatgctggcggctatgctggagctactgcagacctgtggtcgtgtggaagtgatagctctgtgtgttgctcgcaggttacttgcctttcgatgaccgtaatcttatgaacctgtgcaaaaagattccagcaggtgaatttacttgaccccataggataagttgcaaggcaaggaagaagagcacttatgttctggcttgcaaactgctctcttaacaaactatgtctgtaatttttgaaagaggaggggtttt

SEQ ID NO: 55644 - DNA, 257 bp, Gossypium hirsutum
  Clone ID: uC-gsflmaxxa051a09b1
ctctctggtttgccggttctttgattgcgacacgaaggctgagtaatccacctgcattgactccctcgacctatcggctttagaacggtgcctacgagatgcgtgcttatatttctcaactgttcaatatctagcccatattcacgctttattgctaatttagtgtatgaaatggaaactgtcatcaaggtgttacaaacttctatcttttttataattacgcttaaaatttcttacctaaagatacttcaataata

SEQ ID NO: 55645 - DNA, 575 bp, Gossypium hirsutum
  Clone ID: uC-gsflmaxxa051b06b1
tcgctcacgcgtccggtagcagagtttctagggactcattggaatttgatgaattcccaatgggttcttcacaatgcagaagtcggcgaaaatggtcatctctttgatctcaatggcaattggtcggttttagtgttttactgttttactattttttcttctacttttctctttatcttattttcctttttttctcttttttttatattttttttttttttctttatctttttctttcttttacttttttatttttatctttctttttttcttcttttctctattatatcttttttctttatttctctcttttttatttttttttttctcttctttatctttttctatattttttttctttattatctttcttttttacttttttaccttttttttattctctttttatttacttctccttcttttattattttacttttatttctctttcttcctatctcctctttatcctcttctttttttatttaatttatcttttatcttttactccttctttttatttttttttttcttatatctattcctcattttttactattcttcttctttttttt

SEQ ID NO: 55646 - DNA, 107 bp, Gossypium hirsutum
  Clone ID: uC-gsflmaxxa052e04b1
aaaatatgcaagtatcaaaactgttcttcttcacttctccgtctcctcgatgctgattcattccgatggctgttgctgcatctagtgatatacatttcaaccttcct

SEQ ID NO: 55647 - DNA, 240 bp, Gossypium hirsutum
  Clone ID: uC-gsflmaxxa052h03b1
cgttcggatctaaaaagttattggtatggaagccaatggcctacagttacaaaagttcccgccatttcatttattgcacatcgttatcatcgtttcgctttcacttgtctttgcgttctgatatggcccgtttctcggccctctgcttttcttaccctctttgaagcccaagcaatgaccgagtccgctttcccatcttattccaagtacttccattgcatcccctactttttcataaat

SEQ ID NO: 55648 - DNA, 272 bp, Gossypium hirsutum
  Clone ID: uC-gsflmaxxa054c05b1
gttatttttacgacggcgggcctatcgacgtgtgggctctttcgaactgattatcggataatcacttctaagtgcacagtctttggtatcagcaatcaattgatcccatcattgctaaattatgtatcctcttccatcagaccatggattgatacttcgagttgtgcccgaactttctattaactactcccctaagctttaatatgtttttcatgctacactctcggcaagaagctttctactcacaccctcggagggactcactgggacct

SEQ ID NO: 55649 - DNA, 292 bp, Gossypium hirsutum
  Clone ID: uC-gsflmaxxa054c06b1
gctattttttctacgacaagacgatcatcgtgtgcgacggttcgaaacactcaactgagcatgctttcatagtcgaccgacgccggagtcatcaataaatgtgagcccctgattgcacatgtactggatcccacctactgatgataccgtttggaatcacgggctatacgcgtaggtgcttgtcactactcgcttacattttaaggagtttttctggctacattttcgaaaacaacggttaaaactagcacccttggagccattcactgaagaaatcaatttttaatgaaca

SEQ ID NO: 55650 - DNA, 466 bp, Gossypium hirsutum
  Clone ID: uC-gsflmaxxa054d08b1
tttcttatccgtacaaaaacaaaatcatactagtgaacggttaaaaaaaacatttgtctcatcatccaaacatagcccacaaaggcaaaacatataatacatcattacatctgatcctttgagtgactattagatcatttcgcaaatgagtgagaggatacccacattgttaggacttattcagtgagtatgtagagaatcagccgctttttgtcccgctattctttatctaatgactcaacaaatgtgtatatcaatgaaactgtatacaacctatttttctgaaccaagttttgtcacacaatcatgcatttcacgcgttattatacgactagggcttgttaagggttattcctaaccctatgcagaatgctaaccattttagaactattacaccgttgtcaaatttgaaatctattattgcaaactctaggatcaagcggttttattgcagtttagggcctaa

SEQ ID NO: 55651 - DNA, 444 bp, Gossypium hirsutum
  Clone ID: uC-gsflmaxxa054e08b1
ttgttttcgcgtggttcaagatcacaaaaaatgggggccattaaaatcaaatttgctagggtttactttacttgactgtcaaaccaccatgaacctaggcaattaccatgctcagattgcatctctagctcaccattctaggagcgtcatcacaaatactagcaatctatttgaatcaacggccaaatatccatactctgcttgctctgccttggtaattccccacagagcactgctaagaatactgcctaattggtagccctcataggcgaacatatgctgatcatacataaatggaagagtgagaatgtgccctaagaaaaattcccacttgcttgagataggggatccatgtgagacaagaattgagctgggcaaaattattttatagacaatgaaagcttgtccccgttgagatgccacagaaataggccatgatgagaa

SEQ ID NO: 55652 - DNA, 227 bp, Gossypium hirsutum
  Clone ID: uC-gsflmaxxa054g03b1
attttatataaagctggttgaaattgatgtgcagggggggagttgattcttggactggagtgatcaactattatgggcctcgcccaagcacacggtctcatcaggtatttgttgcaaaccatacatcgaaaatagatttcattattctggagcaaatgacaacacttgtctgtattatgcaaaagcattctggatgggttgcgtttattcataagactatcttggaa

SEQ ID NO: 55653 - DNA, 237 bp, Gossypium hirsutum
  Clone ID: uC-gsflmaxxa054h01b1
gttttgcttaaacgtcgattacccaatactatcaagggctcacctaataaaaacgacgggctctcaaaggctacatcatgcataagtgctcagccctcaaccagcaacatggctcatactttgaacatcggaattacaaaaatgtatacaggagtaacgcttggctgtttcttttaggacgagttgacactgaagaaaaagagctagcaataatggaagtgatacatttcttggatg

SEQ ID NO: 55654 - DNA, 226 bp, Gossypium hirsutum
  Clone ID: uC-gsflmaxxa055c02b1
aaaaatggaatttagaattgtgtttgtgtgagaaaatctgaaaggggtgttgtttgggaagcacattatgattttgccgttaggattgtcgggaagataatgggataagtagaatgtattgacgtatttcataccgctctgaagacatcttttttgaatttgttataacctatatgcgaccttatgtttggctgagaaatccaccttttgatccaacataccattg

SEQ ID NO: 55655 - DNA, 291 bp, Gossypium hirsutum
  Clone ID: uC-gsflmaxxa055e08b1
agctgccaccggtgactgagatccgatcacaggtgcttgctgagggatcttgtatgttgggtgaggaggttctcaggaaaatgtctgtatcccaagctgttcagcgaacgaagcccatgtccgtgactgctgatgctgctcctttattactggaggccaaatcaggcgaagaggctgctccactgaatgatgttgcacacaggaataggctggcgaatgagaccaggctagatataaggcatgcgacagacactgggagtcgtgagttgcatcaccacaactcattagaca

SEQ ID NO: 55656 - DNA, 408 bp, Gossypium hirsutum
  Clone ID: uC-gsflmaxxa057c01b1
cttacgctttcgcccacgcgtccgtttgtgcttgggaaacttaaaaaaaactgtggctttttctttgctagggtttcaacttgaccttgggtgtcgttgtatgtgtaccactccccaccgaggacccactgtggccggtggacggagttacgcaaaaagggggttgagaccctcgattcttcatattatgagggcacaaattgcccaacccaactgacggaggacgagaacttcaacccctttttagatctggcctcgacgactgagaacaagggtttcaactaccagaccgctaggtgactcggagagaatcattaaaagcgtgcatcgacgggcattgcgcgctgagagggccttactgacgtgcagggaacatatggaggagcgggggttgaaagccaaaatgac

SEQ ID NO: 55657 - DNA, 350 bp, Gossypium hirsutum
  Clone ID: uC-gsflmaxxa058e01b1
gtttgttttctgcttaaacatcaaacaaaaacaggggttgttttatatacatggcggtaaaaagcatgctacgccggaaagggaagccaaacagcgggcaagaccaaactgggatgaaactaattcaatgggaaaagctagggatgcctatatggacaacagtccgtcacagagcacgattgtggtgcctcatggcgtgacagcggagccttctaaacagcaactactcgaaccaccgccatcccaagccttcggtcagcccgtcacacacagagaccatagactaagggtaatggaacgggtcttgtacggccgcgcatacacactatactctacgccaaaacttgggt

SEQ ID NO: 55658 - DNA, 381 bp, Gossypium hirsutum
  Clone ID: uC-gsflmaxxa060a03b1
gccggtaccgaatcgcagtttcggcccacacctacgctttctatcactgcgtcctggcacagaccggccactaactacgacgaaccactggctcccggcgagcgtcttgcttttaagccggaatcaggcgtaggaatccatcgtatcacacgaggaaggaaccccgcccacatggatgctgtaaaatcggcgattaagtcttcgaagatggtccaacaccccagattctgcagattgatggttcttgacaagaacggattccagcactggaggaaaaccccaacagacattggccaacatgtaggttgtcgttaactgccggattgataaatcgggcaattttatttgccaaacacaaggttttaccaccaccgaagaaga

SEQ ID NO: 55659 - DNA, 421 bp, Gossypium hirsutum
  unsure (1)..(421): unsure at all n locations
  Clone ID: uC-gsflmaxxa060a08b1
atatggaaagctgangcgcctgcaggtgcaggtacataatcggaagaacagccaccacccacgcttttcgtttacgcgtccgaacacatacaaaccaataacaaaatggcagaaagaggctgaggagagcgtggagcattcaggcgtggcttaggtggaagaaccgaccgtggccaaagaggaaggcgacgtggccgcagagaggaagaagagaaatgggtgcccgaaaccaagcttgggcgattggtcaaaaccggaaaaaaaacgtccccttgagcaaatctacctccactccctccccatcaaagagtaccaaatcatcgaccaactcgttggcccttaattgaaagatgagggcaagaagatcactccagaccaagaacaaacccttgccgggcagggtacccgtttcaaggccttc

SEQ ID NO: 55660 - DNA, 302 bp, Gossypium hirsutum
  Clone ID: uC-gsflmaxxa060a12b1
tctcatctctctagcttttgttgatattttattaggtttaacattgttaatttgtactctctctttttttttaattttccgaatccaatatcaaaatggagcttcaacttggtcttgctcttccaactccaaacatggtaaaggggtttgtcttgaacacccttgggacttgatcagctcaacgaaaatgctggggcttctgaaggtgcatcatggtgccttttaccccttctcttttgtctatatcccttggattatgactcggaactcgtctggcttatcgattccaaattccccaaaga

SEQ ID NO: 55661 - DNA, 291 bp, Gossypium hirsutum
  Clone ID: uC-gsflmaxxa060f12b1
tatctaacgaccacgctcgattttgtcaactgtgctatcataagtaaagcacctgacacacagtactactgcttcactgagtaagggggcaaagatgctatagaggctagtggaggagctgaccttgaggatcagggaactgttatggtgaagtttgggggtctgagaaacggtggccaacgaatgagagaatgacagcgttgatccgaacgaggaacatgagaacgctgatgaaaggagatagagacctccgctggtcccatattgaggcttaacacagatccactgata

SEQ ID NO: 55662 - DNA, 291 bp, Gossypium hirsutum
  Clone ID: uC-gsflmaxxa061f08b1
tcggtcgcgtgggtacgacacgcttacactgtactaccttggctaagatcaaccctatgagctgtatcaccaagattgcccatatttgtctaaagtctgtattgcgtcttatgagctagtactaagtttaactaatactctatacgttattcttgtgtagatactatcacttggttatgaagaattgactgcaaaaataacaactgatgactcacataaatatgggggggcggtctaaatgagccatagtatacgacgctttacactggacaggacaaccttttatatgaa

SEQ ID NO: 55663 - DNA, 262 bp, Gossypium hirsutum
  Clone ID: uC-gsflmaxxa064b06b1
taataatgaccgcttcccactatacacccgcggaggatttttttaagctagtacccgcgtttggccacgcgagcatggtaaagcaccaaccaaaacacatctcgaggataataccctcactaatggccccccacctatctctaaatgaacaacaatattcttcccccagaacagtgctccgacaaacccagaacccacagttaaactcccccccgtgctctccccaaatcagtcacgggaacatctgcgcttccagaagtgt

SEQ ID NO: 55664 - DNA, 380 bp, Gossypium hirsutum
  Clone ID: uC-gsflmaxxa064c12b1
atcgctcgagcggccgaagatcatatattattggtggttttttttactcgatccccctcagtctcacccctcttacaatacatcttcaattcccttagtacccacatgaaactactctcaacaccacactaacaatatatatatcctacatatcagctattaaaaattactttcatcacataaccatcattcctggacctctatccacaataagcatcttcccttctctcaacaatctgttttatttacatcctatgataacgaaaatcctctatgataaacagtcaaatacgaaaaagaaaaacgatctttcaaaataccacttgaaaaccgtcttttattcaccctttttggaaccgacttaccagaattattcttcc

SEQ ID NO: 55665 - DNA, 280 bp, Gossypium hirsutum
  Clone ID: uC-gsflmaxxa067c02b1
aaaagatggaaactaatcatgggagtgaaagggtgagaatctctacctcatgaaatatcagtctggaggtgccagttggcagtctggttgcagttggtgatggatctggtcaagggaaatcatggcctatgtacctagtgctagggatgattcctgcgagtgctaatacaggtgttgccataggaggaactggcgcgaatgaaacacatgtgcaaaggatggataacgctcctgttcgtgacaacatataggttgggtgaagctatcaacctgcacggtc

SEQ ID NO: 55666 - DNA, 126 bp, Gossypium hirsutum
  Clone ID: uC-gsflmaxxa067f02b1
tttttgggcagcggcctgggaaaatcttggtaggggggctcttggaacaaatttgtccttgaaatcaccagaagaggtctctctgttggggactacaaaagaggtcattgtcaccggtgacaagtc

SEQ ID NO: 55667 - DNA, 388 bp, Gossypium hirsutum
  Clone ID: uC-gsflmaxxa067f03b1
cgggacaccccaggggccgccgcggaattctctcgggggacccacgacgccggccttttcatatggtgacctgtgagcagatgagggggggaatttataaaccggtttttccctgtaacctcaaagtatggactattggccggggcgacccgtgacgccagggccattggtcagcggattgaatgggacaccgctggaactaggaaaaatatgaggagaggatatcgttgtgggatactcaaaaaaagctctgtttgaaactttatagatatgcgaaatgtactaggtggacacggaaaccgatgtcaaatttgagagctcgacatatgatcatctggaaggagttgctggatctcctgctagaggattgagatttatagataatgcg

SEQ ID NO: 55668 - DNA, 413 bp, Gossypium hirsutum
  Clone ID: uC-gsflmaxxa067f04b1
cccacgtttacaattggtgaccttggtgctccctggcgtgaaaagttcggccggcaaagggcttcattcagtgaaaaaggactatatggcgcctgatgaaaagcttccaagcgctggtaacaagatcgctgaagaagccgatgacgagaggactaagggaaccaccatgagcatggcaacctacgagatctacgtacttaaggtcctgaaacaggtgcatcctgatgctgacattggcagccatgctatgggtattgtgaacagttgtataccctgcattttccaaagggtggatgaagaatcttaggagcgtggacgctataacatgagacccaccagtacctgacaagagattcattctgcccgacgattgctcttacatggggagttgctctagcatgctgtttgataac

SEQ ID NO: 55669 - DNA, 176 bp, Gossypium hirsutum
  Clone ID: uC-gsflmaxxa067g01b1
gtttttgagaagtgttgcgctacagtatgggagacggtcgggtttagaggagttttggatatgatatgaaccatctgtgttatgaaggggtgttggagtgtgtaacgcacagccgacggagtattaatgatgatgaggaggagaaattgatgggaaagacggacattgtttgccac

SEQ ID NO: 55670 - DNA, 249 bp, Gossypium hirsutum
  Clone ID: uC-gsflmaxxa067g03b1
acctttcgtccgcccacgcgttcgctattaagtgtgagattgtaagaaacgctatctctcttctgttgcggccgctgttcataatcaaagaccgcaagtaaatatgaatagagattgactaatgtcgacattaattaacaaattgggagccgtctgcccattgcctgaatgccacatggaacctatttccacaacattgaggggaacccgggtcaaggcggaaagtttgtctcggcggctggaactttc

SEQ ID NO: 55671 - DNA, 381 bp, Gossypium hirsutum
  Clone ID: uC-gsflmaxxa074e01b1
gtttgttttttacaacaaagcctgtaccctgtggtccttcgtgcttgccaaagtatcttccgagcaaagagtctgatgcaacgatgaggaatgaagaacctagaacacatggaacaacatgaaccatgggccagatacctgaacttgagaggaaagcagcaagacagtctagagctgccgcagcacccgatgctaatgcggagacagtcttgtcaatgcataaaagacaaattgaactccaattaggagagccggagggagaagatgaatcctcatcctgaagaagttgcctcaggctctcctatagagccacctagaccatgccatgctggtgagtcataagcagatgcacatgggaatttttccaggagaggctcccat

SEQ ID NO: 55672 - DNA, 424 bp, Gossypium hirsutum
  Clone ID: uC-gsflmaxxa074f10b1
tcgcttctgttgaagggattgaagacgctacggtggggtgccatatttccttaggagatgtcagtattgcacatagggaagatctcagactgtctaagtcactgaggagggatcatatgacatgatggtgcgcatgtatgtgagcgcgcttttggcaaaaaaaaaagaaaagaaaaaggcactgtttctaatggaggtgctattattatgattggcggatgatgaagactgcgaactggtataagtactctccaactaaaacttgaaggatgtctcaacatgtatgttgccttcatacggagagcttcaaaatagtgctactagaatcatattatattcaataactacgatttctactggagaaaaaaaacaatgctcctgttctctcatgcctggcggaacaaatccttatgggatggaacaa

SEQ ID NO: 55673 - DNA, 251 bp, Gossypium hirsutum
  Clone ID: uC-gsflmaxxa074h02b1
tcgtctactcttgcgaaacgacttaataggtgtagggttagtgttagctctcgggcgaaattgaaataccactacttttaacggtattttactaattcacgtgaatactgcaggcggcactacggcaccttttttaggacccaaggctcgtgttatggcggccgatacggccgtaagacattccatggcgaggagtacgtctgcgacggcacagactacaaaagacttggcaaggacgctaataatgacca

SEQ ID NO: 55674 - DNA, 239 bp, Gossypium hirsutum
  Clone ID: uC-gsflnu33B002a02b1
tataccttaccagggtttctcacttgtagttgtcattattggaatcaaaaggaataagctcccatttccgaatcgggaaaaaaatggtgaagggacgccaaggagagcgagtcagacctctatgtaagaggaactatcttggcgtacaagaggtcaaaatcaatccagcctacaaccactttatcgatccagattgagggagttaacactaaggaggaagcagtttggtatgccggcaa

SEQ ID NO: 55675 - DNA, 222 bp, Gossypium hirsutum
  Clone ID: uC-gsflnu33B002a07b1
taaacaccttcctttaattttttttcgagtgttttttatttaaaaaaattaaaggaaaaccctaatgaacgtgacatggaattttcaatttcctcacatttgccacttatataccccattatctacattaaattcggggacatgacagcggttgaaaaactggaattcattttaaatttactacatttaacaactttaacagtaaagcactggataatcatt

SEQ ID NO: 55676 - DNA, 291 bp, Gossypium hirsutum
  Clone ID: uC-gsflnu33B002b05b1
ttttaatattaaagaaaaaagaaaaacataatgtcacatgttactgttgtgttttttgcttgagacttcgaatttcgcttccttgtttggagaggaaggccgaatccaagacagaagcatgcagcacctttcctgttaaaagcaatcttcttgattcagacaccacccaagtttggttatggaggtaatgagcagccctctttgccccaaaacctcgtacgcctcggaccttgctattccttgactgccttaaacccattcccgatgtacccaaacacatgacacccctta

SEQ ID NO: 55677 - DNA, 327 bp, Gossypium hirsutum
  Clone ID: uC-gsflnu33B002b11b1
taaatacgatttgctctgctttttctcttctgtcaaatttcttttcttttccttcactctctcactttgacagacagagcagcgtctccgaaggcagagagaggttccgaaactaccaactgaacttttagacctggatattcaaattccgaacacatggattagattcctgatcgcatttctttaaacatcttttacttatttctgaatataacagttcagcgcgtcacacaaattacctatttagctgcgatatctgtccttaaagggcagagttgaaacagctgaggccaattgactaagtggttagaccttggatatttccaa

SEQ ID NO: 55678 - DNA, 192 bp, Gossypium hirsutum
  Clone ID: uC-gsflnu33B002c09b1
tccacgcgtccgcccacgcgtccgcttttctggcaacatttatcataatcgcacctctgtactactcctatcaatctaatcacgagccgaaccctggcatggcaacaaatggtccgtggagtcgtctccgacgctccggccccgctcatgctcacccctgtccacgatattgtacttgggaatgtggctgcc

SEQ ID NO: 55679 - DNA, 141 bp, Gossypium hirsutum
  Clone ID: uC-gsflnu33B002d10b1
tctttatctctttttattcaccgttaaaaacctgaacttttaactatttaaacgcggcttgatcctcagagatttctgcatgtactgcttggggctagacgttctgccggatatgttctaagtagatatgttcatattata

SEQ ID NO: 55680 - DNA, 224 bp, Gossypium hirsutum
  Clone ID: uC-gsflnu33B002d11b1
tggacgcgtgggcggacgcgtgggtttctgtgcaccataactttttacgctcaggtactcacatatctatatggtttgccatgagatctttcttggactgggtttcatgttggagtaccactcctcaagtgtccatcagggaggaggtggagacgcctccaaagaaggaggagacaaactccttgatgcctttagatactgaagatctgtggaagaagaatatt

SEQ ID NO: 55681 - DNA, 311 bp, Gossypium hirsutum
  Clone ID: uC-gsflnu33B002f11b1
tataaaatgatgaggatggtgtataagaagctgctctgtttaccctacccattcgcctaccctacagactctgccacgtctttaccaccagaatgtcattgatcactacaacaattcttgtaacgtcggatccttcgacaagatcgaccccaacgttggcaccggtctgttcggtgcacctgcttgcggtgatgttatgaagctgcaaattcaaaatccacgaggattctggcataattgttgatgcttgctttaaaacctttggattgcggcctcgggtcaattgccttttattctggccgcttacttga

SEQ ID NO: 55682 - DNA, 279 bp, Gossypium hirsutum
  Clone ID: uC-gsflnu33B002g01b1
ttcacgcgtccgtccatggctactgcagagggtgtattatttcagactgcaatccatgtcgagaaacctgaagaagtggtcaaggctggagaaattgttactgacgaggtaccggctgttgcttctgcagcagaacctgtcgttgaagaaccaaaggaagcagtgcctgaagcattatccggagaaccccaggctccacaaactgaatgccacagttgaaactgatttaaatgaggttggttaagagcctcatggtttgatacttgatgagccagaatt

SEQ ID NO: 55683 - DNA, 128 bp, Gossypium hirsutum
  Clone ID: uC-gsflnu33B002g04b1
taaaaaactctccctagatccaacgcataatgggtataatttcactgaaacaccccgagttagcgctgcaaagaaaagggagtattagccgaaaccatatgtgagaagataggagattgagtttggca

SEQ ID NO: 55684 - DNA, 264 bp, Gossypium hirsutum
  Clone ID: uC-gsflnu33B002g05b1
ttggagctcacattggacctgaaccaacgattgacagatttgatgctgttatgcccggaaccgatgaaagaagtgttctagggaacactatcgttgtccaggcatatatgctattcagtggcctcactactttcggaactgcatttttgtagaagtttcgagtgtactcaacagccacatccactgttggagtacgttacactcgcagatactcctggagtgttataaggagaaaaacaacttaactcaactagcctcttattt

SEQ ID NO: 55685 - DNA, 217 bp, Gossypium hirsutum
  Clone ID: uC-gsflnu33B002h07b1
tgacaatcaaatcaaccaaacatgcaacagggtactgttggaactgagaccgaggttactcgggaggatcaacagaatattaacaagcttggaagattaaacaatctatttcatgagattgaagatgaaactaaggttgcctttgaagcaattgataacctgtaggatgctagtccatgagttgattttatcctgacgaggaagtagctcggttttc

SEQ ID NO: 55686 - DNA, 231 bp, Gossypium hirsutum
  Clone ID: uC-gsflnu33B002h11b1
tccacgcgttcgcagctgcatagattgtgttgtagttcttacaaaggaaaacgcaaaaaatggaataaatacaatcggttgttatatgaaaacggctgttagtttttgcggagaagaagaatggtgcgagaattgaggagtgtgattcgtgtatttccacgggcgagctgtaggtggcgctgatgacgtatttccattacctaggataacggggtatgctctggagaaacg

SEQ ID NO: 55687 - DNA, 166 bp, Gossypium hirsutum
  Clone ID: uC-gsflnu33B003d01b1
ctcacgcgtccgatcaaaaatacaatatagggaccgtttatggatcggtaacaccaaaatcactaggggataaagctacaataaaatgaatcaaacctatacgtgaagccataaggtatatacttttactttgtatcccatatcagattgagttagataaataacc

SEQ ID NO: 55688 - DNA, 182 bp, Gossypium hirsutum
  Clone ID: uC-gsflnu33B003d10b1
tcacgcgtacgcaaacgcgcccgctcaagggtgcagtttcaaaagcgaaacccacaagcaccaagaatgcagaggcccggacagatggggcgatacaccacgacggtgagaaggcaacaaaggttgagataatttaaacctcgatattaggtaaaatatgatagaacccaagaatggctaaa

SEQ ID NO: 55689 - DNA, 191 bp, Gossypium hirsutum
  Clone ID: uC-gsflnu33B003f09b1
tcacacgtacactgatcttcgctctcttggtttgtttcaggatgcgtaacaaaaataaaactccctccaaccggatgtatatagtcgaatgttatataaacgattgggattatatcctagaacttttgctaatttcccattattcttttacgttagctgacactagaatcgatatggagcaggtaccctgc

SEQ ID NO: 55690 - DNA, 311 bp, Gossypium hirsutum
  Clone ID: uC-gsflnu33B003g03b1
ttcacgcgtacgattaatcgatgaagaaaaggagcgtttttggttcagagacaccacagaaaaaatggtatgtagcaaatatagattgaatcaaggtttcaaggtggagattaaggatcatagtataagaatggacaacatacttgggtgagaaaattcagtaaccatatagattagattaatggattttgtaaacgtacaaatcactgacatggatgactgaagaggcctataatatataatgtgtacagaaacaggcccagaaactacaggtttgcctacagtaactaagatattaaacagtaaaaata

SEQ ID NO: 55691 - DNA, 200 bp, Gossypium hirsutum
  unsure (1)..(200): unsure at all n locations
  Clone ID: uC-gsflnu33B003g12b1
tccacacgtccgaacaagcgaagaattatgggaacatttttagaacattgacacctaatccaaaatatggaaatgtaaatagttaatcgattaatatngcaaggatgagaatacggtatcgattatcataattgtcacgatgcttgagctgtaaaattatgttatgacataataagagtgatatcgtatgatattgacta

SEQ ID NO: 55692 - DNA, 288 bp, Gossypium hirsutum
  Clone ID: uC-gsflnu33B003h02b1
ttcacgcgtccgattaatcgcacaaggaaaggtccgtttctggtacataggcaccgcatccagaaggtgctatggcaaatgtcccttgagtcaaagtttcaagcgagagaataagggaacgagtactagaacggtcaccatacttggacgggtacacttaggtaccatatacttagcatgagtgagccaggacacgaccaaatctctgacatggattactgaagagcccattatgtattatgcgcacataaacaggcgcaataactacaggttcgcgaactacaatta

SEQ ID NO: 55693 - DNA, 118 bp, Gossypium hirsutum
  Clone ID: uC-gsflnu33B003h04b1
ttcacgcgttcgaagaatagatgaacaaaaggggcgtgtttagaacgaaggccccacaaacagaagatgcggaggcaaatgtgcattgagttaaatgtatcaagtcaggaataaagga

SEQ ID NO: 55694 - DNA, 393 bp, Gossypium hirsutum
  Clone ID: uC-gsflnu33B003h08b1
tcctaacaaaagaaaaaataaaaaaaaaaatgaggacaatttaataaacttaaacccaaataatacaaaaaaccaaaatcaatatcatctacaatcatgggccggcccctctctgggtcccacgttttcttccccgggcctgccacttattttttttcctttggggcccctctaatccatttcctgggccccccgttttcccaccctcttcctcggcattcccctgttgggcccccaatttattttccttggacacctccccccctctttcccgtggggatttcccctttggggccccgccccttctgcctttcccaaccctttcgccctcctcttttggctatcgggacatctcccttctccacttccttcttttccccgcggtgtgtgggg

SEQ ID NO: 55695 - DNA, 322 bp, Gossypium hirsutum
  Clone ID: uC-gsflnu33B003h11b1
tcatccaggggataaatggaaccagtaatgaaaccttaaaaacgactagtacatgttaatcctctactggactttcgaggtgtcgatggtttaaaaaaaaaaaaaaaaaaaaaaaaaaaaaaaaaaaaaaaaaaaaaaaaaaaaaaaaaaaaaaaaaaaaaaaaaaaaaaaaaaaaaaaaaaaaaaaaaaaaaaaaggggggccctctttatgggacccatgtttccttccgcgggcagtatatgttaaagttttgtataaagggaccaaaatttaaattatttggcctcagtttcacaacgttcttgaatggtaaaaccca

SEQ ID NO: 55696 - DNA, 222 bp, Gossypium hirsutum
  Clone ID: uC-gsflnu33B003h12b1
tccacgcgtccgcaaacgcgaccagggaagggatcggttttagcacagaggcacggaaaacagaatgggaacttgcaagggtaaaatgggacaagttttcaaggtatagaaaaaggagcataggaaaagaacgaacaagatacaagtgcgggtaaactgagttaccatccaataagaggacgagggtaaggatgcgatgaatcactgactgggatgaaagaa

SEQ ID NO: 55697 - DNA, 463 bp, Gossypium hirsutum
  Clone ID: uC-gsflnu33B004a09b1
tccacgcgtgcgcccacgcgtccgaacagattatgtaaaccccatattaaacagaccatattcatacttaaatgaattctttttggctcctaaaaaaaaaaaaaaaaaaaaaaaaaaaaaaaaaaaaaaaaaaaaaaaaaaaaaaaagaagcaaaaaaaaaaaaaaaaaaaaggaaaaaaaaaaaaaaaaaaaaaaaaaaaaaaaaaaaaaaggggggggccctttaaaagaaccaagtttacctaccccgggcatgaaaggaaaaacttttttaatggggcccccaaaattaaattaatggccggctttttaacaacgtggggctgggaaaaacccgggtgttcccaaattaaatggcctggaaaaaaacccccttttccccagtggggaaaaaaaaaaaagggccccaaccaatcccccttccaaaaagttgccaaacttaatgggaaaggggaccccccc

SEQ ID NO: 55698 - DNA, 376 bp, Gossypium hirsutum
  Clone ID: uC-gsflnu33B005b06b1
tttacgcgtacgcccacgcgtccgagaacacgtggacgaaaacatatatggaggttcatcggagttccgcccaaccgtccctgatattaaggatttcatgcccatatacatgaacttgacagcatgcatgaaagtgtccctgctgttgcaccacggagtttccgtgtatcagtcgatgcaaatgctgaaatacaacaatgggattatgaacacattgtcaactgatggagctaacatgtatgatttgaccattcaaaacaacgtagaagtggtgacattggagactaaggccatgactgcatagattacagggactttgtaggatgaagagtctttgattgcttacaaaattaacaaggtattggtgtccatggag

SEQ ID NO: 55699 - DNA, 473 bp, Gossypium hirsutum
  Clone ID: uC-gsflnu33B005d11b1
gtactattcctatcccttcctccccccaaaagaaatctacccaaagctccaattctatacccaaagctgctgttattgtgattttttgagttctgggtatggaagaaacagagaaaccaatagaggtattagctatggaagctttgggaaaagggtacgatataactggagatttcagattgaaatatgctaaaggaacaaggttactggtgcttgatgaaaccaacaaacgagacattgttttcccaggtgctgcttcttttactatgaaagaagtttctcaagatattcgtcttgataaaggcgatcgtattcgtttcaaatctgatgttcttgaattcaatcagatgtctgagttacttaatcagaagtcttctatacaaggaaaagttccttcagggtatcttaacagtatcttcgatttgagtggaaattggctttatgatgctgcagacaccaaaactcttgctttc

SEQ ID NO: 55700 - DNA, 211 bp, Gossypium hirsutum
  Clone ID: uC-gsflnu33B005e12b1
ttcaagccacggtaaaagaggacagctaaccgacatggtgccagcagcgcaggcccgatatgagacccagatcggaagcgctcatcagggcagcggggggcccagtaggcccaggccctatctgaagccgtccaaaggcatgagaaggacctgagggaacacaaagcagcgtctagaaaagagatcaagacgggaaaatggctaaaagaaa

SEQ ID NO: 55701 - DNA, 151 bp, Gossypium hirsutum
  Clone ID: uC-gsflnu33B005g11b1
ttcacgcgtccgattcggacgggcgaagtcgtggttgtagaggcgatatattttttgaaagacgtcccactcccaccattgttaattttggcgtcgataagtgtgatactatcgagatcaatgccacctccatcatgcgtaaacttactaa

SEQ ID NO: 55702 - DNA, 440 bp, Gossypium hirsutum
  Clone ID: uC-gsflnu33B006a08b1
ttttggaacatcaaatcaactattattgcaacaattattccaaaaaaaaaaaaaaaaaaaaaaaaaaaaaaaaaaaaaaaaaaaaaaaaaaaaaaaaaaaaaaaaaaaaaaaaaaaaaaaaaaaaaaaaaaaaaaaaaaaaaaaaaaaaaaggggggggccgttttaggggacccaggctctgtcccgggggcagggaaggctaaagtttttttatgggggacactaaagtgaatccacggcccggggtttaacaacctggagacgggaaaaaccctggggtctcccacctaaacagagtggcaccaaagaccccttttcccagtgggcgaaaaaccaaaaaggccctaacggatcgcctttccaaacaatggcgcacactgatgcggaaatggaccccgccgtgtatgggttcataaagcggggggggggggggggtta

SEQ ID NO: 55703 - DNA, 222 bp, Gossypium hirsutum
  Clone ID: uC-gsflnu33B006c06b1
ttcaatcacccggagatgcagagatgaacaagaaccctttaatcgtcaccgccctacatatgcaagacatcatggccatcgctgattacctaaacccctacgacgggtggggcgcatgatggaatgggtgctctcgttcctatcaggaagatcacatttcatgaaaggaatggattaagaaatgccaaacacaaggacgaagcatgggccaccgccatagag

SEQ ID NO: 55704 - DNA, 286 bp, Gossypium hirsutum
  Clone ID: uC-gsflnu33B006c08b1
tataaaaaaaaaaaaaaaaaaaaaaaaaaaagaaaaataaaaaaaaaaaaaaaaaaaaaaataaaaataaaaaaaaaaaaaaatataaggggcggcctttttggggggcccttgtttacgttccgggctttgcgacgcggtagtttgtctttagggttcctttattttatttccctggccgcctttttcgcccgtcgttcctggaaaaccccgggggtatcccaatgggatgccttggctgatcctccccttttcccgggctggtttaatggggggggggccctgc

SEQ ID NO: 55705 - DNA, 215 bp, Gossypium hirsutum
  Clone ID: uC-gsflnu33B006d04b1
gtaagcaagtatggctaaggacgttgcggccggcggcattacttgtagcttcgacaagcctccaagctcagcacacacggtttcgaacccgtttcggacaataccgtctggttagactctcactccaagtcgtcttcttcgattgcaatttacgccaggaagaataactccaagtctgagccgtttatggagccaacctttgatgaacacgtcac

SEQ ID NO: 55706 - DNA, 395 bp, Gossypium hirsutum
  Clone ID: uC-gsflnu33B006d07b1
cgcccttcgcaacccgggaaacaccgaaccaaaacggggagatttaaaggaaaacagcggaacacgcacaggcaacggaaaaagcaccgacaaaacaggaacacacgaaacacacccaacaagcgcagagaaaagggaacacaaaaagctcgaaaaaacgaacaaacgaaaaaagcaagaaccagcaaagcaagaaaacgaggacggacacgccacggcggtgaaaactaaaaaaaacgatgaaaaccaacagcagatagaaaaagtagagaaccaaagccagtatcaagggaccagaaagaagccggaagaaaaccaggccgcaaggagaaacaaaaagaagccaaaacgagggcccccggaggagaggggaggaaaaaaacactaaagcaaga

SEQ ID NO: 55707 - DNA, 310 bp, Gossypium hirsutum
  Clone ID: uC-gsflnu33B006d08b1
taaatacgcaaattcaactccaggctgaatattcacgtgtcgacaggtggcgtgatagggaacgggcgggtaccgatagacttactgaacaagatgttaacgaggttgggagattggaaaccacccggtagcgtcagagtccaggcggaggcggttgaaaccctgtcgctaggagaaactaaaagaagccaaaccgttgccccttggaggagaggcgttgaattcaacttcttttgcaagaggacgtaggcatgttagtatagctcttgcagtcaattgggctgcactatcggaggaatccgcctttgga

SEQ ID NO: 55708 - DNA, 211 bp, Gossypium hirsutum
  Clone ID: uC-gsflnu33B006d12b1
tcctttccaagtggtgggaacctcctcctttgtttcctgcatgttccattagcagacgtttcctgtaacttgcttttatgtattcttcgtgctactgtatgggatattaattgcttccttggaaagatcatggggaggtacatgcagggatttatgcaaactttatgtatcaactaataacgctaattctctcaccttaacttaaaaagaa

SEQ ID NO: 55709 - DNA, 326 bp, Gossypium hirsutum
  Clone ID: uC-gsflnu33B006f07b1
tccacgcgttcgctcacgcgtacgggagggtgacggcaactttagggagttcggagacgatcgtgggggccttggaaagagatgtgtatggtggttaacgggctgaccaccctggaaacggctgagacggcgggagcgagcacggggcggaagagcaccagacgtggggtggagtccggaaggtcctcggcgagaattgaaaatccggaggaccgagcgccgatcgcaacgtgttttacttataaacgaatgaggtcttcaaggtgaactatttttggtaaatggaacattctacgtgaggttagttcgttaactgtatctttaac

SEQ ID NO: 55710 - DNA, 275 bp, Gossypium hirsutum
  Clone ID: uC-gsflnu33B006f11b1
tccacgcgtacgtacaagatggatatagaggcgactattaaatactttacgggcaaccatgttgatacagactgtcggccaagaagaggaacatgcggcaacctacggtttggggcaaactgacgctgaagggcgagatggggtctctagggacgcaactaagtactcgtaacagagtgcaaccgaaagacatggaactggtactggataaacacctacaccagcccctgaaccctgtcgaactccaaaaagaaatgatagaaggtaagggacct

SEQ ID NO: 55711 - DNA, 474 bp, Gossypium hirsutum
  Clone ID: uC-gsflnu33B006h09b1
tcctacgcgtccgtccacgcgtccgaataaaataaaattttttattaataaaaaaataaattttcatttcaatcaatggtttattttttattattatttggttgttattttttgggtgggccttttttggggcttaaagtttttgtccccgtgcatgcaatcttttagcttttttttgggggcttttaaggtcaattaatttgcctgccctttactgcacatttttggtttttttttgggggtatcactattttatttccttttgcagtatttttcccttttttccaggtggaaaatttgggaatagccccatttaaatcgttttttccaacatgtttttttcctgattggtaaatggaaaacggcttttttaccttttattttttttaaaatgttggtataggtttatttgtaatttggcccctttcttttttccccttttttgcccgggttttgggtttttttcctttcttt

SEQ ID NO: 55712 - DNA, 185 bp, Gossypium hirsutum
  Clone ID: uC-gsflnu33B008a01b1
gtcatacgaccgataaattgtaaacgaaaacgggcgacttgagcaaccgcggagcaggaaccaataggagaaacgacagtgactgcactgaaaaggtcaccttcgcattgcccaagacggctacaacgacgcttacggtattgttaggggcgaagtcattgtaatggaccatagagggaccgaag

SEQ ID NO: 55713 - DNA, 359 bp, Gossypium hirsutum
  Clone ID: uC-gsflnu33B008c09b1
tctaatcgggcgacttcaagtgagaacaaacgaagggttatggaaggacataagtcaattgcgaagacacacttgtgatcagcgttggggacctaatgcaagcatggagcattggcaagttaaggtcctaagaacatagagatgtattgaaaagaaatgttaatacggatctctatggctatctattggtgcttagaggatgaaatggcaatatttgccgataatgaagtcgctttgatgaattcaaggatctataatcgatttgtttgaacataatttctggaagacttgataatcatctgaaaaggggaagaaatagagagggttgtataaacgttataatattttgaaataatacc

SEQ ID NO: 55714 - DNA, 224 bp, Gossypium hirsutum
  Clone ID: uC-gsflnu33B008d08b1
tttcactccaaattctccatactataacttgtgcatttggcaagatggcttcaaaaagaacagcatcgcttgccctcttctttgccctcaacgttctcttcttttctctagtcagtgcttgcggctcttgcccttcccccaacccacattcatttcctactcctttcccatcctcctcaggcatatgtccccacgataccttccagttcgctgcctctccttct

SEQ ID NO: 55715 - DNA, 318 bp, Gossypium hirsutum
  Clone ID: uC-gsflnu33B008e01b1
ctcattcgtccgttaaaacgtaactgaaaacagagtattttaacaatactgcacaacggaccaagtggagtaacaacagttactgctctataaaggagaccttcattttgcccatgacgacaccaccgatggttacgtcattgtcagggctgaatctattgttaatgaccattactgcactgatgatgttatcaacggggccttgtctaaacacattgtactacaaaatccagtgccatatagccaacagacaaggctgcatgaagggaaaagggattgactgtaaataccacagcagccatgagacagaggcagttg

SEQ ID NO: 55716 - DNA, 145 bp, Gossypium hirsutum
  Clone ID: uC-gsflnu33B008g07b1
ttcaaacgtccgtaaacgcgtaaataaaagggttcttttttaataacactccacaaatcacatcctggaaaaaacattcttttcaccttttaacggaaattcttaatttatctaaaactcatattaacacgtatataataattat

SEQ ID NO: 55717 - DNA, 147 bp, Gossypium hirsutum
  Clone ID: uC-gsflnu33B008h01b1
ctcatcgcgtccgttcggccgtaaatgacaacagtcgactttaataatagggcacaactgagcaagtggagaaactactgttactggtctataaaggagacctttgacttgcccatgatgactccaccgacggttacgtcagggtca

SEQ ID NO: 55718 - DNA, 393 bp, Gossypium hirsutum
  Clone ID: uC-gsflnu33B008h09b1
tccatgggacaacttcacgactgtggaaaaggcggatcttaacaaagggaatagcaagtctccgagatgagaagctaaacggcccagccctagtggtgatcggaagtcattggatatccgattcttgggcgatactaagctgccatgtagacgttgcacaggctctagcctggacccgaggaaaaagactctagaaaggctcggcaccgtctacaccgccgaggaagcagcgcgtgcttacgatgcgagggcgcgcgagttacaggatcctaacttacaaacacatgtatgcgacaacatcgccatcgaattgacgcacatacatagacagagcagcaccgtggtgaccactgctccgactgcaatagccctgactctgcccagcctatgctc

SEQ ID NO: 55719 - DNA, 237 bp, Gossypium hirsutum
  Clone ID: uC-gsflnu33B008h10b1
tggacgcgtgggtttggggggggggtgaggggtttaattaaaaaggatggccgctagtacatacattagaaaagctgtatgacaaggattttgtggataaagatatttatataaagacatatggatgaatatgtttaatttattattgagaatgcaaatttctaggaagaagctaacgatttttttgcttatattaattaaattatctttatgatgaatgatatacaaatatattaa

SEQ ID NO: 55720 - DNA, 157 bp, Gossypium hirsutum
  Clone ID: uC-gsflnu33B008h12b1
tccacgcgtccgcccacgcgtacgcgaacgtatacgttttattaaagattgcagaattaaactggtggagtaaccagtgttgctattgtgaattggatatctttaatttgttccagacgaatccaccgatagattctacattgacagatgtatattt

SEQ ID NO: 55721 - DNA, 236 bp, Gossypium hirsutum
  Clone ID: uC-gsflnu33B009c09b1
tttacgcgtgcgaccacgcggccgcgatgatgacgctgactaaaccggcagagagtccgagacatgagaaagggcaggcgacgatgagtagcagagtggctgtgacctcggggatatatggcctgaaacctcggggatatacactatttgagtatgctacacgctttgtagacattcacgatagagctgaagcatgcattttcaagatctgaaactaggataggaaaaaactatgg

SEQ ID NO: 55722 - DNA, 465 bp, Gossypium hirsutum
  Clone ID: uC-gsflnu33B009h07b1
ataaaaaaaaaaaaaaaaaaaacgcttgggaaaaaatataaaaaaaaaaaaaaaaaaaaaaaaaaaaaaacaagaatcagctgctgctccggactcggttctttgacatcataataaagcaactggcatggtaaaaaaaaaacttaaaataagaaaaatgaagaagcactaaaatatagccaggggggggggccccctaattggtccagactccaacgcccttggtcaagaccactgttttctcttttgcggagcacccacatcattgactggggctggcggagttttcaccctgtctgggggtctgatagacctccacagaccgccctttactggcggggggaacgccccggagctttagcgctagtgatttttagggacattgagaccatcaatccccttcacaaaggggaacgcccggaggtgggtttgtgggctccccttgttggccttttttttagagaa

SEQ ID NO: 55723 - DNA, 454 bp, Gossypium hirsutum
  Clone ID: uC-gsflnu33B011b03b1
taaagtccgaatcgactgtctttgtactcattacctgctattaattcaataaagttcttttcaagctctccatgtcataacaaaaggaaaagtaggaaacagaagaagctggctaaagctagaaaatggaaaatgattgagagagctagaaaacagagaagaacaacatgaaaaaaaaaaaaaaaaaaataaaaagaaaggggggggcccctcaagaggaccaaagttaacaacgccgggaaggcaaggaaaaacctcttttaaaggggccccaaaatcaaatcccgggcccctgttttaaaaccgccgaacggggaaaacccggggcatccccaaactaaatggcctggaaaaaaacccccttttccccagtggggtaaaaacgaaaaaggccccaccaaaacccctttccaaaaatttgcgcaccctaatgggcaatgggacccccccctta

SEQ ID NO: 55724 - DNA, 246 bp, Gossypium hirsutum
  Clone ID: uC-gsflnu33B011c02b1
taaacagagagtcaggacgcaccggctttatttattgggttttgtgttttattctgcgaccccctttatgatatttccagggctcgctattatccctttgcctctgatgccggactgctcaaagccatgatcatgcagccttatgctttttacttctccttaccagtgctatgcaataaaaatgctactatatgttacattacgattaatactttgcatacctcatccatttaccaaaagttcacc

SEQ ID NO: 55725 - DNA, 199 bp, Gossypium hirsutum
  Clone ID: uC-gsflnu33B012b03b1
ttcactcgaacgcgacagcgtcagcgcttgaggcataatacctgcttaatgccgtgaaaaacccactacctcttgacgacgatgacgaccacccttttaagtgcgatggattaggcccagattaaaccggcataaaaaatgttgtaaaggacatcatgtagatggcaaacaaagccaacgacacatgtggcatcaagga

SEQ ID NO: 55726 - DNA, 228 bp, Gossypium hirsutum
  Clone ID: uC-gsflnu33B012b04b1
tccacgcgtccgcccacgcgttcgcccacgcgtccgcccacgcgttcggttgtaaggattacatacagttggttatagtggagaatataagaagctgttctttccatttcctttgaatcactttttgatggtactttagccttgaaacgtatgttttgggaatttgttttatgcacttatggtttctacaaaaaaaaaaaaaaaaaaaaaaaatacaagactgtaaaa

SEQ ID NO: 55727 - DNA, 261 bp, Gossypium hirsutum
  Clone ID: uC-gsflnu33B012f07b1
taaaaatcaaaaaaaagcgaaaaaaataaaggaaaaaacataataaaactaaacaaaaacaaaaacaaaaacaataaaaataaaaattcaacttgaaactacaacaaactccattaatggcagtggcggcaaaaacttgaagaagatcatcatatcattaagaatgagccatcgctggacgagtgttcaagcctatatgatttggtgcatttggtcggatacagcttacagaagctgtcgacagttcttgtcaccgtatct

SEQ ID NO: 55728 - DNA, 376 bp, Gossypium hirsutum
  Clone ID: uC-gsflnu33B012f09b1
tgtccacgcgtccgacaagatatgaggccacgcggtcggagggctatgtgctgggatttaactagaccatgacggtggataccatcttccttgtggtctagtcattagacaccatggacaatgttaaagtctatatccatgacatggaaggcatcccttcagatcagcaacgccttatcttcttcggggagcagcttgaagacgggcgcaccttagccgactacagtatccagaaggaatccactgtttacctcgtcctccgtctccgcggcggtgctcaagaagaggaagaagaagacctacacgaaggccacgaagatcaagcacaagaagatgaaggtcaagctggccgttctccagttatacaaggtggacg

SEQ ID NO: 55729 - DNA, 314 bp, Gossypium hirsutum
  Clone ID: uC-gsflnu33B012g04b1
tgtgaccgtccgaccactcgtcccttaactggtacctctacaactaaactgtcctctgattctcataccacaagtgttgaccagcatttgttaagattctgaagaaagtgttgtatatgattaacaattcatgggtaaatcccactaggaagcctgtagatgtcccattcttcaaaaactatatgcctactggggctgtcgatcacatggagccatgcaaacgtgcccgtgcaagccaggtccaacttgtcaaatagcgctgcctctggttaccacactggccgatcttactcactctgacacttgagaaaacc

SEQ ID NO: 55730 - DNA, 225 bp, Gossypium hirsutum
  Clone ID: uC-gsflnu33B012h02b1
caagcgtctgtcacgcgtccggggctaatatggctctgtaatgtaaagggaattggctggtacccatggctattagctacaaaaatggtggccattataaatttttttgcagggttcaattgtataagtattgtatttattcatgtaatgtaaaatatggttttttttatctcgctaagaaaaataaaaaacaaataaaaacaatacaatgaaaagaaaacattg

SEQ ID NO: 55731 - DNA, 396 bp, Gossypium hirsutum
  Clone ID: uC-gsflnu33B013a01b1
tctggaagtgggctggagataatagcaactgccgccgattggatgactaacgagcctaaggcacgtacagataacgccatgggcatcgagaaactccatggccactctggtatagctaggctgaagctttactatgctcgcggcctatttgggctcgtggatccaagccatggcactggagactgctcacgctggacttgctcattttaatggacatctgctcgctatgtgtgcagatgatctgacttaccatgatcgtgttactgcatctggggacttggaaaccgttggcagacatgattgtgatggtcaggtgaaatctacaactgttgctcaccccaaggttgatcctgaaactggcgaattctgtggtcttagctatggtgacctccaaaa

SEQ ID NO: 55732 - DNA, 309 bp, Gossypium hirsutum
  Clone ID: uC-gsflnu33B013c04b1
tcttttcttttcctggtgtatgtattttgttgagcttttcttttgtgtttaacttgtgaccgttgatcatgcttactttatcatgatcatcatccaatggctgatgttgtttgtgaatttgtgttaatgctcctctgttttctataaaaaaaaaaaaaactgcacataaaacaataaaaaaataaaaagaaaacatagaacaattacaaaatcaaaatcaccagctccaaagggctgttcaaaaaaattgacaaacctaaaatgagtattgggacggcctttatacttcctccagttattcgggggggg

SEQ ID NO: 55733 - DNA, 326 bp, Gossypium hirsutum
  Clone ID: uC-gsflnu33B013c08b1
tctctcacgcgttcgggcttatggtatgtgactagtgcttttccaggagctggaccagaaacaaaatattatcaaaaagataaagataagctgaacgctctataggttccttgatgcgataactgagcatcgggtactataggcacatgattttggattctaagtataatctagcttcatgatgactggcatcattgggactggaatcacagtggagttgccgtattatagagcttggaagcgtattctgtgttggccatctgacgttattgccatgtggcccaagcggatcgcttatagtaacaaaaatgcatgctgagttttta

SEQ ID NO: 55734 - DNA, 162 bp, Gossypium hirsutum
  Clone ID: uC-gsflnu33B013d05b1
gccttctcccacccggcgcccgcagcctcgataccaagcagccaagacactggactatatgtaggactgaacaaggtgcagggtgtaacacggaagggatggacacgactgctgtatcatcaacatggatcaccgcgcacagtggtacgtgtgatgaggaac

SEQ ID NO: 55735 - DNA, 193 bp, Gossypium hirsutum
  Clone ID: uC-gsflnu33B013d08b1
ctcactcgtacgggcttacggtatgtgtcagattcttatacaggaagaagtcccgaaacacaatattgtgaaccaaattacgattatctgatgggtcagtcggtgcgattaaacgactactgtagatctggtactgcagcacaagattttggatacagtgcaaatcttgtatcatgatgactggcaacactgg

SEQ ID NO: 55736 - DNA, 195 bp, Gossypium hirsutum
  Clone ID: uC-gsflnu33B013e07b1
tcccacgcgtccggcccccggttctctgtgaaattgctacaatgaataaagcccagaaacgggaaagtgttggagatatgaattacactgactgccttgatgagactgctataacacctattaatgttctagaagaccctgacaacactttggatactgtacactgcgacgatcggaggtgctgaactatactgt

SEQ ID NO: 55737 - DNA, 242 bp, Gossypium hirsutum
  Clone ID: uC-gsflnu33B013e11b1
actgtatctaagtctccgcaccaatcactgtcggaatacccaatcaacttgtaatcttccatatttgaataaaataacccgtgtgacaccgttccttgaaaaaaaaaaaaaaaaaaaaaaaaaaaaaaaaaaaaaaaaaaaaaaaaaaaaaaaaaaaaaaaaaaaaaaaaaaaaaaaaaaaaaaaaaaaaaaaaaaaaaaaaaaaaaaaaaaaataggggcaccaagtttaaaaaaaccaat

SEQ ID NO: 55738 - DNA, 147 bp, Gossypium hirsutum
  Clone ID: uC-gsflnu33B013f08b1
tcccacgcgtccggccaccggttaagtctgaagttcttttgcaggttaatgtccagattcacaatatccttaatgctttgaaaattaactgctgctactaaaaagttcgctttaactgctactgagcatcttgtattgcctgacaac

SEQ ID NO: 55739 - DNA, 345 bp, Gossypium hirsutum
  Clone ID: uC-gsflnu33B018a12b1
tacaacaatgagttatttgttcgggaacttgttcaaagcacgtacttttcagaatttcaagctaatcagatcttactcatgatttctatccctgtatagtcttcctctattggatgaagatatgaagtcaaaagatatagatggggagcaagaacaagtctcccttgcatagttaccaatatactgatacactgaaagtttctggtggtggttgtgtatctttcattatatcacttgtaagtaacatctgtacaaaatgaatgtttgcatggattgttcataagatgcaagtttgtatagaaagtcgactaggtgaataagaaaatcaaaataaatttcttctgg

SEQ ID NO: 55740 - DNA, 216 bp, Gossypium hirsutum
  Clone ID: uC-gsflnu33B018g04b1
atcacgccttcgctgggaacatgcctggacttaagccgttacatgatggctcccatggttacgcacttgaggacacaactaacgcgggcatgtcaactggaccccatgttaatgctgatggagatgaggatggtgatacagaagatgagaaccatcaagctggtgatctagggaatgtaactggtggtgatgatggctgctctcagcctctccatg

SEQ ID NO: 55741 - DNA, 330 bp, Gossypium hirsutum
  Clone ID: uC-gsflnu33B018g08b1
taaaaagaacaaaaaataaaaaaaaaaaaagaaaaatataaaaaaaaaaaaaaaaaaaaaaaaaaaaaaaaaaaaaaataaaattaacaaattaaatatggggcgggcgttttggtggatccaatcttgggtccccgttcttgcaatgccatggcttttttttggtgtcccctaacttaatttccttggccggggttttccaactcactgcttgggatgcccttggctttccccaccttaattgtttggcctggcatccccctttccttgggtgggttgatacattatgggcccgccccgttcgcctttcccaacaggtcccattcctga

SEQ ID NO: 55742 - DNA, 351 bp, Gossypium hirsutum
  Clone ID: uC-gsflnu33B019a09b1
taaaaaaaaaaaaaaaaaaagaaaaaaaaaagaaaaaaaaaaaaaaaaaaaaaaaaaaaaacaaaaaaaaaaaaaaaaaaaaaaaaaaaaaaaaaaaaaaaaaaaacaaaaaaataaaaaaaaaggggggggcggttttaagggacccaagttaacccaccggggagggcaagaccttaggtgagttatggggcgccacaaacaaaatcaatggcccggggttaaaaaactgttgaccgggaaaaacccggggcaaaccaaattaaatgccatgtaaaaaaatccccttttacccagggggcggaatataaaaaagggcggacctgaaagcctttccaaaaatttgcgaag

SEQ ID NO: 55743 - DNA, 413 bp, Gossypium hirsutum
  Clone ID: uC-gsflnu33B019a12b1
ctcacgcgtccggcagttttatgcagttaatcgtgggggtgatggttattttctcaattagcgtaagctgatgaaaaaatctaaaaaatattttaagcaatttaaaataaaaaaaaaaaaaaaaaaaaaaaaaaaaaaaaaaaaaaaaaaaaaaaaaaaaaaaaaaaaaaaaaaaaaaaaaaaaaaaaaaaaaaaaaaaaaaaaaaaaaaaaaaaacaaattaaaaccaaatgaagaaaaacctactaaagttaaaaaaaataaaccttactaacagctgactattctgaaaggttaattgtattcgccccctaacatgccataaagcacgctggactacctgttcccataaatacgacttttaaatttccaaagaccttttccccgatgattatgtttattttggttcattt

SEQ ID NO: 55744 - DNA, 231 bp, Gossypium hirsutum
  Clone ID: uC-gsflnu33B019c03b1
ataaaaaaaaaaaaaaaaaaaaaaaaaaaaaggaaaggtttgacgaaatagagccaccaagcacaacaaacaacaaacatgcgaaccaataactgggctatagggtcacctcattttaatgcaccggccgtagcttttcaagggtgggactggaaaaactttggtggcacccaatttaatacgcttgaaggggataaccctttcgccagccggatttaaagcgctggggcc

SEQ ID NO: 55745 - DNA, 327 bp, Gossypium hirsutum
  Clone ID: uC-gsflnu33B019f06b1
atatagaactaaaaaaaaaaaaaaaaaaaaaaagaaaaatttaaaaaaaaaaaaccaaaaataaccatagaaaaaaaagggcgaaacggtgcgggcgctcaagaggtccgcgcgtctccgtcggggtcagtgacattattagggggttctcctgagttccctacatttgaattgagtggcccaacgctttacaccgggaaaactgggaaaaccccgacttgacccgatttgatggcgtttccccatatccccgcttggcccagttgctaataggccgaaacggggccgcccttatcgcctttgccaacacctgagcggcctaagggg

SEQ ID NO: 55746 - DNA, 481 bp, Gossypium hirsutum
  unsure (1)..(481): unsure at all n locations
  Clone ID: uC-gsflnu33B022b12b1
ccggctatgagctatcctaaagagggaaagacaatgcatgcatccatgcatactgaatggaactctggatttctgacgagcgaatgcatgcatactgcaagggagccgctgagacaaacgtggcttactatatgggacaagcgcacctttgactatcaaatcattagccatcaagtttctggagataccagcaaaggtttacaactgcggacaggatcctcatctggctttgcttgagctcccacagagagatcttaatccgcagtcatcaaacgttgttctgtggcttggacgaaaaagacagatattgtaggtgactatgaaaagagtgactgtcggaaagactgggaggcatgaatagggcacccatatgccgtggtaacatcgagcatatcggaccctccggaccgtggccgtacccgctgaccaggccttaggatctngaggcagcttggatttgggtgatgatagcaaagctgga

SEQ ID NO: 55747 - DNA, 211 bp, Gossypium hirsutum
  Clone ID: uC-gsflnu33B022e06b1
taacatgccacgtcatagctttcctatagtgaaacctaaattcaaaacactggccggaagtaacaactgggcgactggggaaaccctggcgaaacccacttttattgcattgaaactcaatgaggatactgctgatggcgcaatagagacaaggcccgcagcaatcgcccttgccatcatgtacgctgcctttatggagaaagtgacccgc

SEQ ID NO: 55748 - DNA, 121 bp, Gossypium hirsutum
  Clone ID: uC-gsflnu33B023b10b1
gtcattttccttggaaatgctagaaggttgcttgaaatgagatgtgatgggaacagccgtcttggacgcctttgtaaattaagccttgccccagttctttagatcatgatcttggaaatgc

SEQ ID NO: 55749 - DNA, 443 bp, Gossypium hirsutum
  Clone ID: uC-gsflnu33B023b12b1
ctcacgcgtccgctcaaaataactctttattctttcttctttattttttttgttccgttctgggctgcctttttttcttttttccctatcttttctttgctatgcgccagtgttggtgcaatttcatttcaaggtgacataaaactgcaaagaatttcaatatatttgttttcctcattgatccaaagtttttccaagtctactcgatttgatatggaaatggaaaactttttgcagtgaattatcagtgggggtctagctatcttcttttagggtttctattcctttacactgcttttctttagggtttctttgagtcttttgatttgtagcttgaataaagttttatccttctgctttgtttggctcagctgaatttgttggcaaaaaaataatggaagaatataatcagcttaacgagaatagtacacccaggggaaatt

SEQ ID NO: 55750 - DNA, 441 bp, Gossypium hirsutum
  Clone ID: uC-gsflnu33B023c06b1
tataaaaaaaaaaaaaaaaaaaaaaaaaaaaaaaaaaaaaaaaaaaaaaaaaaaaaaaaaaaaaaaaaaaaaaagggaggccgttttttagggggcgggcttttttgcggtgccgtgcttccttacgggtcctttgtagggcatcctttttttattgggctgcctattttctttcccctgcccgcttgtttcacccgtggggttggccaatccttggggttgccgaactttctcgttttgccggctgtccttttttcgaggggggcctatttgataggggttcccatacggtgcgcccttctgaacggttattggttcttgcccgtgttgtggggccctctccctgttgcggggtttttttgttccgccgcgtgttttcctcttccccttggcttgggccttttcccctcggcgggctcccttttgcttccctcttttttt

SEQ ID NO: 55751 - DNA, 462 bp, Gossypium hirsutum
  Clone ID: uC-gsflnu33B023d04b1
tgtctttctttcgacgacgcaagcggaaaaaggctgtttctttgttatatgcctccatttcccctttcatacaatggtccaaccataaatgcttataaaagaaaattggccgcgaaactgacctttaagtcaagactgggagtaaagtcgttataaaagaaaaagcccacgaaacgttgtcaccaagaaggatgataaagtcgttatacccgacctacgagccggtgacttgaacggatccgtcaacaaattgaatgcttcgaccaacatggtagcattaagacgtactactctgaatacaagggaacgtgatgaggaaactgaaaatatagctcatgaacgatggccaccagaaccgaagaaagacagtatgcatggttgaatggggaaaaaagccacccaggggtaaattgcctcagatgatccaaaaaaaagcttcatattataccaagatttcgaatg

SEQ ID NO: 55752 - DNA, 168 bp, Gossypium hirsutum
  Clone ID: uC-gsflnu33B024f01b1
aggagttaacaaagcttatggaggagaaagagagaattaaagccgaagctaaagctcgagaaattgaagctgcataagcagtcaagacaagtgcaaaagcggcttgcctcatctattactccatcctaagttattctgggaagaaagaagttgaatctgacttcaatc

SEQ ID NO: 55753 - DNA, 365 bp, Gossypium hirsutum
  Clone ID: uC-gsflnu33B025a07b1
tgggttcaacatatatgttggcggtggcatgggaagaacacatagacaagagactactttcccgcgtttgggtgaacagctcggttaccttcctcatggtgtctcttcttatctttatttatttcttttttatttctcatactgatcttgtttcattttttcttctttcttttttttttctttccttcttattcttttctttctatttattctaaattctcctcttatcttattctctctcttcttctttctctttttcctcctccccctaaaaagataaaaaaaaaaaaaaaaaaccatcccccttttctcttctattatctctcctccctcttttacatcttttctatcttaccttatttttt

SEQ ID NO: 55754 - DNA, 255 bp, Gossypium hirsutum
  Clone ID: uC-gsflnu33B025a08b1
ttccggttccactccaacaaccagacatgggaaacagttacaccattattccgatgcacacttcacagagctcagcaaccagaacatctattgtacctcgatactatccgcaacgcttcgatatcctctctcctattctctttacttatcctcttttcttttcttcttactatatatcccgtttttattcctctaactctcctattaatcctctctttattctcaaattcctgccccccaagggttgccctaccc

SEQ ID NO: 55755 - DNA, 263 bp, Gossypium hirsutum
  unsure (1)..(263): unsure at all n locations
  Clone ID: uC-gsflnu33B025c04b1
cctcactcgtccgctggattagccacggaaaataaagttttgatagcaaagttcaaggtaacatacaaggaccactctattgctcagagccatgagaataagggaaatgtctaagattctcctattccactttatatttcttttttatgtcacttaaactatatttcttatttatttttcttttttttatattaatatttatttgtaattttaaacttttatttcttcaccgcctttttgaaccncctttttcatttattttt

SEQ ID NO: 55756 - DNA, 213 bp, Gossypium hirsutum
  Clone ID: uC-gsflnu33B025e11b1
tataaacggagatccacaggcttaatagtcaaaaaaattgacacaatacgcgcagtcgcatgaatccgatgacattacgtccttattgacacctacactcaagacacggcgagataatgaaacatacagattaaagtgctggaacgtcaccacttcccgagaacaggaaactttgacattaggtatctaatacattcagcttttactcagttg

SEQ ID NO: 55757 - DNA, 329 bp, Gossypium hirsutum
  Clone ID: uC-gsflnu33B049b10b1
atcaaatctgataatgggtaattagctcgctttggtcatccctatcaactctcgtttcaagttcctcatcaatcaactagtcactatcctagtagaatcttctgatcttctactcaaatagcaagttgaaaagagctatttatcttccaacctcacaatctaaaccagtttgggatgaaggtgttcacagagggccataccaaatttgggttaattcccacattgatgacttcctaagatctcatgtctggtatagtttgttttaatctgcttcctaatcaaaaaaaaaaaaaaaaatttctttccattttactaaatccttgcttctt

SEQ ID NO: 55758 - DNA, 212 bp, Gossypium hirsutum
  Clone ID: uC-gsflnu33B049c07b1
gtagcagagacaacctgcgatgccttttactgcttcatattcgaccatcagatcagaggcttagaaattaagagaaacacggaaacggacggacgaaaaacaagatgaggtgagaaaagctcttattccggaaaatgtactggccttgaggatattaggattataactaatgagaatgagcactcgttatgttagaaattggcgtcatgtat

SEQ ID NO: 55759 - DNA, 342 bp, Gossypium hirsutum
  Clone ID: uC-gsflnu33B049c09b1
ttcacgcgtgcggatatgcatgacacatgtaaatccttataggaagagaaatttgagtttggccaacttacatcctgctgccaatgatgtgcctgaaattagaggaagaactatagttcgaatccgatccatagcttgaatccgatgcaatctattaagaatttgacatgtagattgagttgtcagaggatgaatgcttatgatgttgatgaggaggacagagaacagtatattgagcatgacgattctgagtgtttttaaactactctagcttaaagcgcttgcataatcttgtggtttaaagggatttttcaaattgaaaaagtatgtattggtggccat

SEQ ID NO: 55760 - DNA, 355 bp, Gossypium hirsutum
  Clone ID: uC-gsflnu33B049d09b1
tcgttcacgcgtccggtcaccaccaccaccggaacttgctacatgtatagagccacctgcactaccaccatcatgtgtagagtacacgctaatcaccctcaccatgaattcattacacaccatgtacgtgaccttcactcgcacactcaccaatccattaacattcacctccaccaccattacctataaccggttgttgattacgaagggacatttccacgagttatcgcgagttcatacgcataaactcctctgtcacctttgtattgattgttttaagaaatttccgttttaccttgattaaaaaaaaaccttaaaaaagaggagaaatactctttcaggaaattattttata

SEQ ID NO: 55761 - DNA, 503 bp, Gossypium hirsutum
  Clone ID: uC-gsflnu33B049e10b1
gttacgcgtgcgattagatttaaaactgaggctgaccatatggacggattagatccttcaagactaattatcctgcagaaggagcgatcttgacttgaacaatgacgcactgttggtgaacaagtcattccatttgagagaaatttcaagggtgctgatattgagtctggccaccatattacggatcgtactgttgaaatgaaggcggtgaccatcttagccactgctgtagcgaaaggatcttcctcaaggcctgcgaaagaagagacccgtgaatatggcacatgcagagaattcatgagcaacatgagtgctgccatgagagatcaaagtgggctaatatcaaaaccaaaaccggaggagaataacatcaaccttgctcaggtgatattgcttgaagaaggcaagtcacataatgattacctgaagggtggaacatttgttggacttgcctcaacttggcgttcaaagaaatctggttttcaaaatttaaagcaatattg

SEQ ID NO: 55762 - DNA, 132 bp, Gossypium hirsutum
  Clone ID: uC-gsflnu33B049e11b1
ttattttatgcctccgagagggtaaaaaactgaggcggacgattgtgggcagatttgatcctataagacgaattgtcctccgaaaggagcgctcttggcgtgaacagggacgcccagatgcggaacaagtaa

SEQ ID NO: 55763 - DNA, 308 bp, Gossypium hirsutum
  Clone ID: uC-gsflnu33B049f03b1
ataaaatggagcgtgaatctttaagtgatataatttgcctacctagaaagaaccattactacacgcatccaaagcgatgataacatgcttttatgttttaaaaagcccatggggtgaagtccggccctacccaatacgggaactgctaccggatgcttattgggcagcgccgaagattcccacataggagcggacggtaaccaagttggccactacttctccgacgctgacttgggcggttctatcatgagggtcaactcgtaaagtcagctgattgaacgatcctcgagagcctaaaagcagctgct

SEQ ID NO: 55764 - DNA, 215 bp, Gossypium hirsutum
  unsure (1)..(215): unsure at all n locations
  Clone ID: uC-gsflnu33B049g01b1
gcgggtagcttgaggacgcatcggtcttggctaccctgtgtcttatttaatcaaattgtaaattattgtggtnaaagggagagcgtttagaatgatgccaccacaagaggcatgtaccaatgcatagaaaaagtggcaaaacgacaggtcattgatcccaacccgacctcggaaggagaaaaaaaaagaaggggggggccccttctagagggccc

SEQ ID NO: 55765 - DNA, 235 bp, Gossypium hirsutum
  Clone ID: uC-gsflnu33B050b02b1
gttcaaacaaaaaaaaaaaaaaaaaaaaagaaaacaaataaaaaaaaaaaacagagaaaaaatggcaagatattgggacagatggttttgtaggtgccgttttcgcgtcccgctcctttcttctgggggcgcttattccggggtcccggggtgtcgtttttgtggcccggggttctttcccccctcctgggttcccaccctttttgtctggtggctcctccggcttgctcccctt

SEQ ID NO: 55766 - DNA, 391 bp, Gossypium hirsutum
  Clone ID: uC-gsflnu33B050b04b1
tgaatttcttctttccccactacctgtgtaatcttgagtcttcacctgtatattcgcttagatctcatttcacttgaatttatgcaaaatatagctctctgagcctcagtaataatctaaataattgatatctgctgtcaaaaaaaaaaaaaaaaaaaaaaaaaaaaaaaaaaaaaaaaaaaaaaaaaaaaaaaaagcaaaaaaaaaaaaaaaagcaagccaacttaatgaatccaaaaccgaagccaacgtaagcaaatggggagcaaatactcaacctacatccgcgaatggtagtgggcttgctatgtccaatcattggcggggcgactataccctgcccaacgcgctatcacattttcacccagcttccctgtttccgccatgacca

SEQ ID NO: 55767 - DNA, 432 bp, Gossypium hirsutum
  Clone ID: uC-gsflnu33B050h04b1
taaaaaaatcacggtggtcacagacggctatggctaaaaagcttgcattctttgttctttttaacatacggctatttgtgggttacttaacgccaacatcgataaagcgacaatccaatggcaattatggatgtcggaggacaagggacggacattgccgcaagatggcagaatgggatggaagagatcctgcatcggcatgaggggctaacgcgtgatttttaacagggcaaggggtgagagaacaacgggtagcaaacctgagtcaccagcggaagctgatgctgacggcaaacctggaccggatcctaacagaccccaaagaaagaaatggcttcgctgcgttaaagccacaccggctgaatattgacgaagtccggaacgaataccagcttatacaggaccatgcaagccactaaccatggattgtta

SEQ ID NO: 55768 - DNA, 449 bp, Gossypium hirsutum
  Clone ID: uC-gsflnu33B051b02b1
gttatgtgagacagaactcgtacgggttgacacactgatagctgatgctcgatgcgtgagctgttgctgcatggccacgtttatgcgatcaggaaggtgtggatgggtacccctaaacagaaatggacagtagaagaggaagctgcctataaggcaggagttctcaagcactggaccggaaaagggcgcattgtactttaagataccgaggttagaggggatctgaggtctggcatgaatgtggatcttaaggataaaaggcgaaatataaatgccacggccatgtggggatcaagacagaaagctaagcttggtcttaaaagaaattagatagccgttgaacacgatgataagcccatggcgctaatcaccgggccttccattgaagaagtcagtgatcctaaggcgcttgccatttctaggaaaacactaagggtaactgggcccaa

SEQ ID NO: 55769 - DNA, 249 bp, Gossypium hirsutum
  Clone ID: uC-gsflnu33B051b05b1
gctcggccccgatgagtaggagggagcggcagcgtctgaacaagctacatggcaagattcacaactgagagttatgtgcctaccattcccacgtggtgagggaccgatgccggacgctcaggaggaaacctgaccggcaagatcgttttattagacggatacactgtcaagggcactgaaaggaacctggacaggcccataaattggaatttgagaggagctgctcgtgtctatggaaagggtattttt

SEQ ID NO: 55770 - DNA, 162 bp, Gossypium hirsutum
  Clone ID: uC-gsflnu33B051c08b1
tttttccttcaatccaatccaggtaagggctaaggcaagagggagtgaaaatggttgagaaatcatgaggaagaatggcagaggtggttgccaggctttacaccatcacccttcacatgctcctttatgcttttacatttaagattgatgcttccaaggcta

SEQ ID NO: 55771 - DNA, 172 bp, Gossypium hirsutum
  Clone ID: uC-gsflnu33B051d02b1
ccctcgcgtccggtgccagcacccaagtgagaattggttatgcttgtcctgcaaagttgtgctttgtagccgatatgtgaataagcatatgcttgagcattatcagctaacaacccatctcatagcgctcagttttagcgacctgtcagtttggtgtttttgcttgctaatt

SEQ ID NO: 55772 - DNA, 225 bp, Gossypium hirsutum
  Clone ID: uC-gsflnu33B051e09b1
tctgctaaactaaagaaaaaaaaaaaaaaaaaagagaagaaaaaaaaaaaaaaaaaaacaaaatatcagaaacaccactaaccagtgactgaaactcaaacccatatctttagaggatcctaaatgtggaatccctggcccggctgtaagttcccagccgactgctttgacgtagaggtgtctccacctgaagggtgtgcggccctttccctttcccccccggtg

SEQ ID NO: 55773 - DNA, 173 bp, Gossypium hirsutum
  Clone ID: uC-gsflnu33B051f09b1
ctaaatctcaacaaaaagggtaggctcttctttggctcctttctgtaatttgtcttcactgttatttcattgttgtttgtaagagaaaatttgaatcgagtaatgatgaatctatttcttcgtaagatggttcgatatgtatgaagttgtagaggtttattaattcttttctt

SEQ ID NO: 55774 - DNA, 237 bp, Gossypium hirsutum
  Clone ID: uC-gsflnu33B051g12b1
ttatgacgccggctttaacacgcaaggggtcgggccagatgatttatgcttactcacgcgggtttcccacggcaaatcagttaggtagtgtgacctctatacaaatacagtgacctgggaacttcattggtgtggttgtaaacagcctaggaggtcccgaaacaaaacatattgggcacataactctttctgtagggtcatattattgtctttgcggtctggtcctgacgctgtttt

SEQ ID NO: 55775 - DNA, 341 bp, Gossypium hirsutum
  unsure (1)..(341): unsure at all n locations
  Clone ID: uC-gsflnu33B055a10b1
tcgaatactaaccctaatctccccaaacgtcacaaactcatttaatggcgagcagattccaaattataacccatctaaaccccattacactcccttcattcacgagcccaaggcgcctcattggaacatgccaggcncacgataggcaccgccactactacagagctggagcctgtcttcacctccgacaagtccttcgctcccgccacggtagccaatctgggcccaggttttgacttcctcggcgctgccggtgatggtctaggccacattgcttgccttagaatcgacccttctgtcagccccgggcatgacacccatctctgagatctctgtgttct

SEQ ID NO: 55776 - DNA, 317 bp, Gossypium hirsutum
  Clone ID: uC-gsflnu33B055b03b1
atttcatatttgcttttctatttcaagtcaagttaattagtattttgttaaatgcagtcaagtttgtcacatgaaactattctccaggtatatgtataatttgatgatgcaaatgactacactaattttgtgcttcacaaacgattaatgagtctgatagaagatgttgaagacttcagccctaacttaatgcatagaagaagtacaaaagatcaagaagcagagccttactcaataaaaggtatgtcttacggtggggggggcattccaaggtagcacaaggttcctcctccttgaaatttaaaattttttttttt

SEQ ID NO: 55777 - DNA, 185 bp, Gossypium hirsutum
  unsure (1)..(185): unsure at all n locations
  Clone ID: uC-gsflnu33B055b12b1
ctgngtattgtgattaaaaattacaaacagtggcacgtgctattttatgcaaaaataaaatccaaaatcaaaatcccccaaaaatagcccagacattcgcgtttgggtccacgtgacgtcttaaatgttgagcaaagctagctctttggatagagtcatccgtttgccttatcgggctggatttt

SEQ ID NO: 55778 - DNA, 253 bp, Gossypium hirsutum
  Clone ID: uC-gsflnu33B055c04b1
gcgtctcgtttgcgagaacaactcgtgctactcctttaggttcttcttgtattacttgctgcaaacatctcacgactttttgtttcgattataagggataaacgggaccatgaagcagaagatggtagtgaaggttaccatgatggacgagaaattccggtctaaggcggtgaaaattgttgttggtctctaacgggtggtgttcattagagaaacaggttacaacgcgtatcgtctatcattgactgggttt

SEQ ID NO: 55779 - DNA, 297 bp, Gossypium hirsutum
  Clone ID: uC-gsflnu33B055c09b1
gttgactactcaaccgcggcacaaaacgaccccagagggagcacctttaggaggaggaccccttgtatcccctcgcgcatgaagctaaatatatccaaggaaagtaccacacaaacccacacgtgcgactgtcattcagaggggaggagagaaaaaccaagcgtgctaagaacagcaaagatcccagatgggcacaagaaactcagcccatggtggatgaaccaccccacgaatgataaaaatcacattaaagcgttcagcacaacctacaaggaataggctacctgcatcccaagg

SEQ ID NO: 55780 - DNA, 218 bp, Gossypium hirsutum
  Clone ID: uC-gsflnu33B055e06b1
gacgttatagttataatatagagccacctagataccattgactgaccggcggacaacaacgttgtgactgtaaagacccactcgtgtcccaacttattcgccgagatggacattggcccttctacagatggcgtaattgcgaagagggccacaccgagcgccaatacgagcagttgtgcagccagaatggctaatgggacaccccctgtagcggatgc

SEQ ID NO: 55781 - DNA, 233 bp, Gossypium hirsutum
  Clone ID: uC-gsflnu33B056d07b1
ttccacgcgtccgcccacgcgtccgcccacgcgtccggggagtggtggtggttacatgggaagtgggtatggtgatgtaaatggaagtttaccatatggaattgcatggttttattatattttatccaaagtattactaaaccttccatttagtttatgacttgtttaggatgttttaaaaggatcttttgcattgatctattaataaattatgggtgtatttataatttttt

SEQ ID NO: 55782 - DNA, 264 bp, Gossypium hirsutum
  Clone ID: uC-gsflnu33B056f02b1
tataaaaaaagaaagaaaaaaaaaaacaaaaatagaaatataaaaacaaagtaaaagcgaatcgctcacaactgacgctcaaagcatgggcagcagttagcttcaggtttgatggcatgcaaaaccaagcagttgaccccttcccaaccatctcactccccggcaacttggtgactaacgcctttacctgggcttacccgccttgcccctgattatataagacctccaagctgacgcctttcctcggttggggcccaaacctag

SEQ ID NO: 55783 - DNA, 527 bp, Gossypium hirsutum
  unsure (1)..(527): unsure at all n locations
  Clone ID: uC-gsflnu33B056g02b1
tccacgcgtccgcaggatttgcattcgcagcgacaggctctcttgcatgccaataacacgcttcatggagtggatgacaacattggcaagagcaagagaattttgacagccatgtcaaggaggatgaaccggaacaagtggatcattggcatcattattgcagttcttatcatcactattgccgctgttttatacttcaaacgtgttaaataggtagtggcattctgcatcttcaccatcttggctctgggtgtttctgagagtgataagtttattttgtccttgcaatgtgcttcattaatccacagactcggttttattcattcattcatttcaattctatgtggtgaacgttaagaaagaggttgacttcagtccttggatttgggacttccttttaaagattttatcatttatttggaggataatgtggtgtcagacatacaaagaaataaatgttgtttatatacaatattgnggtgagggtaaaatgggttgatttgtgtcaagtgtttgacaaaaatttt

SEQ ID NO: 55784 - DNA, 305 bp, Gossypium hirsutum
  Clone ID: uC-gsflnu33B056g10b1
gccgagcggacgccaacgcgggcggacgaacctgctttatatgatatcagattctgggtctgggatgaccgcaaaagcaaaagcatgggggtggatggtaacattgaccgataggaagaggctgagacgcagtggatcacattgatttatggaggactggtcataatcatgcccatagaggaatctatgtaggaagcaatacaggcatgcatattaaggacgcggccactaatgtgtttcaggagctgaggtggatctcatactggcaagcgctgggccggattacatggatctgaattgccgta

SEQ ID NO: 55785 - DNA, 353 bp, Gossypium hirsutum
  Clone ID: uC-gsflnu33B057g02b1
tttttaaaaacatacaaaaagaataaaaagggggggagattttaaacaaggtgtttatatacaaaaaaacgaaagaaatgaaatcacagcaattgtggcatggtgtctgtccctgcctcatgtttgtagatgacctttaaaccggggggggggggttttggggggcccagttttcatcctgggtgttgcgcggtgtttattcttttttaggggggccccaaattcgaacacctgggccgttgttttcacaccggtggtggggggaaacctggggggtaccccatttaagtcctttggggggcgctttcctttctttccccaggttggggtaatataataggggcctctccttt

SEQ ID NO: 55786 - DNA, 280 bp, Gossypium hirsutum
  Clone ID: uC-gsflnu33B058c04b1
cttgtttgtcaagcggaatccggtgtttggaggcaccactactgcgctctatggagatcgagtctggggactatgacacgttgtgaccatgatcaacatggtccgtcattaccttctttacgatgacctactggcagatgtgagagaggacgccagaccatatggagggctgacatgcgaagaacaaaatattatcactgcatccacgtcttatgcatgatcctcgacgagatatcgacctggacatggatcggatgctgcacgatgcaacgcttaataa

SEQ ID NO: 55787 - DNA, 434 bp, Gossypium hirsutum
  Clone ID: uC-gsflnu33B058h06b1
gtttgttttcacactgtctgtatatgtgtatctgttggattacgagaagggggagatgtttcaagaatacagtgacggaaacgggtcagcctctaccaaaaatggggggatgggtcgacaatgatccaacgtaaactgagggaatgactgtgatctttaacactgagagcctccacatgaaaactatactgatacaccaacaaccatcacgaggtgatacggaggttatgccgggagcggatcccaacaaaacctaagctaagaaatgactttggtgcatgcacgcccctcctgctgaatcttgaagtgatcctgcccgtataaaagctggtccacaagtgtggacaaaacgccaccaacctaaacaagatagaacctatggcgctgaaatgacgcttctatatatatatattactaattttcatatctaattt

SEQ ID NO: 55788 - DNA, 245 bp, Gossypium hirsutum
  Clone ID: uC-gsflnu33B060b04b1
ttcttctgcaaatgaggggaaaaaaaccaccaggtttttttaactggaaacggaggtgataccacagatgacatcatcgttaaataaaggagaagtgattaacaattccaggtgtagttctctatgactctacctgcgatgatatcatagagttgcaatgagcttccctctcttattgtacatgcactagcccttcgtcgaaacctgattccacctttaccaccaccgtcaacggaaaaaccgga

SEQ ID NO: 55789 - DNA, 391 bp, Gossypium hirsutum
  Clone ID: uC-gsflnu33B060d09b1
tgagatgtgaaccaagagtaaacagaggttgtatggataaaaccagaggagtggacagcgatatgaagcgtataagggaggcaaggatgtaaaaggagggcgtacaccttgttcaccattggagaaggacgaagacatcgcccgatgcatgaagaccggcctcaaggcgcggaaatgatgacaacggatggcaagggggaagtggaccataggtaaccaaacctggggtccagtattaagctaagagtgagagaatgactaatatgaagtgttccagactagagtgtgtttagcaagcgttgtagtttgtggctcgagacattaaaacaatcatacagtcgataccacccactcaaagcacataagaacttttccagacctgatctttaat

SEQ ID NO: 55790 - DNA, 218 bp, Gossypium hirsutum
  Clone ID: uC-gsflnu33B060e03b1
ccggcccggaattacttgctcgacccacccacgctttttctcaacttaaaaacgccaagttttcacattttaaacatattaccgcacatgcaccatgtctggcacgtgcggcaactgagactgacctgaccgtatacaatgcacgaagaagggtaacagaagcaccttgatcgctgggactgacaggagctacatcagcactgatgacatggatgctt

SEQ ID NO: 55791 - DNA, 489 bp, Gossypium hirsutum
  Clone ID: uC-gsflnu33B060f06b1
ttccttcaaagacccaacttctcatttctccatcttttcggactctctctgtttctctgaaccaagagggaaagaaacccaaacccccgaaaagatgcatcgatcatctagcagttctcgagtgtccgatgagttcttcctcaacgcatccccaccccaatctgtgggttccaagcaaccatcctcggagacggttcccctgaatccgcaagaactgcctatgtacaaccccctctcagccgccgccaagaaagaaaggtctcgactcagatctgccgagaacgccatccacatcatccctctcgttctcgttctttgtgctatcattctttggttcttttccagcccagaatcaagggtttgaagattgattgcaaaagctaaggtctttaatggagctgaatgaggagttttaattccataaaacaaaacatgacagagtgtgcttaacctatgacattatcaaagaagggcatctaacttgtttcg

SEQ ID NO: 55792 - DNA, 213 bp, Gossypium hirsutum
  unsure (1)..(213): unsure at all n locations
  Clone ID: uC-gsflnu33B060f08b1
ttgctatcatcagcagcagacctggaaacctcgagctaatttnttgacatagttaaccgattttggacatggccgggacagctgtatcagctacacaaagtggcagcactgaattgatagaatgaaatcaagtgcaagtgaggatgactcagggccagacattcatgttccagcagatatagatcggcatacgcttgataaaatccaagacct

SEQ ID NO: 55793 - DNA, 234 bp, Gossypium hirsutum
  Clone ID: uC-gsflnu33B060g03b1
ttccttgcgtccgcaagtctcttcagtgaatactttgacactcacacaaaaaaaaaaaaaatggcttctttcaattacatgttcttgagctttggcctggctctgtcatttgcaagctatgatgatggaggtgttgacagacatcatctaggacatgactaagcccccccttcgccgattggctcaactttgaggaggccagaggatcagaggttggctctatcaaaacactat

SEQ ID NO: 55794 - DNA, 284 bp, Gossypium hirsutum
  Clone ID: uC-gsflnu33B061a03b1
ggaccggcccgaattcccgggcgctcacgcgtcctggtaacccaatccgataaggaccgaaagcagcttattaaaccaaccaggcctttccaaccaatggggggggcaaaaacgcgcgacctagaccccgccgtcggggcaagggccaggccccgatgagtaggagggggcggaggccgacgcaaaacccggggcgcgagcccgggcggagcggtcataggggcaaaactcgggaggagaaacaaaaatgggaacgagaactacgaaggccgcaccggggaaag

SEQ ID NO: 55795 - DNA, 472 bp, Gossypium hirsutum
  Clone ID: uC-gsflnu33B061g08b1
tatttcatatgcctcactttagcaacaaaaggcacgaagagactacaccaacaaatggaggcacttgaggatgcgactatttttggctatgatggtggaggagatggccccgtcggctgtccaatatgttgcgggagatgatgcaccgtgccctactgctacactaagatgctaccgcattcgtgccgactgcgtgagctaccgttgacgctcttgcggaaggtctcctgtttgaaaaaggatgaaatgaattggttgttgataataacaatcgtgagatgtatagaacgaaggccaggaacaatggttactcgaatcattgccatgcggacgtgccagagggcaacaccatggatgaaacttgatacattgaggaagcggtgatgcgatgtaatctcaagtcattagccgatgtttcatagaggatggctgtgctggaccacacacaacctatcaacgggtactaattgat

SEQ ID NO: 55796 - DNA, 233 bp, Gossypium hirsutum
  Clone ID: uC-gsflnu33B062a12b1
cggaatgacccaggtcgacccactcgatgcaccagagagacagtgcagccatttgaatagcaccgcacgtggtgtaatgggcggttcgactgacactgatcacgcaaataccgtggatcttatgacaaacgtgctcggtcctacttactactgcataaggtttccatggaagaacatgctactgtgaatggtacaatggaagctagggaagacggcgaaatggatccgggacc

SEQ ID NO: 55797 - DNA, 163 bp, Gossypium hirsutum
  Clone ID: uC-gsflnu33B062g08b1
tttagcatgcgtcgtgtcacgcgtactattgtagcctgaagagctggtctacgccttgaagatcactaagtggaaagaggggttgattagtactatctgtgatggatgctactaggcatctgaactgactaccctaggaacaggatcttttatcgtatttgtg

SEQ ID NO: 55798 - DNA, 320 bp, Gossypium hirsutum
  Clone ID: uC-gsflnu33B062g12b1
ttcccacgctgacgcatcggaacctggttactatatatatatctatgattatctgtcgctcggataggaggacagacggctctgatgaccgcactttctgagttcttagtcatacatctaggaggcgaaaagactcaagttctgccgctaaatatcaagctggactctttgagtggagactccgattcttaaagctcctgtagctgtatagctgccttcacccatactgcctgatcatgcaaggccagttcagcccttttaaacagtgagtacaaggtacttcggttacatcggagaagatccaggacgaggtaacatga

SEQ ID NO: 55799 - DNA, 287 bp, Gossypium hirsutum
  Clone ID: uC-gsflnu33B063c09b1
tcttcaatatttgtgaagctcactgccttaaacatgagctaaaatgtcttatgtctataagaaagtattaatttgcttagggtcataggtgtaaagtgcgccttgttcattctcagagatctggcctgaatttgggtctaaattggaggccttgttttaattttaactgtatggacctcgattttcgtggctaagaatagatcttgcaagttgaaggcctcatcgggtcaacaaaaaaaaaaaaaaaaaaaaaaaaaaaaaaaaaaaaaaaaaaaaaaaaccaaacc

SEQ ID NO: 55800 - DNA, 277 bp, Gossypium hirsutum
  Clone ID: uC-gsflnu33B063e02b1
ttctctcgtgcaagcacgcgtgggcttgaggggaacatattagcagccgaccagcttggcacaaggttagtaagatctatgctttactgttaagaacgaaaaagaggcagtcgagaggagggatcttctgatactgtctggtctagggttaaaccttttggaatggtggtgccttgaatgcgtgttccagagggaccaacccatcgatatggtcaaggcaagaacccaactggttctaggatcgtcagaaactgttaccaagaacatgcttaaggag

SEQ ID NO: 55801 - DNA, 252 bp, Gossypium hirsutum
  Clone ID: uC-gsflnu33B064a03b1
ttctaaagactatgtaaagaaagactctcacagggcgattgaaagaggatcattgtttctatcgctggctggggacaatgatcctaacacagcagaatcgatggatacagtcgtctaggtgagaatgcacacagggtcatctaagcgaagatgtgatgcgctgagtgaaggagcaacgtaactggaattccaaagttgatcgcgacttctttcatgcgtatgccaaatggtttgatgatcttgccaagagag

SEQ ID NO: 55802 - DNA, 298 bp, Gossypium hirsutum
  Clone ID: uC-gsflnu33B064a04b1
taccgacatctttgaagcaaaagatcagaacgggggggttccagatcctgcacaggtcgttgatcaaggacaagtgatggagtggatgccagagagctgcatggcgagggcgacctctaaccagacacaggaagctgctcatgaggcatggatgaaacgagtgacgattgctagcaagcattcagaatatgagcatggggctgccgacttggtgatgcaccattgagatgagcgttcaatggttgaccagaagaaccttgctgatatagagttggctgaatttggttccagggagcct

SEQ ID NO: 55803 - DNA, 207 bp, Gossypium hirsutum
  Clone ID: uC-gsflnu33B064a09b1
gacgacatagctcttatatagtgccacgtaaaataaatgcactgtccgtgctctgacaacatcccgactgggaaagccctgcagtaacccagctaaaacggcttgaaacacatgccccttgacaacagacggcgacatggccataaggcccgaaccggtcgtgctgaccgacagtcgcccactctgtatggacaatgggacgcgccc

SEQ ID NO: 55804 - DNA, 302 bp, Gossypium hirsutum
  Clone ID: uC-gsflnu33B064b10b1
tacaaaccaacaaaaaaaaaaagaaaaaagagaggggatatttaaaaacaatacctaattaactcaatatgaaaatgaagattacatgactgacttgattaaaaatgcactgaacttttgaaaatatggggggggccttttaaggggatccaggtttgcctccgctggcttgaaagagcttattcttttttttgggggcccctaattaaaatcaatgggccgagggtttaccccggggtaatgggaaaaacctggggttcccccaattaagagggtttgggaaccatcccctttttgccagg

SEQ ID NO: 55805 - DNA, 393 bp, Gossypium hirsutum
  Clone ID: uC-gsflnu33B064e10b1
tacacgcgcactgccacgcctactgaacggagcgcttgtagacgaaaataactgtacccacagtgaggaaatgctgatgcatgaagctctccaacgatggatttcgacgatcatgtaccccgatggatcgtcatcgtcaccagctcctattctgcaggggatcacgatctatgtttacgagaatgggcctcgccttgcggaagcctctagaaacactaaccgtactgctatactgtggactcgtactggcagtccccttcgagctgttcgtggaatgtctgatgggaccatagcttttcttacctcgacaggattgcttgcgtttatgctgatctttcatagctccaactgtcgatgccgtcatcatcttttacctcattgctcaggctgctg

SEQ ID NO: 55806 - DNA, 326 bp, Gossypium hirsutum
  Clone ID: uC-gsflnu33B064h02b1
cttcggtcacgccttcggttaaattgtcagtgtttttgaggatatatgatatttggtcaccttgcatagaatataggctttattaagaattatttgtgttacgaaattatgctggcgtttttgtatataagaaaagttggtggagttgactcagaatgcaatgatgaagcgaagtatgaggggtggaactaggatgccgtgacattattggaaacggcaatgcccaaaccatggattgtttaaaaaaactaaaacaagagctggataatatcccgaaatgcctgtatgtattgcttaaagatagagatgaccccattttttggctt

SEQ ID NO: 55807 - DNA, 302 bp, Gossypium hirsutum
  Clone ID: uC-gsflnu33B064h12b1
tccacgcgtccgcggacgcgtggggacagagcaaaaatttgccttttaaatattgtactgtaacatataatccccttgaactgccgtgcatgcaggcggtctagagacttgggtttagtctatttttccatctcattggataataccaaataaactcatgaatggacaccattgcttttggagatatcagctttgaaatggaaaagttgtggaacaagacaagaaaaataatatagttaggcgtttctgatgcttaacaaaaaaataaaaaatagaaaaaaaagaaaagaaaaataataata

SEQ ID NO: 55808 - DNA, 261 bp, Gossypium hirsutum
  Clone ID: uC-gsflnu33B066d07b1
taacgcgcccggagaagaccaccttgcttggggcctgtatcatgattctagcgaatctttactttcatgctctcttatgatctttcgagtactgaccgcttctataactgtatatacctcatagcaccctactttttggttttggtttaactaatttgatatgtatgttagaccgatgacgattgtattatctctgggattcggaaggttgattgcattggaggtcataccacctatatcaatatagagcggactacaggc

SEQ ID NO: 55809 - DNA, 240 bp, Gossypium hirsutum
  Clone ID: uC-gsflnu33B066h05b1
gacggccgccctttttttgacaatgatgttcgtgctatgtgttctcattttttttatctgagtctggttttagaactttatttaagctcaattattctgcttcaaaataaaaaaacaaaatctcctatcaacacctcttactataaccattaaaatcaactcttctacataacaaaaaaggggcggtccttttagaggaccaaagttttctccccctttcatccaaactaacatccttta

SEQ ID NO: 55810 - DNA, 373 bp, Gossypium hirsutum
  Clone ID: uC-gsflnu33B068b01b1
atctcccgaccttgcacccgatcaatgacagtctaatgtatggttacgctagctatcttgaagcccaaattcaatgctggtcgaacttgcggatcccgctgaagatgcaaagatgcccgctcttgctgctggaaccataaactacgatgtaaagggaagacaaccagcactcagaccatcatcttccaagtggagcgaaggaagatgtccgtgaggggaccacttatgcgcacatactgaatcaagacctgtatcccagagtcgatcaaactagcccttgagagacgagcgactgctgtcaagctagcatgaagccaattcatgctaagctaatgaagctactcattcaactagcctaaagattgatagtatt

SEQ ID NO: 55811 - DNA, 214 bp, Gossypium hirsutum
  Clone ID: uC-gsflnu33B068c10b1
taagggtggcactgactatgtactttatcataaaggacagccactggcaaatattagcttacagattccaggagctcataatgtcctcaactctctagctgttattgccacagggacggtactcttacaaggccgccgacaagtacatgaactaataaactctttaaagttacataagctcgttcccaatgctcctcctagcccgctttgcgag

SEQ ID NO: 55812 - DNA, 226 bp, Gossypium hirsutum
  Clone ID: uC-gsflnu33B070f03b1
ctcgttcatgaaactattcaaagttcagttggtgcagaagggttctggtcctactatccttatggaactacggtgtcgataatcatcacagtgttagccatggtattggggcattataacgggccctcactgtttttcttcttgtccttcagactctttcttttcccttctattatgtcaccccacaatcctcatcatttgggcaatcctccgccccacaatacct

SEQ ID NO: 55813 - DNA, 176 bp, Gossypium hirsutum
  Clone ID: uC-gsflnu33B070f11b1
aacagaaggctgaggatgaagctgccgattctgccaggctcgcagactttcagaggaaggtttttgatgtcttatacaaggctgctgacattccttatttaagctcacacaagcattaaattcttgattatattcgagcatgctgtgacacagtcggaatcaacaattggagtagt

SEQ ID NO: 55814 - DNA, 252 bp, Gossypium hirsutum
  Clone ID: uC-gsflnu33B070g09b1
ggcctccctgggggtgccacgcttccagccgcgtataggcgaccctatagtcattctattgggcgcctaattacacttcactggccggggaatcccaggggctgcccatggtaaaaccccgtggttcaccaccctcatttcgccctggcaggccatctccccttttaggcgctggcggattgcccttccggccagttccgcatcgctgtttgcaacatgggacccgcccgaatggggcccgttacgcgccct

SEQ ID NO: 55815 - DNA, 429 bp, Gossypium hirsutum
  Clone ID: uC-gsflnu33B072b11b1
tttcccttggtttcttgttttctctctgttgaagttcaaaataataatgggaatgaggagaagagaaatgggtttttatttcctggctttcttatggttttgggttcctataaacggattgctttctcctaaaggagtaaactatgaagtgcaagctttaatggctataaaggatgctttgcatgatcctcatggtgttcttgacaattgggatggcgatgctgttgatccatgtagttgggcaatggttacttgttcacctgaaagcctagtcattggcctgggaagtccaagccagaatctatctggtacgttatcttcaagcattgtgaacttgacatacctccggattgtgctcgtgcagaataataacattactggaccaattccttcagaccttgggaagctctcaaagattcaacacttgat

SEQ ID NO: 55816 - DNA, 305 bp, Gossypium hirsutum
  Clone ID: uC-gsflnu33B072d01b1
cctactcgtccgtttttttttttttttcactccaaaacaagcttagctttgaaatatgaaaaataacacacacacacacaattaatacgatcctatgaactaactaaaattacaacatcgtactacattgatccgttcggggattcatcaccacctattgtgaagccaccaacgcctgttatcgttaagccacctttaccggatacaccgtgtactacaccaccactctttggtacaacaaatatgcccaatagacactttaaagctatgtgcatgtgtcaacgatttggttggcttagcacaca

SEQ ID NO: 55817 - DNA, 460 bp, Gossypium hirsutum
  unsure (1)..(460): unsure at all n locations
  Clone ID: uC-gsflnu33B072d05b1
tagtatcataattttgaaatggtaacaaaatattgaaaaaacaacaaaaaaaaaaaaaaaaaaaaaaaaaaaaaaaaaaaaaaaaaaaaaaaaaaaaaaaaaaagggggggcctctttgggggtcccaggtttacttccccgggcttgcgaagtgatagttttttattggggccccttaaattaatttcccgggccgcggttttccagggtggggctgggaaaaacccgggggttcccaaatttaatgtcctggaagaacatccccttttagcaggtgggggtaattccaaaggggccccatccgattggcctttccaaaaagtggggtnacctgaatggggatggggaccccccctttgggggggctttaagggggggggggtgggtggtttcccccatggtgttccctttcattggcggggcgtttagggcccgttttttggtttttttccctttttt

SEQ ID NO: 55818 - DNA, 404 bp, Gossypium hirsutum
  Clone ID: uC-gsflnu33B072d10b1
ctctcgcgtccgaaaaaaaaaaaaaaaaaaaaaaaaaaaataaaaaaaaaaaaaaaaaaaaaaaaaaaaaaaaaaaaataaaaaaaaaaaaaaataaaaaaaaaaaaaaaaaaagggggggggggttttttttgggaatctaagtttccttgccgggccagggaatgtctttgtttttttttggggaaacttaatttaatttgactggcctttgttttccaccgtttgggattggcaaacccttggccttcccaaatttattggctttgaatcacatttccttttggcgggttggtttaatagggaaggggcccgaacggtttgcctttccaaaaagttgcttaactggaatgggtaatgggcccttccttgttgctgttaataagggggggggggtgggttgg

SEQ ID NO: 55819 - DNA, 384 bp, Gossypium hirsutum
  Clone ID: uC-gsflnu33B072g03b1
ccgtccgctgttttgtatagcttgatggacctcactacaatggatggctagaggtagggcacagagtaagtcatacaaaagatccagccttggtgaggaatggaaaaagccatttgctggttgtctacatgccaaaggcatcggcctcgaaaagagaggcattgaagctaactaacctaactctgctctgcgaaagtgtgcttgagttcaatggatcaataatggaaaaaagagtgacaggatcgactcaaacgacggatgatgaaactacatcgcctataatgatcacgggttgaccgctctatttggacgaaagggtcatgccgattgcgagattcccgggggtagagacaaggatgcgaaggtacttggcggttcattatt

SEQ ID NO: 55820 - DNA, 297 bp, Gossypium hirsutum
  Clone ID: uC-gsflnu33B072h05b1
taataataaaataaaaaaaaaaaaaaaaaaaaaaaaaaaaaaattaaaagggacaagcataaataaataagaacacaacatgccgtcctgacagcatatagcagtacgagatcttctgtcgggccccgtgtagggtttgctcgtgcctcggttttacaagagtttgattgggcgcaccttggtgtaccccgtcgtgattgtgtcgcacccgttcccctttcgtttggtggatggacatctgtttggcctgggccagttgcctttcccatccattgctcatcctgaatggcgtttggg

SEQ ID NO: 55821 - DNA, 152 bp, Gossypium hirsutum
  Clone ID: uC-gsflnu33B073a02b1
catacggacttggctcaatcaatgccccgtaggttttgcagcattacgtttgctctgggagtcaaaagcttgtgaaaaacgaccatacggtaacccttcgtctatatgtgcttgcaacgagtgacacactacttctttctgggcggtgaaac

SEQ ID NO: 55822 - DNA, 229 bp, Gossypium hirsutum
  Clone ID: uC-gsflnu33B073a04b1
cgttcgacgatttaacaaatacccccacacttaagcttccgctagtcctcaagaaaattcctcaacccttaattaaaataaatgcttctcaacttataatttctatcgataagtatcttaacatagtccataggtaaacatacattgagaatttaatttacagatcttaaaagtttcaaaacatttcacgttgtgtattcaattatgcaaacaaaggtgttttccctca

SEQ ID NO: 55823 - DNA, 226 bp, Gossypium hirsutum
  Clone ID: uC-gsflnu33B073c03b1
ttttcgcgtccgccgctttatactataaaactctctctatataaatattgtaatgagactgcctgacgttcaccttatcacataactgttggtgcttgcatgtaatgcaaaggagaagctataatctgtacagtctactggacggtgcaggcctaatatatatataatttcttatcgtcgatccagatcaaatattgtattgaataaattccgtctagagaagatg

SEQ ID NO: 55824 - DNA, 335 bp, Gossypium hirsutum
  Clone ID: uC-gsflnu33B073d12b1
tttcaagagccaaactgagagagaaaaagattcatccatggagggcatgaatgatgaccatatgcatggtatgatgatgcacaacacatcatatggcggcatgaacatgaccaagccttcataagatgatgatgcatatgaccattcttatggggcagtgacgcctagattctctttttcggatggtcgggaaccagaacacagcatggacgtcttggccctgatagttgactttctgcttgttttcatgggtggagggggagtcatacactttcggttggagaaaactccggttccacccaccactatgaccgaccggtcttggttaaaaactt

SEQ ID NO: 55825 - DNA, 288 bp, Gossypium hirsutum
  Clone ID: uC-gsflnu33B073e01b1
tttttattgcttgatggcgtggaaccagttgtgagtgcatgtgttttctggagggaaaccttggtcacattagatccaaggaactggtgctggcttaatatctggggttttagacctcaatttaatcgtttaagactttcaaatataaagtgaagtagtatatcgtaactgaataacaaacttgctctgaaagaaggattgccggtaggtatattattcgtggctgttgtctaccccagcttttgacatagccatgtggccattaaaatgctacgaaactatatttgt

SEQ ID NO: 55826 - DNA, 326 bp, Gossypium hirsutum
  Clone ID: uC-gsflnu33B073e08b1
tttttatattccccccttctacttgcaatttctgtagcaaatacactatcaagagagagagaaaagagagatattttgagactaaaaaaaaaaaaaaggaaaaggactaaagttggatggttgtagggttttgtacgtaaaagtctttgtttaattatcataatgactagcattattggcacagaggatgataagtatagcacgattaacttttaagagactgagttgtgtttagggttgtccggcgccaatggaaacaattgttaaattaccaataacaatttaaaattagggtttttagagactgttaatttgatgtttaactt

SEQ ID NO: 55827 - DNA, 237 bp, Gossypium hirsutum
  Clone ID: uC-gsflnu33B073f04b1
ttctgatctcgggtacaccataaataaccatactaaagcaggtaggttctgatgcttctagtacagacatgggaatatacatttccacctttgatggacaaggttattgcaatccttaatgatggcactatgatgaccatatccaaagacctagtcaaggcatctctgacctcagactagtaggatatctaatgagatatttgcaaccggcagttgtcaattggaaccctattttag

SEQ ID NO: 55828 - DNA, 236 bp, Gossypium hirsutum
  Clone ID: uC-gsflnu33B073f05b1
tttttatgtccttggaatagacccagcagtatatactagaacacttcccactaaattgtttcttctttttgcttcaatcttttactaaaacggaacagaaaaattgtttatgattcatatacatgcttttctgggctactctttattggtagaatttgatggcagtatatacatgtatatcttttcttatataaaaataaacattattgctggactttggttaaaaaaaaaaatat

SEQ ID NO: 55829 - DNA, 227 bp, Gossypium hirsutum
  Clone ID: uC-gsflnu33B073f10b1
tctgttgaagaaaaaaaaagaaaagaagaggaagagagggggagaaggaagggaaacctgtacacggatcgaataccggacagaaaccggaggctcactaggaaactgatcaccgcgaaaggtacgagatcatctaaatatgaaaatataagcctttaaatactaaaagtatatgcatactaaggatttaaaagattaaaacgcaaaaatgcaccatgaaccctgat

SEQ ID NO: 55830 - DNA, 514 bp, Gossypium hirsutum
  Clone ID: uC-gsflnu33B073f12b1
tctttacagatgaatttcaattgaaagcttttgaaatgagtttggtacaagcgcaggttacttctctgtttgatggcaggtgccaacttacttatttggctttgcttaataaacttttttttggattgtgttctgtctgttgaatttttctggaaatcagggcgggggaaattctttaattaacccaattgcctggaaagtttcttgtctgggaactttatttgggggttgccctaaaaatcagaagcttgccgtacaggttgttgaaagtatcaaaatgcctcttgaagtgcctcaatttgaatgggacaattattttggtaggccaaaaattcaattgtttttaacctaatgccctggtaggaaaccaaatttttttgataaaacaatattttttagggggaccttttttgggatttgttggggagaaagaggtacctttctccaaaaagtttttggggagggttctctttaattataagtggtgtggcccttacccctttgaaaaccattt

SEQ ID NO: 55831 - DNA, 284 bp, Gossypium hirsutum
  Clone ID: uC-gsflnu33B073h02b1
actactcgtccgaaaaaaccatgctcctcgtatctgtcaaatctctacgctgaccatcaaaatacgaagtatgaagaaactctaccgtagaggcatgggtcatccatcaccatcaatcacgacctattcttcttcttttcctcccggctaccaatataaaccccttttggttgctctttcctctgaagacaaacaaggcttgggcctattctaacttctcgctccaacaacggattttggcaacttttcaggccgccgtaaaaacactccaaaaccccaaactt

SEQ ID NO: 55832 - DNA, 199 bp, Gossypium hirsutum
  Clone ID: uC-gsflnu33B074a01b1
ggggaagtggctccgacaaggtgatgattattgtggaggcggctcgtgctcaacaaaatgaaagttgcaggtacagcctgattatcctaacacagctctataagtacccagacgttgcacaatcatcaagtttatacagagactgggggaaggtttctaaatgaggaggtaaaagcatgaccttgcttccctttgctga

SEQ ID NO: 55833 - DNA, 189 bp, Gossypium hirsutum
  Clone ID: uC-gsflnu33B074b10b1
ctttactaccgcggggatgcgagctaaaagcttttttatagggtcaccaaaattaaatcaactggccgacttataaaaacgtcttgacgggaaaaaccttggctctccccaccataaatcgcctgcaataaaagcggcttttagccagcgggcttaaaactaaaaaggcccgaacctgttggtctttcc

SEQ ID NO: 55834 - DNA, 266 bp, Gossypium hirsutum
  Clone ID: uC-gsflnu33B075c10b1
tcgtattcctccggtgaggttcaagccaacagccgcgatattttaacgttgcctgcgatgggctctcacgcattgcgaaacacaagccttgaacccagttgacggagatgaaaaacgagaggcgattgcaaagcaaatctctgaccgtacatagtacgaactctggagataagagaagctgctgctaatacaaaaattaaacactaaggctctgaccaccatcaccaccagtactactacttccacggcgcgcgtaacggcccctg

SEQ ID NO: 55835 - DNA, 225 bp, Gossypium hirsutum
  Clone ID: uC-gsflnu33B075f09b1
tacaattaattaatgtaaaacgtgtggtttgttccaagtttttaaccttatggattctacttgttccccccctttgagaaatgaatgattgtactgagttgtgaaaaattcttttgaatggtaaaccttcatagccattgaaaattgagacttggaaggggtatcaaaattgtaatgcttgttgctatcgcaatatagaataatcacgtttgtgctgtgcatgcc

SEQ ID NO: 55836 - DNA, 174 bp, Gossypium hirsutum
  Clone ID: uC-gsflnu33B075h07b1
tagaaacacgtaataaaaagtggggtagcatcaatattgatatgggtgaagagctgacggctccccgaccctgcacagcccctctccgcccaactgcacctgatcactccccttcgccgccatcgcccctctgtgcaccaatccaccacccaccattaccagactgcccctctc

SEQ ID NO: 55837 - DNA, 182 bp, Gossypium hirsutum
  Clone ID: uC-gsflnu33B076b08b1
gcctcgcaaccccagcacacagagtttgtggttgggtagtggtttccacaagacaacaatattaaattttgggatcaggatgatcagatatcgggagatgacgtgttgcgtgttattcttctgtaaacatgcgttagggaacaggaggaagaaaatgggtagagaatgattggtctaacctt

SEQ ID NO: 55838 - DNA, 233 bp, Gossypium hirsutum
  Clone ID: uC-gsflnu33B076b11b1
cgggggccgggccggaagaactggggggaccacaccacgcggatggtcacccacacgaccagccgaaccttggggggggttaatgaacaaaaccaaggaagcaccacccgccaccaaggcaaagaggcaacccccagaggcagcagcacagcgggcgcacaagaagacccgaaaccggccgacccggccacaagcaggagaaagagagcaaaaagaggcctagaacgacccaa

SEQ ID NO: 55839 - DNA, 159 bp, Gossypium hirsutum
  Clone ID: uC-gsflnu33B076b12b1
ggtgccgggccggagtttctttggtcgaccacacgccgcgggtgggatgttggttgaagatcgcataatagcgggttgtttttttataaaaccagagaagcatcacatgtcaccaatgtaaagagccaaccagatgtttgatctgatcagtggtgtatg

SEQ ID NO: 55840 - DNA, 134 bp, Gossypium hirsutum
  Clone ID: uC-gsflnu33B076d09b1
gcctaaagaatcacctggaatgggggatcgaggatgagttattttgaaaaggcatccacaaacacacttacttgaaagggtcttacaagaagattccaccggccgtcatttctgccgctttagctgtaagttgc

SEQ ID NO: 55841 - DNA, 416 bp, Gossypium hirsutum
  Clone ID: uC-gsflnu33B076g02b1
gtagagctaccgaagtgtacacctggaccacgggcgttgatctcgaaacttatgcgggttcacaaacaagctcaaaaaagatggccaacgctgcaacgggaatggaggtgcatgacgattgaaagatgaaactgaaggatataaacccggacagaaccggccagatgatagaggggcggccttagtagtggtaccaagtatacatccggcgggggtgcaacatcatagctctactatagggcaaccaaaaattaatttactggccgtagtttaaaaaggtagagacggggaaaacccgggggttaccaaatttaaacgcttggaagaaaaacccctttttgcatgttggaataatacaaaaaaggcccgaaccgatcgtccttccaaacagttgtccaaccctgaatggttaatgg

SEQ ID NO: 55842 - DNA, 310 bp, Gossypium hirsutum
  Clone ID: uC-gsflnu33B076h04b1
ttctccttttccaaacaaatcaaaagaagcagagcccacttttatcgaccatggcagtatcaaacaatacccttttgccatgagccctgccattccctcaacctgggccgtcggatgcagctcacgccgatgcgaaagcgtacgccctctccacgattacactaattcatggttgcattagcgccgacggcatccataggatcacagcactgccgggcactgactgtgcctgaactgactcaccagatgtgggatgctaaaaacatgatgtgtgctgctgacccacgccatggccgcaacctaactgccc

SEQ ID NO: 55843 - DNA, 533 bp, Gossypium hirsutum
  Clone ID: uC-gsflnu33B076h11b1
taggaaagagagacaaagatgggaggtgggctgtattctgaagggactgaaagggctctatacttagctgacaactgagctttttttcccactgggtgttgctttgatttgatgattttctgtgggggagtgtatattacgaagacctaatatagtggttgctgaaatattttatgcaatagataggttgtaatacgctaccctagtgacgttactttggtccaaaatggtggtctctatgtgtgccatattaacacatatgtggattttgtggcctgtcatgtatgttggtgtggatatgatgacctagctgtttgatgcggacagagttgatggattttctggatctggattgaattgttgtgttctgtcttgcccatgttgttatttttctgaattcttattaattttttcttcttttttgactcctggctattttattgattttccgtcatatgtccgtttttatatcattttatattttttagctattttgtactctctttctttctttttttttcatgttttttttt

SEQ ID NO: 55844 - DNA, 289 bp, Gossypium hirsutum
  Clone ID: uC-gsflnu33B077d02b1
gtccatggaagctgaagggggtgttatgatattaatgtacttatttgaaactcatctggacttacggcaacatgctgatctagagtgccaactcttacaaaaacattggagggagtaagtcatccaatagaaatttgaaaagtcgtagagcctatagcactcgataagagccactttcatatggttcatgagttcgtgactatccggatagattctgcactgtgttcattggaatattgccttggatttggaagaaatcaggaacttacttgcctttacttggactaaa

SEQ ID NO: 55845 - DNA, 136 bp, Gossypium hirsutum
  Clone ID: uC-gsflnu33B077d06b1
gagaatcccctagtaacggcgagcgaactataaggagcccagctagagaatcggtcgccatcggcgtaaaaaaaagaaactaggagaagcgttctcagcgactgaccggttccaagttcttctgccaaaggagctc

SEQ ID NO: 55846 - DNA, 325 bp, Gossypium hirsutum
  Clone ID: uC-gsflnu33B079c01b1
gtacgtcgtccgcacgcatacgggcttggggaaagtttttgtgcacaagtgacggagagcccaaactgccgacgatgcacaacaggacattctgagcacagaatgcacatgaagctacaacagagaagacaaaagagaccgttgaacgagcagaccataacgatgacctggatactaacaagcatgggaggtcgcgcagcacaagaagatcaaggaacagggaactcgggaccaggaacagcatcaccagtgcaaagaagacgtgcaagcgagagacgcatgatgcagaaagcaactaaaggataagcacaaactatctggcgag

SEQ ID NO: 55847 - DNA, 267 bp, Gossypium hirsutum
  Clone ID: uC-gsflnu33B079d04b1
gtgactcgcgctgccatcttgagaaacacagtggcagctgaaaagaggggttcatagctctacaccacaggataagccaaagattgaacatgctcttgtagaatctaggcagtggttggattgttgccaattgactgaagctgatgaatctctggatcaaatgcaggaattggttagtgcatgtaaccctataactgataaaatgcaccacgctgctggtgaccacatggttgagattatggatgaggacgcttcttcgctgggtgg

SEQ ID NO: 55848 - DNA, 286 bp, Gossypium hirsutum
  Clone ID: uC-gsflnu33B079e04b1
gtcacgcgtccgaccaatattaggcacacgctctcagcttatatacgctagttcacaatgacaaggaaaggccagcatgcagaggcgactcaatcctatgctctcaaggcagttttggctagagtatcaatataaccgagactgcaatccatctggagcagacccaggcctggttatagacgtgtggacggacatcggagcaacaagccccgggcggtctcggaaccgacgctggagctcagggctgaggacccatgctgctgactccgttggcgccaacatctca

SEQ ID NO: 55849 - DNA, 250 bp, Gossypium hirsutum
  Clone ID: uC-gsflnu33B079e10b1
tccacgcgtccgcccacgcgtccgcccacgcgttccttttacgcgtcccgaactggctgttagagaaacaatgggagaccaaatgcatgggccggtttggcttatggttgggaacaaagggaaaccattctgggcaatcatctccctgcaattggaatatgcagggaggtatataatctcctgggtttctttaaggcatggatggagtaatttcatccttggtacctatcgtcatgtggttgccaccatt

SEQ ID NO: 55850 - DNA, 182 bp, Gossypium hirsutum
  Clone ID: uC-gsflnu33B079h08b1
taccgggcccggatttcctggtccgcccacacccgtccgtcgtgccgccaggctaacatatacctttattgtgaactgttaggagatcaaggacctatgggtgggactgtcttctgtaccacattgggagtccctaggatcgctgtctatccgaaactgccgagggtccggtgatgctagct

SEQ ID NO: 55851 - DNA, 341 bp, Gossypium hirsutum
  Clone ID: uC-gsflnu33B088d11b1
tgatatacgtgacttctatcaccagatggaagaaaggctttattagccaaataattctatcattccctatagcagttgttactgggagaaaaacgccagctgaaaggacaaaaaatggtattagcgataccaagacatatcattatcatttaaatcttggaggaagcgttcctaccaaaaggctgactaggctaccatcaatatctaagaatgatccaaagtccacggggcatgttggaattcacagttcgggatccagaaactttctgctaaaaccggaaccgctttgatctattgtggattccggctctgaacatccatccgaaggcatagttaaaaac

SEQ ID NO: 55852 - DNA, 314 bp, Gossypium hirsutum
  Clone ID: uC-gsflnu33B088g02b1
tttactctgcggggatctgtatagagaactacatctttctctttatcaaaagcctaccgatggtgggctcgccgagacgaatagaacactgggagaggaggaagaagaatactttaaggctgtcgttgatgcaccaacaggggggatggtgtatccaccgtttaggtctcacagggggctattttcaggtggcacaggacgcgatgcacctatcttgaacgggggacttttacctatagcgcttgacctggcagagtttagctatgaccgtgaggcaactgcggttataccgcttgatgcagcttgttgaggat

SEQ ID NO: 55853 - DNA, 194 bp, Gossypium hirsutum
  Clone ID: uC-gsflnu33B088g08b1
tcgaaaatggcgagaagatcttgatcttgtcgagcattgtgtccatatcggtggccgtatgtaaaaacgatcataagccggcccatatatgacatcagtacatttgatgtcagcccaagtcaagaccgacctgagatgtgatcttaagattaggcctaagcccggtttggccagctgctgcaaatgcaaataaa

SEQ ID NO: 55854 - DNA, 334 bp, Gossypium hirsutum
  Clone ID: uC-gsflnu33B088g09b1
ttgctcacgcgtgcgctacaatattaatctggactttgtttttcagatatggagcttcaactcccttcattccaagtgcttctcaggatcctacttgtttccttattcatatagcagaagtttaaagagatcaacacgccgagagaccggaccttaagccgataccggggccgagaaaaatacccgtgacacctatttagaaccaaattgctagcccattaccacaccagaggtttagagacttgctcctgaaacatggactactgagccaatcttcaactggtaggagatatctacagtgatagtttgcttacccccagtggattaagaatag

SEQ ID NO: 55855 - DNA, 435 bp, Gossypium hirsutum
  Clone ID: uC-gsflnu33B088g12b1
tactacgcggacggtttagatgataaaagactgaaggagttcacttatcaacacagcatcataacgatatgcaaggttatgctagaatacattggggataaggataagatcatggaatgtagcattacaaactccagaagatgcatgaatagcatgcgcggatatgaatggcaatatggcagtcagcaaacctctctatgttgcactagactaaaggaaggtagaatggagagccaggttacaggctcaatttatctaaatgcgaccaggtacaatgtcactcttagttgcttctcgtctgccaatgtactcacctggtggtccaggtcttgggccgtatatattttatggtcaagcaccctccagcattgttttcgcagcgctgtatctgggttttaacagtatgctcgatcctggtttgaggcccggcggagc

SEQ ID NO: 55856 - DNA, 182 bp, Gossypium hirsutum
  Clone ID: uC-gsflnu33B088h08b1
ttggtgaactcctggacactaactcaacctaaggtcatgtctctggaatggttattccttgtcaataagataactacatggtcgaacgcattgcaaacattgtaattgatatgcatctttagctcaacaaccaaaaaactcccattacaccaaaataacagtgaagggattaagcaatccac

SEQ ID NO: 55857 - DNA, 179 bp, Gossypium hirsutum
  Clone ID: uC-gsflnu33B089h04b1
cccatgcgtccgcccacgcgtccgacataccttcttttaatacattacatgggggcctaaatgtatgatagcattgattttgctgttgtatgtcataattatcaatgaatgactgtatttccatccccaattacagccttgtcttggtggagaattaaaaaccttaatgtttgcgaatg

SEQ ID NO: 55858 - DNA, 215 bp, Gossypium hirsutum
  Clone ID: uC-gsflnu33B090b10b1
gacgtcttaggttttctagctcgtcacctaaatacaatttactggccaaaattcaacataccgcttgactgggaaacccactgacagcccctgatctttgtcccttgaacaactatccccacgtccccaccttggccgattacaacaaaggccagcaccgaatgtctttaccaagaccttcgcatgcggaatgggaaacggatcttccccaaaac

SEQ ID NO: 55859 - DNA, 203 bp, Gossypium hirsutum
  Clone ID: uC-gsflnu33B090d01b1
tccatacataggccaacacgagcgtccacaattgggcgcattattgcaagcgaacccgcttgggacaatacctgcagaaggggccatgaaagatgcaagtctatgggggtatggttgttcatggttccaagcacaccttgacccaagctggtagagccgaggaataagcaagatggccctgttgatacgtggaatcatgttct

SEQ ID NO: 55860 - DNA, 172 bp, Gossypium hirsutum
  Clone ID: uC-gsflnu33B090e07b1
tccacgcgtccgcgttgctgttaaggatcttaaacgtggttttgatgctttaaactccaaggatgatccggccaaggaagctgccaactttaccttacatgttttcatcttgaaccaccctggtcaaataggaaatggctattccctattactcttctgtcacacttttcac

SEQ ID NO: 55861 - DNA, 433 bp, Gossypium hirsutum
  Clone ID: uC-gsflnu33B090h06b1
tgtagtgcggccggccctcagaaaccatatgaaaagggataattggaggttgtaatgcacatatggagaacacatcatatcacaccaggatcaaacgaatcatatagacagctttgcgaccagagaccatccgtgcgggcatgcccgcacacaggcatgcatacatgcataccactgaggaaatggaaaacccatagcctcttacatcagcatgtatgacccctggacccaaaaggaagggcaacctaaagatcaaaccccaaagcagaaaaacaaccattaaagaaaaagaaagccctcatcatgccacatccgacatagtaatcataaataatagtagtatgactccgtcaactatgacataacagtctatagaaaaaagaagcttctttaagcttttgccaccttacggatggtattggtcggtctattt

SEQ ID NO: 55862 - DNA, 127 bp, Gossypium hirsutum
  unsure (1)..(127): unsure at all n locations
  Clone ID: uC-gsflnu33B090h08b1
gtcnagcgcagacacacgcgaacgggtgaaggaggactgcaagcgagggcgaagagagctgttgaccgaaatccgcatgcggaagacggcgacaacatttgcggttaataatccggagaacgggaaa

SEQ ID NO: 55863 - DNA, 209 bp, Gossypium hirsutum
  Clone ID: uC-gsflnu33B091b06b1
ctggggggtcttttttatttttatgcggttaacaaaacttttattgaagcttgaaatgactggaggcacggccagcaaaagaaatgaacataacggaacagcacaagcacggttgaaccataaaaaaaaagcatgcaggtaccacaacaaggaaatatatcacaaagacccataacaacacaccacaactaaagacatctacagctaat

SEQ ID NO: 55864 - DNA, 412 bp, Gossypium hirsutum
  Clone ID: uC-gsflnu33B091c06b1
ctgtctctaatgctttcgcttgttttgaccgtgtattaaatacccccatacgctggccacaccttctacctacaatcactaaaaccgctgtcctttgttagacgaaacctgcgtcccagaacttgttttttgtggctcttttaccctttttgttggaatcaaaccatggcccttttgtgatttttgagaatgggggaaacaacttggagctgtagtgtattgatgctctccgcttgcagatcgggggcgagcactgtccttactgtttgtgctgattctggtttcagattcggttcttgcagagaaggctggtactaccgctggcttggacttgacccataagcaaccccagctgaatgcctatattgctttgcaccaatagcccagagtctgatattgtttgacacacgcc

SEQ ID NO: 55865 - DNA, 295 bp, Gossypium hirsutum
  Clone ID: uC-gsflnu33B091e12b1
tccgagaccacctgtgatcagagtccagagagagaagctacaggaaccacggagggggaaggaacacggaacgaagggacgcgccaggccagggagagggcacactccaaggggggccaggcaaggcgaggggaagaagccccaaggtcgagcccataagcggatgcaatacaagacaccgtggccacactgccgatgtaggcttcgggaagaagcggggaccgaactcgcaagagaagtgcagggattccagtatgaggcgtacacaacatacgaaggattggagccacaccag

SEQ ID NO: 55866 - DNA, 193 bp, Gossypium hirsutum
  Clone ID: uC-gsflnu33B091g08b1
acggtcgtaccaaagagtcaacacaaatggcaccaaaggggatttttaaaaccactgacgggctttcaaccgcacccccatgaaagcaccactgtctacacccttttccaataccaaagctgctgcacaagaagctgaactatggaccatatgtccaatcaacaagctaaatacatccctcaccaaacacaaa

SEQ ID NO: 55867 - DNA, 385 bp, Gossypium hirsutum
  Clone ID: uC-gsflnu33B091g12b1
tcctcctgttgaaaacaaaaagctacagagggatcactttagaacggaatcggggtactaaccaatccatgaagtggattccagatgctgctttagatgcgaacaccaaacccctcactgattagagccctgacggaaatccaactcattggcctcgccccagctatagacactttattggcttcttccatgctagccgaaagcactatatatatcgatcatcaagtgctacatcccccctgctagatactctgacaaagacattgtttcaatgagaacgctctcggacgaaaccagttgtgcctcattagattcttgagccgtttatgttcacccagggacggaatggaacccgaggtgaccactggcaaaaatttgcaaagca

SEQ ID NO: 55868 - DNA, 306 bp, Gossypium hirsutum
  Clone ID: uC-gsflnu33B092a12b1
gtgtttccaacaaacatatgcatgcataaacatggacagaatgatgtatgagaacatgatgggcctatctgcttgatgcatacacgaagcctaaaacatgctgatgtaacaaacgtcgagtgctaaacacatgattgtgacatgtgttgtcgctgcaacagtgcttgatatgctaatcaatggttaggtatgttaccaggatgacagcctaacaattgcataaccaagccatgactttaagaacggttgctattcactgatgttatgaataccacactcacatcagagaccgacttactccgggcc

SEQ ID NO: 55869 - DNA, 190 bp, Gossypium hirsutum
  Clone ID: uC-gsflnu33B092b07b1
tccatacgtccgtatttaggtacctatgccagtaggattggcaattgggttggcagagttagtgaccctcccaatcacaggaactggtacaaacccaggtagtaacctaggtggggccattattgtgaacatgaacaagggatgggacaagccatggaatgaccatggggtcccatggatgggtcctttc

SEQ ID NO: 55870 - DNA, 340 bp, Gossypium hirsutum
  Clone ID: uC-gsflnu33B092d04b1
gcggcctgtctatctttgtggacagggcaccaactgaatggggggtttgtccttacagaataccacctccgtcatgctaagtaatttgtatctgtttcagacaaagaggaaagatctagaggagaacaagggctgggataaggagacaccgacggaatgaaagggcttagttttatgcaaagatgtggcctttcggggaggattatcagtgcgatcctggacatagccgctgaagctggataggatgcaagtgagttacaagctcatgtttgtatacactacacaatgatgtcatcccacggagacctgtacttagcactgggcttaactgtcgctgcag

SEQ ID NO: 55871 - DNA, 271 bp, Gossypium hirsutum
  Clone ID: uC-gsflnu33B092d05b1
taatattgtttatcaataatctcttgcattttggttttaagagatttaaaaaaaataaaggagaggaaaaacaaaaaaaaaaataaaaaaaaaaataaagggttgccggtgtgggggttcctggctttcccaggtttggttgcggcgcttgagctgtcttttcgggttacctgagtttgtttcattggcggtcgttgtcctactttgtgactgggaggactgtgttgttcccggccttactccgcttgttgcccttgccctttttgccctt

SEQ ID NO: 55872 - DNA, 104 bp, Gossypium hirsutum
  unsure (1)..(104): unsure at all n locations
  Clone ID: uC-gsflnu33B092d06b1
gctacnttgaatttgataaaagaagacaaagtggtttggaaaatggctttactcatagcggtgcggaccttaggtatgctagtgtctgagtcgacttaccagcc

SEQ ID NO: 55873 - DNA, 390 bp, Gossypium hirsutum
  Clone ID: uC-gsflnu33B092g07b1
agataccgagggagagtttttcgaggctgaaaaggaggatatgataaaactgcctggcgacaagaaagaagaccagaaagcagacgacgcctctttgattgagaacagcgagggagacctcgattcaaattgactaccctcctttgaggagagggtgtgcctcttacaaagtccgagcccacctttattcttagaggatctctcccccccctcataatcaccaactgtggacgtacaggatactacctagatccacactcatatgtgctacttcaacttcaatgacttcatccactcaattaatcgcatggatgctctcttcttaccatccacaacccactttcatattaaaagctcctttctgtattccctgaaggagtgaaagtatgg

SEQ ID NO: 55874 - DNA, 155 bp, Gossypium hirsutum
  Clone ID: uC-gsflnu33B092h01b1
atcgtttccttgtgtccgtaagttcaaaggagacagggttccaagtttggttgatgaaccaggaccgtgtgacctgagcgtgattattggtctggtgattcccttgctgggttcactttgactgctcatggattgttcttattttagctttgttg

SEQ ID NO: 55875 - DNA, 324 bp, Gossypium hirsutum
  Clone ID: uC-gsflnu33B094b04b1
tgctacgcgtccggatgatacgattcccaagcggggggttttttcaaaaactggtacgggtaacccattaattcattattgtcttgatagaaaatgctttgcccatggcaagtaatactccatcgaaaatggaaatcttgcaaacaaataacaatagaaagttgatcgtaacatggcaggtcttcacaacaaagcatctattggatgaaatcctatattgaaaagaacctttttgttgtattgctcaatagtcacaaactctgaacatcctccattgatttcgtttaatcctctaattgttttcttctattaggagtgcttaac

SEQ ID NO: 55876 - DNA, 218 bp, Gossypium hirsutum
  Clone ID: uC-gsflnu33B094b09b1
tcgtgtaaacccaaaaaggagaccgcagcctagagttatttttaaaaaagcctgtccttgtcacacaccccagattgagatcttgtaaacttttaccgactttccccctcataaatgctacttatggctcccgccatcaaaccactctatctgaaacagacggatcgactcccaaaaacccaacaaccacccatcacctccaacctcacaaaaccccc

SEQ ID NO: 55877 - DNA, 449 bp, Gossypium hirsutum
  Clone ID: uC-gsflnu33B094c01b1
ttgttgccttccatttttcattttgctgggcgtcactaatctgtctctcgtttatgctatcaagttcgcccaggtaatgcctgacatacctagcagcctcttttcctaaaaaatccttaccttcatgtaagttcttgttcctgtccatccaaagaacccacataccatagatcactagtcggcgttgtgcttccatacaattattgaaaatccaggacactccacaaagacacgccgaagggtttcagttccagctctacatcttggacatatggcatttggagccactcttctctggtgcagattgaccatcgtgggaatgaaattccacgataccttccatgccagtagctttattttattaggaaagtgcaatgcccacaattgtttgtaaaatggttgggccgtagtctgtgaatcagtaggataagtagtaggaatttgggttt

SEQ ID NO: 55878 - DNA, 172 bp, Gossypium hirsutum
  Clone ID: uC-gsflnu33B094d09b1
tcgtccacgcgtacgcaccatcgagaactcacggggcgatgataaacaactgttgggtttacgccaaggggcgaagtatggagccggaattgggcctggagcctatgataagcacgtcacaagaataccattctccggatacacccatttataggaggcaaccagatgcttg

SEQ ID NO: 55879 - DNA, 294 bp, Gossypium hirsutum
  Clone ID: uC-gsflnu33B094d11b1
tcccacgcgtccggagaaatgtagttacttggacaacaatgattaatgggtacctaaaaatgggatatttaattgatggttttggtttgttttcggctatgagaaaagaggaaggagttttggttaattctactactatgactgttttatttgaagtttgtggacattttgatagatgtttatggttgactttcaacttgttttggattgggtttttttatgttcttattttctactctgtttatcctgttttttgggtattgttatctatttttacatctatacgaccatctt

SEQ ID NO: 55880 - DNA, 313 bp, Gossypium hirsutum
  Clone ID: uC-gsflnu33B094e03b1
gcctcctactcgtacggctacacggaatataccggaggagattttttgggagcattgacggtactagaacaaaagggaaagcttgcaatttttaagggaactctgactgatgatgaaggtgacaaagtactctgtgtgataatttatcgaattggctttcaaaggcaaggcaacatttggcctattgatcatcagaactttaatgaccagcagcctgacggtaacctgatatgtgctgaaaaaccaaacctgatggaattttttactcaactattccctggtactagactggtgccattattggcatttttgt

SEQ ID NO: 55881 - DNA, 285 bp, Gossypium hirsutum
  Clone ID: uC-gsflnu33B094f09b1
tccacgcgtccgaaaaaaaaaaaaaaaaagggggaaattttaaaaaaaaatgccgtttaaaccacccaaataagattaacgaaaggaaacccaatatctggggggggcccctctaaaaaaacacaactaattctccccgaccacgcagagggtgaagcttttaaatcgggttaccaaaaatcacccaaagggccccctttttacaacattcgcgattgggaaaaaccccgcctaccccaaaataatccacttggaaacaaaccccccctattcccccggtgccta

SEQ ID NO: 55882 - DNA, 141 bp, Gossypium hirsutum
  Clone ID: uC-gsflnu33B095a01b1
tcgcgaacttttatcttctaattctctatggactgtacaagcgggcgggttgtgtgtaccagcgaataccggccgttctggatagttcaatatcagggaatggaacaagtgtgatgtatagaaggctgttgaatggtaaat

SEQ ID NO: 55883 - DNA, 153 bp, Gossypium hirsutum
  Clone ID: uC-gsflnu33B095a03b1
ggcttgttgcactacttgtcttgcgttgctggctttggggattgcgtactaagctaatatgcgcagagcttcttccatatctgctcacagcacaccaactacattctgatcttatttcttccaggatgactattgcgaggttttactcctcat

SEQ ID NO: 55884 - DNA, 170 bp, Gossypium hirsutum
  Clone ID: uC-gsflnu33B095a05b1
acgcccaaattctcttttgacgaaaatgaaatgactgtccaaatgaggtgttgaaatgcaataattggtgtgtataaaatttcgtttcaatgcatatttgctcaaccgctttttttttaatgaaaaactaaaagctacaaacactcacaacttgcaggaacaataaactc

SEQ ID NO: 55885 - DNA, 421 bp, Gossypium hirsutum
  Clone ID: uC-gsflnu33B095b11b1
tttttcttcaaattgtcacgttccttctcttcgtcttctgagcattatacttgccccttaccatgatgttttccagcctgttagagagaacggcgacctgcttatcgacggccgctctttatatgttgatcaacggaaccatggccaccatcttgctgatctcccggctatggcctcacaaaacgccctacgtggctgacgactacaactcttgatcatcccttaccggcgcactgcaccgacctcctgtcggtcctcagccgtatcaagtcttttaacttctcgacgtacagggttcctgtttacaacccagacatagctgacgactcaacagcctatcggctggagcggaccccgtcggttatgaacgagttgagtcctttaacttttactgttctactttctaacccttaaagggcat

SEQ ID NO: 55886 - DNA, 465 bp, Gossypium hirsutum
  Clone ID: uC-gsflnu33B095d11b1
tatattatataaaaaaaaaaaaaaaacaaaaaacaggaaagatttaaaaaaacaaaaaaatgggaaaaaaaaaaagagggacccccacagagacagcctcctccttccgcggccgggcattcggataactctctttttggggctgctctgttcgttcccttcgcccgccgtcgtcccccccgtcttgccttttccttccctggcttccccctattgtcgcgcctcggggtatctcctcctctcggcggctgcctctttacccatgtcgtccccccctcggttgccctttcccccctttgcccttatctggtgattcaacgagccccccctttctcccccctttctcccttgcctctgggcgtgctccctctctagcgccccccctcctctggtctcttcttttcggcccgtccttggccctccccttctctccctctgtccccttctgtcctcggctttctcccg

SEQ ID NO: 55887 - DNA, 122 bp, Gossypium hirsutum
  Clone ID: uC-gsflnu33B095e02b1
cccacgctgttatagacttctatgtggtaacttctttgattcacttcgaatgagccttggaattgcataagaatggatttacatcattaagagagatcgacaggctttcttttcttgccatg

SEQ ID NO: 55888 - DNA, 241 bp, Gossypium hirsutum
  Clone ID: uC-gsflnu33B095e08b1
ctcgcttgtccgaaagaacaacggagccatcgaacgaaccatttccatggccatgttctcagtctggttctcaatgagcgagccaaacactgatgaccatcctgatgacgagattgctcacatgaatgcgaccgagcggacgaatgatcaagccactgatgaaacctgtgcccagaggtggacccaggaatgacacatgggatgacagcagctgtagcaacttatctttattatatctatt

SEQ ID NO: 55889 - DNA, 123 bp, Gossypium hirsutum
  Clone ID: uC-gsflnu33B095g10b1
gctaccataaaaaggttctttgtttttcttcaaacatttttgggtcgttgaacttctctgttccctatttaacacagattaattagttccctttcgtagtcgctatattaacttctattaaat

SEQ ID NO: 55890 - DNA, 324 bp, Gossypium hirsutum
  Clone ID: uC-gsflnu33B097a01b1
tttataaaaaaaaaaaaaaaaaaaaaaaaaagggggggattatattaaaaaaaaggggacaaaaaaaaaaaaaaaaaaaggggggccacccttacggggcgccccttctagaggccccaagcttccgtccccgggcttgcgacgttttacctcttcttttggggcccccacttgccattcaccgggccggctttttccaaccccgggcctggcaaacccatgggttatcccatctaattcgcctttggacagatccccttttcgcctgtgggcgtaatcccaaaagggtcccccccgttggcccttcccaactgttgaccggcc

SEQ ID NO: 55891 - DNA, 135 bp, Gossypium hirsutum
  Clone ID: uC-gsflnu33B097b02b1
cggaatgtacccgggtgcgacccacgcagtccgctccatgcgaaacgaccacgcagtgcggggacaggggggggctctacttcaaacgccgaggctaatccccgctccggactcgcacccgtaaccaaaattatc

SEQ ID NO: 55892 - DNA, 479 bp, Gossypium hirsutum
  Clone ID: uC-gsflnu33B097d03b1
tttttataaaaaaaaaaaaaaaaaaaaaaaaagagagagttatttaaaaaaaggggcggttaatatagaggaacacaggatccgttacgggtggatgcaacttttttcctcttgtctagtgccaccttaattctttgttctggccgctgttttgcgtcgttttggctggggtaaccggggtggtgccgaccttttttgctttggctcacattctcctttcgccagctggtcgttcttgtgttgggggcctgtctgtttgtctttcccgtccgtttgtttgcctgtttgggttttgggcccctccttttatcggccgttttcgtcctggtggttgatgtgtttacctcgccgggttcctggtttctttgggtggggtgttgttttctgtttttctttttcttttcccttccttttttgtgtctttccccttttttttcctccctttcttttttcttctgttgttccttttttgttcccgt

SEQ ID NO: 55893 - DNA, 151 bp, Gossypium hirsutum
  Clone ID: uC-gsflnu33B097f01b1
aaatggctctctgagagtggcaaattggttgcgaagcttttcaaaaaaattcacgaaatgacagaagaagaaaacaatctagcatttgtcctaatctgatgaaccagaaccacgacaagtgaggtactccaccctgaccagcagagatcga

SEQ ID NO: 55894 - DNA, 191 bp, Gossypium hirsutum
  Clone ID: uC-gsflnu33B097f12b1
tcgtctgatatagtatgttcatcatggatggattggttccatggtggtttacagtcccagattgagcaccatttgtttccaaggtttccatggtgccatctcaggaaaagttccccattcgttcatgatttgcctaagatacacatcttacattacaatccctttccttttcgaaaggctaatgctctttt

SEQ ID NO: 55895 - DNA, 147 bp, Gossypium hirsutum
  Clone ID: uC-gsflnu33B098d03b1
gttacacactgtgctgatctccacccagcatgatgagactgtcacaaaggatgaaggtgctgctgaccataaagagcatgttatcaagccctgcattcctgagaagaatccttgatgggaagacaattactacaccttaacctatat

SEQ ID NO: 55896 - DNA, 200 bp, Gossypium hirsutum
  Clone ID: uC-gsflnu33B098f03b1
cctgacaaagcttcatattatcttttttagttccgacattagaaaacgaaaaaaaagaagaagaaatacaatcgttttctttttgaagtcgggttttagtttttcgccaccttaggcgtcttgtgtctcttccatctctgttcacctgtttactccttcttctatgcctccagtttatctcttcactatgcctccatcct

SEQ ID NO: 55897 - DNA, 172 bp, Gossypium hirsutum
  Clone ID: uC-gsflnu33B098h09b1
tcggtcatcctaagtatctggagaaaaacgaggatgatattgttacccgtgtcgatggagctgataaagcagctgaaactgtcaagagattactggaagatatggttcaaagataaacggaactaaacttgatccgcatgcaccataggatataaatattgttcacctgcat

SEQ ID NO: 55898 - DNA, 313 bp, Gossypium hirsutum
  Clone ID: uC-gsflnu33B099a12b1
ttttacgcgtgggcgcgagggccgccctttttttttttttttttttgtaaagctagctgcaatggggtttttggcagttgcagtggcatgtattttaggttattaagagtctgctaatgaatggaagtgcttgagttcataagaatttgtgatcttctccatgctgggcagcttgttttttttcttgctgaacaaacggtgaaatttgctagtgtctataaaaaaggttgatagcttttgtattttgggccgaacaaatggtatttatggtggtgctttcttcaattcctgattcctggaagagaagagcttt

SEQ ID NO: 55899 - DNA, 185 bp, Gossypium hirsutum
  Clone ID: uC-gsflnu33B099b09b1
ttcgtataaagacaggaaaagaatgaaaaaaaagagggaaaaaatgaaaaaaaaacaccccaaaaaaccatcaaaagagcaagattaaaatctttctctgcgttttaccaagcttcgcagaatcgatccctcctaaccaacttattgggggggcgcttgctctcggggttcatgttccctcccct

SEQ ID NO: 55900 - DNA, 152 bp, Gossypium hirsutum
  Clone ID: uC-gsflnu33B099c09b1
tcgatgagctctcatatggacattgataaaactgatgagaagtaatttgagaaaatcctatcatacatcgagcatgtctaatgtgaaggcgctactttactattaggtggtaaccttatagctcactaaggcatatttcacactttcttctt

SEQ ID NO: 55901 - DNA, 297 bp, Gossypium hirsutum
  Clone ID: uC-gsflnu33B099f12b1
tcgtgtattccgacgtggaccctttcgcgtggttgtaagcactgatctgttagatcgtggaatcgatgttcagaaagtctttatggagactcaatcatggaacctcaacacagccagagagctacgctcattgaatacgtgcgtagcggaagacctggacagaaaaggtgttgacatgacatcttatccacaaatattgagaggatgctatataacagacaaagggatgaaagggttgtcgatgcagagctgatgtgaacagtggcatgagataaattgtgcggatgggaagtggct

SEQ ID NO: 55902 - DNA, 183 bp, Gossypium hirsutum
  Clone ID: uC-gsflnu33B099h09b1
ttgctgacgcgtgggcggacgcgagggggagaatgaggttgctaacaaagatagggacgctgaataaggagaggaaattgacaagagattactggaagaattagttcaaagaagaaaggaactcaataggaactcgatccaaaatagagctgttcaaagtacacatggataaagacaacaact

SEQ ID NO: 55903 - DNA, 455 bp, Gossypium hirsutum
  Clone ID: uC-gsflnu33B100a01b1
tgtatagagggggtgccctgatagggtttcgaccctagaccataaacgccgtcggcgaccttgtggagccaccgagataagcgctgagacaccaactgctagtaccagatgaggactggaacgagacatgcgcgacgtggatagtgacatgtgcgttagtgcgtggagatagccagatgcgacgggtggacaatgggtggaaccaagtgagtacgcttaggtgataggcatatgttagacttggagaatatgggccacaatgaaatctgggctgtattagtgcaaaagctaacggcgtgcaggagcactggtcccactgcagcaattgagaattacaacttatatctctgaaatgattgatttatgagtgggctagatttagctttggaatgtactggatgcaacttcattgtccatgttagatgtcgaccataacaatttaactgggcgtattc

SEQ ID NO: 55904 - DNA, 514 bp, Gossypium hirsutum
  Clone ID: uC-gsflnu33B107c08b1
tcttctttttcctccttccttcgtttcttttcatattcttgtgcttgttatttgtctccttttgtttcccttttatttatttatttatttatttttatcttttttataaactttaccttttatctccttaaaatcaatcgttatctttctcttctttgttcttctgcaactttcatggcggttttacccaccggctcttcacacttggagttgacgatatctgttcctggtttcgcttcttccccttctttcccttcttctggtgatcaagggggttgtacggtgagagatttggatataaaccaagtaccagcagaagatgtatggatcacagcaagcatggaagatgaagaagaaagctgcaataatggtgcccctcctcgaaaaaagcttcgtcttacaaaagaacagtctcgccttcttgaagaaagtttcagactaaaccataccctaaaccctaagcagaaaggggcattggctttgcagctgaagcttaggccaaggcaggttgaag

SEQ ID NO: 55905 - DNA, 413 bp, Gossypium hirsutum
  Clone ID: uC-gsflnu33B107g08b1
tctatttggtctgaaatggaatgtggtttaaaggttaaaaaaaaaaaaaataacagaaaacacaaaaaaaacaagagaagaggggttatcagattttaggttccgggcggtcgttctcgtgcatccatgcttaccgactgttgcttcgcgacagcttattttttttttagggccgcctgcattcaattggctggcctgggaaattccatcggattagcttgggctatcctgtgggctgacccttcttattctctcttgggggtcttttctctttatgccggctggcctattctcgtttgggcccggacggattcccctattggacaggggccctgcctgattggggatgggtaccccccttgtgttgtttcattaccgccgttgtgttctgttacttcgcccagtgcgtcccc

SEQ ID NO: 55906 - DNA, 382 bp, Gossypium hirsutum
  Clone ID: uC-gsflnu33B107h07b1
tttgaactcgtaaattatattatttaatatttacgagccaaatgtagtttttaaaatatttttagaatagtaaattgtgttttataaagatttatttggtcaataaattgagaaaaagaggtatcgagatctcgatgttataaaaaaaaaaaaaaaaaaaaaaaaaaaaaaaaaaaaaaaaaaaaaaaaaaaaaaaaaaaaaaaaaaaaggggggcggcccttttagaggctccattctttcctccgcctgcctgcgacataattctttttttatggggccacctaaaattaatctgccggccgtttttcaacaacgtcactgctggaaaaaccctgtggccccacaaattaatcttgttgcacaacaccctcttttcagct

SEQ ID NO: 55907 - DNA, 266 bp, Gossypium hirsutum
  Clone ID: uC-gsflnu33B108b12b1
gtctttgtcacgcaggcaaaacgagcatcagtctgagggccttcatcacacttgtggggagagaccccacggacacgaggtaggacccaggggccggtggtccttaaccggtgaattggtctgacgatgccatgggtgctcaggtcggacttgatgatgccttagctacgatccttgcctaagcccgaaccacctggccggcatgacttggcaggacactgcatgatggtcaagattgactatcattcggcaagacagatcctatg

SEQ ID NO: 55908 - DNA, 266 bp, Gossypium hirsutum
  Clone ID: uC-gsflnu33B108c09b1
ttcacgcgtccggtaaagatcattaacaaggttggtggcgttggtggtggcggcgacaacggcggcggtagtggtggtgtgctccaggcttgcaaaaagttttgttttaccatagttttaaattttaataaataaaaatgatgtatctttttatctgtcagagtcttttgtttttaattatatgaaggaattcatttgacatcataaaaaaaaaaaaaaaaaatataaaaaaaaaaatatatataaaaaaaaagaaaataataatg

SEQ ID NO: 55909 - DNA, 330 bp, Gossypium hirsutum
  Clone ID: uC-gsflnu33B108f12b1
tttggctactgcgttgagcgtggcgaacactctgtgattgagaccatgtgcggagcagggagaattagggttgctagaattagtttacgattaggttaattgctgtaggctaaattcgggctggacttaatgaaattgtgctatattggtccgaatctatatggatcatggcgctgctcacatggttttgggccccgggcagcaattgggtatcacaattgctgacattcgatattctaacagtttgcttgatttaatatctaagactatcattgttatggtttgctcgatttaatatcacgacctttgatcttttaataaagaaagaag

SEQ ID NO: 55910 - DNA, 425 bp, Gossypium hirsutum
  Clone ID: uC-gsflnu33B109b03b1
cgtacgcccccgatcttagaccgacagcttagcgctaaggctcgccgtaactggctcggcatcggtgagccacaaggaggggtggataaagggcggaacggctcgacttccggttaccactcatcggccgcggctgttgcttggtaagcgctcgtggcctctgtccttgtctcagacggagaggtaagacgtagaccgaagccttgccaccgatcgtgcacagattggggaggcagaggactacagacactcttaaacgagctgcgatggcagcatcagctgggaggctggctgaaagattaggattgcggcatacttcactgaagccatgactgacttcagaggcaaagacttgcggatattgaagcaagaaaactgatgagctcagggactaaagcgaaaaacgcgatacatgacctgaatgt

SEQ ID NO: 55911 - DNA, 275 bp, Gossypium hirsutum
  Clone ID: uC-gsflnu33B109c03b1
ctcacgcgtccgcccacgcgttcgtaaaaaggaacattttaaaaaaaatgggaaaaaatataaaattggtgagagattcttgaatgtatctaatctaattctgggtgttgttcttgtttaggatttgggtggggtcccctcttattgttgccccgtttttttctttgggtggctcgttattggtgttctgtggcgttgcgtttgttctcttcatgggggtgaattccctttttccccccatggtgtttttctggagggcttcttccccttttgct

SEQ ID NO: 55912 - DNA, 311 bp, Gossypium hirsutum
  Clone ID: uC-gsflnu33B109g03b1
tttggctgcgggcgttatacgcggtccatggttactgtcctacgcatgcagccaaccttttgaattttagtgttatcaaccccatagctactgagggccttattgcatgtggcagaccggcacctccagggcgccactgaccagcacagtgatgaaacacatacaaaccccatgtgttggtttaattttcgaagaggcacatatcgaccggccttaccatcagttgctcagaatgaatgatggagggtacgcgccctatgacgatccttaaaacgcggctgaggtgggggtttctgcactagatgaccgtt

SEQ ID NO: 55913 - DNA, 289 bp, Gossypium hirsutum
  Clone ID: uC-gsflnu33B109g09b1
tttgtaagatcgtggactcaaggtagcagtgggtctgattcagtccttccgccccccttgactcgcaacacgagaacaagaacgagcgtgaacattgcatgacaatcggaagagccacccgagcctagctcccggagtgatttcccaaagtattcccgctggttcgtccttagcggcggaggccacgaaacccatgcacggaacagaagtagtcactgggacagcatgacatagacgcaagaccctactttgagtgctaaaggcaccaagcccctgtatgaaccgaact

SEQ ID NO: 55914 - DNA, 169 bp, Gossypium hirsutum
  Clone ID: uC-gsflnu33B110b03b1
tgtgatgatgaagacgcgatatgagtaactaatatgggtataactcgatcatgagaacttcaagattgatcatggatcattccttaatgccgtctgttgagaatttcagaagccactgacatgtcatttaaatacagagtttactgatataagcgaatctaatgatgta

SEQ ID NO: 55915 - DNA, 281 bp, Gossypium hirsutum
  Clone ID: uC-gsflnu33B110b05b1
tctacgcgtactgacaagaaagcattgaaaaaggcagtagcgaatcaaccggagagcgatgccatggaggcctgaggaaggagtttacagctatctgaatctggcctattcgatggagaatgtgaaacacaactagaccacagtgtaactgctgcgggatatggcacagaaaaaggtcaagactattggattgttaagaactcatgtggtagcagttgaggagaagcaggctatctcaggagggcaaggaatgttggcaataccgtgactggcatatgtgg

SEQ ID NO: 55916 - DNA, 282 bp, Gossypium hirsutum
  Clone ID: uC-gsflnu33B110b06b1
ttcacgcgtccggaaacgcgaaggtccagggaggctttagaagggccaccagatacaaactccaagcccagctgaggaggcagccaacgaccatgagcacaggaccatttgagcactgagttccattaaggacctggtggttgataagttgctccgaactatagtgcaaaacgctggcagcaacagcgattgtactccttacaagtaaggaggcggtagagtgtgaccaactagttcgtcggggctcgactgctgatagcatctcaaggtcatggtttttgg

SEQ ID NO: 55917 - DNA, 289 bp, Gossypium hirsutum
  Clone ID: uC-gsflnu33B110c04b1
taataaacaaaaaaaaaaaaaaaaaaaaagggggaaaattaaaaaaaaaaaaagaaaaaaacaaacaaaaatcccaaaaacggggggccccctttgggggacccaggttttcgcccgcggccatggaacgtccaagtttcttcatggggtcaccaaatttcaattccctggccgcggttttccaccgtggggcctgggaaaccccgggggttccccatcttatttgtcttgcggcacatccccttttggccgggtggtgtattagcgaaggggccggaacggattgcct

SEQ ID NO: 55918 - DNA, 239 bp, Gossypium hirsutum
  Clone ID: uC-gsflnu33B110c07b1
tgccacgcgtccgaagacccgaagggcgggggacctgttaggggtgctccgatatttccaccccaagcccatctaagttggctgttagggagcatgggctcatgatcactacagtacagtgttacattaaggagcaggtggtttgaaagttactaggaactatagagcataatcctgacagcagcacaaagggtatgtctctaaagaaggaggcgggagcgggtgaccaaaaagtggat

SEQ ID NO: 55919 - DNA, 404 bp, Gossypium hirsutum
  Clone ID: uC-gsflnu33B110e03b1
tggtctggtacacggatcgtgatgaacacgaggtggttattgaaggcactcttctgaatcctaacatgtctacctctggatccgcctcccaagaggacgcgttccaggttatggctgcttacaatgcaccagccatgcatgaagccgtcccggctgaagaacatggtattgtgctctcgactgatgaacaaagcgaggaaggtgcatcccataaccttaaagtcaagaacaacgctgcatgccaataaaccatggccacattgacggatatcttgttgtgcccctctgcaaacacctataaggtctgtgtttgaaaggatgaaaacctaaagaaagcacaccttgctttgaatgataggagcaaggtctacttcttggccactttcattcttacaaagttgaca

SEQ ID NO: 55920 - DNA, 166 bp, Gossypium hirsutum
  Clone ID: uC-gsflnu33B110e07b1
tgccacgcgtgcgataacgccaaggttgggggatacttcaggtgggttactatattttactccaaagcccatctcagttcgctgccaacgagtattgtctcatgactattagagcactgcctttcactaaggaccatttggttgctcatttgttacgaaccatatt

SEQ ID NO: 55921 - DNA, 184 bp, Gossypium hirsutum
  Clone ID: uC-gsflnu33B110g04b1
tgctacgcctacgataacgccgagggtcgggggggaaataggatggctactagcggctaacccaagagacaagtatgctgatcttcagtgagcaagggcgcatgggcactagtccgttacgatccaccaatggcatatttttttaacataagcaacgatccctttaatagaagttggacatggg

SEQ ID NO: 55922 - DNA, 187 bp, Gossypium hirsutum
  Clone ID: uC-gsflnu33B110g05b1
gtctcgcgtgcgaataagcggagaactagcgaggggtttgacgggatactaggtttttacaccaaagcacaggtaagttggcttcgggcgagaaagggcgactgggcccatgaaccaactccgaatgtggccgataagtatttaccgacatgaccggatgaattcagaaaataacagggccaaaatg

SEQ ID NO: 55923 - DNA, 235 bp, Gossypium hirsutum
  Clone ID: uC-gsflnu33B110g07b1
ttcttcacgcgtgcgataacccgaagtgcgggggatattacagggcggttcctacttttctaaccaaagcccatctctgttggctggcagtgggcaggagtgcatgcctactacagcactgcctttcattaaggacctggtggtttgaaagatgcttggaaccatagtgcataactttgacagctccaacaagggtatgtcgtatacaaaggtgaagttagcgggtgacgctata

SEQ ID NO: 55924 - DNA, 389 bp, Gossypium hirsutum
  Clone ID: uC-gsflnu33B110h06b1
tcgtccacgcgtgcggagacgcggagggactggggcacgacagagggcctcatacgtttacagccggaacggattcctgaaagaacagtgttaatattatgaaaggagaactggatcggtgagatgctctaatggacgaaagggaaaccatttggaatgaggcagatggcaaaccgatgacttccacagtcagacttaaacacactcacactcagctgatatccagtcacaaattttgcatcgagatcgtctgattatgcatagctcagggaattgctgcctatctatacaatgtagtgaagaaatgaagctataaaaggatggaatcgatccgatcctttaaggtctgtaagaaaatctagcattgacgtccatcttgaggttttgct

SEQ ID NO: 55925 - DNA, 374 bp, Gossypium hirsutum
  Clone ID: uC-gsflnu33B111c05b1
cttttgcgtccgcccacgcgtccgcccacgcgtgcgcccacgcgtccgcccacgcgttcgcccacgcgtccgcccacgcgtccgtgaaataataaattattattttctaaaaaaaaaaaatgaaaaaaaaaaagaaaaaaaaaaaaaaaaagaaaaaaaaaaaaaagggaacaaaaaaaaaaaaaaaaaaaaaaaaaaacaaagaaataaggggggacgcttttaggggatccaggtttaaaaccgcgggattgcaagactataatatttatatggggcaacttaaaataaattaatgggccgtgttttaaaagggttgaacgggaaaaacctgggggtaaccaaacttaatcgtttggaagaaaatccctttt

SEQ ID NO: 55926 - DNA, 206 bp, Gossypium hirsutum
  Clone ID: uC-gsflnu33B111e05b1
atgcactgagctcatgccttatgatgggaatgtatggaatgacaagaaacccaatccggatccggcgacgctggacacagaggcaaggcatagaaatctccgaccttaaagtggttatgagaacataacacagagactgcccacaagccccacaacgagggccatgtgggaactggatctttcgatacttcgatgacaaaaacatt

SEQ ID NO: 55927 - DNA, 395 bp, Gossypium hirsutum
  Clone ID: uC-gsflnu33B111e06b1
gttttgtacaagatcgagagggccgcactattttggttgtttctaggaaaagcttgcttgagtagaaccacttaaacggtgaactaaagtccgaggatttatagatgtacaaaacttgcgggttgaatagaccataggggaatatgtatcataagtagagcaacagacagagcatttgtccatttgaggagcaagagtatagctgggctggatgatcgcaaaattacagaggatgtgatgactatctaaaggaaatgaaacataggcaatgaaccaagcgcctcacgcgttttggggcatctagaccactcatgttcccaacagtatacacacgaggctttgttgtgacctttacgcttctgcagattccccctgatattgagggatttgcttct

SEQ ID NO: 55928 - DNA, 478 bp, Gossypium hirsutum
  Clone ID: uC-gsflnu33B111h12b1
ttcacgcgtccggccatgcgtccggccacgcggccggggaggatcttatcatactgtcttctgcttgtaactcttccaaacggcactggtgttagcaaagaaagatagacagcacaagacgatcacagcggctgactgactttagagaagaaaaatggcactgtgggctgttcacttgaagaacgcaaaccctgggaatgcttctgcttctgctgctctgtagatgaagaggaatgcgacacctgaacgacccaattgttgtaaggttagcaacttcggagttcttccgaacgccgtttcaagaacatgcctcccttcatcgtgcatgcgatctttcaccgttacgtatatggctaagaacaataatcacgagagtgcattatcccctgatttgggaaatggtgatcaatccattactgaccgggacagctcaagaagatataattattgatagagcaataaatctaatggtgatgct

SEQ ID NO: 55929 - DNA, 323 bp, Gossypium hirsutum
  Clone ID: uC-gsflnu33B112a02b1
atctttctttcctgtttcatcttggtttcatttggttattgtatatgctgcagttttggttcttttctagaggtccaagtatcgatcattgtttgtcgtaagagtagtccccctagatatgtgatttcatgggggggtcatagaatctgtaaggtgatgtcaggcggttactttattatcatggatgtatcatacatttggatataaatacccttcataatggatcaaaacaaaaaaagtagtattactgttaagataaaaagcaagaataatcaacctacatttcactgattaatcacgctcgtagagattgaatagacatt

SEQ ID NO: 55930 - DNA, 273 bp, Gossypium hirsutum
  Clone ID: uC-gsflnu33B112a12b1
cccacgcgtccgcccacgcgtccgcggacgcgtgggtttttattttctgatggaaaaataagctgggaattatttttttctgctgcgttgctttccattttcttaggaatcaaacatagtagccgagaatccgccatgttcttaaatatttatccagtttgttttcgaaacccttagtttgttctgattcttattttattagttgattctttgtttttgctgattgaactttccttttgatttttttggtttaaaaggctggtaaaagaaaac

SEQ ID NO: 55931 - DNA, 347 bp, Gossypium hirsutum
  Clone ID: uC-gsflnu33B112b11b1
tgttcggtcgtacatgcgatcgtgccttaataacatctaatagcatttttgatcagggagagtatagttaatggatgtggaaaaagcaaaaaaactgtggatgaaatgcttggcttatagaggagcgaacacagaagcaatgagaacatgcctgtctcttgtggtgtaatatcgcacgacttggggccgacattatgtacattcaaacaaatgagcaatgcagattaggtcgcacaaacatgtaattctgaaccgctagaataaaaagaacattgatgaattttcaaggttatgatatgataatgaggattttcccttgaaagacacagaaaggaaaaatcgaggag

SEQ ID NO: 55932 - DNA, 372 bp, Gossypium hirsutum
  Clone ID: uC-gsflnu33B112c09b1
gatgttgatgagatgatccgcgaagctgatgttgatggtgatggccagataaactatcaggagatcggcaaagtcatgatggcctctttaagctcaccctggaaaccagtcagccgaagcacgtgttcagcgagacaaagagcacctcacgatagaagaccgtcggcgcgcaactcacggaccattgaaaattctgaggacacggagcctttcgcgccctgtcacactgataaccatagcaggattactacgaaagcactctctactgaatggcacactgtaggctagggccgtactcagactggattcctagccttgagcaaaggattggctgttagggctgaggccagcggtcctagtcccgaacccgtt

SEQ ID NO: 55933 - DNA, 472 bp, Gossypium hirsutum
  Clone ID: uC-gsflnu33B112f06b1
cccacgcgtccgcaaccagctgcggctggagctgtgtgcatactgcatggggctaactatgaatactcaaccgacagcatgctaatgatggcaataaatagaacaggcaccagcaagggcactgatttctttacacccaccatgagctgagagtgttgaataaccagtaggctggaaactagaggtggcactcgacttacatctccatctaagaaagagaagcacgaacctaaaccatcagacattactttcccaagagaccaacgactggacactattccagacaccctgcattggggaagactaagtagagagaacccataccgtagccatcgcatgaaccgagctattagtgactagctaaatagataaataagtatccatgtaataagagctgattaatactaaggttgtgatgactgtcatgtagtaattaactaggcctgtgactagcgagagggcttatggcagt

SEQ ID NO: 55934 - DNA, 474 bp, Gossypium hirsutum
  Clone ID: uC-gsflnu33B112h06b1
cattcgcgtagccggacgcttgggaaagaaaaatcggaataccaagctgattggaggccgaaaaacagaagaaaatggcaagacaatggaagatgcacatggactccatgccgatactgcaatgagtggtgcgtaactcatggaagctggctgctattactgcggttgtgctctgttcggatccatatgattctttcgcttaaaggcatatcatcgttccaatacatggaaaagaattgcattgcttaagaataacagttactgagtattgcacttggaaattgtgactgccttccctgcttttgcatataagaaggcggccattattatgatcggcattaacatatatgatggcatattccgagtgcctattgaaagtgcctgtgacattatctttgacatgtacaacgcttaaaacgtgattgtagactctcaatgccggaggctaccgacaaaatcacttttttaagtttt

SEQ ID NO: 55935 - DNA, 245 bp, Gossypium hirsutum
  Clone ID: uC-gsflnu33B113b08b1
cctccgcgtccgatttagtattaaaaagcccgcagaaaaaaaaaaaaaaaaagaaaaaaaaaaaaagaacttatattggggggggggcgatatatgggaacccgtttcgggctgacgcgtcgtggggtctgttgcatcccctctattgccttcccggtccgcggccttgcatgggctttttctcggccttgcttcgtggagccctcttgcttcgtccttcctgggaactccgtggcgcgcccctt

SEQ ID NO: 55936 - DNA, 404 bp, Gossypium hirsutum
  Clone ID: uC-gsflnu33B113c02b1
tatagatgaagcactggatggagaaagggcctggttcaagttccataggcctgggcaacttctacagcccgacgacgatcaagctgccgacatgcggggcgtggctaccactaccggggctatttgactcattcagcctattgattggacgacgcagaccatcttggagaaaccacagacggattagagacgaaagcaacatttggcgcctcattgcgggcttgaacatcgcgtatggtgaagaacaactcatagaaagaataaaaataataatgtactaagggacatgatttgtgatggattgaggaaagaacaagcctgtttgcttctggagacaatgactgggacgttgtgatcccgcccgagaaagctgcaaaaagaggaggctacgggcgggcgagata

SEQ ID NO: 55937 - DNA, 222 bp, Gossypium hirsutum
  Clone ID: uC-gsflnu33B114c03b1
acgcccacgcgtccggaattttttttcttgggtaaatgtcgaataacatttgtataagcattattatttttggaatgaaatcatgaataaatattttattcaaaaaaaaaaaaaaagaacaaaaaaaaaaaaaaaaaaataaagaacttaagcctgaaaaggatgtgacctttggtccatgcggtcggacaacgaaattaaagttgttgagatgcaccatga

SEQ ID NO: 55938 - DNA, 322 bp, Gossypium hirsutum
  Clone ID: uC-gsflnu33B114f11b1
gttctatactatcagtgacatattctgggcaatgatcaaattcattgaagcgtgctcctgatccatgtactagaaggaaaagaccgatgactacagattaggctctggttgatgcacgaaatgcgatgatggttcacgaggacctgaaagcggaccatatggtggaggtggaagcccacgacgaccaactgggttaatgaacaatgttaccggaattgaccatagttcccttactgtctaccgctcctgatgcggaggataaatgcatgaagcatacatgttggacatggacactggaatataaatgaagtcctgttattat

SEQ ID NO: 55939 - DNA, 451 bp, Gossypium hirsutum
  Clone ID: uC-gsflnu33B114h07b1
gttacacatccatgtgactccctgggggctttggcactattacggcttacaatggtggcccttatattcaacagcaaaaatggcaactgagcggaactgctactgtagcatcgagcacacatcagtcccgaccgattcacgagcgcacattggctagtgcccaacacttactgtgggagaacatgaaaacctctccaaatgtcttgggccaaaaggcaccaccaatcacagaacattaaaggcttcttacaccattaagcttgtaacacccactggtgaggacagccattttccagcccctgtcgatcaatacactactgatgctgccgaagaagggagaggtgcactgccatacccttgccacgctggaccttgcatcacatgtgccggagagactgtgtacgactcagttcgtcaacactacagtatcgtccttgatgaaaaacaaatt

SEQ ID NO: 55940 - DNA, 445 bp, Gossypium hirsutum
  Clone ID: uC-gsflnu33B115a02b1
ttattaaaaaaaaaaaaaaaaaaaaaaaaaaaaaaaaaaaaaaaaaaaaaaaaaaaaaaaaaaaaaaaaaaaaaaaaaaaaaaaaaaaaaaaaaaaaaaaaaaaaaaaaaaaaaaaaaaaaaaaaaaaaaaaaaaaaaaataaaaaaaaaaaaaaaataaataaaggggggggcctttttaagggaataaaatttttccccccatggtcagcggtgaactgttttttttttgggcccctataaaaaaacttggtggggggttttttaaaaactggtggggggaaaaaacggggggtccccatatttatattcctgtgaaaaaaacccctttttgccctatgcttaaaataaaaaatagggcccccaattgccctcttccaaaaggttgcccctttttaggggaaagggggcccccctttttggggtttttaaatagggggggggg

SEQ ID NO: 55941 - DNA, 504 bp, Gossypium hirsutum
  Clone ID: uC-gsflnu33B115c01b1
ttttataaaaaaaaaaaaaaaaaaaaaaaaaaaaaaaaaaaaaaaaaaaaaagaaaaaaacaaaaaaaaaaaaagaaaaaaaaaacaaaccaaaatgagagcatatataaaatggggggccggttttggggggctgggttttgggacccccggttttgtcgcccggctgggtgctttcagtgtcctttttttttactgcggggcgctggttcatcgggcggcgtttggaaaagtccctgtcttgacccccgttcttgttccacactttcttcctttttgcccttgtcccttttcagacgggtgggccatcccgtaggggcctccccctggtgggtcacccaaagttgttgaaggggcactggctccggggcgtgcctctttgccggggctttttggggtggcccttgtattgtctctccccctttggccctcccttttggggggcctttgtgcccgttcctttttttttttccccttgttttctcagggcgggtgctttttttc

SEQ ID NO: 55942 - DNA, 370 bp, Gossypium hirsutum
  Clone ID: uC-gsflnu33B115d02b1
aggctctctgaaccttacaagggtattggcgattgtatcaagcgaacactcactgatgaaggattcggctctttgcggagagggaacactagtcatgctattcgttcattccccactcaggcctcgaactttgccttcaaggattacttcaagaagctttacaacttcaagaaagacagagatggttactggaaatggtttgctgggaacttgtcatctggtggtgcagctggtgctccttcccttctctatgattactccttggatttgctcgaactcgtatcacaaatgatgcacaggctgccaaaaagggaggagagagacaattcaacggttttgctgatgtctacaggaaaaccctaaaatctga

SEQ ID NO: 55943 - DNA, 298 bp, Gossypium hirsutum
  Clone ID: uC-gsflnu33B115f10b1
tttgggaatgataagcacctcccgaccagcaaaccacagaggaatgctgggcgagagacccacaaacagtgtctcaggaagaccgcgacgatggacaggaccaacaggactatcaggaccgtccaccgaggcctctgattgacatggatgatctcatcagatggtctttatacagacccataataactctgttgataaccactctactatttctgtatgtcactgacggtactgacattggtcacaagacacaacaagatgcatgagacggagcagtcctcatgggaattgcatgaac

SEQ ID NO: 55944 - DNA, 490 bp, Gossypium hirsutum
  Clone ID: uC-gsflnu33B115g06b1
tttattataaaaaaaaaaaaaaaaaaaaaaaaaaaaaataaaaaaaaaaaaaaaaaaaaaaataaaataaaaataaaaaaaaagaaagagaaaataaaaatgcctaactgggggggccgttttgggggacccaggtttccttcctgtgtgggtcgcggtgttttgcttcttttttggggccacctaattctgatgagttggcggtgtttttacaccgctcagattgggaaacccggggggttccccaatttaatgggtttggggaaaatccccgtttccccacttgggattcatgtgacaaggccctccctgttggattttccaaaagtttccccagcttgattggcatttgtgccccgccctgtggcggggctttaaccccggagggtggtgctttttcccgcactgtaaccgtttctttgggggcgttctttccccccttactttgggttttttcttttttttttagccagttgggctggttttcccc

SEQ ID NO: 55945 - DNA, 353 bp, Gossypium hirsutum
  Clone ID: uC-gsflnu33B115h10b1
tttagactaaaggagatcgaaggaaaaaagccggggctttacgtgaaatgcaggccaaagtcaacgaaaggagctgggcgctgtccaaggtttatctcctttcttttttaggtcttctttgctggggtatccaatctgagttccgcgggatatctacgaacaatcttttttattgattcccctaatataatgacactgaccgcatttttactacttttgaaatgtaaaatccactgctttaccaataatattaatattgatttacaaaccatttattcgcgctgtgtgttatgaatagaaaggccctaaaaaactgacttgcccaacatttggccatcttatatggcaatgtg

SEQ ID NO: 55946 - DNA, 262 bp, Gossypium hirsutum
  Clone ID: uC-gsflnu33B126d03b1
tttgttttgataacatatgatcaattactcattgtaaaggttcaagataaatgggtgtacagagatgggaaagcaacatcaggcagtggtctttattcgtgagatgaataaagaggctgggatctatgtttccctttaaagctctattcaagctgctgaaaacactatcggcgtttgatacatgctgaaaagatttgagagcaaccaaacgaacctgcattgctggggctacaatggggatggcgggatccctgactgtaag

SEQ ID NO: 55947 - DNA, 341 bp, Gossypium hirsutum
  Clone ID: uC-gsflnu33B126h02b1
tacatacttacagggttagtgtcaaaggggcggaaggaagcccatttgtggggatcggtcgagtggttatgctggccatgatgacgggtggaatcaatctttcagctattgctacggacagacgcctgaagtatttgaaaatgctagacaaagcaatgcaaggactagacagtgcaaagcaactgggaaaagcatgactcatgagacaaggagaagaacccatagttgccctaaggctaggaccaataggggcttcgtgctaaaattatgcaccagattttgcacatacctccacattgcttctaagtaaggggctacaaggacaaactaaatacaggagg

SEQ ID NO: 55948 - DNA, 318 bp, Gossypium hirsutum
  Clone ID: uC-gsflnu33B126h03b1
ttcattctacctatgggagtgtgtccacgctgagagggaaccgaaaattggggtgccgaagtggggaacggatattgctgaataccaatgaagccaattttacggggatcgttgaggacagcctccacagatatgtctatcactgagtgccgctaagccagcggctgttgatggaaagactcctattcaaggctaccatcaattctcaaagagcggaaagatcacatgctcatgtaccatggttaacagcatcatcggcataacagagcggctcagaccagatactgagctccagattgcctcacacatcaaggctga

SEQ ID NO: 55949 - DNA, 374 bp, Gossypium hirsutum
  unsure (1)..(374): unsure at all n locations
  Clone ID: uC-gsflnu33B127b10b1
ncttataaattaaaaaaccctaactcatagatggcgttcttgtaaccgtacaatcatggctggcttcattagaaactatgacgctgactgggctagaagccctgccagccttgacaccgctggaaaggttgaacttgacactgatggatccacggctactattcacaccactcaataaaggcattgatgaagataatgctgaacatagaaggcttgcaaagagcaagcttgtttacagacttccaggagcatatatgaacctccatggtgtaagacacgatgacgagaccttgtaatacaaaactggttcgatccaacgctgacctgatggggacaaggaaggtaaaatcacccttgacatcaaggttgacaag

SEQ ID NO: 55950 - DNA, 150 bp, Gossypium hirsutum
  Clone ID: uC-gsflnu33B127h02b1
cctgcaccgacccggactgaacttctgggcccacccactttttcttatcataacgaccacgcgttacgtaaaggatctaagaatatgaatggaagcatggttgctgtcacaggcaattccttgtgcttgaaatgagagtggcccccgctt

SEQ ID NO: 55951 - DNA, 437 bp, Gossypium hirsutum
  Clone ID: uC-gsflnu33B128d08b1
aaaaaaaaaaaaaaaaaaataaaaaaaaagaaaaaaaaaaaaaaaaaaaaaaaaaaaaaaaaaaaaaaaaaaaaaaaaaaaaatatcaaaaaaaaaaaaaaaaaaaaaaaaaaaaaaaaaaaaaaaaggggggggcctttttaggggacccaggtttacgcccgcgggtttgcaacttaaaactttttttttggggcccctaaaattaaattcatgggccgtgttttaaaaacgctgggttgggaaaaacctgggggtacccaaattaaatcgcttggaaaaaaatccccttttcgccaggggggaaaaaaagaaaagggcccgccccaatggcctttccaaacagttgccccccttaaagggcaaaggggacccccctttaaggggcccataaaggggggggggtgggggggtatccccccagggggcccgttaca

SEQ ID NO: 55952 - DNA, 406 bp, Gossypium hirsutum
  Clone ID: uC-gsflnu33B128f06b1
tttactcgccctgggactgggaaagcagatatttgacgacaagaattcgcttggcgaaacactgaagaacaaacaaaatgcttagctagcctaaatgggagaccaaaagagtgctatgaacgatgttataacagaatatggtgtggctgttgaagggttctgcatgagccgctgtgggactcagggttctggctagagctccaccgatagggtggtcaaggccatgaagcactccaggttcggttacatttgggtgggtcactcccaaacccagggcctaggacaatgtgcctggacgacccaccagccaatctacagaccacatagtgcgcctacgattgcaccaaacaacaacggggggctagatggcatgtacatcaacttggttagcctctctgtcgggacc

SEQ ID NO: 55953 - DNA, 411 bp, Gossypium hirsutum
  Clone ID: uC-gsflnu33B128g11b1
aaaaaaaaaaaaaaaaaaaaaaaaaaaaaataaataaaaaaaaaaaaaaaaaaaaaaaacccaaaaaaaaaaaaaaaaaaggtcttctctctttataggttctcagcttggggggtcggttttgcgggtccctggtttctttttggtgccttgcaagttcatttctttgttttggggtcccctaatgtcattcctggggccctctttttgtaccccagttttggggaattcctggcggtcccccttttaactgttgttggaatagttccccttttcgcagggtgggtcttttccaacagggccccaccctatctcttttttgaaaagttccctttcttgattgattaagggcccccgctttggtggtttccttcatccggcccggttgatttgtttactccctagggcccg

SEQ ID NO: 55954 - DNA, 263 bp, Gossypium hirsutum
  unsure (1)..(263): unsure at all n locations
  Clone ID: uC-gsflnu33B128h06b1
tttttatgcgatcgaggacgctcggacttgtcctgaacagtgcacaggatatgcaaacacagcatgaagcttacctcgcatccttnncctccccatctattgtctatgaacagattggcgcgatatataactgttccacgattgttgaggagcttgctatacatcggtgtcagacatactttaacaactggttccttcgagagaatggactaagaaggtgatgcctaaactgcatataccatggcatggatatatggaaagat

SEQ ID NO: 55955 - DNA, 234 bp, Gossypium hirsutum
  Clone ID: uC-gsflnu33B129c08b1
tcgtgaagccctagcaacaaccttaaaaataacgacattttctgtaatataactggcacgatgcacaactggatgggctttccaagtcaagactctgcttaaaaggctccttatcttgcttgtatcacttcttactatatgagatagagatttcacgtgtatgattgtgttgtctctattacccttaaacgacatcctcctgtcagttgggtttactctataaaataaactaca

SEQ ID NO: 55956 - DNA, 374 bp, Gossypium hirsutum
  Clone ID: uC-gsflnu33B129d08b1
tcgtttagacttaataagatccttggttatgatgatgttttatgggatgtaacgagcacggttcacaacttgatggcctatacgagcgaggacttgttctacaaagcttgagactgtgattgtattactgcttactatatgctctagtgatatcacgtgtaacactgcgttgattctctaacgttaatggggtgcttactgcaagttctgtaaagtcatcgaattgaagtacaccggagtggcgttatgataattttatgatgctagttgttatgcctatcaatacatctgtgaagataaagttgcatgtggatctcaaggattgagccactatcgaaacttgggtagttctcaccatataaatttgtgctttt

SEQ ID NO: 55957 - DNA, 310 bp, Gossypium hirsutum
  Clone ID: uC-gsflnu33B129f08b1
tcgtgaagacttaatgacatccttggttataacggtgttttcttggatgtaaggagcacggtgcacaacttgatggcctacacaaacgaatacatgttctacaaagcttcacacagtgcttgaatcgatgctgactatatgcactagtgattccacgtttaacactgagtgaatacttgagggtatacgagttcatcactgtaactattataaagtcactgaattgaaatacactgaagaggctttatgaaaatcatgcgaaaatgaatgtaaatcctgacaatacacgtgccaagagaaacttgcatgt

SEQ ID NO: 55958 - DNA, 442 bp, Gossypium hirsutum
  Clone ID: uC-gsflnu33B130a09b1
tcgtataaaaaaaaaaaaaaaaaaaaaaaaaagggggaaaaaaaaaaaaaaaaaaaaaaaaaaaaaaaaaaaaaaaaaaaaaaaaaaaaaaaaaaaaaaaaaaaaaaaaaaaaaaaaaaaaaaaaaaaaaaaaaaaaaaaaaaaaaggggggggggctttttaggggtccaagttttcctacccggggagggaagaaataatcttttttttttttgccccaaaattcaattcaggggggggggtttaaaaaccgggggggggggaaaaccctggtcttccccaaattaaaggggttggcaaacaacccccttttcgggggggggtaaatataaaaaggggccaaaccgaaggcctttccaaaaatttggcaaacctgaaaggaaatggggtcccccctctttactaccataaaggggggggggggtgggggttacccccaat

SEQ ID NO: 55959 - DNA, 309 bp, Gossypium hirsutum
  unsure (1)..(309): unsure at all n locations
  Clone ID: uC-gsflnu33B130f02b1
tcataccttccngaccagacaggcgcacatgctatcattccagggaccattacaggggagaacgaggaaggccgtaattgggggaaaatatggtacctaatatggttccattttgaggaaccaaattaagaagacggatgtgaattaacacaacaagtacttctcacagttctctttaaagcatacatttgaacataaaggctttattaatctcctcctgcactcatatcattaaagttaaagctgttggagcttatactctgaacactgccaccgctatgacctttgaggattactattaggaggttg

SEQ ID NO: 55960 - DNA, 433 bp, Gossypium hirsutum
  Clone ID: uC-gsflnu33B130g01b1
tttattaaccaaaacataaaccaattatcaggatttcaagagctatgggttcaaatgccaaggttgtgcgtcgacatgagcgggcggaggccaaaccgggcggccggatcgttatggagcttttcccatacgccactcctagtactgcctataacttccggtcactctgtaccggtgagaaaaggcaacttacgatccggataaccactccactacaaaaccatctaacctccaccgcttgaaccctgatttcatgtgccaaggacagaaagcttcacagtaccaccaccgacaccggaggtgaatccgatatacggatctaagctcgccgacgagagctttcatgaagaagcacagcggaccccgtatactaaccatggcgaacgccggtcccggaacgaaagggtctcagacatgtatttcgtacccgcta

SEQ ID NO: 55961 - DNA, 336 bp, Gossypium hirsutum
  Clone ID: uC-gsflnu33B130h02b1
ttttatataccagctttcttagtcttccttcaccattcccctgttgtgtaaaaatgggggtaaatgtcctttttacccttatagttttatcattccttgtttgattcttatttaacctaattctcattcaaccattaaaatataagaaaaaaacattacaatgtccgattcgcttcaccataaccaacaacgtaaaccaacactatcttcttcttcctcttcttttttctttaaattattttccgatcccatcaaaattttcttccgatacaaacacgtttttatcccagtcctccttttcttgacccttcccctctctttccttcttttttccct

SEQ ID NO: 55962 - DNA, 184 bp, Gossypium hirsutum
  Clone ID: uC-gsflnu33B131b06b1
tcctttcgtccgtctaaacgcctttagagtacgggcgtactagggtcgcgggccaataattcaaccgacgggatgcacggcgccggccaccatagaagaatatccaagatcctaagataacatgttctaaaagaaacgaggtaggtggacagtatcttgttagcgagccaagggagccgaccct

SEQ ID NO: 55963 - DNA, 312 bp, Gossypium hirsutum
  Clone ID: uC-gsflnu33B131c05b1
tcttttctgaaatatcccattgagcatggtattgccagcatctgggatgatacggaaaagatctggcatcatacattctacaatgaactccgcgttgcttcccaggagcacccaatgcttctcacaaatacacctttcaaccccaaggccaacacacaaaagaggacctaaatcatggttgagaccttcaatgtgcctgccatgtatgctgccatccaagctgctctctctctgcatgccagcggtcggaccacaggccttgtgctggatctctggcgatggtgtaactcacactgtgcccatccctgaagg

SEQ ID NO: 55964 - DNA, 112 bp, Gossypium hirsutum
  Clone ID: uC-gsflnu33B131c06b1
ttcttttcatccgtataaacgaatttaaaatacagctgaaattcgatcccggtcccattggtcaaccaacaattggcatttcgccgggcacgatagatcaaggcattacatc

SEQ ID NO: 55965 - DNA, 178 bp, Gossypium hirsutum
  Clone ID: uC-gsflnu33B131c08b1
ttcacgcgtccgcgtaaacgtcttgagaggacagctataatagtttctcggtccgatagctcaaacaacggattgaaatgtacagggcgggttagaggacaacactacatcgtcacctaacatcttctcagagaggctgccgattgctacaggacctgattcccgagatgatgaagat

SEQ ID NO: 55966 - DNA, 313 bp, Gossypium hirsutum
  Clone ID: uC-gsflnu33B131d05b1
ttcctttcgtccgcggacacgtgttttcaagtgggtattcattggaggtgctggccataccccaatcctcagacataaagtgtcaaaatcatttaaaggatttttcgaattacacagatataattgacatatactgagtggggggttccttaatattttttaacggctgtgaggtttgtgaagcactttgcaccaacctgtttgaggaatggcttctatgctggtcgccaggattataatgccacaagctggggctcgtggttctacgcatcatgggatgagctgcaggcagtctacttttgcaacatggtca

SEQ ID NO: 55967 - DNA, 257 bp, Gossypium hirsutum
  Clone ID: uC-gsflnu33B131d09b1
tccacgcgtccgaggaaccgtcttgagagtacagggtacattgattatcggcactatagatcaaataacagaatggaggtgacatggcagggaagatgataatgctagatcgtcagctaacatgttctcaaagaggctgcctattggtacaggacctcattcccaagatgataaagattacagctgaacctcctccatggcccatgaatgagcctattgtggggacctgatggactatccaccgagctggaaacgct

SEQ ID NO: 55968 - DNA, 234 bp, Gossypium hirsutum
  Clone ID: uC-gsflnu33B131f05b1
ttcctttcgtccgcctaaccgtctttaaagaacgggggagctagcttgtcggccctatagctcaaaggacggaatcaaggtgggaaggcacggtagatcttatcacttcatccacaaataacattttctaagagacaccacggagatctaaaggacatggagctcgagctaacattgcctaccctcaagctgagatcgggcacaaaattgacgcatccaagttgcctcaaccat

SEQ ID NO: 55969 - DNA, 201 bp, Gossypium hirsutum
  unsure (1)..(201): unsure at all n locations
  Clone ID: uC-gsflnu33B131f06b1
tttctttcgtccggcaacccgacggtagaggcgggggctacttgaatttcggatccttctcacaaccaacgtacgcaaagggtcctgcccccggagaggcatacaggggatcctcatctcccttttcacaagcttaaccaaacngatataaaggtggtagtgagcgagccgatgaccagaacagaagtcttgttgacgccc

SEQ ID NO: 55970 - DNA, 355 bp, Gossypium hirsutum
  Clone ID: uC-gsflnu33B132a10b1
ttgtccacgcgtccgccctctcgcccaccgggggggttattaacacgtatcgggggtttttacccctccttcctcacgttaccttacaagctttgaaagggaccttctagacgagtcttcaaagtacccaccctcttgctctacattttagaggggcggacgttttcatttgccggcgacgaattattttgattccagtagaccagccagcggaacccttttgctttgcttttcgcggggtaaccactgaggtgggtttgtcccataattggaaaacatttcagccaacaaaagtttcccgggtggcctttttgattcaagcgggtttcctccggatccgggttttggctccccc

SEQ ID NO: 55971 - DNA, 165 bp, Gossypium hirsutum
  Clone ID: uC-gsflnu33B132b04b1
gcgttcctctggttcttctccatcaccatcttcatcgggttcatcaacttcgtaatcaacttcaattactaactttacagtttgagagcatagtccgatcaggcccatatttcgcggtgtccctgatgtgatctctccaagacgatgatcttttgtgtccaacaa

SEQ ID NO: 55972 - DNA, 213 bp, Gossypium hirsutum
  Clone ID: uC-gsflnu33B132b07b1
tcgtctcacgcgtgcggtctcgtgaacaattaaatggtagttaaggggtgatgttgctacttaaacctcttagagaaggagattgttaaatctgtcaacgtattttaatggggtgacttgtttgagacttcaagaacacttcctagatttatgttatgccctaaaatcgttaattacttatctctttaacatctaacggtctgtacttgatgc

SEQ ID NO: 55973 - DNA, 113 bp, Gossypium hirsutum
  Clone ID: uC-gsflnu33B132d02b1
accttcctgtccaacctacaccaagatcaaacaatggtcaagtgacaaaatgagcgacattaaacacaccactcatggtatatatacggcgggcctttccagaaagcttcata

SEQ ID NO: 55974 - DNA, 197 bp, Gossypium hirsutum
  Clone ID: uC-gsflnu33B132d07b1
tcttccacacgtgcgaccatgagtacaaagtagtcacaggtaaggggtgaggaccaaatatacccctcttactacactcatcggagattcccctcgggggtttacgacgggattatgggctttaccctttaacaccatcccaccggcattcgtgttacccttttaaccctccaccccatagtaattcactaccgata

SEQ ID NO: 55975 - DNA, 200 bp, Gossypium hirsutum
  Clone ID: uC-gsflnu33B132d10b1
tcgtccacgcgtgcggtcaagtgtccatcgcgggggtagttaaaaggatagcaagttataaacacattcaagaaattgcttaaaatcattctataaaggtttttatagtagaagttttctctacagtttcgagcaatctgtcgtcgagctgtttatgtaactaaccaacgtaaacgcttattttcttaactctactttcc

SEQ ID NO: 55976 - DNA, 155 bp, Gossypium hirsutum
  Clone ID: uC-gsflnu33B132f11b1
tcgtccacgcgtgcgacctagcgtccaaagaggcggtggttaaaatgtatttatgttatagacacattccaataatatagaggggccatgtggtaaaggaatatatatgaaatcactaataaaatttttctagtaaactgaagataatcttatta

SEQ ID NO: 55977 - DNA, 154 bp, Gossypium hirsutum
  Clone ID: uC-gsflnu33B132g11b1
tctgttcacacgtgcgggctactgttcaacctcgcggtggtttgaatgtgattatgttagtggcacaagaaaatcatatttataactcatgccagaatgggggttctattccgtctttttatcatgttaaatacaaaacttgatgctatcttgt

SEQ ID NO: 55978 - DNA, 120 bp, Gossypium hirsutum
  Clone ID: uC-gsflnu33B133d11b1
actactcgtccgttatggggcgtcaataatggggggccagtttgacaaaatttacgcgcacaactccagaaaagctgcgcatggtgtctgatccgttctccatgagtagttcaacttcta

SEQ ID NO: 55979 - DNA, 203 bp, Gossypium hirsutum
  Clone ID: uC-gsflnu33B133e04b1
cctactcgtacgtaaaatcgcgccagattatgatggtggggactttaaagagtaacttgaagataataaacaatgaccgcatatagattgatgagagattaacgatatgtaagggattccctaaaaaatatctggggggattattatcaatttgtaagggatagcacgaattggtgccttaaaatgacacaatggtggggacg

SEQ ID NO: 55980 - DNA, 198 bp, Gossypium hirsutum
  Clone ID: uC-gsflnu33B133e07b1
tcctcgcagacgatatatctatccaggcctaggggggctattttgaaaaaaaagattttttcagtcacaacaatgactagggataaaacaaggactacgctcgggcctaaagcgggtgttactcaaagaagaaaacgaaaaaaagctgctcttgctaaagctgcatggattatgcaaccttggcacgaacaaccttgt

SEQ ID NO: 55981 - DNA, 239 bp, Gossypium hirsutum
  Clone ID: uC-gsflnu33B133g10b1
ttctcgcgtacggaaacacgtgccaaaacacggggggagattttaacaaccatgagggttatataacacaacgagaccgcagtagtacagagaagagcataccaatgtcgacacgccacccgaataatgagccggggcgacaaaacttaattgctactggccagaacgatcttgtgaggtcaaacacaccatcgggcaagagctacctgctggccagaatgcactagcgtgggtgcgcg

SEQ ID NO: 55982 - DNA, 334 bp, Gossypium hirsutum
  Clone ID: uC-gsflnu33B133h02b1
cccttgctgtcgcccacgcgtccggcggcgtcaagagggggatctttgtcaaaaccctaacggggaaaaccataacccttgagggcgagtctgctgacaccatcgacaatgtgaaagccatgatccaagacaaggaaggcattcctcccgatcaacaacggcttatatttggcgggaaggagcttgaagacgggcggaccttatccgactacaatatccagaaggaatccactctttaccataggccttcgacttcgaggtggtgcctagaagaggaagaagaagacctacaccaagcccaagaagagcaagcacaagaagaagaaggtcaagc

SEQ ID NO: 55983 - DNA, 327 bp, Gossypium hirsutum
  Clone ID: uC-gsflnu33B133h08b1
tcatgcgtccgctactttcagtgaatacactgttgtccatgttggccaggttggcaaggtcaatcctgaggcttcggttggataaagttgtgttctaagctgcggaatgtccacagggtttggtgccaactgtgaatgtagctaaacccaaaaagggtcaatccggtgcaatatttgggattaggggttgcggtcttggtggtggtgaaggaaccaggagtttttggggtttcaggatcattggtggcgatttggaccctataagatttgaactagccaagaactttggggtgtccgagtttgtgaatcccaaagattacaacaaac

SEQ ID NO: 55984 - DNA, 189 bp, Gossypium hirsutum
  Clone ID: uC-gsflnu33B134c03b1
ccttcttgtccgcccacccatgcggccctctgtgcggaattgaaacttataactgcaagcaatctgccaacttaaatatgccggtcccgtaaggagatatggccaggacatgacgtcgcaacgagcattcttgtgcacgagccgatcatcgacgatttgccgtcatgtcagagctagagcaacggtcat

SEQ ID NO: 55985 - DNA, 198 bp, Gossypium hirsutum
  Clone ID: uC-gsflnu33B134c04b1
cctatttttccgtccacgcatgcggtattctgtgcgggattgaaacctaataccgccagccatctcgcaacttcactatgccggtcgcggaaggagatatggcacggacaagcgccgcaatgatcattcttgtgcacaaagcgaacatcgccgagttggcgcaatggaagagtaagagtaacggtaatcaaggggtat

SEQ ID NO: 55986 - DNA, 240 bp, Gossypium hirsutum
  Clone ID: uC-gsflnu33B134c06b1
cctaatcgtccgtccacgcatgcggtattctgggcggaattgaaacctattatcgccagccatatgccaacttaactattccggtcgcggaatgagatatgactcgaacaagcgcagcaatgatgattcttgtgcacgagccgatcatcgacgagttggcgtcattgcaagagttgagtaacggtaatcaagagggttaggagattgtctcatggatccttgatcaaactgctaacgtga

SEQ ID NO: 55987 - DNA, 185 bp, Gossypium hirsutum
  Clone ID: uC-gsflnu33B134c07b1
ttcctacgcgtccgtccacccatgcggcaccgtgggcggaaattaaacctagtactgcaaaccatctgccaactcaaatatgtcggtcgagtaatgagatatggcacgaacaagcgtcgcaatgaggcagcttgtgcacaaaacgatcaacgccgatttggcgtcatggaagagtctgagcaacg

SEQ ID NO: 55988 - DNA, 195 bp, Gossypium hirsutum
  Clone ID: uC-gsflnu33B134d08b1
cctactcgtccgcccacgcaggcgggactaagggcggaattgaaacgtaaaaccgcaaatgcacaggcaagtaaaaaatgccgggcgaggaagaaggtaagggtagaacatgatgtctgagtgtggattctggagcacgaacccatcaacggcgagttggcgtaatgacagagtcagagcaacgggaattaagcg

SEQ ID NO: 55989 - DNA, 218 bp, Gossypium hirsutum
  Clone ID: uC-gsflnu33B134d09b1
tcctactcgtccgcccacgcatgcgacactggggggcgtatttaaaccaaatggccccaaccctcacccaagcttacttttcaggtcccggaatgagacaagtgcaggtcatgcccccaaacgatgcatcctgagtacaaccaaatcaatgccaatttggcgccatcgcagagctagactaacggacaaccacagcacttgaccgtggccacaaagag

SEQ ID NO: 55990 - DNA, 312 bp, Gossypium hirsutum
  Clone ID: uC-gsflnu33B134d12b1
tgcttttccttccaattatacccaccacaaccatgggttccttacctcaaaccttggtgctcaagagagcacgccgcgaattcaaggctcacaagatctctgaggacgattacatgaaacccattagggaggaaattaagaaggttggtgaccttcacgaaaagcttgtcattgcagtatcggctcatggagagtctgtgtgaaacggtacggctgggtaccatgggggagccgttgcctacacatgcattcactgtatatggatggaagcaaacctacggatctcggtgtgtcaagccaccgaatatatac

SEQ ID NO: 55991 - DNA, 203 bp, Gossypium hirsutum
  Clone ID: uC-gsflnu33B134e01b1
ccttcgctttcgcccacgcatgcggtattgtgggcggaattgaaaggtaaaaccggaaaccatatggcaagttaactatgccgggcgaggaagtagatatgaaaagaacacgcgtcgcaatgatgattctggtgtacgaaccgaactacgccgagttggcgcaattgaagagtaagatcaacggtaatcaaggggtacggaga

SEQ ID NO: 55992 - DNA, 204 bp, Gossypium hirsutum
  Clone ID: uC-gsflnu33B134f02b1
ctaatccttccgccgacccttgcggtcttctgggcggaaatgaaacttataattgcaagcgaattgccaacttaactattccggtcccgtaagtagatatggctcgcacacgcgtcgcaatgagcattcttgtgtacgagtcgatcttcgccgagttgccgtaatggcagagtaagatcaacggtaatccaggggtataggagg

SEQ ID NO: 55993 - DNA, 205 bp, Gossypium hirsutum
  Clone ID: uC-gsflnu33B134f04b1
ctctcgtgtccgtccacatgtgcgtccttctgtgggaaatttaaacttaatattgcaaaccatttcccaacttaaatatgcaggtccagtaaggagatatggcccgaacatgcgtcccaatgagcatgcttgtgcacgaaccgatcaacgacgagttgccgcaattgatgagtaagagcaacggtaatccaggggtatagagatg

SEQ ID NO: 55994 - DNA, 203 bp, Gossypium hirsutum
  Clone ID: uC-gsflnu33B134f06b1
ctaatgcttccgcccacccatgcggcactctgtgcggaaatgaaacgtaaaattgcaaacaatttgccaactcaactatgccggtcgagaaaggagatatggcctggacaggcgtcgaaacgagcatgctggtgcacgaaacgatgaacgccgagttggcgcaatggatgaggaagagtaacggtaatgcaggggaatagaca

SEQ ID NO: 55995 - DNA, 224 bp, Gossypium hirsutum
  Clone ID: uC-gsflnu33B134f09b1
tttgctacgcgtccgatgacgcttacggtactaagtatcaaaataaaaaaaacagttccagacactctgccaggaacacttggcagatcgaatgacggcaaatgataaggatgtgcataacagggatggatatgtggtacaagtatgcgaacaaagatccgatgtacctgcccagtcagatcaggtcagtctgtcttgccagtatgctgacgatggaaggaaag

SEQ ID NO: 55996 - DNA, 294 bp, Gossypium hirsutum
  unsure (1)..(294): unsure at all n locations
  Clone ID: uC-gsflnu33B134g03b1
ccaactcgntcgtctacccttgcggacgtatttccgggaaacgaacgtgcatttgctagtgaaaaccctaatgaactgttcatgtccagttcgtcgcaatgaaccttatgtgtgtcaaggagatggtgctgttgcatgcaaggatctagccgaggaagccgtacttgccgattcagagttacgttaccgacgggaacatgggatttgctgaatgcggctccagaggaagtcgaaaggatgcgaatgagcgaagaattatacgggggactgaacaacagatgcctattacgttct

SEQ ID NO: 55997 - DNA, 208 bp, Gossypium hirsutum
  Clone ID: uC-gsflnu33B134g04b1
gtccgccttgtcttccgcccacccatgcggccccctgtgcggaaaagaaacttaaaactgccagccaatacccaactccactatgcaggtccaggaaggagaaaaggcccgaacaagcgccgcaacgagcatgctggtgcacgaaacgaacaacgccgatttgccgcaattgcagagccagagcaacggtaatccagcggataagaca

SEQ ID NO: 55998 - DNA, 253 bp, Gossypium hirsutum
  Clone ID: uC-gsflnu33B134h09b1
ttttataaaaaaatggatattaatcaaactgatcttcatcaccctcaactataacattgattaaaaaaaaagggaggacgatgggggggctccataatttggtcccgggggccttccccttacaggctccaactttagctgtcactgtaattgcaactcaattgccttttttttggcggacccctaaattcggtaaaccggggggaaacccaactgattcggattggaaaacccttgccttaccccacctttt

SEQ ID NO: 55999 - DNA, 288 bp, Gossypium hirsutum
  Clone ID: uC-gsflnu33B135b11b1
aatgcttttaacatagcccataggcataaaattaatgggatgaacctgatctgaagcttcttcagagggttctttataatactgcaagaggatccgtaagagagcacgaagggcctgctaggagaagatactgactacttatggagcaaggagagcagcgaagatccatgggatgtggcaatatatgagatacatatattcttgggatagtgaggtcaatcttgcagcataaatcaaatgcccatgattaggtgacagtttaggaactgaagagactatataatgcta

SEQ ID NO: 56000 - DNA, 236 bp, Gossypium hirsutum
  Clone ID: uC-gsflnu33B135c10b1
cctacgatatcggaaacgcaagcggaatcgagggccaggccacaatgcaagcacagaacagcgacaaccactcaatcactgctgccgcagaacagtgaaccaaccgacctggcaccccagagaacatggctgccagagctgggacagatactcccatcgaaagtcataagagattacgtcgcccttcattcacaaggagcataggaatacgacccgcatcgaagactacacgaaac

SEQ ID NO: 56001 - DNA, 135 bp, Gossypium hirsutum
  Clone ID: uC-gsflnu33B135d08b1
tcgaatctcgtccggccacgcgtgcggttgcactggtcgttattacagagcaatcgagagctggatcaagggacaaacgtaagcgtgcgaagatgacgggcagaagaggaacagaacgaatagtgctatacctgg

SEQ ID NO: 56002 - DNA, 208 bp, Gossypium hirsutum
  Clone ID: uC-gsflnu33B135d11b1
cctatgtttttggtaaaacgtgcagtttaatttgtgttgcttaaagattagttgatagcggtagataggagtaaaggtataatttggatgaagaaggttatagatggtactagtatgtaatttgttatagcttcgctaggtaggaaaggatcttatatgtaaggtcttgagaggttaattagcttttgatgtatagggtgtttaatga

SEQ ID NO: 56003 - DNA, 145 bp, Gossypium hirsutum
  Clone ID: uC-gsflnu33B135e02b1
cctatgttatcggccacgcgtgcagttgaagttgtcaaacttaaaggtaggttgatagctgctacaatcactttaaccaaaaattggctagagaacgttatgggtgtatctgaatgccaattttcactgcttgcttaaccagaca

SEQ ID NO: 56004 - DNA, 129 bp, Gossypium hirsutum
  Clone ID: uC-gsflnu33B135e03b1
cctacgtgtacggccacgcgtccagtttaatttgtctagcttataggtaagctgatagctgcagctatcactaaaaccaaaaattcgctgaacattgttataggggtaacggcatgtcattttttactg

SEQ ID NO: 56005 - DNA, 286 bp, Gossypium hirsutum
  Clone ID: uC-gsflnu33B135e08b1
tcgcatattcgtacggtcacacgtccactttattttttcaagctgaaaaggcgaccgaggcttgaatttagcgacaaaagcatgctgtcgctgttgacgggttgcggtggaacagcacggaatatgcagcagttgcctttggcaggcatctatctcagtggtcagatcttgacaggatactgatctcctgagggataagcagcttacagctggcggggactcgatgatataagtgaattacggcctgaagtcggcgacttcacgaagctcctggacttagttttct

SEQ ID NO: 56006 - DNA, 106 bp, Gossypium hirsutum
  Clone ID: uC-gsflnu33B135g05b1
cctatttttccgtccacgcgtccagttgacctggcggggcttaatggtaggccgatagcggcagcaagcactacaaggatactttggctgaagatggttatgaggg

SEQ ID NO: 56007 - DNA, 136 bp, Gossypium hirsutum
  Clone ID: uC-gsflnu33B135h06b1
cttatttttccggccacgcgtccagttgatttggtcaagcttattggtaggctgagagctgcacataggactgcatgcatgcattggctgaagattgttacgggggtaatagaatgtaattggtgacggctgcctt

SEQ ID NO: 56008 - DNA, 212 bp, Gossypium hirsutum
  Clone ID: uC-gsflnu33B136a02b1
tcggacgcgtgggcaactttgaagcaatgagtagttgaaatatacagggggcggaaagtcatgctccaagcattggctacgtgggaggtttaggtatgttggaatgcaaagtagcagattcacgcttgtacctctcggacgggcatagcataattatgataggtcttctgccacgctgtcaggtataggatgggctgatataagagctataa

SEQ ID NO: 56009 - DNA, 314 bp, Gossypium hirsutum
  Clone ID: uC-gsflnu33B136b11b1
cggtccgggatttccggggcggcccaagttgtcttctttaggaaagggggagacctcccgggaggttcccattttgcccgcgggggaaaccgaccaccctctttttttaaagggtaaccgaaaaaaaccacaccggccttaatcccacagccacgggatcggtaataacctttctttcccaagctaaggctgatggcactagaggctcatctcttatgacccaggcccaacgaaggggctcctacaacgtctccctatctaacatgggctcaagccgactgatctgagcaaggcgccctggaacggctacacca

SEQ ID NO: 56010 - DNA, 405 bp, Gossypium hirsutum
  Clone ID: uC-gsflnu33B136c09b1
ttggcttcctcaacagcccctcagcctcaatcaccacatcctcctactagaacagtagtttctcaaggatcttctaattgttcctttgcttttcggatgattcaatccaatcatcaggcggaggtttcaatttgtagctacttatgtggtgcataatttgttcatagtcagtccatagaagaaactttgggaagtgttaaatggtctgagttgtaattgatgctatacttaataattacttagatttcacttaagtgtaaagtaaaaagagagaagaggaatatgttgggagtagagatgagaattgagagaatgagtgcaagcaggtagaagccgaaacaatgattgttagcactggagttatgtaattagaagttattgcaaggaataagattctctgtttct

SEQ ID NO: 56011 - DNA, 430 bp, Gossypium hirsutum
  unsure (1)..(430): unsure at all n locations
  Clone ID: uC-gsflnu33B136d10b1
cccggcctccttgggaccggaaaacggcccgcaaaacacccgcaaagaaaacccgcgcggngggccccggcgcaacacggggggcagcccagacaggcgccaaaacacgcaccgacaaccgctaagncggcccaaaaggaggaagaaagcaacgaggggagcaatgcagaggntcatacagacaacactggacaaaggaggggaccagggaagctcccagaaacgggctgctactcccagggcgggaacccagtaaagcacggaatgaaaattgcagcggcaatcaaaacggcattaagaacgggagcatgaacgggggcgaacacgattgacaccaacagagcacctgactgtaccagaacatttgagccatcacactggagagaaaactgccgtgagaaatgccatgtgacccacaacccaacgcaag

SEQ ID NO: 56012 - DNA, 291 bp, Gossypium hirsutum
  Clone ID: uC-gsflnu33B136f06b1
tccctctcacgcgtccgttcctagtgtttttgtgtgtgtggtttaagccctcatagaggaaaaaagacagagagagaatcctctggtaaaaatctcccttagaggagatcacttgtatcattaccatatggattcaatatgaatcactagtttagtttttccagccgaatcagggacccctaaactccatggcgatgaacaaaaaagaatccaaagggattgccttgctatccttggccaccgatgtaatatgacccaagctatcggacacatgcacgaaagggcccacct

SEQ ID NO: 56013 - DNA, 312 bp, Gossypium hirsutum
  Clone ID: uC-gsflnu33B137c12b1
tcccacgcgttcggcaggggatagaggcgagggtgattttattttctgtgtgatcacatctgagaccgctgtgaatacaacaaccgggaagacatacaccagggattgcgatactattaacactgttggtcagcatgcggataataaaagagaggaagtgattgaaccatcgaagataaaggacgaacaccttcaggttcctatcccagtccgaaggagtactaagaataagagggctacagctgttgatgagagccacgatgttaccccaactgataacttcaaagaggacaccttgcaaaatgaaggact

SEQ ID NO: 56014 - DNA, 533 bp, Gossypium hirsutum
  Clone ID: uC-gsflnu33B137d06b1
tggttatttaaacgcaacctgaataggactaactatatattgagatacaaaggatgtgacaacaagaggaaaggggggcgaggtgttaaccaaggagtgcacaatgaaccttcacaagcgccttcatggttgcacatacagaatgacagatccgagggctaccaaggataattaggaagggaggagaaaagccatgaggacaaaggatgtacgagaagctgcaagcgtgacaaagacatttggagacagacggatcccgagacgtcccgagctagactagggcacgccatgagacagacgagagaccatcatggatgagccaaatgcgatcatgacgtctgtagaagcgtttgctcggattccacctgtaggatggaagggactgggcacgatagccaaagatgactacgaggaataatgtcagtgtggctgtgggaacttaagacttgcattttgtactcctacaagcttcatcagagttttgactagttttacaattgtgacattaaaaatacttcgtttggggtatttag

SEQ ID NO: 56015 - DNA, 226 bp, Gossypium hirsutum
  Clone ID: uC-gsflnu33B137h10b1
tggaaaaacctcttcgatactcggtaacaaacctcattgtatcagtgccctttttcctaaagaaatgcaataagaacatacaaaatggggaccatataacccagtttaaactcaatatacagttcacctgggggcgaatttaatgagtatttggttacaacaaggaacattagctctgaattactcaaactgacaattctaaacaatcccaataacccgtactttt

SEQ ID NO: 56016 - DNA, 419 bp, Gossypium hirsutum
  Clone ID: uC-gsflnu33B138a04b1
ctagaacagaccctctaagtctcccttggtgctccttgattatatgatggttccgcctaaaggacgccgcagatgtaccgccccggagcctccgcagagggctcgcatgcgacaccgacgaccgtccccttgaataaagcgccagaacgtccggtgaaatcggcccattgacacaacattgatagacatgcgactggaagatcccaaaagcttccaaaaagacactatccgagactgagaaaagctatgatggacgcgatcgaaggaaagaacggtcaaaatctttgctggaaggaacataactgtcaacgaagacccatcgcgcaaaaatggaagcggtggccgaggaaatgcaggatgaaacagcgggtacagaccctgtgggggcggtcgctgatatagtggtcaccaaggcggat

SEQ ID NO: 56017 - DNA, 294 bp, Gossypium hirsutum
  Clone ID: uC-gsflnu33B138a05b1
cctccgtgctcgatttggaatctgcaaaaagtgagtggagcttttaaatttgggatggggtaggttatctactctcttttttctatgccaattgataccttgtgagggaattaaggcttttcagtcatcattttcgttactgttaatgctgtgtcagtaagaatcctcattgttgaagggacatgttgagaaataattgttttggtctgaaaatccgcttgctttgccagccgcacggcttctttttttcatttatgtctcgccccgaccgatcttcataattggttcgcatat

SEQ ID NO: 56018 - DNA, 284 bp, Gossypium hirsutum
  Clone ID: uC-gsflnu33B138a11b1
ccctcgcgtccgaacaaaaaaaaaaaaaaaaagggaaaaataaaaaaaaaaaaggggaaaggaaaaaacatctaaaagaaccaatatacatccccgctctggggcggcccctctactggttccaggccaccttacccgagcctgcgggcctttatctttcctctagtggaccctaaaacccatggcctgccccccttttttccccgtttagcctggccaaaccctgcctgctcccatattaataaattggcccttcactgacgtttctcccattggttttttca

SEQ ID NO: 56019 - DNA, 414 bp, Gossypium hirsutum
  Clone ID: uC-gsflnu33B138c01b1
tctacttctaaaaaaaaaaacaaaaaaaaaaagggaggagattaaaaaaaaaaaggggtccaaacacccaaaaaaaacaaaacacagaggaagggcaccccggaccaagaggccggccgccaagaccaaaaccagaaccggatggcccgcccacgacagacgggggccgcacctttaagggcccccccccaccccccccgcccccccagctcccacgtctcttcgggcagccccctaaccaccctagacgcggcgcgggagaaccaacactggcgcaccaaaccctgggaacccccccgaacccgtgcggcgacccccccccccccccccccaagtgggacccccgccgaggcccccccccacacaaccccccacaaccaagcgcccacccccgatcgccattgcgaccccccc

SEQ ID NO: 56020 - DNA, 134 bp, Gossypium hirsutum
  Clone ID: uC-gsflnu33B138d05b1
gttacgtgtacgataaagagtgtactcccacggggggtcatgcttgaccgagggatgagtcagagccacccaagcctatcgaaccacccatgttggggccattaggtctacatcatggacgcttacaacctgga

SEQ ID NO: 56021 - DNA, 436 bp, Gossypium hirsutum
  Clone ID: uC-gsflnu33B138f01b1
cccggacttaattgctggacccacccacgcgttcacttgtccgaacaaaaaaaaaaaaaaaaagagaaaaaaaaaaaaaaaaaaagagaaaaaaaaaaaaaaaaaaaaaaaaaaaaaaaaaaaaaaaaacaaaaaattaaaaaaaaaccaaaaaaaaaaaaaaaaaaaaaaaaaaaaaaaaaaaagggggggcccccttaaaagaaccaaacttaactccccggcccatgaaaaacaaaacttttttaatggggcccccaaattaaaatcacgggccccggtttaaaaaccccgggacggggaaaaccccggggaaccccaaattaaaacccttggaaaaaaacccccttttccccagttggtgataaaaaaaaagggcccaaccaaatcccctttcaaaaaattgcccccccctaaatggaaaagggaccccccc

SEQ ID NO: 56022 - DNA, 244 bp, Gossypium hirsutum
  Clone ID: uC-gsflnu33B139a11b1
tcgtagatgcgtccggtgaccctatcgatggggggggatttttataaccaagtggtggatctagctcaaaggctgaagatctgcaagaaagaggccatagactgttaactagttgcacggagataatccttcattgttcgctgttttgagggactatggacattttaggcagggatgggagaggcaatcacacgcaggtggtgcccttacaggttgcgagccgtacacacgctacactgttgga

SEQ ID NO: 56023 - DNA, 286 bp, Gossypium hirsutum
  Clone ID: uC-gsflnu33B139c05b1
ggtacttttaccaaaacaaagcggttgttaagaggggggatagcagaaccccaggatctactggaccatcaggattcagagctgatgcaatgcctgtcgactgcttgggggtcgggggatcaagaccaaggaacctactggagaaacagcatcatcactatcatcatcatgctcatcaaccgcaaccagactgggagcatgtcgcaggaagggggcacgcgagcactgcacggctcgagccatttgcaacaccatgcagtgttcgagaaaccaatgcggaaagctt

SEQ ID NO: 56024 - DNA, 250 bp, Gossypium hirsutum
  Clone ID: uC-gsflnu33B139c07b1
tgattcgcgtccggagaacccagggcaggggggggattggaacacacaaggggtggaaccagcccaaggggagaagatcggcagcaagaaggacaaaaaaagagcagggaggacacggaaaataagggtacatggttcgcagagtaaaggaacgatggactgctccggcgcggaagcgagaggcaaccacacgcgggagaaggcactcctgggcgggagacaaacatacgcaacgagaagggaaacaacg

SEQ ID NO: 56025 - DNA, 251 bp, Gossypium hirsutum
  Clone ID: uC-gsflnu33B139c09b1
tagacgcgtccggaaaagcgaaggaaggggggggctttgaagaaaaaaaaggtgtaatcaacccaaaaggagaaaaacggcaggaagaaggacagaaaaagagaaggcgagagagggccaataatgcaacaaaaaacgcaacgcaaaggaggagaggaactcaccgaagcagaagcgagggccaagcaaaagcaagaggaggcacccctgcgaggaagacaaacataggcaaggaaaagggacgcaaccaa

SEQ ID NO: 56026 - DNA, 260 bp, Gossypium hirsutum
  Clone ID: uC-gsflnu33B139c10b1
tgcttacgcgtccggagaacctaaggttaggggggggtttgaataaacaagtggtggattcaacccaaaggggccatatcggaagcaataaggacatatacagagcaggctgtacacggagaatattggtacattattcgcagttttgaggagcattgcacttctcgcgacgagaagctggaggcaagcataagcacgaggtgtcattcctgcgtttgtgctaaacataggcaacgctaagggacgctacgattgtattt

SEQ ID NO: 56027 - DNA, 280 bp, Gossypium hirsutum
  Clone ID: uC-gsflnu33B139d06b1
gatatttgtccggagaacctaaggttggagaaggacgggtatttttaaccggcggaacgagcccaaaaggagaatatcgacaacaagaaggacatatacagagcaagttggacatggagcatattggtaaattgttcgcagagtaaaggaacgatgcacttctccggcgctgatgcgaggaccaaccacacgcgggagatgtcactgctgggtgtgagatgaacataggctatggtaagggaagctacgattctgatggctgaggccatagaaagggaag

SEQ ID NO: 56028 - DNA, 263 bp, Gossypium hirsutum
  Clone ID: uC-gsflnu33B139d08b1
tgttacgcgcccggaaaaccaaacgcaagggggggatttaaataaacaagggggggaaccaacccacaggggcaaaaccgacagcaagaaggaccaaaaaagagaaaccaggacaacggaaaataaacctacattgtacccaaaacacaggaacgatggacaatcaccgcaagggaaccgagagccaaccacaagcaggagaaagcactacagggcgggacacaaacacacgcaacggaaagggaaacaacaactctaagggc

SEQ ID NO: 56029 - DNA, 244 bp, Gossypium hirsutum
  Clone ID: uC-gsflnu33B139e05b1
gctatgtttccggtgaaacttgggttagaggggggggggtttttataactggggggttgagcccaaggggatcatatcgccaacaggaaggacatatacagagcggggggggtatggaccatattcttgcattgtacgcacagtaaaggcggaattaacttctccgacgcggatgcgagaaggaaccagacgcgggggatgtcactccttggtgggacatgaactttggctatgggacggggag

SEQ ID NO: 56030 - DNA, 255 bp, Gossypium hirsutum
  Clone ID: uC-gsflnu33B139e06b1
gctcttttccggagaaacttaggttggtgggggtcgggtttttttaattggtggatcgtttccacaggtggaatatcggcgacaggaaggtcatatacagagctggttgtacatggagaataatgttgaattgttcgctcattaaaggaagattgaacttcttcggagcggatgcgagaaggaacgatacgagggtggtgtcactccttcgttggacaagaatttgcactatggaaagggacgctacgattctgt

SEQ ID NO: 56031 - DNA, 125 bp, Gossypium hirsutum
  Clone ID: uC-gsflnu33B139f04b1
gatcttttccggtgaaactttacttaccatggggcgtttttttataaatgggatctttttctcaaaggtatcacatctccaattttccagacatagacacttcgggtgatgtatgcaccatatgc

SEQ ID NO: 56032 - DNA, 211 bp, Gossypium hirsutum
  Clone ID: uC-gsflnu33B139f06b1
gagatgcttccggtgaaacaaaggttggatgtgggggggtttttttaaatgggctgaggttttcaaaagaagcatatttccagacaggcgggtcatatatagagagggttggatatggacatagtggttgaattaaatggacaccggagggggatagaagattctgcacagcttatttggtatcgtaaatctaatggggtggtataagctc

SEQ ID NO: 56033 - DNA, 215 bp, Gossypium hirsutum
  Clone ID: uC-gsflnu33B139f07b1
tcggatattcgtccggagaaccccacgctggggggggtttaatttatataagtggtggtttcaacccacaggagccatatctcctacaggaaggacctatacagagctgtgttgggtacggacaataatgttcaattaattgcacagcaaaggaggaattgacttctccagaagcaaatgcgagaaccaaaaatacaagggagaaatcacttcta

SEQ ID NO: 56034 - DNA, 243 bp, Gossypium hirsutum
  Clone ID: uC-gsflnu33B139f09b1
tggtttttcgtccgttaaaccaatcgctggggggggttttttttacctaggtggtttattcaacccaaaaggataatatcgccaacagtagtgtcatataaagagctggcgggtcttgaacaatattgttacattattcccactttagaggaggattagacctctccgataaatattgcgagaaccaaccaaactcctgatctacaagttctacgtttcaggaattcatgcccaagtgtaagg

SEQ ID NO: 56035 - DNA, 199 bp, Gossypium hirsutum
  Clone ID: uC-gsflnu33B139f10b1
ttattacgcgtccggagaacccaaggttggagggggcttttaagaaataattggttgaatcaacccaaaaggagaatatcggctgcaataaggacatataaagagaggtcgggacacggacaataatgcaacattgttcgcaacgtaaaggagcattggaattctccgaagccgatgcgggaaccaaccaaacgcacga

SEQ ID NO: 56036 - DNA, 200 bp, Gossypium hirsutum
  Clone ID: uC-gsflnu33B139f11b1
ttactacgcgtacggaaaagacaaggaaggacgggggtttaaataactaaatggcgggtttcacccaaaaggagaatatcggaaggaataacgacgacaaaagagcgggcaggacatggaccatattgcaacaacattcccatagtaaaggagcataggacatcacccagagacgagtcgagaaccaaccaaaagcacga

SEQ ID NO: 56037 - DNA, 413 bp, Gossypium hirsutum
  Clone ID: uC-gsflnu33B139g03b1
cttatcttttccgagcaatcaatagtcaatgtcgctgtatcaactataataacgatgctgattgcacatatatcactcctattccagataacaagatgacggctggggatgctcatgaacaagaaatactactaatattggatgttgcgcaagggaacacggtacatctcatctgcagaaaaggtgtctccatcttgtgaaccaaggacacttgcgacgcggaaattcatttaggggacgccaacgacccatcgcacaaggtattcatcttaatggccgtgaggcaggtgaggaaagctgcagccatcctgagggtcagaatgatggattgctattcgatggatcgaggggctctccgctgaaaacctagaactgacagctgcatcagaccgatatcaaaacttcgtacacgg

SEQ ID NO: 56038 - DNA, 244 bp, Gossypium hirsutum
  Clone ID: uC-gsflnu33B139g09b1
ttgctacgcgtccggagaaccgatggttggggggggttttaatgatctaaatggtggattcaatccaaagggaggatatctcaagcaatagtgacgtataaagagcgggcagggtatggacaatatgcgtgcattaatcccatatgagaggaggataagacatcaccgacacagatgcggaaacgaaaaatacgtaagaggaataagttctacgattctggtaaagttagccataggaaagggg

SEQ ID NO: 56039 - DNA, 382 bp, Gossypium hirsutum
  Clone ID: uC-gsflnu33B139h10b1
tccactcgtccggacaacatccatatatagggggctttaaatatctaagtgggggcttccatcctaacgtacgatatctcaagcaataggcacggggagagagacgacatgaaatggacaatattgcttccacatttccataacaaagaagaattagaattcactgatgcactaggcaggaggcagcacatagcacgatatgtaaattgtgcgattctggtaaatttgagcaaggataagcgacaatatggtgagagttttctagtgccttgagtagaaaatgggagcgccactctaagtatactgcgagggctatccctaactgggaacttactaatgccatataaaatagcctgcacaaagacaggatgagcgtattcta

SEQ ID NO: 56040 - DNA, 271 bp, Gossypium hirsutum
  Clone ID: uC-gsflnu33B140c04b1
tgccacgtttccggaaacccagacttacagggacgctttcaatttccagggggttgcagtcactaaaacagcatgtgagggagcaactctttggctaatacacacggaaactgatgtagaaggcgggtaaatcttacttttactgacacgaactgtcgattagaccctatgatatagccattagcattggggaaggacgaatcttgtgagtgcaacgaggcctttctagggagccaccattcgtggggtgtttagagaaatgaagtgttta

SEQ ID NO: 56041 - DNA, 285 bp, Gossypium hirsutum
  Clone ID: uC-gsflnu33B140e02b1
tgccacgtttacgaaagccaagaccgacagggacggggtcaatatgaagggcaaaacggtccaccaaagggaagcatctggatatactcctgggacaaaacacaggcaagatcacgacgacagcgggaacaaaacacaggtgcagagactgacaaacgtataggacgaaaataaaacggacagccctgcggaaggagacacccgcgagggacagggaaggcacaccgcggacacaacaaggtgtgggtgcaaaaagaaccgcccggataacagcgccaaacacaa

SEQ ID NO: 56042 - DNA, 297 bp, Gossypium hirsutum
  Clone ID: uC-gsflnu33B140g04b1
ttccacgtttacgggctgctacagttattctggatggttcatcaaaaatatgacacctgttctgagaaaaagtgaaaatcagttatactctcatctatcatatatcatttgtgaactccttggagggcactttctcattgtttgagtttgtgtttactgcaggccaggaggtggacggggagaactcctgctccaggaatatatttgggtttgagaactaattgtgctgaccatcgatctagaaggaactcaactaatcgatctgcaagcatattcttcatattcaagaagctagag

SEQ ID NO: 56043 - DNA, 397 bp, Gossypium hirsutum
  Clone ID: uC-gsflnu33B141c08b1
taaaaaaaaaaaaagaaaaacaaaaaaaggggaaaaatagaaaaaaaaaaacggaaagaaaccaaaaaacaaaaaagagaccgaaacaagaggagaaccgggggggggggcggaaagaaccgacgccggggaacgtgcgccagcgccggcagaggagaacccaggggaggccacagccaatcccaggggcggcaaagcacagaaagggaagggggcgaaagccaggaaggccgcagctcgtaggaagccacgagcaactcctgatcatgctgggtacaaagagaaggagaacgaggcaagacggtacttcgaaggagaagacgggaacaagtgaggatggggtcacccacttgcaaaggggagaaacaggaggggcgtcgtggggaattccaagaag

SEQ ID NO: 56044 - DNA, 174 bp, Gossypium hirsutum
  unsure (1)..(174): unsure at all n locations
  Clone ID: uC-gsflnu33B141d06b1
ngtcacgcgtccggaaaaggggaaggatcggggggagtttttgaacgtcgccgggttttctccctcctatctgataggactcatgaacattgcagagaagaacctgggtgcgagctccatgtacaagattcaagaggacggaagctaagcaaagaaagactacgagctcgggga

SEQ ID NO: 56045 - DNA, 298 bp, Gossypium hirsutum
  Clone ID: uC-gsflnu33B141g09b1
ttcacgcgtccgggagaagtgatatatgtgagtatagttttaatgatgaagagttcaaacaactataagggctattattattctctgggaatgagcagattgatgctgtgttaaggagcgaggatgaaacatacctctggttctgattcgcaaacatgtccatatgttctttcaacggagcggaaacaagtatagagtgcgatccagaccgatacgcgaatggtggactatctgctccggttcaatatccacgaacgatttgtgaatggtttgcttgcctcagctcctggcggacgga

SEQ ID NO: 56046 - DNA, 234 bp, Gossypium hirsutum
  Clone ID: uC-gsflnu33B141h06b1
ttctcagcttcaccgaccggccattgaatgggttccattactttcaaagactgacagtagttactgggtagaggtagcggaatttgctagcgtatgtagaagacagcccgatatgcttggcagaacattacgcaagtcttttctgagaggacactctatactgaggagattaaacgagctgtggttccaaggatcaagacggtgcagggaccccagcccagctctaatatatgg

SEQ ID NO: 56047 - DNA, 273 bp, Gossypium hirsutum
  Clone ID: uC-gsflnu33B142c06b1
ataaccgctcggacgagattataaaagggggggcgattttcaaaaaagagagcttaagaggccaaaaaacggaagaagaaaggccggggcatactgaccgaccaggaagagcatcatgaacgcgactgaagcaggaacgattgatggggaaccccgaaaaaatgaatcagcaccgggtatagcgcaacgagagacaggtacagaccggtttagggaagaaaagaaactcggagaagaggccgatgtggcccacggacgggaccggcaagaggc

SEQ ID NO: 56048 - DNA, 315 bp, Gossypium hirsutum
  unsure (1)..(315): unsure at all n locations
  Clone ID: uC-gsflnu33B142e03b1
tcngtcacgcgtccgctttccaagacaaagcttggtattattttttttagttccgactaaagaaaacgaaaaaaaaagaagaagaaatacaatcgttttctttttgaagtcgggttttagtttttggggtgaaaaaaatgttgggagtatttagcagtgcgatagtgtattcgtcggactgagctggttgcggacggttgccttattccatcacctaagatatctttggtctctcttgagaaacggtttcttgtgacgaattctttttgtgcgttcatgctcatttgtgatcttgttcattttttataatttttc

SEQ ID NO: 56049 - DNA, 181 bp, Gossypium hirsutum
  Clone ID: uC-gsflnu33B142e09b1
taccacgcgtccgcccacgcgtccggccgggtgttgtttattgatttttctttttttctgacctttatcctttgattaatgagaggtgatgatgatttggcattctttttccaccagaatgaattttgctttagaaatagtaatactttgtgagtgtctgcgttcattttaatgtattaaa

SEQ ID NO: 56050 - DNA, 132 bp, Gossypium hirsutum
  Clone ID: uC-gsflnu33B143a05b1
ttaattcaagtactttgtgttgctttatttacgcgaggtttatttcaaaaataaagggagtaaaaccaacaagaaacattaaactaagcaattatgtactagcatttaggtgttgcatagaaatttaaaacg

SEQ ID NO: 56051 - DNA, 385 bp, Gossypium hirsutum
  Clone ID: uC-gsflnu33B144f02b1
actacgtttacatcctgagcggacgccctctttgggccgcagtcaataccgctacttgtcgctgagatttcgcatgaaagatctcagacctcaaagcggagcgctcttttatatcacagacatggctttgatcttgcatgctggcacaacaaacataaatgcctttaacgcactcattgctgcagaacataccggcgtgcacgacaagatggatgtgaataatgagatgggggggtgaaacacgactcctgagtgcatcaagacgaaccctacggggaaggatcctgtggcgggaacaccggaggcaccggcagttgagagcaatggcagtgctgcgattgaggctctgttaaaggctaacaaccctatatgcggggctacattg

SEQ ID NO: 56052 - DNA, 347 bp, Gossypium hirsutum
  unsure (1)..(347): unsure at all n locations
  Clone ID: uC-gsflnu33B144h09b1
tctctatagtgttaaaaaagaaagattgaaacttaataatagcccttaaatgtgtgcttataggtatcttgacactaaggcaataataattattatatttttgacgatncacaatagctntcctatggccaaatgataaaaaaaaaataaatgaaaaataaccaaagccaggctataatatataacacacccaagaaaaccaaccagaaaaatgcgcatacaaaagccttttatatactctaacctaaataaaatcaaatgccctaactaataaaacctcgacgacaataaaaacgacaccgtcacacaacaaaaacttcatacaaaacataacaatgtcgccactt

SEQ ID NO: 56053 - DNA, 395 bp, Gossypium hirsutum
  Clone ID: uC-gsflnu33B145b11b1
tttcgttttcactttcttataagcaaaccacaaaggaaagcttggagagagaccccaaaacaatgtctaaggaagtgagtgaataatgacagggacctaaggactatgtgcacccttcaccggaacctctgattgttctggttgaactgaagttatggtctttttacagagacctcatagctgagttcatagtgcactctcctactgctctatgtgactgtcggtaccggaattggacacaagacacagcaaaatgcatgtgatgggataggtctattgggatttgcaatgggctttcggtggcatgagatctattcttgaatactgcactgacggtatctaaggtggacacattcacactgcgctgacaattgagtcgtatttggcccagaaag

SEQ ID NO: 56054 - DNA, 375 bp, Gossypium hirsutum
  Clone ID: uC-gsflnu33B145f12b1
ttcgcgcgtgcgctgatgctctggaggaatgaaggttactaacgcgtgcaggcactgtcatggttaatgtggagagagactgaagcatggtatactgattgcggtgcatcagcagtgggactggctaaataggggtggctgctagcatacatgtcatgtgggggatacggatgtcgtcaggtggcgacactactaagagggccggacagatcggagttactaacagacgcgcagtcagaatggtgggagggacacgacatgtggcgtgctataaagcggggtgttgcagatggttaatcgcatggtgacatgaacactggccagctctgatatgcgcggtagcattaggttattaccatgcaatttaggcacaat

SEQ ID NO: 56055 - DNA, 148 bp, Gossypium hirsutum
  Clone ID: uC-gsflnu33B145h02b1
ccattatagtgaaagccgataccccggcaggaacacggacccgaatacccgggacgtcccaccctttctagatatagaccaacaaagctacaagaaagggaggggcaactttaaaagccccacccggaaaaaaaacaaaccttccctg

SEQ ID NO: 56056 - DNA, 153 bp, Gossypium hirsutum
  Clone ID: uC-gsflnu33B145h03b1
gaagaagaaaggggggggttgattataagccgggatgaggacagatacaaagcaagccggggggcacatctaaaccttaagcgtgtagaaaaagctcgaagtctgggcaagtcaaattcaggtaggggtgacacttgtgtagaccaaaacttg

SEQ ID NO: 56057 - DNA, 159 bp, Gossypium hirsutum
  Clone ID: uC-gsflnu33B146a11b1
gctaaatgccgcaagaaggcgctggaagtagggtttgtttaaggaatgagagcgcgtttatcctcttcacccaaggggcaatgttcggcaagcccatgtacaataactggagacactgtttttagtttgggacaaaagaaacacccccaaacttggtag

SEQ ID NO: 56058 - DNA, 229 bp, Gossypium hirsutum
  Clone ID: uC-gsflnu33B146a12b1
gcctgtcatccactatgagacactcaaattcacgtgtttgtaacacgagcgggagctgttactgacctgacaagagtcagtgcatgatgaagggaagcagttacaccatggctatagagaccgacaaagagccacaccagcactgttgcggcataggttccaactgagaatgatcgcaagtgcggagttaactgctgttgcaccaactgctcttgtgggcggaaaacag

SEQ ID NO: 56059 - DNA, 390 bp, Gossypium hirsutum
  Clone ID: uC-gsronu33B002a04b1
gcgggccccgattcccggttcgcggccacgcgcccggctatcgttttcgcgtccgcccacgcgtacgagggccctgtgaccgtttatagacatttaatactacaaaaaaaaaaagggggggggcggctgttggatccgggcatacccttcctgaccctggaacgccacggctttttttttgtgtagcctaacttaaattcactggccgggcgtgcccatcaccacgcctgggatggccaaggcgtggcccaacccaattgactggcctagcatcccattttccttaggggggggggtgcattaggggcccggcccgatcggctttccctacattacagttgcccaaattgaaaggggaacgggccccgccccgtggctttacattcggcc

SEQ ID NO: 56060 - DNA, 348 bp, Gossypium hirsutum
  Clone ID: uC-gsronu33B002a06b1
ccacccaaaaaggggacatgtggaattagcaaagccttggcgttcaacaccggccctagatcggctttgatagttctgacttcgttctctctattcacttctccacaagtctgtcaacagaggctttcattcaacttgcgtgaacagaatggcgggcgggcctggccatgatgaacccaatcacctcctttctcaacagcatctcctctttctttatcggattctcaaaatatggactgcccaagactccgttcgtctctgcttcagcattggtgtggcttgttcctatctatcctgccattttcccaccaaaaaagactgcccctggttgctctcccttcttccccc

SEQ ID NO: 56061 - DNA, 362 bp, Gossypium hirsutum
  Clone ID: uC-gsronu33B002a08b1
tttcggtttatcgaatgggagatacaagtaggggacagggcaacatgaaaagagatctatgggcacaccaacagttgcacccagagtggatccaacaaggcgcattagtacagacccatatacagggcctgatgataggaatgctcctggaaggcatgctgcgaatcgggatactggtttcaacagtggcccaaagccttcagctgataatatccaacaacctgatggccctagctatgacagtgggtaccctaaagaacatcttaattctgcaccaacaaattagtctgcatatgttaattcatgggcacattaaaatccgatgagggatgcaccttctacatacactgacagatacactc

SEQ ID NO: 56062 - DNA, 326 bp, Gossypium hirsutum
  Clone ID: uC-gsronu33B002b08b1
ttttcgcctatgcgtacggaaaactacaaccggggttaagaggctttatcagaggcaggccaatggaaccttggagctccctgctgttaatgtcaatgactgtgtcaccaggagcacgcatcggtaagcttgaagtggcatgtccatccactctgatctccctgatgtggcatgagtgacgatgcttagccgtatgatcatagagttgctaggtgaaggcacgcctgtgtgtcgcgcgtgtctatggaagatgctcgagcacaggtgttgtagcatgtttgtctcgatgcgagccaatgctcgcgttattgccactggtgatccat

SEQ ID NO: 56063 - DNA, 330 bp, Gossypium hirsutum
  Clone ID: uC-gsronu33B002c05b1
ccacgcgccgtttgcgttggaagcgcaggaccgaaagggcatgttagacatgttacacccagacagagggacaaaagtgacaaatgtaatcgcgagagccgagtcatcatccagctctgaaaagataccactatcatgaaacaaagaccttcagacacatgacctcagacagggcaaaacactttctgacgcgcaaggccccaggagctacatacgagactgccgcacattgagacaatggcctagtcgaagaaacgaacagaaagacaatagacggtgccggagcaccaacctacagaggagaacgattcagtctgaaagaaagttggg

SEQ ID NO: 56064 - DNA, 410 bp, Gossypium hirsutum
  Clone ID: uC-gsronu33B002c09b1
tttcgggtcttggacccgcaaaaggagatctgctctgggggactattaatgtccatcaacggttgaatcccaacgccacattgttagaatggaaagcgtacccaacagaacaggattactgtgctgaggggaggcctgcaagccaaacgtccaagtgtttgctggactactggagtcaagaccggatccagaagccccaaggggacgacaccgagaaacatgcaccctaaaaacactatgcctggtatggcgatgacgacgacccttatggtgaccctacccttaaaggcctaaacgggaatactttaaaagaataaacgccaatagtgacgttcggatgcaacatggtggcaactgcgagtgagttaccaacggtgaccgacaaagcgctcaaaatcgccaatgtgaaa

SEQ ID NO: 56065 - DNA, 323 bp, Gossypium hirsutum
  unsure (1)..(323): unsure at all n locations
  Clone ID: uC-gsronu33B002d03b1
gggccccaatccccgggacgccccacgccccacgcttttaccattcntcagcacgacccaaaaaaccaccaaacgggggaatttgaaacacccagcccgtccagacccacaagataccaccggaaaacaccaccggcgagaaaaaccgccggccaagagccgcagaggacccccacacaaactgacacccggggaaggccaacccagaagaccgccccccagcagcacacgaataccaagagggactacggaaggaacgcaagaacaccccacataaagtcccacaacacaacccaggacaaaaactcctgatcggacctttt

SEQ ID NO: 56066 - DNA, 410 bp, Gossypium hirsutum
  Clone ID: uC-gsronu33B002e07b1
cacccgggacgccccacgctggcggctggtcggccccgcgaaaagctgagagaggaggttgagaaacgagcacgagaaaagatcctccacacgcgggaggaagacaaggcaaacagaaggcggaccgcacgggcccacaccagaggaggccttcagcagcacctaaaccatctgcaaccagaggggcggagaaaccgagcgcatcgccagccaggcctgccacaacggctgaacatatgcgcgaacgcccgcgagcccggaagcaaaaccacaaggaagatgatgcgaaagccacgagagcagtccagactctccggacatacacaggcaaagaggccaggaaacctgacgaggagaaatggagaaaaagaagactaaatagccaaccgtggcaggaaagagcaaggagc

SEQ ID NO: 56067 - DNA, 587 bp, Gossypium hirsutum
  Clone ID: uC-gsronu33B002e08b1
tttcgggtctttgtaaaattttgggccttggatttattttgtatgttttgggtttgttgggcccgggcgaaaattaggccctacaaattatatttagtttgttggcctctaaaaaaaaaaaaaaaaaaaaaaaaaaaaaaaaaaaaaaaaaaaaaaaaaaaaaaaaaaaaaaaaaaaaaaaaaaaaaaaaaaaaaaaaaaaaaaaaataaaaaaataaaaaaaaaaaaaaataaagggggggccccttttaaagtaccaaattttccttccgcgggttggaaacttataaatttttttatggggacactaaattcaacttcttgggccgtcttttaaaaaccgcaaaaagggaaaaacctggggaaacccaacatataaaccttgtgaaaatatccctttttcacattttgggttataaaaaaaagggccctacccttatacttttccaaaaatttgcccccctctatttgcataagaacccccccttatggggaaaataaagcggggggttggtgggttccccgattttttctttttttttttcgagggcctaaggcccccccttcggtttttcccatgttttttc

SEQ ID NO: 56068 - DNA, 337 bp, Gossypium hirsutum
  Clone ID: uC-gsronu33B002f06b1
taccgacttcgcgaacagaccaaaacaaaggggggaaggggaaaaagaaaaccgttagcccccccaggacacaggcagggaaagacacaagcaaacggaaaggaacaccggggggggacacgccaccgcaagaggggagcaaacacggggagacgagaagagacggcacgaccacgaaagagacagagacaagggaccatacggaagcagaagaggcccagaaaagggggaccagtgcagaaggagaaaacacagcggcaacaagaaacccaacaaaacaaaaaagcgaggagcaccgcgcggccgcacagacgaaacacggaaaaggaagggagag

SEQ ID NO: 56069 - DNA, 255 bp, Gossypium hirsutum
  Clone ID: uC-gsronu33B004a05b1
tccttaactacccacccatccccacttttttttttctatacaccaccaacccctacctccgggggggtttaataaaaaaatgaccgtccgtataaaccaccccacatacactaatacccagccaccttctttttcctagacactcccacacaattgacccctaattccaagccctaccctatttctctcaaatgccagtggccccattcattttctctcctttacaaccccacccacatgagcccttttcttctg

SEQ ID NO: 56070 - DNA, 137 bp, Gossypium hirsutum
  Clone ID: uC-gsronu33B004e01b1
ctcttcctttcgtatgagacccgcaagaggaaaagggagcgatcaaatacttacggagagacttctggaacaggaatgccaacacaaattgaggaccaggagacagacaaaatttaatatattttatactaataaat

SEQ ID NO: 56071 - DNA, 417 bp, Gossypium hirsutum
  Clone ID: uC-gsronu33B004e04b1
accatacgttctaacaaatatgctgatgactcggcgaacaacgctacttacataggggcccttgtaaagggtattctagctgctgatgaattcactggcaccatctgaaggcttatttcaaggattaatgtagacaatgttgaagacatcaggcaggctctacgtgagcttctattcacaactcctggagctattgagcaccttatctgtgagattatctttgaggaaaccatctatcaaaaaaccgcttccggcaagcccttcaatgatggtttgaaggaacgtggcgtcctccctgacatgaaggctgacaaggttactggagcgcttaatggaactcatggcgaaactttaaaccagcgtgtacatggacttgcacagtgataccagaaggactatgaatctggtgcccggttt

SEQ ID NO: 56072 - DNA, 396 bp, Gossypium hirsutum
  Clone ID: uC-gsronu33B004g02b1
cccatgcgtccgaggagacagttttctttgctctggcttgacttcatatgtccggcgataggatatcccgaggtccattgcgccgtcgttgtggcccatgtgacttaattcttctaatctattttatgtcttccctaattggccatcttatgtctctattctacccatattatttcttcttctttactatattattttattttttttatctttttaatctttactatcttctttttttttaaaaattttactcttctttttattttatttttatttttttatattaatttattcttttatcttttctaatatttttatattttctttctaatttatttttttatataatttatttacttataatcttatttttatatttcttctattttatttact

SEQ ID NO: 56073 - DNA, 112 bp, Gossypium hirsutum
  Clone ID: uC-gsronu33B005b10b1
ttcttttgggatccaatcatggatgcaaatttgattgttttaaacttgtttggggtctctatggaaatgtcaatttctgactattgtgaaatgcagttgaagctttatcaat

SEQ ID NO: 56074 - DNA, 136 bp, Gossypium hirsutum
  Clone ID: uC-gsronu33B005c04b1
tgctatttttcctaactatagggtctccgatactcaagcacttgtcctacgcatggcagagccctgtactgatgacctgcgacaggacgcggcttattttgctggcattacatccgattttttacaggtgggatat

SEQ ID NO: 56075 - DNA, 264 bp, Gossypium hirsutum
  Clone ID: uC-gsronu33B005d10b1
cgtcttgccctgaaagacacactcaactgggggggacattttacacctcttgtggcgagatgctaccgaccttcgcgagaaattcgaagcctacatgcttgggaacgatcaagtctcaattcccagaacgatcgactcccaagctgctccggttgaaacaccaacgttttttcaatcctttccctgctcctgatcccatataaatttcccagccaaatttcttgcggttataaacataatttccccaaaccaattacatgcctg

SEQ ID NO: 56076 - DNA, 170 bp, Gossypium hirsutum
  Clone ID: uC-gsronu33B007c05b1
cccacgctaccgatgaggaaaatcatgggtgccaaaggtcttttcttctttgcttggctttccttttcagctgtctcggcatatgcacaggatgaggaagaccaaggtcttgctctgaacttctacaaggactcttgcccccattctgacgacactaacaaggaccaagt

SEQ ID NO: 56077 - DNA, 222 bp, Gossypium hirsutum
  Clone ID: uC-gsronu33B007e12b1
ttatctagtagagcttggacttgccaaggagaatggcacccaagtgagtggggttcatactaccctttactatgaaggacttgaatgccaagccgtgcatattgtgctcagtagacatgctatttgaggatcaagcatgccagactaaactgacttagtcagtgaacctatgtctgtaactggaatcgaaggtgtcatgaacacgttgcttgaggaagaagt

SEQ ID NO: 56078 - DNA, 365 bp, Gossypium hirsutum
  Clone ID: uC-gsronu33B008c05b1
ggctgttttttgtttaggaactaactgtaaaagtagggaggttgagactaaaaatgcatatacggcacaaatggtatgagttgtgcagtgggcacaatataagaatccaaattacatgtctgattctgaaatgaatgtcagagctgggaaaacaataaaaaaagtgtggttagttagagttcgtagaaccgacactgacatggaggatgagctatagacttcgagctattcaaattgcacagaagcaacaaaggtcttgatggaagagcacggccagcaatgctttttgttgacccgaccactatagagggaaccatggaggcctactctcctttaaataattggattggatgagcatatcacct

SEQ ID NO: 56079 - DNA, 528 bp, Gossypium hirsutum
  unsure (1)..(528): unsure at all n locations
  Clone ID: uC-gsronu33B008c06b1
cggacgcgtttttccaaatgtggtgaagctgagagcttacgattgggcccctgatgaaaagcttctcattagtgatttcatctccaatggcaatttggctaacgccatcagaggcagaaatggtcagccatcaacaagcctctcatggtcagtaaggcggaaaattgtaaagggagcagcccgtggcttggcctatcttcatgaatgcagtccaagaaaatttgttcatggagacgtcaagccatctaacattctccttgacaacgaattccaatcttacatctctgatttcggcctcaacaggctcattaacatcactggaaacaaccccgattcttcatccggcggcttcatcggtggactcccttacaaatcaatccaaacggaacgaaccaacagttatcgagcaccggaggctcgagtccctggcaaccgagcaacacanaaatgggatgtctattcatttggagtcgcattactggagctggtacgggcaagtctncngagctatcaccgaccacatcaact

SEQ ID NO: 56080 - DNA, 376 bp, Gossypium hirsutum
  Clone ID: uC-gsronu33B008d07b1
ccttcatttcgtccgacgggaccaacgaaacggggggatttttaaaagaggcgaggaaaaccaacccactgaaactaggaggaactaaagaggctccagggcccatgacaaggatcagaatggaacatatcagcggctgagctgcgccatgtcatgacaaaacccggcgagaagccaacagacgaggaggatgatgaaatgaaccgagaagccgaggcagatggagacgggcagaacaactataaggaggtaggaaagacacgacggccaagcaactttgtaaccaaccacaaagaagaaccaaacattgataccaaagggaacagggcaaacaagtacgcaaagacctatatctccgaataagaacatccacgct

SEQ ID NO: 56081 - DNA, 222 bp, Gossypium hirsutum
  Clone ID: uC-gsronu33B008d09b1
ttcctttcgttcggactactgagaacgccaagggggggaacattgtagcggtatgatacaaaacacaggaatttgcacgcgtggagaaaacaaacaatgcaaagccaaagaaggccgatgatggggcagctacgagcatagatatcctgttagccaagatattggctgcctttgacatgtaacaggaggttgtatggcaggtggaggacaggatatgtgttg

SEQ ID NO: 56082 - DNA, 238 bp, Gossypium hirsutum
  Clone ID: uC-gsronu33B008e07b1
gcgtttataggacagtgatgctggttctcacgaagagggatttttagaagtatatgtgccaatggagcccgtattgatcgaaagaaacattcccctgaggtcaataacaggataccaggctatagtatatacacgtgagtagaaatcgggtatgactaataacccctaggaacgggaaatcacagaaatttaaaaaacagtaggagttgtcgatatggactcagcttacatacacttg

SEQ ID NO: 56083 - DNA, 443 bp, Gossypium hirsutum
  Clone ID: uC-gsronu33B008e08b1
ttcactcgtccgtgcgaccgcaaacgtacagagggggaattttaaaactgcaatagggtaaagaacccaatttcaacgaatggaacttgcagatacatgcaagaaaatcagggcagatgagacaacagccacgggcaatgaaatcctgatagaaataaaaccgcctcaactaggatatttactaaaatttgaaatgaagaagcaggtatcaataagacttgtgcttaccacaggcggagacatccatagcattatttatgcagagtaaacctccaaacattaatattgtagacatgaactgtttatatacaccgatggaacgtcggaataactgtatactgaattgtggggagatccaagtgaagattgagcattctccacattctaccctgaattggtcaggccaatcatagatccaattgcagaaatatatcaccggatgc

SEQ ID NO: 56084 - DNA, 435 bp, Gossypium hirsutum
  Clone ID: uC-gsronu33B008e09b1
tttctttcgtaggtgctatggcggcgttagacaggaagttgtctaagacattcagggacgaaagggttcaagttgtaaggatggcgatgcggggtacatgcaagaatacatcagaacatgcaaccacgaacacgggtgttgatatgctgattgaaataaagccttttacattagatgcttctcgtaagtcaccaagtcagatgaaagactcaatatatgtcagcataataaagaacgaatccaatctatgtagtatttatgcaaagttagcctctagctattaatagtatagtccggaacctatcatatataacaatttaagctttgacttttctatatacttgataggtgggcggtagtagctctccatctaagatattttgctgccatctgttctaagggaccaggaatgctaatcactatggtcgcattatg

SEQ ID NO: 56085 - DNA, 300 bp, Gossypium hirsutum
  Clone ID: uC-gsronu33B008h04b1
cacgtttactttctctctatctccaagttatcgccattctcctgcttttaggatgcttgttgaaccccaacatggtgtatatatcaaaatacaaaacatctaatactgccacactactggttttgagcctgaatattattagttatgaaatgaagctttttatatatgtaatttattagttcatatgtatcatgaaagaaatagaagcgtacgttgtttcataacatgtaatgccttttggttaacattgatagctcgtcttcttaatggattgagaaatggggcaggcaagtaagactg

SEQ ID NO: 56086 - DNA, 183 bp, Gossypium hirsutum
  Clone ID: uC-gsronu33B008h05b1
cccactcgttctcataggtagcacgaaataggcatgtaggcgttagagttgaaattccgttggagtgaccactcatcgatttcataaaccatgaaataattcaatgagttgacacctaaaaatcaaccaaaaacagctaactagagtgtaggaaaccgtaaactgcagatccagcataaacac

SEQ ID NO: 56087 - DNA, 336 bp, Gossypium hirsutum
  Clone ID: uC-gsronu33B009b01b1
aaaaaaagaagaaaaagagaacccatacagcagaaaaaaaaaaaaaaactaaaaagggggggccccttttaagggacccaagtttccgcccccgggcttgcaacgcattagtttttttttggggcccccaaatttaatttcctgggccgggtttttacaacgccgggccgggaaaaccccgggggttccccaacttattcgctttggaaaaaatcccctttttcccaggtgggaaaaaaacaaaagggccccccccaatcgcccttccaaaaatgtgcccaccctaatggggaaatggacccccccctttatgggcccttttaagccggggttttt

SEQ ID NO: 56088 - DNA, 269 bp, Gossypium hirsutum
  Clone ID: uC-gsronu33B009c09b1
acttcctggtgactgatagaaggtcagatgcacgctgtggatagatcaagacgagcaaagatgttgcctagctcaaggtccgctgctgcatgtgcttgtacacactttgcgcgtcggatgctgacaagggtgacaagttgtagcagccccttcctgcaggtttgagggttcaagacctgtgaaaatatggcagcctcaggattgtcacctgatttattggtgaggaaagctagattttagttttgctagcactgcttcttgggccattt

SEQ ID NO: 56089 - DNA, 286 bp, Gossypium hirsutum
  Clone ID: uC-gsronu33B009f12b1
ccaggaagtttatgatcataccagtcaggattcttgtgaagcgcgatgagctcaccctcgaaggtattaagcagttttatgtcaacgttgtcaaggaggagtggatgctcgactcgctttgtgatctccttgtttctttatctttttcttcagagcgggatctttgtttatctctattactcttatcttttttgtcttcccttttctcactctttatttttaaatctctctatatttactttattattctttatcatgtctatttctctttttttttttctctttt

SEQ ID NO: 56090 - DNA, 172 bp, Gossypium hirsutum
  Clone ID: uC-gsronu33B009g03b1
aaaaacaaaagccccttaacacccccaagaggagtaaaggaagggtcaccaaaaggcgccaaaatcgcctgctcttgaaagctttacatggctagggtatagttcgcttcttcactaccctgagtaacaaagtcttatttttatatagtctgataaacccgaacgagatgca

SEQ ID NO: 56091 - DNA, 386 bp, Gossypium hirsutum
  unsure (1)..(386): unsure at all n locations
  Clone ID: uC-gsronu33B009h02b1
ctctatgaacgatgctggaagngtgaacaacggggcggggatacgacgangaaatgggacacctctactggcctaagaaggagcgtcagtcggtaaccgagaccccgaggtcgtcaccgggatccaaaaacaagcctaaaccacccatttttgtgacaagggatagccctaacgcgctcgagtatgtatggaagtncaagtggaccgatgtagccgagagtatagccaattgctcgataagacacgttagtttgcgtgcttagcggcagggctcggtcccaacgttaccctaagacaccggcagaccggcgcgggggtcgcccttatggaaggtgagaattttggctttgccggggcttttctccccggaccgcttcaccgggatc

SEQ ID NO: 56092 - DNA, 425 bp, Gossypium hirsutum
  Clone ID: uC-gsronu33B011b06b1
tgtcctttcgtccgataggacattctttgctgacatggattccctcatcaaccgtggcgacagatagagggctgtcattttacaaagggaaagaaatggatgtaggatctgcaggaaccggctgctgttgctgttggtggtgtcggtgggggtgatcagcggaatcgggcatttgtgagctccacagttttttgtagaattctttaacctaactctgtatgaaataacctaaacaaccaaaggctcgcctcttgtaatagttgataggcactactgacacgacattctacccagagttctcttttccacacttggaaaactaatgcgcactccctggtggggagtctgcagacaccctagcccacttggtctggaacatgatctttccacaaactcaggcatgattccaaatggagatactatcc

SEQ ID NO: 56093 - DNA, 443 bp, Gossypium hirsutum
  Clone ID: uC-gsronu33B011e04b1
agaaaaatcccaacctctccagctggtggtgtgtattacaaatggcccaaggtagcatgctgaaggctgggcgatagcctgaacaaatggcaatactaaccgcagcctcggcgcaggcacgggaggcgccgagaccgactgcagacgctggagctggattctcagtcagaggcactaccgccgccatagacttcattttgatcgtaccccttcttgctctcttcaagcattaaattgaagggcctgggtggctctcctatgtgagtggctttctggtatatatatatacatggatgcatgcatggatccctgataccatactgtctatgttgaatttagtgcaacgaacttgatttattgaataagatgcttacgatctgatacatgtttttacagctgatcgccctaagtgaagaagtgagtggcaaaacccttgtgaaaac

SEQ ID NO: 56094 - DNA, 218 bp, Gossypium hirsutum
  Clone ID: uC-gsronu33B012g06b1
gacggaatgaattttatatagtgtcacctgggctggaacgttatatgacgcatccaatgtacacacgatcgcgtagtgtgcaaacacccatgagcgtttacctatacttaatacgctattagttaaacatcctggctgtcggcagatgacgtatagctggaggaccctagcgatcgccatttcaaacagttgggcagactgaatggttaatggaactg

SEQ ID NO: 56095 - DNA, 177 bp, Gossypium hirsutum
  Clone ID: uC-gsronu33B014b09b1
aggtccgagaaggaggctgctgaaatgaacaaaaggtcattcaagtatgcttgggtgcttgacaagcttaaggctgtgcgtgaacgtggtattcaccattgatattgccctgtggaagtttgagaccaccaaatactattgcaccgtttttgatgcacctggaccccgtgccttttt

SEQ ID NO: 56096 - DNA, 148 bp, Gossypium hirsutum
  Clone ID: uC-gsronu33B014c07b1
cgcacccttacgggtgggatagtgtacgacctcctcccgcttctacaaatacaagtgtgctacaccaccaccaccccattgtgtatacgcttgacccgctcctgctcaccactactacgccacggctgtgaccgagctccactccaag

SEQ ID NO: 56097 - DNA, 359 bp, Gossypium hirsutum
  Clone ID: uC-gsronu33B014h04b1
ttgtgccggagtgtttgcagcgataaggtcactatacgtgtgagcattcagatgatcagatggctagctagagcctgtggatgaggtgccactgacttcagatggtgcctggatgggattgaatattgtgctgccagaatgaatgtaagtagaaattgttgtgtaacccctatcacaaggtagccgggaccgaactggatctcagcctacatgaaccagcctaagagacttcttcataagccttgcaagggataggggggaatttgccatagtcaaatgattgttaaggagtttttcttataacttaaggtaaatgcatttagtttggctaacaaatttattcgcattgcattgatttt

SEQ ID NO: 56098 - DNA, 149 bp, Gossypium hirsutum
  Clone ID: uC-gsronu33B014h11b1
ggggacccggccgtttcttccccgaaaaccaggttgataatggaggaggaggtgcttgtgagttcctttgccttgtgagaaagctcacagtttggcgatcagagaatgtttttgaaatatggtttattcattctttaaatgttccctca

SEQ ID NO: 56099 - DNA, 323 bp, Gossypium hirsutum
  Clone ID: uC-gsronu33B015b07b1
tttttataaaaaaacaaaaaaataaaaaaaaaaaaggaaaaaaaaaaaaaaaatacacaaggttaggggtcgctggctttcgcgggtccaggctctccgacccggccctccaatggggtggcttccctactgggactcccttatgggcttccttggccgccctttgacagacacttggaatggtaacactccgccgttccttggcttatttgctttcgcgcgtatcgctttttcgcccggtggcgcgctctcggctggggccgcccctgtcgcccttcctgacatccgcacagttcttagggccaaggggccgcccgctcgat

SEQ ID NO: 56100 - DNA, 421 bp, Gossypium hirsutum
  Clone ID: uC-gsronu33B015d12b1
ttacatgatggtgataaatggaattggtggggccctgttaatctaccctgtactacgaggcaaatgggatagtgggacataggtggcgtatcgcagacggggcgatcttgtacatcgtggcgatgctccagaccgctccgaaggggccgtcgggggagaagaagggagcgcacaaccgtgagagagtggaagggtgcatgaaagaggggtggcattgcaagctgtaccttcctcactaccgttccatagaggagtggaaccgacatctcgagaagcaatggtcgagactcgccaagaggaaggccgagctggatcctatgtgcatcctggcacgtggacaaagcattactgaagggactagataataatgataattaagtaggcacttgggatctcgttgttactacacatagatatatat

SEQ ID NO: 56101 - DNA, 496 bp, Gossypium hirsutum
  Clone ID: uC-gsronu33B015h07b1
taagataatgaaaagaaagaaaagaaaagaaaaagagataagaaatgaaaccaagataaaaaaaaaaataataaaataaaaaaaaaaaatggggcggtcgtttttagaggtttcaatttaatgtacctgtgtttgcgggggggtcccttttaaaaggttaaattttttttaaaggggggggccgtttttaaaattttttttttggggaacaaaattgtaattactcagcttttttttttagggtcccatatttaaaatcccggggggttgtttaaaaaaaggggttggggaaaaacctttttttcaacaattgtatatgttggaaggggaatggcacttttccttttgtgtgaaaaattttacaaaaggccgatgggaaattgtctctccccatgtggggtacatttaaggggggaggggggggggtttttgaggggttttaatttcttttgggaggggtttttccgcactatttttcattttttttttgggtttt

SEQ ID NO: 56102 - DNA, 439 bp, Gossypium hirsutum
  Clone ID: uC-gsronu33B016b01b1
cccacgcgttcgaaagttaggaaaaggtgtacgcatgttgacaaataaatggcttttcttttttgcaccttttaatcaaataatttcgcatagaagaagagctgcgagatagatactttagaagaggaggaaacggagaacaagtggagctgcaagtaacaatgacaacaacaaggaccgcaagggcagacaaaaagacacgggggggggggttacagggaaccaaattttgcagaccccgtgagcaaagcaagaagcatttaaatggggcggcaaaaaaagaactaaaggggggtggataacacattggtgggggggaaaaccttggctggcccgacctaaatggcttggcggaccacaccctgttcgccatcggggtgaaaaggaagagggccctcaacggggcccttcccacagagggggacatcttaaagggaaa

SEQ ID NO: 56103 - DNA, 444 bp, Gossypium hirsutum
  Clone ID: uC-gsronu33B016e04b1
ctgcctcgcccggcccgtgtccggaccggactgggctcgacccacgcgacgcgttcttttttttgccaaaagactaaaaaagctaagaacagcccatggactatatgtaaaatgcgcatcccccaccaagttatatatagttactgaaagcagattgatgcagataaatctggcttttgcatttgatcttacagtgcagttcttgcctgtacctttactgaaggcctacttgaaggaagcaagaaaaagcttggggacctggttagtactggaaactacttttctactgcttagattgagtttagtgagcttgagttgggggcctcttaaaggccatgtatcaaggcgcattgttgaccatcatattgaggagcaaccccctgttgatccactttaaaagcgggttctcctattggccattggtcaagctggcaaaaaaggaaa

SEQ ID NO: 56104 - DNA, 243 bp, Gossypium hirsutum
  Clone ID: uC-gsronu33B016e08b1
taatgagttcttgttatagacaagcttctttttttttttttacttggggtttaaatttttttgtatttggtctctttatgtttcaagggaagaaggtttgggtgaaaaggaagttggttttgccagatttggctatataattcagataggctagttttaactgaacgcccattctatttctatggtagtaagaaatgattccattaaaaaaaaaaaatcaaaaaaaaaaaaaaaaaaaaatat

SEQ ID NO: 56105 - DNA, 200 bp, Gossypium hirsutum
  Clone ID: uC-gsronu33B016g12b1
ttccacgcgtccgaaaaattccatcaatgtttcactctagcttttcccaatgctgttgtatgattctgtggcatataatctcaatttggaactaggatagagtcaatagaccgaatttcatgcacttgcatattatgtgacatcttctctctctctctctctctctctctgaaaatgaatacctctttgtttctttcttt

SEQ ID NO: 56106 - DNA, 424 bp, Gossypium hirsutum
  Clone ID: uC-gsronu33B016h06b1
ctcatacgttggcttgcatgttgtcaagctatgcagatactactgcagagggcactgtgggggttaccattggtatgggaagtgctgctggttgacgcgcaagataagttaattgacacgtgatggtacactagagggtgttaaacaatgaactggcgtgagaaatgccgagtacattgcagtgtatgaggatatgtaacccgctctggtacccaaacttgaaaggtagtgtgagactgtgaatgaaatggttacccaaatgcttaattatcctttaggtctgacttgcatacggagcatgatacccctaatgctcatccaaattctattccatattccagaattcaatacagtggtcaggaaactgatcaggcttatcatgagaagtgctccagggttacttccacgtcgactagctaggggc

SEQ ID NO: 56107 - DNA, 872 bp, Gossypium hirsutum
  unsure (1)..(872): unsure at all n locations
  Clone ID: uC-gsronu33B017a10b1
ttatctttaacgcattgagatttatgtacttcgattatctatttcattcgaactgttcatacacaattgccaaattgttgcaattcaaaagaaaactgaaattactctttaatttccttagntnaaaaaaaaaaaaaaaaaaaaaaaaaaaaaaaaaaaaaacaaaaaaaaaaaaaaaaaaaaaaaaaaagaaagaaaaaaaaaaaatagccataaaaaaaaacctgggggggggcctttttgtggtcgctagcttccgcccgctgaaagatggaaagggaattgctctttaaggcaaacatatttccatcaccgggccgtttgtttacaagaatggtattggggaaaacccttgtgtttttaaaattaaaaagcctggaccaaccccccctttaaacagtttgtttttttaaaaggcccagtttttcccccctcctcacaattttgcagcttttattgtgaatttaacccccccttttttaaaaatttaaattcggggggggtggggggttttgtcaatttttctcttttttttttcgagggtctttaaccccccccttggaaaatttaattttttttttccacgggggggtttttccggaataatttaattaggggtgccccttcagggtcttttttttttataggccccttccccaaacaaaatatatgtgtgtttcctaattggcccccaaaaaaaaaactatttctcctgggaaagaacatctttattaatatttttttctctatataaaaaaaaaacactttattttttttttgtataaaaagtccccttcttcataaaaaagaccaaaacaacactcccgtttataaattattcttatgtggttttgagaaggcccttttttttt

SEQ ID NO: 56108 - DNA, 324 bp, Gossypium hirsutum
  Clone ID: uC-gsronu33B017b07b1
ttctctcgtacgcacaagcggccgaccaatgatgacgtataataaaggagacaagagataacctggcaaacccaggtttgagaacataacccttgatgcttgacttgttgttaggagacagggagctccgggcgtcaaggcgaagaccatgcttgactgatatccaaaagacccacaggagccgacaactccactacaggatgcttgttaaaaacacacgctagaaggggggacatacggttcaatgagagatacacattgggcgccaccggtcattgaacattcggtagatggatttgacaagtcaaatgacaagctggtgtt

SEQ ID NO: 56109 - DNA, 367 bp, Gossypium hirsutum
  Clone ID: uC-gsronu33B017d07b1
tcctttcgttcgggggaatgtgtcataaccgtttgctaaaaccaaggcgaccaacttgatccgacgggcgataatattggcatcacgagtgccatcaccaaaggcggctccggcgtctaggatggtggtggttaggcctgtctctagcgaaacagaagctctataggtggaaccagaagccgtcgcctacttcaacatgaagaccgtacaaatctaccgacggaattccagattaccctaccaaaccccaggtccatgactacaaaatcgacttaaaagaatgcgggcctatggaccatgacgccctgattaagatgaataacgagaactacccgatgctcacctttcgtcggtcctgcccgggagg

SEQ ID NO: 56110 - DNA, 306 bp, Gossypium hirsutum
  Clone ID: uC-gsronu33B017e08b1
ttccttctcgtccggtctgagggctgggcacgggggtcccagttctgaacccgtcggctgccggcgcactgttcgagctgttcccgcggcgagagcgggtcgccttgtgccgtccgggggactgactggtaacggctccctcgtgggccttcctcggtcgacgaacaggtcattcagagctggcacttgacaaggggaattcgactgttttaccaaaacacacaatttgacttgggcctggctgatgcttacgcagtgttgtttatgagcatattcaaattcatgccgagaggggcttgtcatctg

SEQ ID NO: 56111 - DNA, 370 bp, Gossypium hirsutum
  Clone ID: uC-gsronu33B018a11b1
ggttctttgtgttatttaagtgtgtaatcaatagtttgtagtggaagttaatcatgaatgagaatcttcccttttgttggtgtaaaaaaaaaaaaaaataaagaaaaaaaaaaaaaaaaaaaaaaaaaaaaaaaaaaaaaaaaaaaaagaaaaaaaccaaaatataaaccaaaaaaaaatcacaaaaaatagccggcattactgataaaaagtcaagacacagagggaggaaaaaatttcaaaaacttaacaatgaaggggttgcataagtgatttaaattaaaggattttagaactcctgaaacaactgttatattgagggctaaagaaaaatttaatcaaccctcaaatttttaaaaaggtctatttg

SEQ ID NO: 56112 - DNA, 309 bp, Gossypium hirsutum
  Clone ID: uC-gsronu33B018h02b1
cctttttatcgggcgacgcgtccgtaagggcataacggtaaggatcagctgacactaacgcgataattttggaatcaagtcggcattatccttggggggggtcagcgaggaacagcgatgtgacatgtaaagactcatataggacgaaacggaattgtattgaatcacatgctgcacctatgggatggggatagagaaagagggaacgccgcggatgtcacatagagctgttgatcaaactgtcaggctgatggatcgcgcactgctcggtcaaagagaaaacgggtcagatggtataggatcaaacct

SEQ ID NO: 56113 - DNA, 279 bp, Gossypium hirsutum
  Clone ID: uC-gsronu33B018h05b1
cccatgcgtccgcccacgcgtccgaaaaaaaaaggaaaaatttaaaaaagggagaaagataaagacgaaactttgtaatctcagttggagtgagtccttgtttattgctgaatacagaaggattccaagtcatattgcgcaaaccactaaaatactcaacttaatacacatgcatcatatctcactttatacagattatccaataactatatgacaactgacggtaactgcatttggaacaaaagagcacaacacagaaggggggggtggcgcctttta

SEQ ID NO: 56114 - DNA, 309 bp, Gossypium hirsutum
  unsure (1)..(309): unsure at all n locations
  Clone ID: uC-gsronu33B019b09b1
aacttcatagatctggggtggcgtctcttgagttcccttctttgcccgccgtttttcgccgccgagactgttttttctcgggcgccccccttttaattgcctgtcggttattatccccctttcgccgggtgaaatccttgtttttccgcccgcttcctgttcgttgttgccaaccccttttttaccctgtttggctattgggactcggcctgtcccggttcttttttcccagtggttggtgtgctttcttggcgggtgggccctccccttggccgcgcctttacgcccgttgctttnggttttttccct

SEQ ID NO: 56115 - DNA, 233 bp, Gossypium hirsutum
  Clone ID: uC-gsronu33B019d01b1
gggcaccgccccaatatcccgggcgagacacacgcccgcgatattaacccactgcgcgggcacgacaacacggggggcttagaaatcactagcccttcgcatccgcaacatgtcactggcactaaagagacaaccagaaaacacagggggaccatcaaaaacggaaaaacgaagccaatctctcacacaccaaaagaagaccgagcgagcaagggcaccacaagcaaaagagc

SEQ ID NO: 56116 - DNA, 286 bp, Gossypium hirsutum
  Clone ID: uC-gsronu33B019h11b1
gggtgataaagaaatgggatgcggtttttgaagctagtgatgctactaccgctgactatgactggacccaccatcaacatcagctcattacctgtattcattctcacatataactcaaagatggcaactttacgtcaaacgcgccacagaaagacaaaacataacgttgatagatttttcacgtttgtgggggaaacaatgaatgaccagggaaccggttcgagaataaatgattggaaaattcaacgaagttgactttgaaagacatgatgcttgacaagctgac

SEQ ID NO: 56117 - DNA, 176 bp, Gossypium hirsutum
  Clone ID: uC-gsronu33B021a02b1
atgaccactaccgaaacacgacatggaagcaagcgcggatcaaacctgctcttgtgatccatgcaactgttgaaaagctcgatgaaagccacaaattatgaaaaaaagaaagcagcaaaaataacaggcctctgaaatgatatattgccaaggatggatgcctgcaaggcctataa

SEQ ID NO: 56118 - DNA, 400 bp, Gossypium hirsutum
  Clone ID: uC-gsronu33B021c10b1
ttaaaaaaaaaaaaaaaaaaaaaaaaaaaaggaaaaattataaaaaaaaattttcatttaaaaaaaaaaaaaaaaaaaaaaaaaaacccaaaaaaaaaaaaaggggggggccgtttaaaaggacccaggttaccgccccggggcaggcaacgaaaaagctttttaatggggcccccaaaatcaaatccccgggccggggtttaacaccgcgggaacgggaaaaccccgggggtacccaacttaaatggcctggaaaaaaatccccttttcccaagtgggggaaaaaggaaaagggcccgacccgaccgcccttccaaacagtggcacacccgaaagggcaaagggacccccccctgaacgggcccataaaccccggcgggtttgtgggaacccccaaggg

SEQ ID NO: 56119 - DNA, 270 bp, Gossypium hirsutum
  Clone ID: uC-gsronu33B021e01b1
agaccgcgagcggccccccaacggtgatgggtggaaggagatttggctttcctacaccccccttgaaaaaagaaatcatatatatactagattttaactgggaacggtatatatagactggatctactctatgaaggggctctattgtttcggcttctggctttggtaactagaccgactctgggtctttctttttgatccaatgaagaatgataagaaggtctcttaaaaaaaaaaaaaaaaaacaaagaagaaaaaagcaaaccataa

SEQ ID NO: 56120 - DNA, 229 bp, Gossypium hirsutum
  Clone ID: uC-gsronu33B021e04b1
ttgattattgcctctctgggagctggcccggggggcgttatttaaagcggcggtcattttaccacccctcattttggcttcattctgtgctctggctgcgggcattattgcaactctgaggctgcctgatctggcaagttccttcaagtcatctggatctcattttggctaaggaacaaaatggccccaaaaacccaacaagccctctggataagaagggtcggcaacc

SEQ ID NO: 56121 - DNA, 201 bp, Gossypium hirsutum
  Clone ID: uC-gsronu33B027a10b1
tcgttaaaacaggaaactgagtttccttttatcttctgttttgttttgttgttgctgttatgcttatcgctttctagttttacttgacatagatgaaaaggcagatgtgtgagcaatgtaaaacaaatgcttcaggcttgtaagataaaataaaaaggatatacatcctggagctgtatccataaaaattaaatacctttt

SEQ ID NO: 56122 - DNA, 139 bp, Gossypium hirsutum
  Clone ID: uC-gsronu33B027b04b1
gtcaataccttttttcagtttcaaacctctcgaatatggcctctttcaattgctttgttttagcattgttcatggctttatcgttttcaagcgtcaacgttgtctctagctacttgttatactttatatttgctaacat

SEQ ID NO: 56123 - DNA, 137 bp, Gossypium hirsutum
  Clone ID: uC-gsronu33B027c10b1
tatcactcgtgcgaatagggggaacccaaacaatctggtaaactcagatgaggataggcaccgctctagaagatcaagatccagggagaggggcacgaataatgatagaaaacaaagaaaagatttggatggaagat

SEQ ID NO: 56124 - DNA, 205 bp, Gossypium hirsutum
  Clone ID: uC-gsronu33B027e11b1
tccacgcgtccgaataaaaaaaaaataaaagataaaaaaaaaaaaaaaataaaagaagagccgctttcgcagaattaggtttgctttccggtgcttgctgagtcatatttcactcactgactggcttgaattcagtactgtggcctctggtttaccactaacagtatggtacttccctgggtgtgcccactttaccgttttggct

SEQ ID NO: 56125 - DNA, 209 bp, Gossypium hirsutum
  Clone ID: uC-gsronu33B027g02b1
ctcttcttgagatcggttgcaatgacagacaccgaaaggatccttgattctaagtatggcgcctgtgttaactacaaccagaacatgcaatacgatgaacattggatgttctgggatggaccattcataggtgacatccttggtgcaatctatgaccagcttattctgcgggcacacgctgttaaagctcttggatccttaaggagcag

SEQ ID NO: 56126 - DNA, 270 bp, Gossypium hirsutum
  Clone ID: uC-gsronu33B027h05b1
gcgttcactcgttcgcccacgcgtccgatgtcttttgtttttatggtcaatgcaactgcgcacagatacaataaaagatagatggaggagcaggaagacgattacgtatttgctttaacttattttgattaacaagagtctgactgtatttattttgataaaacactctgtgttagggaactacaaggtaaccctgtcttttcatatattattacccatttggaactactttaaacgaatctcttgcactaaactagacccttgttagaa

SEQ ID NO: 56127 - DNA, 135 bp, Gossypium hirsutum
  Clone ID: uC-gsronu33B028b11b1
cctggtcgaatcaagacaggatgtaactattctgtcatgcggtcatacaattcacacaaattgcctcgtaggaaatgagggaccattttcaatatgcctgttctccttattacataaatggttttttattattat

SEQ ID NO: 56128 - DNA, 153 bp, Gossypium hirsutum
  Clone ID: uC-gsronu33B028d08b1
tcgtcccacgcgtccgttctctcgtccgatcacgcgtccgcgcagacgtgggcatgctagcaacttcatagaccacaaccgcccttaacccttcctgagtgtcatcgcccagaacataattagtgtaatgtacaacacatttgaccctgtcta

SEQ ID NO: 56129 - DNA, 181 bp, Gossypium hirsutum
  Clone ID: uC-gsronu33B028e05b1
ccctctcttccgaccacgcgtgcgtgcagactcgggcatgatggctagttcaaagaccgtaacgaccctagagcattcttgagtgacatagcccgttgcataatctgtctaatgtacatcgataagaacctgtcggatgatctaaatgacctaagatgggcgatagatcctaacgatatgc

SEQ ID NO: 56130 - DNA, 158 bp, Gossypium hirsutum
  Clone ID: uC-gsronu33B028e06b1
cgtcccacgcgtccggccatgcgtccgggcaaacgtgctaagagaggtgggcgtgatcaataatatagaccccatggcgtccctccaccctacgagtgtggactcgacgggtgaataactagtgtggagtactacagactttgcttttctgcaagtgg

SEQ ID NO: 56131 - DNA, 118 bp, Gossypium hirsutum
  Clone ID: uC-gsronu33B028e07b1
ttctcgcgtccgatcacacgtgagtggagacgagggcttgctaacaagtttaaagaccttaaccaccttaaagcattcttaactgacgtagatagttacgtaaactgagtaatttact

SEQ ID NO: 56132 - DNA, 300 bp, Gossypium hirsutum
  Clone ID: uC-gsronu33B028e11b1
ttctctcgtccgagcacaagacagagcacagctggtcatgaaacctacttttcagaccgtatccatcacagaccctgcataaccgacatagctattttgttgctcctagcactctaattcgggatttgcctgtctgatgatgtataccacctatgagcagcaagagagcaacaacgataacgcagtttacaatcagcgtacaatcatgtatgtcttatgagaatgcaatataaaccgcacggtgactaaggtatgccgattcgggaagcctgagtacaaacgctcgtaggacattgggta

SEQ ID NO: 56133 - DNA, 341 bp, Gossypium hirsutum
  Clone ID: uC-gsronu33B028f04b1
cgtcccacgcgtccggccatgcttccggttaaaggtgcgaagagtgggggtcttgatagctagtatagacaccacagtggcccttgaccctgcgagagagtcatttcgctatatgtaattcgtttgtcttacaaggtagtttccttggcttattgtgtttattttctatttagttttttatttattttgtgcattttttttttactttcgtatgtcatttatatttctttttatttttgtataatttttaatattattattcttttgttttaattgtaaatttttttccttattaaatatttttcgatatattttaatttttttttattgatattttattt

SEQ ID NO: 56134 - DNA, 244 bp, Gossypium hirsutum
  Clone ID: uC-gsronu33B028f05b1
gcctctcttccgaccacaggttcgcagagtcaagggcgtgataactacttcaaagaccgtagcgccccctgacccagctttacagaccaggcccgatcgatatactttttaatgtacttctataagatcctgtccacggatgttcttgacctaaggagtgctactgggcttgacgagatgcatgatgcaaatgaagactaaatcaggtgagtgtcgtcaagggatacatgaaaatactgatgaa

SEQ ID NO: 56135 - DNA, 207 bp, Gossypium hirsutum
  Clone ID: uC-gsronu33B028f06b1
gcctctcttccgagcacgggtgagtggagacgagggcctgaacactagtttatactacgtagggaccccagggcgtgctagagggacttagctagttgcgtacactgggttatgtacatcgctatgaacctgtcggataatataaacaacctaagtggggggcaaggactgaacgagatcgctgtttgcaacgaagcctgattcaat

SEQ ID NO: 56136 - DNA, 210 bp, Gossypium hirsutum
  Clone ID: uC-gsronu33B028f10b1
ttctctcgtccggccacaggtccgcgcacacgtggtcatgctaccaactatatagacagtaaccgccctagagcatgatatacggtcgatgccatatccataaactttattatggacatcagtatcagcgtgtccaatgtagggcctgaccaaaggcgggcgaaagagacaaaagacatgcatgtatacaacaaaagcataatcactgag

SEQ ID NO: 56137 - DNA, 244 bp, Gossypium hirsutum
  Clone ID: uC-gsronu33B028f11b1
ttcactcgtccgatcacacgtccacgcacaccaggtcatgctaactactttaaagaccttaacgatcctaaagcatgctaaacagacatagctctttacatcaactttctaatttaaatcaataataccctgtctgataaaataaatcacctaagacatgctaaagaacttaacgataagcaagtttaaaacaaaggcatattcattgatctctgaataggatgcattatataactcaccatga

SEQ ID NO: 56138 - DNA, 172 bp, Gossypium hirsutum
  Clone ID: uC-gsronu33B028h08b1
ttcattcgtccgactatctgttaaaaaagacgtggtgttaatgacaactagagagtctatatccctccttggggacacctgatggtgcatgttgcacgttaaccgtttataattgacttaaaaaagcaggagtccaacgatcttgtcgggcatttcgggagctaagagatcc

SEQ ID NO: 56139 - DNA, 167 bp, Gossypium hirsutum
  Clone ID: uC-gsronu33B028h09b1
gatgcgcggcaatatttcaagtattttatcttgcgcttttagttccttattctcattatcttcccttggttgcttggtattgaattgtactttttgatgatctttatgtgcttgtgcaggaccttgtttagcttttgaagcttgtttgtttttggttttcgggttaa

SEQ ID NO: 56140 - DNA, 917 bp, Gossypium hirsutum
  Clone ID: uC-gsronu33B029a08b1
ttgcctacgcgtccgcccacgcgtccggtttttcctttttctttattttgaagtgtcaaaccccacaattgttgaggtaaacattgtgaagaaaaatggaaaaacagatgatttttgcatgtgcaatgatattttgtcttgctcattgtttcagttgttggccaattctattccagatctgtttaggtatgatcttttgttgaaaagttttctcacatttatcttatttttctaaatatctatttattaattaattttttttattcaatttttttattttttttttatcttatttttttttttttttaattctttatatttttatttatttttttaatctatttatatttttatttatattatattatttctattttttttatcttctatttatctttctttttattttttttatattaatttatatttaactttctatttttatattatatttttcttttctttttatttctccttttttattattttatttcatctatttttatatatctattctattcaatttatatattttcttttcttacttaatttaatttttttctattttattattatttattttattttttcttttattttcttttttttaaattattatttttttattatttcctttatattattttttaattttttttttatatcttttaattttaataattaatatttttcttaattttctttttcaataattaattttttattattatatttatatttttctacatttttttattttcttatctattcctttattcatttttttttaattctataaatttataactctatttttatttatttacttatatattttttattttttattctcttattctaatattataatcttttttttattatcttaattgtttttattctaatattaaattatt

SEQ ID NO: 56141 - DNA, 144 bp, Gossypium hirsutum
  Clone ID: uC-gsronu33B029a12b1
tgtgcagcccgatgttggtcgcatccaaggtgaaaaagttgagcaggccctcggatcagagggttgaaacattgacgagtgtgtgaaattaccggaaactgttcgagtgaatgcccacagcgaagatcttagaagaagtttttg

SEQ ID NO: 56142 - DNA, 953 bp, Gossypium hirsutum
  Clone ID: uC-gsronu33B029e05b1
acggtgtcttgccgataatgcgcagaggtctgtcggggataatcgaacggtggagaggagtaatattttttttttactatttttattaataaaatatttttaggattttaaaaagattataggagttgttaactttttctgcaacggcgatttatccttttacagaagacaaattttatacttattgatgttttgaaaaaataatttataaaaaaatgtttttataaaaaatttaaaaatattgatcgttttaaaatttaagacttaaaaaatcagctgtttttttaatacgagaatatttacactttttatttttaaaggtatccacgggtttttctgattttgaacaaattttttgtatgttaataatttttctgtatttaaattttttaaaaaaaaattgtttttattttaaaattctaaaaactttagaatttcaatataggaaggaaaattttttgtgatgaaaaactttaaaacatttttaatgtaaaaaaaaaggtagtttttttgaaaattggaaaaatgtaaacccttattttttgaagaatactaacttattttttttaatttggccttggttgaaaataagcaaataaaagttagttttttcaatgaatttaatgtttgcttttttttggagataaattttattggtggttaaaattaaaaggtttattaattttataaaaattttgggaaataaaaaaattttataaaaattctttttataaaattatatttgttaaaaatatttatatataataaaaaattatgtaattaatatctaatatattttattttaaattatatttatttattattaaatatttttttttttattttctttatcttttattatttatataattattatttatattttttatttattttaactttttatatattttttttatctttttctatatattatcatttatttatatata

SEQ ID NO: 56143 - DNA, 218 bp, Gossypium hirsutum
  Clone ID: uC-gsronu33B029f11b1
ttgctcagcggtcggacgcttacaggggtgaatatgaagaaatttttatgtggagaaaccattgcaattgtatatattgatgcaagattctgtttgataaattcaaaatgtaacactaaattaccttatggacattaacttttgttgtcattttacaaattttatatattttttccaatggtttgaatattattttctaattttcaacaattgtttaa

SEQ ID NO: 56144 - DNA, 344 bp, Gossypium hirsutum
  Clone ID: uC-gsronu33B029h05b1
ccctcgcgtccggtagggttcatggatccaaaattgttgccattgatgttgatgaatgtgacgatatatcatcctcagatgatgatgatgatgatgaactgttttaaatttgaattccttgtaatattaatttgtaaatatcgatactataatatgtatccaattttgagtccttatcatattaaaattgccaagttttgttgttatttctacctcaattctttccttccctattatcttctctttctaatttctttatttctttttctttcttatttcctcattttatttttatatttttctttttcctcaatttcttttatctcttttttctatatttcttt

SEQ ID NO: 56145 - DNA, 345 bp, Gossypium hirsutum
  Clone ID: uC-gsronu33B031c04b1
cccattcgttcgaacaaaaaaaaaaaaacataaaaaaaggggaatttttaaaaaaaacataaccaataaacccacaaaagaaaaaaaaaatgggggggccgcttcagggggaccatgcttacttggcgcccgcatgatacgtaataagttcctttttcggggcccataaattgaattctctggccgaggttttccaacgttccggacggggaaacccttggcgttacccgagttaggcgcctggggactcatccccctttccccggtaggtcgttttctcgaataggcctggacggatcggcctaccctacggttgcccatttaggttgaacccttggggtccct

SEQ ID NO: 56146 - DNA, 214 bp, Gossypium hirsutum
  Clone ID: uC-gsronu33B031d07b1
tttatgtgtacggcaaaaaatgcgtccatggggggggttttattaaagcttaggggtgcagataaaaaggaaggaagggaactgaatcttgcaggcagaatgaaagcttttatatagagagaatgggaggtcgaaacaggccccttcagtcagagcatagaagtggaaaaacttatgaagatacctaatatggtaggggcggaagcataaaaca

SEQ ID NO: 56147 - DNA, 466 bp, Gossypium hirsutum
  Clone ID: uC-gsronu33B031h05b1
ctcttttaacctaaaaaaccaattaatgggtgcaagaataaggtttgtggctcttgctttagcgatattgatgatggtgagttactgcttggctgcaaaggttataaaagtggatatgctgaagcacgaaaacaccgcggtcaatggcggccggcggctgctccatgacgacagcaatgccaaaagtggatacgcaaaagagagcagtgtgaacaaccaccattacattcctaggaacgactttaacaactaccctggtggcagtgaagatggaaatgggtaaattaatgagattagcaataatatggggactaaaccggtaactagataataattgcatgatgttgctgcgtgtttaatgagtttttaagacatatatatgtgattgtgatctaattagtttctgtacggcagtacgtatataaaaaaaaatatacatggtttggtgaaaggggagttaagattt

SEQ ID NO: 56148 - DNA, 200 bp, Gossypium hirsutum
  Clone ID: uC-gsronu33B031h07b1
tttggtctgtggttcctgcaattgagatgcggatgagagttggatctatggcgcctggatttggatcctgggagttaagagtaggtataggatatgtaatgggaaggggactatgcaagacgaggattgggcatttaatggactgcaataattttaatttagacggaaaacaagattgagaatggacggctcttggcacg

SEQ ID NO: 56149 - DNA, 298 bp, Gossypium hirsutum
  Clone ID: uC-gsronu33B031h09b1
catataaaataggtttgataattgttaaagacggggcatatttgagggattgcgggctggttaccctcccaacgaagggttctgacttacccacttagacagtcaggaacctcggaagcaaagtgcgcattacacgctccgagcaccatgctcctcatgatggcccgtgttcggttcatgtgctgtttcagcggaaagatcccttcacgtgcacatgataattcagctccgttatgccgggggggatacccgcatcgttgccgttcattgtttcacctccttcgcagccattcttacc

SEQ ID NO: 56150 - DNA, 547 bp, Gossypium hirsutum
  Clone ID: uC-gsronu33B032a03b1
cccacgtgtactggactgctgtcacgtattgaggcattgctacgtgatccaaatcctaattaccgtgcaaattatggagccgttgggatgtgcagtgagaacaagcgctaatactatgtgagagtgcctgtgatagtcgctcctagtgagagtgatggttgatgttttatgttgcagtgccatattcagagcgaatcgtggctatgttaccagagcttgtgatactggcacacatggctgtactgctgatggatagctcaacgctggggtggagttatatggagcgtcgaaggtagtgcaatgtgctgactaaataacaatgtacgaccgatagagacgcaaactaccaggtcggtattatgttgtgtgtggtaagaagaagaacgctgatacttggactggatatatcatttagtacgtcaagcgtatagaaacccgaagacccgtgcagagcgaacttgagtctcacgttgagagctacttggtgatgatgtgtgtgaactcgtagtttatttttgctaagttattaaaactatagtgctatata

SEQ ID NO: 56151 - DNA, 370 bp, Gossypium hirsutum
  Clone ID: uC-gsronu33B032b05b1
cccacacgtccggtctttttgtgattcgaacagcatctaatgaatcaatttcttgctttgttgtttattaaaaaaaaaaaaaaaaaacaaactaaaaaaaaaacaaaacttaatcccttcaaagaacactagacagacactgctacaaataaacaaggacttttgcgagccggggaagccaagatcacagtgagatggcgatcgaaccaaagtttcccagccggaaccgactaaactcataagaccatcaagggccagctacgctatgcacccatcagccaaacactccgcgcatggcgaaacaccgaggaccatcttaacaacaacaatacatgccatttcaagatcgcaaaaaaccctacaccaacca

SEQ ID NO: 56152 - DNA, 101 bp, Gossypium hirsutum
  Clone ID: uC-gsronu33B032d11b1
taatgatctaaagttggcaacaagaaacttcagacctgagagtcttcttggtgaaggtggttctggatgcgtttccaagggatgcctagaagaccatggac

SEQ ID NO: 56153 - DNA, 407 bp, Gossypium hirsutum
  Clone ID: uC-gsronu33B032g07b1
cgacaccacagcgctgcgggcgtcttgtttcttctcggtaatgaatgcgcttggaatcgtagcgtttgcattccgtggccataactctaacttagagattcaggcaacaatgccatcgacgtttaaacatccgggctcatgtttcgatttggacttggagcccagggtaggtaattctttaattggaatgtggcttttccctgttgacattggaggtttttggggattaagtccctcaaccgccacagttgggttgtgaatatcgctttttaatttttaccatctcgatatttcaagtggtctttgtaagtttgtttttcattttaggctgtttatatatgattttataatttttccaatctttttttttccttttttttcatttttttggtcatcttttacctttt

SEQ ID NO: 56154 - DNA, 310 bp, Gossypium hirsutum
  Clone ID: uC-gsronu33B032g11b1
agttctcttaagaaaaaaaaaaaaaataaaaaagaaaagaaaagtatataaagacaagtaccattactgacactgggcttgggatcttttggggggtggcggctgtcgcgtttccagggtcccgtcccctgtcgtggggtgttccgggggtcctgtggggtgtgttccattttcctccgtgcttccttgtgtccgcctgtgccgtttggtgggtccccgatcgtgcggtcattggcctatttgttgcaccgttctgtttggtagaaccctgcgttttccgctctttttcccctttgcgcgctttcccctt

SEQ ID NO: 56155 - DNA, 360 bp, Gossypium hirsutum
  unsure (1)..(360): unsure at all n locations
  Clone ID: uC-gsronu33B032h08b1
ngccctttctgtttttctcatggcctacaaaaaaggaggtgatttttataaaaaaataacaatataaaaactgaaaactgggcctgctttttggggggccctccttttggtccctcggtttttcaaccgaaggacatgcttttacagcaccattaataagcccacccacctagcttttaaccccgcctgaaatggtatcccggtccaggaggcccttggatcatgccccagaacggaggcggtggcccaccccttcccccccggtgaatggacaacgtttggggtatttgaccatagttccttttactggctgtggcatctgtcgaacggaaagtgaaaaatctccttcatggttttaag

SEQ ID NO: 56156 - DNA, 232 bp, Gossypium hirsutum
  Clone ID: uC-gsronu33B032h09b1
ctgtgtttgttttaccctctgaagacattcccgattgaactgttacatgcattttcaaggctgaaactaggataaaaagaaattttacgcagttctttcatttcgaggggtgagaaggctcatagattttgtttgtggaatgtggttttgggacaggtataccgggttgcatgagtagcttgtttggaagggatattatgggggcgtctttttaaaaaaaaaaaaaaattaa

SEQ ID NO: 56157 - DNA, 458 bp, Gossypium hirsutum
  Clone ID: uC-gsronu33B036a01b1
gaatgcttggtggacatcggccatgcagatcatgtatttttcgctgacccagagacaagcctgcagaaagttcaccctaatttcatcgatgtttccaagaacaagttgagtactccagatgataaatgtgggagaccaagaccaggtcagccctattatccttgcgtcccagaccctaatgatagcaaaaaaggtgaacattgtaagggaatttacaaagacagcaatagaaatcgtggatgcaagtagaattatcttgcagattatggatttttttagttattgtttatgtaaactaaataaagatttttgctattagtttttgtagtttttttgaaaattatgaattttaattcgatgaaatttaatatttatatttttcaaaaaaaaaaaaacaaaaaaacaacaccacaaaactaataaatactttcatcacttatttcctttctcttaaacct

SEQ ID NO: 56158 - DNA, 115 bp, Gossypium hirsutum
  Clone ID: uC-gsronu33B036g06b1
gacatgccctgtagcggagcattaagctcggctgatgaggagggttctcacggtgggggcgatgaacttgacagcgccatagagccagtttgtctacctatagagaatatctttt

SEQ ID NO: 56159 - DNA, 803 bp, Gossypium hirsutum
  Clone ID: uC-gsronu33B036h07b1
tctatgcgtccgaaaaaaaaaaaaaaaaaaaaggaaaaaatataaaaaaaaaaatataaaaaaaaaaaaaaaaaaataaataataaataattttaaataatttaaaatggggggggtctttttttaggttccaagttttctttcttggttatgtaaggttatagtttttttttggtgtgacttaatttaaatttattggccttgtatttaaaccttcgtgattgggaaaacctaggggttatccaatttaatttgtttggtagaacattcctttttctccggtgggggtataatcaatggggtccttaacttatttgccttttcaaaaagtttgtgattcttgatatggtgattgggcctccctctttattggtcttttaatcacgtcgctttttgttggtaaatctccctgggtcctttttacttttcagtgcccttaggcccgttttttggttttttttcctttttttttttgccacgttggtgggtttttcccggtaagttttaaattgggggttattttttgggttcctgttttgtgtttttttggatctttgccccaaaaaatttggttgggggagtgttattttgggggcctctcctataaaggtttttcgccttggtattggatacatttttaatgggcttttttcaattggaacaggctactttttggtgtttttttgtttaagggttttccatttggttttgaaaaaatgtttaaaaaaaatacttattttaaaatttactttctttaagttttttggaaaggtggacctttttttttttatcaaaatgtttct

SEQ ID NO: 56160 - DNA, 395 bp, Gossypium hirsutum
  Clone ID: uC-gsronu33B037a03b1
ccgcggacgttaccgccgggaccgacccggccgactggattaaatatgactacagcgagcgtggtggcgcgatgaccagctcgctggattatgatgaccgctagtgaaagatacgcataatgacacttatcgcagaacctgcgagagtcaccatggtgcggaggacggcgtcactcatgaaaggctctataacactgattatgaggtgctgagttggctagaagccagctagcagaatgccgatagctagctgactaatggaggccagaagctggtgttagatgagaggagggttggactgttgaggagagtaattatgaaaaggactggaaagacactgtgaaagaggaaatatgaggtgtttgcaaggtcatcaaggatgtcttaggtgacaa

SEQ ID NO: 56161 - DNA, 218 bp, Gossypium hirsutum
  Clone ID: uC-gsronu33B037a09b1
tatagtttttatatcactctaccaagagtggtggggaggtgtccagcttgaaggactgtgtgacccgtactaatgaggctcaaaatgacatctattacattacctggtgagaagaaaaaagttgtcgagacagtttctattcttgtgaagctccataataaaggttattgggtgcaccataaagttgatgccatggaagagtatgccggatggcattt

SEQ ID NO: 56162 - DNA, 131 bp, Gossypium hirsutum
  Clone ID: uC-gsronu33B037d05b1
gctatatctgcctgcgaacattacgtatgtatggcttagatttatagaaaacggctctatctttgtttggccggtagccttcagacaaactatactgagcgtactctagagctgatcctggtggacaaaaa

SEQ ID NO: 56163 - DNA, 156 bp, Gossypium hirsutum
  Clone ID: uC-gsronu33B037h08b1
tattgttaagctggcacgcctgcgtgtaccggccgcggacttactgggtcgaccgcacccagtccgtattttcataataagcagattgtaatgaaaatggggtgggtgatcgactgaatgggaccattgttactgaaaagcggcgtcctggctgga

SEQ ID NO: 56164 - DNA, 279 bp, Gossypium hirsutum
  Clone ID: uC-gsronu33B038g06b1
cccactcgtccgaaacattgtttttatcccttttttcctggactccttacaaatctggctaaagcaatgatgatgaagcatgagtcaagaatcagcttgaaaatgcaagatccggtctcattgaagtggttgttagagatttataatagtatttgtgattcaaattataacacattaataatattaattaatagtattaattagtgagatttatattgtattgggacaaggagttgatataagaattaatttagtaaagaattgttgctattatagatg

SEQ ID NO: 56165 - DNA, 196 bp, Gossypium hirsutum
  Clone ID: uC-gsronu33B039a02b1
cccgagaccaaacgtttcggttatacggggccaatgatgctgaactaaagggccgccacgattcattcactaaggattccgacccagacccacacgtctccgcttacaataactaataaaaagcgaaaccaaagttccagtggcttatacccacattttccaataaattcgtcatcagactgtgtgtcggactcct

SEQ ID NO: 56166 - DNA, 263 bp, Gossypium hirsutum
  unsure (1)..(263): unsure at all n locations
  Clone ID: uC-gsronu33B039b08b1
taataaaaggagcagcttgacctcccttttgtgaagaacccataatcttagagatggatatttgatagatttccctttgatctccttttctctttaaagaaaaattggttttcgatttcattttcaaatttatatattttggattagatttggttgnttttagggaaaaacaatggaaagggcaatgttaaccccagcaaggaagaggcttgatgagagactttcatgagactacagcatgatccatctgctggtattagtgt

SEQ ID NO: 56167 - DNA, 219 bp, Gossypium hirsutum
  Clone ID: uC-gsronu33B039e11b1
gttagtcactacctctacccaccgtcgtaccgttttcttttcttttctttttctcttaatattctgtctagaactctccattttctcttttgctgtctttggtttctctttatttttcgtctctaaatctctgcatcatcatcgatcatgtctcttttattcttcctactgctgttcttagccatgactcggcctttcaagcgctctttattgctttat

SEQ ID NO: 56168 - DNA, 750 bp, Gossypium hirsutum
  Clone ID: uC-gsronu33B039g06b1
tgtacatggaatccagcctgatggccagatgccaagtgacaagactgtcggaggaggtgatgatgcttttaacacctttttcagtgaaactggtgctggaaagcacgtccctcgtgctgtctttgtggatcttgagcctactgttattgatgaagtgaggactgttacttaccgttagctttttcacctttagcatcttatcattttcatggttgatccttccttcaactttccccgtgtccactactcttttgccctaacagatcctattttttttttttttcctcttttatcttatttttgtttattttctccttccttcctcttattttattctttttttctttcatctccttttccttctttttttctctcctttctctttctcttttctattttcttattcttcttccttcactttttttcttcctattctttttcttttcttttctatttttccactctttctttcttattcttcttatctctttatttattctatttcttcttacttctctcttctttttttcttttcttttttacttttttttattttttctattttctcttcttttttcacttatttacttcaccttcttttcttcttccccttctctttctttcttacttttactttatcttccttcttttcatttctttccctttcttctcttttttttttttctctcttcctctcttttcctctcttcttttttttttttcttttcattttttttcctcctccttttc

SEQ ID NO: 56169 - DNA, 105 bp, Gossypium hirsutum
  Clone ID: uC-gsronu33B039h11b1
ctcacgcgtccggccggacaagaagtctgtctgtattacctagcccgaggtatagaaatcgtccctttggacatagacgtagattaaatctaagacaatttaata

SEQ ID NO: 56170 - DNA, 362 bp, Gossypium hirsutum
  Clone ID: uC-gsronu33B039h12b1
ataattataaaaagaaaaaagaaaaaaaaaaaaataagaatggaacaagaatatgcataaacggcatacatggaagatataaagggaataaaatgaacatgttccaagagttggtcgaagcactgccgttgtgtttatgaggaatcgtgtacttaagtttgtttagggggggggcccgcttgttgggttctcctgggttcccttagccgctttggggggccgctttttttcttttttgggggcgcccttaaaaaacttttggggggcggcgtgttttttctcccgtggtgggggggtttaaacctttgggtggggccccctattatttctctctggggggtcgatttctctttttttttggt

SEQ ID NO: 56171 - DNA, 110 bp, Gossypium hirsutum
  Clone ID: uC-gsronu33B040b06b1
aggcaccgtgtccggaatcgaccttttcgacccactcttccgaactggcctctgtaatgatttattttcaaggatgtttgcctgcaaggcctatgaccataattacccct

SEQ ID NO: 56172 - DNA, 118 bp, Gossypium hirsutum
  Clone ID: uC-gsronu33B040c03b1
ttttccggcctcggactcattcgtaggacaactaatggacaatgagcacgaaaagcagtacaagttctccgatgttgaaccagtggaaaatgaagctttagatcacaaagaagagatg

SEQ ID NO: 56173 - DNA, 189 bp, Gossypium hirsutum
  unsure (1)..(189): unsure at all n locations
  Clone ID: uC-gsronu33B040g09b1
cgacccacgctcnccggactaataacaagaatcctgctgattacagacctgtcataactcatcaggctctactggcgattctagatagtccagtcaataaagctgggagattgcaagctgagtatgttagaactgggaaaggtgtactttttgaagttaaacctcatgttagaaattgcggtccatata

SEQ ID NO: 56174 - DNA, 486 bp, Gossypium hirsutum
  Clone ID: uC-gsronu33B040h02b1
gaggcgccagttccgggttcgaccttcgcgtccgcgttttcgttctcccacgcgtgcgattataacaacttgcactttttatactcaaactccattccgttcctgaatatccatccgggttctgcatttcttgtcttctgctttccttctcataatttcaccatgtctgtcattggagaggctgctttgtctgtgtttctggagctgtaggggggcaagttgctcgactctgcactcaactttgttgctgatcataagtaactccacccgcagctcaagcagtggaagtccatattgcccgatgtccaagcaatgttggatgatgcagaggagaagcagatcaagaacgaaagcgtgaagaaacggttggaggatctacaggacttggcttacgatgtggatgacatcttggatgagttcgcttatgaagagttacgcaacaagctcaagaaattgcaagttcatgccagcactagcaaggcattg

SEQ ID NO: 56175 - DNA, 775 bp, Gossypium hirsutum
  Clone ID: uC-gsronu33B041e08b1
cttactaaaaattaaaaaaaaataagtaatatttaatttaaatataaataataaaaaaccttatagggcggccgcttttgtggtcccttgctttcttccccttttcttggcgccccttttctgttttcttgggtccccttccttcagttccctggccgtggttttccatcggggtgcctggttttcccttggcgggcccccttttttcccccttgcgccgggttcccccttggcttgctttcctcttttccccttggcctcttccccttttttccctttcttctgttttctccgccttggttctcgttggttccccttttccctacttttggcttactctcttgttttttggttcccccccgctttttattgggaccccctgggttggttttccggtctctctctcttcttatccttcccccttttttctctccctttttctccctgcttttgggttttttggggtttctttttttcctccttatttattttgtccttcgttatgacttttcccttttctcttgttttttcctttttctctgggtgggcattatcccctttctttccttttattttttccctccctctttccttctcttcttctctcttttttttttctttcctttccctttttttttctttcttttccctccttttttctcctctctccccctctttcttctctttttccttccttcttcttttattttcttttccttttctttctttttttttctttcttcttttctttttttatcttcccccctctcttctt

SEQ ID NO: 56176 - DNA, 195 bp, Gossypium hirsutum
  Clone ID: uC-gsronu33B041h02b1
ctgaattcccgacccaacccacccgtgtgtaatatgaatggcaatgcgtattctcatccgaatgtcactgttctacatagcattctcacgtactgttcaccgtgccttttctgtgatgaaataaatgatgccatggtgatcgtttcgaccagttagagcatggatatgataccaagtaagcagtttaatttcgta

SEQ ID NO: 56177 - DNA, 185 bp, Gossypium hirsutum
  Clone ID: uC-gsronu33B042a02b1
gcctttgtcctaaatgtttttgattcttttgtgaattaccttatatctatagcagtgtcaggtctataaaatattcattgttatggtaatgtttcattgttgaatttatatatatgcacatttcatacttttgtcaatattattcttatgttgaaccgtactattgttttcttcatctgcatatt

SEQ ID NO: 56178 - DNA, 214 bp, Gossypium hirsutum
  Clone ID: uC-gsronu33B042a03b1
gaattatcttgtactattactgaaactgagcctcagaagtttgctcttccagtggattccgaacataaggcgactgagtttcatttgttctcggcggctgcaccgtatatgctaagcgtttcaccttctcctggttctcatttctttttttgctcctgttcccacttatgcttgtttcactcttccttctttttcctctttttctttttatttc

SEQ ID NO: 56179 - DNA, 108 bp, Gossypium hirsutum
  Clone ID: uC-gsronu33B042b08b1
tgtttactccagctttcgcgtaatttcatttatgtctcttacctttactttaccttaaggcatagataaccaaaaccctcaccttttgacactctactatttaataat

SEQ ID NO: 56180 - DNA, 278 bp, Gossypium hirsutum
  Clone ID: uC-gsronu33B042c11b1
ttgtttgcttctttacaatcctgtattgctcaccaaatctttgaaaaatcaattgaaatccctcggaaatattcaatttattatagtcgcctataggcaacacttgtagttttttacagtttatttgaatgaatacccataagtctttttttatttatccctctggttcttttgtctgtttttcatatgaaagtttgtttgttttttttttattcatcttttttatttttttttattttttgttttttattctttcctttttttttttctctttttta

SEQ ID NO: 56181 - DNA, 154 bp, Gossypium hirsutum
  Clone ID: uC-gsronu33B042e01b1
gtcttttttagttgaaactgttctcagaaacagactacatcccaaccccatcgttcgatatactacaggaccggctaatgttacccttaacaggactcggtgtattaccaacttcatcttgcacctttcgcccgtgtcatctgttaggctatcg

SEQ ID NO: 56182 - DNA, 343 bp, Gossypium hirsutum
  unsure (1)..(343): unsure at all n locations
  Clone ID: uC-gsronu33B042e10b1
tcccacgcgtccggtaaatcttactgaaagaatcgatttcaataaaaaaaaaaaaaaaaaaaaaaaaaaaaaaaaaaaaaaaaaaaaaaaaaaaaaaaaaaaaaaaaaaaaaagggnggtcaatataaaaaaaaaaaaaaaaaaggcgcttaaaatgagaggccccatctttaaaaacgagccaccgaaataaaattaattgcacaattgaatcacacaaatataaactgaaaaaaccatgtttttacccaacttaatggaaaaaaacatgattccactaacccaagttgccgtaaaaaaaaaaaggcctgaaccaaacaggttttaaaaaaaaatggacatc

SEQ ID NO: 56183 - DNA, 852 bp, Gossypium hirsutum
  Clone ID: uC-gsronu33B042e12b1
taattttttagatttgtcattacttagtaatagtgtaactaaaaaacatgacatgaacttgaatttaataaaataatttaaacaatattaataattagatttaaattttaaaatctaaaataaaaaagactaaatttaaaagaaataaaaatacaaaaactaaattctaattttataaaaaaatacaacaacttaaaataaaatttaaccaaaacaaaagccaaaaactccaaaatctaccataaaaaagcaaccccccatccccttattcctttcaaaagcattggggacttggaagtgcaaagcttgctcacatttctcaagagctgtttttagtgtttataaaaaaaatcctcccctccccttcttgttctactttcctctctaatcccttaaaaaactcattgctttttttcttattaacacccatattatttgccccatctaatcttatctttttctttctggatatggtttacatttgttttttttttcagttttttttttctttttttttttttttttatatttatattttattatttttaatttgggggtctgttttggttttttagttagctcttttctttttattatattatttattgttactataataatttctttcgttttttttttttttatttaaattcttgtacttctttattctttcttatttttttttattttatttttttatattttttatatttttttattttgttcttgttttttttttttattcttttatttattattttttttttatttattttattttctctattattcttttttttttatatttattattttttattatttttctttttttcattattttttttgttt

SEQ ID NO: 56184 - DNA, 416 bp, Gossypium hirsutum
  Clone ID: uC-gsronu33B042g04b1
atattccttcatacagccgaggatatcagcgtcaagctggaagtggatttgttatgaacccagtgggtgatgctgtcatagacataagagtatatttatgttttttttatagattatccttttttaatttgctgatgaggttataagtattggtttttataattttttatatatttgttttatttttgttgttttatctttttccacttttatatttatctctttatttcatattttctaattttatgatttatattcatttttttatttatttactttttatttatttatattaatattttaattctctatattttttttttactttctctatttaatttattcctatttaattttgtatcctcttattttaatgtttttttatatttcttcttattaatctcattgtctttatc

SEQ ID NO: 56185 - DNA, 422 bp, Gossypium hirsutum
  Clone ID: uC-gsronu33B042h09b1
ttcttttatcccttttatcctgctcctttgccaaattggtctcacctttcatactaggcaaagcgccaaatcgggaacccgatctacgtagtgtgttactctctataatcataagaacctttttaacgagaatttgcgttcaatttctcgtttgtgaaaggatacttgttatctacttttttattttttattattttttttcattttgtctctaatcatattaatatttatttttttaaactttttgtttttttttttatttttttttatttcttttctttgtttttctatttcttacatttttatcactttctgcaaaattttttttaatatctatctctgttttctaactatattatttttttattttttttagtatttaatactttctctctttcccttttatttttattttttctatt

SEQ ID NO: 56186 - DNA, 255 bp, Gossypium hirsutum
  Clone ID: uC-gsronu33B044b04b1
cccactctgtccgcttgtgcttgctagtgatggattatgggatgtagtgcctaatgaggaagcctgtttcctttgttcaagagaaaaaaaaactgttaacccttctaaaaccgctaaatttacttgcctttaattttacgcatatttcctactatattacatgcattgcctaaaatatctaacttttgacattggtatattcatttcgcattccttttcccctacatatatttctatatttttattttaacttac

SEQ ID NO: 56187 - DNA, 150 bp, Gossypium hirsutum
  Clone ID: uC-gsronu33B044b08b1
tttcatcgtacgggctgcggctgctgctgataacggggctcatcataatgtacatggagctcataaagttgcacatggaggatactatggtaatggtaacttgttaaattccaaaatcttatatatctaagaatgttcatattatttata

SEQ ID NO: 56188 - DNA, 324 bp, Gossypium hirsutum
  Clone ID: uC-gsronu33B044d02b1
agcgtatctctttcatttgcccgcactagcagcagcagcgccacactttttacagtgctgatcaaccatggcggagcagaccgagaaggcatttataaagcatcctaaagtgttttttttgcatccatgaaatttggttattgcttctgactaattcttgttaggtctttcttttattatatatttttctttttcatttctttatcttaataattttttcttctaatattatctattatttttttttaataataacttttcttttttatattttttttcttatttaattctacattattttctttttctctaattattatatct

SEQ ID NO: 56189 - DNA, 289 bp, Gossypium hirsutum
  Clone ID: uC-gsronu33B044d11b1
tgagtcattgagtgatggctcacttagttaaaagattgaatataacacaacagaacagaatatgttttccgtagtctgatgtgacattaattttaccatacttattttacattaatattttattttattttacttcaattacgaatatttatatattatcgttacttcatataaaattattacttatttattaaatatatttatttctatataatatataatttaatttattactttttaatttaatttctaatttaaatatttttcacttattacttcttttaaaatt

SEQ ID NO: 56190 - DNA, 417 bp, Gossypium hirsutum
  Clone ID: uC-gsronu33B044e09b1
ttcattctttctcattacacgtcgacaatacgttcgcaacaccgtagggaagcacgactaggatgcttacggcgaataactgccgacagagaagcttgaacgttgagtcttagtgaaagaaggacttggcttaagggaatctgaacggctcaaagtccgaccactactacatagctggtgacgcaaggtacactgctcaatgcagccataattgggtacaaacagtggaacgagacatgcgagaggcatactagctacacaggacatcaactactgtgagctgctgcttcccatctgatgatcttcttgccaagcaaacaaggaactgagaagagtccttgtttgcagagaatgtgacaggttggatgttgggattccatgaaaaaagcagcagcagggaaactacaggggtacata

SEQ ID NO: 56191 - DNA, 117 bp, Gossypium hirsutum
  Clone ID: uC-gsronu33B046a07b1
tcgcccatgcgtgcgaaacagctttgtgtttccgataaacccttttgtgcctattcttggccttcatcaagatttgatgagagcacgtccactgatgatgcacatattgatgaaatt

SEQ ID NO: 56192 - DNA, 226 bp, Gossypium hirsutum
  Clone ID: uC-gsronu33B046a12b1
actaaattgtagaaatacataaaatctagcacaagagttactaaacgaagaagaattgaagggggcggcccgatatgaggctccttgtttagagaccccagccttccatcccctagctttcaaatagagacccctaatttaaagtaactgggcgtcgtctcactagcggttccatgctaacgccctcgtggatacaaacctatagcttctctaatgaatccccttt

SEQ ID NO: 56193 - DNA, 226 bp, Gossypium hirsutum
  Clone ID: uC-gsronu33B046d04b1
atgtcagcccttcccatcattctcttgcccccgattccaggtatagaccctctactatgctaaaatctagaattttatccctgcactttaattcggtataatttaaccccctttacttttaataatgacgtaagtagcttcgaattaataacaccattaatgggtgctattaacgtagtgacatacaactttttcaaataattgtaattaagctttctattgacat

SEQ ID NO: 56194 - DNA, 259 bp, Gossypium hirsutum
  Clone ID: uC-gsronu33B047a05b1
ccctgctttgcgtccacacgtgcgaacctatatgaggaagatgcagtcataaaccaaagtgcagactcgatcgaaagaatataggcaaacttcaataaaggaaggaacccaccataccaacaacggtgtgatttttgtcggaaaacagttcgaagatggccggaccttggccgattacaacattcagaaggagtccacccttcatctcgtactccgtctacgtggtggcatgcagatctttagtaaaaccctgaccggc

SEQ ID NO: 56195 - DNA, 344 bp, Gossypium hirsutum
  Clone ID: uC-gsronu33B047a06b1
cccattcttctcgcaaaatcctagacaatttctggaggtgacaccatgttgcagcactaattgggtcccacctcttgtcactttacccttgctaatatttgttgtccttaaacttactgtgcaaggtttcttccttttgccccctgtttaatcaatacatcatgtaccgtcctttttagattcgatttaagattcacagttgcatgattttgcggccttaatatagcgtattggttggttgatgaacctgataaaaggagatggtaccgagagttttttgttcttttggtttcctgtcaacagagagatgaggaaatcttatgatgaattcgatctactccaac

SEQ ID NO: 56196 - DNA, 275 bp, Gossypium hirsutum
  unsure (1)..(275): unsure at all n locations
  Clone ID: uC-gsronu33B047a10b1
tccgtctcgtccacacgtacgctgaccggcaagaccatttcttttgaagtcgagagttccgacacgatcgacaacgttaaggctaaaaccctcgacataggaagggatcccaccagaccaacatcgtcttatcttngccttttattcgctcgaagatggccggaccttgtctcgttatcatatttttatagggcgtttaccctccatttagccctgcttacaatcgcgtgctatcaacatcttattttttttcctgaccggcaagaccataactt

SEQ ID NO: 56197 - DNA, 260 bp, Gossypium hirsutum
  Clone ID: uC-gsronu33B047g07b1
cccattcgtccgctcacgtacttaaatagagaccaccttgtctcctacgagatcaagcgtgctctagccatgattcttgccacattctatactataacggtagctctcgtacgtaaatcccctgtgagtagctgcaccagcaagggacaggcaccggataggtgccccacctctaataccaagtgcatcgcagccccattaggccctcattccggaatcgtatgcgatatggaacaacctttgagccctagatttgcgag

SEQ ID NO: 56198 - DNA, 165 bp, Gossypium hirsutum
  Clone ID: uC-gsronu33B047g12b1
ttctctcgtgcgagtaatgggaggggatagaggggtgcacactttggatgagggttctgaacacaacctagctaaagactgttgaatagacattgcggacaaggtttttaaagtgactaatctcttggtggaccaaccaggtggtgttgatgtcttgttttcttc

SEQ ID NO: 56199 - DNA, 197 bp, Gossypium hirsutum
  Clone ID: uC-gsronu33B048b10b1
tttcggcttctcttccacccacctcctttgtttcacctctttctttctttctcccctaaaccatcatgaatctcatctataggcttagtcctaagcgttcttttttcgatctaccattatcgatagattctctcgtctctcatgtttgacccctcctcctatagtttcgtcttctctcttctctctcttttcttcct

SEQ ID NO: 56200 - DNA, 203 bp, Gossypium hirsutum
  unsure (1)..(203): unsure at all n locations
  Clone ID: uC-gsronu33B048f09b1
tcggcctaatacggctatatagaaatatagaaagcaagaaaatagtctcctttttttttctcttnttctgcaaattcttttctacaacaccctaagaatatccacgtcttacttagaaaatctatgtgtacagcatcttctatccctttatccatggattacactgagcctcaccctgcttccttttttgagcctagtgagtt

SEQ ID NO: 56201 - DNA, 270 bp, Gossypium hirsutum
  Clone ID: uC-gsronu33B048h04b1
gcaatgatatcgttcacgcactcaaggccgacctgacgcagacttacactgatcacgcggtgagccctgacgggcgtttaaaaacagtctcggactagacatccgctctcaacagatccaaaaacgtacctcatggctacttcaccaggctaacagctgatgaagctgctacactaactgaacacacccgcaatcttttctgcttgaccgtgggggatagaactactgcacacaactagaacaccagagagacccgggggaggaaggagc

SEQ ID NO: 56202 - DNA, 315 bp, Gossypium hirsutum
  Clone ID: uC-gsronu33B049b03b1
ccttttcttcctctttcacgtcagaaactcccaagacctatacgattaaggggtgttgtcagttatagctttgactgcaccagtcgaggccaccttaccagtcttgaatggcatggatccttcaaagcatgcatggcatgttgtaaccgataaactcaatcatggagcagtgaacatgtggcttctgatacatccccctggagaggccaccattcctgttgaaaatgttgacgaatccaagtggcttaaatgatcctattggcctgttttacggccgcgtaagactgcttcactgaaggtgttttactttgaggc

SEQ ID NO: 56203 - DNA, 254 bp, Gossypium hirsutum
  Clone ID: uC-gsronu33B049e05b1
ccctctcctcttaatggggactcattcatacattatcaaatcttacaaacacttgggtcaaagctctccttaatatgaggcatggccacacagaagctaaagtccatattttagtatcaaagctgaaagatgctgaagcgtagtcatccgtccacgatcaagtttcaaagactctaggatccgaacttgcttacatgatcaaatctcgaggataagtgcttaaagaaacattttttaacctcagcattaatgtg

SEQ ID NO: 56204 - DNA, 337 bp, Gossypium hirsutum
  Clone ID: uC-gsronu33B049g02b1
gtatcctggtatcaactgctcaaagcatgactgaacgcccaatgaagggaatgcttactgaccctgttaccattcttaactggacctttgtcagaaatgatcagcccagatttcagacttgctaccagattgccttggccatcaaggatgaagtggaggaccttgagaaggccggtataaacgttctcccaattgacttaaacctgctttttagagaagggtctcctcctcttaaagacccagcactcctcatactttacaattctcatgtccaccctctttttcgatcatctccctttcttatctcaccaactacatctacacttctcctatccct

SEQ ID NO: 56205 - DNA, 103 bp, Gossypium hirsutum
  Clone ID: uC-gsronu33B049g09b1
tcggattaataaaggatgaattgcattgaggaagtatattcactaacctttacaccttcatttacaaaatgagaaacaatagatctacattgataaatagata

SEQ ID NO: 56206 - DNA, 237 bp, Gossypium hirsutum
  Clone ID: uC-gsronu33B050c05b1
ttcaattgtacgagatgatttccttagatagggagtgggtggatataactacttttttagggcaatagccattgctatatgctgaagatacgacgtttacaccgtggggagcggtgctgccttgggatgtacaggattgtgagaattcaggatgatcgatttggatgatgctggtcaatatcgttgaagaagggcgcctcttagagactggagatgtacaagacctgataagaatgg

SEQ ID NO: 56207 - DNA, 179 bp, Gossypium hirsutum
  Clone ID: uC-gsronu33B050c06b1
ttcacttgtacgacttggtttcctcagatacggacggagtcgatataactacttttttagtgcagtagccattgctatatgctgaagaaacgacgacgacactctatggagcgggaatgccttgggatgaacagcgatgtgccaacttcaggatgttccattgatagatgcttgtcaat

SEQ ID NO: 56208 - DNA, 236 bp, Gossypium hirsutum
  Clone ID: uC-gsronu33B050c07b1
tttaagcgtacgacatgatgtctgtggttatggaggaaggcgatataactactgtctttgggcaatagccattgcaataggctgaagaaatgacgactacaccgtgtggagctgtacatgcctagggttgaacaggcttgtggaaaattgaggaggttccatgggcagatgcttgtcaatatcgtcaagaagagggcctcttagagtctggagatgatcaaagctgataagaaacg

SEQ ID NO: 56209 - DNA, 456 bp, Gossypium hirsutum
  Clone ID: uC-gsronu33B050c12b1
tccacgcgtccgaaaaaaaaaaaaaaaaaaaaaaaaaataaaaaaaaaaaaaaaggtaagaaaatataaaaagaaacagaattacgaacacgtgcatgcaacatcatagctcttttatagtgaaacctaaataaagggggggggcctttttggggcaccattttttcttccgggtactttggagttattaatttttttttggtggcaccaaatttaattttttggggctgttttttaaaccgtggggtctggaaaaacctgggttttccccattttatcggcttgggaaaaattccctttttcgccgtgtggggtaatattaaaggggcccgccctggtggtttttcccaaagtttccccttcttttttgggaattggtaacccccctttatttggctttttaagcggggtggtgggggggtttcccccctttttgccctttttttttgatgggcc

SEQ ID NO: 56210 - DNA, 236 bp, Gossypium hirsutum
  Clone ID: uC-gsronu33B050d07b1
ttcacgcgtacgacatgatttccacggatacggagttaggcgagataactcctttctttgggcagtagccattgaaatacgctgaagaaatgacgactacaccgtatggagcggtcatgcctatggatgaacatgcttgtggagacttcaggatgatccactggtagatgcttgtatatatagtacaagaagagtcccacttagtgaccggagatgtacaaacctgataagaatcg

SEQ ID NO: 56211 - DNA, 377 bp, Gossypium hirsutum
  Clone ID: uC-gsronu33B050e08b1
tccaaatgtccgacataatctccacggtcaccgacgtcggcgacataaatccattctttgggccgtggccgttccaatacagtgaagaaatgataccgacaggttatggagcggtaatgctctcgcatgaacatcgatttgcacactaacaggaggatcatccgatagatagtcatatatatcatacaagaggctccgcacctggatacgcggagttgtcaagccatttgaagaaacggattcaaatgggatacaggtcgggcactttcttgcatgctccaacaagaagagcgtgtgctccatatggatttagctgccgatgaattactcatcaaggtcgtgcaaatcgaagttgaacaggaaactttagctatgct

SEQ ID NO: 56212 - DNA, 312 bp, Gossypium hirsutum
  Clone ID: uC-gsronu33B050g10b1
tatttgggttcatgactcgatatctaaagaagctagtaacacacatgattgtggaagaaaggaatctgatctgatgtgaaaatggcttacctggttgtttgtgacgttctcgccaccaaaggattgatgtttgactggaaacgatttagaaggcaagcaagtttaatgcttccaaaatctcttgttatttataatagatcccaagtatgttatgctcgtacttccaccctacggctggaaatagttgcactgcagcagtgggttgaattgtatgtttatgtcaagataattcaagagcctcatttgaggatc

SEQ ID NO: 56213 - DNA, 296 bp, Gossypium hirsutum
  Clone ID: uC-gsronu33B055e05b1
aaaattaaaattataaaaaaaaaaaaaaaaaaaaaaagaaaaaaggaaaaaaaaaaaaaaaaaaaaaataaaaaaaaaaaaaagacaaaaaaaaaaggggggggccgttttaggaggcccagggtttcttccccttgctttgtaaccaaaaaacttttttgggggggtcccctaaataaaattaatgggcggtcggtttaaaaccccctaattggtaaacccttggggtccccaaaattattggcctggcggcaattccccttttgggggggggggaaactcccgaggggcccccc

SEQ ID NO: 56214 - DNA, 129 bp, Gossypium hirsutum
  Clone ID: uC-gsronu33B055h05b1
cccactcttccttccaaaacggacttcgtcagggaaccgatgctttaaactttaaacgacgggttcataaacatgctatttgcggcatacccctcccctttctcatattcactatctatcccctcattc

SEQ ID NO: 56215 - DNA, 338 bp, Gossypium hirsutum
  Clone ID: uC-gsronu33B057a01b1
cccttatcatgctccaaccgagccagtacagctcggcggcgttttttaaggtcattagctttatgttaaccgccggaaaagaaagacaaaagctacaccgcattaaagcagctgcttcagatcggagccagctgctattcgaacatatccatacaagtgaatgcgacttaaactgagaaccgagcagaatgaagaattccgaaccaactataaaagcaatcattttgactgctaaaccaataatgatagatgcagcgcatcaacgattgaccctaaaacgagaacagaatcacgatttaacctgctaaaaaggaaaaatctgcttacaattacaacca

SEQ ID NO: 56216 - DNA, 381 bp, Gossypium hirsutum
  Clone ID: uC-gsronu33B058b07b1
ttctttaaagacagaggtggagatcatcaaggaatggaatgtttaactgcaagatcccatcttaaaagtcgaaaagcaggatagtgcaattgttgagtgggataggcgaatcttgcataatcgtgatgttctgtcaaggattgagattgacgaggcaaaagttgttgagacccaagctagattggagccgacaactgcccgtaaattgagactcaccaacaagaggtcgataacgctttgcaaagaatggaaaaagaagcagaacgaatctataaagatgaccatggatcggttcttgaggatgaagctgcgtcaacaagagaagcaatgtatgatcaggcagaaaatgtgtagagggaaccggagcctatgaatgtacaa

SEQ ID NO: 56217 - DNA, 328 bp, Gossypium hirsutum
  Clone ID: uC-gsronu33B058d12b1
ttgttagacccacaatcaggcaaggaccggggagcgcactttgaacgcacccaggattaatagcaggaccatgtgagaacttatgcaagattcaagataagcgggaatctggaagcacatgttggtactgacgaattagtaccgaactaaatgtaactgaaggctaagtaactaggaataggaggatgacccacataacagcatagagagataaagggtacgggtatatttaaatgcacaatcatggactgagtcccaagagagtgtgcaccaaaggcaaatagctgctcaaaggttacaatgaaagtgatcgccatatcgctgggac

SEQ ID NO: 56218 - DNA, 383 bp, Gossypium hirsutum
  Clone ID: uC-gsronu33B058e04b1
ttattaaaaaaaaaaaaaaaaaaaaaaaaaagaagaaatataaaaaaaaaaaaaaaaatggaaaaaaaaaaaaaagaaaaaaaaaaaaaaaaaaaaaggaaagaaaggggggggctctctagtggggccacctaaattcacttcactggccggcgttttacatcttctagagtgggaaaaaaatggagttacctacccgactttttacaagggaaatcccggtaaaccccggggtatacccaattaaaaggccttgaaaagatcgccctttttaacaattggggaaatatggaaaggggaacgggacgggccctgtttcgaaacatttagtcccctttttggggtggttacgcccactcgtgacggtcccttttaccagggcc

SEQ ID NO: 56219 - DNA, 352 bp, Gossypium hirsutum
  Clone ID: uC-gsronu33B058g08b1
tcttatatgctgagcctcaacgtttcgaaagggacatgttaattcgaatttcgctgaccccaaatcctggctttcaggtgataatcgcaacatcatgaacggtaactcctccccgactcaccttccaactcactcttcactcacttactccaacgccaatctggatcgcgtcctctacaacgatctcgtcgagatgatccctctcgttcaatccctcatcgagaggaaaccaagtagttcatttacaaggcgtggttcgatgatatacaccaagaccccttcaagggaatccttatctggaaatgtttactgatatgaaagggaggaatggagctcagtcaattccaatgag

SEQ ID NO: 56220 - DNA, 422 bp, Gossypium hirsutum
  Clone ID: uC-gsronu33B058h02b1
gttcttaagcaactcaagaaagtggctgccaggggattttataccgacactgcttattcaccgccaacggaagggccaacccatgatgagatagacatgaaaatcttagggaacctgagcagtgacccttacattgtacacaccaaagagtttacccaagggaacggcaacagcagaccaacagttcaaatcgttggtttgacactacatgaaacttccacacctattccaacacctggaaaccccaacacatcattaactcggacgaaaacacccccaatagagtctgcaaaaaggctgaatccattggtgtaccattccgcaaagagccaacccatgaagatatactctagactatcgaacgctgatgaaagcggcacatggagtggattagggaaaactgattgagacaaagcaccttt

SEQ ID NO: 56221 - DNA, 356 bp, Gossypium hirsutum
  Clone ID: uC-gsronu33B060d01b1
gcgccctcgcttccgcccactcgcatgtgctaacaggacgcaagggacacctatggaacacgcacttgaggaggtcactcatctacagaatcaccttcgaagttgcttgctaagggactcatacacatgccgtgtgctgacgactgtgcactaatctactgatagatgaggcgcgagccactagatgggcaagcacagggagctatgcgagggagagcaggactttgctgatcctatggcatgctcatactaccaatgcacgggttacccatctgatctgagagactgatcgctattactgacacgctaggtactatgacaacagctcatgtgaacacgatgctgttttcccatga

SEQ ID NO: 56222 - DNA, 349 bp, Gossypium hirsutum
  Clone ID: uC-gsronu33B061a09b1
gattaagcaacatggttttgaagcgttcaatggcactaatgaataggacggaagctgttaattactgtcaaacatatgccaaagtctataataggtactagagattcccatgacggcacgtgatgtgtatagcaacggccgcggttaccgaacatataaaaagcgagactgagatcggagctattttgttgagatgacatatgcacgaatgcttcatgagcgggtgagatgagccggaactgaagggctatatcttcgacgagactaggggagaaaaccacggtgactagcaaaaactccatgagagggtgcagcagcttcaacaacaacatagctcggctggagaaag

SEQ ID NO: 56223 - DNA, 212 bp, Gossypium hirsutum
  Clone ID: uC-gsronu33B061d11b1
tcgatcgcgagggccgccctttatttttttgggtggtgttttttaacccttccccgacttgtttttagaaagaaagtttgcccttctgtcacttaatccgtatgtgcaattcccttgttctgctgatttaaggaaaactatttacttgccctaagatgtaatcttttgaaggaccagtgctgcccattatgaaattttagaggaaaagggag

SEQ ID NO: 56224 - DNA, 289 bp, Gossypium hirsutum
  Clone ID: uC-gsronu33B061h04b1
cttgacgcgtgggttttggaggagaagaccctggagtttttctcatggactacgtggagggaggtgttgtgaaatcaaagagttcaatatggatactgaaagctatgactgattttttatgggcaattattaattgcattgaaaggcacttcttaaacatgttgtccatggatatggacgttgcctacagaaaaggctttggtttaagtgaaaaatgtgattttgcggtttaaggatctaatgatgatctaatatattggatcttaacctctgtaggaaactgaaagac

SEQ ID NO: 56225 - DNA, 422 bp, Gossypium hirsutum
  Clone ID: uC-gsronu33B062b07b1
tttttattaaagttgaaaattgtctttttggtagatattaatctatttatggaaaaatttatccaaaaaaaataaaaaaaaaaaaataactttaaaacaaatcttaaaagatcttatagatctacataaaagatccttctacctattgcattacaaaccctggcgctcctttcttatgtccccaactttccttcccctatttttccacctttcatctcttttttcgggtccccttttttaattcccctttcccttttttttccacctttccatctaggaaacccctggctgtcccccattattattcgtcctttcaccctatccccctttttcccctggtagctttttcctaaatattccctcccaacatttccttccctaccctttaccatatcctaattgtcactttgacccccccctct

SEQ ID NO: 56226 - DNA, 296 bp, Gossypium hirsutum
  Clone ID: uC-gsronu33B062d02b1
aaagagggctccaaatctcaagcggcgggtgttttgcattgatgtaatcgcggagtgcatagttaatggtcctaagccagcactgtataaggaggttgaagctttccagggacttctcaaatctgataccagcaaaagcctgatccacatcttctttgctcagcgtggatcatcaaaggttcctgggattactgataggggcttggtgccaagaaaagtgaatatggttgctatactttggcggaggtttaatgggctcggggatagcaacgggtttgctttttagcaactacaca

SEQ ID NO: 56227 - DNA, 287 bp, Gossypium hirsutum
  Clone ID: uC-gsronu33B062d05b1
ctctctctattcaacaagccggcgagggggggaataccggagagggagagcattgcctgctggtcacggcctccgatctcggaccagggttctgcttttccagacccctttagatagaaaggttccattccatcgtccacttatcttatgacctacaagattggcgactatgtggacgttaaggttaatggcgccgttcacatggccttgccccacaaactctaccattggcgtactgttcgagtctggaacatcaccatgcgcgccattcgtgatgtggtcatcat

SEQ ID NO: 56228 - DNA, 355 bp, Gossypium hirsutum
  Clone ID: uC-gsronu33B062g06b1
aattactggtagacccacgcaaccggttttttggaaccaccacgctagcttttatctggaagaaaggtttaatggttgggggggatattaaagctagcataggagactatagtctcttcacaatcagtgaagaaaaaaattgaaatgaaaccttacatgcttggaacaatggctggaggagctgctgactgccagtttagggacagaaaattaggcatcaagggccggatgcaagaacaagcaaacaagcgaagaaattcaggtacaggggcataaaaactgtaggcaaacattctctattattaccgaggaatgggacttttggttggaaccatgatcgctggatgggatgaaa

SEQ ID NO: 56229 - DNA, 315 bp, Gossypium hirsutum
  unsure (1)..(315): unsure at all n locations
  Clone ID: uC-gsronu33B076d04b1
tatattaagaatcngnctaaaaaaaaataaaacgggtatgtaacggaaatgaccgttgataaaagaattttaaaaaatttggtgaaaaaaaaaaatgagagtttgaggcaatatgacaaacgggggaaataaataattattttaggcttaatttggccaacccggaataatttttgaaaaataaatttaaaaaaaggggccaatgtttatttaaaaggttttgggcccaaaattattaaatttaaaacggcgggaaggggggggaaaaaaaagggtaaaataatggttttttttttttttatttaatttttttgg

SEQ ID NO: 56230 - DNA, 211 bp, Gossypium hirsutum
  Clone ID: uC-gsronu33B076d06b1
attcattacttttagcaaaagtaaaagggaaagtaaaaggagggttttgaggagggtgaaagatggctggttacaggccacaggatgaactacgacttccttatcaagggggagccatccggggattcgcgagtaggcaagtccaacctcttattagggtttaccaggaacgtgctccagccaagattacctttgcgggaccagagatgag

SEQ ID NO: 56231 - DNA, 130 bp, Gossypium hirsutum
  Clone ID: uC-gsronu33B076h08b1
tcgaattgtcctgcctatgtatatagtcagtggggggagggcatttccagctatggatgcagcatgagtctcacccgggaaggcgaatccaagcagggcatatgagggacgctagggcaagctgacggta

SEQ ID NO: 56232 - DNA, 357 bp, Gossypium hirsutum
  Clone ID: uC-gsronu33B076h09b1
gagcccaccgacctcacgcgttcgttacgtatccgggactacagtaaaacttgcgggcgcgcgagcagtataagattgacttgtttgtaacaacaggcttccaacagtggatatctatgtggatacaattctatggtggtgatgtgtcttccgcctccagatgagacatcaactcctattgtgggttcttggaagtccgagaatgggacgacaacattgttatattggagcttgaggacaaagaaccaaaaaaaattgacgggcaccaaatgaaggtctccgggaacttcgagaacttggggtcgaatatgtacttcaagaagtcggaaaaaggcgattatgtagtgggtgtaatac

SEQ ID NO: 56233 - DNA, 393 bp, Gossypium hirsutum
  Clone ID: uC-gsronu33B077c02b1
tcacacgcccgcggtcctatagaacatttcgcaactgttccctagcagggggccattctgatcaatcttgagggtgacaacacacagttcaagcagagagcctattacacaaacacaacatcaatcctgggatgggcgcagcgagtctacatagctacaggcctaacttcagagggaggtgacagtgccctacattcacttctaatgagagttatcataggcaacaaaatgaaagtgggagcttacacatatatgaagcgcgcacaccatatcctgggattcgcaggggccaatacgccacacggtcttaagtagttggcactcagaacaactgaggcaacatccatgttaaagaagagagagctgaagggtatgcggccatcatatatgaaa

SEQ ID NO: 56234 - DNA, 373 bp, Gossypium hirsutum
  Clone ID: uC-gsronu33B077g07b1
ataatacgaactgcagggaattaaattccctataaaatcgtttctcgaaaaattcctttccgtttttaatcaaacccgatttcctggtttctttttcttcatcgatcgccgccgtgcgtaaaacatgaaatatcaaaagcataatgcttgccgaattagaaaaagaaactatggggcctgaacagactgaaggaacaagctttccaccatcggagccaatgctttgtgccaacgggtgtgggcttttcgggacggcggcccgtttgagtttacgttcaaagcgctagcgatgcctacatgtcggcgtggagcaccccgcttttgcataagctgaggtggagaaatctgaaaatttgaaagacgaacatgtgcc

SEQ ID NO: 56235 - DNA, 424 bp, Gossypium hirsutum
  Clone ID: uC-gsronu33B078c04b1
cccacgcgttcggccctagatcgcgagcggccccgttaccttcacattttgacgcggatctgcgataggacgctgacggataagaccctatccttggagggtgaccgccccaagacgagcgacagcgtttagggtcacgatgcaggacaaggagggcctgctacccacacatgcgtgacttatcttcgcggggaaggacttggatgacagtcggaccttagccggcttctgcatgcagacggagatacactgttctcattgcctagcgagaagggggggcgccgtgaagaggaagaagaagacctacaccaaacccaagaagatcaagcacaagaagaaggcggggccagctcgcagggctccagctctacaaggcggacgagcccgggaaggttcagaggctggggacagcgtgtcctaatgc

SEQ ID NO: 56236 - DNA, 365 bp, Gossypium hirsutum
  unsure (1)..(365): unsure at all n locations
  Clone ID: uC-gsronu33B078e10b1
cccacgtgnccgaaaaaaaaaaaaaaaaaaaaaaaaaaaaaaaaaaaaaaaaaaaaaaaaaaaaaaaaaaaaaaaaaaaaaaaaaaaaaaaaaaaaaaaaaaaaaaaaaaagagaacgaaattggggttccaagtgcgcgaactaaagaaaatttaaggttcagttcatttaaaccgaattcaatgtcaaatgccctggcgtaacctaaaatagcactgtgatagcaaaaacaaatttgaatcagatgggtaaataaccaaaaggccctatcagtagcaaatggaaaacagacaagccccctgaatatcgaattggacctcccatgataagttgcaaaaggaacgggaaaaggtgcaggaaactg

SEQ ID NO: 56237 - DNA, 350 bp, Gossypium hirsutum
  Clone ID: uC-gsronu33B079a02b1
cccacgcgtacgaacacgcgtacgaccacgcgaccaaggagaaaccaagttaggctggttttttgactcaaaccgcacgaagacaagactcgctgggagcatcagaacgaaacccagcctccaacaggagccaatcatggacgcacatacacacgccgcgtcaatcaatacttgccaacggctagcgcttcgagctccaaccatacatgaccagcgttgccgaggatgccaagcagagcaagcaatggaaccagctccagacaatggaaatctcaagaagataagtcattagctgagaatgtaacagcaatcgcttcagatcctaaaattaagggtgcagatgcggatgc

SEQ ID NO: 56238 - DNA, 259 bp, Gossypium hirsutum
  Clone ID: uC-gsronu33B079b01b1
cccaaggtacggcaacaagggaacaagggagcacaatgaggccattagaaggacgattaggggtgcgacaggaacaagagaagaaaaaacaaggtggaaatagaaggccgaagggggaaaagaaccagggcgcgaaagaaagagacacaaacctggcaaacagaaatcgaaaagggcaaagaatgggaagtgaaaaggcagatggcaagaaagccaactaataagaaaaaagaaaacaagaagaacacgagaaagaaac

SEQ ID NO: 56239 - DNA, 257 bp, Gossypium hirsutum
  Clone ID: uC-gsronu33B079c02b1
cccaatgtgacgggcaaacaaaaaagctagagatcaaaaggggaccttatgaagctggattatgagtgactacggcaagaggccgaagcaagagcggcaagctaacacaccactactcggttacgagaagccatgtagtaaaacaatgtggcgaaccgagcgaaacactattagctagcagatagacacggaacgctgactgaaatggaggaagagctgcacatacaatgtggctgacaatggcagctccagggata

SEQ ID NO: 56240 - DNA, 250 bp, Gossypium hirsutum
  Clone ID: uC-gsronu33B079c05b1
cgaaaggtattccgccccgcaaagaaaaacaaccgagcggaggagccttgaaagagagttttgcggggcccaaacccccaacccgagctccctcatgcgtaactaacgaaccccaccggcagggatgatcaaccacgcggcgagaactgacaaaaacgatatacaagcggaggtccggcgggctatgccatggaagaacaccatcaaccaaaaacatccacgaagaaaacgcgggagggcatgaacggag

SEQ ID NO: 56241 - DNA, 256 bp, Gossypium hirsutum
  Clone ID: uC-gsronu33B079e01b1
aaaatgatgaagtgccaacaaagaagtcagggagcaaagtgatgccttatgagggatgattatcagtgacaacgacaagaagcgtaggcacgaacggtgagcaaaaacaccactactcggtgaagatgaaccctgtgttgattctcacagacaaaacgggcgaaacactatcagctaccagaaagggggcgaagccgtacatgatggaatgcataaatgcacgcactatatggctaactatgggagataccgggat

SEQ ID NO: 56242 - DNA, 104 bp, Gossypium hirsutum
  Clone ID: uC-gsronu33B079g01b1
cacactctaaagaaccatcaatgaagcatttgatcaaagtggggccctttgaagagggattatcagaaccacacgcaatgagtgtaagctccaacaatatggaa

SEQ ID NO: 56243 - DNA, 301 bp, Gossypium hirsutum
  Clone ID: uC-gsronu33B079g11b1
gcgcccatgtgatcgcccacccgtccgcaaaaataacaggcccgtgcaatgttaaaaaggaatggatggatgccggccagggctataatgatgactgtgcctggggcgcgtgcaacagaagctctggctgcggacgaatatgtgaatcaaccatttggatgagagcaaagggacctgtgctccaaaggatgctggctgctcacacatggcgactagacccatagatttatcctgggctgataagatctgatccaacaatatatccgtcgctgctgacttgaaaaaagagggcaacaccgac

SEQ ID NO: 56244 - DNA, 392 bp, Gossypium hirsutum
  unsure (1)..(392): unsure at all n locations
  Clone ID: uC-gsronu33B080c12b1
tcctcgcgtccgatttaactatcaaataccacaggcagagtgttatttaanaaattttgtggttttacaccccccaaacggagacgngggtaactgatcattaaggggagcaatttagggaacttgtgacaggacaaatactgaaccgggtgcgggtgaaaggaggaaattaactgggatttggaactgtacctggataatattaggcatctcaagaaattcatatcaacagaagagaagtcaccttcttgaagaaatgcttttcgggaaagtaacagatggaattgaacagtctatgcaaagtactgaatattcctgggctccaagaagaaattttcgaccgtatggagaaaccatggaaaagcactcattcccttgacaagccaaggaaa

SEQ ID NO: 56245 - DNA, 415 bp, Gossypium hirsutum
  unsure (1)..(415): unsure at all n locations
  Clone ID: uC-gsronu33B080e04b1
tccatgcgtacggggattgaaataagaaataactgagggaacaatttataaagtacttgtagttcctacgaaaaaaaaaaaaaaaaaaaaaaaaaaaaaaaaaataaaaaaaaaaaaaaaaaaanannaaagggggggccgttttaggggtccaaactttagcaacccatgcatgcaaagaaaaaatattaaaatgggggcccaaaaataaaattaaggggccggcgtttaaaaactggaaaaagggaaaaacctgggggtaaccaaattaaatggctttgaaaaaaatcccattttacccagttgggaaaaaaccaaaagggccccaacagatcgcctttcaaaaaagttgcaacacccaaaagggaaaagggaaccccccttgaacaggccaaaaaagccggggggggggggg

SEQ ID NO: 56246 - DNA, 375 bp, Gossypium hirsutum
  Clone ID: uC-gsronu33B087a01b1
cttttgatttctgaattcgatcacaaggcatctcgagaggggaggatcaattctcgagcctgagctggtaaatgtctagttcaggatacggataactgaatgacaaacgggcatgagttttcaaaactatattttgcttctttaagacacagggtataacagttgttaatttatctgcgactacatttttacagacattatattggctacatggatatatttcttcagagccgggatgacagaatgaaatattatggaccctgaaagcaactccatggattaagcaaactgcttaaacatttttatctccctatgtaaaagttatgctcaagccaaattattgcaaaatccttggacctaaaatccccggaaatg

SEQ ID NO: 56247 - DNA, 307 bp, Gossypium hirsutum
  Clone ID: uC-gsronu33B087c10b1
ttcgtttcgctgaaacacctcgaaaaacacagggaaggatcttttctctgccagggccggtctattatgcaaccattagaccaccatcagcttggtggcttgcgaccccaatgtcaaccaactttctccggacatagcctcgtccacgaagatccggtaacccagtcctatgaagtggttcctacccctttggagaaacaagcccagagcttatactgttcttaaaaaacgaaacaaacttaaaagatttgattaagattttaacgccgttcgacccctacccaaatacatgcgtgactagacgctt

SEQ ID NO: 56248 - DNA, 272 bp, Gossypium hirsutum
  Clone ID: uC-gsronu33B089d02b1
gagcaagtcggtggagacaagcatgtaagcgaaccaaaaaggagacgccatactcaagaagcggaaatctcaagataggagcgacgaacactgcgccaagatttcgaagaactgcaaagaagctccgccagacaacgggaaagagaacgacgccgaaagcacactcccagaaaaccccgaaccaagccttgccacgaagatggctcgccataacgaccgcaacatgcaggcccacaacccagccgggaaagagaggaccgcaaacgacccac

SEQ ID NO: 56249 - DNA, 361 bp, Gossypium hirsutum
  Clone ID: uC-gsronu33B089f12b1
gtgaaccgagacctaacatttcgggggtgagattctaaaattctggtggggaaatacataaataatcatacactaaacatttctatccacacccaactatctacctttacaataactaattaaaagcgatacccatgtaccatgggcttagactcacatcttccattaatttcaccatcagatcccgagagaagctatatgtattatattattgaaaaaaatcacattgttgttataaatatctataattctgtgaccactatcattacagaacaatggcaaaagaactgtgaccactatagggatctttgtgatataaactataatgcacatcaaattaactatgatttccacacttatt

SEQ ID NO: 56250 - DNA, 312 bp, Gossypium hirsutum
  unsure (1)..(312): unsure at all n locations
  Clone ID: uC-gsronu33B089h07b1
gtcatttctggagacattgtgtaataatacggggtcctattaaagcaatgccgggcatatgatctgtgaagatgctttatcttgaaacctctcagtttcttagcggccttaattgcatgaaccaaangcaattgatcccatgtgattatgtcttacagtctacattgggtatgcaccaacttgatgtctgtagattttggatcttttaagccaccgattcttttgggctttgaagcttatgtttggcggtataacaaaggtgaagaaagtatctacccccgcttaaatctctgattggttaaattttcatta

SEQ ID NO: 56251 - DNA, 358 bp, Gossypium hirsutum
  Clone ID: uC-gsronu33B090g01b1
acatatttttattttggcatcacatatgcttaatggggggcactattaacaaagagggtgggcctatgtcttggaatcaatctaatagtctatcatcattaacaaggggctccatatctgggggaagaaccattgcaaaggaggatcaattaccaaacagtggtggaagcaatgatgtttcaaacacaaggtctaaccgatcaaatttgagtatgaacatggtagatgaggagcctgtaaatgaatcacccgaatttgagcatttttttcaagaaaagtactggaaaggggcacccttaagtccatgtactgagccaacagaggttggtaactgaggtgacagcaaccagcatccctt

SEQ ID NO: 56252 - DNA, 289 bp, Gossypium hirsutum
  Clone ID: uC-gsronu33B090g12b1
gggccgtttcttatttccttcttgatccacgcccccttatattttttactccaatcagcattaaggaaatgggagggtttttggaaaatttccgtggcttccactattatatctggcctgggtttcagtggatggacagaatctttaccacctaaaccaaaatgggatcgcgcaaaaaatgttgacattccaggggttgagttagcaaagagtgcagttgtgttaccacttgtctggaaccaaacatgaaattatctggattaatatttgtgtttatcatagactttta

SEQ ID NO: 56253 - DNA, 357 bp, Gossypium hirsutum
  Clone ID: uC-gsronu33B096b08b1
cccactcttccgggaaatcaaagagattgatgaatatagtgactgtgatcagtggataaatggactgtgattttgatgctgttcatgtgttattttgttaaaattttttctatctaaatttccttttttttttttgttttaatttttattttattttatgttgttttgtttgtatttaaagtatgttattgttttttgtgctttcatgattgaagttccagtgcttttggctggtcggctttgtatttattatgctcttttgaagtctgggtttgttggattttaggcttacctatttgtttctgggttgtaggaaaattgtgatagtgttggctaatcttgttattttggtttttt

SEQ ID NO: 56254 - DNA, 120 bp, Gossypium hirsutum
  unsure (1)..(120): unsure at all n locations
  Clone ID: uC-gsronu33B096b10b1
cttattcatacagcccgaaaaaaccgagaacgaggagggggactctttaagcgccaatgccccttccttccaccttnaacactccacagcaaatcccataccaacctgaacccactaaaa

SEQ ID NO: 56255 - DNA, 557 bp, Gossypium hirsutum
  Clone ID: uC-gsronu33B098c01b1
cccactcgttcggacgtcgatgatttcttcaacttgggtcccattttaccaggtttcgagtctaaccaaatggatgtttttgaatttgactcgaaacctcaatttatccatctaaccgctcctaagccctttgaatttgcacctcaaatcactgaactttcagctggtaaacctccagctccttcgaattcgagttccagctctcataatcgaaaaccgtcgctcaaaatatcgttaccgcataaagtagagtggattcagttccgcaaaccgtattcgactaaggcacagccgacgaattcaaattccgaagacaaaaataagcattacagaggtgtccgacagagaccgtgggggaagtttgcggccgagatccgagatccgaaccgaagaggttcacggatctggttgggaacctttgataccgcaatagaagccgcaaaggcttacgaccgagccgcttttaagctacgtggctcgaaagcgattcttaacttccctctagaaagccggaagcttgacgtaaccgccgtcgacggagagaggaaacggagcac

SEQ ID NO: 56256 - DNA, 352 bp, Gossypium hirsutum
  Clone ID: uC-gsronu33B098d11b1
cttactcgtccgagatcgcgagggccgccctttttgttttttttataaaatttgtttgtccaaagagcattgtgtttgcttttgtgttaaaaaaaaaaaaaaaaaaaaaaaaaaaaaaaaaaaaaataaaataataaaaaaaaaaaactaaaaataaaaaaaaaaaaaacaataaaaaaataaaaaaaaaaaaaaaaaaaaggacctgggggggggggggcttttaaaaggaaaaaaatttaagaaccgatcaaacagaacttaaaatttttaaaatgggtaaacaaaatacaattaaggggccgatttttaaaaaagaaggcactggaaaaaccctggtattacaaaattt

SEQ ID NO: 56257 - DNA, 386 bp, Gossypium hirsutum
  Clone ID: uC-gsronu33B098g06b1
ggtgttctaaatgcagactctaatatgtacataatataaggtgattgtagacgggataaaggcatattagctgaaaaaaaaaaaaaaaaaaaaaaaaaaaaaaaaaaaaaaaaaacagaaaaaaaaaaaagaaaaaaagaaaataaaaggaaaaaagagaaagaacagcataagaatagagaaatgaaaattaaaagaaatgaaaactaaagggggccggcttatacagagaaaaccctggagtccccagaaaataatagcactgatgcaaaattcccgaggccccaacaggaataagagtaaacagggctaaaacggacgtccatcagaaaagcagggcaaccccaaatggaaacgggagagcgccctgaacagttttatgaagg

SEQ ID NO: 56258 - DNA, 431 bp, Gossypium hirsutum
  Clone ID: uC-gsronu33B100b05b1
cccacttcgtccgctaaaaaaaaaaaaaaaaaaaaaaaaaaaaataaaaaaatttaaaaaaaaaaaccccaaaaatacaaaaaaaaagaaacataaaaaaaatcaactcttatgggggcgggccctctttggggccccaggctttcctccgcgggcttgcggcagtattgcttttcttttggggcccccatatttccaattctggggcccccgtttttccccgtttggcctgggaaaccccgggggtctcccctttttatgcccttgcatcacttcccccttttccctggcgttgtcatggttagggggccccccccccttgctcttcctctttttttccactcccttgttgtaatttgttcccccctcccctacgtcccttttccttctctctctctgcttttactttactctctctctattcctccctt

SEQ ID NO: 56259 - DNA, 546 bp, Gossypium hirsutum
  Clone ID: uC-gsronu33B100e05b1
aaattttaaaaatttaaaaaaaaaaaaaaaaaaaaaaaaaaaaaatagaaaataataaatatagggacaaccaataaaagaaggacacaagattcctaacacgggcgggcccctctttgggtcccatgtttccctccccttgcttgctaccctgtgctttttttttaggggcccctactggcatttccctggccgtcccctcccaccgtggtttgtgggaaacccctgtttttccccatctttttttttttgcttgtcccccccctttcgcccgttgcctcttttgcgaagggtccctgcccctttggccctccccctcgtttgtcccccttgattggctatgggtcctcccctttttgcggtctcttctggcgcggggggggtgggtgtctccttctttcctttcctttttcctttttctatccttacccccgtctcctccttcttttcccttctcttcttcgctcttcttctctatttcctccttttgttcttcttctgttccttcctcttgttttttcttctttctttttcctttcccttttc

SEQ ID NO: 56260 - DNA, 399 bp, Gossypium hirsutum
  Clone ID: uC-gsronu33B104e10b1
tctttgaatggaatttgcatatttacctatattctctgttcgtcgtaaaaaaaaaaaacaaaaaaaaaaaaaaaaaaaaaaaaaaaaaaaaaaaaaaaaaaaaaaaaaataaataaaaatatctttaaaataattaataaataataaaaaaaaaaattaaaataaaaaaaaaaaataaaaaaaaaaagggggtggcttttttaaaaaaccaaatttacctcccctttttttgcaacttataatttttttttttgggacccaaaattaaaataaatgggcgggcttttaaaaccctttaaatgggaaaaccccttgtttaccaaaattaaactctttggaaaaaaacccctttttacacattggtgttttataaaaaaaggccctaccttatttttcttt

SEQ ID NO: 56261 - DNA, 423 bp, Gossypium hirsutum
  Clone ID: uC-gsronu33B104h09b1
aaaaaaaaaaaaaaaaaaaaaaaaaaaaaaaaaaaaaaaaaaaaaaaaaaaaaaaaaaaaaaaaaaaaaaaaaaaaacaaaaataaaagacagggggggccgctttagaggaccccgggttccgtccccttgcttgccccccctttcccttttttttgggggcccctaattccttttccttggccgcccttttcccccttcggggcggggaaacccctgccgttcccccctttattccccttggggcgcccccccttttcgccggttggcgtaatacccctcgggcccgccccgtttgccttttcccaccggtggcgtcccttgtttggcgaaggggcccccccctttttgggccctttacccccctcttttggtggtgttcttcccggggggtgttttttttttccctcccttttccccccc

SEQ ID NO: 56262 - DNA, 375 bp, Gossypium hirsutum
  Clone ID: uC-gsronu33B107b07b1
tgttattcggctttgctttttcctgatttatagactaccaagcttgcctatatagtgaagaagaggaatttcagcatgtagctggatcgataagtgttctggtctgcatttggtgaaaaagcttatggcaattagagccttttgactatatttggcagaccaataagtttaagaatacaaattccagcgtcttgccccaaaggagaagatgacgacaatatatggataatatttggtacatgatcaagggatcggtgcctgcttaatgttatatatgctaattttagaacatgaattagaaaggttccgtggtgttgtgaccctgtatgtctatacatatatgtgttagtatataaaagcatgttgcttgaattg

SEQ ID NO: 56263 - DNA, 325 bp, Gossypium hirsutum
  unsure (1)..(325): unsure at all n locations
  Clone ID: uC-gsronu33B107f07b1
tgcctcgcgttcggtgacagacaccggcgctggggacttcaagagagtgttcgatgtcaatgtattgggtggtttcttgggtgccaagtatgctgccagggccatggtaccnggtaagaaaggctgcatactcttcacatcaagtattgtgtcaaaaatcagggtgggactgccccatgcatacaaggcatcaaagcatgccgtcgcagggctgacgaagagcttgagcgtggagttaggtgagcatggaattagagttaactgcatctcgcctcacccaattttgaccccattgctgcaaaaatcaattgagaatattgataaa

SEQ ID NO: 56264 - DNA, 284 bp, Gossypium hirsutum
  Clone ID: uC-gsronu33B107g03b1
gttttatacctccactcatcggttgctggtgtttggtctgcacatgatgctcaaaggctagactatactactcaccatgccgattctctctatatgtaaagccatggctctccttggccccggaggtctttcgtctataggaatgatgatagtctggtattgcattctatcatgttgtgcttgtctatatgatactacatttctgtcactatcatgcgactggaatcggattgtatagtgcaccaaaggtgcagcttttgccattctgttaacaacgtgaaaac

SEQ ID NO: 56265 - DNA, 312 bp, Gossypium hirsutum
  Clone ID: uC-gsronu33B107g08b1
ggctaaggcttaaaccctaactaatattgggccctccgttccggttcgaatggacaagaatgcaagtcttgaaaagaccgtaccgccctaactcaccacctgcacgccatggcagaatcaatgaccactatcctatagtccatgagcttgcctctagccccggaggtattgcctctatacgaatgtgcataagaatgggatgactgactgtaatgtagttaatgacatatacatactacatatccggaaacattatatgacaggaatcggattggcaattactaagaaaggtgccactatggctatgatagt

SEQ ID NO: 56266 - DNA, 357 bp, Gossypium hirsutum
  Clone ID: uC-gsronu33B107h05b1
atgcgtcctctcgtacggccactcgtacgattttggagttgtggagattgtgcttgattttaagtttggagctatatctattaagccaactactatcacaatatgatatagatccaaggctcgaatatgatgatatcaatcctactccagctattaggaagctacttgattggcatgccatggttgaaagcaatgactctataacgctcaccatagccatacattatacttgttgtgagtcacctgaaaaagtacttcactatatccaccataacctctaaatcctcgaccgagatgtccatcactgagcatgaagcgtcttttcatggccagatggtgacacataacatgaaaagg

SEQ ID NO: 56267 - DNA, 416 bp, Gossypium hirsutum
  Clone ID: uC-gsronu33B108b09b1
ctttctcgtacgctacctgctacgaggtcgccgggtggttacttatccatatttggggatggattcacagattaggtgtgctgcgttggcaagaatgattggatggaccctaccaaggagctgggtgactcaggtgagatcactgcatcaagcatgatcagagctcgccaatcaattaagaacgcatatggtccgttcaggtacgaacatatcttcatcaatgtggtgtgtatcctgaaatctctgaggttatgctgacacactagactctatctccctttcgttacaggttgaatggtgatgttgatcaagtatactgcatattcttatttgataagggtattcagagcagcctgcttaaacttggtttgctgtcgactgacaccaatgaatccattgttattatagcatcatct

SEQ ID NO: 56268 - DNA, 407 bp, Gossypium hirsutum
  Clone ID: uC-gsronu33B108c06b1
cccattcttccggctatgctataaccccaacaggtacatgggtatattctaacactgaggggagcatcaagatctgggatctggcaagcgcgagcattctgggagacttgactgctgatctgaaagctgaagctaataaatctgatgtcgccgaccatgcaaacaagaggaaggtcatatactgcacacgcttgaactggcgtgcagatggaagcaccttatttagtggttatacagacggtgatgtcagagcctgttgaattggtcaacactaggaccaacattcatgcatgcatgacgcgccttccaacgagtaatcatataggattaaggaacatgtagcgatacttttagctgcttctcttagcatttccataccttcctaaagattatgtttaaaacgttgc

SEQ ID NO: 56269 - DNA, 432 bp, Gossypium hirsutum
  Clone ID: uC-gsronu33B109a01b1
cactatcttatacaaacaaagagaaaaaaaaaaaaaaaggggatttaaacaaaaaataagaggcagaaaaactgaactacaaagatgcttcaacagcggccgcattatagtgggtgtcgccctccttttccccgatctggcagatgggtcatcatttttgactacctgcttcttgacgggacaccacccaaccctctttgggttgcccttcatgtgccgtccttcaaagccttcatcttttgatgtctccgacgacctcctctttattcaattttggctcatcttgttcgtcttcaccatcctccatgaattgtttccagttctgggcacccccctatcttgtgtacatggatgagcacactttttttactgcagatgaagcttgcctttacttctctgatgagcttgcttcaagtcttttatggtgtttcc

SEQ ID NO: 56270 - DNA, 318 bp, Gossypium hirsutum
  Clone ID: uC-gsronu33B109b10b1
tgctgctcctcctgcacgtagctcgtccttccttcccggatccacccagcgcgtccgctcgttcgtacaaaaaaaaaaaaaaaaaaaaagggagggatttattttaaatctattgtgggggtatccaagactctcaaacaatttacatgctacaaaataactcttgtctcgtgcctcctagattcaatttctctggccttctcgttacatcgtggggcctgggtttacccggccccttctcctccttcgcgggcttgcatttcatccgctcttttttttgttcccctatttgctattcggcccctttcgttcttccct

SEQ ID NO: 56271 - DNA, 465 bp, Gossypium hirsutum
  Clone ID: uC-gsronu33B109b11b1
ataatttcaaaaaaaagaaaaaaaaaaaaaaaagggggaaatataataaaaaaaagggggagaaaactttactatttataaaaaaaaaaaagggtgttggggttggggtatccatggggactgaaattttacggccctcggattgtttgattgtacagctcccgtgtttcttcgacggctcgttctcgtcggagatattggacatgggaagctcttagtcctacctataattatcctaattgtaatagcaatacctttagccggttcgtgtccttggcacaggggcccttagcggaccgtccttcccatttttatgggaatcgggaatggtcaaggggacacgccctgtacgtggtgtttatgcccccttagcggtgggggttaccgggaagggtgcccccctacccctggcccttcgcctttggcggcccgtttcttatcccctttttttcccctttttttttc

SEQ ID NO: 56272 - DNA, 543 bp, Gossypium hirsutum
  Clone ID: uC-gsronu33B110c06b1
ctgctggttccggtccggttttcccttgtcgtccctcgcgtccgtctaattttcaacaaaaaaaaaaaaaaaaaaagggggggttttttttaggtttttttttgtttccccccccaaaggggtctccgtttttgggggcggccgttttttgggtggcctgctttcgtgggccccccttgtctcggccctggtttgtttttagggtctctctttttttttttcccggccttcgtttttccgggtcgggtttgtccttcccttggcgggccgaccctctttggttttttcccctcttttcccttgtgggcgtttgcgctttttccttttttggctctttcctcttgcgccccttccccattgtcctcttccctccttgtggtctggccccttccctgcttttggcgcctctctcttgggggctttggcccctccttctggggggtccttttcccttgctgtcgtcttttttcccgcggttctcttcctggccttttcgttttttttccctgtctctttttcccgggtttcttttttctcggggtt

SEQ ID NO: 56273 - DNA, 341 bp, Gossypium hirsutum
  Clone ID: uC-gsronu33B110g01b1
ccttcgtgtccgtccacgcgtccgggatgttttatttaaaataaaaaaaaaaataaaaaaaaaaaaaaaaagaaaaaaaaaaaaaaaaaaaaaaaaaaaaaaaaaaaaaaaaaaaaaaaaagctaaagaagagcccttagcatgacatcaaatctggggggggccgttttaagggacccaagtttacccccgggtgctgggaacgtaaaagtttttttatagggcaacataaattcaattcaagggcggcgtttttacaacttgggagcgggaaaaaccttggggttccccaacttaaaagcgtgtagaaaaacccccttttatgcggctggtggtacaag

SEQ ID NO: 56274 - DNA, 403 bp, Gossypium hirsutum
  Clone ID: uC-gsronu33B110g12b1
tcttttaaataaataaaacatatactactataaatagttttttacaaaattttattttcttctcctccactcaaatattttaaccttaaatttttttttaatttactttaactctcttattgggccgtcccctttatatgtcccatctttccttccccctccttccaacgtatatctttttttttatggccccctaatttcatttccttgcccctctttttccaccctcttacctggaaaaccctctttttcccccaatttattcctctttgatcatttccccctttccccatctttatttttttcaaaaaggcccgtccagtccgcctttccaaaaatttcctcatccttattgccatttgtacccccccttttatggtctctttaccccccagtttttttt

SEQ ID NO: 56275 - DNA, 351 bp, Gossypium hirsutum
  Clone ID: uC-gsronu33B111a06b1
atataattttttaaaaaaaaaaaaaaaaaaaaaaagaaaagattaatttaaaaaaacggttgggactacaaattctgaaaaaaccttcttctcctccctgaacctccaccctgtatttttttctaaaatcatccctcactctaattcttcttactccctaattttccacactcaaaattttccttccccttcccctacctaaacacttctgatttcacgccaatcccccttttcccatccagacttctctttttatccatccacctgttttaatttttcataaactccctattttttttaaaaaatatagcccccaatttacagtcctcttttatcatatatttttcaacc

SEQ ID NO: 56276 - DNA, 405 bp, Gossypium hirsutum
  Clone ID: uC-gsronu33B111a08b1
gttttctcgtccggtgaatacccagtaacaggacggcttacatgaaatattccgtgagacattctaaagtcctataccaaggcatgaacccatgctggattaccttatggctgcacatacggatgcaaggacgtctgaagagaactcaagtgacgccccgaccgacataccgacctttatcacggataacatgcaagatatcatgaacagtctatcttacatgcgtacgattatgggtatcattggtggagttataggtggaacaggatggatcacaggcatcatggagtttatcgtcaaggcacttgctatggcagtaactataataggactcatagcataagcacagttatcagtccatagatataacgatagcttgcaccggggtatactggacggtctcat

SEQ ID NO: 56277 - DNA, 449 bp, Gossypium hirsutum
  Clone ID: uC-gsronu33B111b01b1
cttctgctgttctctttcgaaaaaaaaaaacagggcgggctttaattgaaaggagggtccttacaaaaagagaaaaatatccaccttgtagtctaaatccacggggggcctgctctcccttgttccgtgctctttccgctttggcgcccactcttgagttcgcggggtgggtccctaacgacaacccgcttgccggcgttgttcacctgggtgtcttgctctcccttgccgcccccctctttatttgccttgtgcgacttcccgccctcttcgcctttagatccggccttatcgctctcttcctgccttctagaaggtcgtctgatcgcctgattgtgattctagatgtgggcctagcgttgccactgacttcgagcatcttagcttgctttggcagtcgctcagataggcacgaaaggggacactcatgcaggttggctgccccgttg

SEQ ID NO: 56278 - DNA, 112 bp, Gossypium hirsutum
  Clone ID: uC-gsronu33B111b07b1
gacacgccacgcaccgtgtcattaagcactaagcgcgtggtgtgtactcgcaacgcgaccggtgcacttgacagtggcctagggcctagtgcttgcgctttctgccctttct

SEQ ID NO: 56279 - DNA, 345 bp, Gossypium hirsutum
  Clone ID: uC-gsronu33B111c01b1
ctatggctgaaaacacctcgagggcggccttaaattgtgcgggggcgacatacacaaggagtcaactattcatctggcccttcagctgcgcggtggcatgcaaatcttcgtcaggactcttaccagaaagacgatcactctcgatgtctagagctatgacacgatcgacaacaggaaagccaaagctcatgacatggaatgtataccgtcagaccagcgcctgttaatattaccctgaaagcatctcctagacaggcgctatttaaccaacaacaatattgataatgaaaagactctttatctggttttacatctttaccaccatatgcacatacacttcaaaac

SEQ ID NO: 56280 - DNA, 346 bp, Gossypium hirsutum
  Clone ID: uC-gsronu33B111d01b1
gagtttccgttcgacatatacagggctattaagttcttcttgcgccccttattaaaggaaccctttctggtgtggggaactccaaggtgtaaaagcttgatgcacttaaatttgggcctaatgagactgttttgaaacttctacgtgatcaaatcatattggtcaaaaattctaagaacttccaaatgctcagatgaggagtctaagccccttctcgaccaacttttcagagcagagcctgttggtttagacacctgaatgagactgttatagaaaacagcgtaattttttttgaaaaagaccagtctttgaagagacttatcagagaatggactgttcctctctt

SEQ ID NO: 56281 - DNA, 458 bp, Gossypium hirsutum
  Clone ID: uC-gsronu33B111d12b1
tttttatacaataattaacaaaagcacataataacgggggtatttttaaaaacattgggcgccttacccctaatggaatccctttttgggcccctaccttgcgacctcctttcgggcctcccgctttgaggtttccagttctccctccccttgcttccgcggccttttttcttgttttcggtccctcttatccccttttttggccccctctttcctcccttcttgctgcgttgcccttgcctttccccttctttgctccctctgctgacatcctcctttgtccctttggtttttcacgcacaggccccctccagttcgtccttcccaccagtgtctctgcccgtttttccattgggtccccccctctttgctccccttaatccctcctgttgttttggctctccccccttgtggccccttccctggtttgcctccttcggccccttcttttccctttt

SEQ ID NO: 56282 - DNA, 314 bp, Gossypium hirsutum
  Clone ID: uC-gsronu33B111f01b1
cgcctgacttaatgaagtgtgatccatttttttatgcagtacatgaaatgacgccttacagggggacatggtaccttactatgcgcaataaattgtgctactgtgtcattgaaaacgctaaggcatatattaacaattgaccgttacactacatgaaatccaactataccaatgatatattttccttaatgaaaagccagaaaaaaaaaactttgtgagacctacatactttatccagctgaagaaggcaacatgcattgcttcactgctgtcacagtatgcacggtccaggatgtcctacgccctcattactc

SEQ ID NO: 56283 - DNA, 356 bp, Gossypium hirsutum
  Clone ID: uC-gsronu33B113a10b1
tcggtctgcttttcgttatccgccgggctcagcgaaagggctctttctataggatgagggtttaaagaacaatactgtgcttatagtacgaattttaactctaaattgatcgtgacagattaaaaaaaaaattgagtacgattcgctgaaaattgtcgaaaagaaaaaagcaaaaacatatcgttgagactggaaaaacccgaaaaatcctaatacaagagaaacaataaacaggggggtatcgtttaaggggatcaaatttttctgacgtcattaagatgtcaaaaaattctttatatgggtctcataaacaaatttagctgcccgatttttaaacacagacctgtgggaaaaac

SEQ ID NO: 56284 - DNA, 259 bp, Gossypium hirsutum
  Clone ID: uC-gsronu33B113e05b1
aaattaaaaattaaaaaaaaaaaaaaaaaaaaaaggaaaaagggaaaaattaaaaaaaaatttccgaccaaacaaacaaacgcgtgcacgctacaaaataatccatttatagtgcccccttaaattccatgccttgccccgttttttcaccgccccccttgcctgggaaaccccccgtgcactacccaaccttaatcgcccgtgcaaacaccctcccctttcccccagcttttaaaactcttgcaagaccaggccccct

SEQ ID NO: 56285 - DNA, 234 bp, Gossypium hirsutum
  Clone ID: uC-gsronu33B113g01b1
tcgtccttgcgtacggttcaccacaatgggggaacaggggccattttaacaggaaataaccaggtcagagacctgaaaccaatccaccacgcgattaccttggacatcaacttggtttctggaccaaatggggtggcccgcggggattatttatacgacaagcaatacgtattcacagactgagagggtttcttcttacataaacattctgcccgaaaaaaatgaagtgtaaaa

SEQ ID NO: 56286 - DNA, 423 bp, Gossypium hirsutum
  Clone ID: uC-gsronu33B113g02b1
gcgttcgattaaaccaaaggctaaccacatggtgggtgcgcgatgaaatagactctagtttatccttctttgagctgtgagtgttgccgacgccatgaccttatacagacaactgctacccgaacaggtgggccactcataacagctactattgtcgaggaggctcttatactaccggcgtgggggttgctgtcggtgtattaatagttatcttggagctgatagtgatttattatttcggaaggtaaggcaaacttgagcgtaccagttgcatgatagagattggctggtggcaacactcaccatggtgcctgcaagtgttgatatttaaaagacatacgcacattcagagggccatatatgtgtgtaatccgactgggttatgttatctgaagggaaaattatactttagagctttatttt

SEQ ID NO: 56287 - DNA, 443 bp, Gossypium hirsutum
  Clone ID: uC-gsronu33B114a01b1
aatttaattaaaaaaaaaaaaaaaaaaaaaaaaaggggaaattaaaaaaaaaaaagggggaaaaaaaaaaaaaaaaaagaaggcaagacaacaaaaacaaaggggggagccacatgtgttataaggggggccccctcttttctgccgccggagggggtgccctttggggggccgttatttcctttcctttgggcgccctttttgcccctttttgttggggcaccccttgcctgtcggccccggtaagctccctggggggccccgcccttttatcccgctcgggtgttcccccttatggccggctgggacgcccctcgcaatcggtggctcaatctgtagtggcagtgggggcgcccccttgctggccatttcgatccgcccgcccggtgggttttccggccccctggcttttgttttttccctggccttgcttgccggttttt

SEQ ID NO: 56288 - DNA, 458 bp, Gossypium hirsutum
  Clone ID: uC-gsronu33B114b03b1
ctagatcgcgagcggccgccctattggttctgagagagggggatgctcgaatgttcttttgcctacaccaacaataaagaagcaaggtgctgaattccctgagaatacatacaagtatatcaaaaatagtcaggaggacacaatgaaagatcctcgcggaaagaggaggatcaatgggggtgtaaagaaccaaagttttattctaaagcaaatgagaacggttgccactacagcatgtccaagcatgatgtacatcatggtcgtcaagccatcggaagaaaaagtacaggctattggattggaggacttatcatatcatgactcataacacgatcattaaggcaccagttgcaaggtgtgagatgccattaattgatgcaacctggatggacacatacattggcattgtaaagttcgctggaattgctatatgagatttgcaacagttagaaccacct

SEQ ID NO: 56289 - DNA, 376 bp, Gossypium hirsutum
  Clone ID: uC-gsronu33B114d11b1
gtctctcaaaaaaaaaaaaaaaaaaaaaaggagagggttattttgaaaggacacttggtttaccaccccaaaaaaaaagaacaaaagcaagcagcgggcaagctgcttggggggcggccctctagggggcgggccggcctgggggccccagcgttccgcccgcgggcggccctggcctcacccctcctatggggggcccaactcctccccccgtggcccgcgggaccccgctcttgagggggaaaccccgggggtcccccacctgatcggccgggccggctggccccctgtgccccgggcggggccaccacagagggcccgcccgtgtgggcccttcccaccggtggtggcccccgccgggcgggggggcccgccc

SEQ ID NO: 56290 - DNA, 347 bp, Gossypium hirsutum
  unsure (1)..(347): unsure at all n locations
  Clone ID: uC-gsronu33B114h10b1
tatatataaatctagcacgcccggatggaccaacccttacttccctccccgacccacccacccgggcttattttccgtgcatataacaacaatctaaaggggnggcttttattaaaacatggtttacaaaaacaagacaatagcaaattatcaaatcgatcacaatccccaaccaacgcaaacaaccacacctaggcctaccaactccagcacccgcaccagcaaaatccaacaataagaaggctaccaccaatcctgataccccccatattaccccaactgataaccccaaaacggccacctcacaaaacgtaacatagaccccagccgctgctccaacaattgca

SEQ ID NO: 56291 - DNA, 368 bp, Gossypium hirsutum
  Clone ID: uC-gsronu33B116a04b1
gcatatgttctctcgccgtctttgttcagaacaactgctaccaaatccttggttctcagaactttcaacttccaaatgatatttgaaaatcaagggtttaaccaaatcgattcatacagtcggtggtgtccgatagatttaggactcgaatcctggtatttacacccctttctcttgtgcctagattaaagcatcttttgtataaaaaagatcttgaattattgtgatatgagtacaaatttttaggcaattttcatatataggatgtgttctggtttgggattgaattgttttcttatttcctgcttttatggtttaggatatggagattggagagagacatttgcattctaaataaattaaatttc

SEQ ID NO: 56292 - DNA, 293 bp, Gossypium hirsutum
  Clone ID: uC-gsronu33B116b12b1
tttttaaaaaaacaaaaaaaaaaaaaaaaaagggagggattattttgaaaaatatgtgcgttaaaaccaccccagcgattgggaactcaagggttgggccgggggggcccattcaggcgatcctagttctccgggcccgggaacgcgaaccctgggctgtagacccacgtcacctgagcctagaggacggggggtcgcctctcaaggaggggacggggcaacgcgagccgagacccaactaactggcgaggcagccaatccccccgtggcggggttgggaaaaagggaggggg

SEQ ID NO: 56293 - DNA, 305 bp, Gossypium hirsutum
  Clone ID: uC-gsronu33B116g11b1
tagtttacaacccgcgtccagacccaacactggggaagggtgaaaaaggctgttcttttaaaaccccctcccgcgaggctcttatgcttatgtaaaaaaaaaaacaccccccaaatcaggccccacgaaacctccctcccacggcccacccccctgcgttccccctccttgcccccgaacacccccgccccgtggcaaccccgccaagaccccacaaaataccacctttcaccaaaatcacctggtccccggacaagccccccccccccccccgggtacccccccccatgtccacccacccccaa

SEQ ID NO: 56294 - DNA, 390 bp, Gossypium hirsutum
  unsure (1)..(390): unsure at all n locations
  Clone ID: uC-gsronu33B117h09b1
gtgaattgttagtggagaattggcatgaattatacttcggaggtggtaaaggttccaggaaattgcagagccaaattccgagcttgaagaacacacttcaaacccctcataaaaggagtaaaggtaaggttaagaaatgttgtgaaatggctgctttggctttgcaattcataatctcagctgtacttggtgatccaaccgctcttattgctggggttattggaactttgatgtctagagcctgaaaacattgtctggttgatgcactataatgttggtgcctgtaaaactaaaaccaaatatgacatccacaatgtttattttagtttctgttgtgaataaattctattttcttcaaaanaaaannnnannaaaaaaaaaaaaaatatt

SEQ ID NO: 56295 - DNA, 101 bp, Gossypium hirsutum
  Clone ID: uC-gsronu33B121a12b1
tcccgggtcgatcccacagcgtccgattcgttatggatttaggaatcagagatgaagctgcccgttttcaatttctctgaggataatctaaagccaggaac

SEQ ID NO: 56296 - DNA, 278 bp, Gossypium hirsutum
  Clone ID: uC-gsronu33B121b02b1
tatattttttcgttaattgatataagtaaagttgagggtttttttattgaaatgccgggttttttgcttcggaggagaatggtcggggtctgtcgcctgtgtcctttctctcgttttgtgctcttttctcccctcctctgcggggggggggggggggggcggcgggcgggcttctccttcctctgggggggtgcggtttcctcctcctgccgttcctccctccttccccttctgctttttgtgcggctcgtgtccgctcttttttgtcctcgtctcgt

SEQ ID NO: 56297 - DNA, 238 bp, Gossypium hirsutum
  Clone ID: uC-gsronu33B121b06b1
ttctatttcaccctttaatggctcctcctctagtgattggtattcttcaccgtcaccaaatatgtgatttccccttttgactctctttgtaatccataaccaatgctgcttcgaaattccatttcctacaccaaaaggttctttcagaaaaccttacaaagtttcaaggctcttttttttggtactgatgcttaaccttaccatagtctacccattgccctttacatatcaattcctt

SEQ ID NO: 56298 - DNA, 236 bp, Gossypium hirsutum
  Clone ID: uC-gsronu33B121e11b1
agatcccacagcgtctctctctctctctcctatactaacttcttccacttaaaagcaagttagctaagctagggttttttagagccagagagatgggtccgaaaagaacagtatttctaacccttctctttgcactcaacatcctctaatttttccctgaagagtgcctgtaggtcctattctatatcaaaccctaaaccttaaccttaaaccttaatccaaatcttaaccccact

SEQ ID NO: 56299 - DNA, 173 bp, Gossypium hirsutum
  Clone ID: uC-gsronu33B121f04b1
tccctgtttcttcccacagcagtccgtattaatttaatctcaaatatttactagcaacacaataagatacttatttgagaggatcaattggtcaaagatattgcaatgatagctatctttttaagcccatttctttcagaaaactgttttgtcactcttttctacaagatccg

SEQ ID NO: 56300 - DNA, 125 bp, Gossypium hirsutum
  Clone ID: uC-gsronu33B121f05b1
agatccctcagcgtccgcattggctagagaaaagcaatgaaaaagacggccaaggaattggatgatctacttgaaggctggcttaaggagcatcgtcagagaaggatttctggtggaatcaaggc

SEQ ID NO: 56301 - DNA, 141 bp, Gossypium hirsutum
  Clone ID: uC-gsronu33B121f09b1
agcgctgctttcgcgtccgctaggacttattttagccatgaaagttatggataaagctctttcggcacgtagaaagaagctccttagagcccaaactgagagagagattcttcatacttttaatcattcatttttgccatc

SEQ ID NO: 56302 - DNA, 237 bp, Gossypium hirsutum
  Clone ID: uC-gsronu33B121f12b1
ccctcgcgtccgctcattctaccctaacgtgaatgtctttctagttaaaaggggaagtgaatactcagaggttcatatggaacgtgtagtgaagaatctgctaatggttgaaaccaatgagtagcctaaggttgtgctaatggacatgcctggctcttaccttgatgtccatagtttccccagccaagatgacctttgcgggaccaaagataaccactactgtaccaggacttggct

SEQ ID NO: 56303 - DNA, 147 bp, Gossypium hirsutum
  Clone ID: uC-gsronu33B121g09b1
acaaacacaaacatacaacggggtggcccttctatagggtcaccgtattcctacgcactggtccggagtttaacacctttctttagggtaacccaatttcatttcactgcccgttgttttacactctacatgcctggtatacccccg

SEQ ID NO: 56304 - DNA, 414 bp, Gossypium hirsutum
  unsure (1)..(414): unsure at all n locations
  Clone ID: uC-gsronu33B126a04b1
tatataaaaaaaaacaaaaaaatatgttgttngggtcattttgagtaacattaggggtttataactcaagggcaatgaccttgtgtgacatgaatgataagggacttgacgtgcgcaacccaatctttagacaagtgtacccgggctacccatctcccgagtgtttcaaggctgaaaggagctgacttaccctgcttgtgcccatataagaattcatcgaggctaagtagtttggggattgatccaaaacttgcgatggattttgcctccaaagtgcattccaccaatttacatattttgatagtttcagcaaagctccatttgtcacatataactaaacctgaaggattacaggacattttgggcataacatttcacttcccaacgctttatacaaaatacccattataacca

SEQ ID NO: 56305 - DNA, 315 bp, Gossypium hirsutum
  Clone ID: uC-gsronu33B126b07b1
tttttgtggaggttcatattaaccgctgcggggggttttttaggtttactgaggcgtaacaactgtaaatgtggtaacgaataaggtttgagcaggcgagaaatacaatcgaagagcaaaaggtgataccagctaaggctggtgtctttcaccttcgcttagactagctctacttacgatgaacatggagattataacgttcactgcaggcgagggtttgaggcggagaaccagggaattgagtcaagtggaatacgacgaggatcacgaatgaacgctgctggtgtcgacaagatatcttgggaagcgacgatt

SEQ ID NO: 56306 - DNA, 335 bp, Gossypium hirsutum
  Clone ID: uC-gsronu33B126e11b1
atctaacaaacaaaaacacataaaaaaacaaggggaaatttaaaaaaaaggggggggtttttcaatgttccaggttctacttcacatacccgccaggtcatcgattttgctatagggaaacggaaccccaattcaatgggctgggttgtacaataacaggactggaaaagcccaagcaatccccgtctcaatcgctgctgctgacagaccccattgcaacaggtgctgataccactaacactcccaggccagtcgcctttaccatcactgacacacccggaatggaaaatgagaccagccctatagcggcagaagaggcgcattccttaagggtt

SEQ ID NO: 56307 - DNA, 347 bp, Gossypium hirsutum
  Clone ID: uC-gsronu33B126e12b1
tttatacaatacaaaaaaaaaaaaaaaaatagggggatattttaaaaaaatttgggggtttttaaaaaaaaatataataacgggcgccccttctaaaggttccattctttcttccgcgggcgcgcgctcctttatattctcctatatactcccccatctcccacccactgtccctctttacaccacgcccttactggtaataccctggcgttccccaaccaaggcggcttttgccaaacccccttctctccactttgcatatttcttaaaaggcccacccctctcgcccttcccaacaattcctcaaccccaatgggcaatggcacaccccctctatgtagggcctt

SEQ ID NO: 56308 - DNA, 291 bp, Gossypium hirsutum
  unsure (1)..(291): unsure at all n locations
  Clone ID: uC-gsronu33B126h04b1
gctattcgtccgcataaacttgaatgttattngggatattttaaaacaatatggggttaattacactttcccagcagacattgtttaacctccctatcctcacactggagacaatgacttacacctgcaccaagatcatctctcctataatttcacacaagggtgattactcaaatgaagagcatacattggcacttacttccgccctttgagactattcaattcattaccgactcacttagaaggttaacatcttctcattaaaacccaaactgaccaaagacccaaccc

SEQ ID NO: 56309 - DNA, 159 bp, Gossypium hirsutum
  unsure (1)..(159): unsure at all n locations
  Clone ID: uC-gsronu33B126h12b1
ggtatcgatatacatgaaagagaatggtgtanggggcttttcaatggccattggggttatatacatcatggaaaggctaaaaaggccaaagaagatatgtaagcagcataccctgataagaatttggccacttccacagcgatccaaagacatctaatg

SEQ ID NO: 56310 - DNA, 449 bp, Gossypium hirsutum
  Clone ID: uC-gsronu33B127c10b1
ttttaaaaaaaaaaaaaaaaaaaaaaaaggggggaaattttaaaaaaaaaaaagataaaaaaaaaaaaaaaaaaaaaaataaaaaacctgggggggccctctttaggggttccgttttcctgctcgcgggcttgcgatctttgttttcttctaggggcacctcttttttctttgctgggcccggttttacaccgcgtggtgtgggagatccccgtggtgtccccatttttattcgtttggctgcacccccctttttcgggtggtggtttttcgcatagggccccactctctgcccttttcccaatttgtgcgccccctgtggggattgtgccccgccccttgtcgcgctccttttcgcgcgggtgttgtgggtttcccccgtagggttccttatactttcgccagcgcctcagccccttgtcttttgttctttttcctctccttttcgc

SEQ ID NO: 56311 - DNA, 367 bp, Gossypium hirsutum
  Clone ID: uC-gsronu33B127d02b1
ctttttccccgcgttgtctgcaggcactaatcggcaaggggggggttggcgatcgctacaactgatgctcaccgcactgaacatgccccttaagacacaccgcatcaaaccagcaggacccccacaaccctcatcttccgactaccgctcataagcgtactcattttgaccaattgctagccaccgatatataagaacccaaggctcagcctcccttgccaattacgccgacctatccgccatcgcctagcatgtgcacgctcctcatccatgaaactcgacaattcacggctttctcttttgaacccaactccgacacacaagcaagctttacaaaagcccgtcctacacataattgaactgaccc

SEQ ID NO: 56312 - DNA, 447 bp, Gossypium hirsutum
  Clone ID: uC-gsronu33B129b11b1
taactccttacaacagttcttccccgtgattgcaggtgggagatcatggcttacttccggtcgctccctcaggttagtacgagcaaggatgcggaaatgtggatcccaactgacacaaaacaatggcaacaacctccgttaataacaccgatcaagtcgatgaacagtgaacctctgggtttgcagttatacttggaacaccctagcccatctgaactggtttctgggtaaactggtatgagttttgggacgttatgttgtttatgttattatacacttcaaaatggagttggggtgacctcaaaacttttggaatgtggaagaagtaggtaaaagtaccatggaggtctttatattaggagtgagattatgttttactttctttacttaaaaaatagacaaattagttcatgtacgttaaatgaaagagcagattgatcttatttt

SEQ ID NO: 56313 - DNA, 303 bp, Gossypium hirsutum
  unsure (1)..(303): unsure at all n locations
  Clone ID: uC-gsronu33B129d05b1
cgcataccatagaattctatttaattggctgctctgcactcactgtccgtatccctaacaatgggaaaggctctatcccaccatatagtttcaccgctctaccataaaaacagttgtgggaacagacgctacccttactcttcctctaagtgatgtgatgaacacatctaacctacaacaagtggaactggccgtgcacgataacatatccagaacagcctggtggcttaccttaccttcaatgggcgatgggcatatacatacattnaattttaggaactatgctgctcctaccaagaatct

SEQ ID NO: 56314 - DNA, 307 bp, Gossypium hirsutum
  Clone ID: uC-gsronu33B129e06b1
ccaatttttaagttttgccataaagacttttatcaggctggatgatgataaacccgtagttgcgggtatttgtgatgggttatctatagtacctatgttttgagtgcctttctgtagtctttttatctccttcaacgctaatatgcaactgtctgtgagggttagacaacacatttagttcattttcaagttttttttttttgtttaatttcattgaatattgacccttgtttgtttttttttcagtgtgttaaaaagagtatgctttcatgacttataaaaaaaaaaaaaaaataaataaaataaa

SEQ ID NO: 56315 - DNA, 435 bp, Gossypium hirsutum
  Clone ID: uC-gsronu33B129e12b1
gttcatgaaaaataattacaaatgttacattatgtggggaatccaagaacttcatcgggcgtcttaaaaaagaaggaggaatctacatggaacaactctatttgatgaccctatagagcatgatcggggctgccgctgtaaaagctccaaccttacttcccctagcatgcgagatgaatgctttttgctaccgactccataattaaaacatgcggccggagtttatacactaagtgactgagaaaacctagccgtaacccaacttaatcctctttcattaaattccctttttatcaatggggatcacatcgaaaaggcaagccacctacgctctttccataagttgggcatgcaaaaaggccaatgtaactctccctttagcggttcactaaacccggcctatagacgaggtactctcatcgtgacggattcaat

SEQ ID NO: 56316 - DNA, 373 bp, Gossypium hirsutum
  Clone ID: uC-gsronu33B129f12b1
aaaaataattacaaatgttacattatgggggaaatgcaagtcttcaatatttgtcttaaaaaaaaaaaaaaggcgagggtacatttattttagggggggcgggacaaatctaatttaatatcggcccccccttttaaaagaaccaacattacttaccccctctatccaaaaacctaacctttttattctctcccctaaattcaatctacttgccctctttttacaactccctaactcaaaaaaccctttcctcccccaactaaatcgcctttcaaaacatccccctttcctctaattccgtaaaatcaaaaaaggcctcacctttccccctttccaaaaatttagcaaccttaatggtcaaagggaccccccc

SEQ ID NO: 56317 - DNA, 251 bp, Gossypium hirsutum
  Clone ID: uC-gsronu33B129g10b1
gacttaacaccacaaacaaacaccgggggcggttttaaaaaatttacccaaggaccggttactccggacaatggcgacgggagacagggggaggagcacaaatacagctagggccaggctattggggagatgaggactaaggggtcctaataagagcagaaccagcacacaatggggggggggaacaaaaggggaagagcctcaatgattctgattcccacctactaattcaaaccctaaaacccagcaca

SEQ ID NO: 56318 - DNA, 233 bp, Gossypium hirsutum
  unsure (1)..(233): unsure at all n locations
  Clone ID: uC-gsronu33B129h01b1
tcccactctttcggaaatgganaaccttgaattcanagggggccatttaaatgtaaatgaatgtttatgaacaaggggggcttattttcttgctttcaatgtattgtatttcggacgtttttggcatctttgtacatccttatcctctcttcttttttcttccggtggtgcttttcatgttatgtttttaatgcataattctacaagtaaaatatattgtttgttttagtgtc

SEQ ID NO: 56319 - DNA, 420 bp, Gossypium hirsutum
  Clone ID: uC-gsronu33B129h12b1
tctcactcgtccggccacacctacctaacttctggggggctttgaatacattagtggttggtgtgaaacaaaccaaacatgccgctcacatggttgaatgggacgctcaaatttctacaactttctttgcatgcgacctggttactgtttttgatgccactgtaaccacataggatatcgtatacggtttcaacaaatgaacagtaagagaggctggactacgcttcaatgctctatatcatgactcttagctacgagaaaattcttatcattgttatcaatgacttttcgtaacaactgaaactttgggaaggacaatgagctcggctttatcattaaactgcaaatatatcatcgtatgaacttgtcgcaattacattataatgccggcctcatgaaaaaagaccaattcaagattca

SEQ ID NO: 56320 - DNA, 476 bp, Gossypium hirsutum
  Clone ID: uC-gsronu33B130a05b1
ttcttggctttatactctaaaaaggtttttctgtatcactttaatggctgcatcctccccccattcacttctcatatcgtcttccttgttctatttggattctttttgggtttttcgttttttcgatcgttgtttaatttcaaacctatctcattctcagattcttagtcaaccttgtagtttctaacatataaaaaccgacggccgagaagtagtcaccaacatgggaaaacgtaaaactcagcgcaataatgccgcgatgttagatagtgacgatgataatagtagtgtaagttcatcgtcgaccatgcgttccgctggaatgtcggtttccggaactgaagaagtagagcttaataaggatagtttacttgatgaagctgtggataatttatacgaaaagaggggttcaacgcgagagaaggctttggcctcgattatcgaggctttcacagcaacttgcagcatgagttcgt

SEQ ID NO: 56321 - DNA, 438 bp, Gossypium hirsutum
  unsure (1)..(438): unsure at all n locations
  Clone ID: uC-gsronu33B130a10b1
ctctgcttattactgtattactggaatccatccgcaatcttctctcgagtgacagtaattttaatcatggaacataattgatcatcaataatagactggcaaggataacgtcatattctgtaaacctttgctgtagaaaattaaacttaaattggcatgtttatttcgttaaggattgctagtgttgcatttcatatcctgtatttgggtcttccccatggcacatggcatccgttgggtgtaacatggagaatattttcctcctcttttgtgtgaaattttgcttctcaaaaaagaaaagaagatgatgagtgggaggtgttagtccaaggtaaagccaaattagcatgtcacatgacattgntgaaagggaaactcaactggccctacttgaactatgcatatttacaacatcttttatcatttcaccaaatgact

SEQ ID NO: 56322 - DNA, 325 bp, Gossypium hirsutum
  Clone ID: uC-gsronu33B130b11b1
ttaacgattgcatggatatgcatgctgatgatagtccacaccaagattctcctttctgaaattcctatggtcattcatttgctgctttcttctctttttcttgtaaaatatcttgaaaggctaggaatctcaaaagtatctcgaaatgtattgcaagttcactcgttcatgacaagctggcatagagaaaaaaagaaaaacatcaaaatccacagattctaagcctgcacggtggaagcaggaaatactaatctgattaggacatggccgacccttttagggtgaccaagtttacatgccctggcacacgagcttttcagttttt

SEQ ID NO: 56323 - DNA, 294 bp, Gossypium hirsutum
  unsure (1)..(294): unsure at all n locations
  Clone ID: uC-gsronu33B130c03b1
tctcacgcgtccgcccacgcgtccgtaataaagagcttattgctactggtggtggagttcctcttgttctgaaactaatgttctctccccatgtgtgtacaattcttatagtcagatgctccgagattgttgagaaactttcttctgaaagcaatggggttaaattttttgttgatgaaaaaggggttcaacttgaattggagccaatcatccgtgaattgttggctttgcaacanaattccaaatcatcgaacaaatttccggaggcctgctttacgtgcactgttaggaaat

SEQ ID NO: 56324 - DNA, 308 bp, Gossypium hirsutum
  Clone ID: uC-gsronu33B130d07b1
tcgttttttttaaaccaacaatagaagtaatagtttcattacatcaaatgtactacaagatgtgaccctgattgcataaccggaactcaattgtttgcaagaacacgaaaacataagtagaaaccctagctatttagtcgatttctctatgcttggaacaatatctaaatgggaatacaaacacatataccatatgcatatgagaggaaacttttatgttagataagccctgataaaacagtcttaaaggagggtattcgtgaactgaacatttagggtcttgctataagaacactgcaagcgtgggg

SEQ ID NO: 56325 - DNA, 540 bp, Gossypium hirsutum
  Clone ID: uC-gsronu33B130e07b1
tcgcccacgcgtccgtataacttagggatttctatggatcaagtcaaatgaataaattgtctgattcagagtcaaataacaagtgaagcctaagtggatttttccttaggtattgtcttaatcaatcgaattttccaaaaagtattttcccaaattttctttctatgcattcttagtttagtaattagtttagataaacaaaactcttaatttttagtctagataataaaaagggagtaaatactagtacttgtggttcctttggttcaacaattcggtcttgctaaactatactactgttcgatagatacacttgccttaatcgtgataataaattagtctcaagaaccattcattcataaatctttaaaaacttgtcacgaatatcagataccaagcttttggtgtcgttgccggggaactaggatattaggagcactcaatttttattactttagccattttattttgcaattcaaatttttatttttatttttaatttttaattttcttttctaattcttcatttattctcttttg

SEQ ID NO: 56326 - DNA, 475 bp, Gossypium hirsutum
  Clone ID: uC-gsronu33B130e08b1
tgcccacgcgtccggacgattacacccactgtcctgcttctgaccggagtcggcttcttttccttgatattattcggagatccattcgcacccactcttgcaaagtttgggatgactactgttgttgcagctgcatatgtaggcgccttgcaaaacattttcagtaagagtgcaaagtacagtttatttgatccttgcaaagaaatggcctatatttcattggacgaggacaccaaggttaaagggaaggcgtgacattgatgacgtctgcaacccaagcgagaagtcgccctgttgctggataaccatgaaaaaatgatgctgtgacaacgaatcacgtggcatttgcaccctttcccatggagggcattcaaaagagatcatattagctctgcatcatttaaactgtaaagattatcaaacttaacttaaacaagttaaggatgtttctttgtgataaggaaattgaaagagc

SEQ ID NO: 56327 - DNA, 500 bp, Gossypium hirsutum
  Clone ID: uC-gsronu33B130e10b1
tcgggctatccttgtacttgattcacatctatataaccgagcttaaacgcacccttcaagcgttttgggtcctcggtgttgttggatcattggcaacctacttagtccttgctcaaccagccggagagaacttggttcagtatgttatcgagaaccccatggcagtctggtttgttggccctctgtttgccgcattgattggactcgttttcaaagaaggcctttgctatggaaaattggaagctggtattcttacattcattatacctacacttcttcttgggcacctgaccggtttgatggacgatggaacgaaacttactttactcggttcatggatggctctctttgttatttttgccggaaggaagtttactcagccgattaaggatgatatcggtgacaatccgtgttcgtgttcaattctctacccaaggacaaaaaggaagctttgattgagaaacttgagaagcaaaaattacaatcagatagccattttt

SEQ ID NO: 56328 - DNA, 466 bp, Gossypium hirsutum
  unsure (1)..(466): unsure at all n locations
  Clone ID: uC-gsronu33B130f02b1
ttttccacgcgtccggattgggatcagatttgatgcaaattggttattatgaaatgagtatcccacatggaaatgaagtccaaagagattccgagaaaaaaaatgtttcagtggaggaattggaagtcatcaattaatggatctttaactcagttacttctaagatattaaatactgatgatagaatattagctccattggttttttaaacatgtacctgctaactactgtaattgttttcttagaattttcgtctttaatctggtagcatcattaagctaaacgttgtttatagaacggcaggttcgccttagtactgtatatttggacggccaccggtcggtattactcgtncgttattgtgatttgattattgccgacaaattgcccgcgaccgtccctgttgttatcctatgccgacaaaggctcgcttttgatatttatgtttgagtaagatattgcttac

SEQ ID NO: 56329 - DNA, 408 bp, Gossypium hirsutum
  Clone ID: uC-gsronu33B130f05b1
tttgtggtctgaaagtattattctcatccgacaccctgtttgaagttcatgatagctccatcaatgttgttgatattgtcaaacaacactgcagttgtgctatgtggaaaccaactgggcttccttgccatcatgcaattgctgtctttaactgcacaggtaggagtgtgtatgattattgttcaaaatactacacagctgaaagcttccggatagcctttgctgagagcataaatcctgcttcgaccattgctcacccttgtggaaatgaagaagattccgaggaagacgaggatcagataatgcctccaagcatctcacgacctgtagcagctcaacaaccaaagaaaataagacgaaacataagccagggaaatattgggagatctgtgtgttgtaccccgtgca

SEQ ID NO: 56330 - DNA, 367 bp, Gossypium hirsutum
  Clone ID: uC-gsronu33B130f06b1
ttttccacgcgtccgtggttgaactccgtcccacaccatacacacagagttgtaagctgaggcttgccagccatatttaacaagacttctgaaatacaatcagattcagttggttatatgtgtccaacctgcaaggccaaatttctaggcagctcactacaataagcatgcagttcatttcccatgtataaaaggataaaaacaacagtgattcagctatgaatgatctccacctttggtaagcctttcatgtacaaagttacagagatagaaccccctaatgttggtaacttaaattaaattgatatttgtatattgcagagcctacctctggtataattttttaatctaagattttttttcctaa

SEQ ID NO: 56331 - DNA, 208 bp, Gossypium hirsutum
  Clone ID: uC-gsronu33B130g03b1
tttttaattgttgtaatttaaacggccttaataatgaaattgtggtatcttaaaatgataaattgagaggagttatagttgtaatttatagtgcttgggtgtcgtggttaaaatgtataactctgggattgatattgatgatgtgctggtaatgaataaatcgagtttaatttgccaaatgacatgttattttagaaatacaaattga

SEQ ID NO: 56332 - DNA, 401 bp, Gossypium hirsutum
  Clone ID: uC-gsronu33B130g10b1
tttcggacgcgtgggccgaagcataatggctcagtcatctggtagcaatactgggaagaagcttattcgaattgatgttagttcagacagcgtttgcccatggtgctttgtgggaaaaaggaacctggacaaagcaattgctcaagctaaggatcaatttgattttgagattaaatggcatccattttttcttgatccctcggcacccaaggaaggagtcagcaagagagaatactatgagaagaagtttggatctcgaactcaaggaattttagctcggatgaccgagatatttaggaatgttggattagaatatgacatgtccggactaacggaaaatctcttgacagccctaggctgatctatttggctggaaaacagggtcttgacaggcaacatgc

SEQ ID NO: 56333 - DNA, 147 bp, Gossypium hirsutum
  Clone ID: uC-gsronu33B130h09b1
aaaaggttatattatatatatatctatattcagctcatagcggctcaattggggttgtagcaatggtggatccgctgtatcaccgccctcaccggcttctcctcgacaacactggcaccaaaccccgtagttctttcaccaacgaag

SEQ ID NO: 56334 - DNA, 477 bp, Gossypium hirsutum
  Clone ID: uC-gsronu33B130h11b1
ttgcccacgcgtccgcccacgcgtccggaaaaagactccaagtgctaaaaaagccgaacgacaacacaaggtccgaacattaatgtcgatgcggtgatgatgtcgacggaagctggctgatgatcatcctctgatgatgatatgtttgaatagcatagatactttctatcatcattttgtcttcagaaatttgacatattcttgaatgtctattaccatataggttcatgagggcaattttacttcaatccttgctgaaggggtcagtcatggtttaaaaccttggtaagcaagcgaccttaagtttcttgctatccttcattctttgaagggattaaggtaggatagggaggatttcttgtttcaactttcacaatccatgtagataaaaatactttgtttttgagattcggttcttaatgaccaagaattcagatgattcgtctgaacaggttgcttttccacccattctttacg

SEQ ID NO: 56335 - DNA, 349 bp, Gossypium hirsutum
  Clone ID: uC-gsronu33B132b10b1
tcttattagagaagttgcaggacttattgacttcaatgtgctttacagtgtatgctacacaggatgatattgctgtgtggcagaaatcttcagatattggttgctatgagaagctcaccggtccagatgtctacccagccacgtgtgatgacagtatcgaacaggatgcatcatggtacactccgttacgcccatgtgttacatctccaagacaaaagcttatgaggtcatccgtgggttccctgccaaagtggccacagaggttaaacatcgcacctgagcgcatttcagatgttcctggtgggagtggcaatgctttaaagcgcgatgacagcaactggaaagagcg

SEQ ID NO: 56336 - DNA, 373 bp, Gossypium hirsutum
  Clone ID: uC-gsronu33B132c08b1
tttccacgcgtccggaaggatgatcatcacactaagattaatcttcgagttcgcatgaatgaagcggtcgaagcattcataaatcaaaggttaataagtaaccagtctacggattttatcgatgcattggagatttcgaactccaacaaggaattgttgatgaaactcctgcaggatccaaattcactgctggtgaaacatgttcatgaattatgtgattctcaggcaaagaaacagcaaacaaaaacatcatcactgtcccaaccattgaacacaatagttgtcttgaaggctgtcaaacaaaactgtcctaatagaatcagtaattggccatcaccaaagtctcattatagtaaaaaagacaggggtgtta

SEQ ID NO: 56337 - DNA, 456 bp, Gossypium hirsutum
  unsure (1)..(456): unsure at all n locations
  Clone ID: uC-gsronu33B132d11b1
tccacgcgtccgacgaacttctcctataagcggctaatgattaatctccatcgccctttcataatccacagccctgaaatggtttccaagattatcaagaaacgaactccgccacgatccatcaagcgccatcgccaccaccaccggagaaagacttctccggtgaagaagaatggttcgttctccgtcattgcctccctcaacaagtccatcaagacttgccgtcgtcgcatcgtgaggcttttctcgaggttagcccatatagcaaccccttccaccgccgccaaacgctaccgcaatggcttccaactcctcaagcaagaagaaaacgaagagcaagaagagttctgtgggttcgaaagcaatttcatcgatcctcgtgctttagtgttcgagcggtgcttgcttcaccgntgatttccaagacgaaaagacgatctttcttgacttggacga

SEQ ID NO: 56338 - DNA, 239 bp, Gossypium hirsutum
  Clone ID: uC-gsronu33B132e05b1
gtaactaagaaagatctgatgcaagatatatcttcagaggatgtttgtgttgacatgccgggagcaaacgctcgttttgatgggtctgatatacggagtatgcttcaaaggtggtttcaagaaactcatgttcgattttgggatgagaaatcaactaaagattcataggttaacgggggctaagacgacagattgccttaccagatctggactgttaattttgcttatgttagctgttg

SEQ ID NO: 56339 - DNA, 194 bp, Gossypium hirsutum
  Clone ID: uC-gsronu33B132e06b1
tccacgcgtccggaacctcagaaaaaaaaaacagttattaaacaaccaaattcccgtatattcttgctagttttaggaaatttttagccctaaaattcgtttctgtttctcctgaatctgctaatgtctgctacttctgctttctaaggtacgaccaccgcttttttttcgtcaaaaaaaaaaaaaaaaacaag

SEQ ID NO: 56340 - DNA, 452 bp, Gossypium hirsutum
  Clone ID: uC-gsronu33B132e09b1
tttttcttcttctcatctcagtcgtgcaccctaaatccctaaataaaagtttgtttttcttcagctgaaatcccccaaatttcccatttccaacaacaccagtcaatacacctacaccaatcacacttctttttccttttcatttcactgcactgaattcactcaccatagctactccttttctctcgatctgttagggtttcttttaattttaggctttcaatacagtttccttttaaactggaaggagttgaaagataaaggaaacgaagaggggagtaaggctgttcgctgaaataaagagataaaaaaaaaggttgaagaagatgattttcaggttttttttacggtaaggtgttccacgagcaccttcttggaattaactgtgttaaatggagctgcttccttttcactgtttacttggcatattggttggttacaatgcgtagaga

SEQ ID NO: 56341 - DNA, 475 bp, Gossypium hirsutum
  Clone ID: uC-gsronu33B134c04b1
cccactcgtccgcccacgcgtccgaaaaaaaaaaaggggaaaaataaaaaaaaaaaaaggaaaaaaaaaaaaaaaaaaaaaagaaaaaaaaaacaaaataaaaaaaaaaaaaaaaaaaataaaagattgggtaataaagaaagccaaaagggtgtgcaaaaaagaaaggtgatcctgaggttaaagtataagttgatattagagagcggggacccatgggagtgatttggcaagttgccgacaagatcaatgctgatttgctttatattggaaagccatgattatggcctgattaagagggcattcttggggagtgaagcaatcactgggcaccaaaacttaaaatgccctgttttgatagttaagaagcccacatgttcctttttctgcaagtggaaccaaaaggattgaaattttcggattacataggcctactttgttttgtttatgtacaaaatttactttagtgggtatg

SEQ ID NO: 56342 - DNA, 352 bp, Gossypium hirsutum
  Clone ID: uC-gsronu33B134c08b1
tgctttcaaagctgctcccgaacccaaatgaggaccggaaaatggcagatggcttgttctgcgacggctgacagggcggcgacgatcaggacacggaagctcatgaccaacccgctactttccaggaaacacttagcacattgatagcattgcatccagagcggcccactgctgccaatgcggaatcttatgataagctttgtaggatgtctgaggtgaaggacccatattctatctcagtgttcaagcacaggactcattctggtcggggtgattctactgcacttgcgttgacatcatgattctgctcagagagcatgagtaaggacgagcccagacacaggctgatcag

SEQ ID NO: 56343 - DNA, 210 bp, Gossypium hirsutum
  Clone ID: uC-gsronu33B134e11b1
gccggaccgacccacgcgttttgtttttggtccaaggaccacttctaacatgacatgtacatggatgagctgcctatagtgccttccaatacatcctacaatggggcatcggtctgctggcactactatgacgactctaatcctggtctcactctgtgggacaacaacattggccgatgctgcgccactggatacagcctcttacggtcc

SEQ ID NO: 56344 - DNA, 309 bp, Gossypium hirsutum
  Clone ID: uC-gsronu33B136a08b1
tccacgtcgggcgatacacagacacaaccagggggcactgtactccgggagcagagtcaacccacagaggaaatccttcaccgcacgaaacgcaacaaacacaaacggggccgcatccgcgcacatacggccataaacaaaaccaggtcagattcacagcaaaaccaacgtgactcgcccttagagtctcgcaaggctaaagaccgaccgagcgcgagctgctccacatgcctgatgaaaaatgcaccacagccaccgccactggggaattgcaccacgcgaactcccgggctcaacaagtcctacccc

SEQ ID NO: 56345 - DNA, 390 bp, Gossypium hirsutum
  Clone ID: uC-gsronu33B136e02b1
tttatatctatattcagctttataaacatgtgtttgtttttcatgccttttcatttttactttgttcaagatcttgctctttctctctccatagaataatatttgtatgctttgattgggattgaaaaaaaaaaaaaaaaaaaaaaaaaaaaaaaaaaaaaaaaaaaaaaaaaaaaaaaaaaaaaaaaaaaaaaaaaaaaaaaaaaaaaaaaaaaaaaaaaaaaaaaaaaaaaaaaaaaaaaaaaaaaaaaaaaaaaaaaaagggggggggccccctttaagaaacccaatttttaagcccgggggataaaaattatatctttttttttggggcaccaaaaaaaaaattccggggccgctgttttaacacggggggatgggaaaaacccg

SEQ ID NO: 56346 - DNA, 385 bp, Gossypium hirsutum
  Clone ID: uC-gsronu33B136g05b1
cctcttgtccgaaaaaaaaaacaataacaccgggacataagtttaattaaagacactttttaaggcaaaaggccatgaaaagataccgcctgtgttccctgcccccttcattcctcaagcttcctttcttcttggggcccccccctttatggttcccaaggttccctccccgggcttccgactacatgattcttttgttcgtgacccctaatttcacttcccgggccccccttttccccccctttggcctgggaaccccctggcctcccccactttattccccttggaccccctccccctttcccccgtttggttttttccacaaggcccccccccgttccccctccccaccagtgccctcccctttttggtcaatggccccccc

SEQ ID NO: 56347 - DNA, 509 bp, Gossypium hirsutum
  Clone ID: uC-gsronu33B137f02b1
ctctcgcttccgctgctagtggcgaataaaaagaggggggggtttatttaaaaaatgagggggggttaaaaaaaaaaaaaaaagaatatatattaatatattatatatttgttggggtgttttttaaagttaaaaatgggtgggggctgttttaatgggagggggggggccttttttggggttccaggtttttttccttttttttggcgaggctttagtttttttttggggcgccttattttcaattcccgggccggggtttaccctgggggggctggggtaacccggggggggcccaattttatttggcttggggggcttcctctttttgccggctggcgcttttgcttttgggcccggtccgttcctctttttgaacattggccccccctttttggggatgggtcccccccttggggggggctttttacccgggggggggggggggtttttgccagggggcccgttccttttcctggggctttttcccctttttttttggttttttt

SEQ ID NO: 56348 - DNA, 472 bp, Gossypium hirsutum
  Clone ID: uC-gsronu33B137f09b1
ataaaaaaaaaaaaaaaaaaaaaaaaaaaaataaaaataaaaaaaaaaaaaaaaaaaaaaaaaaaaaaaaataataactttattaataaaaattaaaataaaattataatatgggggcggcctttttagaggtcccaagtttccttccccgggcttccaacgtattagtttttttttggggccccctaatttcatttccttgcccgcctttttccaccctcgggcctgggaaacccctgggtttccccactttattccctttgcaaaacttccccttttccccagttggcgttttaccaaaggggccccacccgttcgcctttcccaccagtggcccacccttattggcaattggacccccccttttaccggccctttaaccccggcggttgtggtggtttaccccattgtgcccgttccctttgccggcgcctttgcccccgcttctttcctttttttccttttttttttc

SEQ ID NO: 56349 - DNA, 320 bp, Gossypium hirsutum
  Clone ID: uC-gsronu33B139d09b1
tttaaaaaaaaaaaaaaaaaaaaaaaaaaaaaaaaaaaaaaaaaaaaaaaaaaaaaaaaaaaaaaaaaaaaaaaaaaaaaaaaaaaaaaaaaaaaaaaaaaaaaaaataaaaaaaaaaaaaaaaaaaaaaaaaaagaaaaaaagggggggccgttttgggtgttaaaaccttgtctgcaccgccctgaatggccttgcagcatattgtggttacgcacaagtatttaaatgggcctgcggtccacaccgatagtcggtgcaaaccaatgggtagcctgaattaataattttaagcggaatgtctcgtcccattgagcggg

SEQ ID NO: 56350 - DNA, 205 bp, Gossypium hirsutum
  Clone ID: uC-gsronu33B139d10b1
tttacgcgtacgcttattactggtccgaattggttttcgatgggtactcgagttgatgttttgactacaatacttatctggtgttgctctacagagtcacgctgttatgtacacgcattttcaaccttttagtcaactcttgctgtcactgatgctcatttacttggacttagcattgcagcctctgacttgatcacaccctgat

SEQ ID NO: 56351 - DNA, 241 bp, Gossypium hirsutum
  Clone ID: uC-gsronu33B141a03b1
atcctctgtgtccggttacaggaaagacgagtacagttggaggtatgatgatgataccccagaagatgtgattcgagcttcaactgccttggaaaatcttcaattggacagaaaggcccggaatcttagtacttcttggcggcatgccagtgatggaatgagtgaggatgatggcagggccgatcatatgtagtgccgaacaacatatgttgcattatggcatgtttagtttagccatgta

SEQ ID NO: 56352 - DNA, 559 bp, Gossypium hirsutum
  Clone ID: uC-gsronu33B141a12b1
cccacgcgtccgctcctccttactattacaagtctccacccccgccctcacctagtcccccaccaccatactactacaagtcaccacctccaccgtctccctcaccacctcctccttactactacaaatcaccaccaccaccctcacctagtcccccaccaccatactactacaagtcaccacctccaccatctccctcaccacctcctccttactactacaaatcaccaccaccaccttcacctagtcctccaccaccatactactacaagtctccagtacctccaccatctcctagtcccccaccaccatctccctcaccaccacctccttctccatcacccccgccaccttactattataagtcacctcctccaccacctccttatcactactagtcacctctccttgagtgaaatttccacctcattattaccctacatcaccaccagtttcaaagggccactaagctaagttaatatttaatctctttactcaggttgaagatttgataaggagaagaatattgtgaatttcttgatagcttcctgacatgttt

SEQ ID NO: 56353 - DNA, 589 bp, Gossypium hirsutum
  unsure (1)..(589): unsure at all n locations
  Clone ID: uC-gsronu33B141b06b1
cccacgcgtccgcccacgcgtccggtgaagataagtaaaatggggtcaaagaagcctttcctggtggcgcttctagtgcatgctctttcttctggcatgatcttactgtccaaggcagtattcaatatgggtatgaatatatctgtgtttgtcttctacagacaagttgctggaacaattttcatggtccctttcgccatggttttcgaaggaaaacacgccaagccactttcaatactgacctgtttgaagatttttatgcttgcttcgctggggattaccttaaccttgaatatttacggagtagcactcatttacacatctgcaagccttggtgctgccaccattaattgcattccagtcataacgtttgccttcgcagttttactcaggatggagaaggtgagagtgaagactgtacctggcattgcaaaagttgcaggtatagctggtgtgcatggctggngttgtcactctagccttntacanaggacccgctntgaaacctcccttncatcttcataatttccgtccccatagcggcgcccaggatggtgaccatgaccatgcttcttctgccaaaaattgg

SEQ ID NO: 56354 - DNA, 525 bp, Gossypium hirsutum
  Clone ID: uC-gsronu33B141b09b1
ctggaattgggccaggtagcttcagcagtattcctccagcaggtggtgctgaagcttcagctgagttttcaatgaaaattttgtgcccagctgggaagattggtggtgtaattggcaagggtggctttaatgttaaacagttacagcaggaaacaggagcaggcattcatgttgaagatgcagcaacggagtcagatgagcgagtaatttgtgtctctggaattgaggctcttgggaaccctagatcgcatacaatagatgccattctacagcttcagaataaaactagtgaatcatctgagaaaggtacaattactactaggttgcttgttccatcaagcaaggtcgggtgcattcttgggcaaggaggtcatgtaatcaatgagatgaggaggagaacccaggcagatattcgtgtatgctcgaaggatgataagcctaagtgtgcatatgaagatgaagagctagtacagatatctggcattttggtgtcactaggatgctttggctgagattgcttcaagc

SEQ ID NO: 56355 - DNA, 533 bp, Gossypium hirsutum
  Clone ID: uC-gsronu33B141c08b1
taccacgcgtacggccacgcgtgcgtcctgcacagttacattccaacctcaaatccatacagttgtacaggaggcagtcgaaactcgtctcagaagcagcttactatctcacaaatcttgtttcagccaagtctttcattctagacttaaacgccaaatcactttctattgaagaaagtgaattcatggagagtatggaagcagcaaggttggttaatagagtgccacaagaaaccgtaaccaccatcgataatagatcaaaattcggaaaactgatggatcctggtccatcaacactgttgcacgtgaaaacacaaactaacattaatggtggatcaaactatccttacatggaagccgaagctggtgaactaacagttggcgatgtggagagattacttagtttgtacaaggatgtagtaacaaaatataccagtttgtgcaacactgttagacacttttctgttttcagaacacagacatgatgatatcgtgagagagcccaatggaacacacaaggacacttgtagcaa

SEQ ID NO: 56356 - DNA, 553 bp, Gossypium hirsutum
  Clone ID: uC-gsronu33B141d12b1
gcggagttagcatccaagactggtggcgcaatgaacagttctgggtgatcggtggtgtctcggcacatctttttgctgtcttccaaggcctgctcaaagtccttgctggagttgacaccaacttcactgtaacagcaaaagccgctgaagatgccgagtttggagagctttacctctttaaatggaccaccctcctaatcccaccaacaactctaataatattgaacatggtgggagttgttgccggggtttctgatgcaattaataatggttacggttcatggggtcccttatttggcaagctattcttcgccttctgggtcattgttcacctctatcctttcctcaaaggtttgatgggaaggcaaaacaggactccaaccattgttgtgttgtggtctatacttcttgcatcaattttctcactggtctgggttcggatcgatcctttcttgcccaagcaacaggtccagtcctcaaacatgtggagtggagtgctgatcatgccaacttcttattatatcaccattcattgtttgagtccccaaatctc

SEQ ID NO: 56357 - DNA, 508 bp, Gossypium hirsutum
  Clone ID: uC-gsronu33B141e02b1
attgaaaccctagcctctttttaatccctcatttggccgaccagaactcacccccaatcgccacaccatcattgtaatagatgactagcaatgagttgggcttgattttgaagaggaagatgcaactctgacaacccgattgattcaggtacggaggcaacatggtgggggtagctggcgcgtacgaaggctgctggtggtgtcgacgtggaggcgccattcatggtagtgctggaggctactgtgttccttgctgctagggttctggaacattgataatttgggcttttcgggcctattctagtagttgggccataatttttggaattggactgcaaactgggccgctattgacatttggatttttatattattgtatttttcatttttttgtggtttttgtttgatttgtatttgcgcggtccccggcccaaattgggctttacatgcttgttgcaagcatgatattgtgatcctgtagttgaaccatttttgattgtggagcttt

SEQ ID NO: 56358 - DNA, 518 bp, Gossypium hirsutum
  Clone ID: uC-gsronu33B141e05b1
tatgctggttatgactgttggaggagttactgcattagctactggtgtttatacaacaagagaaggagctagagtcacatggggttatattaataggatacttggacagccatcactgatacgagagtcatccattgctaaatttccatggtcgggcatgatgtctcaagcaaggaaccgaattttaaattatagtacagcagcaacagtggaaagcaaacagagtcttcagaatgttgttctccacccctcgctgaaaaggagaatagagcatcttgctagggctacagcaaacaccaaaacccatcaggccccattcagaaacatgctattttatggacctccaggtaccggtaaaacactggttgcaagggagatagcacaaaaatcgggattggattatgcaatgatgactggaggtgatgttgcaccactgggtgcgcaggctgtcaccaaaatacatgagatatttgattgggctaagaagtcaaagaaaggtttactgctttttattgatg

SEQ ID NO: 56359 - DNA, 521 bp, Gossypium hirsutum
  Clone ID: uC-gsronu33B141f02b1
tgagactaaaataccaaaggaggggaccacaagctttccattggtttctaaggaggaggaagaaaatgttagctcggttaagaagatagaagaagataaattaagtgaagcagacacttcagagaatatctcagaagattcttttaatgcaaaggaagtagcagagacatgttcagaaaaagaagcaatccaggagcttgacgatgccaagaaagatgaagctgccactgctcaatgtccccaagtggaggaatcaagtgagcaatctttgccttcagaattgactgttgagaacctaaagcgtggagctgaggccagtgaagaagaggaagaaaaggtgaaggaagtggaaattctcgaaaaggaaagacctcaggagcctgaagctgttatggatcaagaaaccattatagttcaggcttcaataacagaggaatcacaaaagattgaagcaaacgaagagaaaaggaaagaagccaaaaagcttgacgatgggaaatttgaagactcgtcagctggag

SEQ ID NO: 56360 - DNA, 414 bp, Gossypium hirsutum
  Clone ID: uC-gsronu33B141f07b1
gttttcctttttcttgttgaataataagaaggttttcacttttttaactcaagccttagatgaaactggaaccagatattataatatccaaatgttagctaatcaaaatcggaattgtttatgttcatatatactgaattttcgatgtaagatctcaggatattaaaatagtttatattccaactgtctttgattgtaaaacccaactagaattaaatactaagtatacataaacaaaatatatgaaaataaaaaaaaaaaaaaaaaaaaaaaaaaaaaaaaaaaaaaaaaaaaaaaaaaaaaaaaaacaaaaaaaaaaaaaaaaaaaaaaaaaaaactaaaagagggggcggcccttttaagggatccaggtttactaccccgggcttgcaacgtaatagtttttttttgggg

SEQ ID NO: 56361 - DNA, 528 bp, Gossypium hirsutum
  Clone ID: uC-gsronu33B141f08b1
cggacgcgtgggcggacgcgtgggcggacgcgtgggcgacaatccaatgaatccctgtagagctatgtcagttcaaaccaacaccagccatacctcatcactcatcgccgacgatgaggagttggagttcctgatggattctcatagcggtagaatcctcgccggacatggtggacatgtgactgacaaaactggcaatcgtgatcgaccagctgcagattgtgggagaggtaaaccttacaaatcctgccttcccaacccgaatccagacggaaaaagaccagaaaatcctggggtttataaccgtgggtagaacaccctgggaccgataaccgtggatgctgaaggtgaatggcgtattgaactgcttttagtaattaatttttctttttatggccttggctgccttatgtatgaattttatcatttccttttcaatctgctaggcggtctgcatatataaagccaagagtcatatgaaataaatagggataaaatagtgtgtaattagaattagagatatataag

SEQ ID NO: 56362 - DNA, 545 bp, Gossypium hirsutum
  Clone ID: uC-gsronu33B141h05b1
tctagatcgcgagtggccggcctttttttttttttttaaacttcttttaaacacactcacatgccattgatgcgtgcccgcacgtctttgcaaaagctcgcataccctgagcgagcgagcgtttgcttcacagctgcatcgcgcgtgcacacgactatgggagagcacgcctgatgatggatgctatgggaggaggtagcagcctgctgggatgctattcgcttcttccaactatatgtgaataacagacggggtggataggctaagctggcgcagagagctgaaaataatggatataaagctattgtcctgactgtcgattctccaagactcggcataggggaggcagatgtgtagaacacactggttgtaccttcgctgaagaacctggagggtctattaccaacgaaatttgtttctgatgaaaaaggttcaggtttggctgctctggccagtgggactcttgatgcttctttctgttgggaggacatcgcatggctgaaatctatacaaacttgccaattctgatcaaggggtgctcactc

SEQ ID NO: 56363 - DNA, 456 bp, Gossypium hirsutum
  Clone ID: uC-gsronu33B141h09b1
cccacgcgtccgctcgaacgattgccgattcgaagacagctttcgttatttgaaaaaaaaaataataataataataataatcttataagaatcaaatataaacataaaaatcttttatttgttttttttttcttttgaatgaatcgcgactatattctgattaaggttcttcccaaattttagctttctttttttaaagctttgatttgattagaggaattgtttccaagttacagagaagttgaagattttaatgaagctaagctttcattgactaaagaggggaaagcgagttgactcaacgttggaactcggtgctgctaaaggtcaattgggattttgctttaaacagaatatttaaaaatcgaaggatatttggtcaagatgggtaaaagtcaatgaaaactacttggatgaagcttgtttgtgaagctgagtgtacacattctaaccata

SEQ ID NO: 56364 - DNA, 569 bp, Gossypium hirsutum
  Clone ID: uC-gsronu33B141h12b1
caaaaagttagtatctgttctaaagaacgtgcctggaattaaaatagagtccacctacatacttcctgcaagcatggttccagatgattttggcccggaaacagccgctggtaacattcaagaaaatgtgagccatgcattaggtgaattgcctgatgatgcaacaacaaaaggtgatgctttagacacaacatgggatgaactaggacctgtgtccaacacgacttcaaccagaaacgaatcacattcaggataaggaggcaaaggatgggcaccaaagcgacatattccgactattcttctcttcagaggatgaatattctgattccacaggggaatatcaagtgcgacacgatcggggctacaacagaaagccggggtagatgaggaagacagctctttgctgtgcaaatccttgtattagtggcacagtgtaagagtgttggggataacacatatttttcagcgctctctgggggtgtggatgagtgttcaaaatatgatgtcagccgtctggtgctgctggagaagcatgaagaccgaaaatatttgaggactatggaagagca

SEQ ID NO: 56365 - DNA, 406 bp, Gossypium hirsutum
  unsure (1)..(406): unsure at all n locations
  Clone ID: uC-gsronu33B143a05b1
cccggctactacccccccgnacaaacaaaggcaaagggggggaattattacgcattatgggggagaaaacccccccccccccaggaacaacaccagaaaaacatctaccacgacaaccgcaaccccagacactccacactatctcagggcccgactcccccgcaggatatcacaaacactcaaagccaacaaggccgctatcaagccaaccgcaatcccttcacggactagccccgccccaagggacaccgccgctgccgacccccgcgcacaccctcaccgcactcactacaccagcggcatgactggcaaaaccgactcaactcgcgacacccaaatcacccttgaccctgccggatacccccgggcaacaaccccacaccgttcccaactcacccaactcacc

SEQ ID NO: 56366 - DNA, 376 bp, Gossypium hirsutum
  Clone ID: uC-gsronu33B143c02b1
gcctgcctctcattgcaaaacactatattttgggggggatttaagagcactttttgattctatcagcaacatccttgtagcttttgagcatagggtataacaagcagaatccacatgccttctcaggctttatctgacctcaaagagaagaaagaggacacaatgatgaagaagaagatcgctctcgaaacacctgaatccgagaggaaaacgaacaagatcaaggaacctaagggtagagaagaggaagatgaatcggctgtgaagaagagtaaaaagaagcgtgaggcctcggagctccaaaccgaagaggaggagaggagccagacgagctcggagcttggtgagcccgaggatccacaggaggagaaagaaa

SEQ ID NO: 56367 - DNA, 400 bp, Gossypium hirsutum
  unsure (1)..(400): unsure at all n locations
  Clone ID: uC-gsronu33B143d01b1
cgatgagaatccgnagacaaagctaagcctgagggggacctattaacaccatatttgggttgataaatactttggcagacgacgacccgagcataatttgatcaacaccggcttctattacatcagatcgaacaacaagaccatctgtctgatccacaaatggtatacactcaaggacagttccaccaggaaaaaagagcaagacgtgttgttagacctactaagacatggggtcgtcaccacattggatctacgagtaaggatatgggagacgagacaagccagtggcattcgtgaagacagcaaagatgtggctgcagaaacgacggtacatgccaaatgttgccaccacatatatgcaaaggtaagggatatgtccgtctaacatcgaaattggaag

SEQ ID NO: 56368 - DNA, 297 bp, Gossypium hirsutum
  unsure (1)..(297): unsure at all n locations
  Clone ID: uC-gsronu33B143f02b1
gcgtanaagttctaccaaaccaactgaatcatgtggagagtttttaaaatgaacgtcgtgtaaccaccccccataaggggactgtgcgacaccgtaaagctgatgaaggatggggtacaacggctctggggacattggacattgggtcatcaaggagtgcttgtcacgcgacttagaatgagaaaactcagcgcgaaactcatggggaagatctcatgcaacactatggacgaggaacttttaagggacattcgagcgagctcgggtgctgatgactatggaccctgcagagcatga

SEQ ID NO: 56369 - DNA, 336 bp, Gossypium hirsutum
  Clone ID: uC-gsronu33B143h02b1
cgccccggaatacccggcgcgacccacgccgccggctactagccccaaaaacaccaccaagaagcggggaagcattataaaaaaagcttggggggcaaccaccaacaacagggggcggggcgccgagaaccgaaagagctgacaggggcatgcaccagcagtactaaccaggaacagacaaagctggagcgctgcgggacactcactaccaacggaacactacaagagcggacgaaaatcacgcgctagggaaaggagacctcttatcggagcaacagccaagggaccgggctggagccgccaagtaacatcagatgaaactgagggacagcaagg

SEQ ID NO: 56370 - DNA, 357 bp, Gossypium hirsutum
  unsure (1)..(357): unsure at all n locations
  Clone ID: uC-gsronu33B143h03b1
acaatgaaacgtccggtacgacacaaagangngggggggcttaataaacaattaggggggtaaaaaacacacggaaaagcgggcacagcgaaggacccgcaaatatgacccaacccaacatggaaaccgactgaagaaactacgttaacagaagctacagacacctagacccacccaaagaacaagctaaggaagaaaacaaaaccagcaaaggtgcacaaaggaaccacagacaaggaaagctgcatgacgctgcagacagacacctcacctgaaggggacaagaaacacgcatgaccaaaaggcgacgatgaacacaacaatgacgaccaaacaatcacagacaaaagcgcaaac

SEQ ID NO: 56371 - DNA, 305 bp, Gossypium hirsutum
  Clone ID: uC-gsronu33B144e03b1
ctctttcacccccccacgcgcccgcccacgcgtgggggttgtttatagaattttttccctcactccccccgaaaaacaaaatgacttcaggctgcaatcgcggatcctaactgcagcagcggcgacaactgctcatgcagcaggaaccttaacctcggatatccggagacgacaaacagcactcagaccatcatccccggagctgcgccagcgacagatgaccattgagggaccagacatgagcactaccgaaacaggacatggatgcaagtgaggatcaaaccgatcttgcgacccatgcacct

SEQ ID NO: 56372 - DNA, 256 bp, Gossypium hirsutum
  Clone ID: uC-gsronu33B144f07b1
ctcgtaactccaccggtcacagcggttcgtatagggagaaaatgagatgaaactatggcatgggccccgccatcgagtgcggcatgctgaaactctcgggccgaatagacacccttaggaatccaggtgcttcgtattcgaatagtctatgttacctaattctttctgacagagtaatttagcttaattctgaaccgagtgtcacaaaatcgagctctttaaactttacgacaatgaaagcgaaaacccatcacag

SEQ ID NO: 56373 - DNA, 274 bp, Gossypium hirsutum
  Clone ID: uC-gsronu33B144g07b1
tcgtaatattccatttgtattgacttatttagggcaggtgtattgtactgcttatatatatggtaatgtatacaggtaatgatttgaataatgcgtagacacaacatgacatttttcttctccgattgaagaaaggcaaacaacatgagtgtccaataagataacaaaattttgggcctaaaattagaggaacctaaaggggcgcccgccggaaaggaccaaaactaacctccccgggcggaccatgtaatagtttttttattggggcacctaa

SEQ ID NO: 56374 - DNA, 247 bp, Gossypium hirsutum
  Clone ID: uC-gsronu33B144h01b1
ggaaggagagccacactgtagagaggggtattactaagtggtctgatgagggggacctcatctagctaaaccgggctatgctaacagatagctaaggattcagagacgactcactgaagcagatgtgcaccacacgggcgcgggaggagcaatacatggagcctccagcaaaggagaatgagagaggacgattttgatcatgctgataaaccagagagaacgctgatacgggaggaacaagtactac

SEQ ID NO: 56375 - DNA, 408 bp, Gossypium hirsutum
  Clone ID: uC-gsronu33B145b09b1
cccccctttatgctactcctcccagaagatgaaacaaagatgaacccttatacaccccctttttgtattcacaccccaagctcccagcttaccacccccctccttccaatcttattatggttccctataccaaagcaaaaaaaaaaaaaaaaggaggaagcttacccatttttaccaaaaaagcctatacgaggtccggctgccgcttacagtggcacccacagcggaccgccgaccggaccatggccgaccttgtggccaaaaatcatccaccctctccctctctctccttttttgctattatcatatttcttaatatcacattatatatatcctcccacaatatcacgaatattttaaaatccatattacgcatatatatatcctataccattcaatccatacatc

SEQ ID NO: 56376 - DNA, 139 bp, Gossypium hirsutum
  unsure (1)..(139): unsure at all n locations
  Clone ID: uC-gsronu33B145d09b1
taaataagtccctcgagtgtgtcttcttgcctatgtgggcgatgattgactatgtctgtggttttatacaatgatggaatgaccagtcaatggcctttgtctgnttnaaaaaaaacacacaataaaaatatataaaaat

SEQ ID NO: 56377 - DNA, 371 bp, Gossypium hirsutum
  Clone ID: uC-gsronu33B146a08b1
tatagcgaaatacatggaagaggggggcttttctttacttctttgggtgttcacaaaaatctcaggtcctcagcttaaaaactcagctgccagatgcaagctgataaagatcaaggcctcccacaagctctcctaagccggcaaaaaagagacagcccccgctacagcaccctacattgataagaaagctgcgcgcccccatcagcccttgaaaactctggggacccagtaccgcacatagacagtcgtactcataaccgcattaagtcccgaaggtgcacagccttctgacaatataacaccgtctgctagggaaggcgccaaaatggatccttttcctacataaaaggattggctctcatggctgggca

SEQ ID NO: 56378 - DNA, 165 bp, Gossypium hirsutum
  Clone ID: uC-gsronu33B146a11b1
tcattcgtccgatgaaaataagaaacaatatgatgagaatttaaaataaaatatcgttgggactaggaaacagtagaaaacgaaaacaaggaatcgatctcaacctttctacttgtatattgtttttttgatcgcttaacatgagttccatacttgttttgatga

SEQ ID NO: 56379 - DNA, 277 bp, Gossypium hirsutum
  Clone ID: uC-gsronu33B146d11b1
tcttttagtccggagggcgaggctgtattatctaagagataagcttccaaggttgtcgactttcaaatgaaagacactgccgatgccatcatcgctcgggttcttcttccccaaaaattccaaggccagtttcttagttgcatacatgttgtaagagctttaatttctatgatccgcccccgcccccttttttccccttttgttgtaaaatttgctgttttggtttgggaaaaaaacaactgaattcaaatattcaatgctttgcttaattcatttc

SEQ ID NO: 56380 - DNA, 357 bp, Gossypium hirsutum
  Clone ID: uC-gsronu33B146f02b1
tttctcgtccgcccactcttccgcccacgcgtccgatttaaaaaaaaggaggaattttttaaaaaatttttggggggtaccaaacaacaaaaaaaaaaaaacataaaaaacttacgcttagctaatagctttggcttcttgtttcatgcactttttaccagggggggccccctttgggggacccaagttcccttccccgtgctggggccttattggtttttttttggggccccctaaacatattttcctgccggtgttttcccacccttgggccggggaaacccttgcctttccccaatttaagcccctgggagcccatcccctttcgcccagtggtttgtttaagaaaagggcccg

SEQ ID NO: 56381 - DNA, 356 bp, Gossypium hirsutum
  Clone ID: uC-gsronu33B146g01b1
ctcgcccgcctggacgtaccgggccttaattgccggacctgactctacgcgtccgttttataccgtgtcagaacgcacgatcggtgtggacggttgccttccagtttccgttcggtgccaatcttcaggataatgttctggccatggcactccagtatgtacgttgcgtcattccttctgtccagaggattgctatggccatatgtccatgtggatcgagccctactatgggaccaaaaccatcttcaggttgtaacccagcgcttaccctggctcattggatctgccagagctaccgttttcatttgggggaagagatagctgaaatgcccatcacttggtggccactcaacatt

SEQ ID NO: 56382 - DNA, 395 bp, Gossypium hirsutum
  Clone ID: uC-gsronu33B147b08b1
ttattaagaaaaaacaaagacaaaaaaaaacggggggggttaaaaaaaaaatttagtcaaacaaccacgaaaaaccaaaaagcacaagaaaaagaccccaatatacccgaggaggtgctgaaaccccgccctgcccccgagatggaacgaccctctactctatacaacgcagacgttcggctttacatgcatgccaacacgcggaacgcggacgacagtgaacctagtcgcccaccactagacacctgggcccgacccaccctcgaggatggcgagcacccctggatcttgcaaccagtcagaggctggcggaccgccagggaacagcgaaaagagcccctccctggccctgggggaggccaaaaaccctatggtgagccacaaacccaactcct

SEQ ID NO: 56383 - DNA, 453 bp, Gossypium hirsutum
  Clone ID: uC-gsronu33B148a04b1
attcgcccacaggtttgttaccaccacaggaaggccaggccgaacgggggggggtttgtataaaatcatctgttggtgaacgaaccagaaccttggatattcggacaagacaaccagcactcagaccataacaatacgaagacgcaaccaagcacgaattccctattggtaccagaaatgaacactacagaaaaaggacatttctgccagtgtggatcaaactgcacctgtgagccacgcaactggcgaaaagcatgatgaaagccatagattatgaaaaaaagaaagcagccaaaaaaaacaggccctccgtaatggagaatcgccatgtaacgaccccctctcaatgcaacctaaaaaaaggccactaagggggcccccccaaagaaaaaaacccacggccacggactcaaaaacccccgcgctcccccaaaaaaccccgggtggaacccc

SEQ ID NO: 56384 - DNA, 228 bp, Gossypium hirsutum
  Clone ID: uC-gsronu33B148e07b1
agctttgttacatagctgagataaaaaacactaacgagcaaggggagcttgtttgaaaaaactgtgcgtaaagacaaaggggcacaaaaatttaacaacaggaaaggcttaactaatgaaagctttttacctcacccacaaaaaacacaacctaaaaatctactcatccctcactttaaaaaaaaaaaattaacctccccgcatctatccaacccaccccgatccaat

SEQ ID NO: 56385 - DNA, 299 bp, Gossypium hirsutum
  Clone ID: uC-gsronu33B148e11b1
cccattcgttcgcccacgcgtgcgaataaaaagaagaaggcagatagttagctgaaatattaagattggatttagggaaaaagatttggaagataagaagttaacacacacgagaatgaagggggatgtctcttataaggggggacctttattaaggccacaggccatcgttgtacatcttggtgtctggaaacttttttgatttgcccgtttttgttttttaggcgcctttgcttgtaagctcggggggtgaaataactgaaggggcttggcatttatatctttttttgaatggtttg

SEQ ID NO: 56386 - DNA, 316 bp, Gossypium hirsutum
  Clone ID: uC-gsronu33B148g09b1
ggatgcataaggtgtgaaaggctagaagaattgattgttgaacgaacatctgaacgggtggggaggagatggctttctccctcaaccccagtcgagagcaacgccatacgcccatttatgaggaagttccatcctttgaccccatatcagcccccccattttgcgcggtttcttgctccaattgtcctatcacttgtatgccgacgctttaacccaataaacgccacccatcaaacctttccaggacccctggcgctactttgtggcctctcttgcatttaacccttccccctttggtgggcccctcattgcattt

SEQ ID NO: 56387 - DNA, 300 bp, Gossypium hirsutum
  Clone ID: uC-gsronu33B148h10b1
cccatgcgttcgcccacgcgtccgcccacgcgtccgagggtagcacttgaaatggcttgtacaagaaagctgagaagatggtaccgacgacgacaagggcaagagctagaaagaggtagcgattcagggtcgtataccggaaacagtggagacctagatttgagcagacggagtggacgctgatataaacagcgaggtggacccctaccctctggcatgggatgaaccagaatgctattttgatgtggacaccaaggtggctgccgaaggaacacaggctttgactgctgatgcggctag

SEQ ID NO: 56388 - DNA, 287 bp, Gossypium hirsutum
  Clone ID: uC-gsronu33B148h11b1
tcacccgcccacacatttcattttgcaagcagcgaggggacaatcaggggccgcagttgataacacagtatgcgtgaggtacaacaccggcaaggcacgatgatgagagccctggggtatcgaaggagggcagctaaggtatgtatattgcaaatagcgcaaaccatcatgttagcagactggggaagcggatataatcaagagcatgatcgccacctaccctctgggggggactgagtgacgatgctagcaagctgaggttgacgagcttgctggccaaagaaaac

SEQ ID NO: 56389 - DNA, 492 bp, Gossypium hirsutum
  Clone ID: uC-gsronu33B150h04b1
gaagtgtcaaaacccaatattgtagaggtaaacattgtgttgaaaaatggaagaacagatggtatttgcatgggtaatgatattttgcctcgccatagcaccagtctatggccaacactactccaaaactattaagctaggtggtcgggtggaaaagaagacgcgactccgcttcttctaccacgattttcccggtggcaaaaatcctactacagtgctgttagctcaggccaacatcacccaggatttcttttccccatccccatacagcagcttgtatgcaatggatgatcccctcactatagggcctgaacgaacatccaccaccatcggaaatgcccaagggctctacatagcattaagtcgagatcctaacaagttcactgcggttttatacgcggattttgcttttactaccggcaggttcaatggaagctccttcagtttgttctcacgatatcccctcactgattttgttcctagccccgacac

SEQ ID NO: 56390 - DNA, 557 bp, Gossypium hirsutum
  Clone ID: uC-gsronu33B153g03b2
aattaggtgagaaagtctcgagcttggaagttaactgcttttcagcgcttggatttcacttgtgatgatgtgttggactgtttgaaggaggatagtatcatcggaaaaggaggtgctgggattgtgtacaagggacttatgcctaatggtgatcaggttgcggtgaaaaggttacccgcaatgagccgagggtcttctcatgatcatggattcaatgctgagatacagacactggggaggattaggcacaggcacatcgtgagactgttgggcttttgctcaaaccatgagacatatcttttgttgtatgaatatatgcctaatggaagtttaggagtggtttttcatggttagataggggtgtcatatgtcttggattcctaggtttttgattcctcgttgattcttataatgttcttttctttctttatctttttttgttctctctatatatctttttccatctctttatctttatctttctctcttactatctcttctttcactactgtattctttattttctcattctcattccttcatatatctatattctt

SEQ ID NO: 56391 - DNA, 464 bp, Gossypium hirsutum
  Clone ID: uC-gsronu33B154a11b2
atcttattcgccatgcaactcaccattgccttaaccagggccttagtccttacgatgggcataaaacttgacttactacagatcatggtcaaaactatgccaaaagctttcctatgcgctaaagaattggcatacgagttggccaccaacatccccaatacacacgtcatgctagaccgcatgctacacctcctggctacctacttgattaccaattgctccttaagcagtttttcagatagtatagctgagagactctaggagagactccatggcttcgaacttttgaccaaaaatgagaccaggattaatttttgcgacattattttcaccatctatgacaaggaccttacaagagcctttactacagttaatactccgtgatagaaggctagactatacttcatattgccttttctaaacttatataaagttgtatttagatctaatagttgaatcagttt

SEQ ID NO: 56392 - DNA, 290 bp, Gossypium hirsutum
  Clone ID: uC-gsronu33B154b01b2
accatgctttcatagaaggaatatccacatggggggggaatgacatttatttgattactggaagaagggacggtagaaggagctttagatagggagtggatgagaatcaattgtgacagagaacagacaattaatgagaactctgcagattaaagaatctgggtcttgaaagaatgtgcatatgaattcttaattaatcttagaatgatatatgatccaagattgtaacgccctgatttattaaatcatgatgtgatgaattctgccataattaaggatatgcatcagag

SEQ ID NO: 56393 - DNA, 283 bp, Gossypium hirsutum
  unsure (1)..(283): unsure at all n locations
  Clone ID: uC-gsronu33B154c05b2
actggctcgtcatgcctaagaccggaaagatgaattagagagtttgaaacatttactcactttctcaagcataagtgtnaatgtttnaaactttctaattcaacttaacatagtagtgaatggttattccttagaccggaaagttgctcctaacaaaatagtgcctgaccggttattgcttaccagaagaatatagataaggctttctacactatcatgtttttgaggctgctgtaactttaagtctatcatatttgcgaccattactttccattttaaccat

SEQ ID NO: 56394 - DNA, 426 bp, Gossypium hirsutum
  Clone ID: uC-gsronu33B154d06b2
gctcttttcgtgctacgacttgtcttcaagaaccagtgtgggggacccgacagttgcgtttgagtttcagcaggcggactgtcactgatatagccggcgaaaaattatttgataccggcagtcctctgaggaacgtaatgctaggcgtttgcccccacgacgtctgcatcgtgtataatggagagcgaacagcagctagggacacgtgtgagctttgcttagagttacaatcagacaagctgcttttctgacaaatggtttgacagtaaataaatagcttattggtggtaatttactaatttacctatccggcttgtttccgatgaatgaaggtgaagaatttaccgaagttagtacgattgttatatgtattggtcgaaatctttactatgctgtcaaaattttttttcattgtatgattttccc

SEQ ID NO: 56395 - DNA, 314 bp, Gossypium hirsutum
  Clone ID: uC-gsronu33B154e02b2
cccatcttttacgtccacgcgtgcggtaatgatcgattcggcagagttgcggaggttcattccggccaaccgcagatttgtcggaaaaaactaaacactctctttcatatgcggcgatggcgattgcggggcctctcttaagtggctcaaaaggagtttgagctacaaagggtggggtggggttcccaaaatggccttccttgaatatgctccggccgccttaacacgggtccttcggcggttagaaccttttaaaaaaggaaggagtttcttacccccgcctggttctatttgtcaattaaacccctgaatgt

SEQ ID NO: 56396 - DNA, 454 bp, Gossypium hirsutum
  Clone ID: uC-gsronu33B154h11b2
aaaaaaaaaaaaaaaaaaaaaaaaaaaaggggaaaatttttaaaaaaaaaggggagaaaaaacccaaaaaaaaaaaaaggggctgccccttttggggttccatgtttccgtccccttgcttgcacacgtctagcttcttgtttggtgccccttaatttcatttttttggccgccgttttccaacctcctgtctggaaaacccttggccttccccactttattccccttgctttccttccccttttcccctgttggcctttttcctttttggcccttcccgttcgcccttcccaacccttccccatccttattggcttttgggcccccccctttttgggccctttaaccccgccctttgtggttgttcctcccatggtgcccgtttcatttgccagccccttaccccccgctctttttgttttcttccctccctttttttccctttttccggttt

SEQ ID NO: 56397 - DNA, 537 bp, Gossypium hirsutum
  Clone ID: uC-gsronu33B156c07b1
cactgtcgtactgaaacagaacataatgattaaggctgtaagggctaacgcaccgggagctgagcacatggctactgatgccgaagtgaatgaatttgaccaagacccggatgacttgcaggggtgactatgacaatcttgaggtagacaattgcatgaatgtataattagcgactctcatgaatgtgttaacctgatttaaagtgatcctggctaatattgagttgaataccaatccttggaccggtctctgatgaatcggcttccagagatgaccatgacaggcatgaataatagacgagtgtgttaaatgacaggagagcatatggataagtggtggctgtgcatgtgaagctgaaacccattacgatcatctatattgtacttagtaaagggatagagggcgggcgccgtaccctctttttggacccaaggtcggctttggccggccgatccgggcgtaagacattgacaggttgtgagtttggctgggatctttgcttgcataatgtatataacttacaaatggttgtaaga

SEQ ID NO: 56398 - DNA, 370 bp, Gossypium hirsutum
  Clone ID: uC-gsronu33B156e11b1
ttatcgtggttttttaagttttcgtgaggagatccatgtccagctagaaagaataagcaaataatgctaagtttttattattattgataaattttagattgacattgttacattcaagaagcctacactagttcatatttagtacatatatactttcttaccatatttgctagtttttaaggtaattctcactgcatagatgatatgatttatgtgctttgagaaagactttgtttgtttgatacagtacatataaagcatctatgttatcggtttagtaattaatattggtttatttttagatcacttgcatattactttatttagttttcatgttatatttttctatttatatataataatgtcttaa

SEQ ID NO: 56399 - DNA, 290 bp, Gossypium hirsutum
  Clone ID: uC-gsronu33B156f06b1
gatgatcattcctcaggaaccacatcgccctttcttccattttgcaaatactttccgtaagaatgcacataaggatcttctgtcatatataattctttcccattattaacgtacttatatgacttttctctttgtaggaggagatttatgtttttgatctcatacactttagatgtatctagttctataactttttttggtttttatgtatatatctaaacctatccttaatttactaagcattttatttaagtttatgtaattactttaacttatatttattttttaat

SEQ ID NO: 56400 - DNA, 288 bp, Gossypium hirsutum
  Clone ID: uC-gsronu33B156f08b1
ctctattcgtccgaaattccttaatttttttccaaatcaaaatcgcaacccaactgctgtagccaatcggtagagtagattgaccttacggaatgtttttgtttgaagttttattgccatagatattaaactgatatgtttttcagtgtcaacttttactttggttattttattgtataaagagttacttttttttttactacttagttttttttatcttatttatcttcatctgtttttagattttcttatttgtcttctttcttttgttagattttaatttttttt

SEQ ID NO: 56401 - DNA, 217 bp, Gossypium hirsutum
  Clone ID: uC-gsronu33B157e05b1
aacccattaacccatctatcgacatggaccgacccagattcgtaatcgattctgccgaagtcgaacagatggccaaacaatcacggcaaacggtgctccatctcctgccgtcgttggtcaaatccgcccaggccttagcccgtccgccaatctcgaactaccacgtcggcgccgtcggggtcggctcatcgggtcggatctttttcggagtcaatct

SEQ ID NO: 56402 - DNA, 181 bp, Gossypium hirsutum
  Clone ID: uC-gsronu33B157e08b1
gtagtaccgaccctctcatcatcacattcactttatttaggcttcctattttttttcttttttctttccattgaataagtcttaaagaaacttaaaccccttcgtattatcagttcataccctatattcccatactccttgttgtcaacatcaaaaaactcaacttttctgtttacttact

SEQ ID NO: 56403 - DNA, 679 bp, Gossypium hirsutum
  Clone ID: uC-gsronu33B157g03b1
cccacgtgatcgcccacgcgtccgtaaaattagaagaatagaatgcaatcatgatcggagaaaatgatccgtagtattgtggttcgtgcggactgctaagagtttggtgcatgtgaagcggctaccatggaagttcctagggaatcgtgctcttctggttgaggggatggctgttgaagtttatttgggatgcccgtaattgccttttcgggtcttcggtcgggaatgctgctggtatgttcaaggcattgccttgatcggaggaaacgttggggtttaaccaattgttcactaatccgagttcgctgttatggtctttctcacaacggctttaagattcgaagacacgaaatttcggatttttattggttttgtttgcttggtagaatgattctaaaaacagactatagattcttcttacactctttcaaaagtgctaacaaaaaaatatctttttttgagtggtgatgtttatatacacttatgatccaggttcgtttaatttcgacttgaagaatcgatcccttttgttcttttttttcgtgttctttagtttgttgtatttccttggtacctttgttttaattttcgatttctgtttttggattgaaattcttctaatataaactcttctttctcttttttatgcttatgtcatctctcttttttctctttcttt

SEQ ID NO: 56404 - DNA, 392 bp, Gossypium hirsutum
  Clone ID: uC-gsronu33B157g06b1
cgcgccaacatggaagctgattagactaacttaaaaaaatgctttttctttttaagagcaaatgatgtcaaaagacccgaaagctggtataaaaggcgcgagctgcgctaaacgtaagagaggacacggcagcctaaacgtatcatgtatttaagccatgcctaggtatacattacagcctgagatcttggaaactcacaccgactttttttctcataagtgtaacttatggctcctgctatcaaacctgtctatctgaaattgatggttgactgttcaatctggaaaatacacattgctatatatacgtaaaagatctattaaacacagaatatcaataattaaacccaacaagtaataacgggtggcccgttttaaaggaatccaagctt

SEQ ID NO: 56405 - DNA, 340 bp, Gossypium hirsutum
  Clone ID: uC-gsronu33B157g09b1
acgtgccaaactttaaatacggtaggacggtaaaaaaagaaaaaatgagctgtgtgaataaattccgatttggggaaagcttgaagccgacttatctgcattaagtgtgtttgcttaactcgtttcttctccctagatggtgctgtttcatcttgctgtgactggtgaacctttctggttttaatgccggtactacatggcttccatgctcatgcccttggtgatctatcttaacggcatgcatgttatctggatccgatttaaagtttgctgtcaaagagcatggtgctccctaggattacaaccgtcatgctgttgttctaagatatttaagttttga

SEQ ID NO: 56406 - DNA, 389 bp, Gossypium hirsutum
  Clone ID: uC-gsronu33B159h12b1
tttttcaatcacttgaaaaacgcagctgcagggggatctctttaggtggttctgatgctcttgaaaaaagtgacacctgtgaggagctcgggggtgtcccatgaagaacacgagggggtaattttctactacactctatcacttcccaaaactctgatcatgctcgggaacacaattatgtgattatattatcacatgtggtgatatttgtgtgtgccatgtgcctgtgctgaaatatactccaatgtgtgcctcctagaaatggggtctctcagaatttctcggaactcgatctgaattcttgatgagtctcgagctcacatcaatatagtgtaatggagacacattgtgtctcagaataaaaaacacaaacctattatacttattat

SEQ ID NO: 56407 - DNA, 436 bp, Gossypium hirsutum
  Clone ID: uC-gsronu33B160a07b1
taataaaaaacaaaaaaaaaaaaaaaaaaaaaggagaaaaaataaaaaaaaaattggggaaaaaaaaccccaaccaaaaaaaaaggaaacacaagaaaccaaacacgggccggccacttcagaggtcccaaagcgcggcccccaagcacgcgcccctggccccctttaaacagcgcccccacggggaaaacccgggccgtacccaaccaacgcggcgagcggaaaaccccccgcgggcccccagccaaaaaaccgaaaaggcccccccctatcgcccgtcccaacagtagcacagccggcagggccaacggcccccccccccgagcgcccacccaaacgcggaaggggacgcgccccgcacagggggaccgcccccgtggcaggggccggaccccccccccgtcccaaaccccccccactgccaaggccccccccc

SEQ ID NO: 56408 - DNA, 458 bp, Gossypium hirsutum
  Clone ID: uC-gsronu33B160e03b1
ggtgcgccgcctggtgccgccgcgcacataattggcgggaccgcacgcgtccgctttttagtggggggtagaactgctgaataaagcttgttttagtgtctttttaaacatgagactgagacactgttatcgtttatgcatgatcagatgaagcaaagatgtgtggaacagttcaaagaaagaactttggggattgaacagattgacgtggggggggcgttttaaaggatacattctaaagtgcgcgaggcagcaacaccttactttttttatagggtgccctaaatcgattttcagggcgcgcgtttaacaacgaagggacgggaaaaaccctggggtaccccaactaaatcgcttggaggaaaagccccttttggccagctgggatataagcaaaaaggcccgacccgatcgcctttccaaaaaattgcccaccctgaatggcaaagggaaccccc

SEQ ID NO: 56409 - DNA, 384 bp, Gossypium hirsutum
  Clone ID: uC-gsronu33B160e07b1
attaataaacatacacaaaatcggacgaggggggcgatttaaaaggatattcgggccgaaacccccagccggccgatccgaacggaagacattgacagggggggagcttggctgaagtcggacataatgtaaaagataacgcaggactactaatatgaacataacgagaccagaaatcacgggtggaacaaaaggaaaaaagcacgggagatgcaagaccccagtaccaacacgaaccgagaaagcgaggccaatcgaatcatcagaccctctgaacaagaagcaagaggagtcagaaaagataccacagggataacaacgctagaggcaaccaaacgaacatagccaccgaagattaaagaacctacaaattggctcctaact

SEQ ID NO: 56410 - DNA, 453 bp, Gossypium hirsutum
  Clone ID: uC-gsronu33B162c07b2
catatacaataaaaagtgccgaaatctagcattgtagtatgatctgcagctgacgctggacaagctgaggcccttaaagcacatgaagctgagtttatatcaatgctcataaccgctaccgctgtcaaaggctcggccatggataacaacatgctaactgacaatggctctacaacaccggttgtgataggacctgtatcagctgtcaatgctctttttctgttagaccaaccaccgtgccgatcccggcgaggacaccagcgattcagcggcatcgcagccacatttaccatgctcgaggaaagatttccacgacgaaaactccttcccaacaatttttacaaaaccctacaacttttcaaccgattttgggattggcccttaactattcatacttcttattaataacattgttattcccttctaaatcctttatctttcattctttcataa

SEQ ID NO: 56411 - DNA, 428 bp, Gossypium hirsutum
  unsure (1)..(428): unsure at all n locations
  Clone ID: uC-gsronu33B162d04b2
ccctctcgtccgggaactcttgttgctcaaaanaaaagaggggataattttaaaaaaatattggggttttattaattaaaaaataattaaatatattatatttttgtgtgtttttattttttttttaagtttggttttttttaggggtttatgtttttgggggggggggcttttttgggggtcccgggtttccttcccctgtcttgcgcgttttttttttttttttgggggcccttattttcatttccttggccgggtttttccccctgggggcttgggaaaccctggggtttcccccttttattttttttgcggcagttccctttttggccggttgggtttttagggagggggcccgcccggttggtctttcccaccttttggccccctttattggcaatgggccccccccttttgggggccctttt

SEQ ID NO: 56412 - DNA, 235 bp, Gossypium hirsutum
  Clone ID: uC-gsronu33B164a12b2
ccacgcgtcctttcatgcgtccaatccatttcaagtgttccagggggcgaacataaaccacactggggagcggcaattccaaaggccaatgctccttcacgagcattggaccgagcgcgataaccagggcttttcaaccccgtgcttgaccctaaccttattgtccgttcctacataccaagcacgtccattcacggagagtcctttcgtgtgattctcgattcgatctccaaca

SEQ ID NO: 56413 - DNA, 292 bp, Gossypium hirsutum
  Clone ID: uC-gsronu33B164b08b2
ttcatacattacctacaaaatccgtgcttgacctttattagctatttttcttgccgatggcttcttcaccaaaacaaacgtattactaactccttaaagccgtaccctacgacgaagcacgagcatggggttttattagcacgacataatgtacaacggccatagcgcaaagagcgcaacatcagacatagcaggctcaccacaatgggggagcaggacgattctagcaggacaaaaccatttcggagacctggtcgtgttggacagaccctatgaccttggacatcatcgt

SEQ ID NO: 56414 - DNA, 367 bp, Gossypium hirsutum
  Clone ID: uC-gsronu33B164f05b2
tagttaatcatttgtctatgaaattcggtattgcaggtctttgtagcagtactctatttgatattatcatggccgtgctagtggaagatcaaggaataatgattgctctaaggaagaaacgaaagctgctgaagaaagagaccctgcactgtatatagatatgtacattgctcattgaattttaaaggagttctagcatgtcaataacatacggtagcccataatttatggagcaaagggaggaaaggtatggccttgctgatacacaatagggcggctcatgatgtggatggggatgttcatcctggagccaagattgcgagcgggatatagtttgatcatgctactggagttattgttggagaga

SEQ ID NO: 56415 - DNA, 363 bp, Gossypium hirsutum
  Clone ID: uC-gsronu33B167f09b1
ttaatttaaaaaaaaaaaaaaaaaaaaaaaaaaaaaaaaaaaaaaaaaaaaaaaaaaaaaaaaaaaaaaaaaaaaaaaaaaaaaaaaaaaaaaaaaaaaaaaaaaaaaaaaaaaaaaaaaagggggtggctgtttaaaaggatcaagtttctatttcctggagttgcaactttttatttttttattggggctcctaaaaaaaattagtcggccccggttttaaaaacaattaatgtgggaaaaaccttggttttcccaattttattttcttttgcgaatatcccctttttaccaaattgggtaattagaaaaaaggcccccctctatttgctatttcaaaaaagtgttcaccttatatggtta

SEQ ID NO: 56416 - DNA, 385 bp, Gossypium hirsutum
  Clone ID: uC-gsronu33B168a10b1
taataaaaaaaaaaaaaaaaaaaaaaaaaaaaaggggggatattgtaaacaaaaagggggtttccaaaaaaccaaacccctggcttcccccatatatcttttgtctcgttacaaccaaaatggggtcccttttcgggggttcaccatttccttccctgggcaaacccttgcaattccttatttggggggccgtgaaaaaaaattccctttccccctgttttacacattgggaatgggaaaaccccgtgggcccccccaaaaattgccccggccaaaaatccccttttgccccccccttaaatgcccaataagcccccccggttttcctttttcccaaattggtaccctttatatttgcaaggacccccccccctgctcttttatt

SEQ ID NO: 56417 - DNA, 395 bp, Gossypium hirsutum
  unsure (1)..(395): unsure at all n locations
  Clone ID: uC-gsronu33B170a06b1
tactcggcccccaaattatttgcccaccatacgggctagagcaaaaaagtgtggcctttttagaaaacgggccgggcctcgggcactactttttcggnccgggcccgggccggaccgatatactacatggatttattcttttaattttaaaatatttttttacatacttgtataatttgtgctaaacatttaaaaatttttaaaataatatacttaatgctctttaattttaaaataatcctaaaatactttttttaattattttaatcttaaaatatttttaaaatacttttttaattttttaaaatttttaaaataaaaatgggccgggctcgggtttatgatttttttctcgggccgggcctgggcaaaatcttaggcccatattttggggc

SEQ ID NO: 56418 - DNA, 480 bp, Gossypium hirsutum
  Clone ID: uC-gsronu33B170h06b1
cccgttcgtaaataacctcgtcaaaatacaccgcacaagagtgggattttgaatggagagggctaggatacaccctcggaaactaaagacatcatgttgctcctactcacagttccaggcctcgacggactccggaagggcttgatcgacgacacacggaacctcctcaagcacttgatgttggtggatgctttgtgcctctttcttcacatggatatatactggaaatacgagatgcgttcaaactgggacgccgaaacctgtacccataacgaatatctgcgtaaccagaaatacatcatgaagagccagcgcaacgcgcttatcatcgctgccgctcttattttggactggctactttactctgatactaaccttgatgctaaaatcgagcagtggaatcagtgagcagagaggcttaagaatcgcaattgagataagtgctgcgaatattagaactgttgtattagggctacttct

SEQ ID NO: 56419 - DNA, 217 bp, Gossypium hirsutum
  unsure (1)..(217): unsure at all n locations
  Clone ID: uC-gsronu33B171c02b1
cccaatcgtaccatcatcactcatctctgntagctttgtttttttttaactgcaagctcggttcatagctcacagccatagaagcatcaacaatgtggagaatatttatatattttaaatatattttttttttatattcattttcaattaatgtaatactatttataatttaaaaatacactatttatatatactatacctatccttatttatcact

SEQ ID NO: 56420 - DNA, 351 bp, Gossypium hirsutum
  unsure (1)..(351): unsure at all n locations
  Clone ID: uC-gsronu33B172c06b1
ccaaagcctccgtttcccaacccagnggcagnngggcaaaggagggacttggngagccacacgccgcagagcccccccccccacacggannacgaccaaacccccaaaagcaccgagaaagcaaaaaacccacccgaagaaggcggcgaccgggagaggaagaacccgcggaaggcccaccaaggcccagaccgcagggccacccggaagcccaaaaaggcaaccgacccaccagnggaggccatngcaacctncacaaccgacgaaccnggcccctatgagacattcatattctacaccgtgctcacgagcatcatatcgttggatagaggttcccttacacaaaagggc

SEQ ID NO: 56421 - DNA, 160 bp, Gossypium hirsutum
  Clone ID: uC-gsronu33B172c08b1
gccatggttttctcgcacgcgggcgaataatgccggattgagtgacaacaaagccagtggggagcatctcagatgacattgtgttggcaatatttgctgcggccatgattgtagtgccagaatccatgttgcatgttataagaggttgtcctgcattgct

SEQ ID NO: 56422 - DNA, 146 bp, Gossypium hirsutum
  Clone ID: uC-gsronu33B172h10b1
acgccttccgcttaattagttatacatagtaatgctttttgctgtgattgaacttgttcaaatggtttcgtttcgcttcatcttaagacgctatttcagctttcgacatgtttttgtccctccctttattctctctttctcttctt

SEQ ID NO: 56423 - DNA, 459 bp, Gossypium hirsutum
  Clone ID: uC-gsronu33B178d11b1
gtctaccatatgtgagggagaggcaatagttgggagcatgactgttgcaccaaacgagaagaatccccgagatgttgatataatggtaaaatattcattgagtggtcggcgttgtgcggtttcaagagttcaattctacaagatgcgctgatgtttctcactactatttttatccaccaccaccataaatttatggcctaggctaaagcatgaagatgctactcctattttaatgcatttgtattctaacattcctcaactgcttgagaatattggttctttcatgtggaatgtaacatttgttgccctttaattttcattgattctttaccatgtttgcatgagtaaattaggattaaaaaaaaaaaaaaaaaaaaaaaaaaaaaaaaaaaaaaaaaaaaaataaaaaaaatataaaaaaaaaataaaaaaaaaatattacaaattaaataattttag

SEQ ID NO: 56424 - DNA, 259 bp, Gossypium hirsutum
  Clone ID: uC-gsronu33B178e09b1
gtttacttcaataatctatgctcatctttttttggttttggattctctttttttaagttcttacatttcacagagagggtcttgaaaggtatcaattttttcttcccctcttttgttttcctttttccctcgtttttcctccatccctccctgtgtaatattgttaggctctgtgctttcaagaggagtacgaataaaaataaaccttttttttttcttcttttccccaggtgaagtaatagcgcaaagtcccgcccag

SEQ ID NO: 56425 - DNA, 435 bp, Gossypium hirsutum
  Clone ID: uC-gsronu33B178f07b1
ttgtgattacccgctgagtttaagcatatcaataagcggtggttaaaaattaaagtgggtttactcataacaaaactaacctataatataagcttgtgactgcggggacttcaccagccattgctcttagcttgcatcattttgagacaacctgtcctgttgttgattcgatcgcctcaatatgctgtcctgcgtgccaccattaacgataagacggtccctgccccccttcttcccatgcattttcatgattgttttataaggccttgtgatgcttctgtgctgttgtactcaacgggaaccaatattagctgaccaagatttgcctgcacatctttctttgcatggcccccctgttatagaaactgcaaagacagaagtcgaagcagcttctcccggtgtagcctcgtgagctgatattttggcttctgccgc

SEQ ID NO: 56426 - DNA, 427 bp, Gossypium hirsutum
  Clone ID: uC-gsronu33B179f08b1
tttttcgcgtccgcaacaaacaagacaaccacaaaggtttcaacatcagttacaacaaaaggtaaagtgaaacgcaagcctataactgctttctttggcacctgcatgtgttgtgcaactgtgacaaattaatcaaataaacaccattgaagaccctttttttttccttttgtttttgcttgggttaagttgggttggttttattattattattattattattattattattattatttaattgaagctttgaaaaatggagttttgtgagagatgtgaattgtaactatggttgtattttttttctcccttttttgggtttcttattgaatttgtataaaagatgggggtttgatgatgtaaaagtaaaacttgggcaatatttatttttgctgcctttgattgtaatatttgcttaatttatatg

SEQ ID NO: 56427 - DNA, 335 bp, Gossypium hirsutum
  Clone ID: uC-gsronu33B179h01b1
cggactcttgggaaaaaaaaaaaaaaaaaaaaggggggggatatgacaactggtgtgggggaaaaccttaccttggttatacggagaagacaaccatgtcttctgaccgtcatttacggaattgcgccagcgaagatgacctttgagggaccatagatgagcactactgaatcatgacatggttgcatgtgtggatcaaactgcttttgggattcatgcaactgttgaaaagctcgattaaagccatatattataaaaaaacgaaagcggaaaaaataacaggcctctgacctgatatattatcaaggatggatgcctggaaggtctataattat

SEQ ID NO: 56428 - DNA, 297 bp, Gossypium hirsutum
  Clone ID: uC-gsronu33B179h03b1
ataattaccaatatatacaaaatgtgggggcatttattaaaaccaggtgggataactataaaagtcaaccattataaaaatataacagctcatgctctttcggcatgattcatatttaaatcatatcctcaattaacaaccaggcatttaagaggcgggctaccggtccatattcacaaccatggcatttgcagcatgctaagtcctcattgctaccaggactcacgagcctatctaggatctccctaggtctttatatgttaaggtagcgaacactaacgacttattctcaaacca

SEQ ID NO: 56429 - DNA, 412 bp, Gossypium hirsutum
  Clone ID: uC-gsronu33b023b01b1
ttcacgcgtccgatctggaggagaacgtgggggaagggcaactgtatgatctgtttggccaagttggaactgttctttccgttagagtttgtagggatcagaataagcgatcttctctaggttatgcttacgtcaattacagcaattaccaagacgctgcacatgccaaggaaatgtttaacttcactcccattaatggaaaacctatgagaattatgttttctcaacgcgatcctattattcgtaggactggatatgccaatgtctttatcaagaacctggacccagctattgataacaaggcattgtatgacattttcgctgccttcgggaatgtactttcttgcaaggttgctactgatagaaatgggcaagcaaaaggattcggcttatgttcagtttgaaaatgatg

SEQ ID NO: 56430 - DNA, 254 bp, Gossypium hirsutum
  Clone ID: uC-gsronu33b023b05b1
tttaatttcaattcaaacatgggtttgatgggggcttcatggtctgagaaatgtttaccatccgaaaagcgggaaaaacggagtctttgtctaaagaaatgcgttgagaaagggtggatgtatagaacctttcaacgagatagtgctttttcaactctctcaaaacggaatctattccaaacatatatgccatggttccttacttagacagggtacaaatatctaaattctgatatttgtagatactttttcag

SEQ ID NO: 56431 - DNA, 314 bp, Gossypium hirsutum
  Clone ID: uC-gsronu33b023d01b1
ttttacgcgttcgcccacgcgtcctcccacgcgtgcgttttttcggaattgaggggtggggatagcagtttgaagcatgaagtggaggaaaataagctgacctcgcccagcaccaccaccaagtaagtacatttccaagtacatgtatcagcttatttcgacagtacgagtttcactaatatgttttgcatattttttttgttagaaagataagattttagtttttactttgttcaaagaattgtatttatgatcgtagaggtctgaattaatgactgacatgaaaaatgtatttcaatttggattcttttctt

SEQ ID NO: 56432 - DNA, 532 bp, Gossypium hirsutum
  Clone ID: uC-gsronu33b023d11b1
tcttataatcatgtttgtgttgttataggtcttggtaaattgtttgattaagtaagaccatgattatgttatatacttgcattacaattgtaaggcaactaatgaattaattattaatcgtatttaaattgtaattaattgacacaatacttaatcagttcatgtttaatcttctaaggtagctgagggttaaattagcgacggtattaaacggtatattagccttgtataacttgcaagattattgtgattaaactgtttcaatgtaggaatatattgttacttcacttaatcttttacttgcttatttaaattgattaattatttgaattggttttgtaatatattcaagagattagttaatttagtaagtttgtatgtgctatagttaacaaattactaagttgccattaatttattcgtaacaacatgaaccatggcttgataatattaagttacgaaatgtaattgatctaacacaattatgtcatattgaataaaaacaatttttgaaattatgctttggaatttt

SEQ ID NO: 56433 - DNA, 413 bp, Gossypium hirsutum
  Clone ID: uC-gsronu33b023e02b1
tttttactgcttcagtggcacaacgtgccttgcgttatattgctgtgaagttgaagaggctattcgattctcttacacatagtaagttgtatgtttgtatggttactggtttggagcctgattctgttgatgacgctttcagatacgccagagaaatccttaagtgggattacaacgacaatagcttcatcagcaccgagttctccactactacccatattgaggcaagcacaacttcatgacccacgttttgtgtgtgcgtgtgtgctctaaatcacagaactcaattctaaagcagggcaagcacttctttctttggatttactagattttcaatatgtaagtatgtattgtatgtattgttgtaactcgaaaatcaattagaaaacactcaagcattactggatatgttt

SEQ ID NO: 56434 - DNA, 410 bp, Gossypium hirsutum
  Clone ID: uC-gsronu33b023e07b1
ttctttctagatcgcgacggacgcccttttgggggttttttaactaggaacggggtaacctacacctaccttactacgacttacaccaagctaaatggtggcattggacgatttgtactattataggaaaaattcatagatacatttaaattatctattactaacgtctgctttcactattttttaaacttttaaatcacttaaaaaattaaattcttacattatttaagaataattattaaaaaaaagtggggcaattaaatctttcaacataggggttagaagcccgtattcttttactatataaaattaattaataaatttttaattaaatacaaccttatatatattttataaggagcattaccagatatatatagaaacagcaagtcgttgccctagtagcttta

SEQ ID NO: 56435 - DNA, 460 bp, Gossypium hirsutum
  Clone ID: uC-gsronu33b023e11b1
tttaaggagtccgtgacaaggtggagatagggggatgactgttgaagacccaaggaatgcattgtggtgaaaaactgtgtattttttttatttattttctagaaatagaaccatggaaaccttggctaataattttattttaattacccatctccttatatatctgttttataattaatatttatattatgttatattataagtttgatatatatatgtatgagaagatccatagttgatcgattaaaaaataagaagtgtggtaatgagaaaatacatatgttctattattcatttacttctttaggttattcgattactgtgagaagtgtcataatgagaaggtgcatatctagcattggctctgacaagaaaatacttgatttttaaatggtcaaaacttaccttcctttcttgggacttatctggtgcacattcacattcactttttgggttttcc

SEQ ID NO: 56436 - DNA, 254 bp, Gossypium hirsutum
  Clone ID: uC-gsronu33b023f03b1
tttacgcgttcgaaggttatccctcttagggtgccccgtctgttaccaatgacttgtagtagaagatcttacatttcagttcgtagaagttgctttcttcatttactcatcagtcagcaagtataaaagagaaggctcgaacaaagactgcaaaaatgtcttgccaattgcaacaacatgttgagtgttgaatttgaagatgataggaaagtttcttaccacaagaaggttgtttttctttttttttgccgggg

SEQ ID NO: 56437 - DNA, 321 bp, Gossypium hirsutum
  Clone ID: uC-gsronu33b023h07b1
ttatagcatccccaacttctgtatcagtcggaggtgtacatgcttcttcaaggagggaccgaaattcctcatttaaaatggtttgcagttgagggagaatacaatgttatggttatcgatcttcttggaccaagcctagaagatttgttcaactattgcaatcggaagtctttctttaaaaacagttttgatgcttgcagatcagttattaatcagagtttgtgtacatgccttctcgcgggtttattcatcgtgacataaagccccataactttttgatgggtctagggcgcaaagcaaattagggatacctaattgatt

SEQ ID NO: 56438 - DNA, 331 bp, Gossypium hirsutum
  Clone ID: uC-gsronu33b023h08b1
ttttaatctcaatctgtttcagtttacaactgtggggttcaaggttgtgttcggggtaaagcatgagcaagaagaaggagacttggaaaccaaaaacgaagagttttaaagcaagggtccatcggattaaactagatataggaaagataaaggaagatcaaagatgcataagagatgaacaaagggatatacgagaaaggtttgaagatgttaatcggcaatgcgatgcgctcagactggaaactgaagcgattgtgaagcaatcagctttgaatcggattcgacttggtattatgttgaatatcttaaaagctcgccaagtgggtgactt

SEQ ID NO: 56439 - DNA, 245 bp, Gossypium hirsutum
  Clone ID: uC-gsronu33b023h10b1
ttttgacgcgtgggcttttgagagcgtatgggggtgacacctatgaaataaccggcaaacaaattcaaatgtaagtacttacttttcatttcacttaaaattctcatatctaacacatacttgggcattatcatatgggatataattttttaaagatcaatttctgtaaatatgattatctaattgtcatttaaaaaaaaaaaaactactcttaaaccaatattctttaatacaaaatgataaat

SEQ ID NO: 56440 - DNA, 596 bp, Gossypium hirsutum
  Clone ID: uC-gsronu33b025b02b1
ttttacggaccctgcgccagaactttagtggggtcgtctaaagattggaacttagccaaaaagtatccattttcaatatccatgagatggaatggcttggcagtgttccaaagactgctaatacgattgttaagagcctcatagccaatgtttcttcctagtaatttcaatattaccgtgagttccatctctttgactaaaatattttgaatccgttcagagaagtcaatggaaggaataccattaacaacagatctgtgaatgtctccttctaaaaactcaagatcttcatcaacatctagactagaagacccatcttaccaacgtctattcctccagaattggttcctaaaagtttatccttccaggatatctttaggctcgatccagagtctttaccatctcagtgtctttttctccgattccacctttgaaccgtactttcttaagtcgaccatcagaattcgatcgagatccatcgccaccgcttactgcctaaggggggaaaacgttatcgggatcagagagaggttttccattttttattgaaaaaaaattgtttgaggatttatttttttaaaatggttaaattaatc

SEQ ID NO: 56441 - DNA, 383 bp, Gossypium hirsutum
  Clone ID: uC-gsronu33b025b03b1
tatatttgttgttgatggaaatgaaaatgagagtgatgttagggaattaaggttgaaatttaacagtatggatgatttcatcgatcattctatttgagttgctatagaattgaaaaccatgtgcagttcagatttagggaagtcattgatatcatagaacacaagtttatgatttgttgaactcggaatctgctatccacaatatcacttgcttttctccattttgttccagtaaaattttgggacttaattcaattactttcatttcttcatcttcttttctattttgcattaagtgtaatcttatatttatgaaaaatcttgactacccttatgaattgtttaccatatcttttcggcgaaagttagatatatcgagtttg

SEQ ID NO: 56442 - DNA, 462 bp, Gossypium hirsutum
  Clone ID: uC-gsronu33b025c12b1
tctcccacgcgtccgcccacgcgtccgataagtgccaacaatcttaattttacggacccagattccggccactggtccatcggaatctgatccttcaatttttatttttatttattgttttacctttttaccctttaccaattttcccgcttattattttacccaaacaagtataaccccgttttctttaaaaaaagactagtggaaaatacggggcccctgttttatgtatttatttatatatttgtagtagattatttggtggtgacgtggcatgctccaaataaggcgcaacaatgaacaccaaaacgatgcgtctccctccccgtcgggtgcccgattccatgcccaacaacaaacgaaaagagagagacggttttgaccttaaaccccctaaccttttttctccgttctcgaaaccacccaatgccggcgcttcttccccgctttttttcaaccacc

SEQ ID NO: 56443 - DNA, 262 bp, Gossypium hirsutum
  Clone ID: uC-gsronu33b025d04b1
tttcccaaaaaaataccaaaagaaaattgggggtgatgtcaatagggtaatgtgttttttctctttttatacctaccttcactcctatatgatctggaattacagtggttaaactatttgtatgtatgtcttttaccctcctttatgaacccttttagcaaacatggtactaattgctggactaatttgtatttggcaataaactcgagtttatacattttgaataagaggaaacaaacaacaagatccataaaaaagtcag

SEQ ID NO: 56444 - DNA, 629 bp, Gossypium hirsutum
  Clone ID: uC-gsronu33b025e04b1
tgtttttcatttgcgtccctctagcaagcattggggtgttcaaatggagagaaacggcatgcgtaggcagcttgcaatcatgaggcaatccctgtttgatcagggacatgttgatgaacaattcgtgcagttggaggaactccaagatgatgccaaccccaatttcgtagaagaagttgtcaccttatactaccgtgattcagccagaataatccttaatatagaacaggcactggagaggaagccttttgattttagaaaattggatgcctatatgcatcagttcaaaggaagcagttcaagcattggagccaagaaggtgaaagctgagagcacactgtttagggaatattgcaaggctggaaatggagaatgatgcatgaggagtttccaacacctgaaaaagaatatgcaacattgagaaagaaggttggagcttattttcaggtggcaagacaagctgggccggtggagaccgcaagtcgcccaataagaaaagctggagatatttatccatccaaatttagtaacttgcatttatttggtagaaattataccacctgatgatttgtatgatggtattgggtggcgatttgactctttttatccacttacattttctcctttct

SEQ ID NO: 56445 - DNA, 303 bp, Gossypium hirsutum
  Clone ID: uC-gsronu33b025e06b1
ctcatctcgtccgcccacgcgttcttccacgcggacggttacgcgtccgggagggtgtatccagcgagaggaaagagatcacgatgaacgaggaggtgcccgacgagatgatgactttggaggatttcttggcgaaggccggtgcagtggaggaagcggcggccgttgcgtcagcggaggttaagttgcatccggatagattgagtggtggagtctacacgtttgatccggtgggagggggtgcgtttcaaattctggataagatggaggggtcaattgttgggctggggaactgagttgaag

SEQ ID NO: 56446 - DNA, 377 bp, Gossypium hirsutum
  Clone ID: uC-gsronu33b025e08b1
ttccacgcgtccgcagtgattcagtccctgggtgaggaagagattaacggggggttcttggttcagcttgataaattgattcgtttgcttgaaaccccgatctttgcttatctaagattgcagcttcttgaacccggaagatatgtatggttgctgaaagcattgtatggtcttttgatgctacttcctcagcaaagtgccgcattcaagatactgcaaactcgtttaaaaaccgtgccatcatactccttcaatggtgatcaactcaagcatgcattatcaggcaacccatactttcatcacggtgcaccccaaatttttgaggatggtaacaaaaaccttaataatgggaatgtacagaacgactttaattttac

SEQ ID NO: 56447 - DNA, 454 bp, Gossypium hirsutum
  Clone ID: uC-gsronu33b025e10b1
tcgttcttacaagaggtgcgaagaggagtgggcgagagcagatatatatagcagtgccctctcaccaaatttccaatggttggctgtttcgagtgataagggcactgttcatatatttcaccttcgagttagagtttttgggggccattcatcttctcaatcatcttctgtccaaggtccagcattattgcatcagaattcttcaacctcacttgatgcacttatccctccaagcactggtgccaaccctagttcatccttgtcttttatgagaggggttttaccaaagtattttagttcagaatggtcatttgctcggtttcacttacctgaagatacccaattcattgcagcatttggatctcaaaacactgttgttgtggttggcatgaacgggagtttctacaggtgcagttttgatccccgttatgggggaagaaatgttgcagcagga

SEQ ID NO: 56448 - DNA, 534 bp, Gossypium hirsutum
  Clone ID: uC-gsronu33b025e11b1
tcgtacggcattgcttcagtcacttggtgggcggaaagggattaaccggtttggtgatttttcagctcctctcgatgaagcattgatacatgtttcactggatttatctggccgaccgcatttaagttatgatttaaacattcccactgcaagagttggaacatatgacactcagttagtggagcattttttccagtcattagtcaatacctctggcatgacactacacataaggcagcttgctggaaaaaattcgcatcatataatcgaggcaacctttaaggcttttgctagggctcttaggcaggcaacagagtatgatccacgtcgccttgggactataccgagctaaaaggagttctatcaagatcttgatgttctccttggatgtttattttagtttgaagctttgggtatttgagaaattaagatgtgaggctcaaacgtgttgctttgggtatttgggtttccttttatattccatgaacatgaatttggattagaaatacatgatgatgaactatgctttacttt

SEQ ID NO: 56449 - DNA, 505 bp, Gossypium hirsutum
  Clone ID: uC-gsronu33b025h05b1
gtattctgttaccaatgatgcaggcggagggtgtcacttgactatgggagcgggtctttcaagggttcttaggggtggtcctagctgtagtgccaatctacctattccatcccaaatcaactatccagttccaggagggtttactatatccggactaaatttaaatcttggaggaggctccacgcagcctgtgatgcgaccaatgcaaccttcccaacctccaccaatgctgcagcaccaagacgttacgccctctttgatgaacaccgctacttttggcgcggagggtggctatggtgcatagatcaccactcagaatgcaaatgggccgaccaacagatacttgagcatggaccattgcatggacttggataactattggcccacgtactaatggacaatgcaaaatccaatgtccccaacatgctttttgtttttagtattaggcagtgggtaagtttggtagtatatgtttttaaattggattagttgggggaattaaatg

SEQ ID NO: 56450 - DNA, 438 bp, Gossypium hirsutum
  Clone ID: uC-gsronu33b025h12b1
tattggactccggaaaggaaccggattggtgcggcgtttaaggatggacgggggattgagtggaacgctctaactagccagaaaactcacgccataaagctgccttgtgcgtgggtaatgacgtgtgctttttctcccacgggtcaatcagctgcctgtggtggtctcgatagtatgtgttccattttcaacttgaattctccgactgacagggatggaaacctacctgtatcaaaaacacttagtggacataagggttacgtctcgtgttgtcagtatgttccagatgaagacattcacattattacccgttccggtgatcagacctgtgttctatgggatattactactggccttagaacatcggttttcgtggggagaattttattctggccatactgatgtcgtgctaagtgcctcaattaacggatccaactt

SEQ ID NO: 56451 - DNA, 522 bp, Gossypium hirsutum
  Clone ID: uC-gsronu33b112a01b1
ttaatttgaaagttttcgtgatgatgaaaaacagaaaatgacttctgctttgggtgaactggagtctcaaagggatcaagcacgacttgctcatcaacaagctcaacgggagtgtcatcaaaaggtggaggaactcccttgttctattcgcttaatagtatgagcaatggtaaaaataccaagaaggctcttgaactagttgttggattgttgtttgccttatttattaaaaagaatgggtaaattagtccctatgcattagattaaagagcaaactagtcttttttgttaaaaatttcattctttaatgttaaaaactgatgtggctgacgaaataaccaaatagatacatgtctgaggtaagagatttgtttgtttttaatagtaaaaatgaatggaatttttaacagatggacaagtgtgctctttaatcttacatataaggattaattttaaaaggggcaaaatgcaattcgcttttcagtagcagggcctctatgatatttgtacctatgatcaacc

SEQ ID NO: 56452 - DNA, 452 bp, Gossypium hirsutum
  unsure (1)..(452): unsure at all n locations
  Clone ID: uC-gsronu33b112b02b1
tcccacgcgtccgtgacttatctcatttccaatcatctgccatggcaaaacttcgaagccggtccttttggtctcatctctccgatgcctttcttttctttgctgctgcctttttagctcttgtgttagtatggtccttttggtcgtatttcactccaacccctaacttcctacccacctttacccatccatcctccaactccaaaaccaatctggtcgaaagtgggttcggagttaacttaaagtccgacccgaaagaccccactttttatgacgatccggagatgagttactccatagaaaagccggtgaaggattgggatggaaaacgacagagtggttaaagcatcaccnctacgttcgccgccggggcacgtgaaagaatcgttcttgtacccggggtcccacctaagccatgtaagaatcagtcggtgatcatttgcttttacgtc

SEQ ID NO: 56453 - DNA, 612 bp, Gossypium hirsutum
  unsure (1)..(612): unsure at all n locations
  Clone ID: uC-gsronu33b112c01b1
ttccacgcgtccggccttaagagttatttgggaaatgtgtgggcatcggaacggatacagaggtgtgggaaaagctttgcagagttcaacaggaaagagggcttttggcatggaatatgaatcagattggactaagaatagagtttcatcggcatttacagctcaagtcatccgttctgctacatcacttatgccttggagttgtaaaatccctataggtgatggatttcatgagtttctttaattagttgactagcatttatattgacgcattcttttgggaaaatatatttgtaccgcatacgagaaccatctagaaaaaaatgcctggttttgtgagagaaaagaagagaatcacagaacccaatatgtgtctcagctccccgcttatgcaagatcattcaaaaggcaatcaccgttcaccctctcaggctactgatgaaatagaaagcctgttgcttcagggctaccggatgatgtggccaagtattgccttgcttctgtccgcgctctagcttnccttcatggtgtggttgaagaagtgggaatcattcattcaagcaagaattcttatggacgaagatagctgatgctgagagggcttatgtctac

SEQ ID NO: 56454 - DNA, 394 bp, Gossypium hirsutum
  Clone ID: uC-gsronu33b112c08b1
ttttcttaaatagatatgagaagagaaaaaaaaagagaatacacaagagaaaaatatatataaaatcaaaagagccacgaacaccttttagtttccaaactcttttgatttgcttgtatgcgctttgatacctaacatatgtgttacatacatactttttgtgagaaaaaaatcttttttacaatccgcgcctcccgtttcgttttgactccttcttgggtctatagtggattacactagtagaaaaatattgtgtttctttgtgtctaccactgtgcgtgtgttgtgtcgggtttctgctccttgtgtgtgttttcttttgcaggtgtggtcaagacgctgagggcacaaagtatggacgatggtatgggacacccgtgtcgggtgttgtgca

SEQ ID NO: 56455 - DNA, 502 bp, Gossypium hirsutum
  Clone ID: uC-gsronu33b112f07b1
tcagaactttatgtctttgcatcttctgattgtagtatgtattataagtgcatgggatgttatatttgaaattcaaatctatgttgcttggattcgagtgtgagtgttgaagatagggtatgtgaccgatactattatttagagtgtccttggtggatcttatctctatacccatgtttgcatatatgttggatacaagtaccaggacatggatacttaaaggaaaaatctgttcttgactcagtgaactggttagggttctcttatacaatctgtttcttgcttttttgtcactatcattcattattttgaagctgatttaagatatcatcaccttgtggatcaccacaggttttcatttttgtagctgctgagtatgaaacaagaaagaattccttgaatcaggattcgctttgggatgctataatacctgccaaagagcgtgcaaagttttggatccgcagcttaaacatatttcgatttgttgatcacggaaagaacc

SEQ ID NO: 56456 - DNA, 390 bp, Gossypium hirsutum
  Clone ID: uC-gsronu33b112g05b1
tgactagttctagatcgcgagcggccgctcgggatctagaactcgagttctttgtttaagaataaggatcttttaagatacgcctgatcacattaaataagccgatccccgtctcagtctttcgatcatatgaggctgattgaccttgtttgagcctagtgagttggctggacccggatccctaccgagctggaatcgatgagttcgttgcttccactttcactttgcagactaagtgttccactgtgatgggagtccttagtgtaagatcgcacggtgctgatgccccgaatgaagggactggtggggcttttggtggtatgatctttgctccggctggctgcaatggtggtttgcatgtggtcatataatcggcggtgacattgggct

SEQ ID NO: 56457 - DNA, 561 bp, Gossypium hirsutum
  unsure (1)..(561): unsure at all n locations
  Clone ID: uC-gsronu33b112h05b1
tgtttgctaatggttttgtttcgtcgagagttctcgttttgtgattcattgtatttatgggagatgatgtgggctctcgaatatgatccggacttgttctctctgtatgaagaacctggatcaaatattacgaaggctgttggttctaacaaagggaaaccaaaatcgagacgtccttgtgggaagtatgagagagaaaatatgaaaattaaaagctccgatgcctccctccccatttctgttttccttgttgcaagtgtcttaaaagataagagctcgaaactactgcatgaagctcggggcctcgatgatgtagttaagattctaaatgacatgactggtaatttggatgccaagaaagcctgcattggggcaatgaaacttcataagaaatatttaaaaaaggcaaagaggacgtaatatttggtaaaccagatgaaattttccagaactcaagtcaagagataattattattattacttttggtttcttttccatgttgcacgcatcagattcccgatgaaccctcgctcggngactgccgatttctgtatacgaat

SEQ ID NO: 56458 - DNA, 207 bp, Gossypium hirsutum
  Clone ID: uC-gsflmaxxa008c12b1
gactttccgaatccctttcacccacgcgccgtaacgctaaaagagcttcctgtctatcagcttttttaggtacttaagcctttttccctcggcctaggcttatctatcattatgcttacagatcgaattaaaaacaccatatatctttgaatctgaaccctttggagaacttaagaagaaatgccaccaattcccctttacccaaca

SEQ ID NO: 56459 - DNA, 256 bp, Gossypium hirsutum
  Clone ID: uC-gsflmaxxa009g12b1
ccgtgcgggccccggcgcggtatccggggcgagccacacgcgcgcgtttacgcgcattttaggatcattgccatattgtaccgaacagggtataaggcgtgaggttctaaagagttcattgcttactgccgttcacatctccaacgctatgaatgcactcgccgctagcaggctaggcgccaccacgcctggactcgccacacggatatacggggagctcacacaaaccacctacagtagcggattcctgatcaca

SEQ ID NO: 56460 - DNA, 418 bp, Gossypium hirsutum
  Clone ID: uC-gsflmaxxa010c12b1
ttacatgacgacggcaactatccactacgggcaggctagaaaaccaactggggacttacttagggcaaaagatgaagaacagcctgagatatctgaggaatactcggtttctgctgtgcctttttttgtcttcttcaaggatggaaaggttgtcgataaattggagggtgcagatccttccagcctggccaacaaagttgccaaggttactgggtcaattaacccccgagatactgctgctccttgctagtcttgggatggctgctggccccaccgtcctcgagaggtgtcacatatttggcaaaggcaaccggttcttcccaaatgggaaatcaagtgcaaacttgtctttcatcaccaaaattaaaaaaccattgcagaaatggaatgactctcatcctcgaatgctattcatgaa

SEQ ID NO: 56461 - DNA, 257 bp, Gossypium hirsutum
  Clone ID: uC-gsflmaxxa029a03b1
tcgcacaggcttggtttttgctcttaccgatgaacatgaatctgaggtcaaggctcaataaaatgaagaaagggaggaaaaaggcagattctctagaaataggggcgagtatccctatactagctgcagttaaagtaaaatctcatgaatcaaggatggtaacactagaggaactatataaattgacgatcgaaacttggactaagaggaagggaatggagctcaaaagcacagagatcattgccaataccccattg

SEQ ID NO: 56462 - DNA, 531 bp, Gossypium hirsutum
  Clone ID: uC-gsflmaxxa029a08b1
aattagttttacggaggagcggggagacacgggaaggagggggggcaaagagaagctcacaggagcccaactctctagcatattccagaagctactggcgccctcgactgctgagcacaatttcgggccccgaataagggctagggaaaggaaatgggtaaataaaaaaagggaaagaaaagtatctggactggaacaagctaaaaattggccctgaaaatttgaaaaaggacctaagaagaacggactaatacaggcacaaaataaaaataaaaacccgggatacggcacgactctctaagggatacaccccaaacgaggctcggggccaaatgggcccaaatacaaggaagaaataggacaacctccaaaaggcacaggatggaccaagaaagaacacaaagaaacactaatcaccctctaagaaatctaaaaacctggaaagagaaggcaaaataaacaaaagaaacccaagcggaattaaaagaaacatcgcgggaggcttccggttccggtaaaaaggggaaagaa

SEQ ID NO: 56463 - DNA, 223 bp, Gossypium hirsutum
  Clone ID: uC-gsflmaxxa029b02b1
gctggccgcacgccgacgggcctgaattccttgctcgcccacgcatccgaacaattattttattccttccccgaacaaataccctgatgggtgggtgtatttggcactaatctgaagcatttctttacgctttatgggaaagctctggagagaacaagttgcgacagtagtgaaatgatgattatcatccagagcgcacttcgcctgctctgaaaaccccgtc

SEQ ID NO: 56464 - DNA, 214 bp, Gossypium hirsutum
  Clone ID: uC-gsflmaxxa029c04b1
cccacgcttcctttaaaccttcattccatcccactcaccccgaacggggtcttttcaacaacatggggaggacacgtggaatgggagcggggcgcaagctgaggacccaccgcaggaggcagaggtgggctgataaggcatacaagaagtctaacccttggaaaatgaaaggtagaagccctttgcccgggttcttcccatgcctaaaggaatt

SEQ ID NO: 56465 - DNA, 572 bp, Gossypium hirsutum
  Clone ID: uC-gsflmaxxa029d03b1
actatagggaaagatggtatcggacgcctgtagggacccgtacttaattgctggacccacgcatgcgtccttccattttttctgagaacggtccgcatggagaaaagaagagggaaggaggagaagaagcctaccattgttgtcgtccaaggtcctaagcctgagaaacctactgactgttccaggatgagacagattctagtgaaactaaagcacaacacaccttttcacctgaagcacatgtccgtcaccaactccagcatcttgtttttgcataagaacttgatgcaagagctgaaaagccttggacagttcctagtaatcaatgagatttttgagaaaatcactacctagaacaagatctactggatttgatttctaaataaaagttttactggttattataacaagtacaaggaataccgggacacaacttttaatggtgcagttgaactaaattactcttgatatggcatcttagtcacagggtgaggtttccatggattcaaattatatagacaggtactatcccaaataaacttttgaggagggaaagtaactaagaattttac

SEQ ID NO: 56466 - DNA, 272 bp, Gossypium hirsutum
  Clone ID: uC-gsflmaxxa029d04b1
tcgctaaagctaagatttaattcccaaataagaagaaaccaaaactgagggtgaaagataataaagaaagaatggcgttgaaattgaatcactttccacaaaaactcctatgttttggtcttccggcaatggctactttctcatcttccaagtttttcatggccttcactctcctctttgccttcaaaggaaggtgaaaatctgaaaaagacatatatgcctcggcgacatatgcatgttcaattcacacattccatgcccccgccaaagat

SEQ ID NO: 56467 - DNA, 216 bp, Gossypium hirsutum
  Clone ID: uC-gsflmaxxa029e11b1
acgaccacgtttttcgatcatcgacttccaagttacaaatacgggggcaagaaaacaagtaccggcgggagcggacaaagttttgcaccttaaaattcaatctctgtaattctcagaaaagaaaaaagaaaaatggctgggaaattaactacaggaggtggcaaagaactttccccggtgatatgaacaggaagtcccgaaaatacggacacacta

SEQ ID NO: 56468 - DNA, 316 bp, Gossypium hirsutum
  Clone ID: uC-gsflmaxxa029f05b1
gctcaccaacaacaacaagcttgctgggggccattagaaataaactgcgggtgaagcacaggtcttcacatgccgatgtgagaaacttgcaatgcttgtggcacctgatcacttcaagcttgacagttatatgagcacaggcgtggatcttatgcaaaaggcccacttgtgactttatgaacatggtcagacctagctcaccagagaactcgcacccgattcacagactaacagtctgtctactgtcacaattctatcatattgtaagaatatgaatttagggcatatatattttttttaaaggaaattgactttg

SEQ ID NO: 56469 - DNA, 260 bp, Gossypium hirsutum
  Clone ID: uC-gsflmaxxa029g02b1
ctccattttacatttagatggatctgaagcatattgagatgggaaatggaattttctaagaaggaagtggcgcttatgccagagttgctgactttaccaggagctgattagaacttgggtaaggcagaagatcgccatggctgtttgagaagagaatagtgcatgttaccgattttcattttaacaatgctggcactgcctttggtgccggatacaatactggacttgagcctagcattattcaagaaaacaaatgttat

SEQ ID NO: 56470 - DNA, 264 bp, Gossypium hirsutum
  Clone ID: uC-gsflmaxxa029g08b1
ctcactcttaccatgtcgcttccgttttccaactgcggctgggtcctacttaaaacaagacgtggttcctatgccactcctcttaacctaaacactaactgaacctttcttatccatggccactatgcccactgccctatctaaaccgctatccggtcaacctccatctttaaatcctgtaaacaactaatctacggacactgtttcatgctttgacagttcacatccgagcttatgaatgccagctttactatttccccaaac

SEQ ID NO: 56471 - DNA, 340 bp, Gossypium hirsutum
  Clone ID: uC-gsflmaxxa043h04b1
gttaggcctacgggaaacacaggcatgattggggggacttttaagtgcggtggcgtttcgtatcaatgctcatgccagaaaagaaccgcgaggagatatgaaagtatctgtttcaaagagggcgtttgatacgccaaaatagattacagcttggcgaaacacccagaactcgatgttccaaatctttaagcattaaagctgatgcatagctttaaaaccaaggagtacgttcgtgaaactactgcttggatgcattataactgggaccttaccaacgatggtattgaacttctaaggaccgaccttaatctaccctctgagatttgtactgctcctttga

SEQ ID NO: 56472 - DNA, 266 bp, Gossypium hirsutum
  Clone ID: uC-gsflmaxxa045b07b1
ttgtttgatccaaactcccacagcagacaatgggtcttctaggcgacgacggacgcggcatacgacctacctgggcatgctagaagcatgctgagtctggagagaatggctcggagagtccacctacgcctgtaacgcccattttctgacaacttcatagggttgggaatccttcatgcgagctgacgactctaagtatagggctgaaatccatctccagctcagatgtcacgccctctagattgacaaagccaccgtatgatgtc

SEQ ID NO: 56473 - DNA, 338 bp, Gossypium hirsutum
  Clone ID: uC-gsflmaxxa045g01b1
gctggtgcgcctgctggtgccgccgcggcggaactgccgggaccgacgccgcctgtttcttgacgtgcattggcgagtctgagaggtagcatgtttgaggcttactggacatgctggctcattgcgctgcaagcgttggggatatcgcctgagcacgtattagagagtggctatcgacagcatacagggaagactcccctggtttagtgactaattggccaagcgcaggcctaatacgtgagacctgacgctagggtaccgcttgcttgaacttgcggggggaaatgcatactggcggtgttgtcatgacgcaatgccggtgacctgccaggatactg

SEQ ID NO: 56474 - DNA, 522 bp, Gossypium hirsutum
  Clone ID: uC-gsflmaxxa045h07b1
tgctagcccccgctggtgccgccgcgccggaaccggcgggacccacgcgtcctccgttcaccctgccggagtcagcgcaagcgctaagattactactactactcctgccaaggagtactatgcttctagcaacgcggagcagactgctacctggcttgcaatagccatggaggctcacagagccgctccagcaccccataagagcaccattgataggctcaaaaccacgctcaaagaaactttctttcctgatgatgctgtgcaccaatccaaaggacaacctaccgggaagaaatggattcttgcagctcaatacatcttccctattctacaatggggtcctcattatagaccagggctcttcaaatatgatattgcagccggacttaccattgctagcttagccatcccccagggaatcagttatgctaagcttgataatctaccgacacttgttggactctatagcagcttgtgcctcgtcttgttatagctgactggcaagctccagggaccttgcag

SEQ ID NO: 56475 - DNA, 444 bp, Gossypium hirsutum
  Clone ID: uC-gsflmaxxa046b01b1
aatttataataaggtttggccctggcttcctgatgtgcagaggatagattggttccattgcggtggagtgcatttctgggatttcgggatgacataaatttgtatatactcttaaaattttctcatgagtttcaattatttgttcttctttacattttttattagaaaggttctgctcatggtctaaaaaaaaaaaaaaaaaaaaaaaaaggaaaataataaaaaaataattaaacaatataaaatcaatataactaatagcaacaccctgttgtctaccaaatgtattgctaagtacaggcgacctacttaatattcaagttcttagtctagttccggctgacttaaaaaattgtgtatttgaatactattaataattatctacctcttttgtttttaaattttactatttttataagtgtagcttttataaactgatttttt

SEQ ID NO: 56476 - DNA, 381 bp, Gossypium hirsutum
  Clone ID: uC-gsflmaxxa046h12b1
attttattcattatcatcaacatctaaaaaacagtttacgacaatgtgccctggaggttacacggatggcactactagcttatctggaaaagctcctcgaaaggatcttcgtgactatgccgggtactggggagcactggtgcatattgagattattagacgtggggcatatgcatgtacagtttgtgtgacattaaaagatgcctatgccatggagactggtggatgactcactgtagctacaagtgctgatcactgcgtatgcatgtcaacttggagcacgtatggaggggatctatatcttagcgatagatgtacgtggaagactgatgaggatactaactcatcgcgtactaagatgcacccatatgtttatagttc

SEQ ID NO: 56477 - DNA, 166 bp, Gossypium hirsutum
  Clone ID: uC-gsflmaxxa047d09b1
gttatatatcgcgagcgccgcccttttttttatttggggggtttttttaaatcttttttggggtttttacccttagcttcctgtgttaggttgctacaggaaccattataattatgacccttacatacaaggacccctatccccccaatgatgcactcaaccctac

SEQ ID NO: 56478 - DNA, 330 bp, Gossypium hirsutum
  Clone ID: uC-gsflmaxxa049b10b1
tctttcacgcgttcgcggacgcgtgggtccgcttcctttttttaacctatacacatattttccaggaaaaagataaagcttgtgctaaaagaaaatggtccttcagcttaccgatcgtcagttctctgatttaaatgatgctcttattctgttcgacatggactgatatggttgcattactactcaaggagttgggatctgtgatgcgatcacttgggcagaaccccactgaggcagaactgcttgtattgattaatgaagtctttgctgatggaaatggtaccattgttattccttaattctttaacctgatggtaagaaaaatgatat

SEQ ID NO: 56479 - DNA, 273 bp, Gossypium hirsutum
  Clone ID: uC-gsflmaxxa049g04b1
tttttgccgactgccaaaaaatgaggttccacttgggaatcccaaatctatcaatgtttctcagaggaagcgagagatggcttccttcgctgcccacggcaagcacggcagatgaggtacatgcaggtgcagtacctaataaccatcctttcaatgctaacgacgacaaagagctatcccaaggacggcttcttactctatcttctccgacaatcagcaagtgccggcccgacggtggtgatcctgcggtggatacacttggcttgttccttc

SEQ ID NO: 56480 - DNA, 126 bp, Gossypium hirsutum
  Clone ID: uC-gsflmaxxa054c04b1
cctacttttacgtccacacgcctatccacctgtacgcggggtctaggcacctaacggaggaggccatctctgtccaccctctacggaatcatctatcaatggcttccaccattgccaaacactgta

SEQ ID NO: 56481 - DNA, 341 bp, Gossypium hirsutum
  Clone ID: uC-gsflmaxxa055f12b1
ttgaggctcacttcaggggtttgcacaaagatactattggacttgttagctgggatattggcatgggcttatcacgctatgcagccgccaatacctaagacatgtggctatactgatggttcaccggtcaccgaatcgcgaataaagctcaaggacggaaggcatttgacctacaaagagcatggggttctccgagacgcatgaacatttaaaattgtgtatgtccaatggcatggattcttgtagacatgatgcggttgttggacaatctctgtctccggcaattgttgcagccttttgaggtctatatcgtggcttttgacacaccaggtttttgagag

SEQ ID NO: 56482 - DNA, 382 bp, Gossypium hirsutum
  Clone ID: uC-gsflmaxxa058a06b1
agatttttattatggtatgccatctttcacttatatgcatgatgtagagggagagaaatatgtttttggttgagacagtaagacttcttttcctgtctgtgtattgatgaagagaatctaagttgctacatctttctatcgtcatgtctcggtctgtcaacaactgaagctgctgaagaaaaggattaaggacatgttatcttttgaattgttgaaatttatatcaaatgatataaatttcaagcattaaaggtttctacaaccatcagtattatgatttgataccgagcatgtgaggtactgtgcttttctttgagcctatcaagccaaaccatttgtgaagcttaatttaagcataatgggcggaaaattttgaactttt

SEQ ID NO: 56483 - DNA, 209 bp, Gossypium hirsutum
  Clone ID: uC-gsflmaxxa067g05b1
agctggttgcatcccacctggaactgacccttctggggcagttgtcaatgggttattctatagtcagcacgatgatgaagtactgtaaattgattcaccattatgtgatagagtgaaacagactcattgatcttgactatagctgattttttgacaaaacattaatgcgaatggataggatgaatcataatataattactttttcgttc

SEQ ID NO: 56484 - DNA, 499 bp, Gossypium hirsutum
  Clone ID: uC-gsflmaxxa067h02b1
tcactatttgtgctgctgctcctcctggggccgccgcggacttattgctgcgaccgacgcaggccgcccactttttctggttctattgaaagagggcacgacacgggggacatctgaaagggtttgttctgtgaaaaggccaactgataagacgcagatttcggaggaccccaataattattagaccttgtctgaagccaggaacagaccaagtataagggagccgattcaagaggcatattggcgatggcagttgcagatgtgcattcttgattaccatgattattcctcagaagatgggaatgtgatctgccttatgctgggagtgcagactagggtggataactgtgggcttgaataatttgtttggaataatattgctgagatttgaccatgcctggttcctgataagcgtgtggaggttcatactatggtgagactcggaaactaggttgctggacaaccctactgtgccaacagaaaatagctgatacggttg

SEQ ID NO: 56485 - DNA, 479 bp, Gossypium hirsutum
  Clone ID: uC-gsflmaxxa067h05b1
gcatttttaccatagccttgaaattattgttaatttggggcaacttatgaggagtatgaggctaagtccacccctccatggccaaactgacgttcaactcttgaaagagaatgcacctcattgatactcatgataatagcaagctttacattgatgggctttctaatgcggagccattaaatgtccctctcattgaactcggcgttgaatattatcaatgtgatggatgggtaaacgaagccaaaggagatgtacaatgattgggctagtatacaaaagtttcatgttaatgacactcttggtacaagcatgagaaaggattagacttggtcttggaaggacacatagaggattccttcaagggcaacatggaatgtcctctaaagaaaatgattagtgggagctctgagtttcggctatctaaatagggtgccttctttctcatcagtgagaaagatgggcattgtccaatgggtcag

SEQ ID NO: 56486 - DNA, 172 bp, Gossypium hirsutum
  Clone ID: uC-gsflmaxxa069a05b1
aattagttgaagcagaaaaagctcaaaaccctaaatgtgagagttgttagttgacgaatgttcttttttctttaaatttttggcgagaaaagaagaaaagaagaagatgaggccgattttgatgacatggcttcaatcggctttccctttctcttgccaccctcttttcttt

SEQ ID NO: 56487 - DNA, 134 bp, Gossypium hirsutum
  Clone ID: uC-gsflmaxxa069d07b1
gctttggggatgatgaggctttccaaatgctcggtgtcgctgtagaatcttgtggcgtctgtccgtattcacccatggattcgtgatgtcgcctcgcactttgcttaaccgcttctcttaaaacagcctctatt

SEQ ID NO: 56488 - DNA, 141 bp, Gossypium hirsutum
  Clone ID: uC-gsflmaxxa069d08b1
ccctcttcgtccggttttatttattgattctctggggtgttgttttcatcggagaacggcgtaaagaagaaaagtcaaaaacaaaaatttcatggctcggaaatccttcgtcggcggcaactggaaatgcaatgggacatc

SEQ ID NO: 56489 - DNA, 148 bp, Gossypium hirsutum
  Clone ID: uC-gsflmaxxa069e02b1
cccatctgtctgactcttctgcagagagtttttcagagaggaaatttgtaaaaacagaaagggactcacttagagactcactctgaggagacaacttaaaaaacatgctactccaaatctcaaccttatctacacttttattatcaac

SEQ ID NO: 56490 - DNA, 518 bp, Gossypium hirsutum
  Clone ID: uC-gsflmaxxa069f10b1
agctataactaagttaaaaggtttttttctttttggttgcactttttctcaaacttctcaaacttaaaaagagaggcagccaggcatggtttgagagattcagagaaagtctaaactaaagcctccaaaagcattacagtttctgagttggggcttggtggccccactactacacttgatcttgttccattcctcttcccctccccttcctttcttttttttttctccttcattttacatctacttaatcttcttcacatttctttctcttattcttatcattctgttccttttttccatcactattccccttcttctcttcctattttcctcttcttctctcttcctttttttttccttttacccttttatcttcttcttatccctcctctcacttctcctcactttaactttcttcctcctatattcttattttatctttttctccctttcttcttccttcttcctcctttttttccttttactttatattttctcttctatttcttcttctcttt

SEQ ID NO: 56491 - DNA, 219 bp, Gossypium hirsutum
  Clone ID: uC-gsflmaxxa069g07b1
cttgacaaagaaagacaacctacacaagtgggctacttagactgctttacgggttggtaaccgcgaacttgctgaggagttgcttgcttactccattgagcagggcaagaaggaatgtttcgccagcgtgcctctctgcgcgtcatgacctaaattcgaccagatgttagctcttgacccggcccgaggtaacacctttgatagattcccaccacttcc

SEQ ID NO: 56492 - DNA, 160 bp, Gossypium hirsutum
  Clone ID: uC-gsflmaxxa069g09b1
cttcaccatctgaagcataaagagggagaaattttaaacattatgcgtcgcacactccaaccatactattgtctccggaaaatgggtttctttgacggactgctgcgcggtccccttcgccggccttgctacctgtcgcctacttcgaacggcctgagaa

SEQ ID NO: 56493 - DNA, 202 bp, Gossypium hirsutum
  Clone ID: uC-gsflmaxxa070a05b1
cccacttttctcgttcaaaaccaaataaaaacatggcacggcgcgttaatattgttccttccatgtttgtgcttctattatccttgatgctcacctctaaagttgaaacaggcccatatgtctcttcttctcaggccaggcccagaagctgactggaaagctggtctgaatgggcggttcttggatgcttggaaagaaggat

SEQ ID NO: 56494 - DNA, 335 bp, Gossypium hirsutum
  Clone ID: uC-gsflmaxxa070g07b1
cttatttctttctcccgatgaacaaacgctcctttgtgggtagatttagagtttattgccactcaactcaccactatttgatctgaccttggttatttctgcttcatttttttctcttttaaatattctttgtatttttctttgaagcttctttccaacggagaaatagatagaagagagagggagagccagagagagtcgactgagaaagttttgctgtatgtcagttgattgtattgagacttactgcggtggatttggctagcttgtaaaccctttttcatggccttagcttataaaatgacctctcttcatttctttttatttcttttccc

SEQ ID NO: 56495 - DNA, 167 bp, Gossypium hirsutum
  Clone ID: uC-gsflmaxxa070h08b1
cttaatatctcaaacccagatttgttctctctctgtgtgtctctcttcaatcaattaattcctccattggaggagcttagggtttgttggtgctctgatctttgctctgcctgaaaaataaacataattataccccaccaccaactccatgtcaagatcctaagagg

SEQ ID NO: 56496 - DNA, 210 bp, Gossypium hirsutum
  Clone ID: uC-gsflmaxxa088f03b1
ctattattaatgctgctgcccctcctgctggtactccggacattaccgccgggtcgcacccgtccggtgttatcctgcacttggaagaagaagccgacaaaggaataaatatagtgataatttgattcttcgctgcctgagaaaaataggagagatgatccttttcttcgactttacataaaaaaaaaaaaatgggtgtactattactga

SEQ ID NO: 56497 - DNA, 274 bp, Gossypium hirsutum
  Clone ID: uC-gsflmaxxa088g09b1
tttctgagaaaggaatgcagcgaaatgggtgaagaagttaaggtttttggatattgggcaagcccttacagctacagggcagagcttgctttgaagttgaaaggctcctttgataaattcctgatcctggatataactagcttacttgcaagttttaattctgatacacaatagatcatatgaaacattcccaggtcttcatttacatgaccatttaaattgccttagcggttctttcctctgccattccttgaatcaaatgttaggtttgggc

SEQ ID NO: 56498 - DNA, 395 bp, Gossypium hirsutum
  Clone ID: uC-gsflmaxxa089d07b1
tccacgcctactgtgacacacacagcgctcaggggggttttcagaacaaattggtggtcactgcggattctatcttacccactactgccgctctatagggttttgaagggcaagcgttcgcgtgtacatttcataactcctccggagataatggactctgacacccaattctgtacctgtctgtcagcgtacacatcaatggcttcgggtgattggattacgggtgacacgtggatcagatttcatgagactcatattatccacttcgatggtccgtgagaccctcgtcgagctgataatgcaccccgaattccacatcaacagtcaaacatccaggctgtctgatggctgctccgtgactgctaatatggactgagatgctttcgctttacctg

SEQ ID NO: 56499 - DNA, 538 bp, Gossypium hirsutum
  Clone ID: uC-gsflmaxxa089e05b1
ccctctcgtccgcagaaaggtaaatcgctaagggggggatttttaagagatggccgggtgcgcaacagtgatcggagcacttctgggactgggcacccagttgttcctcaactgtttacgcacggctccttatatgcgacatccgcgggagcacctgtcgcggatctgtactcgcacgccatttgttaaccagcttgtgaattgggacgctcagctcccacgggaccttgacaatatgctcgaaaaggccaaggttgccaacgagcgccggttctctgatggagatgatgattaacgctcatgccctatgactacatgcgatatgctaccgccagtctgaagctggaggagaccggatcagattgtgagtgggtgaatactgactctgcttttgtgccagaattaaagcctgttgtacctgttgatgcattaatgtgaagggcgcattgcagaggaaaatggtgagtgaccgaaggagaccttgcaagtgcttcatcggatttttacctaaaaatgcaagtgttttaacaggacatcc

SEQ ID NO: 56500 - DNA, 350 bp, Gossypium hirsutum
  Clone ID: uC-gsflmaxxa089f07b1
ctcacgcgaactgtgactcacacagctctcaggggggcgtttagaataaactgggggtcactgctgtttctaacttacccactactgcctctctataaggtttctaagggaaagctttcgcggagacatttcagttctcctactggtatgatggtctctcacacccaagtctgcgccgaccttgcagagtacagaacaaggcccctgggttctcggattccggaggagccggggaaaagagttcatgagatcatattagccgcttcgatgatccgtgaggtcctctttgagctgaaagttcaccccgaattacatatcaacagtttaacatccatgatgtctgatgcgct

SEQ ID NO: 56501 - DNA, 454 bp, Gossypium hirsutum
  Clone ID: uC-gsflmaxxa089f09b1
gagaaatggggtttttaaatcttgcagtcattgctgtagtggttattggttcattctgataaatattgatatttgtagagagaagaacgatcctaaaaaactagatgcagatctcaagtggtgctggaatggggttgcttgaatctcttttacgtgctgaacgaagaaaatccttcactaggacagacagtgatgcaggctaagcaggcaaagcattggacgagctgatgggatccctatacaatgagcttagaacatcagagcgagccatgcgacaacagtaactattttgtggaccgaacgcggcagatcacagtcaatttcttcttggctagtggcactattctaaccaaccaactactgattgggagagtctgcttcaatttcccactcttattaaccttactacattacgccgtatcatggcttttactagcaatatcgaggacacttt

SEQ ID NO: 56502 - DNA, 342 bp, Gossypium hirsutum
  Clone ID: uC-gsflmaxxa089g07b1
ttttctcttacgcctagatatacttctaaggggggctattttttaatcatttttggggtatggcaccaatagctgaaaaaatgccagcctagaagaagcctggggagtgagaaaaaagccgtatctcagatagccccggccgataagaagcctaaggctggtataaagcttcccaaggaaggtggatcggctgtcggagacacgaatatgtagatagttaagaagagcgtattgacctacaatatctacatcttcaaggttcttatgcaagttcaccctgacatcaggatctctagcaaaggtatggggatcatgaacagttacatcaatgatatcttcttg

SEQ ID NO: 56503 - DNA, 205 bp, Gossypium hirsutum
  Clone ID: uC-gsflmaxxa089g11b1
ccaacctgaccattatcacaatagaggggggcgtttttaagaatcttccgggtctaacacatctatctgcaacagttgctgtggatggcacctgtgttcattgccaatgccattggcttcaattacttaacaggacctgaaggacattaagcagttggcctttaggtgccctgtatgtcgggtcatcatgctcaactgctcatct

SEQ ID NO: 56504 - DNA, 148 bp, Gossypium hirsutum
  Clone ID: uC-gsflmaxxa090b03b1
cggcgcggaattgccgggaccacaccacgccggcgtttttttcccacaaaacctagaagttccactaggggggcgattatatacaagtttgagagtttccacaagccccaaaaattccactaatgccaggacagacgggatgtgaaaa

SEQ ID NO: 56505 - DNA, 459 bp, Gossypium hirsutum
  Clone ID: uC-gsflmaxxa090b09b1
accccgccggcggttttttcacccgaagcttaaacgctccaaacgggggagcttttatgcagtgtttgagcttcccacatgctccagaacttctactgatgccagtacagacaggatgggagagacgacagtggtgccgataggctggtgctgggactagtgatgtgtgcggccagactatgatcacatcatgaacttgacagtgtgaatctgtcacgcgcgaaagcttggatccggtaatggccagtgaacgcaatttatcgacgtagagcgatcataccacataaggattatgttacgatgcccagaacagtgcagatacattttcatgcatacgatagattattgcccaactgtgagtggaaagatataacacttgtaagacatatcgcttttaatactagcgcaactagagaatatgggttgttgataatacgccatcctagcttagctgaaagt

SEQ ID NO: 56506 - DNA, 278 bp, Gossypium hirsutum
  Clone ID: uC-gsflmaxxa090e04b1
gccgcttctctagaggtctggtctaggggacatttttataaatcctttttgggttcaaaaactcagatccgttcggattcctttgtcccagacctagaatggagacctttctatttacattactagtctgttaccgagggacaccctgtcatgctttgtgaccaggtctctgatgctgctctcgatgccctgcctcgcccaggaccctgactggatggattcctgtgaaacatgcactgcaactaacatggtcatggtctttggagagaattaccacc

SEQ ID NO: 56507 - DNA, 420 bp, Gossypium hirsutum
  unsure (1)..(420): unsure at all n locations
  Clone ID: uC-gsflmaxxa090f04b1
cgcccattttttcgcgaagaaaaaaagaaaccagacaganggggttttttataaatatattgtgtgttaccacctccgttcagtagttgaagctatatctgctgatgacgataacgccgcttctctttatccagtattctgtcccgaagaagtgatgacttttccatcaacatgtggagcctgtgctgccacaagtgagacttggatgtatgtaaccaggattccatattttcaagaagttattgtcatggcatccacatgcaatgcttgtgggtacagaaattctgagatgaaacctggtggggcaattcctgacaagggaaagagaataaccctgtctgtgagaaacctcactgatttaacccgcgatgttataaagtcagatactgcaagtgtaaaaagcccagaacttgatttgga

SEQ ID NO: 56508 - DNA, 139 bp, Gossypium hirsutum
  Clone ID: uC-gsflmaxxa090f06b1
gcccaaatccccgggacacccacgccgcaattatcgtacggcacccactcgaactaacgtaggacctttaaaaaatgttgggcggttaaaacaacaagacagaggccagggacaacaaactacaccaggagcgggaaac

SEQ ID NO: 56509 - DNA, 409 bp, Gossypium hirsutum
  unsure (1)..(409): unsure at all n locations
  Clone ID: uC-gsflmaxxa090f10b1
accaccgccgccggtttttggcaacttgtttttgatcattgcatagnggtgccttatgtaaatagctggtacttacttgactaatggaagtgagcttttgcttgagatcctcggtcctggcattgcccgaggattggtcttgcctatacttggagctcatcccgatgcaatgctgattcttgtatctggactgtctggcacagtagaaacagctcaagagcaggtcatagtccgaatggcgtagatagcagggtcaactgtcatgcttctcactgtgatatggggttactgtgtagaagaagaccgatgcgaccatcatgactcactagcggttgatggaactataacaaacggattgcacctgacagagactggtgtgagaccggatatatggacttcgctatgctgc

SEQ ID NO: 56510 - DNA, 334 bp, Gossypium hirsutum
  Clone ID: uC-gsflmaxxa090h09b1
ccggcccaaaatccccggcgaccaacccctccgacttttttttcttcccttcagaaaacatcacctgaaggtgggtcaaaattaaataaactcgcaattataaacacctcgcccctcaaaccaccagaggctgatcctcctgctgcacaaccaatgctatgatgaagggcacagagtaggctctaggcaggcaaccagctaacacaatattgtcgagcttcatcagcttcaagatgattactgatcgtggttgtaactctaacactcgtactggaaggcacctcccccaagcctacacagctggccctgaggcctttacttttctgacctacac

SEQ ID NO: 56511 - DNA, 425 bp, Gossypium hirsutum
  Clone ID: uC-gsflmaxxa090h12b1
acgccgcgccttttttggcacttcatgccaaacaacgacaggggggggcataggataggccaaagcggaataacaccaacgtccaaggaggggcttccaagggaaatataagaccaaaccgcgcaacaaaacatggggcaaaagtaacataattttacacaccacctacacctttatcaaaacagggaaaagcatgggcgaaggatctaatctcaattttccatcacaaaaatgaagccttaagatcttttctgtacaccaaaacaactgctgtctacttattgtacccatccagagaaacccttgatatcattgaaatgtcactaagcccaaagggcagcgagacattctagtgcgatatcgcccacatattgtttgtccatcctgttccgttcttacgcagctccttcagctttgcgcctttc

SEQ ID NO: 56512 - DNA, 253 bp, Gossypium hirsutum
  Clone ID: uC-gsflmaxxa091c04b1
caatacagacctgacctcaactctccactccagggggcatttaaaacccccatcgcgcggagcccccaaatataaaccaacaccaacgccaggggaagatccgaacgagggaggataccacttcagaggtacgcccttaagcctataccaaccttcagatgggctacacaacagccgttaacagaactgaccatggctcgattccaaagcctggcgccagagtcccctacgaaaaataatacctttccccagg

SEQ ID NO: 56513 - DNA, 363 bp, Gossypium hirsutum
  Clone ID: uC-gsflmaxxa091c10b1
cccatgcgtccgagggaacctaactgatcccctttggtggtttgttttaaactgtgacgaagaaaaatgcacgcgaggcatcagctactggaagagccaatcaggacggcgataaatctggagccattaaaggcctagtatttcccggcaacgacgaacaaagtgtgaactttaggtccaaggtttcgaaccgttgaggatatcaatggttgccttacggctggaatgactgaggctaggaaagatcttctcgaggcatgaccccggagtattatgaggaaacattccaagaatttaaaggcatgccttaaacgcactaaaaagctctgtgcggttatgttggatacctgtgggccctgaaat

SEQ ID NO: 56514 - DNA, 166 bp, Gossypium hirsutum
  Clone ID: uC-gsflmaxxa091d06b1
gtcgttattacactaacaggagaccctcatgaatagagggggctttttatagcagaagtacgtgtggtaacaaagctagcttagatcatcagggtgtgacgtcataaaagtgggcgcttgactaggggctggcaacttctgcttggacacagcttttcgaccttat

SEQ ID NO: 56515 - DNA, 300 bp, Gossypium hirsutum
  Clone ID: uC-gsflmaxxa091d11b1
gattcttcccacccaacctaacaaacctggatcaggggggatcttttaaaactcatgtccatgcggatcggggctcgtaaagtccacaactgtacttttgtcgagccaaggaagaaagaggaagggagagacgagagagattattagcggccacatcggccaagctgggataaaggctgcgaattcatgctgcgagctggactgccttgaacatgatagccaccccgaaggaacaacggctagcaacacccgagtggccgtcacacacgatgccatcaacactttcttgagcgaaaccgg

SEQ ID NO: 56516 - DNA, 370 bp, Gossypium hirsutum
  Clone ID: uC-gsflmaxxa091e12b1
ggcccagaatccggggcgcgacccacgcgcccggttttttcggaccgaccaacgctgattggccccgggggtctattacacccacaagagctggttctaccgcgtggacggaagcactggctgctggcgctgacgacagcaggagcggtccatgatggggtcgctttctactcagcgaacttggttgctcgacacggctcgcggaacgacacaggaagggtgttgatgaacaatacgtgtgggagtaccaaactggagcgatggccacaaggaccggggatacatgcggagagaacattgccaggggtacaaagattactctgggtccaaagacgcccaactagaggacctagaggagcgacgtttgaag

SEQ ID NO: 56517 - DNA, 314 bp, Gossypium hirsutum
  Clone ID: uC-gsflmaxxa091f11b1
caatattctccaaacctccacatctacggaaaagatgtcaattttgaagaccatgttgcttgtgccccccccggcaataatgcctgatgcaaatatccctaatcaacactgctagggtgcaagctcaaccaaacaccatctgctaaccatgagccaatgcccgtatgaacagttggctcaatcttcctgtgatacaaagcacgcgtcaacccaggccggtggtcttcgcccattccgagctacatttcattttgcaggatgggacaagaacctatggatcccaactttacatgagcgaacctagtggtaactac

SEQ ID NO: 56518 - DNA, 546 bp, Gossypium hirsutum
  unsure (1)..(546): unsure at all n locations
  Clone ID: uC-gsflmaxxa092e09b1
acccaaacttccgactcttgctaccgattccgttccaaggtttcccgtcatttatctcggtcccccattaaactgcaaccgcctgaggagcccacttccttggctccctagcgtaatgctccggcactgaggacagtaaccttagcaccggcagagagagcaagtaaccgtgggtagaccacccaaacgtccggtggggcgtcagacaacaccaaattatagtcacagcccctgctagcggggtggtccggctgataataagtgagggtcgggaagcaaaaaccgcccgctgcagaaaaagtgctggcgcaaccagtagatgtatattgggcgaaataaacccccgcaatggccgcaatggcaggggacagggttacggccactgttgagatagccaagctcgctagggggagtcataaagtactgcaacatggatcagaaactaacaaagctgtgcctgtggctttgaacgnttcgtcngaacctgtggaggaagttacagccactaagcacccagagaacacagggccagaagagaaactgtgt

SEQ ID NO: 56519 - DNA, 142 bp, Gossypium hirsutum
  Clone ID: uC-gsflmaxxa093b07b1
aaattattcccaaaccgaacaaacccatgagtcaatcagatactcattcagttcactaccaaaagagatagctctcgaaatcgcatcttccctcgaggtaccgactcttttctcactgcgttgttaatatcttccttttctt

SEQ ID NO: 56520 - DNA, 482 bp, Gossypium hirsutum
  Clone ID: uC-gsflmaxxa093c10b1
gggactggttccatgtgaacgggacttgcacatgggttagtcgatcctaagagactgtgtaagcccgtacaacagcgcgtccagtgcgagcttacaaagggaatcgtgttaaaatatctgaaccgggacgcagaggttgacggccacgttagggagtccagtgacgacggcggtggcctggggaagagtgatcttttctgttgtaacggtctgcctaccctggaaacggttctatcggaggaggggcccagtaatcttctgatcactttacgttctgtggttgtgctctggcacgatgttcattcttattatcctatgtgtccatatttatttctcactatttttatttcattctctactgctttttcatgtttttttcttttttccttttctcattttatatcactggtttttcctcttttttctcttgctactttcctattttttcttttctttttcctttttcatttttttttctcttt

SEQ ID NO: 56521 - DNA, 349 bp, Gossypium hirsutum
  Clone ID: uC-gsflmaxxa093f04b1
ctcactttgttataaggtatagactgcgagggaaaaaaagggagctttttacacaataccctgggctgaggtggctaaactgctagaaggacattcggttttgtaaggacacatgtcgtttctcctaaagggaaacaccaggtatctatggactggttctatggcctttggtgacaatggctcaagctccttcggctgttgtgaacgtgttcattgccaagtataaaatggatctgccctactgctcctacttgtgctggggctgtacttgtgggaatttcttacacagagtggcctgatgtttgagagcagcccgaaccaggtccacattattagggggcctttaggg

SEQ ID NO: 56522 - DNA, 526 bp, Gossypium hirsutum
  Clone ID: uC-gsflmaxxa093h03b1
ctatagggtaagctggcaccccagcaggcgccggcgcagaaccgccgggacccacgacgcgcgcccactgtttccgacagaatgaaaaagaaacaaaggaggagggagcaatgagcactgttactgtggccacgaccgcagctacaaggaggaaagactgcgaacaacgaatagaagccgaataagggccaagggcggatgcaggctcataacgagataaatgaaaacgacattgcatctggctacaaaggaaagcgaaaggagactgctcttcgaggaagaaaactaggatttgagatgaatgaaggcaagaagctgaaaaatgaagagcattgcatgacggctggtgaattctccatggaataaccttatggaaaagctatagctttggtcaaccttaaaactgctattatagagatcagggaagaagaacccgttggagtccctatgaataaaatggctattctagtttctgaaagttcaagcaactgcgaagaaaagctgcaataatggaagggaagggggg

SEQ ID NO: 56523 - DNA, 288 bp, Gossypium hirsutum
  unsure (1)..(288): unsure at all n locations
  Clone ID: uC-gsflmaxxa094e08b1
ataattcacctttgctttggccctcctgntgggagcactgagagtcaactccttattgcaaccgcggcccgaccggaaatcgatagctaagactagaaaacatcctccgggtccaccaaggcggcctatcgtcggcaatcccctttaattcagctcactcccacatagggacttacctcccttatggtatcaaaacggctcactagtttaccctccgctcgcctcgtgacgcaccttcacccctcatgccttcacagaccctccctgcaaatactatctaccgcctca

SEQ ID NO: 56524 - DNA, 172 bp, Gossypium hirsutum
  Clone ID: uC-gsflmaxxa094e10b1
ctcacgcgtccggggttgctgaagacggcaggggagttgctggaaaacaatggtcgttttcaaccccacactgcctccgcagatcaagcaatactcttaaccaaccttactgaagagcacagctcaacttcgcggaaaagcacacctgtacagccgggccacacaggctcac

SEQ ID NO: 56525 - DNA, 156 bp, Gossypium hirsutum
  unsure (1)..(156): unsure at all n locations
  Clone ID: uC-gsflmaxxa094f06b1
caataaggcttgccagagcctcaatttagctcanaggatttatagaagctttattctgctatttacaacatgtgtacccaaaagccgcctcacgactattctcaacagtggtttgatatgggtcactaatccttcgaagaaaacaccacatcgtct

SEQ ID NO: 56526 - DNA, 372 bp, Gossypium hirsutum
  unsure (1)..(372): unsure at all n locations
  Clone ID: uC-gsflmaxxa094h05b1
cccatgcgtccgcaaagtcttctcctttctttcaggatccattgtagaaaattagcattcacgattccaggttacgagatgtagagcncctctttcaccactactattagccctatccccaatcccaatccatgacccccccgatttttaccaagcaccatacgcttctgcacccaccttttagctccggctctgcctcctctgactacttcgcttatcccccaaattaccctacgcattcccaaaaatctgaagctgacccctccactgtttacgctaatacttctccgcttctcagcacaaccactctaccggatccggacatagctccacaaccttcttttaattcaacaacccatggggccacccttg

SEQ ID NO: 56527 - DNA, 217 bp, Gossypium hirsutum
  Clone ID: uC-gsflmaxxa094h11b1
ctcacgcgtccggtttgttgtgtttcgaatcggggtctttttctaactttttctgcttcaattctccagatgagggctgcttcatgccttgcatcgcgctgagcggcgtgcgcctgctatgcgcgccgcacggtggggtcggtggtgagccggcggccctcgaggagtgccctggagtcggcgctcttcattccgctagttggggtacaggatccat

SEQ ID NO: 56528 - DNA, 195 bp, Gossypium hirsutum
  Clone ID: uC-gsflmaxxa095a04b1
accatgctatcgaccaatggcaaccctgacaacctcagagttggtttttacaagctctgaggcgagcaaccacggagcagacactaaggccaatcttgcacaggctggtgccaggaatcaagccctgactcacacatagacgccgccatctcacactatggaggtgataaacatgccaacccccaaacacactcc

SEQ ID NO: 56529 - DNA, 377 bp, Gossypium hirsutum
  Clone ID: uC-gsflmaxxa095f05b1
ggaacacctccagggaccgtccgaattcctcgtcgacctctcgtcccccttataaaaacgacacaagctgaacctctctcggttgtccattttaaaaacacatgggcgctaaaacctctcgcatgtttcgatcctcgtttacctcaccactaacccggaacatgtcgcactccactgagaaaccctgcttctcacctgaaaaccacaacggcttccatttggtcgaaccaatttcttcttctccaccacccaagtctcgacccttccctcctgctcataaaccccaagacgccatcaatgctcctaaagaatccattcccacactcaatccgacagcctcgctacccttcctacatagtccccctctccaactctaa

SEQ ID NO: 56530 - DNA, 118 bp, Gossypium hirsutum
  Clone ID: uC-gsflmaxxa095f08b1
ctggatgcgtgggctgtctctgaaactgaaaaaaagggggccctttttaaaaccttatcagggaaccaggccacacctaaggaagaacccctagaaccaatgccagagactggaactc

SEQ ID NO: 56531 - DNA, 320 bp, Gossypium hirsutum
  Clone ID: uC-gsflmaxxa095g01b1
cagctgaatcactttctattcagtagcatatacaaactaagggagcttggatactctccagcagaaacggctcccgcttccttccatcacgagaaagaatgcccgaaggacgcctccggcaatcacttctctactaggcaccaccgcctgttccgaagtctaacatcttcctaccccggagttcgactttctttccattcccccacctttatttctctcctttcttttcacttcctctgttaagccccttcgctttcctctccatcattctcattttctcttcccaccaagaggaaaatcggccagctaattgtgtccaa

SEQ ID NO: 56532 - DNA, 107 bp, Gossypium hirsutum
  Clone ID: uC-gsflmaxxa095g09b1
cacatagatggcaggcgcagcaaattgggtttccatgaccttactgtaaatcagtatggggatcgacaacctatggtaagaggacctgaatctccaccatgtctgac

SEQ ID NO: 56533 - DNA, 133 bp, Gossypium hirsutum
  unsure (1)..(133): unsure at all n locations
  Clone ID: uC-gsflmaxxa095h03b1
gcaaaagatggttttattcttcgatgaaaatgagcaaanggtcaattttataaactctattgggggcttcataaccatccatcgtgaagctaaatcgatcagagaaaagcctcaagcttttgagttcttcaat

SEQ ID NO: 56534 - DNA, 246 bp, Gossypium hirsutum
  Clone ID: uC-gsflmaxxa095h10b1
ataatacttaagaatggtagtgaaagcgcatcgcgcagtgcaatttaaaagccctgaggggttaacaacacgcctccttgagacagaggttcaattccatatcgtaccctcaaaaccatcaatccaatacatcctctaccaataaattcctatctttcctacccctttaaccctgtaacttacatcatttaccaacattcatgtattactattccccaaaaacaaacacataactcccattctctt

SEQ ID NO: 56535 - DNA, 501 bp, Gossypium hirsutum
  Clone ID: uC-gsflmaxxa096a11b1
caccccgggggccccggcgcggaatccccgggacgccccacgcgcgcgtttgggtagcgtccatggggcatatacagcaggggggggtgtttgtttaaagtttttatggtgataacacccctcacacacatgaagcgggcttgggcatgacggccttggccagcggaccacaccagcagggccaagtgtcactgacaggggtcacagaccgaggcgagcaaagaaagatggtgacattggaagaagccaaatgggatggggaatagctacagctcttattgtgaacaatatatttgttgttctcaaggaaggggactctgaatatctcctgaacggaataaaaacggcagaagcgaatgttagaggtttagcaaatagaggacaaattaccaaggacaaggcggaaaaagccctctcaatgcttaaaggagccctggattactccgaatttaaagacgtagacatggtcatacaggctgccattgaaaatgtcgctaaaag

SEQ ID NO: 56536 - DNA, 463 bp, Gossypium hirsutum
  Clone ID: uC-gsflmaxxa097c07b1
gtcttgtgtggaccacgaaactggagagggggggccaaacaaaaaaggactggttgcaaatggacagaaggagtttaccatgggggatacactgacacaactagacaaggacatggcggcaccatataaccagaggctgggtcaacctatcaagggtacctacttaataggctgaagattatgggacatcctggatctaagcgcatatctggtatgcaagatataatatggaatgcttgatgatctataaagaaaatagaggggcatgccccaaaaagctgattcaaatactttaccgtggtatcatccgcatgatcctataattatgagactatgtttaaggaatgctaggtaattaatgggactgtatactgatgtggaagatagaaaaacccgtttgatgtattttgataataaggttcgtggttgatttgcaatatagatggggtttggatttttaaaa

SEQ ID NO: 56537 - DNA, 295 bp, Gossypium hirsutum
  Clone ID: uC-gsflmaxxa097c10b1
ttgctttacgcgtgggtttttttgggtcttaggggggggtatattagatataggtgcctttatttgaagtggatcataatggataaggaaaagactgacattaacatagaggtcataggtcacgtcgatgctgggaataaaaccaccactggccaactgatttacatgcttggcggtatctgacaagtatctcaattgaaaggcttcagaaataagactggtgataggaacacgactgcatctgaagaatgcttggagctgaccacacaaaagtggaacttcaagaagatgctga

SEQ ID NO: 56538 - DNA, 245 bp, Gossypium hirsutum
  Clone ID: uC-gsflmaxxa097c12b1
tttttataaggtaaaaactattggtatttcggggggggttttttaacaaacgcgggggtccataacaatctccatgaacaaaacctaccagagcatagaactgatcataatgtcactgttacaacccaccatctgccagctgtcctggatatctccactgttgaactcgctaaggtcttgtccctccatacaccaataaagtcacttaaacattttatgcagaatccagagcatcttatcaaaaa

SEQ ID NO: 56539 - DNA, 394 bp, Gossypium hirsutum
  Clone ID: uC-gsflmaxxa097d09b1
tcttttaacacccgggagccccgagacctcggggggggtcttataaaaaaaggggggcgctataaacccggcccacccaccctggaaaccgctaaaccggagggagggtccagcggccggaagagcacctgcacgacaagtgcagtccggagcgcccccggcggcccttgaaaatccagaggaccgagtgacccccacgcccggtcgaactgataaccacatcaggtctccacggtgaacacccactggtccatggaacactgcaggcaagggacgacggccacctggatcccccacctcaggaaaaggactggctctgagggctgatcacgggggccccagtgcccaacccggcggccgacaaagcactgctcgagcatgctccccccagaga

SEQ ID NO: 56540 - DNA, 180 bp, Gossypium hirsutum
  Clone ID: uC-gsflmaxxa097h02b1
gtttaatttccggtgccgtgtctcataaaatgggggggactaattgtgacgcggagagcatctgcacactcctcttcaagagttatgttgtttgcataacagcctgaccactcagcacacaagctaagacgctgttgcttccattgatgcactaaagcactacccgttgaatggaccccg

SEQ ID NO: 56541 - DNA, 475 bp, Gossypium hirsutum
  Clone ID: uC-gsflmaxxa098d12b1
tttttcgcgtccgcccacgcgtccgcaaagacaagacatgttttaccatatctgggtgtcaccatcatcttcaacctccattgttttagcaatggttttagctttaactctcacatttgttcattcactaacattgagatcagatacggaagctcttcaagcacttacgcgttccattgatcccaacatgattccaccatcatcatatatcagttcatgggatttctcagctgatccatgtgatagtactggtgctaaatttctggggattttgtgttcaaaccctggggataattcaacaaaccggatcatatcgatcgagctcgatagtgctggatatgatggttttttgacacacaatataggaaaccttactgagttaacctcgcttgatcttagcaagaaccagtttagagggccattaccagataccttaaagaatttcaagacactaatccagatttctctttcaggg

SEQ ID NO: 56542 - DNA, 358 bp, Gossypium hirsutum
  Clone ID: uC-gsflmaxxa106d05b1
tttagttcccacacaaatcgacggcgctagtgggatgggggggccatgagaagagtcaaccgctttcctacccccggcagaaccttaacctgtggcggcgccgctgagaaaccgctggctcaagcggcggtgatgagcacatgcccttcttcatcgctaaaatctcataatttcccgcagaaacccgctgaacgaatagggctgtcgcgtccttccctcgtgcgcaggggagcggggaccacgctggaccccggggcagcatccactactggcacaagaagcccttgctaaggagaagccaccctctgcaaaggccccccccaaggaagccggtctctaccagcaagaagcctgcccc

SEQ ID NO: 56543 - DNA, 284 bp, Gossypium hirsutum
  Clone ID: uC-gsflmaxxa106d10b1
ctcagagcttttccaatttgatggcgtttgtgggtttatttgaagtttttttgcctctcgctttctttctgcttctctactgcttaagagataagtatcatggccctccaaagagtttcccgcttgtcgggatgatgccacagtcttctcttctacattctctcggctgtcatgactgtcttaccaacactctcccgatatgtcactccactcttcttcccactagggttttgctaacacaaccttccctgctcccttctatcccttccatcatttaccacatc

SEQ ID NO: 56544 - DNA, 364 bp, Gossypium hirsutum
  Clone ID: uC-gsflmaxxa106e04b1
ccctttacttgtccgaaaaacaaggcaccacaccttaggagggggcctttcaagttggtacttccattatcacccccctcagcctctaaaggtcaatcagatgctcctgatgctgctgccaagtctggcgcaaaagctaacgggaaaacggatttgagccagccacttttggatgctaggaaagaagcatgtgcctctggaactccatcaacaggtgggaaccctaaagggacatacctattaccaaaagcaaacttagaaggcccaagccaggcccctaccgagataaaagcccaaggcaccataccggctccggctgatcctagggccttccaaagaccccaaacggggtagagtccatagt

SEQ ID NO: 56545 - DNA, 293 bp, Gossypium hirsutum
  Clone ID: uC-gsflmaxxa106g04b1
accgtttacttgtggcaattggtttcatcgaggggaccaacggggttatattgaggtgccttttccggatcctcaatgaacccagctggttcattcggaccagtcttggttagctggacatgggacatccactggatctactgggtcggaccccttaacggtggggggctcgttggcctcatttacgagttcatttgtaatagtaacacccacgagcagtttccaaccacccattatttagcctaatcaggggttaattgattcggctgtcacttttaaaccggatttttttc

SEQ ID NO: 56546 - DNA, 115 bp, Gossypium hirsutum
  Clone ID: uC-gsflmaxxa119b01b1
aattaggctccaaggccaaaggcagagataaacggggtcgttatgaacttctcatcatcggcaaatactttcctgcttgcatggttagtagagaggttctgaataagtatttcga

SEQ ID NO: 56547 - DNA, 109 bp, Gossypium hirsutum
  Clone ID: uC-gsflmaxxa119c03b1
ccccgtgctatcgccatggtatctgtccctgggaatcccgtcaaggttaaccacccagcagcccgagattcatgttagaaaatcgtatcgcgcgaataaagccatccct

SEQ ID NO: 56548 - DNA, 166 bp, Gossypium hirsutum
  Clone ID: uC-gsflmaxxa119f02b1
ctccgcttctctctttctttctacttgcccattcccatgttatcatttcaaacccccatttaactgtctagttttttcccatttcagttcaaaagttttgttcttcttttcaatttgttgaaaagtagatcattttaaagatttctattagtgagatacattgggg

SEQ ID NO: 56549 - DNA, 125 bp, Gossypium hirsutum
  unsure (1)..(125): unsure at all n locations
  Clone ID: uC-gsflmaxxa119f04b1
accccccggatcncatccgcgtaaaatcaaaaccaaattgtgttttattttaaacatatagccgcgcaaaaacacaaagggcataaaaaaaggatattcaatggggatcttctccttcaatgcca

SEQ ID NO: 56550 - DNA, 264 bp, Gossypium hirsutum
  Clone ID: uC-gsflnu33B003f03b1
tccacgcgttcgaagactcttgcatcattaggggcatttttagtacgtttgcctcgaagctacaagttgatcttttaaatgttctagacggcaattacttcaagtttgaaaatcagcttaagagcaacgggaagctatcactaactcgcaagagatggtttagaaacgatacgctcagattgagattgtatggtgcacaaccaattcttgatcagattgcctgtggcggttcatcatgtatactgtgagcagaaagaggcgcag

SEQ ID NO: 56551 - DNA, 471 bp, Gossypium hirsutum
  Clone ID: uC-gsflnu33B005a12b1
ttctcgcgtccgtcctcgcgtccgataaaaaaaaataataataaaaaaaaaaaagactagcaccaatatcaaatataggtgtgtcgcttttaacggtttcctggtttttcttgtggtggccttgaccttccattttctttttcttggcggggcctttcttttggctggtgtcttttatttctaattcgcctgctgcttgttatggctctggtgttccgacccttttttttcttgctcgcttttttcccttttttgccttttcgcttttgtcgagttcggcctctttccctttcgtgcttttcctccggggggcccttcttcctttgtgccttgcttctctggctgtttggtggctttgtctttggcggcttttgtcttccttctgctttttgggcggccccctgtgtattgctccttctttggtctggttggttttttggccgttctttttttgcccttcctttgtttttc

SEQ ID NO: 56552 - DNA, 266 bp, Gossypium hirsutum
  Clone ID: uC-gsflnu33B006a06b1
ttaacgcttacggactatcgttctgctaatcgttgctatatctatagttcttcaagccacggtgcctccaactgcgttagccgctcgtaacgaggttatgtcctctgccgctgcatcgaaagtggctaatgattgcaacggtttggctgaggttttcaagatggcaggccctggctgcaaacctaaaggatcgttttgattgtttgacctaaccagctgactggaggtcatgcggatgccttgcaggggggagctataactatgat

SEQ ID NO: 56553 - DNA, 222 bp, Gossypium hirsutum
  Clone ID: uC-gsflnu33B006g06b1
ttatgagggaagacgaggaagatattgattttgatgatgatgatttcgaagatgatgaaaaagatatgctggagcactatctggttgagaagtctgttttttacacacatttgacattgagagttgtctaaatgaacaaattgtggcctgtgaagttgatgaagatcataactgatgcactttatgcggcttgccctttgataatttttatagtgatataac

SEQ ID NO: 56554 - DNA, 217 bp, Gossypium hirsutum
  Clone ID: uC-gsflnu33B008h02b1
ttacacgtccgtacacacgtaactgaaaacattctattttaacaatagggaacaactaagctagtggagaaacaacagttactgctctataaaggtgaccttcaacttattcatgactgcaccaacgatgcttacggtattgtcagggctgaagtcattgtcggcgaccataactgaactgatgatgttatcagaggagccatttctagaaccattg

SEQ ID NO: 56555 - DNA, 179 bp, Gossypium hirsutum
  Clone ID: uC-gsflnu33B012d10b1
ttctgatctcaactcgaatgccttcttgtacgatggtctccgtctgcgaggagggcaaaccccggacgagcttgagatggaggatggtgatgagagcaatcctatgcgtaaccaaacaggctggccctctggggaagagagaactgcatggccgcgaagacaacactgatgagttagtt

SEQ ID NO: 56556 - DNA, 125 bp, Gossypium hirsutum
  Clone ID: uC-gsflnu33B012g01b1
ttttgctcccaaaattcacggcgcaataacggggggcattttttggttgattggcggtgttacccacaacaacagtggttatcgagaagcctgggattttatgcagaaaatgatactacagggag

SEQ ID NO: 56557 - DNA, 354 bp, Gossypium hirsutum
  Clone ID: uC-gsflnu33B012g10b1
tccacgcgtccgcccacgcgtatagaaagggtgtaatttacataatataggcctgttatccaattagcaaaatgattgctgggtatcttcattgtcttgaacatggaaatcagactgaaggccatatgacaagtgacaagactgtcggaggaggagatgatgcttttaacaccttttttagtgaaacttggtgctggaaagcacgtacctcgtgctgaccttgcggaacttgagcctactggtattgatgaatcgaggactggaacttaccgtcagttttttcaccctgaagcaaatcaatcaattgcaaggtagactctgccaacaacatcttaccgaggccactacactatt

SEQ ID NO: 56558 - DNA, 200 bp, Gossypium hirsutum
  Clone ID: uC-gsflnu33B015d12b1
ttcgcaccaagcaacgcccacaaggcggcggggggcacttttaaaaaaggatgcgggtaccaccccccaacccgagcggcaaccggaggctgcggaggccgaagctggcgaggaagacaaagggaggcggggggacccacgaaaacgcgaaaaacgatcggcagacgaacgaagaacacgcggagacctaaccagaacgc

SEQ ID NO: 56559 - DNA, 456 bp, Gossypium hirsutum
  Clone ID: uC-gsflnu33B015g09b1
ttctacacatacaaccacacaaacaaaaaaaggggaaactttaaaaaaaaacgtggttacaaaaaaaaaaaaaaaacatcattatcatacccttccatttccaaaaaccgaaactcctatgggcgtcctttctaaagatcccaaattatcatccccttccttgccacataataacttttttttcgggaccccaaagaaatattccctgcccacatttttaccaccgagagcctgggaaacccctgcgttaccccaccttaattccttttagaaaactccccttttcgcaacctggctattttcataacagaccccaccgggagcaccttcctaccagttgctctactcttactagataatggaccccccccttacctagagctttaccccccagtcatgcttcacttatcctctacgtgaaccgatacctttacaatcgccctaaccccctgcatt

SEQ ID NO: 56560 - DNA, 417 bp, Gossypium hirsutum
  Clone ID: uC-gsflnu33B015h06b1
atatgggagaggaggaatagttgataaaactgggggaacttttaaactagtgggtgaaggtacatgataaaggggccgctaacggtaggctgtgtgtgtttttccttgatggttcgatctttagcgcttgcgtttgatcgccctgttttttgacgggtatgggctgtctggccttccccagcttgcctggacggggacgcctgctggcctcgtgttttctttggtttatccatcttttcccgcttggctgttgttccgctgttgcatgcgttcaaccgatgcgcctgccgcggcgttgccttgattatacccgggtttccgacggtgttggttttttaacggtgcgtttttttgtttcttttagcgcgcctgtgcgaatgttttgacggggagctgccgatattgttgcggcctgcg

SEQ ID NO: 56561 - DNA, 505 bp, Gossypium hirsutum
  Clone ID: uC-gsflnu33B016a03b1
taatatatggaagcggtgacgcctgcgggggccccgccgcgatatccggggcgagccacacgcgcgtttttatgtgtcagacaagctccataaatgcccaggtaatgtcatagacctcaaggacgcacactatgagagtacagaacgaggtgcagcaatggtaatggccaaccactactacagcaacatactgcccaacacggtgtaagaacattgtggaacacccatggctacatgacgtctaccttgtgagactgcaaaccagatttaatgggagtctaggacatacatcttgaggactaatatgtcatatataggtggggaatcataagaaggtgtatggaactgatgactaaatgccttggcaagagaaagccgagtgtgttcgaataaaacggaagctcacttgtttagtgtccaagagacaagaaagataaggtgcagtgagtaacggtgcaatggtactagtttgatacgatcgacccattgcatttatatttagcat

SEQ ID NO: 56562 - DNA, 464 bp, Gossypium hirsutum
  Clone ID: uC-gsflnu33B016a04b1
tttattacgtacgaccatgggtatgtaaatgcggggggctaaagctagaatgttagggatttaagtatgtaatattaaagcctgtggttcattgagttatgttcactatctgcatacagatggtctgggaaacaacggttaggagcatgcacgaaatgcctgtgtcaaacacggagcggagctgatgctgtatgactgagacagggtggaagcctttcgattgcttaaaagctatatactggactataacgaactttaattagtggatctaatatctcggcacgaatggactgggactgggtgaactatagctgtatacacatattgggagtaaaaacgatatcatggggatgatagttgtgcttcgtaactaaataggatatgagtgcaaggttgcgagtgaccagtatgataatgagcagagagtaacggcttaatggttctagatagatacgatcgaccca

SEQ ID NO: 56563 - DNA, 483 bp, Gossypium hirsutum
  Clone ID: uC-gsflnu33B016a07b1
tggggagcggtggcgcccgtgcgggccccgccccggaattccgggcgacgccacacgcgcgctttttctggtgataggttcaatgcatgtataggggcactagatgcaggggaacctgatgttctaagagactgggccgcatgtgagggtatacagcttgaggatttactaccgctgagcaaagatacaagagcaaggagtgctgatatcgctaggaaggttgatgtgagaagggaggcacagccgagaggctatgaaatagccaaagctggaactttggtgcctgaacaagtgaccgtggaaactgggcttctcgctacgacattcaagatcgggcgagctaaagctggggcgtgctgcgggaaagccatatccaacatgtatgctgagctttcaacttgcgagccagcaccttcaaatgtctaaattgggattggcttcaacaaaatgcacaaacacatttcgagagggaacaactttata

SEQ ID NO: 56564 - DNA, 412 bp, Gossypium hirsutum
  Clone ID: uC-gsflnu33B016d02b1
ttgaagctgttggacagggtatatacatcacgtggcatgtactttatagaataggctacccaacgggtcatctgctaagattgttaataataaaggatgttgtgtatgaaggggttatgggtgtggaataagggatgaagatggactacatacatatgtgtgaggaaaatcgtatggtccataacaaacaacagtgcataatagatgcaaggatgatcatccagctctggaagaacactggttgctatgaagcataatcatgataagttacctggtcaacttcacgacgctgatttcgccacagctgaagagctgttccagctcccaaccgaggtaaaaatgcagcacaccaccgacatgcttttattgggttgttgacgacaatacaacactggtacaatctacgagttct

SEQ ID NO: 56565 - DNA, 364 bp, Gossypium hirsutum
  Clone ID: uC-gsflnu33B016g01b1
ctcatcacatccctccacgcactcaaattcggggctatttttaatcaaatcggggtttttatacccaattattatagatctagatcccatctttcaaacttatattaacgccttaaaagatgtccctcaacaatctaaacctcatgcccataaattaaaaaaataagccccaactcatactctaattactttactctcccctttatataaacattgaaacatggaaaaaccccgcatatacaatttaaaaagagctcattcaaaaaccagtttcaaccataggcttaaatttgaaaaagcccttacaaatcttcttaacctttacattccaactcaacctaccgaattggaaaaactctgtaca

SEQ ID NO: 56566 - DNA, 236 bp, Gossypium hirsutum
  Clone ID: uC-gsflnu33B016h01b1
gccgcgccggaattgccgcgtccaccgccgccgttttttcgtccgaaggccggccccaatcaaaggggggggttgaataaatctggcgggctttatataaggtccaagatggcggacacacactggccacttttgagaatgacatgagagtcaacggtatccactacagtgggcgcggttgttcaaaattaagaccacgaaaagggggccggcttcctatttattcactttgcatg

SEQ ID NO: 56567 - DNA, 232 bp, Gossypium hirsutum
  Clone ID: uC-gsflnu33B016h03b1
acccacgcgtccgttttttttcttctcccaaggggattaaaaatggggggcaagagttatgaacatgggaaaagtgacaaaagaccaactcttttggtgccacaacaaattgagtaagattaattttgttcataggaagattaatgtagaaccatctcttttgcttttcccatgttaatattcatgaaaaagtcttgtctacagttatacttacaccatcatatacttttgg

SEQ ID NO: 56568 - DNA, 305 bp, Gossypium hirsutum
  Clone ID: uC-gsflnu33B018e02b1
caaggcgtcgtctacacgtgcgatcacgcgtgcgtaggcgtgttcgatctggagctaatagctgaaccataacagattcaactatagaagcgacatgggagattccaggaaaacaagggtaacttgaaagacccgagagtggtaaaggagataggtataggaatgacactgggactgagggcacgtaaggttctggaagatgcattactggaaggagtagaggaaagtgagagaatgtataaaatgctcgtgaaaggtgaaataagtgacatagcaaaagaataaatggactattagattagtga

SEQ ID NO: 56569 - DNA, 418 bp, Gossypium hirsutum
  unsure (1)..(418): unsure at all n locations
  Clone ID: uC-gsflnu33B019d09b1
ttgacgcatactcatgtattggctcccaggatgctatggtttaaagtaaaaatatacatctcgcagagggtnctactggcagtaccttacaagtaaccgcctatcaaggtgtaatggaaactctcatggcagacaatcgacgcttcaaacacaaaaatggcaacacgacatctgctgtattactcttcgaggagcccgatttcacatggattgcgtccgaaattcgacattctcagttccatgtttcctcaaatagagcatggggcagcggaacagaggttcaccttcaccaagcatattatcaaggaacggaatccatagcttgccttcaattataatcgagaaccggacatcaagggtacaatataatggaccaaaaagatctgctgtcgaccgacaaatttatgagaaaacaaca

SEQ ID NO: 56570 - DNA, 272 bp, Gossypium hirsutum
  Clone ID: uC-gsflnu33B022a03b1
ttttcttttttttttttttttttctcttttagctttactgtgatcgaaagttcaaggatcatggggtctgtaaacaaaaaccaaaaaaacacgttgagttacatataatatattccggtctttgacccaaaaatgtatcaacatgggtacggcccctggggaaaaacagggggggactttgtcgcaaagcccagaacactgtgtcaaataatcaaaaccgggtatcgttggaaaatccccaatgtatagctaccggtcgtggttgcccccat

SEQ ID NO: 56571 - DNA, 250 bp, Gossypium hirsutum
  Clone ID: uC-gsflnu33B025d06b1
gggtctgacccacgcgtcctggacaacgaattctacaagggaaaacaggattttatcatctgctgagcctctttcattcgtcagagaacagcctaccagaatacctaatgattctgatccttttctccttctaaagattcttaaccccatccacctgcctatactgataagaaaacccctcctaaaaaatgctttggttgcgaacatctcttgcgctaatgaagaaagagtttttgagtgtagcagaacc

SEQ ID NO: 56572 - DNA, 420 bp, Gossypium hirsutum
  Clone ID: uC-gsflnu33B026a11b1
cagggcccccgactccaggttttaatcaaccagttcttgcgccaccaacaatgggtgaggccgcagcattctagccccaaattcctgctcgaccagccgagtctcctggtccaccatataagccccctgcaccagcaccggctgccgaggctcctactcccccatataaagccgctactgccgcaccggcacctccagtcgaggcccctacacccccatatgagcccccgacacctgctccagcacccccatccatagcacctacttcagcaccagcagctcctagtgaagcaccaactcccccatataagccccgagatcctacacctgcagttaagtcaccaacaactccatgcccgtcttacaagccaccaattgctgcattgccgcctgttatgacaaaaaaggattgcatgccat

SEQ ID NO: 56573 - DNA, 251 bp, Gossypium hirsutum
  Clone ID: uC-gsflnu33B026a12b1
cccggcggccttctcttctggaccacttttataggactacttgggtacatgatcactgcgggcatgtacacaacagcaatctcagtggtgtggacactggctgagctcattcggagtccacgagtgcaggacaaggcgcactaagagcttgatcgtgtgataggatccagaagggatgatgcctgaacgcagcttatataatctgtcttaccttaagacgcgtatccaaggaagcactacgactgcacccc

SEQ ID NO: 56574 - DNA, 296 bp, Gossypium hirsutum
  Clone ID: uC-gsflnu33B026d03b1
aacgacatagctcttatatagagacacctaaagggggggcccttttaggggtcccacatttccgtcccctggcaaaaccctgactttccccttcttagtggccctgaaatacattcccctggccccagttttccaactagcgaactggcaaaccccgggcgtcccccacataaattgcttagcctaaatgccattttggacgcgcgctgtaatggcaaataagccccgccggttgggctttccacacactgggcgacccttactgttgacagggccctaccctccgctgctttatt

SEQ ID NO: 56575 - DNA, 447 bp, Gossypium hirsutum
  Clone ID: uC-gsflnu33B026d05b1
ttctcgcgtccggataaaacataaaatagagagagatatattttatagaaaatagtaaaatactaataactttttaaaatgacagaggattaaagtgtgttcttgctttatttggagggtggtggtctccccatgggaactgtttatgttttattttgaggggggggccgttttttgggttcccttttttcctgccggtcgttgcggaattacttgtttttttttgtgggcccttgttttaattcatggggccgggttttaccaccggtgggcgggggatccccggggttttccccttttttttgcgttgtggcgacttccccttttttctgtgggggcaatttaaaaaaggccccttcccgtcgcctttcctcaaagttgctgccccttctttggtgtttggcaccccccttttcttggccttttttgccggttggttgggtggtt

SEQ ID NO: 56576 - DNA, 328 bp, Gossypium hirsutum
  Clone ID: uC-gsflnu33B026d10b1
ctatgttacttgacgtactacatatcggcatgtgaaacgtgcgagctgtgcgcggcctttgttaatgcctttacctccataggactgttgctagactgacacaggaataaaagtgtggacacccatgctgtggatattggtgcggttcaaacatgtggtgccgcctcatcatgtatgtcagttatgtagtcggtgtggcctcagctgatatgaccgtggaggaagacatgcatttcacctgtgtagagcccaatgacatggctcgtgacgtacccagccgagttggtagaatggcagatggcgcttgacctgaagggtgagggatgat

SEQ ID NO: 56577 - DNA, 350 bp, Gossypium hirsutum
  Clone ID: uC-gsflnu33B026e12b1
ttttcgcgtacgggagtccctcactttattgcgtctatttgattggaattatggctggaaataggattgctgctatcccaccaagcgcccttgctttcaatccttccactgatgctgggcccacccttgtttatggtactggtttctcccgctttgttgaaccagcctatgtctctgtacggtactcattccctcgacttgttgggttggcgaacctgacatctctcggtgaactctcacgtgtccctctgtccacatcatttgcacctaccataactttcatggtttggggcatgaacgtgacatggccacaggagaaccttctgatacacatggcaacgtgcaagatc

SEQ ID NO: 56578 - DNA, 405 bp, Gossypium hirsutum
  Clone ID: uC-gsflnu33B026f01b1
gtctgcaagaaaggcacaaggatgggtgaagctgcgaaggtcatcggtgactgtgcgagcccctacagattcggggaagctctggggttggagatgacaggagttgcgtatgcatacatctacgatgagccagttgacgacgtgagcgaggagatgaccagatgcagagcggatcatatgagagtagcgacagttagcacacaagccaagcaatcggatgtggaatgcgttacactatgatacatgtgtggaaactgcggatgcatagatccctatttaggacaatgacccttatgacaaatccaccgatcgactctgggtgaggaccactgacgatggtgctatggtaccctttggctagctacatgtatcgccatgattgagcgcgaatatgtgaccaatgaa

SEQ ID NO: 56579 - DNA, 501 bp, Gossypium hirsutum
  Clone ID: uC-gsflnu33B026h06b1
aaggcggatcccccggcgggatccggttccggaattccgggttgagaccacagccgtccgttcaggatgccgccaaacggaacaaaattgggggcccttttctaagccctggacgctcaccaattttttctaatctgggcacgctggtcccggacatcctacaacgcgaccagtaagcctacttatcccagatagcggaacatgccaaacgctacgaggcgatggatcaattgatgcagaacctacgcgctcggatctactactgcttccgagctgaccgcccgaggaacggaacctcttctcggtcgcttacaaaaacgtaaaccgatctgtacgcgccgggcggaggaccgttctttatatcgagcataaagaagaaagccggaagaaccaagaacatgtgaggctgcgcaaggagtactgatcagaggttgaatccttggcgtccgatgttcgcactagtatcttgaatctgttggactcgtatctgatcccatctgc

SEQ ID NO: 56580 - DNA, 316 bp, Gossypium hirsutum
  Clone ID: uC-gsflnu33B028a10b1
gctgatgcccccctgcaccgcccgcgactgtacactctggctggacccacccacgcgtatgttttagccggcctttttatcaacatcaccgcgcttatgatccatctgactgataatattggcaacacccatatttgttatctcactttgccgggcggccgatccaatggtccaattctaagaaccactttcaaagctctgcctacgttcgctatggtgctacttttaaacaaccagcttacaggctgtatacgactatgagactggtgagctccaggcggctgcccactttgatgcccttgccaaccatgcgact

SEQ ID NO: 56581 - DNA, 184 bp, Gossypium hirsutum
  Clone ID: uC-gsflnu33B028a11b1
accgaccgcagcgcgtactggtttgagatccaaagaggaagctacgactgctgatatacataggcggattaccactttcggcgacaaagacagaccggtgagctggcatacagggcggactatccagaggatgcatgctaactaacacaggcaggcgacagcctacatcccctatcgtgtaaaa

SEQ ID NO: 56582 - DNA, 285 bp, Gossypium hirsutum
  Clone ID: uC-gsflnu33B028b02b1
tacatatcgaccgatccaaaacggggacccagtgcatttcgtgcatcgtatccgcggtgtcatctaatcgggggcccatggtagtcgatcacccagatcttattttgtatgaaccgtttgcgcattaaagtgcgtttgcggttgagaacggaaactatgctttgcggggctgaaaaggggagggcccgcacatgtgtacctaccatatgaataaggccatacgttcatcagaaagatccccaatggcatgtgacaaggaggccactttaccgccggaaacaggaa

SEQ ID NO: 56583 - DNA, 376 bp, Gossypium hirsutum
  Clone ID: uC-gsflnu33B028d05b1
atttcattagaggacgtcaaatatgattccgagcgcaaatatgcattagcaaatgacttctgtgaaactgcgcatggcccattaacctagttatggccggcctgaagctcagcgaacgcacaatcaacgctggcgtgctagaactattgcggtataaatgccctgaaggctaaaatcgacgccaaatgcgatagaaggacgcactgggctacgcgacgtagattgaacatgcatgtaacactaaaacggctaaaagaactcctgtagtcggagacctattattgagagttgtgtcgtatgtgtatctcatggtcgcatagaagcctacatacctggtgtcgaatgctttatgtttgctcatactttctgctttggt

SEQ ID NO: 56584 - DNA, 536 bp, Gossypium hirsutum
  Clone ID: uC-gsflnu33B028f05b1
acgggcgcggaaattaccggggggagcgacgcaggcgcgcactcaggcgcgtggttgtgtagagaaaatccagagactggtttctctttctttaaaaggggggatatagaacgaatccaccattggattcatggcgcaagagcacaggaatttcgagatggatggcacaagtgaaggtgcaaaaaaggagacactatctaagatcatggatcgaaaaaaaagaaaaaaatactgcgctatgaaaagctaaggggggggccgtttgagggagcccaggtttacgaccgcgggatgggaaaaaaaaaattttttaagggggcccccaaaataaatttccggggcggggcgtttaaacaaggtggggaggggaaaaacaccgggggtaaccaaattaaagggcctggaaaaaaaaccccttttggcaggggggggtaaaaccaaaagggcccgcccgatcgcctttcaaaaatttgcccatcttaaagggaaaaggggacgcgcccttgaggggcccataaagcggggggggggggggg

SEQ ID NO: 56585 - DNA, 431 bp, Gossypium hirsutum
  Clone ID: uC-gsflnu33B028f07b1
tttattattcgtccgtatagtgaaactaggtgtgaagcaatggccttgttggatcttattggatagcttgagactgacgaaccgatcgtgattactgccgtagagggccaccatgtgcggagccacaggacgaaccatggccatcacactagctctgaagacgtacatggatgcgatgtacatgagggagaatcaggtactgcagcagcctttgtttgctggagagacgcacatgatgggaagggtcagactgctgagctgggagttgatgctgtggaccatgctaagaagtctacatcttgcatgctgtttgatggtgatctgagggaggaacactacagctctgtgagtgcagtccaaactgtcctaagagctacgggaacggggtgtagtgactgtactctggagatggaaaagctgacgggggattt

SEQ ID NO: 56586 - DNA, 243 bp, Gossypium hirsutum
  Clone ID: uC-gsflnu33B028h06b1
ggttgtttattgtagttctagtcaagtaaggaaggactactattatagtattatctaccaaatgggtcaaagtataaatatatcactgtaattgcactattatagcttaggtgtgcgctcgctcttattgttgtattagatgtcctatattcttgttcgggaactgatcctgtcttgattgatgggatatttgtactaatactttggatgtcctcgctgacactataattgttactctgtgct

SEQ ID NO: 56587 - DNA, 277 bp, Gossypium hirsutum
  Clone ID: uC-gsflnu33B028h08b1
ttttgtatgcgtgggcggacgcgtggtcggacgcgagggcggacgcatggacggactcgtggcatcgatagatgcagtggtgactccagagctctaacaatctacgccacgaagatgtacagaatggactactagaccaatgtgcaggttcgcggtcagctgaacacaataactggagtccctgatcacttcagtgcattgatacggcactcatatcatgaattgttcacaagagttggtgatgcaatgcgctatgatagatgcgttgaggtgcagt

SEQ ID NO: 56588 - DNA, 420 bp, Gossypium hirsutum
  Clone ID: uC-gsflnu33B035a02b1
agcgcgtttcttcgtccggtaaaagggcagagaaagacgtcgaataatttaacacatggtgctgattttacgaaagcaaagcgaatcatccagtggaagacctacgtttgcgcggagagcatgcaagccaatgggagtgcgctcggatcatgtgacccaacggatgggcatctgagccttgattttgccccctatttgatggctaccttgtcttacattatcatagttgagcccgcctcttggccggcaccagagcacgggatttggaaagcgtatccctgaacggacacaaatatatcgggacaagccgttgattcgggcattgggggcccaacggctgcgacagcagtatgggtcaactgccacaagctggtaataacatcatgtggcgattgccgagccgtgatttctaataacggc

SEQ ID NO: 56589 - DNA, 324 bp, Gossypium hirsutum
  Clone ID: uC-gsflnu33B035a06b1
ttcttttctgcggggaagatggtcgccctgatagtaatggacatattcatggttgaaggctccagggcaatgtccacgtatctgacggactaatcatgagtcacgacatgggccagaaggctatagccacaacaagctgtccaccctaaacgcgatggttgcaaggctaagaatggggctgactagacacagccatcgactgcatcagaatgtcggcgtgctgggtactacgaaagacgtgagccgacgatcgccttgaatttgcctccaatgaagcagctccaaatgcctagtgatggctcaagtttgcagatgagcatgaag

SEQ ID NO: 56590 - DNA, 284 bp, Gossypium hirsutum
  Clone ID: uC-gsflnu33B035b03b1
tcgttcacccgtccgttcacacgatagaccgactgaaatctaatacctgatcatctacatgacatcccatagcctaccttagttgtccgaagcaactatatgactgattacgatctaataaccagatgtactccttttaactatctacaacctaagagaccctccgaggctaaagaaatagaggaactattgccttctacgccctaaatgcttgtggcaataacttgcaccgataagccccgagatgttctggtccagacacgcactacactgacgcattcaac

SEQ ID NO: 56591 - DNA, 282 bp, Gossypium hirsutum
  Clone ID: uC-gsflnu33B035b07b1
ttatgcgtcctcccgctggtgaggaatcccgtggatgttattgtaaagtggcgccgccgaggacggaggtactgcatgtcgctgaaatggctaactgatcagattaatagcctggtgacctagaacgaaccatattttgcaaatacgctgaagatgatcgtaagcaatgcctgctgtggaacgatgtttacattgcctgcattaatccatttgctgacgacaaaggtaaaatcagagcggaaaggatggactgccgatgtctcaactgagaccatgtagcct

SEQ ID NO: 56592 - DNA, 326 bp, Gossypium hirsutum
  unsure (1)..(326): unsure at all n locations
  Clone ID: uC-gsflnu33B035c02b1
ttcgttaggattgagatctgcatgctccctgttggcgatggaatcaccctctgccgccgcgtcaaatgaaccaccaccaatgctaccggcgacacaaancgttactaccacccaggatcgacagactttcatactgagtctgagcaacttgaaatacggggtaaattcaatctggcactcataaacgcactgcctatctaccattatcaactcatatgacattctaaaccaagcagtgccttaccatttagaccaaagagggaacggctaatagtgaggttgaaccgctttatgataaataccatgataacgggggggcgttcttt

SEQ ID NO: 56593 - DNA, 343 bp, Gossypium hirsutum
  Clone ID: uC-gsflnu33B035c05b1
tttatgcgaacgtggtacatgatatacaatagagggactattgatagatctctgaacccatttactggcaggtgatgagcgcacagaaatcaacaattttggcagggatgtaggaagaggcagaattattttggcggtgcatagagctaatggaacgcacaggggcaaaactgaatctggaacaaaagggcatggaccttcaagtttgaacagtatgaaaaatgttggggtatctggagggagctataaacagaaatatggagtcgattgactggctagaacgatatctttctgttacaggggaaactgaacctgcagaaactgctgctctgataaagtcgac

SEQ ID NO: 56594 - DNA, 385 bp, Gossypium hirsutum
  Clone ID: uC-gsflnu33B035d01b1
ctctttcactgatcagacccataaccaatcaggagggcttaaagaaggtatgccggacagacacatactcagtcgggcggcccgaaaaggcgtctcatcctgaggctctgaaggcagctctagctaagctaatatcaagcctgatccttgaactcgctggatcaggctaatgaaaggctattaacatgtaggccgacaacagtgcaacaacgcactccgttcttgtatccaacactcactcgcacgggtcccgtctctctgtctctgtcacacgtggagccagcatataatgtgtggcgcgaagccccgcacacacctgaactgctttcgttggcgggaacatcacttgctggcgcggcagtaattactggatcgaccaacagct

SEQ ID NO: 56595 - DNA, 324 bp, Gossypium hirsutum
  Clone ID: uC-gsflnu33B035d06b1
ttctttcgggcgcattgtcgtcgtttcgactccaataccatacacataatggtcatggatctcatctacctgcaacgccatttaaagaacgagggcctcttttttcttagatcggactgtgtccagtagaaagcctcaaaggaacacgggaaaccagtgtagtgactgccaaataccccattcatcttttacccaaacattaataccgttgttgagaacgaagatgatgcctatgactagcctcgctcgagggcctttaggttgattcttacacccacctgaagcccacggagacttcgactccaagtgaaaaagggaaggcca

SEQ ID NO: 56596 - DNA, 358 bp, Gossypium hirsutum
  Clone ID: uC-gsflnu33B035d10b1
tcgtccacgcggacggacggcagcacggacggggagaatagataataggtcgggggtctgtccagacaaaaaccgcataataagcacacatacgtgtacggccgatcatacatcaatggagacagtgtttcacacaggtggccagccggcatatacgccaagacggaaaagcgtatatagacggatggactagaggcggtaagcaaaaccacattacatcacaagctgaagcctgggagagatcgtgatgacaataccaaccatagggttcaacgtggaaactgcaaaatacaagagcataaactatgactgtccgagaagaagacgggcatggacaagattcgcccatggcggaggg

SEQ ID NO: 56597 - DNA, 138 bp, Gossypium hirsutum
  Clone ID: uC-gsflnu33B035d11b1
aaaacatttccttagtgcataaaaaaaagttgaggagcatgccgattgtgaagcgtgtaattgcgctccccagcatcgaggatcgttgatccgatctgaagtgagtacccgacgggtggaacctcatgcgctagaggg

SEQ ID NO: 56598 - DNA, 350 bp, Gossypium hirsutum
  Clone ID: uC-gsflnu33B035e04b1
tttgtttcgtggtcacccccgcgtgtctctctagcaccctcactaataatgcctgccgctagggtataaggagactaacgccaggcttctacttcaaaacacagttccatggacctctgtaagacacccatcgatgggttctcgtccctagtgagtgctgcaagcaatacctgctattggagcggctctattatcataccacctgatactctatatgaagggggattgtgcaacagccatcactagctatccagccaattatgcaaacaggcctacatcagtgaaagtcacagcagagacacggcatgctaatgcatatcgctgcgggcgtgatggcatatcagtccttg

SEQ ID NO: 56599 - DNA, 380 bp, Gossypium hirsutum
  Clone ID: uC-gsflnu33B035e06b1
tcctatgcgtccggtgattgggcttcctaatgatcgctctgatggacgggcacgggtaccagacccgaactctctatgggctgaaagcaacggacacacgatttccggaaatcgcatgaagccgaaccatgccgtaggaggagacgaaccgagtataatatccgggcggatgggacctgatggagcctaccctgcgagtgctacaagcaatgatgagagaagcgggaagtgagcctcacgaaggagagcgaaaatgcgagacgttgcggcctatcatgaaaatgggacattagaagaggcggtacattgttgacccataccatgagaggaaggcaatatgaaaggaatagaatgagatctgctcggatcaaggctatgct

SEQ ID NO: 56600 - DNA, 254 bp, Gossypium hirsutum
  Clone ID: uC-gsflnu33B035e10b1
tcgtccacgcgtccgcccgcgcgttcgaccggggggtcggcgcagcctataaacggcccgcccatcaagaagcttctggttgcgcttaggatgcccttattgtcatgcttcggtctgtgatcgcttcgtctcaagctgctgttgcaactccagaaggtgggccatcgttcgtagccgcccgtttcccggtggcctcgttacaggctcacatagctctgcaaggtgcagcagagatgcctgcggggactgtggtt

SEQ ID NO: 56601 - DNA, 267 bp, Gossypium hirsutum
  Clone ID: uC-gsflnu33B035f02b1
tcgtctcacgcgtgcggacgcacgcaggtaggcgcgtgcttcgaagtatgctcctatgactccaccactttccaccagatttacattgaagatgggttcatcaatgttaggggtttgaagggcggacttataatcttaggatcgctgtgtgccacagaggctatttccactggtgtgacggatctgagacatggggatactcatgagtgggggaaggctgaggggaactgatgccactattggcatgactgatgatgctcgcaatca

SEQ ID NO: 56602 - DNA, 474 bp, Gossypium hirsutum
  Clone ID: uC-gsflnu33B035f05b1
cactatattgaatgcagctcgcctcctgcaccggcccggacttcactggctggaccgacgcaggccgtttctcttcaaacgctgctgcatgtagggcacccacagactttggcccactagcatggtgttgagggtatgcatgcctctcggcacccgaatgacggggaaccaccgcctgagctgcgcgattccggaggaaacgctgctggagggccggacagatactgacttgcaaaccggtcgtctgacttgtcccttgcctgaaagaccataatggaaccattttatagctttgggcctaccaaggtggcctaacgagagcggtggactttagaggaccgccagcaatgccaagtactcccttagctgtggggggtgctactcccggagactattgaaaaacggcagatggctcgaatggttttagtttcttaccaaagcgggctaattatggttctagagaggaattcatgc

SEQ ID NO: 56603 - DNA, 321 bp, Gossypium hirsutum
  Clone ID: uC-gsflnu33B035g02b1
ttcttttattcttattgctgaagttagagactagaggcaagtttagcgattgcttaatgaatatcccgcagcgcttggtgaccggagaggaaagaagttgtttatctatagctcctatcgcaaacccattgctggcaaatagctctccaagaatacccttaagctcgtgcggaaagcatctgaacacacctgcttgaagagcggagtcatggaagtggttaaatgtattctggggtggcctaaatgaatattcgtgatagctggaaacatatctactactgaggaaatcacttacgttccgattcctatgcgaagaggctg

SEQ ID NO: 56604 - DNA, 229 bp, Gossypium hirsutum
  Clone ID: uC-gsflnu33B035g03b1
tcgttcactcggccgactgcaaagctgatctggagacccagagacccttgtctccgcctgaacacctacttattccgtaactatgtctgtggtagccacacgaagattttcaggacatttggcgtgccctgtacaccaacgatgaggggaacgcagaacaatattgatgctgcgacctacaccaaggacctcggatggccttaccccgacttagtctgcaagaaagcct

SEQ ID NO: 56605 - DNA, 249 bp, Gossypium hirsutum
  Clone ID: uC-gsflnu33B035g05b1
ttctttgttacgtccgaagatgcactctctctaatggatgatgatattaggtagaggctacccgcctccaaagagaactgagatactctctacaaaaaagcactttaacgaacatctttagaaagtgaactttttgcttgaatgaattgagtgcttgcggcgggaaactggtagcctatgtcgagtgatttaatatttgaaatgctctactttttgactcgttgtagtccatatgaggccatataaaat

SEQ ID NO: 56606 - DNA, 210 bp, Gossypium hirsutum
  Clone ID: uC-gsflnu33B035g07b1
ttctgtgaatcggacggccgaagacaaggacaagaggaaagattagggatagcttgggatacacccggcaaggctaaaagatgctaaataaaaatattgttgaaaactatgcacaagaaatgaatcttgatatgacgcatgaattttttacaaagatgagtctatccaatgacaaaaaggaggttgaggaatgggctactggatcaggat

SEQ ID NO: 56607 - DNA, 427 bp, Gossypium hirsutum
  unsure (1)..(427): unsure at all n locations
  Clone ID: uC-gsflnu33B036c09b1
cccatgcttccgccgacgcgtacgaggacgatgaccagaaggggagcaatctctgcactaccaaccaagggcgatggccttgtcttaattaatggagctgatattttaagcatcatgaataatttgaacattggtctgactcccgtgaatattctttaatttcaaagagttctcaatttaattccctttgatatgcgacctatgtgcccctaacgccgaatggcttgggttcgaaagatggaaaagactgtgtggttgtatgcgtgaaggaacaatgtaacccatcattaaaataactgaagaggacaatcgaacttgtcctgacgatgtggaaatcgattaaggatttagctttggatgatggttaaacacctttcctgttnccatttcagctataaaagatgataaattaaaaagggggggcccg

SEQ ID NO: 56608 - DNA, 324 bp, Gossypium hirsutum
  Clone ID: uC-gsflnu33B036d02b1
atattatatagacaccgaaaaaaaacagaaaacaaaagggggaattcatgtaaaattttgggtcaaatcccacgagtgcaaattcgatgcggtgggcgattcatcaaggcgcttgcagcacacgggctggttttcgattgtcatttttgaggctctgcatactcaattcttgctctcaggcgtataacttgccctgcatggtgctatcaacatcgtaacaaaccacgttgttgtcgttaccactcatgctgttgcctataacaccccatgcacatgacgaattgcatacggcctactgggaaccccaagattactcgagatggg

SEQ ID NO: 56609 - DNA, 239 bp, Gossypium hirsutum
  Clone ID: uC-gsflnu33B036d11b1
ctagactggcgcaattatctcacacctttcagggttgattgtaaggagatgcgtagtcaagacaaatagaatggctcgggtttaacatttaaactgttctccaaaactttatacaatattcgttcctcatgatcgtcgtgatgtttattctaggcttattggcagagacatctcttctattcccattttctttataaataatctgtactaatcatgataagaataaattgttttggggt

SEQ ID NO: 56610 - DNA, 232 bp, Gossypium hirsutum
  Clone ID: uC-gsflnu33B036e06b1
gccatggatccggagcggacgccctttattatggggggtgatagaaacacaatgggggggattctacaaaacacaagacaaaaaaggcagaggaacgcgctaaaaaaccccagctgaaggccaatggctaaaagagctaccgcttgatggaataccaaattgataacacctacgcctcaagaagaagcgagtgcgaatgaaccaacaactactaagccaacacttagggagg

SEQ ID NO: 56611 - DNA, 284 bp, Gossypium hirsutum
  Clone ID: uC-gsflnu33B036f02b1
gccatgcttacgaacaacattctagtgctgaagggaggccatttatagcacttggggctgggatccaacataagcatatggattatggctagtatgacaaaaactcaagcttctagaatgccatctttcacatgagcctatgcgatgcggttgacgcactggttcctagctattactgctgacgacgtaagcacgctggttaccaacatacttactgcattgatagccagccggcgtcagacctctgacataggggctctatagggaaccaatctaatgttcca

SEQ ID NO: 56612 - DNA, 420 bp, Gossypium hirsutum
  Clone ID: uC-gsflnu33B036f03b1
gtggacccacgcgtccgccctcgtttccgcccagttgcacccacacaaccggggaattgatactgtcgggacggttgacagtccatcacttttccccaatcgagctccatctggcagggtgttgctcttgaacaacataggaggagctaccaacactggaatattgtccaagactgaaggggaacttgaagaagcagatgatcgtgatttgagaaaaatgctgataaatcctaatgcacaggagcctcttgttttgggtgtaagagtatggccacacgccattccacagatcttggttggtcatttgcatctccttgatagtgcaaaaatggctctcagggattccgggaatcatggactgtatcttgagggcaactatgtattatgtgtggcattaggacggagcgtggaaggtgctta

SEQ ID NO: 56613 - DNA, 293 bp, Gossypium hirsutum
  unsure (1)..(293): unsure at all n locations
  Clone ID: uC-gsflnu33B036f06b1
ngtcactcgtccgatttttggtgcttgaataactgccggttttcatgaagctgattgtcataaagggcaaccccatttgtggagccatgctgacgttcgtgatgctgtccatgccttatttttttgtagagagacaaatttatgagaacgggctggaggttccaagacacactctggaataccccagccgatcccacttaaagccgccaacaattcaattcatcgtgaacccaatgctttgataccccatgagagaagaaccgatcggaaaatccaacggtgatcatttggaa

SEQ ID NO: 56614 - DNA, 266 bp, Gossypium hirsutum
  Clone ID: uC-gsflnu33B036g02b1
gtcatgcttatcaggaacagcctagtgatgatgggaggcccttatatgtccttgaagacgggaacgaaaaaccggatacggaacagggcaagagttgcagaggcttatgcttcgagacacccctagatcactagacgctatctaaactggctgacccacattggtgggcatatcacgggagacgttgccagcacgctagcttccagctcaagaacagcattctgagcgaggatgcttcaactctctgaacacagaggctctatcgg

SEQ ID NO: 56615 - DNA, 351 bp, Gossypium hirsutum
  Clone ID: uC-gsflnu33B036g03b1
accaacaacattctactgttgatgggaggccatcaaaagtccttggggatgggttcgaagatgaggatactgaatatggctagatctgcagcgacctaagctcttagagagccctctttcacaagaccttagcgtatgtggttgacccactggttgcagactattacgttgaacgtcgctagcactgctggtaaccacctcatgtaatgcattgagagccaggtggagtccgattctgacaatagagactctatcgtgtacccatctaatgttccaccatgcatactcaggaagagacattttggggccttagaaagtgcattgtacatatcgtttaagaatagggccttg

SEQ ID NO: 56616 - DNA, 114 bp, Gossypium hirsutum
  Clone ID: uC-gsflnu33B037b10b1
cctcctatccaggacgagccaacatggagccaagggggactttaaaaaaattttccgagacttcacacaaacgcccatcacgcccaccaatagcattccaatcaaaacctaagc

SEQ ID NO: 56617 - DNA, 477 bp, Gossypium hirsutum
  Clone ID: uC-gsflnu33B037f07b1
ttcctcattacactcaaacatgaatgggagtctaccagggcctagccttcattttgcggattatcccagcaaggctcctttagagaattctgggcacccaggtatggctatggctgcttctctggcctctgctgtcggaccaagagtcgctgctgcctgtgcccaagcattccttggcagcaatgcctgaagatgtacataaggaaggtccgggacatggtcataggatgaatatggagagtgtacatagcacagaaggtggtttacatggctccgttcatcaaaaagagatctcagcattaccttcattttgtcaaaatgaggcatacggtcatccactttctgcagaaaaagttaaagctgctgccaaaagctgccttgcagctgcaactatgaaggcaaaactggttgcggaccatgcggaacgagttaattgaaaggtcatcagtcaacatcataaatcatccagtgcagaga

SEQ ID NO: 56618 - DNA, 544 bp, Gossypium hirsutum
  Clone ID: uC-gsflnu33B037g01b1
acattatggggagaggtggcgcgcgtgcgtgcccctccccggtatccccggcgcgccccacgcgcgcgtttttcagcataccattccagcattgtatgtgacacatgtgatgaggattccacactccgatatcctcttatagccgctcccagtttctcttttcttgtcgcacgttgtacttcaccatataacccaaataccttcctcagctataacagtcacatgatcaaatagccactatactgaactgtcaaatttcccgtccaaaacactagttcacatcatcgtatgcaccacatgttccatgaccatctctcttatgggaagaacaatcaccatccaagcggtactcagatagttacaatggcatacaccttgatggtagaagcatacacatgagaagcgattacgctgggttgaagctactacacacaagggctcgatagctacgagccatactaagcctgtctggcgcaacggcggctgacttagcattggcaccacagatgctttacacatttggaatcagctcacatggtatggg

SEQ ID NO: 56619 - DNA, 442 bp, Gossypium hirsutum
  Clone ID: uC-gsflnu33B037g09b1
ccgtcgggccacccgtccgcgtaattgacatggctactgaagaagctgtatcatgttaacttccatccactcctaggggctcacgcttgtgcgaggacgtgtagcaggtctgaaaggagtggaagcgtgaatgagcggcgcgcaacatggacgccgctttgcagtctcggatgcttaaacaaaagcaggtggttgatctgatgatccaagggcttcagatcgcacacgaaagcaaccagatccttggtaacattaccatagccacacatgtctacttgatcatgtaggtcacattcgcggtgcttagagctgagatgggtgatctcagtgccaggcttgaatctctgaatgaaatcaatggatttaataaactcgaacaatgtgggtttcgtatatgatcatccgaacaactatgtagccggccatgatcacgatcatgatc

SEQ ID NO: 56620 - DNA, 189 bp, Gossypium hirsutum
  Clone ID: uC-gsflnu33B046d04b1
attttgtgcacgatggcaagaaagggtaaacctgggagggattataatggcatcttgacacgttcacagatcttggacaggggaaggtatttgtagacctgttataaaaaaaaggaatcctcgtactgtgcaagtgatcttaggccaaacttattcagtgactgtagatattgcgtggtcaaaggttca

SEQ ID NO: 56621 - DNA, 180 bp, Gossypium hirsutum
  Clone ID: uC-gsflnu33B046d10b1
tgtcctactgaggctcggggttccaaagaagaactgattgatagctattttgccgccacagaacttacaaatataaagtgctattgcttcttttcctttctatcactaaatccccaatattcattatcttcaattgcataataatggcagcaattgagttattttggattttgcttttaa

SEQ ID NO: 56622 - DNA, 316 bp, Gossypium hirsutum
  Clone ID: uC-gsflnu33B046e09b1
tttgtcacgtaagatcgcagggatgcataatggagtctatataggaggttgctcagcaacaaaaggaaatatattcatagatactttggggcggccgcaaaaacgcccccatgtttacatactcgagcagtcaacgagatgaatgttatatagtgtcacataaattcaagttaatggccggtgtataacaccgtcgagacagggaaaacactggcgtaacccaactaaaataccttgcagaacatccccctctaggacagctggtgtaatcaaaaatacgccctcaccgatcgaccctgccaacaggcgggcagac

SEQ ID NO: 56623 - DNA, 270 bp, Gossypium hirsutum
  Clone ID: uC-gsflnu33B046g08b1
ttattttgaacaccccaaagctgcacatcatggcggaacaacttaccacataccgcgaggacatacaacgggctataatgtgattgagcccactaaggaggccaccccagaaaacgatgctagtgaaagaaatcaaactagagagcctgccgagacgtaaaaccggatgaataagtgttacccagagataatgctatctcattgaaacgaaatgcgaataaactagggcagctcgctgaagtacctaagatgttagccacatctcaacat

SEQ ID NO: 56624 - DNA, 259 bp, Gossypium hirsutum
  Clone ID: uC-gsflnu33B046h05b1
ggaaggggagctcttggagcttggtggggctgttttcattaacagattttgttcctggcccttacatgattcgagaaatggctgatagcgcgagggacaggtgcgtttatgataggcacaggatttgcactattgctgtccaggtgatctagcgccaagactggagatgctcatcctaaggcagaggtacctttgtaccactactaaacccatgtgaaggatatagagatttataactggaatcaataaaggggctcaa

SEQ ID NO: 56625 - DNA, 454 bp, Gossypium hirsutum
  Clone ID: uC-gsflnu33B051b01b1
tttatgcgtccgtgcacgcgtacacctgactgaagatgtatgctaggataagagatgaatctgtatgagctgatagtgctgtaccatgactgagatgagaataaactggttgtagtcgctgccgaaggagaatcgttaacaagctttcagagaagcagtggagagaaactgaggaaggaaaggcgaaggctcaggttgctaaagcacaaccagatgacgtgagtgacttctaccagtgaaaaagtagcaagggaatgagtcagctcgtataggaggatgaggtacaagatgatttagaaactgtgcaactggagagcatggcaaggatgctggtgatgcaaaaaagctaaatcgaattcttgaactgactggattgagtgacctagggtatgctgaagcaatatgagactggccattactatgatattggtcttgatgtcactgttattaatcg

SEQ ID NO: 56626 - DNA, 132 bp, Gossypium hirsutum
  unsure (1)..(132): unsure at all n locations
  Clone ID: uC-gsflnu33B055h09b1
tgcctacgcgtccggaaaaactgcagaagctggggagatctaatagctgatgtcctctacataccaggnggctctatgtcaagctattgatgagaggcatgcttaagggaaatagacaaacgtattgaaaaa

SEQ ID NO: 56627 - DNA, 374 bp, Gossypium hirsutum
  Clone ID: uC-gsflnu33B056b12b1
tctacaagagataatagcaccaaacgaaggaggaaattattggattagagaatggaaaatcaaaaaacagggggacccattggtgaagggcggtcttgcgtcagatgcccagctacatggaaattttaaattcgtgctctcaaaccaagaaaaagaggtcgaagattatcatgatcaattaggccaaagccatggccgtaccaagaaaaagcgcttcgagagcaacacggaggcagagcttggtttcttactagaaagggctttgcgctttcgactgctatggcaggattctttaaatcatggggtatgccactctctccagagttgttgcctcctgcctggactggtaaaagtcaagaacctcatttcctctt

SEQ ID NO: 56628 - DNA, 199 bp, Gossypium hirsutum
  Clone ID: uC-gsflnu33B058c11b1
tcgctacgcgtccgaccgaatcggagccgtagtgggattgatggaactatggaatgacaatgagaggtttgagaataacagttgatgccatatgtgtgtattttaggttactgtaaatagggataaaaccagaaatttattttaggagtatcaagattaaattatatatttttaaggggattaaaaaaaaaaaaaaata

SEQ ID NO: 56629 - DNA, 309 bp, Gossypium hirsutum
  Clone ID: uC-gsflnu33B059d06b1
atcaccgcagccctgagtagatcctctgttcattcacgcatggctttatgcatgatcgcttgtcccaaagtccgaaccgagtatgtgacgtgcgagaccatggctcctgcctgattgaggcacatggttactgatcatgctcaccgatggatcattgaagaccactgtgacggtgagacgatgtacgcgaatcactcttatcagaccaaagcagagtgcactgagcgttaccctatgggggtaccacatgtgaggtgcatatatccggatgctgtacaatcgcgcattgatcgccttgcacatataagg

SEQ ID NO: 56630 - DNA, 177 bp, Gossypium hirsutum
  Clone ID: uC-gsflnu33B059e02b1
tatgatccgagattcattttatctcatcaatacctgcaataagttattcagtttgtacttatttcggacttctttctcatttgcactgtgaacactttgtctagatgtgttgattttggattgtcagataactagcataaaagttatttaatatataagagagaaaaattttatctt

SEQ ID NO: 56631 - DNA, 337 bp, Gossypium hirsutum
  Clone ID: uC-gsflnu33B059g05b1
cttttactgatattgtcatagtatgccaatgctgctttcttcttctgctttttctgttttcgaatcttcacttcttgtgttttcatatgggattccaactcataatcaacaatgtggactgaacttgtaaacatatttctggaattttttttcttcctttttttaataccattaagctacttgtaaagtttcatttgtattattatgatgaatattgatttgggtacaatattgataaacttcaaatattaatagtattatctcataaattttttttcttttcaaaaaaaaaaaaagaataaaaacaaagaaaaatacataaaaaaaaaaacaaaaa

SEQ ID NO: 56632 - DNA, 367 bp, Gossypium hirsutum
  Clone ID: uC-gsflnu33B059h11b1
tcttcgcgttctggggaccgccatgactcttactactctatgtaaacagcagtggaagccggtgatgacggaatcacttccactgaaggtgaaaacaacgtcacatctacaccgcacgtagaccaccacgaatgtagcgaacgtgacagccgggaccattcagctatgagagggctagactgtgaacagcgagtgaatgcgacgcggacctttcatgaagaggctgaagagaaacttcctgggagcgaagaatcttcgagaggaaatgcctaagatcgctctggctatctgcgcccgatgttgtatagtccatgatgatacagtgactgatcagattgaaccgaacggtcagcccaatccattaact

SEQ ID NO: 56633 - DNA, 198 bp, Gossypium hirsutum
  Clone ID: uC-gsflnu33B064c02b1
tttaacgcagcacggcacgaggaagactcataaccaagcattactcgaggttttcgaagggtgtaatagacttcatgtaatctacttcgatcttgcgaatcgagacaaaaatggtgacttcagccatgtcccaaaaacgggtggtcctgttttgaggcaactatgccgaggcttttagggtatggcccctttccaggc

SEQ ID NO: 56634 - DNA, 356 bp, Gossypium hirsutum
  Clone ID: uC-gsflnu33B064g08b1
ttgattagatctggcggatgaactgagagtgtgcaaaattactgagcttgtgaagagcatagcagatcagttattaaggaacccatcagcgagataggaacagtcaaagccagaacattttagactatggagaatgaagcacaaacatgaggagcatatggactgggacagaaatcagatactggtggtaactacagtaggtgatcaatgaggatcttagatatgaggaacgttgaaaattctttcaccgaagggtcgttaaagatggcaaatgtccaggttgctgaatttcatcaggatggagggtgctacctgatctcacttgcagtcatttagacccatctcttcatgcaaat

SEQ ID NO: 56635 - DNA, 609 bp, Gossypium hirsutum
  Clone ID: uC-gsflnu33B071a03b1
ttcctactggctcttgttggaatcacagctaatcaaggtttctacttgttggggttagataacacatcaccaacctttgcatcagcaatccaaaactctgtcccagccatcacctttctcatggcagccatactaaggatagagaaagtgcggctagacaggaaagatgggatatccaaggttataggaacaatattatgtgtggctggagcatcagttataacactatacaaaggtccaaccatctacagcccagttccaccactgaatagacccacaccaacgtttgtttcgttgggggatgcaaatgggaagagctggacccttggttgtctctatctaatcggccattgcttatcctggtccggttggctggtgttgcaggcacccgtgttgaagaagtaccctgctagactctctgttacttcctatacatgtttctttggtcttattcagttcctcatcattgcgctagtttttgagagagactctcagcttggatgttccactcggcggtgaactattcactattctctaccgggagtggtggcatcagggattgcattgcagtacagatatgtgtatagacagagggggccctggtttcgt

SEQ ID NO: 56636 - DNA, 465 bp, Gossypium hirsutum
  Clone ID: uC-gsflnu33B071b10b1
tcgaattttcagggtattggagtttcaccatggatgcagtcgaggctagatgcctccatgcttggtttgcagactgacatgtaccaagctatggctgctgcagcattgcaagagatgagaactgtggatccttccagatctggaactgcttcccttcaattccagcaaccccaaaatggcccttgcaggcctgctgctctaatgcaaccccagatgttgcagcagactctgcctcaggccattcttcagggtgttgaagacaaccagcatcagtctcagccacatctacttcagcaacaattgcagcaccagaattcatttaataaccaacagcaacaccagcagcagcctttgtttaacaaccaacagcaacagcagccacagcattcaatgtcccagcagcaccagcaactgggttgatcatcagcagattcctagtccagtgtctgccatgtcacagtatgc

SEQ ID NO: 56637 - DNA, 518 bp, Gossypium hirsutum
  unsure (1)..(518): unsure at all n locations
  Clone ID: uC-gsflnu33B071d06b1
ttgaaattgaagttgccggagcaaagaaagcgcttcagagactagctggaaataggctaaaaagcattttcagcaggacttggagggaataaccagtaaagctactcacctccccgccaactaaggaggaggtttggaattttctaactgtcagaactgctgtggttgaaaacgcggcaaacacacttcgtatactccaaaactttacctcaaaagcaaaatattaattattattatatgttttaaacactatgttaatttaaatgatgataactgaaggcatggatgcggtttttagggagtatcctcgtttttttttattagtaatatttgattcactgatgaaagctgagctgtaagagggagggtatgatgatngttatgtttccttccctctttttttcttttcctaattataatgattgtactttgttctataatgtaaattattaaaggattgtttgtttgtttaaaacacatacccccaccctttttttataaaaaaaaaaagggcggcc

SEQ ID NO: 56638 - DNA, 611 bp, Gossypium hirsutum
  unsure (1)..(611): unsure at all n locations
  Clone ID: uC-gsflnu33B071d08b1
tcggttgacaatgtcctggtttgtaccaagcttaagagcatgcgaaggtgatgtgtgtgctgagccaaggaaggctcatgaagtggcctttttccttgccatatacttgatctccattggaacgggaggccataaaccttcattggagagctttggagctgaccagttcgacgatgatcacccacaggagagaaagaacaagatgtctttcttcaactggtggaactctggtctttgctctggactcttattgggcgtcactgtaattgtatacgttcaagaccatgtcaattggggcatttgcggatattattctcactgtagtaatggcttgtncgctgttaatcttcatcattggaaggccgtattatcgttacaggatgccatcgggaagccccttaactccaatgttacaggttttagtagctgccatttctaaaagaaaattgccccaccccttcaatcctgcagatttgtatgaagttcccaactcccaaaggctcaggggaggcttctgtgtacaccaagaacttaagttcctgncagagcagccattgttgaggagaggagaattatttgagaaacggatccatgagacttgcacagtgacc

SEQ ID NO: 56639 - DNA, 575 bp, Gossypium hirsutum
  unsure (1)..(575): unsure at all n locations
  Clone ID: uC-gsflnu33B071e10b1
ttggaaactatgaaataggtaaagtctaccttaaaggcagatgctgacagcagcagtgatgtaaatttgaaaattcactaaaaatagtaggaatggaattaaatagtgaataaattatttaatcgaaccttgatgaatctactttcatatggaagaaacgaaacgatcatatgagtcgtattttaagatatatttaagtttttgtggaatagggccagagcgatttctggatcccctgatctgactttggaaattcactataaattaaccagagataattagaagtcattctatatatgtatagattcctttttgagtctagtttcattagaaacaaacggcataagtattgaatccctgtacagggagatatataagtcgtaatgcatgaaggtcagagcagtcgaaccctgaaacaggggagaatttaactaataaactgtactaattggcctgattaaaaattctataaaaaaatttgtagatggatatatgagtctagtttcggngaaaatttacggaatcagtttttgagcttcggaactcgagatatgattttaaagtgactgtgatgc

SEQ ID NO: 56640 - DNA, 515 bp, Gossypium hirsutum
  Clone ID: uC-gsflnu33B071e12b1
ttgttcacgcgtccgaaaagctaaaggaatttcttgtgacagttggcttcgttggttcaaaattggatgcttcgttatttgtgtcatgtacaacctgattctacactctacgtacttgtgtatatagatgatattatcgtaactggggatgtgcctactatcattgatggaattgggaagttgttgattgtggaggtctcggtaaaagatatgggtgacctttattatttccttggggttgaatttactcagattcgtgctgcgtactgtatctatactatgtcaaagagaagctatgtctcgtgatcttcttgaacgaagttctatgactattgatgcacgagcttatacgccaatgagtagctcgtcaaatctgtctaagggtgatggcaatagtatgtcagatccatctgagattctgagtcttgctagagcattacagcatgttgttcttactaggttagaccctgaagatgcaaccggcatgacttgttagttctgcatagtctaccact

SEQ ID NO: 56641 - DNA, 677 bp, Gossypium hirsutum
  unsure (1)..(677): unsure at all n locations
  Clone ID: uC-gsflnu33B071f12b1
tcgcccacgcgtccgcccacgcgtccggaagccccctccgccgatgaacttttctccgacggtaaaatccttcccactgacatcaagaagagcaacccctctaaacaaattgaccactcttcttcaccaccaccgccgccattgccacctcagaaagcagcagaaagctcgaaagaagaagagaagcaaagttcaaagccaacttcattttggggtttcaaaaggagtagtagcttcagctgtgggagtggttatggcagaagcttatgtcctttaccacttttgtcaagaagcaattcaactggttctacaccaaatgctaaacacccttcgccaaataaccctaaacacatccattcacataaacatgctgctgctaattctattactaatccatctttcaagtcttccacaagttatcatcaaaagcctccactgaagaagactgcttataagccttattacggtaatggtgttcatcctgttctcaatgttccttctggtaatttgttcggtttaggttcgatcttcttcaatggcaacaaagctaaagacagctgcaagaggaaatgatatgatccataccatggattgatccttggtattacccattgagagaaaaatgcaatagagattgggtaagagacatcaangaaatggaatgtaatggggggggg

SEQ ID NO: 56642 - DNA, 491 bp, Gossypium hirsutum
  unsure (1)..(491): unsure at all n locations
  Clone ID: uC-gsflnu33B071h03b1
tatttccccgactttcctctctgcgtatcttcttcttttatgccttgtctgctgtttgaaggaggggtatggcttgggacggagagcaactgcagagagccaccaccttgagcacagccatacaatccaagtcacttctcttctgccctcctctatttgcagccccgcaaccaaagaattgaataaaaagtcatctttacgagttgtccacaagcatggtccatgctcccaactccatcgtcaagataaagcaaacatccccactgacgccgagatccttcgacaagatgaatcccgggtcaagtccattcacttgaaacttgccaggagctcaggctcgagcaatgtcgaccagattgatgcaaccaacctccctgcaaggatggtagcggttggggtcaggcattacgtagttactgtgggtctaggcaccccgaagaagatttaactctatattngatactggagtgacatcacatggcacaatgtca

SEQ ID NO: 56643 - DNA, 211 bp, Gossypium hirsutum
  Clone ID: uC-gsflnu33B072b06b1
gtttttcgtacgttttcactgtcttaagaagtggagggaagaaatgttagcctttgaagctatgaatcaccttaatgattatggtgttagtaaaggaaacaaccctttcggtcttaggcagcttgagctggaacggtgggagaacgcagacagagagcttgaactgggggctttttcttattgtttgccgcacctacaagtatatttattg

SEQ ID NO: 56644 - DNA, 248 bp, Gossypium hirsutum
  Clone ID: uC-gsflnu33B073a12b1
ttgtttcaattccacatattgagatggcaacaggttattatattgcccgttcaaccccaactctgacccaatgtataatcccaacccaattcaaaattaatttattgtatatttgacccgaatctaattcgacttgttctttatcttaatagaataatatttctatattcattatattatttttgtaatgatatttatcaatcttttttttagggttaacttattgttagaacacaatattaaatata

SEQ ID NO: 56645 - DNA, 223 bp, Gossypium hirsutum
  Clone ID: uC-gsflnu33B073f11b1
actttcacgcgtccggaaaataaaagaagggtaattctaggagaaaaaaccgtaactataatcaactaggaataatgagctatactagtgattaaaaaaggagggatgagataatgacaatgtagatcgcccacataaaatataatccattatggaggaagaaaaagaggcatataatggcagcaaacatactagagactagagaaagggcaagactaagagt

SEQ ID NO: 56646 - DNA, 187 bp, Gossypium hirsutum
  Clone ID: uC-gsflnu33B073h05b1
tttttcgcgtccgaccacgctgttcgagcaaaagtggagcaaatagttctccatcttgtgataagattacacgcttctctagcccaagctatcattcactacccaatcttcgagtttctattctgcagcaaacaccgaaagaaatttttgtatctgccaaaaatttagagaagaagtcaccatgcaa

SEQ ID NO: 56647 - DNA, 441 bp, Gossypium hirsutum
  Clone ID: uC-gsflnu33B074f05b1
tcgaacgcccacccgcacttaggagaagactgaatttgctccaggctgcatgagcggatctgactgcggctgacgagacagctggtactgcggctggaacggaagccttatatattcatagatgacaacctgccctcagaccatgatttccggaggtgcgcctgaggaaatcaccttatgcggaccacacatgagcagctctgaagttatgacatggatgcaagtggggatcaaactgttttagtgatccatgcaacttgtgagagagcttgctgaaagcactacaattatgagaaaaaatgaggcgggagaagtaacaggcctctgcaatgatatattgtcaaggatggatgcctgcaagggctataattatggctctgtctgtgcctagtgtaatacaagctttgtttgtggtgaaaataatgtataagccatttggtt

SEQ ID NO: 56648 - DNA, 129 bp, Gossypium hirsutum
  unsure (1)..(129): unsure at all n locations
  Clone ID: uC-gsflnu33B076c02b1
cctacatcattttcttttcactccaaaactgtgtgattgattagatatcattgcacgaggaacacagagttgagggggacggtcattaanggtgctaatgccttgatgtctaattagtgacgcgcatga

SEQ ID NO: 56649 - DNA, 406 bp, Gossypium hirsutum
  Clone ID: uC-gsflnu33B078b02b1
gttgttttgactaacatgtacaggagtgaaaatgagggttaaataatgagaggtgaaatttactgatagatgaatgacaaacacctagaggagcattcgctccggtttgaagaattcatcaagagcggaaatgaggaggaaactggcaaggaaacggtagcgagaggaaatgcaattgtgacgagtctaaaccggataataatgtaaggaagtatactatatgaggacaacacttccgatgggtgcaactataaggctgattactcaaacattcggtgtgatggctacacattcgacaccacggcgggacatactactggggggactgcttttgatgaccgtgatagatgtgcatggatggcatgaccatctggatgatggatatgatagcattctatagatgggc

SEQ ID NO: 56650 - DNA, 461 bp, Gossypium hirsutum
  Clone ID: uC-gsflnu33B078b06b1
gtttattgaattcatgaagggaaaggaggatacaatcgatgtgtttgtggggacagtgacagataatattaaggcttatgaggttactgctttgcaggccactgttcttaggcttactgagactgctagagctaggatcgagaaagctgtggtagaatgcttgactctagatcagcttgctatgagggctcctttgacgtcaaaacacgatactgctgacagtgacaaagaaattcggtgaggcacttaaacactaatgatactgctcccggtgtacctcacagccacaccaagccatatgtgcgctcgaagggacggaagaatgagagggcttgaggaagatggaacagcaggggattgagagcttaatattactttactacttgatatagagggctggctgttatgtaggttttctatgtgagatgttcactggcttatgcctgcctctcattcatgga

SEQ ID NO: 56651 - DNA, 286 bp, Gossypium hirsutum
  Clone ID: uC-gsflnu33B078b12b1
tttacacgggcggatacagtcggtgcgcaaggggccgatcatgcggatcatattgtgcctcctgaggctggaacagctataaaacttattcaaagacaggctcatttgattgactagcggtgggaaaacaaccaagagagcgtggaaacctgcacgttacacgacgtgatgtgcttggtgaacattccactgataacaggtatccgagttaagtattgggatgaagttttgctggacacaaacaaaaaaacggtctgacactctaaaggaacccagcttactgacg

SEQ ID NO: 56652 - DNA, 304 bp, Gossypium hirsutum
  unsure (1)..(304): unsure at all n locations
  Clone ID: uC-gsflnu33B078h02b1
nttggatatgttagcagagangacatcgngggagggagctaaaaattgcctttttgagggccaaacccatagaagcaccagcctttgtctaggacacaatattaaagagttcgacatgacctggatggagatatgtagcactcctgacgcagaaaaatgcgcagaaaaagattggactttttggaggtgcgtgcagaatactccaaattcggtagaagcagatagtgaaccagcgacagttgttggatcttcgaatgtgccggagacacttgacgggcctgcaaaatttcaaatggtgggacgc

SEQ ID NO: 56653 - DNA, 398 bp, Gossypium hirsutum
  Clone ID: uC-gsflnu33B079e07b1
tacatcactggctgcaacaaggatcacgcagggtctgtttcaacaaaggaaggcattgcccaccagactatttttggacatgaaggtggagccggtggcgctgtttacaggccattatgtggcgggggctcatgctccggcccctactactaccttagatgccaccgcattcgagccgacggcgtttgcttcccttgtcggtcttgcgtttggtctcctgtcttaaaacgggtgaaccgtggccgacctggataacatactcaagatgtaatgcttgagggctacacctgccaagaagctgattgatccacgggcgcatgtatgtgcttgggggaaagggatcactgctaggcctgctggggctgaggtcctcggtttgcaaaaacaatgtaaggttt

SEQ ID NO: 56654 - DNA, 272 bp, Gossypium hirsutum
  Clone ID: uC-gsflnu33B080a08b1
cgccccggaacacccgggacgacccacgccgttgttaacaacccaaaaagaaaaaaaaaaaagggggggaaacagaaagaaaaacagccgaaaacccaccaaaaaccgcaaggaacaaaacgaaggcaccacccagacgaggaagcgggaacacaaccgaacaggagaccccacacagggggcgccgccagaaggccccggccaccgggagccggcccccgaaggagcaccccaaccaaagggggggcggcagaacaccaacccggggcggg

SEQ ID NO: 56655 - DNA, 320 bp, Gossypium hirsutum
  Clone ID: uC-gsflnu33B080a09b1
tcgtactcttttgcggagggaacgagcggaagccggaaagtttcatcgggtcatcatttgctgcacccggggagcctgaaacactcattaactgtggggacgcgaaaagcaggtcccacaaaaccctacgagatcccgatatatccctaacttcctaattatcctgctgtgatgaatgcccaaggcaagtaagggaaaggcaaatagagcctggaataacagcgagagaggcatagagaatcgcactggccttgaagtcctcaaccaattgttgaaactcgaacactacgaaatcgcaaaaggacaaatagaaagccctt

SEQ ID NO: 56656 - DNA, 452 bp, Gossypium hirsutum
  Clone ID: uC-gsflnu33B080b02b1
actactctttcgcccacgcgtccgcccacgcgtgcgctacaattttcgaaattgtttcaatgaaccggaaaagggattttgtaacaaaaaaaaaaaaaaaaaaaaaaaaaaaaaaaaaaaaaaaaaaaaaaaaaaaaaaaaaaaaaaaaaaaaaaaaaaaaaaaaaaaaaagggggcgccccttttaaagaacccaagtttaacgacccggtgcatgcaacgaaaaagcttttcaaaagggccaccaaaattaaattaactgcccgcgttttaacaaacgtgaaatgggaaaaaccctggtgtaccccaaactaaaacgccttgaaaaaaatccccttttacccagttggggaaaaaaaaaaaaggcccaccaccatatcccctttccaaaaaatttcaccaacctaaatggaaaaggggaccccccttgtaacggcaaataaagcccgggg

SEQ ID NO: 56657 - DNA, 157 bp, Gossypium hirsutum
  Clone ID: uC-gsflnu33B080b03b1
ctatcagatagtgaagagagtcatggctagaattcagaattgcgcactcctcaaacaaaaccatgttcatgtcactctaactgattgaagaacgccgatcgaattcatacccgggctcttgacgctttacccaaaacacccaaattcaacacacaac

SEQ ID NO: 56658 - DNA, 219 bp, Gossypium hirsutum
  Clone ID: uC-gsflnu33B080b10b1
acccccgcggagccccccccccccaattggtgggtcgccccccccctttgttttttcttcggacgggcgcaaggacggcggggcttctacaccggctcctcggatctaccaggctggggcaagacccacgtcatcttactgcggcctcagatctgagaggaaagacactcttctcttcctcatacgtgactggggcgaccgcaacaggtcacaagaaac

SEQ ID NO: 56659 - DNA, 256 bp, Gossypium hirsutum
  Clone ID: uC-gsflnu33B080c01b1
gacccgccccccaaaggccggtaagacccacccaccccgtaattaaagacccacggacagaaaaacccaggggggggatggtggaaccaaacagccccgcccccccggggaaaaaaaccccaaaaacggcacagggaaagcagaagacgaccacgacaagaaccgggcagaaacccaacgcgacaaacgcgccggacagcccaaagaaaggcagagaggcaaaaacccaggccaaaaagaaagccaagacccaacc

SEQ ID NO: 56660 - DNA, 475 bp, Gossypium hirsutum
  Clone ID: uC-gsflnu33B080c02b1
ttcttaaagtctcccttatatgaccatactaggggctttcaaaaaaaaaaaaacccaaaaaaaccaacagaaaaaaaaaaaaaaaaaaaaaaaaaaaaaaaacggggcggccgcccgagaggagccggggcggcgcccccgggggggcccacgcccaagcccctccaaggcgccaccgaaggccactcagctggccgcgcgggaacaacagacggggcggggaaaaccccggcgctccccaacgaaaacgccgggcagaacaccccccgtccgccggggggcgcaaacgccaaggggccggacccggcccccccacccaaccaggtgcccaaccggaagggccaaggggacgcccccggaaagggaccaaaaagcccggcggggggggggcaacccgcgggggggaccggtacgaatggccggagccccacccccccacactgcccgcaccccccccagcccgcctggcgacgac

SEQ ID NO: 56661 - DNA, 297 bp, Gossypium hirsutum
  Clone ID: uC-gsflnu33B080c03b1
ccgcaggcccgtccccctattcccgggtcgtcctacccgccctactacgccttcgaaccagccgcccagcgctgggaggccatttatgaaccatttcgcctctaatccccgagagcaatggctaggcctttcttattacagtagtaacgcactctttttgagaccatccagagcaaacgatctaattcgacagactccgacttgtgcccttttcttcaatgattagaaattcttactctgttcaccccaaacaacaaaaaaaatcaaaaaacactccatacaccacaaagctaatta

SEQ ID NO: 56662 - DNA, 245 bp, Gossypium hirsutum
  Clone ID: uC-gsflnu33B080d02b1
gcgcaagagggagcaggggtctttagagactttctgcggtttcccggcggtacacgaaaaggtatccacgatacttcgagaggatgcgtttgggtccgatgaaagaaatggtcgcgctcccagtggagactaagcataagaataatagtcccatgccctaccatggctgggtcggaccttgcaaagcaggcttccgcgtcgtatgaaggctttggagtaggagatgtctacaactatgactttgt

SEQ ID NO: 56663 - DNA, 256 bp, Gossypium hirsutum
  Clone ID: uC-gsflnu33B080f10b1
ttgttttcttttctagacccagacccgccatcagagaggcttttatgagcctatcttctgttggccccccaaacattgttagagacagcctggacacaaccggttgtctatggaatgagcacaaaggacgatgatagacgcaagatgcagcaacatggcactcattgccaagggcaggggtctgccccgacgaatttatcccactggacctggccgcgtcatgccagctcctgacacctacccgcgcttgacgcat

SEQ ID NO: 56664 - DNA, 323 bp, Gossypium hirsutum
  Clone ID: uC-gsflnu33B080g04b1
atcatttcgttcgggcagagccagcctatcaggcagagttgcctgagaagatcggtttcgtcgcgaagaacgaggaggaactgcctggacaagacaggaaagctgaagaggccaggggcccagcgacagccccagcagccgaggcccatcacgtaggggagacgaaggaaaagaagggaattctggaggagaccagggcgaagctagctgggaaacacgccaaatcagatgaagaaaaagaaaaggcttgaggaacacggtcagatagaaatacaggggggatcgggggccacgccagtagagcaaaaaaaagcatggggatg

SEQ ID NO: 56665 - DNA, 387 bp, Gossypium hirsutum
  Clone ID: uC-gsflnu33B080g11b1
acccccccggaaaacccgggacgacccaccccgactaaacctccagagccgccgacccaccgggggaacaccgccagacaggccccagctcccccacgaaaaggagaaaaaaggcgaagaacatgacgcgagccgctcaagacaggaaatacaacggaggcgccgctgacctcaagcacgcagaagccccgggacccagcccaaaaaaggaggaagccccgagcaaagcagaggcagcaaggatcaacccaatcgacaggaaaagacaggagggggcagcgcgcccatcagtacctggcaaaaacccccacataccaggcaccgacgcagcaggagaaaccggacaaggaggacccaggcgcccagagacacaaagacggggaaaca

SEQ ID NO: 56666 - DNA, 266 bp, Gossypium hirsutum
  Clone ID: uC-gsflnu33B080h01b1
gtactcttgcggccggcggcacagggcaggggcggtttggttaggctaaacttgcgtgtcaaccccctaagaaggcaacatgccggacgttagcaggccaaaaacgtactccatgggacttgatttattgttgaataacgggacaggtccggtccccggatctttatcgtcggcgaaggtcgtccgacattgagatcccagccataaccacctttgcgtgacgagtccggtgggaacgccgtgcgatcacaattgaagcttcaatc

SEQ ID NO: 56667 - DNA, 287 bp, Gossypium hirsutum
  Clone ID: uC-gsflnu33B080h08b1
tcttacacgcgggcgcaccagcaggcaccagggggcaaactggaaaagtattggccagcgccccccccaagaggggcacaggcacaagagcgagggctgcaaggacgaccccgcagggaagcaccaccgaccgggcagggagacccgccggcccggaaacagagggccaacaagcaaccagagcccaggaaggcaccaaacaaacagcccacgaggccagaccaacgccagaacaaggccgggacaacaaccagaccaaccaccacaaaggcccggacccaaaacaa

SEQ ID NO: 56668 - DNA, 216 bp, Gossypium hirsutum
  Clone ID: uC-gsflnu33B080h11b1
actacactcttcggccgggcaaaacccagggggattctgcactgttcggcttattgcccaaaaccaccatggagacacaggcgcattctaaaaaacagcacaagccatccagggaggaggcgccgaatgggaaaccaaccccaacatggaatgacccggtttgtctcctacaaaaaagcccgctcttagaataaactaaaggggaacggagaacaa

SEQ ID NO: 56669 - DNA, 319 bp, Gossypium hirsutum
  Clone ID: uC-gsflnu33B081b01b1
ttgtataaaaaaaaacgcgtacagaaacaacgaacagggaaaaaattaaaaaaaagggaaagagaatatgcggaaactaaaataatttgcgtcattctaaagatgggcgtttgttttgggggacctaggtttacttccctgggcgtgggaggacatcgtttttttttgggggccccttgttttactccactggccgtggtttgaccccggtgggccttggaaattccttgggtgttcccaatttagtcttttgggggcggtttccttttggccgggtggggtaattgctgattggccccccccttttgccttttcaaaa

SEQ ID NO: 56670 - DNA, 430 bp, Gossypium hirsutum
  Clone ID: uC-gsflnu33B081d01b1
tgagcccctgccgtgccggaccggaatcgccgtcccggcccaagccacccgttttttttcacgtacgaagaaacagagcattagaaagagatgatgggagtgacgaaggaacacgtcgagtcttgatggacttaaaaattgaagccttctcatctggatagaatcgatacatctggagggtgcggtgcaagctttgctattgtgattgtatctgagcaattcgaagggtagagactcctggaaaggcaccgcattgcgaatgctgctctcgaggaggagatgaagcgaactcccgccctgtctaaaaaatacgcttatactatatatcccctgtaagatcatcaccagatttacctgcttaatcacatatcttgacgacacgctcaaatctacacattgtacatatgtatgacatgtcctgccagctcac

SEQ ID NO: 56671 - DNA, 336 bp, Gossypium hirsutum
  Clone ID: uC-gsflnu33B081d09b1
ttttcttatacgtgaagaggagccgaatcagaggcgtcactccagccacagttcacagagtatacctctgcgttcattttatccataacaagagttttccgcttcagataccgaatatgataagggttacgctgcagttgtacctgaaatttgctaacagcacgctgactgttcggatccggccatggcttgacaatgctaaataacttctggacctactatctctgagcatcgatctgactggatgggtaccgtgcgagaacaggtacttacagaacagccaccgttactgacagaagaacgaataatgtgaccgaccctataccacattcagtc

SEQ ID NO: 56672 - DNA, 311 bp, Gossypium hirsutum
  Clone ID: uC-gsflnu33B081f12b1
acaacacgtctgtgaacgcgggggttgaactcaagtttccatatattcaaacgagggttctaagcttcatttttttgctgtgttggcattcgatcaaattgcttttggtgtaggtgttagagctgagcaatgcttaagcgctgccaagattgtgcaggaaatagaaatcaagtacaggtatcgagtgtttatgtaagacatatcgaatggctatggaggtggagcatgttggtttttcatgggtagccaagttcttatactgagggctagcccatgcttttgatgtctagaggtttttaaccctacaggtt

SEQ ID NO: 56673 - DNA, 223 bp, Gossypium hirsutum
  Clone ID: uC-gsflnu33B081g11b1
aattcccgaggctcctcatggcattaacgacatttgcactgtccatgcaaactacgcagttaatccatctgctatcgtatcggctatcgacgctgctattgggagcctgtctcttggcgagagccgaggtcccctgacccggagggacttcgctcttgacgtgccgccatgactggcggttcgctgtagggtacagagccatgctttgggcgcacggccgccg

SEQ ID NO: 56674 - DNA, 383 bp, Gossypium hirsutum
  Clone ID: uC-gsflnu33B081h03b1
tctggtctactacataaggagtcgcccatgtggtgaatccatagcgaacaacagtgtgcatcgagctatgcaagatgacccaacgctggctgcagctcagtggtggatgcattaccacgattggactgggaaaacatgggagggatccatcttaatcgacttgaccaaggacaacatcagcacagatggactcacctggaaacggaaggtagcgagggtatcaagcaacagatgatgcaccggaacggctagaggatcacggcccgggcagtggcatcaagggtgatattggtggaaggtacgcccaagatgacatttactcttgacagggacctgaggatgatataccaaaaggaagaaaagatggtaggaggcccaagata

SEQ ID NO: 56675 - DNA, 325 bp, Gossypium hirsutum
  Clone ID: uC-gsflnu33B081h07b1
ttttaattttcgcctgactcacattttcgaagagggtccgttccaagaagaccccctgttggccgccagcccgaacggttccagggagctcccgcctccacaagggtgcctgtaaaattggccaaacacaccggaggggtgaaaaggcctcctcaatcccgctcgggcactggcgctgttacttgactatgttagcatgtctctaaccttgagagggttaaactagaaaagtgctttagaagggcttgaaattagttataaattgcgatatattattattattaaaaaaaaagacaagctgttataacttttcaggaaggtgctt

SEQ ID NO: 56676 - DNA, 322 bp, Gossypium hirsutum
  Clone ID: uC-gsflnu33B082b11b1
tcggttaacttactgtaactggatactttttggatgatgggtgagtgaggaattgggaacagcaccattagccattatgatgatgtgcgttacaaaggtgagatcatagagatcttactatttgaccctaaacctgtcgatctacacatgagcaggataaatagagctaataacaggacttgtgggaccgaatctacgtatgaaggaaaaatacggttatgacttgtggttcgacatgaaaggctaactaagatgctatatagctggttgttcgggaaatctatgtacaaagaggcgtgtgatgttaatacactcgaggtag

SEQ ID NO: 56677 - DNA, 270 bp, Gossypium hirsutum
  Clone ID: uC-gsflnu33B083a07b1
tttacgtgtgtgcgtacacgtgaggagatccatgcgggggatttgttaatacggtagggtgttttcagcatcctagttttgagtgtagtggctcgtgataaagataatatggctgaggagcataccaatgttggtgctgaggaagctgcgtatagcatggagcgatgtatgttaggtttcttggtgtaaaaagaacataacaagccttcaatcttaagaggaggtgtgtgacacccagtttgagaaagttaagtatgaaaaagttcatgt

SEQ ID NO: 56678 - DNA, 232 bp, Gossypium hirsutum
  Clone ID: uC-gsflnu33B083b06b1
tcgatttataaataaaaaaatgtaaaaaaaaaggaagggagaaataaaaaaaaggggtggcaagaaaagagaaaatggatttggtgtgcaatggcttttttagctactattggggggctggcttccttgtgttgatcgtgttgattactttacctttgctttggattttcatgctttggattgtaatctgggagcatttattgctctaagctcccagaggattttgactttc

SEQ ID NO: 56679 - DNA, 362 bp, Gossypium hirsutum
  unsure (1)..(362): unsure at all n locations
  Clone ID: uC-gsflnu33B083c10b1
ctgcattntcccacataccctaggccgggttttctgaataaaaagctgggtagagaaaaccccggctaacaagttccggctaaaacacaaggggattttgttgggataactatctgtcagattcatcgatggcaaccaacgtgtgtagagaatactaaaggaatgtatggacatgaggaaaaactcgctcaaggactcttggaaaggggcgcaatctgttggccgagtcaaagagcaactttggcaggtccctgagactctgtaagatgatatgtttggaaagatgcgagcaccaccaaaaagtgaaggaccggtcaacactccacatgacctttctgaggctgatgggataatttttgtat

SEQ ID NO: 56680 - DNA, 299 bp, Gossypium hirsutum
  Clone ID: uC-gsflnu33B083c12b1
tcgttctctcgtccggatatgctgcaattgcggggggatgaattaaaaaaatggggttttaataacggagcaaattgaacttatagcacttggcatttttagttgcagaactgctactggcacctttggcttaatctgtaaaataacactaccttgcattcagaccattcatgctctggaatggcaactggaagaaacctagcgctacctcaatgggacttcactatctaaccagaatcacattcaatacatactaaggatgtaaacgaccgccggaggacctgaaaaggctaagcgac

SEQ ID NO: 56681 - DNA, 434 bp, Gossypium hirsutum
  Clone ID: uC-gsflnu33B083d01b1
cttacttggattcatggaaattgggttcagtgcctgaagaagagctgtatcctgaatagagtcacacgccggctgatactggctttgcctcgtttgccgatcgcctagcaactaaaagttctgataaacactcacctttagattggagcggctcttttgatggagaggaagacggctgtataccacactgatatgatgctttttattcatatatggcaggaacagagggacctgttgatcattgactacatagggggcgggtactgtgggctgtcatgagctctgccggctcgtacaattactgtgaaagctagagtggttgccctggaccttacagggcatgggaaattattcacagaaaacgagctggagctatctattgagactatgtgcacagatgtctttgctgccctgaaggcgtcgtatggggacac

SEQ ID NO: 56682 - DNA, 278 bp, Gossypium hirsutum
  unsure (1)..(278): unsure at all n locations
  Clone ID: uC-gsflnu33B083e04b1
aaganccaaaaagggggagattttttttttatagggacagttcatacagaacctactgagactatggactacaattgtgtataacaatctttaggaccgatagccaatccagccataacttaaggggtggttgccgttaaagtttccatgacgaagataactcgggagcctgacacgggatctgcctcaacatccattattttgatgttggcacacagatggtctagccattcatgaggaacaccatgggttttaggactactaaagcgaattcccta

SEQ ID NO: 56683 - DNA, 355 bp, Gossypium hirsutum
  Clone ID: uC-gsflnu33B083f07b1
tcgccttcgcgtccgaaaaaaaaaaaaaaaaggagggagagaaattaaaaaaaaaggaggggaaaaaaaaaaaaaaaaaaaagaagaaaggggtgggcgtttttggggttccaaggtttcgttcccgtgcttgggacgtaataactcttttcttggggggccttatttcttttggctggccggttgttccccgcggggtgcctgggaaaacccttttggttccccaacttatttgcctttccgttgtttccctttttcccagttggggttttggcaaaccggtccgtccccatcgccttttccatcaggggcgccccctttttggcggttggttctcgccctttgggggcgcgtt

SEQ ID NO: 56684 - DNA, 360 bp, Gossypium hirsutum
  Clone ID: uC-gsflnu33B083g07b1
tcgcctacgcgtccgacgaataaaataaactaataggcaggaattgataccaagcgggggaatactggcctatttgagggactgggccggcgccttttgaggaatcaagacttacatactctgaacttgcgatctagtagcatatgatataacctggccctaaagttcattcactgaggagctgtgattcaagcagttgcctggtaaaaaccttatgttaccaagattaatggacttgtaaaaattgctcttttcgaacgagggcttaatggtgataaaagacaaaccggtactccttccaaaccgtagaacaaccttgatgggaaatggaacgcgctctgtaagagtatatttaaccct

SEQ ID NO: 56685 - DNA, 213 bp, Gossypium hirsutum
  unsure (1)..(213): unsure at all n locations
  Clone ID: uC-gsflnu33B084a02b1
gacaaagaaaccaanaaccacgaagacgggggctctaacacgtaataacagcaccaacaaagaagaccggccccccaagaaacacccaggaagctccactgacaccggcggaggaggcgggagaaaagaaaggcagaaacgcgaagaaaggagcgaaggggctgacacgagctcacacgaggccaacgaaaacaaaagggcgcaccagaaaca

SEQ ID NO: 56686 - DNA, 379 bp, Gossypium hirsutum
  Clone ID: uC-gsflnu33B084b01b1
tttttgcgtccgctcaagtacttggtcgatgagggcgagtgggagactttgacgtgtgatgctgaccttgaggagtgtagagatatatacaaatcatcttaatgccacacactcaaaaactccctacataaagctgctcatccgaatctaggaagttgatttggtatcagtgccccattataacataagttccctttaggatatatttgatggtcgtagcagtttgattaggatcatatgatcttaattccctatactatttgcaacaaataataatacattatgagctatataagacaccatgcaataaaagcaaatcgggtggaaggccatctcgatctataacccaagtttcaatatgtcctcaacgggcgtgcct

SEQ ID NO: 56687 - DNA, 356 bp, Gossypium hirsutum
  Clone ID: uC-gsflnu33B084d12b1
tcgaagccacgcttgcttacgatggctaccttggaactttcttttttttcaggggacgtgattacaatccattgagctgcgggatattacctctgatgcgggagataaaacgctggtactcacataacttagattggctacgaatatctgtttaacatggctggctgaataaatagttataaggctcggatcgagcttccttccaaacagttgaccatgactggatgatgggaggaaccctgtgttgacaaccaaattactcacgttgtgggtgatgtatacaggctgaccgatccctttactagcgacctagctaccgccggttccgttatgtttcctgcctttctagcaacagc

SEQ ID NO: 56688 - DNA, 342 bp, Gossypium hirsutum
  Clone ID: uC-gsflnu33B084e02b1
cggaacttggccgggtccgaccgcaggccttttgttgtgcggtgcaaaactgaaatccatcaccaggacatcctgagggcagctgctggtaaagctctcggatccttcaagcgcaactgtaccatggaatgaagcaatcattctccagccacaagttaggacagaagataggttaaaaacggggcggtggccatggacgattgaattaagatttatacatgaggttgagaggctatctcagcccactcaatcttgaaattatgatggaggatgtcatgcttttatgtatgccgcacttactgggaacgggcctcatcattatcccgtgctttttcttatcct

SEQ ID NO: 56689 - DNA, 165 bp, Gossypium hirsutum
  Clone ID: uC-gsflnu33B084f02b1
tctctcacgcgtccgcacaataataataaccaaggctctgtatcaaggaaaaaaaccatttcttgcagaccaacatgaggcctaaaggcagccaagccctctatcttaaggtccggcgttaaaggagttttcactgcttttcatcctcctattcgagtaagatca

SEQ ID NO: 56690 - DNA, 340 bp, Gossypium hirsutum
  Clone ID: uC-gsflnu33B084f03b1
tttatatacagctatctggcatgtccaaaaaggtggctacgttaacataaatgttccttacactattcactagactgagcttgatgattaatttgctatcttattgaagaacccttgtattaatataaaaagaaagtggataatgtatacctttttgacctgagatatacgatattagtacctagtacctaggactatcacaatctaagggttttggcgatcaaggaatctatctttagctaacgtggtggactgcaacagaaggaccacaaaagcaccgtgccaacatcatgggttaccaaaattttaaagtactggatggaagattaagacgtggaat

SEQ ID NO: 56691 - DNA, 470 bp, Gossypium hirsutum
  Clone ID: uC-gsflnu33B084f08b1
tctttacgcgtccgcacaaatataataaccaatactctgcatcaaggaaaaaaaccatttcttgcagaccaacatgaggcctaaaggcagtcaagccctcaattttaaggtcctccttttaggagttttctttgcttttctcctcctttttgtgttaagatcaagtatatcatcttcccaagatgatacatcgaatttacaaacatttgccgcagctaaaacctctaatggtgttaaagaaagcaaaagtggagcaaattgctcgccatcttgtgacaagattccacgctctctagcccaagctctcattcactacgcaacttcgagtatcactccgcagcaaacactgaaagaaatctctgtcactgccaaaattctagagaagaagtcaccatgcaatttcctagtatttggcctaggccatgacagccttatgtggagttccctaactacggtgggcgaacagtttt

SEQ ID NO: 56692 - DNA, 383 bp, Gossypium hirsutum
  Clone ID: uC-gsflnu33B084g06b1
ttctttcgtccgcaaaaaaccattttgccatctagtgagagagaacctgagacactggcgaaattcgcttttggttcgtgaagtgatcatgcccagcaaatgcaagttgtgcagtaactccgatgattcaatattgccaaaccttgtttacagcacacatgatgatgataggtacgattttttcttgtgttatctttttgtgtaccatgagtttggttcattctaaaaagtaggaacatgtgaactgtgggcacttatgttttgaagcaaggtgtggcaaccttttgaattatacaccaatgatgtcaacgtttcgataattggctccaggattaggtatattgaacatccctggtttattatatatatatatattctcgact

SEQ ID NO: 56693 - DNA, 268 bp, Gossypium hirsutum
  Clone ID: uC-gsflnu33B084h08b1
ccggtcttcccaccctttgtactgagcatacatctccccaaataagggggggcttttttgatgttgcggtgatttataccaccactccaatcatcgttggaaattgcacacgtttgctgtcaataggatgttcttcccacatactcatgcaggcctttcccttggtgaacggggaacacatgttcatcgcgctgaccgagctaatactaatgttggaatgcctatgggcccggtttggcttgctgaccttggtggctttggtgctgca

SEQ ID NO: 56694 - DNA, 212 bp, Gossypium hirsutum
  Clone ID: uC-gsflnu33B085a07b1
gacttcactaactcttgatagcgtcacttaaagtacatctcactggccgaggcatcactactgaatgactgggaaaaccttcgacctaacgaactgaatcgatttgcagcacattcgtctttggtcagtttggccgatataacgaatagtcctctacgcgatctgctctcacgatcatgataggcagccggatatggcaaatgggacagcgg

SEQ ID NO: 56695 - DNA, 460 bp, Gossypium hirsutum
  Clone ID: uC-gsflnu33B085b03b1
tgggaaaggtgtttcgcctgcgggtgccccgccgcagtttccgggtcgacccacacgcgcgccctcacgtccggactgtgagctcagagacctcagtctcggtcccggtgcgtggcctctcttggcatgccgaagaatctgatggtcacaatgcgaagctgatcgccacctgcacctggttactaaacacacggcgggactccgttccgtatcgcatcctaccaccaggtattagtgctatagccacttacggctagatctcccacgatgtcgataccacctctgaagctgcatgccgaacgctcaataccatgctgactgaagcaccaatatatccccttcgagaacattcgctttccttctaagacaacatgggggtgggcgaagctgcttccaatggatcttccgttaacgacacatccaggcttgcgctatttgatggcccagccatgtctgaata

SEQ ID NO: 56696 - DNA, 398 bp, Gossypium hirsutum
  Clone ID: uC-gsflnu33B085e05b1
tcgtacacatttttctcacttatttattctggggggtatttttatgtaatgtctgggctcatgttcaggaagtggacgatgatgtggtggcagacgtatgttgatgatcacctgatgtattctactctttgcttcccatttgtctgccgttgctttcattggtcaagactgcagtgtttgggctcagagctccagtttccctttatttttgctagaagatttcgattggcatcatgaatgactttactgaaccctgatcaattgccccaaccggattgtatccaggtgtctgtttttcatgttgattcatgtgtttaccaggatctttttttgagggtagaagggacctgcaggtgttcctgtttaatagaccaatcacgccttgattcatcggcatt

SEQ ID NO: 56697 - DNA, 298 bp, Gossypium hirsutum
  unsure (1)..(298): unsure at all n locations
  Clone ID: uC-gsflnu33B088g06b1
natcatccaaaaacgctcacactctttccctgtttttcttttcttttctgtaaaatcgatttagttttgcttttgccaaaatctggaatatttgcttttgttctcctaattctgattcgttttgacagtatctatacccagtatattcctttaagtgcaatagccatcagctcttgagtcgatctcccacccatgtagctgatatccacgaaaacaagatgttagctttgtcgaatatccctgaccttattgccagccattccagcattcgatttagtcgctacaagatccttatttc

SEQ ID NO: 56698 - DNA, 146 bp, Gossypium hirsutum
  Clone ID: uC-gsflnu33B092a02b1
gtttgtttctcagttaaaacattgctgtctgctcttaaacatgtttgttgagaaaacaccagacaaacttgatgttgttttaatgtttcctgatatgaaaagcaaatatttttagtttcaaaaaaaaaaaaacctaaaaaaaataa

SEQ ID NO: 56699 - DNA, 336 bp, Gossypium hirsutum
  Clone ID: uC-gsflnu33B093h01b1
ccttctcgtccgaaaaaaaaaaaataaaaataaaaaagaaaataataaaaaactattaagcattaaaaaataaaaaaacaaatataccaaacatactttttgtaaattgagcaaggggtgttcgttttatagacacaaacatttcatacacctggcttcaagttgcatgttcttgtttttgcagcacctgttctacctgattgagagtggtttgttgactgagccattgggagatgctggtacggtcccatattcatatcctaacaatggaatgctttttcgtcaattcacgataaagctattgggtacatcattccccaacatgactgctgttga

SEQ ID NO: 56700 - DNA, 249 bp, Gossypium hirsutum
  Clone ID: uC-gsflnu33B099h07b1
tcgtgacattatagctcggctgtcttcctttacaccattgattttttttggacaccctgcacatcccaaggagccagggaaaaaaggcatgcttgcttcacaaggcaattcatttttactcacaaatgattaatgtaagaaggatgttatgtcccatatcccaaaaatcatataagcttcaaaacccccatcacttgaatcttgtaaggctttcatggatctggacttgcagaacttagtctcatgtat

SEQ ID NO: 56701 - DNA, 410 bp, Gossypium hirsutum
  Clone ID: uC-gsflnu33B100b12b1
gcacggaccgggactggacttgccggaccgacccacgccgttggtttgattcagctgctgataaacggacaaggtggctttacgatgggaatattatggtcactacgacctacaatatggagactaagggcatagtctgacggccaatacagagtgatatctatgtgccagggggctacatggagagctcgctgaaaatgaggaattggcagccaaggatgtaagcagggctgttgatgacggaaaagctcctaatagttgcgaactcattaagtcgagaactattagatcttgcattgtgcacacgaaaagacagacgaatgaattaactatatgccaagaatcaaatacggaaggagcaataaaaaatcaatacatattctagaccgccaataatgagctttagtgca

SEQ ID NO: 56702 - DNA, 440 bp, Gossypium hirsutum
  Clone ID: uC-gsflnu33B100d04b1
atatttttatagaacaaaaaagaaaaaaaagagcgaaattaaacaacgatatacgcaatgtactggcttgaggacgattatacatagttcgtactcatagagtggtacataaagaacgcagggtggtacgtggctgccaatctgatgagttgtaggttgcgataggcgaatggcctctaacgagtttgtatatacgggtccagccaaatcattttatgagcttgtcgataagaacacctgggacgagcaaccactgtggatatgaggatagagcatctgaagccaacatggtttatttgacggtggcatcttccaaagggaatgcgccaatgtacagcctgcatagagtgaagacttccctttgactgatggggccgctttgacttgcgattttccagcattcgcaagatgcgacaactctccaggctaaatttattgtc

SEQ ID NO: 56703 - DNA, 436 bp, Gossypium hirsutum
  Clone ID: uC-gsflnu33B100e05b1
cggcacgcgccgcggcggacttgctgggccgacccacgcctttgttcatctctattctggaagtagaacactgcgggtatattttaagtgacgactgcggcgaacgcagagcatacaaaaccggagtcgtgccaagtggctacaagcacgggtctcgaccggagggctatagagcccatcaccatctgcctgatcgaggccgggggctgaatcgactaccacctttgccagaaaacgatgacttagacgcacgacaaggagctcgccttggacgccaacaacgacacggctaagaccattctgaccccggactttgtgactggggctgtgcttgtgaatgagcacctgcttaacatcacacgcgagaataggctcgaaggcctactcaaggaggaacttcaccagatctatcctggagccatgtcaactacagcag

SEQ ID NO: 56704 - DNA, 472 bp, Gossypium hirsutum
  Clone ID: uC-gsflnu33B100e07b1
ccgggacggaccggctggacccacccacgcgtttattctactcgccgacgcgtgggcggacacgtgggcggtctcttggttgggagcaaagcctaaatggccgccactgtgacaggagcatgcacgaccacctaatacagacactaagccactgtgaaaacactctagacggggtatatctatcctgaggtaccaaagacctgcacgagcttgggggcccacaaattcacagggtcgctggtgttattggccatggctgcatggagcaaaccatctgatctccatggggcatcgaggggagctacctggaggcccgagaagtcatgcactgcgaataagcttgcgacgatactatacaccgccggggcattagctctggaaccgaaatgctactagaaacttacattccactgtgtgagtttgttgtcgatctgaatgcgttaccactacttacgagttccctagctgattg

SEQ ID NO: 56705 - DNA, 268 bp, Gossypium hirsutum
  Clone ID: uC-gsflnu33B100g03b1
atcgttctgtgttaaatcttcgtaaaaaaaaaagggggagatatatgctaaatataagcctaaaaagccacgaccgtggacgggggtccggtttggcggttccgtgctctgcggcgcgctgcttgtggtttgccggtgcttctttcgagtttcctggcctcgacttcttggcctttgtgttgcctcgccgtgtctggggccttgcctggctgcgccttgcttactcggcttttggccggttggcctttcgaccggtggggttctggcg

SEQ ID NO: 56706 - DNA, 332 bp, Gossypium hirsutum
  Clone ID: uC-gsflnu33B100g12b1
ctatatgtgatagctggtgcgcctgctggcaccgccgcggcagtaactggcgggaccgcacgacgccttttgtgaaatataccatctacccttgagtatgggggagatcaacaggaaaaggtttttgttgtctttctgaacaacaaatgtggaggggactactgagggagtggattcatactgcctgcaacaacaagatgaaccgtgtccaagtatgctatacccagaaaccccttttcttttacgataacctggccaagaggtatatgcagcaatacaacgaggtggaacgctctgctcttggaatggttattgctactgatgttaccatt

SEQ ID NO: 56707 - DNA, 392 bp, Gossypium hirsutum
  Clone ID: uC-gsflnu33B101a08b1
ccctcgcgtccgcccacgcgtacgtggacgcgaggactgatacgtagaactttcacgttcttcggaccaaaacaacacttagcgctctagccaaatctacaacttatggaactagtgcccctggaattgtcgcatgtgacatcatcctcatttcatttaatttattatactatgggaactaccctatatcaactagaaggaccattgacacataaacttgtgaaccttattactctatcatgttgaactgtatatcgtttgaaggaccagagctaggtaaactcttatcaaatattgtgccgcactagagtgcggaaattgccacagatcctacgacctctccttgatactgcaacatccataatgatatctcccacttgagtgtatacgcg

SEQ ID NO: 56708 - DNA, 283 bp, Gossypium hirsutum
  unsure (1)..(283): unsure at all n locations
  Clone ID: uC-gsflnu33B101a11b1
tttattccaaacaccatataaataagctcaggaaggggcaacttaagagcattctccaactcaggccaaacgaaaagggggggcccagaacgggggggccaacaacgaccagaccaggaaatcacccaaccgggctagaagacacgccaaacaggcccgggaagaggccagaggggggcaaaacgctggtgaagagcagacaaacaatgacacccctgggggaacgcaacgaggtggcgaaaaacacacaagggccgcatcaaaaatccaanacaacacaacc

SEQ ID NO: 56709 - DNA, 322 bp, Gossypium hirsutum
  Clone ID: uC-gsflnu33B101c01b1
tctacttttgcgtggacgcgtgggcggacgcggggggatttaaagaagattttctgtaatatttttgaaaattgaggttcgagctatgaaatgaatactgagaataacagataaagggctggatctgaaaatataactcatactgtaaatggtgaggaagattaagactggtaagatagtggtgatcattggcatgatgggtaaggatggatcttatttgagcattatggatattaaaaaaggctatgaagttgatggcatgatgcgtcttttaaaaagttgaatatgcatagtataaaccacatagttaaagattcacata

SEQ ID NO: 56710 - DNA, 382 bp, Gossypium hirsutum
  Clone ID: uC-gsflnu33B101c09b1
cccacgcgtccgaggggagaaagagaaagatgctgatgatacgttatcaggggggaactagaatgaaaaatttgcataaatgcattgctgttctgcttgaggatgtgctgtaagtatagagatcgtagttgatgctcaaagaaaatgctgggttttgatggaagatcacaggtacaggaaggaaactgatgcgaactcatctctcaaaaggtattggcctagtgggactgtcatatgtaagaacaatgggattgtagatgatgcatgaataggcaaagggtcacatgaagcatctatggagaatagctggttgaggagggaattctgagggcactgatggcgtataacgagctgaacggagcttgatcgaggctatacacaa

SEQ ID NO: 56711 - DNA, 385 bp, Gossypium hirsutum
  Clone ID: uC-gsflnu33B101c10b1
acttgtaacacccttatggccaatggaatggggcaccgttccgctagagaaccatacacatatccggattaccctccgtgacggaatcaagacctctctatgccgcggtgagcacgttaccgaaccctgcacggatcaacttacatatttgctggcagggatcaaggagacactcaggctccgtatgggcatgcctgtactagtgccacacatgaacctacatgatgcagagctaggagtgtatgacatccctgcagagagtaagatgcttgagcatgcatggtgcatagccaccagcccatgtgactggacgaacccagacctgtaccgggcctaaagggaacacgcggaggcatcgcaggcacaagctaatgggattgactct

SEQ ID NO: 56712 - DNA, 385 bp, Gossypium hirsutum
  Clone ID: uC-gsflnu33B101d09b1
ttttctacgcgtgcgcacgtccatcttctttacgaagtgatcgaggcgactcttgctatagatcaagtgctgagacgttctggtgactttgcgaatcatatgactattgcctaatgtactggtgctgtgagtatgaaaatgctgattgttgtaccgaaactgaatactgatggcctagaggatgcccccagttgggatggccaaggatgactctgcctgaagaacgcttgagactatctgggagtagcagctaggaatgcaacggagggtaaacacatagtaccatggactagaactgaggtgacagatataacatataactctgtgcagggagaaagaacccgtttgctgctatgcgttgaaaagagtgagaaatgacatgtca

SEQ ID NO: 56713 - DNA, 301 bp, Gossypium hirsutum
  Clone ID: uC-gsflnu33B101d10b1
tcactataggtgaaggctggctcgcccgcagggacgcgtcccggaccgcccgtgccgacccacgcgaccggtttgtctcacctctcctattactatattaatagggggggtttaggaaaagtgagcaaaaatcccacagaacttaccttatcatgacagaaaccgatagaagagcccaacgatctgcaccacgtccatggttatagcaaagagtggattctcgaacggcctaatacccctacgaagattgtccaaaggaagcttggtccccaggggattcaccacattcattaggcggggg

SEQ ID NO: 56714 - DNA, 381 bp, Gossypium hirsutum
  Clone ID: uC-gsflnu33B101g09b1
cccacgcgtccgctagatcgcgagcgccgcccttattttaaaaattatttttactgcttttaccaccacttagactagtgccagaacaagagcgcaccttacaggcaccagtggaactagatggacacacacatgcgcgcactttgactagagacttaacgcattgacctactgaaccataccttccaaaagtcatacaagcttggagcacagcgatggagacaggactcccacaagcccattcacgacagttaacacttatcatgatatatcagccaaaatccaagccacatgcaagatggacagacagaaacacaggcatgaaaataggatcgagaatcacctttacaataattttgtactagatgatgatgaaatcaa

SEQ ID NO: 56715 - DNA, 305 bp, Gossypium hirsutum
  Clone ID: uC-gsflnu33B108b06b1
ttttcacgtaagcagactgagcatcattctgatggcctacataacacttgtagcgagcgaacccatggagatgagggaggaccaaggagtcggttggaccctaaaccaatggaaagataagaccaggatctggcagttctggtctgacttgatgatgccttagcttctatgattgcataaagctgatgactatgatatcaattactttacagaatactgcatgacagttaacatttcctacaattagccaactagaacctttgtatggaactttcaacgagacttgcaagaaattgaataaaata

SEQ ID NO: 56716 - DNA, 290 bp, Gossypium hirsutum
  Clone ID: uC-gsflnu33B108h02b1
tttatgcttccgaggcatcctggacataaggggagctgttatgtgctcataagcgactgacagacaacatgaaatggttctttagctcgctgacattatatccaaaagggccagaagagctggcacggctatgaggaagcaaccgaaagctattgaagaaatttgattctggtattactaaaatgaggtctgctatgcagagagccatggcctccttctctgagtacccaccaatgagatggttatcaatgcagatcaaccgacagcgcaagggtgaacttgatcgaaac

SEQ ID NO: 56717 - DNA, 388 bp, Gossypium hirsutum
  Clone ID: uC-gsflnu33B109c02b1
ttatttttgtaatgtcaagttaatttcctagcggttttatgggttacctatatcatcctgtaaaaatgatatttgctgggaaaaatatattccattcctttttaaaaaaaaaaaaaaaaaaaaaaaaaaaaaaaaaaaaaaaaaaaaaaaaaaaaaaaaaaaaaaaaaaaaaaaaaaaaaaaaaaaaaaaaaaaaaaaaaaaaaaaaaaaaataaaaggggggggcctttttaaaggtccaaagtttacgaccccgggcatgaaacgtaaaagtttttttaaggggcacccaaaataaaattcagggcccgcggttaaaaaacgggggaacgggaaaaaccctgggtaacccaaattaaaaccctttgaaccaaattccctttttccc

SEQ ID NO: 56718 - DNA, 371 bp, Gossypium hirsutum
  Clone ID: uC-gsflnu33B112e01b1
gtgaattcctatcctcctatcccaatttacgcccaaggaatactctgaatgatgacttggtcagtttctgtcattgaacaacggaaacgattcaggacagccgacgccaagggcgaggattaaagcgacacttaaccgagctggggacaggtactaagggggcgctctatctgcatggctctccaggagcttggtatgcattggaggcaccagatgaaagctgcggctaaagcccgattgccagccatcgcgttacattccagcggctgcagactctactaccgcccaccggagcccggaaccgcagacaaaaaggaccttgtacacgaagtacgcgcccttctagagttgtagggaatcaataagggcat

SEQ ID NO: 56719 - DNA, 410 bp, Gossypium hirsutum
  Clone ID: uC-gsflnu33B113e04b1
tccacgcgtccgagttgacacacatactattaccggtatgctctgtgtgcaggtaaaaaaagcaaatcatggatgctaccacagctctagtcgcctctaggcaggtatctcctagagaagccgctatccacatgatgttgtctgctgcggatcattttgtcaccatgaactgggattgccatatggatcgttacgttgtcaagcgtgtcaatgacggtatttacatcaacaaccttggcacgacctgagagaagcttcaactagcatctcgcgttaacgacgctatcgagaaccgtcaagagatcagagttcaatctgcaagaccctatggacagagggcgtgtcttgtaatctgctcatgacacttgatggcatgccattgctggaaagcacactggctggtcattctg

SEQ ID NO: 56720 - DNA, 442 bp, Gossypium hirsutum
  Clone ID: uC-gsflnu33B115a09b1
tgtggacgcgtgggaaaaaaaaaaaaaaaaaaaaaaaaaaaaaaaaaaaaaaaaaaaaaaaaaaaaaaaaaaaaaaaaaaaaaaaaaaaaaaaaaaaaaaaaaaaaaaaaaaaaaaaaaaaaaaaaaaaaaaaaaaaaaaaaaaaaaaaaaaaaaaaaaagggggggggctttttaggggaccaatttttttttccgggtgttgggaagttaaaattttttttttgtgggaccaaaattaaatttaaggggcggctttttaaaaccttttgatttgaaaaaacctggggttaccaaaattaaatgtgtttaaaaaaattccctttttccaaagttggtttaaaacaaaaagggccccaccattacccctttccaaaaattggcgccccttaattgttaaagggaccccccctttaatgggcaaataaaagggggggtttggg

SEQ ID NO: 56721 - DNA, 445 bp, Gossypium hirsutum
  Clone ID: uC-gsflnu33B129g04b1
ttcttgcgtgcggtaccatgcctccctgcagggcgaaagcaacagtgaagccctggtcccccggcagatacctggcgctttcggacgacctgtggctcaactacatggtgacgacatgacggtgacacgagcctgacagccgacgactgatcatgaaagcgcaacttgccactgggactttttgatgccgaccagcactccgacggcatgctccaccaccggacgctagatcgagctgggaatggccggcgagacctgtacagacttcgtggggtggagaacggccttgtgcttgtccggcaacttgagaaaggaattcgccgcacgcttgaagaccttgttctaggccgatagccccacccacttctccagctttcccgcgtcggcgccttccttcttggaaatcgaggaaggagtaatcaagccccacgcccttccaggcaga

SEQ ID NO: 56722 - DNA, 478 bp, Gossypium hirsutum
  Clone ID: uC-gsflnu33B130a07b1
tattcctataaataacacaagaaatcatggcaaaaacagaatatcaaagacaaaaaaaaaaaccattgcagagtactgagaaaggtatgatattaaaagggatattgtgataataaaagaatatacaacctggagttgtcgaagaactgagttttgaaactcaggcacgctggtgagaggaccccttgatgtatcgttcgctgaaggagaccggaatattgcaagtattctctgggttggataccctggggaagctggtggaaaggcacttgcggaggtcatctttggtgattttaatccaggtggaagacttccaatgacttggtatcctgaatcatttacaaagattgcaatgaatgatatgaacatgcgtgccaacccttttcgtggttatcctgggagaacttaccgtttttacaccggaaatagagtgtatggctttggccaaggcttaagctataccaaattcacctacaaa

SEQ ID NO: 56723 - DNA, 165 bp, Gossypium hirsutum
  Clone ID: uC-gsflnu33B131d06b1
ttcctttcgtccgcgaaaacgaacgcacaggggggggcaactttgcgttcgggcgcatgcgacaactcacaaacggaaatggcaggggctaatggcaccacataaacatactcttaccactcccaaacttggaaatatcgggggggacaggacttactgtcaagc

SEQ ID NO: 56724 - DNA, 122 bp, Gossypium hirsutum
  Clone ID: uC-gsflnu33B132f03b1
ttcttatcggatgacaggctaagggatgataaacttaaagggctatggggtcaatacggtgccatcacctattacaatgttatgccatttccaagcgggggaagtagaggaccatgtcctgt

SEQ ID NO: 56725 - DNA, 127 bp, Gossypium hirsutum
  Clone ID: uC-gsflnu33B133c06b1
cccactcgtacggaaaagcacgccaacctaagatagcggggactttaacgagtaacctgctgttttaagaccaggaccggaggtaccaggaccagagaaccacgacaaggacgggatgccccaaaaa

SEQ ID NO: 56726 - DNA, 270 bp, Gossypium hirsutum
  Clone ID: uC-gsflnu33B133f11b1
ttctcgcgtacgaaaatacttgctaaaaaatgggggctgtttttgacaaatatgatggtttaataacaaaaaaagacagcagttttcgggagatgacattacccgtgtctttctcgccgcccacaagatgagctggggcgacaacatttaacctctactgagtagtatgatcttgtgcggtcaaatgatcaattgtgggggagacaattctggtccatagtgcactagcgtggggtcacggaataggatatgttaccacttagctgcttt

SEQ ID NO: 56727 - DNA, 117 bp, Gossypium hirsutum
  Clone ID: uC-gsflnu33B134d07b1
ttctatgcgtccgtgcacgcatgcgttattatgggcggaattgaaaggtaagattgcaaatgataaggcaagttaaatatgtagggcgaggaagtagatatgtgactaacatgtgtt

SEQ ID NO: 56728 - DNA, 102 bp, Gossypium hirsutum
  Clone ID: uC-gsflnu33B135h03b1
cttttgttttcggccacgcgtcctgtttatttggggtcgcctaaagctgggccggttgatggtccaagcggctgcacgataaggtggctctggagtctgatg

SEQ ID NO: 56729 - DNA, 209 bp, Gossypium hirsutum
  Clone ID: uC-gsflnu33B139d05b1
gctatttttccggtgaacctgaggttggtgggggaggggtttttttaaccgggggattgagcccaagggtacgatatcgccgacaagcaggacctatacagagctgggtggatatggaccataatcttgcattgtacccacagtagaggaagagtgaacttctccagagcggatgcgagaatgaaccagacgagggggatgtcatctcc

SEQ ID NO: 56730 - DNA, 136 bp, Gossypium hirsutum
  Clone ID: uC-gsflnu33B139e11b1
tggttacgcgtacggaaaacaaagggaaaggggggggtttaaataactaagtggttgattcaacccaaagggggaaaatcggaagcagtaatgacgtaaacagagctggctggacttggagaatattggaagaata

SEQ ID NO: 56731 - DNA, 247 bp, Gossypium hirsutum
  Clone ID: uC-gsflnu33B139f08b1
tcggctatgcgtccggagaaccgaaggttgggggggggttttttgatataagtggggtgttcagtccaaaaggggcatatcggcaacaagtagtgacatataaagagcgggctggggatggacaatatggttgaattattcgcatagcaaaggaggaataaacttcacgggtgaaatctggaaaggaaaaatacgcgagtgctataatttctacgatgaacataaagttgcacaagggtaaggggct

SEQ ID NO: 56732 - DNA, 378 bp, Gossypium hirsutum
  Clone ID: uC-gsflnu33B141d02b1
gtgattaggaggagaatagagggaagcaccgggatctttttgctactagttctgtctaattctacgggacacccgatgagtgattacatgcggagaatcctttggttaatgtacaagttttcggtattgtctatgaatcacgagcacgtgcaaaattatatgacaacttgccgagctggagaacattgccaaaactgaaacaagggctttattgagacaaaattaaagttcactagaaggtgggcagcacaaaaggtacggagctagtgaacgtgtacatgaatcatcaatctttttgtttgataccaactctacacttactactggcgtacccttgctgagggcataaatgaaaaacactatggccttcccacctta

SEQ ID NO: 56733 - DNA, 354 bp, Gossypium hirsutum
  Clone ID: uC-gsflnu33B143f01b1
tttaataacacattttctggtccatctaagaaagcttagtgttatcactatggactgcaaattccagggcatgctgtgacatgacgacacggaggtcaggccgctggtcggatagggaaggaactatgaacagagagcactgctcacactgaggagaacttccggaccctctgtactggctagaaaggtgtaaggcgtatgagtatgcctctctactacaagagctattcttgccatggtgggagcgataactatatgtgccaaggaggtgacttaaccgacggtaacaggacccgaagggaatccactgaccgatcatagtgagttgacgagaacttcattatgaagcacact

SEQ ID NO: 56734 - DNA, 404 bp, Gossypium hirsutum
  Clone ID: uC-gsflnu33B145h04b1
ctcacgcttccggcgagctgtgctgaggtttatgtgatgcagaatcggcagaaggagaagatgaagagaatggaagaggagaaagcaagcagaggcattgaagagtcgacaaagcctcaacctcatacggttgttgttgggaggagtaaggttcagcctggccaggctgcgcccgactctgctagtgttagcgtcagtgaaaaacagggatcgggagatgtcaatgcaccttaatttacagcttctattgattatgtccatcactttatgtatattctagagattatgatcggtctgctaaatcggtgagaatcttttatatataaatagacaagtctcgtaaaaagaattatatatatatgttgattcttcctgtcggcaaaagaaagaaaaaaacaaacaaa

SEQ ID NO: 56735 - DNA, 144 bp, Gossypium hirsutum
  Clone ID: uC-gsronu33B157g04b1
tatagggaaagacggtgacgcccgtgggggcaccggcgcaaaattcccggcgagacacacgcgcgcggatactcacaaagactgacgacaaggcatactgaagaccgaatggtcctcaatgaagagagtaataattaatcagca

SEQ ID NO: 56736 - DNA, 455 bp, Gossypium hirsutum
  Clone ID: uC-gsronu33B164a10b2
ttattataaaaacaaaaaaaaaaaaaaaaaaaaagaaaaaattaaaaaaaaaatttgcgcgtcaaaaaaccccccacatcaaatattccctgcttacttccccctccaacccatgacctagctcttctatacttcaccctatcttccatcccctgtccttatatttacaacgtcttgccttgaaaacccccgcccatacccccctttctctctaaacacaaaaccccccctcccccctccaagaccgttcaacaaaacttcctttctccctccccttactacatttcattcctccacgatgcctcctcgtatcccccctcttcttatccttatactcttgagagttttttgtttcctcccactcttcccttaaatttacacctcccctctctccttctcctttctttatcttctctctcattccctctaatatcacttcttccccttcttccccc

SEQ ID NO: 56737 - DNA, 479 bp, Gossypium hirsutum
  Clone ID: uC-gsronu33B167c06b1
atttttattatcaaacaacaaaaaaaaaaaaaaaaacgacctataatttaaaaatactcaatcacatacactcaaaaaaaaaaacaccaacatagccccttcccttcctccaaatctggggccgcccgttttatgggttcctagcttccttcccctgccttgcaccttcatttcccttttatggccccccctaattctattttcctgcccttcctttcccccccccggtcctgggaaaccctttgtgtcccccactttatcccccttgcacctcctcctcctttcccccccttgccttttacctaagagccccccccctactccctttcccaccagttgcccctcctgtttgtccaacggccccccccctttatctcccctttccccccgccggttttggtggttcccccccattgggcccgttcccttttccagtgccttccccccgttcttttgtttttcccctctcttttccccct

SEQ ID NO: 56738 - DNA, 260 bp, Gossypium hirsutum
  Clone ID: uC-gsronu33B170g04b1
cggacttcgtgggccacccacgcgaacgagaacgcaagggggtggagatttaaagcgggcgggccggatgacccaccttaacccacgagtgaatgcgacggcatagctcaggctatagggaaaccaaaatacaagcaacgggccgacgcaaaacaacgtggggactgggaaaacactggcgtaacccaaggtaataaccgggcagaacatcccccatggggcagaaggcgtaacagcgaagaggcgccacaccgaacgcc

SEQ ID NO: 56739 - DNA, 479 bp, Gossypium hirsutum
  unsure (1)..(479): unsure at all n locations
  Clone ID: uC-gsronu33B171g07b1
aaccgaaaggtaggaaccccnagcgaagccncagcccagagggggttcattttgaggcccttcaccggtcattcccgggcccggcgagaagccaatgatagttgttcagcacaagggggaggagaaacaggttgcagccccagagatcttctccatggttctcattaaaatgcttgagaacgcttgaagtttaccttgtcagcaccatcaagaatgctgttgtcacggtacctgcctacttcaactactcacagaggcaggctacgaaggatgctggggtgattgctggtctcaatgtgctgcgtatcattcaatgagccaaccgttgttgctattgcctatggtcttgacaagaaggcaaccagtgttggtgagaagaacgtacttatctttgaccttggaggtggtaccattgattccttcctcctaactattgaggaaggattcattgaggtaaaggcaacattggcgacatccat

SEQ ID NO: 56740 - DNA, 215 bp, Gossypium hirsutum
  unsure (1)..(215): unsure at all n locations
  Clone ID: uC-gsronu33B171h04b1
ccggaccggaatttcagggttgacttacgaaaaccggcgatanaaaccaaaacaaaaaaaaaaacaaacagtttttaaattaaaaggcaaaaagccgatagggcccttttggcaatggaatgtctagatacattctttagatctgaatgaataaaaatctggggggaaaacaatgaaaaaaaggttgaaagagaaacaagtctatctaatctaat

SEQ ID NO: 56741 - DNA, 417 bp, Gossypium hirsutum
  Clone ID: uC-gsronu33b023h04b1
tttaaaagaagcaaaaggccaacaatgtgggggggaaagaagagataaaggtgctgcatcaaccaaaagccagcagggtttcgccattctcagtaatatcaaggagcagcagttttgacagtctcataagtgggtcatctagcagcggtgaagggagcaaaggaaccaatgatgcctatgtttttgatattcctagctattggtccgactttgcagctgatactaacctagaatttcctgacgctgaggcgttttcagatgccacacccgtaggagatagtaatttgcttgaccacatttttgaagaataccagaaactttttgaccgcgatgaccctggcggaagagaatccatatttgatgttctctcttgattttgagtattttctgctaccagattcttcccctgtataattc

SEQ ID NO: 56742 - DNA, 419 bp, Gossypium hirsutum
  unsure (1)..(419): unsure at all n locations
  Clone ID: uC-gsronu33b112a08b1
tgagaattatagggttcctggaatggtgaaccaggcctcagattggccactgctgtcaccaccagtcatgcccctaacaagcacaaaccaagatctttatcttagagaccaagattccatcaggaatatacttgtcaaactaggaggaagattctcggatgatcatccacaatcaagcaccatatccaccaccaccaatccaatgaattttcgatacccttttgatgtttatttttctcaagatcatcagctatacgaggattccatgaacatactttcatctgcatcttccattagtcccttaaacagtacttgttctcaaacaaacagtactaccatttncagtgtaacaggttgggtggtcctaatgatatgattcaagggcttgatgcttccaagctggctaaggaagctgatct

SEQ ID NO: 56743 - DNA, 343 bp, Gossypium hirsutum
  Clone ID: uC-gsronu33b112b05b1
aagcccctcacttgcttcaggacatgtattcagagtttgtggccaaactggtgtttatcaacgttccatgatggaacttggctctcaacatgatgattagtccttggctaacgcagcgaaccaataacatgtttgtgtgtgcaaggccaggcaactcatctgatatcctttgagatatattgcgcctgaacaagtaccacgtcagttggtggattgagcaaggtcggtgtacaagactttacggttgctgatgctgcaacagatgtgacaatcaaaccagctaccaaacacagcgctgaattgcctgtgactgaaaagagtacagtgatgagccaagtactag

SEQ ID NO: 56744 - DNA, 389 bp, Gossypium hirsutum
  Clone ID: uC-gsflmaxxa004b02b1
cctactttccgcccacgcgtccggaacttttagttacatatagattcatgggtcgcattgtgagaaagacagtgaagtttctttttgtgtttttccagtttcgttgaatatggcgcgttagctatttgtggttagagagttgtctggatcttttagagagttctctggtgtccattagccttgttctgtttttttgtgttggcttcttttcttgtttatcttttcttattctttctctttctattgtttttttcttcactctttctttcctttttatttatttttttttttttcttcttcctttttatctttatttcttcctcttcttctttcctcttcttttacttttcccttattctctttctttatctatctcttttcttcttttc

SEQ ID NO: 56745 - DNA, 295 bp, Gossypium hirsutum
  Clone ID: uC-gsflmaxxa045d07b1
ctgcccctgctgctgccgccgcggcataattgccgggacgaccccctcggtctttcacgcgtgcgaccacccgtacggtggagtgggtctatctgaacccaattctgatggtgcaatgcgacatgaaaggcgagcacatgaaagcgctaatgagcagtggaccttctatggggaatgtcctttttacaatggatgttcactgacatttgagggctcatgcggttgtaaatatcttgatatatcatgcgtcctaaaactataactaaattatctaagctctatttttggtgaatgt

SEQ ID NO: 56746 - DNA, 123 bp, Gossypium hirsutum
  Clone ID: uC-gsflmaxxa058g01b1
agtttttctctctctaaataataggctcaacatcgggatgggttcaaatcacatcggataaagatataaaaacacgttgcggagaacacctataacaaacgatgattcacaattactctgaca

SEQ ID NO: 56747 - DNA, 368 bp, Gossypium hirsutum
  Clone ID: uC-gsflmaxxa090g11b1
acgccgcctgtatatataccgaaaaagaaaaggggcttgaaggaagtgtttataaaagaacatgggcgtaaaaaaaaacaggaaccctaagaaccctaaccctaacactaaagatggacgaagatggcgaaatttgcagaaggggagatcgcaggtgaagacgatgatacgaccagcgcacacggtaacgaaaggtatcgacgaacagtctcacccgtgggagtatacataggcctgcaggtttgatgaccctcttgctaaatcaaaccaaggtatcccgggaccgactaggcgccctatttacacttggtgcaccagcggacaatactggaatctttacaataaccaacatcgaccaagcaaatggt

SEQ ID NO: 56748 - DNA, 118 bp, Gossypium hirsutum
  Clone ID: uC-gsflmaxxa095c05b1
cccacgctaccgagactctctttcctaccttaaaaccatggactcttttagactctctgtggggtactccaccccgcattctcctcgactccatccttaacgacctcaatctctagga

SEQ ID NO: 56749 - DNA, 175 bp, Gossypium hirsutum
  Clone ID: uC-gsronu33B018g10b1
gcgtttttacactaataagagaggatcaagaaaaaagagaaaaaaaatagaggacaacgacagacaatggatcaagaaagaccaggggcaggctccttcttgaggagccaagcgtagcgtgcagcatcgctttcaaggcatgtaggttttgtatggtggaacttaattaaaatca

SEQ ID NO: 56750 - DNA, 226 bp, Gossypium hirsutum
  Clone ID: uC-gsronu33B037d01b1
gtattacgcaccatcagaacaatcatggaggggaccaaattaaccaagaatggagatcatacatacaacgcaggcaatcgcggcaaccgaaaagtatgccaaaacctgagcaaataataaattccaaacacgtccatagaaccaaaccatgcgtgacacgggcaaatgaagaggcaagaacaaagacgaggagcataagttgaaccaacaatataaggtctcaccc

SEQ ID NO: 56751 - DNA, 263 bp, Gossypium hirsutum
  Clone ID: uC-gsronu33B139b06b1
ctttcactctgatcttggaagacctgctgcagattatggtggtgtcagcggagacggttccaaactacttgtatgcgctggaaatgacgatgctcggaagggggtctgcgatcgtggattgacgttggataaaattaaggcttgtgggggtgatgaatcagccaacaggcttaaacctttctacaagggggaaccaattactgtgaccataccatagtcatgggaaagtagtggttggcaattactttgatttaaacgtgcca

SEQ ID NO: 56752 - DNA, 178 bp, Gossypium hirsutum
  Clone ID: uC-gsronu33B167d08b1
tttttattagggaactgtgtccttcattcaaacacaatgccaaaatatatgaacttattcatggcattaattttcgtttgtgtgttaaattgtcactttttttttcttataatttgttacaatttcatatacacagatgtagattaatgttaaaaataaattcaatggttcttgtttg

SEQ ID NO: 56753 - DNA, 409 bp, Gossypium hirsutum
  Clone ID: uC-gsronu33b025c06b1
tgctctctcgtccgcccacgcgtacggccattggtggtttaataggacttgtttgttcagggactgttttagcacaagaaaactcaattgggtgtttatgtaacttggtttctaatgattctaagttaaagcttttgattgttaaggaaaatgggattgattgtttgaagaatttcttggattcatctccaaatccaaaaagtcttgaagttgctattgaattcattaggcatttagcttcttttcctcctattgcagaagctttggttgctgatggtttcattgcccgtcttgtatctgctttgaactgtggggttttaaatgtaagaattgcagcagctaaagctgtttacgagctcgggtttttcgtgaaaacaaggaaagaaatgggtgaatgtggatgcattgc

SEQ ID NO: 56754 - DNA, 139 bp, Gossypium hirsutum
  Clone ID: uC-gsflnu33B002b08b1
tatacagatcgagagtggacgccaaaggatggtattctttaacagaaggctagtactacggcagaggctgagatatatatacacatgaggaagcgaagagaatccaagaggcgcaaactgagtccatgttatggttaaa

SEQ ID NO: 56755 - DNA, 184 bp, Gossypium hirsutum
  Clone ID: uC-gsflnu33B024a04b1
gtcggaggctcatggagcttgcataagatctgggaaatctgctccaagtgagcaagttcagagggaactgtctgattacttggaagataacatgatggccttgataatatcttccggataaaagtaaccaattgggtagctgaggagacttcggtacctatgtattacatatttggtagccaca

SEQ ID NO: 56756 - DNA, 447 bp, Gossypium hirsutum
  Clone ID: uC-gsflnu33B035c06b1
ttcttgcttccgaccacgcgtccgtacacctgcaacactatctaacgcaccaaggcatggagttccagtagatgctgaaagaagctcaagtggaacccacagaagcagttctacaactgctttagggccactcccgatccctagccaatttaaggcgctcgaaacgcatataaacagtatggagtgggaactgcccgtgagaggtcctgagagataaagagtaggagacttcggaccaagtgcttcacttcttttacaaaaagatggggaaccattgatacgagctccaatcatgtctcatgtgacaagagacccacttttatggtgccattccaaattaagcaggaattatcccagataaaagggagactactactgaaccgtccttttggcttcaccaggtaatatttatgaaattaataccgcatgtatatctattcctctcgc

SEQ ID NO: 56757 - DNA, 638 bp, Gossypium hirsutum
  Clone ID: uC-gsflnu33B071f07b1
tttattatgattacagtgtaatgatgccgggaaaggagagcccggttgacgcttcaagaggggaccaaggcaagggtttctatacacgtagcgggaggcgttacgatacggcgaatgatgaggtggcaacagctcaccgctcagagacgcgggagaagaagggattgatggattggatcaaagacaaactcccatgacagcataggatagatgaggaggacaccacacaaccaccagatgatgttgtcctaattgagaacgaccaccatgaaggagagacaagacagaagaagggattgttggtgagaatcaaggagaagattcctggttaccactccaatacagaggacgagacgggaaaggagaccactgctctgaattaatgaatcgatataatgcattgcatgtcaaggatgtgaagagtatgggtggtgtatcaattagatggaacggaacggtctgtgctttgtttttggggtggcgtacattacataaatttctggggtgggtatgctgcttggagggtagaaagaaaagaaagaaagagaaaggagggttttaatgtattgaaggcacgttattaaataaaaaggaaggactgttttcctttaaataaaaaaaaaaaaataaaaaggagg

SEQ ID NO: 56758 - DNA, 366 bp, Gossypium hirsutum
  Clone ID: uC-gsflnu33B079h09b1
taggcctgcctggcagggatagacctttggaggatactgttgcgaatttatcgagagctgaccgttacgatgaatgttattaatgatgtggtccgctcattcgtagctaatcatctaactgggcgagtcaggaatgccactatgggtaaatacccggtaaatggaaaaaggcaaggaggctgttgaaatcattgagcgcatgaccatagtaccctaagagcattggttggatatccaatcattactatggtgtagatgttcaacctcctaccttgatccagaaaatagagatgatgtattatcctacaccaacatggagcccttgccaagaaagcggtttgacatactaaaattggaaggatgcaa

SEQ ID NO: 56759 - DNA, 373 bp, Gossypium hirsutum
  Clone ID: uC-gsflnu33B088f04b1
actcgtgtccataaaccctgaagaaatttctcgcaaatccgaggtcaaaatttagagattgcgaccatgatcagcattcttgctgaggcaagcgatcggtttaacatcaattgccagatcgagcatctcctagccaaacactgtggaactggacatgctgagcttaacagattagaatgggcgggtaacattgaacgctatagatacgcatcatatatagggccttacccgacggtggcttactccgctggggcaaagaaagaatccatgggaagagagagttacatctgcatgcagaaaaggctcacgccttgaggcctgcctacagaaagagaacatgattacgaactgctggtcgggctgccaagtgtaa

SEQ ID NO: 56760 - DNA, 182 bp, Gossypium hirsutum
  Clone ID: uC-gsflnu33B094h03b1
cacgcctgcggtaaaatactaaagacaaactaggccgactagggggttaattagtgccacggcacagtggacaagacttccagcaatgggagctgactgaaagctgagaactcaacacctaaagcaaaggatgggctgcaagtcatataagatgtcaaaatctcggaaatgaatggaagaaa

SEQ ID NO: 56761 - DNA, 351 bp, Gossypium hirsutum
  Clone ID: uC-gsflnu33B112e03b1
tgattttgcacgactctataaaggggcaattggacacatgggttacgaagtaaagagatccacatccaatgtggaggatcataaggagctggttacagctgatgaggtattgtaggactatgtctactacatggagatcgcgaatggagtgtagtggaaaggtgctggactgcgaggcaggtgataggaagcgaggcatatgacagatgcttaggggaatcaacccatttgctgagggggcagctgcggagtaggtgatgacgataatgtgaagacaggaggggagatttggagcgcttttgcactccaagagttgcttgcatgtgccaaggtgccggctgtgacatggat

SEQ ID NO: 56762 - DNA, 537 bp, Gossypium hirsutum
  Clone ID: uC-gsronu33B057f05b1
tttttgcttttcgtttcctttcaagatctcgcagatgctcaccttaagtaaatttaatcccacatgaaatttagcagatcgaaagattttttcttttctaaaaatggcggaggagcatagatgccaaacgccggaaggccaccgtctttgcgttaacaactgcggctttttcggaagtccggcgacaatgaatctttgctctaaatgttatagagatttccgtcttaaggaacaacagggagctacttccatcaaatcatctttttcttcctctccttcgtcttcatcagtcgttgccgaatccgtttctcaggttccgctgttcactctgcctgaattcattggagaatcgtcagtttctttcgtggaggttgccctggtggctgagcaacgggccgaacaagcaacaaccgatttgatgcatggtttgcaggaaaacggtcgggttgacccgggtcagatgcaaatgcgagattacattttgcgggcccataggtatccagagaaatacgggtgtacgttcgatttcagaaggtt

SEQ ID NO: 56763 - DNA, 434 bp, Gossypium hirsutum
  Clone ID: uC-gsronu33B057g04b1
aattcctacacctttcattagcaaaagtgatcagggcgggctttaaatcaaacggcggataactaagcttgtccgtaatggaacaaatgccattgatgaaatccgtggtgtatgaatcgtttcgtatcgacccgccagttcaggttcaatacggaaaggcgaagaaagatcttttgattgaaagtcaccatgccgtatacgaagtgaaagaaggggagatgttattcggataccaaccgtttgcgacgaaggatccgaacatatttgacagagcccaggagttttgacccgaccggttaatgggtgtcgactaggagaagttgtttgagtatgtgctttggtctaatggacccggagactgagcatcctaccgtggcggattaaccaatgtgcccggaaagaattcgcgatgatggtgtctaagctttttgtgg

SEQ ID NO: 56764 - DNA, 201 bp, Gossypium hirsutum
  Clone ID: uC-gsronu33B057h02b1
gttttcactataaggccatgaaggtgggcgatctgggagggttttactacaagggcgccaccgatcgccgagacgtgggggtgggcagcgtggttaaggaatggaacgcagcggagggcggagataaaaacagcgaggaggtggtggatgtgaaggcggtgggggagatgaggaggcgagtggaattaaacgacatgtaac

SEQ ID NO: 56765 - DNA, 440 bp, Gossypium hirsutum
  Clone ID: uC-gsronu33B057h06b1
atttcatcaccgataaagtcatggcactgatcaacgttgcactattgtgcacaaatcccacttcttcaactaggcctgtaatgactccgggagagagcatgcttgcaggcatggctgatgttcaggaatacctcacagagtcaagcatttcttcaaatcgtcaaatgcgcgcagagattatgaaacagttgtctcggaaacttgaagaagatgatacacatgctagccaaacaaggagtattgaagctgatgggccatggaccaatacttctacatatggtgctgatctgtatccagcaggttcgacttctggatattggcagaatagagagtccacaaactagaaaaaaatgtggatagtgctcgcctggtttctccccagagaattcgtattcctttgaaaccaccgcttaattagctcattcgattcaggcaaaaac

SEQ ID NO: 56766 - DNA, 415 bp, Gossypium hirsutum
  Clone ID: uC-gsronu33B057h10b1
cccacgcgtccgggttaagctacagctcaccaagggctgtatgcgcactgggcctcttgatgcctaccatttccttcttgctttccatcattctcaggacagcaaggctggattggagaagcacaagcagccaagccaaaatgattggaacttttatatcaatcgcaggtgcaatttttgcagaactatacaaaggcccgtttacacgaccatcacctgtttcacttgaccaccaccttcaagttataccaaaactttttggattctactcgacgccagatcgttgagctcttggaggtattatgcttgcggctgctaccttgtcgatttcagcatggaatattgttcaggtacaaggtttcggtccacaaatagactaagctcactttttggtttttgtgccttgaaaccttgt

SEQ ID NO: 56767 - DNA, 257 bp, Gossypium hirsutum
  Clone ID: uC-gsronu33B072c10b1
atacatttaaagattttccagcatcatcgctggctttcattgacactcttcttgcaattgatccagcggaacgtctgactgccacttctgcactgcgaagtgaattctttatgacagaaccttatgcttgtgaaccttccagcctccccaaatacccacccagcaaagagatggatgcaaaacgacgagacgatgaagctcgaaggctcagagctgctaaataaagctcagggtgctggtgcaagaaagatcatgga

SEQ ID NO: 56768 - DNA, 324 bp, Gossypium hirsutum
  Clone ID: uC-gsronu33B074a04b1
cagatggaaaaaaagaaaagaaaagagaagaagctttaatggctggttcgacgattctctctagattatcatcatctcggttaaaggctcttcctgtaaagcttaaaagcagcaaaccagtgttacccactatttctccattgaaatcgagctctcagtctcagttttcttctgcttcttcttcttcttcttcttcttcttcttcttcactgaagcgcatttccgggattccaagattaccagtggagctgagctgcttaatctcaatgatgcctttgcacagtgcggttgtttttgtttgtcttagatcattacttgctttga

SEQ ID NO: 56769 - DNA, 214 bp, Gossypium hirsutum
  Clone ID: uC-gsronu33B074a06b1
ttcatttctattatctcacattttcgtgtcatggcaacaccttctagcatccctcttgcattcaccgttcgacgatgcaaacccgaacttgtcgctccggccaagcctacaccacatgaacaaaaactattatcagacattgatgatcaaaagagtcttcaggtccaatttccagctgtccaattatatcggttccaaccctacatggaatgga

SEQ ID NO: 56770 - DNA, 587 bp, Gossypium hirsutum
  Clone ID: uC-gsronu33B074a08b1
ctgtttcgtgggagccattgcaacagcttaaaaaatggaagttaatctacaccctaaaagtccttaaccatatctgtaccaacctggaaatcttatcgttgtaattttggaccacttcattaattgttgggggtaatattattttctatttcttctattgtcttttattatattcttttatctattattttttctttcttatttttttattttttctttctttctttatttactattttttatattcattttttattctttatatttttttattttcatattttacttttcctttatattatattcctttttattctattcttatcttaatttcttattcctcttctttttttttttttattttttcttctttattattattctatttaatattatttttatttgtaatttttttcttatcctattttctttttatattttttcttttactttatcatatcattttcttttctctattaaatatttctatttatctattattttttttctattttttatcaacttttttctatttttctatctatttatatttttttcattattttattcttttatttttttctatc

SEQ ID NO: 56771 - DNA, 501 bp, Gossypium hirsutum
  Clone ID: uC-gsronu33B082c07b1
ggcactttcctcatttggctgatctggttactagaattaattacaacaatttctacatgtctgatggtggaaatttgatgactgcccctagctctgaaactgccgctgcaagacctgggaaggcctttgcaagttgaacaaaatacagttgattctgttacttacggtggtgcctgatctccaaaccaggtacgatcaaggcaatttgaatgataagtctctaaagctgctcatacatatgatctttgagtttgttatatacaaggtgagtttaaagaaatcaattagttcggcggtgggggctaaagtctttgcatctaaatttggagttgatcaaccgtctgcctttgcagtctgattgttcagtttgtaattgaaatcctggtataaaaagtaccatgtttccgttatatttcaggttgatgatgctgtggaaatggtatggtgtggtgtttctttttcttttcccctctctcctctcctttcctttctcttcttttt

SEQ ID NO: 56772 - DNA, 203 bp, Gossypium hirsutum
  Clone ID: uC-gsronu33B082c11b1
tgttggtctgctgcccttgtggcttaatctgctcgtccagcctccccgtgccgtcctaccatgcccgtctctgacaagaagcgtgagtacgccttgaagctgcgcgccctgctgcaggagaaccgcagcgtgatgatcgtggagtgcgacaacgtgggctccaagcagatgcagagcatccgtctgtccctgcgcggcacggc

SEQ ID NO: 56773 - DNA, 561 bp, Gossypium hirsutum
  Clone ID: uC-gsronu33B082f04b1
ccctaaccctttcattaccactgccgaactctcccgccttatgcaatggaagctcactcgcggcaaatggaggcctcgtttgttagacttcgtttcctctttggacgactcttccgtccaatccgtttctcaaaaggctttcctctcccttcccgacatctccaaagccatctccgagcttacggttttgaaaggagtcggcgccgctactgcctccgctgttctcgccgcctacgctcctgaaacggcgccgtttatgtccgacgaggctatgttggctgcgcttggaagctccaaagattattcgttaaaacaatacttgttatttgtggaaaaactaaaaagcaaatctaaggaactaagttcaatgggtgactccttcagaccttcagatgtagaaagggctttgtggagttcagctgtaggcgtaaagttgcagtcttcacagacagctccggacaagaagatcaagggaagcaacacaagacagagaaaacattgaattatctatgtgcaagatgatggaaactttgtgagttctaacatggccaagtattaatc

SEQ ID NO: 56774 - DNA, 523 bp, Gossypium hirsutum
  Clone ID: uC-gsronu33B082f11b1
gaaaaagatggaagagatcaggtatggggccattgagaggttagcaacccagaattcattaggagatctatttatgagtgtcgtgaggaggagtgccgaagctgcagagccactgcatttacttccttcagcatatttgacagtgaatcttactccatccgaagatttcaagcaagcccatgggatacaacaatggtggagacctgatctgcacttgaagtgcaatctttacaagtataaatagtttgtccctgtctagcttttgcttgtatatgtaattatgtaccactagtcaatccttgtagtggctcatgttgctgtgggttagggaaaacagagatatatgtattgttttccatgtgagactctcaaactgatagattccagtccattttcttgtcaataagtatagaatatggttcctttttggattaataatacattatttcttaaaatttcctcttcttctttctttattcccaccttctactcctctatcttccttttttttttttctacctct

SEQ ID NO: 56775 - DNA, 344 bp, Gossypium hirsutum
  Clone ID: uC-gsronu33B082h12b1
ctcgatctgagcatcagaaagccactgccactggttttggagaatctttattacctaccaaagcaagtcagaagataaagtggagaatggaggaaccacagccagaacttccgaaatcccgtggaagagaattttagccagcaggcctgtttgggcaatcgtggtaaataatttcacattccactatgccctttatgtattaatgaactggctgccaacatactttgagctgggcctccagctcagtcttcaggaaatgggttcttctaagatgttgccttatttcaacatgttcatattttcaaatatcggtggggctcttgctgaccacttgttcaccataa

SEQ ID NO: 56776 - DNA, 327 bp, Gossypium hirsutum
  Clone ID: uC-gsronu33B086a10b1
ttcctcgcgtccgggccaatcaaggccttattcaaccataggtctgcgagtttcgctcaccaaccttaaaatcgtcacctagcttcgattgcaacgaatcaagtgaggattcgaaagagccaactctctgttatttgtgtgctggcaatctgttttgcaagtatgcacggcatagagaaaccgttcgtggtgacgtgtcgtggcttgtgacttattgtctttggagaccctctttcattatgttcttctattatctttttttgtcttacttcttttctatctttttcatttcctttattttccttattttctctattaatttttcat

SEQ ID NO: 56777 - DNA, 198 bp, Gossypium hirsutum
  Clone ID: uC-gsronu33B086f12b1
atgctcaatgtccctcatgctcttagttgttctgtcctttattttgcacccggcatggatcttttaaacctagaggcatgacccaatgacggggaagaggcgtttttgttagaagtcagagcctttcttttagctttacggaagaacatcaacaacgataattttggccatttagttctgttcacttatcaaaagaca

SEQ ID NO: 56778 - DNA, 484 bp, Gossypium hirsutum
  Clone ID: uC-gsronu33B086h10b1
taatttccttcgttggcactcacgagtacttggcacctgaaatcattaaaggccaaggccatggaagtgctgtcgattggtggacgtttgggatctttctatacgaacttttgtttggaaaaaccccttttatggtagtctttatcctggcaactgtttttaaccttatcgttcagtctttgagattttcagtgtttctattcttctagctcttcaactattttcttatttctatcttttattttattagtaaccatcatcttccttttttttttttgtcttatttttttttttctttttttttttttttttttttttttttttattttcttttttttttactttttttcattcttttctttttttatttttctttctttttcctttttctttttctatcttttctttttctccttttttttattttcttatttctcttttcttctttaccttattcttttttctcttttttattctttttttt

SEQ ID NO: 56779 - DNA, 277 bp, Gossypium hirsutum
  Clone ID: uC-gsronu33B099a08b1
tactgttattggtccataataaaccattactcaggttgaagaccgagaggcagcggcgtgagaagctgaaccagcggttctatgccttacgagctgtgagtgcccaacataatccaagatggacaaagcttggggggtaggggatgcaggtgccaacattactgaccttgaggtgcaacttaaggtcttggatttagggacggaaaagttagttagttctccgagagattccacagggctagatggtaacaccaaggcggagcccaacataggagcg

SEQ ID NO: 56780 - DNA, 279 bp, Gossypium hirsutum
  Clone ID: uC-gsronu33B099a11b1
acccgccacttgtcctgtgagttctttgttataggaatacggactccactgagattccttttattcgccttattacatgtattattcattgcccctcccatatggggtgacgcctgtctatatttccactagttcaaaaataacttgcttgcctaattattgtagcctgcttccgatgtgctgccatgattctttgtactgacaattttacatgcatatttctatgtatgcccatcgtcataagatacaatcagtcccttgtcttagaacagacaaaaa

SEQ ID NO: 56781 - DNA, 203 bp, Gossypium hirsutum
  Clone ID: uC-gsronu33B100c05b1
ctggatctggattaaattattagcggtgaagatactcgaacaactctgatgataaaaaatattccaaataagtatacctcaaagatgttgctggctgccattgatgaaaatcatcagggaacttacgaatttcctctatatgccaatagattttcagaattagtgcatcgtgggctatgccctttattatcatgctgcctcct

SEQ ID NO: 56782 - DNA, 260 bp, Gossypium hirsutum
  Clone ID: uC-gsronu33B100h12b1
tcgaaagactaaatggacattatggggttggagcatttgtcattggaaacacaatttcatccattccttacttatgttttatctctttaatcccgggagcactagcctattacctggttggacttcaaaagagttctgatcactttatctactttgtcatatctgctcttcactagcacgatgctggtcgagagcataatgatgactgttgcaagcgttgtgccgatctatttcatgggaatcatctcaggagttggtat

SEQ ID NO: 56783 - DNA, 215 bp, Gossypium hirsutum
  Clone ID: uC-gsronu33B101a03b1
ctcagtcctaaacagagatttgtcagagaaggagctccaaatgaaaacaaggagagaaattatggttcttggggcccagttgggtaaaacaaacatcgcagcatgggctagcaaagaggaagaggataaggatgcatccacttcactgaaaattgtagcaccagaacaaccatctaagagtgtcattgaaacccgtgcagcattatgggaggaag

SEQ ID NO: 56784 - DNA, 240 bp, Gossypium hirsutum
  Clone ID: uC-gsronu33B101b01b1
ttcattcgtccgaaaaaaacctagaactaaaaaatttcctttgtttccccttgtttccagccgaaaggctaattccccaggcctttaattgccaccgagaccgactgcgacaatcgaagcagggccttccagtggtgcgtgcgcgatgtaactctggttgtggagttgtggagaacgaacagcgcatagcgcgggtgcgaacatggagcgaggcacatggggatcgtgcgcggaggcgct

SEQ ID NO: 56785 - DNA, 205 bp, Gossypium hirsutum
  Clone ID: uC-gsronu33B101f09b1
tcgtcacaaaggaagtgcctcaacaccatgaagaccaagttcttgctttatcccgtctttgaatctcaaaattattaagaagatggaataaactacggttgtacatgtagaaacccttatttttttccgtacgatttgttgtttgttgatgctttgccatcgttaaatcttcattgtctttctttcttttttcacctctaccttt

SEQ ID NO: 56786 - DNA, 415 bp, Gossypium hirsutum
  Clone ID: uC-gsronu33B103a02b1
gttatattcttagtctcttacgaagtgaaactatggctcaacttaagaagatggattgcgaaatagtgatcaagacaccagctgataagttctacaataccttcaggaccaaatcccatttgataccaaagatgtccaacggattaatgatagatggcaaacttcttcaaggtgattggaatactgtcggctgtgtcaggctctggtcttatgtttccgaaggtaagtctgagatggttaaagagatacttgagaacgttgacgacgaaaacaagacaatggttttcaaagtggcggagggtcaaatcttgaactattataagagttggaggagcatctttaacatcacgcccatgggtgaggggagctcggcgaaatggactatggaattcgacaagcagatcgagatcatccc

SEQ ID NO: 56787 - DNA, 566 bp, Gossypium hirsutum
  unsure (1)..(566): unsure at all n locations
  Clone ID: uC-gsronu33B103d07b1
gtggatattggaccgtttccttatcagaaaccagcaactaatgttaacatgatgaatgtgcctggtgcttatgtgatgaatccctgcaatgtgcaatgcaatgatcagatgtattgccttcatcctggagtcgaaaataaaacaggagaagctgcagcactgaatggacaaggatttaatggttgtgactttgacaatattcagtgcttggcgaatcagaactctacaggtgggattggaagtgcagggtcgaatggcaattattctggcacaaaaaggaggaaaggtaaaagtttaggagtctttcttttgatttttttgcataatttatgttgatataggaatgttaatctctaatttgatttatctattatgactagtatgttggcttgagtgtagttatttacttcactagtttctggcttggaactctacaaggtgtagctatgtgcttcttttaccttgttaggactgctaataactactttttttttnggtgtgtgtgtgtctattatgaagttattccatctactggcttgttggtccacaataagggctcttgattg

SEQ ID NO: 56788 - DNA, 401 bp, Gossypium hirsutum
  Clone ID: uC-gsronu33B103h01b1
aattcttcgtatctccaaccgccaacaaacaccatcttcaacagctcgaaattcaccacagccacccaaaccttcgagtaaacaaggatcggaagttcccatcaagttcgactataccaccgccccaccaaccgagaaaccaaaaccagttgtttcagctggtaatgctcatcaactgtgaggaagtaagctgaagcctagtgcagcaaagggtaatgggaaaagccaagtccaaaaccacgatgatatatttgctaaatctatccatgaaacaaggcggcagatcacgtcaccggagccggacaacggtgagatttcccagaaagtgggtggacatggacatggacatggtagtggtcgaaaggatcatcaattctcggataccataagcagactaaaag

SEQ ID NO: 56789 - DNA, 482 bp, Gossypium hirsutum
  Clone ID: uC-gsronu33B124a03b1
ccctctcgtccgctcaaatacctcatttttgcaggggcaattttctatctgtgtttgcctctattgaaactttaaaaatatgagtaacataaggttggtagaagccaagttgccaacagggttcaggttccatcctagagatgaagagcttgtttgtgattatttgatgaggaaggtggctttaactgataccttccaactcatgattgaagttgatctcaataagtgcgagccctgggatattcctgaaacggctcgggtgaatagcaaggaatggtatttttacagccaaagagatcgaaaatatgcaacaggattgcgaacgaatagggcaacaacgtcagggtactggaaggccactgggaaagataaggctgtccatagcaaaggcaccattgttgggatgaggaaaaccttggtgttctaccatggtagggctcccagtggaaccaaatctgattgggtcatgcatgaattcaagc

SEQ ID NO: 56790 - DNA, 404 bp, Gossypium hirsutum
  Clone ID: uC-gsronu33B124b04b1
gttgttttgaaatcgagcttgttttgttactctgtgacctcatcatatgagtgctttttatctttattctttgtgttttttccaccccttcactatcctttttttgttttcttagaaactaaactttctgcaggttaagttagtatcagcagtcatatataattacaattaaagttaatactatctttagattgatttcttatttaaaaaaaaaaaaaaaaaaaaaaaaaaaaaaaaaaaaaaaaaaaaacaaaaaaaaaaaaaaaaaaaaaaaataaacaaaaattaaaaaaaaaaaaaatattttaaccaatgcactcaaaagtaaaaatcctatggggggggccctttttaagggccccagtttaccccccgggggatggcaaatttttaatttttttttg

SEQ ID NO: 56791 - DNA, 469 bp, Gossypium hirsutum
  Clone ID: uC-gsronu33B125b03b1
atgcttcaaaagcttttgacacaaatgctgaaacccgcatcagaagctgagggttcagggatatcgcctgaaaagaaagtgaggaaaatgagggcgtcaccgttcaacatgaaaagcggttcggtcttggggaagacgagcggttcttcactgtcttcaatgccggaaatcgatagcgatgaagatgaagaagtagctgtggttgtggaaccaagagctagaccacaaagggcaaaccggaccaagacaacttatgttgttagtgattccgagactgaggaagaagttaatgatgactcagatttcgaggaagattaggattgaggaaaactgtgatgtttatctttcagtgtaggaacgaacaagtaactctaattcttggctgcttgtttatggtcaacttaggttgtcaacgttgtgtaaaactgaaagtcatgaatttccttctgtttccattgcaaaaaacaat

SEQ ID NO: 56792 - DNA, 384 bp, Gossypium hirsutum
  Clone ID: uC-gsronu33B125b05b1
gaaaactttacctgatgaacgactgccggtggtggcttctcgtttcttgttgcagtttcagaattccccatttgtactttgtcctctaattacgatggcacagatatgtcatttatgttcccatttgcaaggtcaagcaggaactctgctggattcatggcaatgagaggggaacaacctatagatgagaaataagccattgcttccgaagctctcccgaagtaaagcgaactgcctttccctagaagaaccaacttgtcgaatttgtggaacagtctacttgatggctggtggattgttgttatcacagtcttcccggcctgcaatgagaactctgaagtcatttagattcaagaaaatacacacacacgctttcagtttttg

SEQ ID NO: 56793 - DNA, 515 bp, Gossypium hirsutum
  Clone ID: uC-gsronu33B125d03b1
cttttgcttacgtacttgctaggagtggtacttggagtgactgctttagccactccctatgttgctacctatgatggtaccaactatggtaaggccaatactcctgctaatgagactcctaaggtgaatgcaccacctcatgaacattatccacctgtctatgaacctacaatgaaggataaacctgcacctaatccaccagcttatacaccaccaacgaaagagaagccagaacccaaggcaccagcatatgaggcaccacccaaggcaaagccagaaccaaatccaccagcttatacacctacaatggaagagaagctagcacacaatccaccagtatatgaaccaccgactaaggataagcctgcacctaatccaccagcttatacaccaccaccgaaagacaaaccagaacctaatcaaccagtttatcagcctccgaagaggcacctgtttatgagcctacaccactcaatgcaccagcttatgtaccaccacagaaagagataccagga

SEQ ID NO: 56794 - DNA, 477 bp, Gossypium hirsutum
  Clone ID: uC-gsflmaxxa002b04b1
tgaaaacatgtctcgaaagagagacaaaccctacttctcccgtcacgccccagcttccatctctaaacggcgtcgtcctctgccacctcacccgccacctctgccgtcttctgagaatgaggccaagccaaagtcgccaccggctgttattgtcatgggtcttcccccgaattgctcggtgctcgatttgaagtcgaggtttgagatctacggttcgatctctcgcatccgcatcaattgtgatgctgtcggttacattgtatatcgcactaaggaatccgccgagtccgccattgcggcttcccttgattcctctttcggcatttaccgttgattccaaaagggttcaaggtcttgtgggctcctgatcctttagctcaatggagagaccgaatagggctaaatgcatacacccattatggggcatcttttttatcaaggattctaggtctgaggtgccttttattagtttttgtc

SEQ ID NO: 56795 - DNA, 448 bp, Gossypium hirsutum
  unsure (1)..(448): unsure at all n locations
  Clone ID: uC-gsflmaxxa002e12b1
tcggacgcgtgggcttatacaagcccaatttgtgggggccaaatggcttgggaaagcaatccctgtataatgtcagtattactgttgatgtcaagggatatggagagtctgatacgtggggccatctatttggtattcgcaagatcgagtctcacatagatagtgctactggagggagattgttcaaggtaaatgggcagcctatttttatccgtggtggtaactggatattgtcagactgtttgctacgcctttctaaggagcgtttcaaaacagacataaaatttcatgcagatatgaatctgaacatgattcgttgttggggaggtgggttggctgaaaggcctgatttttatcattatagngatgtttaaggagtggtggtatggcaggagttttggattactggtgatgttgatggaagaagtatcccagtatcaaatcctga

SEQ ID NO: 56796 - DNA, 504 bp, Gossypium hirsutum
  Clone ID: uC-gsflmaxxa002f09b1
cttacattaaaaaaaaaaaactccccattacggtcttatcttaccccttccatttttaatttcgatttttccaaggcttacaaggaaaaaataaaaatttccagaaattattaaattttatatataaaaaggaaaacccactataaaagattccaagaaattgagtcttttgatgaattcatcagtagtgtatctctttttgtttggttcctcggaaatctaaaatgcgaagaaacgagtgtttcgtgttatgaatcgagctttgtaaacggtgaagcaaacgagtagaaggagagagaattttgttttggaagatagaaattgaagggttgggagaaaagatcagagaaatggcgggagagaagaggagattcgcgattggttacgcgcttttgccgaagaaagagaacagtttcattcgagaatctttggtgaacctggcgaaatcacgaggagtggatcttgttaagatcgatagggagcgttctttggtcgatcaagggc

SEQ ID NO: 56797 - DNA, 509 bp, Gossypium hirsutum
  Clone ID: uC-gsflmaxxa002g03b1
cttaatccttgagccttaagcagatctggatcttctctttgaaagaaaaaaaaaggaaaagaaaaaaaaacacgttaaaaacggtttcaacttcccgggaacatcacagctcgtttcttgatcattaatctcagctgtcagttctaaagggctaagcttagagaagatcgaagatggtgctggtgtcggccgtacgggattatgtttaccggatgttacaagacatctccggcatgaaagtcctcattcttgattctcaaacggttagcattgtgagtgttggttattcccaatcagagctacttcagaaagaagtctttttggtcgaattgatagactccatctccaagtcaaaagaatctatgtcgcatctagggcagcttatttcctttggcctacatcagaaaatattcaatatctgccgcgtcagctatctaactctaagtttggagagtgtcacttggttttctcagacatgatgaaggatactcagattcatcttttagctg

SEQ ID NO: 56798 - DNA, 244 bp, Gossypium hirsutum
  Clone ID: uC-gsflmaxxa003c10b1
tcttagaaaatgggaaactgctttgctcgtaaaacagtaacgaaacgaccggtcacgaaaaggttgcagaaccagcaaaaaggacccaattccagcaaccggtgggctagggttcgatcgtcgtggaaagacatgtcttgatgattctttgtttcaagagctatcttttgcatcttctattcttgttctgtttttatctttacttacttggtcatcttttttttttctttttttattgtttttt

SEQ ID NO: 56799 - DNA, 370 bp, Gossypium hirsutum
  Clone ID: uC-gsflmaxxa003d11b1
tctcttcatcttttaacaatggtagatcagggggctgtttgctgcatgtgcggcgacgttggtttctccgataaaatcttccgctgcaacaagtgccgccaccgctttcaacattcgtattgcagtaattactacagtgagttcgctgagccgattgaactgtgtgattggtgtcgaagcgaagaaagaaactcaaagcatggaagctctttgaagaaatcaccgttgatgaacagaaacgaaaccggaatcgtaaatcgatctgagtattcgggtgataaattaaagcaacacaacgatgatcatcaacatgaacatcatcatagagggaagaacggggggacaccttctcctaggcctacgactcgca

SEQ ID NO: 56800 - DNA, 456 bp, Gossypium hirsutum
  Clone ID: uC-gsflmaxxa003e06b1
gtgctgtgcatgaatggggcaaagcacagatttgagggttcccatggatcaaatccaaaaccaagaacaagataaggtgaatcttcataatcaaggcattgatgatgctatactaatggctactcccaagggagagaacattaggcgacctagaggaagaccagcaggttccaaaaacaaacccaaaccacccattattgtcactcgtgatagtgcaaatgcattacgagctcatgcaatggaagtaacttcaggttgtgatgtgcatgagagtttagctagttttgcaaggagaaaacaacgtgggatttgtgttcttagtgggagtggggtttgtaaccaatgttacactcaaacaaccatctttatctggtgcaattgtgactttacatggtcggtatgagactctgtcattgcttggttctattcttccaccacctgcaccacctgggatta

SEQ ID NO: 56801 - DNA, 431 bp, Gossypium hirsutum
  Clone ID: uC-gsflmaxxa004d06b1
ctgttaggctgggctggaggatccagaagcatgacgaagctgctatggagcagctttgtgaagaaaccggggtccaaaggcaagttcttaaggtctggatgcataacaacaagtgcactcttggtaagaaaccctaatttcccatcaaaaccaaaacaacagtgcttaaacattgttacttgggaagaaacaaaacattccagagaagcatatgataatggggaatcgaagaaaaaaaacatcatgtgatttcagtagggattgtatcgcactagggttctcacttgtttatttctttattcattgcactttttttttgcaatattctgattttggattagcttatggtattattatcaatgccgatcaacgcaagatgatgacgatgatatgatctgaaagtttctgatgaggacattgctgctgactgc

SEQ ID NO: 56802 - DNA, 512 bp, Gossypium hirsutum
  Clone ID: uC-gsflmaxxa004e04b1
gaacaatgctagtttcagagtagcagatcagtgtctttaccaacttccctctgctcaaccaattcaagttttttttttttttggtttcaaaatttccctccaagttgacttggcattgaggagaaatggaaactagctcagtttccaagctgttgattttcttcttcacagcctttttagcgagttctaagctaatccagtgcagcattacctatgataaaaaagccattctaatcaatggacaaaggagaatcctcatctccggctccattcattatcccagaagcactcctgagatgtgggcaggatcttattaagcaagctaaagatggaggcttggatgtcatagacacatatgtcttttggaatggccatgaaccttctcctggcaattataatttcgagggaagatatgatcttgtacggtttatcaagacagtgcaaaaactcggactattatgtcatcttcgcattggaccttatatttgtgcagaatggaattttggaggatt

SEQ ID NO: 56803 - DNA, 547 bp, Gossypium hirsutum
  Clone ID: uC-gsflmaxxa004g04b1
tatatatctctcttttcttcctttctccaccaaagaaaatctgatttaaattttaatccattaatggctgatgaaccttctctcactcgatggtcttttctggtactctctttttcttttctctttccttctttctttgtttttcttttccttttccttttctgtttggttgtcaaatcgtcgttttcttcctgatttccctttggtcaattgaactgtatgaagctaattgacttacttcgattgactattttcctttttttactcatttattagcttagattgcattgcattgaatttctttttctaactcttaaattttgaaccaactgtgaagaaatgtgaaggaaaagggaaaaaaaaaaagagttctaagcattttctttaagcaattatgttattattccataggattttaaactattttatgatgccaagtttgggaggaagagattgcctgagccgcaaaatggtcaaactgctgatgagctcgactccaatggcactaatttcaacgtgacttcaaagaaaaccaccctgtcaggaa

SEQ ID NO: 56804 - DNA, 547 bp, Gossypium hirsutum
  Clone ID: uC-gsflmaxxa004g10b1
tctttcgcgtgggcggacgcgtgggatgtaccaagcgatttgcttcctttttaatgtgtctgaagtgaatccatggagaatgttccgcagtaaggtgaatatttcgtatatatgcggcgatttctgatttgtccataacatgattctggcattttttgactatagaaagcgcatccccttctattattgtttctaaacccatctctattactgtttgaatcgcacataaacatgccagggactctgctgcaaaagcagatccaacattctcatgcagtttcgatcttgcaatcaagacccgaccctccccattccttgctactactccgaatgccgttcgagatctttgcctgtcaaaagccccatcaaaattgatctttattgctgtaccagataggggtacccaggtcgtgatttcagcatttcttggtagtccacttccttctaaatcgtccatttcttttaacgtgctagatatgaatctagagatttcccttactgattgggtctttccttcatgagtcttttaatctatctgtccaagggc

SEQ ID NO: 56805 - DNA, 517 bp, Gossypium hirsutum
  Clone ID: uC-gsflmaxxa005a01b1
gttatctttttttgtttggggagagtagtatttctaaagagaagcaaagcagagatttattgttgttgttattattattatcagaatttccatttccatatgctcaatccatttcttctccttcacaaccaaattaaatccctgttcataaactaaaaatcccacctttgaaacagagcattcaaaaatggtgactggctggagaagagctttttgtacttcaattcctaaaaaacaggacagccctgttttaccagaaaaacaacaacaagaagaaagccatggtactaaaagtccaagattttcatcaaagtttgggtttttctccaacccatcaacaccaaggttacgatctcaaccgggttcaagccccagtctccgttgccgaaccgtttctactgctacttcatcccttccaaatagccccaagctccatttcagaacacctcatttatctaccccttcttcccctaaatccccttctagtttctccttccttaaatccactctgtgtatc

SEQ ID NO: 56806 - DNA, 422 bp, Gossypium hirsutum
  Clone ID: uC-gsflmaxxa005a04b1
cccacgtttccgatttattcttcgtgtgaattttcccccaaaggcatactattttcacttagcatttttatcaatatcgtttctgctgttaattaatagaacaccatatccttggctatagggttttgcttggtagctatgcagctatttattgaaagttgaaactcatgcctattttatgaatgcttacatgcatggcaagctgttgttagcctttctttctattatgtttgttgctttgtattagcattctctatgctacttgccctgcaaagttccaagtttccatttttattaaagatggcaatcgggtatttgcccagcagaattaagctaattttatggatctatctttaattaatgcaggactgagcaatgctttctttacaggtcaggttgctgcttctttgtcatggacggat

SEQ ID NO: 56807 - DNA, 429 bp, Gossypium hirsutum
  Clone ID: uC-gsflmaxxa005a07b1
tttgatcaacttggtgttcacttgaatgaacatgtgaaagagataaacaaacctctctcactggatagcagaaagaagttgctgtctgcgcacatatttcagcttctatcttcctctatttacttgatagcagcagcaggaagcaccccctgaagttcactcatcttctaccatagattaggtcaagttcctaaaattttacgttcttgttaattttattcataattaccattattaacttgtataaaactttctttattttcggtcattaaacaaaaatgcaagaaaaaaaaaaaagctaagcgaaagtccaccacttatcatcaaaaaaaaaaaaaaaaagatacaaatctaaaccaagaaaaaaacccaaacacaaaagccccaccgagactactgctactacatacctcacaaaaactcccgggg

SEQ ID NO: 56808 - DNA, 429 bp, Gossypium hirsutum
  unsure (1)..(429): unsure at all n locations
  Clone ID: uC-gsflmaxxa006b06b1
cttttaagtgagtaaatatggattttgatgaatatgagtatttagaaaagacggttgaaaatcctgagcatcaaaaggtgaagaaggaagatggtaatggtagagttgataatgttaagtctgaagagaagattcgaagtgggagttcaaagcataagagggaggagagagtcgatgattatgatgattatcgaagtcattccaaacgttcaaaatcacgagaggaatgattgtatgatcatgaccggcataaggaacgaggctcttgtcgtcacaggtcacggtctagagatggtgagaaggataggcacaggagtagcagagaagatagagtcaaagacagggacaagggggagaggatgnggagagaataaagagcaggaacgcgaacgagataggaaagagcatgatcgcgagagggaaagggga

SEQ ID NO: 56809 - DNA, 483 bp, Gossypium hirsutum
  Clone ID: uC-gsflmaxxa006d04b1
gcctcctcatttctcttcaaacaaacatcagtttctttctctctctttcctcgacaatatttcgattttcaccctatttttatttttattcgtattttatttttggtttacttaccaaaaattacatactggcaaaaataaaattaaaagggcaatttgagttgagatcaactttgatagctgctgttcaaaacaagaaatgggatctcatctgaatttcaaggacttcggtgatgcttcaagtatggaaggaaacgagtctaagccactggggaattttccattgacaaggcagtcatccatatactcgttgacttttgatgagttacagaacacctttggtggaattggaaaggacttcggatcaatgaacatggatgaactcttgaagaacatatcaactgctgaagagactcaggcttttatgacagcttcagtttcaggtggagaaggaagtctttctggaggcaatctacagaggca

SEQ ID NO: 56810 - DNA, 217 bp, Gossypium hirsutum
  Clone ID: uC-gsflmaxxa006d10b1
cccacgcgtccgaaaaaaattttatggctcttcaatttaattttatttcatccatgttaataatattacttttaaccatatcatccgctaaagctcaagaagctggtggcgttggcggtagaggaggaggagatggcggcgccttggccgctggagtcgagatcaactttgatagctgctgttcaaaacaagaaatgggatctcatctgaacttcaa

SEQ ID NO: 56811 - DNA, 191 bp, Gossypium hirsutum
  Clone ID: uC-gsflmaxxa006e07b1
gaattgttaccgcctccaactccccttcacaatttccctcatcgtcaaaccctattgtcaccctttctttctcgtggcgtttcgaaattaaagatttcaaccgtgtaatactaattcccatatgcaagcgaaaaaggaatcaggttcttggttgtgtggctgaatggcaagatttgagggtagggtttcgt

SEQ ID NO: 56812 - DNA, 445 bp, Gossypium hirsutum
  Clone ID: uC-gsflmaxxa006f10b1
tcgcccacgcgtccggcctgctgatacggaaaaaaaagtaaataaccaaacagattcctctttctttcttacttcagtaatggcttcttctatttcgattattccgtcttattttgcttccaccagccttcctcccctccccattgcttctcacttcccctttaacctcaactctttaaccttcttctttcctttgaaaaacgggtccttcaagcttcgtaatgcccctcctctctctcccaaggccctttcttctcgtgcacccaaagctgctgttgtttctaaagcccaccggtagaaaccagcttcgaacagtgtctcccccgttcctgtacacttttactccaggccgttatcccccctcctccatctcccacctcttatctctttacctcatctcctacctaccctctttatttctctcctcctttactttcctttttcc

SEQ ID NO: 56813 - DNA, 252 bp, Gossypium hirsutum
  Clone ID: uC-gsflmaxxa006h04b1
gtctactccactctcatcaatggctactaatgaaattgaaaaaccggatacctgaatatgttcaaagcacagtcaaagcccgtaagacaatgtgcctgaatgggcaccgggaccggcaccagctgaggaggtcagagacctctaacgcgttcgaagagcgtggactagcatgcaaaaaagaacttgctgtggagctcggggttgctgttgatgcatggctgcgtgctggccggagggaaggggctgcctcac

SEQ ID NO: 56814 - DNA, 510 bp, Gossypium hirsutum
  Clone ID: uC-gsflmaxxa009a01b1
gcttttacgcatccggacttataccattaacagtagctaagccgtaacgagaagcaactcctattatggtgactgctctggacatattcttgtgtcttcagcacgagggagattgttcgattagagaagcgtggtatcatttatccgatgaatacccgatcaaatacgaagctgaacgtctccccccgcctctcgttgccgatctgaatggcgacggaaaaaaggaaatcctcgtcgccactcacgatgccaaaattcaggtattagagccacacgcacggcgtgttgatgaaggattcagtgaagcgcctttgctggcagaggtgtctctgttgcctgataagatcaaggttgcttctggtagacgtcccgtagccatggccaccggtgttatagatcgaatttattagtctgggcaacctcagaaacaggttctggttgttgttacttcaggctggtcctgtatgtgttttgaccataatctcacaaagttatgggagaataatttgc

SEQ ID NO: 56815 - DNA, 386 bp, Gossypium hirsutum
  Clone ID: uC-gsflmaxxa009a07b1
cccacgcgtccggacttatcccatcaacgttagctaaaccgtttcgcagagcaaaacccagttaggtgatgcaactggactcatcaggaagcattaacaatcacaatgatgcccacaatagttggtagcttaattttggtgaggaaaagccgaaagatgatgagggtatttcctccctcattattgaagttgtggaaggaatgggagatccgagcaatggttgtaaccagccttgtgctccaaattttgctcatttcatttggcaagcgcagaaaaaggagttcaaaaagaaggattagagctgctgttggtgttcctatttgttggctgattctgagcaagtattcgccttggcatactaacaaatgacctggctgatatatatg

SEQ ID NO: 56816 - DNA, 570 bp, Gossypium hirsutum
  unsure (1)..(570): unsure at all n locations
  Clone ID: uC-gsflmaxxa009e04b1
ttcacgcgtccggtgaaattgtagaccataaaaatataataaaaacaaattttaatgtgttggatttgtggtcccgaaaccactgttccgactaggccctaatttgggatgttacacatcatcatttgaaaaatatttaaaaattagaaaatggaaaaaaataatttaaattttataaaattataaattagaaaagaaatataaaaatataaaaattattatttttaaatttttaaaaaaatatattagaagtttaatatctttaaaattttataaatcacatttactggagcttgaacatgagattgttgtcgcttagaatgatatcacctactataattgttttataattcaatcaaacaaattttataataactgatagatctttttaggtgataaattggataaacttttttttcaaattatttaaataaatttaaataataaataaaattatttttattagtttttatctattggtttcaaagataaatatcataattagttntactcaaatcatatgtatctatacttaanntactattataagatttaatttagcatcatggg

SEQ ID NO: 56817 - DNA, 487 bp, Gossypium hirsutum
  Clone ID: uC-gsflmaxxa009g05b1
ttcaaggaagcacttgctgttggatacggcacagaaggtggtgtagattactttcttgtgaggaattcatggggtcctaactggggagagaatggatacatcaagatggaacgtaatgtcgcaggtacatcaaccggcaagtgcggtattgcaatgatggcctcgtaccccatcaagaaaggaccaaatccacctaaaccggctccatctcccccttctcccgtaaaacccccaaccgtgtgcaacgagtactactcatgtcctcaaggaagcacttgctgttgcttatatgagtatggcaaatactgccttggctggggatgttgcccaatggaatctgcaacctgctgtgatgatcactacagttgttgccctcatgagtatcccgtatgtgacctgacagccggaacttgccgcatgatgcaggacagtccattgggagtaaagctattgaaacgaggtccggctaagttgattaccaagcaac

SEQ ID NO: 56818 - DNA, 416 bp, Gossypium hirsutum
  unsure (1)..(416): unsure at all n locations
  Clone ID: uC-gsflmaxxa009h02b1
gaaaaaaactcagaatcaacagatcgaagtgaaaatggagtgtgtgttcgtgctagctgttcttccccaaatcgataacccacctccaccgatccaccattccacctctggtgtncagtcctncacaactccacctccgctctagccttcaacgtggtagaatttcaaagggctgaattctgagatcaaatacaagtatattttttctgcttctttcatgcatgctggttcacaaacagcaggtggtagccttgtcaaggcttgtggtagcttgggtgctattaaacaagatcatgaaccaaagaaaatggatttggatcggngaaaaataaaaataattgaatagtcggctattccgtccgtcgatatccgaggttagtttattagcaaattaatattttaattttttattaaat

SEQ ID NO: 56819 - DNA, 411 bp, Gossypium hirsutum
  Clone ID: uC-gsflmaxxa009h10b1
ttcaatttctccggaaacggaaaaccagtaaagtattgtttggaaatttgcaatccaagtaaatgcaaaagtcgtgtcgtttcatttctcgcttccttcgctcctccaagcacacttcttcccctatcattgttaactcatcgtttaacaatctctcccattttgattttttaaacccccgaaatcagagctttttccaatttagtccccatacaacaaattctgggcaagccagaggtttgaaacgttgcgttttgctgggttttgtattgaccgctgatgatcccatctattatcagcatcatacacatttttactctctccgtcgaaaatttttcacgagggctaaacaaataaagaagattgaaatcaatgatcagcacagtcaacgtgctgttacaactgctttat

SEQ ID NO: 56820 - DNA, 330 bp, Gossypium hirsutum
  Clone ID: uC-gsflmaxxa010a11b1
taaaatttcaacttcatatattcgcagtagctggcaggaccagcaagaatatgagtcttggaaatctggcgagtgcagtcggcaatgttgtcggcgacattaccggccttagtaaacccagcaagaacacaatcacaggcagtgttgttatagttaagaagaatgttttggacttcaccgccgtgcattcaactgtaagctgctagcctctttgaattgctcggcaatcaaaagggattacagctcgactgagctgcaaatgccgaccctgcaaatgaaaatggtggtcagctgctgaagatataggtaacggaatactggaaccatgca

SEQ ID NO: 56821 - DNA, 476 bp, Gossypium hirsutum
  Clone ID: uC-gsflmaxxa010d10b1
gcttcttcatattttgcctgcacaagcataaatacgaaggaatcacaaatgggcttttgctccgaatagtaatttctcttaaatacttgcctaaaattcattaatatgcccatttcccgcttcattttcttttccgccaagcaccgcttcgcccatgcttccaatcttcttccaaggtttggttcatctaagagaattcaatcttgtggctataccaaatcagcaaagaacaattattacaaaaagccaactggtcatcctgttgggaatgttgaaacacaggcttctcgctcgtcgggtgcttatattattccacctattttactaggatttggtgggattgctagcttttctgcattacaatgacgagcgaagagcagttaaaataggcaaggacagctataccggtagtgatactgcagcagcttcaattattggcggcccattcactttggttatattcggaaaatagattg

SEQ ID NO: 56822 - DNA, 322 bp, Gossypium hirsutum
  Clone ID: uC-gsflmaxxa012b04b1
ctccctctgtgccacgaagtcctggaggggcagagaaccctgtaaaccctgggtcacggtggaaaaaagggaagcttctgggtagaggcacatttggtcatgtttatgttggttttaacagtgagagtggtgaaatgtgtgcgatgaaagaggttacgttattttctgatgatgccaagtcaaatgaaagtactaagcagttgatgcaggaaattgctttgttgagccgtttatggcatccaaatattgtgcaatactacggctctgaaaaggttgatgacaggctttacatatacctcgagtatgtatctggtgcctctat

SEQ ID NO: 56823 - DNA, 378 bp, Gossypium hirsutum
  Clone ID: uC-gsflmaxxa012d08b1
attagatttctgatttttttttaaaaaaaatttttttttcccaaatttccttttccaaacatttttctctcctctatcattttccactttcaatttttcatttccttcttctgattgctatcatttttctcattcaaattgttgctactgcgatttttgggttctttaatcggcttagtaagtgaagttttgtttattattaacgattggtttttggaaatgtgggcaatgctagtgatagcagataattggtgtgcattcaataagttccgttgtgaccgatcacgtccgcctcggtcctccccctcctctcctcttctctaactccctctcctctcttctctctattcctctcttctcctccctcctcctctcctc

SEQ ID NO: 56824 - DNA, 277 bp, Gossypium hirsutum
  Clone ID: uC-gsflmaxxa014c07b1
atcgctgacgcgtgggaacccatcttgccctgtgctttggtgttgtaatatcatcatagttatgagcagtgatatagagtgtgtctgggtcttcgcccttgcatccaactgccgagctttttcacgggaaagtactgcctggtcaactttgatcatcgctcttgcctggcctcttatgatctttctctcctgggctcacccctgttgtcccgtccgttccttttttcgtgtttatcactttctcccctctttccttcctacccttcctctcttctct

SEQ ID NO: 56825 - DNA, 495 bp, Gossypium hirsutum
  Clone ID: uC-gsflmaxxa015a04b1
atcaaccactacctcccacaatcattccctattccaacgtccacatctcctctcaatcccagccgtcaaatttccactgtcggtcgcaatctcaaaatttgaaccctttaccagttaagatcatcctactaaaaacccattacactaaattcgattacaccggattagataccgttgctttgattcataatttccaaatttctcacagagcaacaaaaacagagaaaaagggaaaatctcagttagttcatttttaaattcaaataaataagtattcttcttgatttgcttacaagcctactctctcagtctctctcttgtagctgctttcttgtgatacgctttgctttctattttttttctccattttcaatataagcatggggtttctttctctaaacttttaaaaaaaattcatgcttcggtcttcctttttggtggctttggaaacaggattgctagatttgagctgcgaaagtattgcatttacagggt

SEQ ID NO: 56826 - DNA, 499 bp, Gossypium hirsutum
  Clone ID: uC-gsflmaxxa015a08b1
ttgcttacgcgtacggtcgactccggcatccccggtatggctattgaaactgctttcccaggtccaaccgctaaaagcgccaccggagatacacgaatgtcaccgccggctaggataggttaagggcaagctcaatagctgcaacagacattatctgaagatattctttccggaacatcatcaaaaaacatactggctattgacatttaagcaagaggttctgcaacaagatttggagtttcgaactgattttgtttcgacctggaactgaaagagatatggaagatcttgaaaatccaagagaggttccagcctcgttcactctccggtcatcagaagagagggttatctctgtgctcggtgaagtagcttgcatctcaggtttacagagcactggaaaacattttctggaaaatttattgggaaaaactccctcaaactttttcggtgggttcggaaatcaaaagggattgattcaaagatcatctgttttttacat

SEQ ID NO: 56827 - DNA, 246 bp, Gossypium hirsutum
  Clone ID: uC-gsflmaxxa015c10b1
tcgatttgtcaaatattgcctagactaaccatgttgcaacctatgacatttccgatgaggtttacaagggttttgttgctttgtcagtttaagatgccccattgttttggttaagatttcaaacaagaccaggtggccttcccagcaccgtcacgcatacttctgaaactcagtgattatagcccggccttggacttaaattctcaaagaagcattttctcgctcttaaggagacaacccttgctt

SEQ ID NO: 56828 - DNA, 385 bp, Gossypium hirsutum
  Clone ID: uC-gsflmaxxa026a05b1
ttcctgtttctgattgcgacgatggtccaaatacaataatgaaagatgaggatagaaatgaccttctagaggtggtgtggtgccgagcaaatgttgtaattttcgcctgggggaagcgaattgtatgatattaaaatctataaattttgcaaaaagcctatcgaggaaattatgttggggcgttcctctgaggcttcttcactccacctggatgcatatcccttgagggcttgcagcagggaagcaacactctgagagtgaatgagtgaatgaaaaagacatttgcatattaggtagtcatattttagcatttgtcaacaatgaagaagaaaaaacctaccgcattgtgggctactggggttcaagagaatttaactttattcac

SEQ ID NO: 56829 - DNA, 260 bp, Gossypium hirsutum
  Clone ID: uC-gsflmaxxa026a10b1
tctttagcttcaatcttttttatcaatggcggcttacactaccttgcgacaaaacatccattgatggaagtcggacaccattggttcaaaatctagattcggatttctcttctgggtatcttgaagatgctttacttgaattcactgaaatgtcaaaacggagacgattgttgtcgcttcatggtgatgattatgatgatgatgatttaacaaatagcttcaaagatcttgcattgaattatttgaattctgagaattta

SEQ ID NO: 56830 - DNA, 430 bp, Gossypium hirsutum
  unsure (1)..(430): unsure at all n locations
  Clone ID: uC-gsflmaxxa026c01b1
gtgctttgatggttgagattgggaattatgattccttctatgaggctggtgttattttctccccagagcagatactaaagctaacaaaggaaacaaggggcaatcttccttctataacactatcagttacagtgcctcacacacttagcctccctgaccaggtcaagcttgcagagatgctggaaaaagaaggtgttgatgttatccaaactgaaggaggaaaatgttccactccctcaaaatctggtgtccttggtttgattgagaaggcaacaccaacattagcagcagcatattcaatatcaagggcagtgaagataccagtaatgtgttcatctggacttagtgcagttactgctccaatggcaattacagcangggcagctggtgtgggtgtgggatcaagcatgaacaagcttaatgatgtcat

SEQ ID NO: 56831 - DNA, 449 bp, Gossypium hirsutum
  unsure (1)..(449): unsure at all n locations
  Clone ID: uC-gsflmaxxa026d12b1
aagaggctgttatctcgctttatgtttatagctgacgcatactatttatggcatttgtaggaagacacaggtgggttgaatatgcaaaaaaggatagatatgatgcatctcaggtacccccagaatggcaaggttggcttcacttcataactgatcacacaggagatgagcttttgatgctaaaacctaagaggtatgggttgagcacaaggaaaacttatctggaaaggggagtgaatttatctaccattctaaaggacatgcacttaatccttgtcagagagagtggactaggtatcaatcatggcaacccacgaaacctgagtaatctttcaaaaccaatcttnttttttttccttactttgcaaacactgggtacttaactggatttttttttctttttttgatgaatgatgtcttctattccgctcaaaaaaatactttcttat

SEQ ID NO: 56832 - DNA, 507 bp, Gossypium hirsutum
  Clone ID: uC-gsflmaxxa026g02b1
tccactcgtccggcggaaagtatttgaggccctggatacacttggaagcaccaaatggagagtgaataacaaggtgcttgccgtggtagagagtatttgggctagtggtggcaacattgcaggcttggttgatcgtaatgatattcctataccagagaaaccttattcagaggattcaacagaaatccaagagtggaaatggagcgtgagaaaggcaaacaaggttaatcgtgaaagacattctcagcgatgcgacaccgaacttaagctttctgtggctcggaaaatggaaaatgaggaaggcttttattatcctcacaatcttgattttcgaggccgtgcataccccatgcatccacatttgaatcatctaagttctgatctctgtcgaggagttcttgaatttgctgaggacgaccattgggagatcaggattcattggctgaaatacatttacaaacctgtactcagagtgttgaaagctttccatgacggcgttgcatttgt

SEQ ID NO: 56833 - DNA, 399 bp, Gossypium hirsutum
  Clone ID: uC-gsflmaxxa026h03b1
tccacgcgtccgcccacgcgtccgctgaaatagagatacctgaaagttacattgattcactccccaggaacggaagagcgagcctcggtgattcgatctataaaggcattacggtggaccactttgatccatcacaattcctttcgactatggacttgtcgacggaacacaaagttcttgaccttaagaataggattgaggcttccattgtcatttggaagaggaagatgcaccaaaaagacggtaggtcttcttggggttcaggtgttagcttggaaaaagggaactcttcgaagaagggcggaaactattttaattctgttaaagcaacgttattccggactttcacaatcttcactcgatatatcttagttacaagaaatagggatgtaggacacg

SEQ ID NO: 56834 - DNA, 308 bp, Gossypium hirsutum
  Clone ID: uC-gsflmaxxa027b02b1
catgaatcgtacaactgcaagcgcgcttggatcaattccaaaaacatttaaaggagtacaatgttttagtatcttcaggcaattgataaaccggttaatgaagctggtgaaacccattgatatactgtggagttcagcctgggtgtggacttagacctgcctttgatttgattgtttcttctttgatgctatggctttcttcctccatttttgatgcttcaggttagtttactgttgtgactccatattataaatatatgcattgctcctcccttcgttataaataaaatgtgtgaaatttattcagc

SEQ ID NO: 56835 - DNA, 459 bp, Gossypium hirsutum
  Clone ID: uC-gsflmaxxa027b10b1
tcgggtttctcagcttcatggtgcaccgaagtctcgtgctcccctgatgaagttgagtccaaatccaatggcttagattcgtccaaggccaagaaccaaactgtggagattactcggtcaccacttgtgaggacctccagagggcgagttcaggtacttccttcgcggatcaatgattctgtaattgagaattggaagaaagaaggtaaaactagcttgcctgatgatagtttagatgatggtgatgatgacgacgattatgattttgaatgtaaaaacgataaatttagctttaagaaacctaaagtttgtaagcagaacatgaaaaatcggcgagctgaaaagaagaatggttataaagggagaaagtatactacattgtgtgaggaagatggaagagaaacaaagtttgcttggactttttgatattaaaaagtactcaagttcccggagtacttt

SEQ ID NO: 56836 - DNA, 476 bp, Gossypium hirsutum
  Clone ID: uC-gsflmaxxa027d06b1
ttcactcttccgatccaaaatagtaatactctcatattttcaacaatggctacccctatctcactctcactctcatcactagcttctaaatcccagcaactggtgaggaatgagcgtcggatgttggccgcatccgacgatggtgcaatgatgaagcaaattcagtcgactcatgcccccgatggtcgtgttgttgatgttaaaccaattctccaagtcattgacaatgtgttgcatcatatcattcccaacattgatcatgctatgaaatggtggaacgggacacatcgatgctctcgatgatcggaccaactcgtctgccgttgatggtgcacttgatgctttggcttatatcgcacacaaaatctgctgcgaggtatcatgcaagtgttcaggaggaggggatgctcatgcacaacaatggggattctcaacatgctttcaagctatttcgtgggatgcaaagtggtgcttac

SEQ ID NO: 56837 - DNA, 553 bp, Gossypium hirsutum
  Clone ID: uC-gsflmaxxa027d08b1
ggaggatgtctgcctagttggagattttacaggaaactggaaagaaccaataaaggcaacccataaaggtggagctagatgtgaagttgaaatcagacttccccaaggaaaatattactacaagtatattattaatgggaactggcggcattcaacgtcttcaccaacagaaagggatgaaagagggaacattaacaatgtgattatgattggtgacactgcaagtgtgaggcccacaattcaaccacaacagaaggatgccaatcttataaaggtgatagagaggcctttgacggagaatgaaagattcatgctggccaaggcagctcgttgcattgcattctctgtctgtccaatcagactagtccccaagtagtttttgtcactgcaattccaccaagtggaatgtgctttggtctcttcttgaatctcaaatacatttagcacattcaattccctgtgcaaaataatttttgcccttcggtatgaagtgatctgccaatgtaattcttacggctgaattttttttgaatacatttaattggtctctttg

SEQ ID NO: 56838 - DNA, 539 bp, Gossypium hirsutum
  Clone ID: uC-gsflmaxxa027e03b1
gtcgactggtatgcggcaattaataaaccagctgctgttgttcattggctcaaccatgtaaacgttgatgctgagtacatagttatccttgatgccgacatgatcttaagaggcccaattacaccatgggagttcaaagcagcacgtggccgaccagtttcaaccccgtatgaataccttattggttgtgacaatgagcttgctaaacttcatactcgccatcctgaggcttgtgacaaagttggtggtgtcattatcatgcatattgatgatcttcgggaatttgcactgctatggttgcttaaaaccgaggaggtccgagctgacaaagctcattatgcaacaaacatcactggagatatatatgaatttgttggaacagtgaaatgtacggttactcgtttggtgcagcagaattgaaattacggcatcttataagcaatgagatattaatatatcccggatttgtttccaaacctgatgtcaagtacagagttttcactactgcttgtaatttaaagtcgggaactgagctttat

SEQ ID NO: 56839 - DNA, 429 bp, Gossypium hirsutum
  Clone ID: uC-gsflmaxxa027f09b1
tctgaagaagaggaacagcgattagaccgagttgactcactccacgagccggacctgacttcaaccagctcaagcctgtcctcggtattcagtgcggttgattctaggagtgcgacgagttccggcgatatatccggaacgagcgggagttccggcgagatcttaacggcggatgctgtggttccgaggctgctcgagcctgcgcctgcatgtgaggagttgaaggtgacggtaacggcgaggcagaaatgtgttgggaggaataacaagggagtgacgtgggggttcacttcggtgatcgggagacagcgagagatggaagaagccgtcgccgttgtaccggcgttcatgtctttcacgtgtggtcaacgtggaagttgtaccgctcctggttctgaaccctccctgggaactccctattcatttttt

SEQ ID NO: 56840 - DNA, 394 bp, Gossypium hirsutum
  Clone ID: uC-gsflmaxxa027g11b1
tcgtgtcgcgtgggcggacgcgtggggggaaagtcttgaattcgattcatgctcgaaaaagtggatcgattgggaaatggtttcaacaccacaaggaattaggcaccaacacagtgaagaagaaagatatgatacgtgcggaaaatgctcgggtgcactctgctgattcggttgctggactagctgcaggtttggcagctttagccgcagctggaaagtccaatgggacaaccacaggctcaaagatgagcacgtgattggcatttgcaactcaacttttggcatcacattgcattgaattagctgaactagccggtgcttgatatgatcgtgttggttctgttgttaaatcagccgttgatattcaaactgctggtgatctgatgactttcac

SEQ ID NO: 56841 - DNA, 416 bp, Gossypium hirsutum
  Clone ID: uC-gsflmaxxa027h09b1
tcgctcacgcgtccgacccgcacaggcaacaccaccactcgcgctcgttctctgcgcgtgcaatatctttgccttctcttccttttcgggcaccttctcccgccccaccgatcctgctctggttcacccgattcctgacccgagttatcgcttccggtcccgccttcaagttctcgacgggtcaaaccaaaacctataaacaaaactattaaatgagatgagttttgcaactgattccccagtacactcgtctagcagtgacgattttgctgcattaattgatgcggagcttgaagctggttcttcaggctcatcgccagatgaaccaagacaatgaagaggaagaagtcgatgctgatagtgatgatgaccaccgcgaccaataaaaggatgacacgtatgatgaccctaacgat

SEQ ID NO: 56842 - DNA, 583 bp, Gossypium hirsutum
  Clone ID: uC-gsflmaxxa028b06b1
gtcgttatgttcgaacacgtgaagctggtatccaggacattcaccataaaattagacctgaagaagttgagcttgttcgacgtgattatactgcaaatgaaggttgggaaacatttttgtcgtatgaagatacgcgccaggatattcttgttgggttgttgcggctgcgaaaatgtggccggaacactacttgccctgaactaatggggaaatgttctattgtccgtgaacttcacgtgtatggaactgctgttccggttcatggcagggatgctgacaaactccaacaccagggttatggtacactcttgatggaagaagcagagcggattgcgagcagagagcatagatcaacaaaaatagctgttatatctggggtaggaacccggcattactataggaagttaggctatgagcttgaagggccttacatggtgaaatatcttgtttaacgaggctagttttgtgattaaagaattagtgtaaaattcttgcgacatatataaatcatcaatttgtttgcctgcaggaagccatatttgtatgctctatttcaattttttttaagatgttggagattgat

SEQ ID NO: 56843 - DNA, 492 bp, Gossypium hirsutum
  Clone ID: uC-gsflmaxxa028c07b1
tcgttcacgcgtccgcccacgcgtccgtctttacattcctatttcattttggaattccattatccactttgttttctttttcttaattcaattgagcattagattattttgtcttctttttacaaaatttgtctaattctctttgcaatttttcctatccatttccactacctttttcatataatttctatcattttcataaccttcaagcatgattaaattcatgccacactaaacccctttcaggtttaagccgatgttaaccccgtcaaaatacccgtgagttatgaacccgagctatttaactcccaactttcgatatttattatttctccggattaagagtatgacttcgtcaactcacaaagtcaagtcaatactaagtcaaaaaagacgtcgtttgagttagtgtggctagacgtacagttggaattccgaaaggatcgattgtctaattggtcttccgtgaacacattggcgtgccaagtgggg

SEQ ID NO: 56844 - DNA, 532 bp, Gossypium hirsutum
  Clone ID: uC-gsflmaxxa028d03b1
ttcatttttctcacacccgacgccaagtcaatggctctctcaaaactcgaacaacaatcacccacacaagaaccgccgtcgccatcccactgctacactgctttaccaacccaatcttctgatgaaaactacgccgttttgcccttctactcccccgggggacgactccgctggtgcggttgccggatgctatacaccggcacggcttccttcttcttgttagctaccttggtgtacattttctggccctccgaccccgacgttaagatcgtacggatgcatgtgaaccgcatgaaaatccacaccgtacccatcatagcgttggatatgtctttattgattacgttgaaagtgaggaattcggacgtctactccatggacattaccagtttggacgttgccgtcgggtacagagggaagatgcttggacacgtgacgttcgagcaaggtcacctgaaggcgttggggtcgtcttatgtggaggcggtgctccagctaatggggttgagttgttgtcgacgttgtgtatttg

SEQ ID NO: 56845 - DNA, 527 bp, Gossypium hirsutum
  Clone ID: uC-gsflmaxxa028e11b1
tctttacgcgtggggtagtttttcacgaaaataaaaagtgatcccgtcggtgaaacagagttaatctcagagttgaaaaatgcaagatgaataaaataggtaatcgttattcagctttcatgtgcaacgaaatgaagaaacaagattatccaaagaatcttcaaagtcgaaatgatgcagtaggaggtgatctttggacagatggacttatttgtgcttttgaatatgttaaaggccaaggtaaaagaggtcagccaaaatcaggtgcaaaggtcttgtctgcacaatatagtttgaaagaagcttctagaagacggatctatgctaatgaacccgaaaatgttaatttctaacaatttagctaaatcttcacccttgaaagactccgtagtcacagttaaagatgcattatatgtaacccaagatctcaatcccggggaagagtttccaagagcttattgtgaaccaattggttgtacagagtttatcaactagtccagatgctacaagctgatgatggatggggc

SEQ ID NO: 56846 - DNA, 430 bp, Gossypium hirsutum
  Clone ID: uC-gsflmaxxa028e12b1
tcttttattctccccgcaactaaaagcacgatcccatcttttccttacagagcagcaccctttgtttctctctcacgttgttcttagtgattgtgtgaatgtgcgactgagtgtatatataccattgctgcttttgtcgattcccgaacaccactcgcctgattcaaccgcagtccaatatcccgtgtattacgccccccttgtcaaaagcaaaaaaggaaaaaaagaaattcgtgttgttgggttcgatccttttgcctttgataaattgtgaaagactgagagaaaaaggaaaatgtcgatctctgtgtaacggctacttttggcggtgttgttgaagaagtaaagactgagaaaaaaagggggaaataaaaggtgtggtttggatcagttttgaaaggtaagctgaggaaatggattacaacaatga

SEQ ID NO: 56847 - DNA, 422 bp, Gossypium hirsutum
  Clone ID: uC-gsflmaxxa038a06b1
cttcattactctctcttcaaaatgcctcctacatatttgcctcttcgttgggaaagcactggggatcaatggtggtatgcatctcccatagattgggcggcagctaatggccactatgatttggtccgagagcttcttaggatagatggcaatcacctcatcaagctgacctctttgaggaggatccgccgccttgaaacggtatgggatgatgaggaacaatttgatgacgttgctaaatgtcgttcccaagttgctaggaaactttttcttgaatgtgaatcaaagaaatcaaagaattcccttatcagagctggctatggtggatggcttatatacacggctgcctcagcaggagacttgggttttgttcaacaactgcttcaaagaaacccactactggttttttgaagaaagggagt

SEQ ID NO: 56848 - DNA, 555 bp, Gossypium hirsutum
  unsure (1)..(555): unsure at all n locations
  Clone ID: uC-gsflmaxxa038f11b1
tgtagaagcttgggcggagtaaaaatgagaatattgtggcgcagtctcaaaatgcatctggactggttggtttattggaaacgatgcgtgtccagatggagatttctgaggcaatggacattaggacaagacaaggattgcttaatgccctttctgggaaagttggaaaaaggatggacacactactgattcccctggaattattgtgttgtatttcacgaacagaattttctgacaagaaagcatatataaggtggcaaaaaaggcagttgaacatgttggcagagggtcttgttaatcaccccgctgttggatttggggaatctggacgcaaaaccagtgagtttaggattcttttggcaaaggttgaggaatctgaggcttttccaccttctactggtgaagtccaaaggacagaaagtttgaaatctctaagagatattgcccttcctcttgctgagagggccgcccgaggtgacttaactggagaagtatgccactgggcagatggttatcatctgaatgtcngaccttatgagaaattgcttgtcagcg

SEQ ID NO: 56849 - DNA, 488 bp, Gossypium hirsutum
  unsure (1)..(488): unsure at all n locations
  Clone ID: uC-gsflmaxxa038h02b1
tttttctttgccttttgtttttagatctcccaactgcttatacccttaagtgtcccaacggtcgcttttccatcgatcttcccacactttccctttttgattagtattcaatcccctgcacattccaaaccatcaaccgcctctctccctcctaccatgtcccaaaatcacttccttcctctctttctctatctcattttcgtgtcgctgccgcgttctttggcccagcacggcggcggaacggtggtcacggagctttggtgtgtcgcaaagaacaacgccgaggacgcggcgctgcagggagcgctggactgggcttgcggtcctggcggaacggactgcagccggatccagcaaggcggaccctgttacgacccctctgatgtccagaaaacggcgtcttatgccttcaatgactactactngaagcacggcatgactgacgatgcttgctccttctncacaatgctgctctcactctttagacc

SEQ ID NO: 56850 - DNA, 421 bp, Gossypium hirsutum
  Clone ID: uC-gsflmaxxa038h11b1
ttctcttcaccaccatctcttactacaatggcgtttactttcatcttctgtttcattcctccattcttattcatttttctattccattctcttcttcttcatttcttcaaacccaatcgccccaaattacctctccctcctggaactatgggttggccttacatcggtgaaacctttcacctttactcccagaaccccaatgtcttctttgcttccaagcagaaaaggtatggctccatattcaagacccacatactaggttgtccatgcgtgatgatttccagccctgatgctgcgaaattcgtgctcgttaccaaatctcatcttttcaagccaacattccctgcaagtaaagagaggatgttaggcaaacaagccatcttctttaaccagggaccctaccatgccaagttgaggaagc

SEQ ID NO: 56851 - DNA, 270 bp, Gossypium hirsutum
  Clone ID: uC-gsflmaxxa039f07b1
tttttacgcgtgggcgcaagcgctctggtgtccttctttatggtcctccaggaacagggaaaactttgttggcaaaagctgtggcaactgagtgttccttaaatttccttagtgtaaaagggcctgaactaattaacatgtacataggagagtcagagaagaatgttcgagacattttccagaaggccagatcagcacggccatgtgtcatcttctttgatgaactccattcgtttgctcctgctcgaggtgttctggagaatcttgggg

SEQ ID NO: 56852 - DNA, 335 bp, Gossypium hirsutum
  Clone ID: uC-gsflmaxxa039g09b1
tttacgcgtccgtgagaagcaaacaaggcatatacttgataccattgttgaaactttatcaaaggatagtcgacggaagttcatatgggaagagatgtcttatttggaaaggtggtggagagatgcctcagatgataaaagggagtctttcacaaatttggtgaggaatggtcagttagaaatagtaggaggtggctgggtgatgaatgatgaggcaaattcacattactttgctataatcgagcagataactgagggaaatatgtggctgaatgacacgatcggttttattccaaagaattcttgggcaatagatccctttggttactcaccta

SEQ ID NO: 56853 - DNA, 432 bp, Gossypium hirsutum
  Clone ID: uC-gsflmaxxa039h10b1
ttttgattttggctatattcacaattcaaagagattgggaaaaggaggctgaaaaggctaagcagagagttaaaaggtgggcgaaatgatcaaaccacggcaacccacaatcaagggatctactaattggacaatgaattttgcacattttgggacaccttaaactttcactcccaataaaaacctgttaattgtttcaaaataatgttcaatgttttccatccctgtttaaatatcataagcaaaaatgtagtgttcacctgttttctaactccaaacactttgatttttcgccattgatgccagcaacttcaaccattgattcagccaactatggcgtatctgccattggacttgtttttgattgggtttgaaaattctcttggatttattggaccaaattattacaattgggctcttctactttgcaaa

SEQ ID NO: 56854 - DNA, 434 bp, Gossypium hirsutum
  Clone ID: uC-gsflmaxxa040b03b1
ttagaatgcaaattcgaaaccttaccaacgacatgggaatggagaacaggcctagacatgacccgaaccaggattcatattgaccggatgaaccagagctcgacctttacaccataccgagctacttctgttggcgtgttcggaacgagatgcacgaaacagaaaggcatgcattgacagaatggttggaaggcagctgaatctcaagaacccctaaaatctacaaggagtacagggatttcatcatcaacaaatacagggaagacccttctcgccgcctcactttcaccgaaatccgcaaatccctcatcggagacgtcactttactccacaaggtcttccgcttcttggaaactggggttttgatcaactttcttgccccgtcttcaccccacgaagggttcgagaacgatgatagggtttgggtcgaaaac

SEQ ID NO: 56855 - DNA, 274 bp, Gossypium hirsutum
  unsure (1)..(274): unsure at all n locations
  Clone ID: uC-gsflmaxxa040b07b1
atttatttatttttctctcaaataataacaaaattaatttttatttataattatcaaaaaataaataaaaatctctttctttgcttttctcaagatagctgctgctttattgctgaagttgaacgctatatataaaaattcaaaaaaaaacatttgtttgtttgtgttctttaaagttttcgtttgatttcgtgattgcggatttttagtcattgttgcgatggggaaagtagcggtgggtgcggcggccgtgtgtgccgcggncgtgtgtgcc

SEQ ID NO: 56856 - DNA, 207 bp, Gossypium hirsutum
  Clone ID: uC-gsflmaxxa040c01b1
tagcttctttcattcctagcccccgctggcaaggtccttcaagttatgcacctctgattttaccccaagggatggtatcagttccagggtggaatgcttacagcgcatcagtctcttctttagagaacctgcagcagacaaacggaaataattaaatctatggaacctcaaaccagaatgaatcggtgactggaggatattaagctt

SEQ ID NO: 56857 - DNA, 213 bp, Gossypium hirsutum
  Clone ID: uC-gsflmaxxa040c04b1
tctcacgcgtccgggcaacttcgcatggatggttggcctactctgtcaattcatggagataaaagtcaagcagaaagggattgggtcctttcagagtttaaagctggcaagagccctataatgactgcaacagatgttgcagctcgtggtttagatgtgaaagatgtgaagtatgtaatcaattatgactttcccgggatctctctaggatta

SEQ ID NO: 56858 - DNA, 532 bp, Gossypium hirsutum
  Clone ID: uC-gsflmaxxa040e07b1
taaggtgttgatgtgcttgtagtcatggtcacaaatgaagctcaagctgagagtgttttatttggggatctggctgcagtttcagcccttccatctggagcatctataattctttcttccacagtctcccctgcatatgtgatccaacttgaacggcgtttacagaatgaaggcaaagatttgaaattggttgatgctcctgtttctggtggtgttaaaagagcttctatgggagaacttacaataatggctgcaggttcagatgatgctctcaaaagtgcaggtcttatcctctcagcattaagtgagaagctctatgttatcaaagggggttgtggagcaggaagtggtgtaaagatggttaatcaattacttgctggagttcatatagcagcatcagctgaggcaatggcttttggggcccgattatgtcttagcacaagaatattgttcgatatcatcagcaatagtggggcaacatcctgcatgtttgagaatcgggtttcacacatgttagacaatgactataccc

SEQ ID NO: 56859 - DNA, 492 bp, Gossypium hirsutum
  Clone ID: uC-gsflmaxxa041b12b1
tataaatcttaaaatagaaaaagatacagaggctttgcagttgttctacgaccataagggattaacaataaaggtttcattggcgctggtacctgaggagatagagagtttggttcaacgtctgagggaaaactctgatgtctttgtgtggtctgtgatggatattccaagggtagatccttaggtaattgtctatagactgaatgtgctccccgagatgaggccaattaagcaaaggaagagaaggttcactccctaggttgtagaagcagtgaggcaaggttcatcaaagaaattgagtatccaaactagatttcgaatgttttcatggtaaagaaagctagttgcaaatggagaatatgtattgattttaccaacctcaataaggcataccctaaggacagcttccctttgccatcaattgatcacttaatggatgagtctttagggtacaaattcatgagcttcatagatgctttttcatgttatgat

SEQ ID NO: 56860 - DNA, 490 bp, Gossypium hirsutum
  Clone ID: uC-gsflmaxxa041d09b1
ttcattcaaaaaaactctcttcattcttcttgctttattctctttagttttctgtttgtttcagcttcaagccacgacacttgctgctcaagcaattggctgaaacttcttgttagttgctctcagctccaacaaaatagaaccgaatttcttttccagtctacttcacccacacattacgatttctctaagcacagtatgcatgagtgtccaaatttttcgatttttcacatggatataatgagcttcatgaaatggctttcatagtccaagtgaacgagggtaccagagcaacctgcgacgacaatgaaaaacagttacggagaaacaacaccgatgaccagaactacgtatcctggcacataccctaatcagatgagagtggtggatgaagtcattagagaaatgcacatccctacatatttgttggacataaccatgctgtttgagcttaagaaagatgggcacccttcaatttacagtggtgact

SEQ ID NO: 56861 - DNA, 440 bp, Gossypium hirsutum
  Clone ID: uC-gsflmaxxa041h03b1
cttatttttccgcccacgcgtccgaaaggccttctcatcatcataatttcaaggctggagccctcaacgtccttcttcgagtctcagcgataataagcaattctccatatattctaatgcttgactgcgacatgtactgcaatgacccaacttcagttaggcaagcaatgtgttattattgcgatccccaaacaccttcttctatagcatttgtgcaattccctcaaacatttcgaaatatatgtcaagatgacatctacgacagccaaattcgacatttattcaagatactttggcacggttttgatggcgtcggaggaccaacgatatcaggttcgaacttatatataaagagggaggctttattgggtagtttcagcaagcaacaagaactcatggcacttaagagatcatttggtccatcccatgatttcattaaa

SEQ ID NO: 56862 - DNA, 457 bp, Gossypium hirsutum
  Clone ID: uC-gsflmaxxa042a08b1
tcgttcacgcgtccgcccacgcgtccgaaagcaaggaaagcttctctgcaaacaccttaattttacaactttgttattgctttgcaaagatgggttcacttgaaaccagtaaaccccacattgtaatcgtcccatttccagcacaaggtcatgttaaccccatgatgctacttgctaagctcttacactctagaggcttcttcataacctttgttaacactgagttcaaccataggcgtttggtcaggtccaaaggccctgactttgttaaaggtctgcctgatttccagttcgaaacaattccggaagggctgacatcgtccgatcgaaatgcaacacaggatcttccagttctgtgtgattcgatacgaaagcattgcttggcaccattcgtagatctactagctaagttaaactcctcgcccaagtgcccactgttacttgcataatctctgat

SEQ ID NO: 56863 - DNA, 343 bp, Gossypium hirsutum
  Clone ID: uC-gsflmaxxa042a11b1
tttctcaaaaccatgcaaagctacctacttgaagtctcacagcccaattgctgagaagaatgctcgggatgctgttcatgaggacaaatcagctaggggagttcgatcccctcgggtccccatgaacaaatccgatggtacatttgaaccacctaggctctccaaggacaaatccgatactgcatttcagtcgcccaggctctccaaggacaaaccagatactgcatttcaatcacccaggctctcgaggggcaaaccgaatactgacgttcaatcccctaagctccctgagatagggaaagagctgatatgcgtatcaaatcaagttagcagctcaaatgac

SEQ ID NO: 56864 - DNA, 399 bp, Gossypium hirsutum
  Clone ID: uC-gsflmaxxa042c09b1
tcgtcacgcgtccgcctttctcaaaaagaaaaaagagccagaacttggacatgaatttcttctgctaactggttactgccatttttttacgttaaatcctgcgatctttgatggcggtctcatcttcagcttcttcctctctcttaagagcagcgtctttatactctcgaactcggttctttcattcttcgtttcggaatctcagtccaagctctccttcgcttctcgatcaccaacgatctcttgcctccgccgccgttcgttccttccattgctctgttccgcgatggagccaccgactccattggagatctccttttagccttcgtgctcagatcagagctgttaatcctgtcatcgaacggctcgagggaagttttccactatggctgctgaaca

SEQ ID NO: 56865 - DNA, 442 bp, Gossypium hirsutum
  Clone ID: uC-gsflmaxxa042e08b1
ttccacgcgtccgtgttgtttttgaaatccaattgcaaatggccatcttcaagtctcttttgacttccctgcttctttctctgttttttcttcgctttgctgagtcgtccgatccactggtgatcgagaacatggtggaggagaactctttcaatgataagaaaatatattgcggtaggcttgtgctgagagatgcaagttatcgtcaaggcctaacctttgcaagagagcatgtgggacatgttgttctcgttgcaactgtgttcctccgggcacctacgataactatgatgtgtgtccttgctaccgtgacatgaccacccatggcggcagacacaaatgcccatagcctaaaactccacttcatcagcctgtcgtgcgtcaaactcgtagtaaattatacaataagaatgtgatgatgatcataataacgaatcacaat

SEQ ID NO: 56866 - DNA, 496 bp, Gossypium hirsutum
  unsure (1)..(496): unsure at all n locations
  Clone ID: uC-gsflmaxxa042h04b1
tttcttttctcttctcttcccttttgttctttttttttctcctgagtttactggctctctctgtcaatggacaaggacaagcaccagcaacagctgtctttggcaaagagttccaggcaaagttgcaatgaatggatttttagggatgttccaagtgatatcacaatagaagtaaatggagggacaattgctctacacaagtttcctcttgtctctcgaagtgggcgaatccggaagctagttgaggaacatagggactcagatatctcaagggtggagctcatgaatctacctggtggtgccgagtcatttgagttggcagcaaaattctgttatggcattaactntgagattacacccttaaatgtggctcagctctgttgtgtttcggattacctcgaaatgacagaagaattttcaaaggataatctttacttacatgctgaacaatatcttgaaagcattgtttataagaacctggagatgtgtgttgaag

SEQ ID NO: 56867 - DNA, 458 bp, Gossypium hirsutum
  unsure (1)..(458): unsure at all n locations
  Clone ID: uC-gsflmaxxa043d03b1
tttaatccccccacccccttttactgcattttctttgcaaccaaccaaaggataagctaagaaacaagagttcaggagggaagaatagggcaccttaaagattgaatcttttcgagatttttgattttgggtctttttattttttaagcaaatggctagtggtggtggaaataataggaatgggactcataggaactctctcaaaggaacgacaacaacatcaacagcatcaacagataagccactctctgtgaattccaacccttcaaagcctgcattcaaaaacaagtcttcgcctttgaccggtgcttcttccgggttaaggaagagtagccccggatcacttggaggtggagctgccaaagatgatgctggagttcctggaagagttcgagtggctgtgagattacgtccacgtaatgcagaagagtcagtagcagatgctgattntgctgatt

SEQ ID NO: 56868 - DNA, 431 bp, Gossypium hirsutum
  Clone ID: uC-gsflmaxxa043g08b1
ttcttattcacaatttacccccaaataatgttgaagccacatgtttaccatcctcacaccaccaccaaaaccctagcctcgccattgcataagccattttcccacggcactgccctcgcatttcttcctttcaacgcctgttcttcattgggcaagacagcgaaaccttttaaagccagggttgttccgaacaaaatcaaagctgcggtagacgttaacttgaccgatgatggtatcctaactgactacactgtgaaaggtgtgatcacagttaaacaaactgtaggtggtttcctctccaacttagggttaagtagagggatagatgatatccaagacttgctcggcaaatcaatcctcttggagcttgtcagtctcgagctggaccccaaaacggggcaagagaaggagacgatcaaagcgtatgcaca

SEQ ID NO: 56869 - DNA, 191 bp, Gossypium hirsutum
  Clone ID: uC-gsflmaxxa043h07b1
tttgaatgaatatgcatataatatacatggggttggggtttgggttcgctatgtagatccagatgcggaagtggtttctttgtcgcctaaaacgctgctagaatcggaccgatacgtgtgtgagatctgcaatcaaggattccagggagaccaaaacctacagatgcacaagaggcggcacaagggttcat

SEQ ID NO: 56870 - DNA, 482 bp, Gossypium hirsutum
  Clone ID: uC-gsflmaxxa045b03b1
tgtggtggtagctatggggttgctggttggagcgtttcttatggtggctattaaaaaggtgttggtccttggagctgtcggttcggtggtggtgccaatggggctgggattagcttggaattgcatttggggaaggaaaggcttgctggggttcattaggaaatacccagattctgagcttaaaggagctgttgatggccaatatgtgaaggttactgggattgtcacctgtggccgcattcctttggagtaatcttaccaaaaggtggctagatgtgtttatgtgtccacagaattgtacgagtataaaggatggggcgggaaaagttctgaaccctaaacatcgttgcttctcttggggaggtagttattgtgagagttacgttgctgatttctacatatcggatttccaatccggattaagagcattagtgagagcacgttatggcgctaaggttgctccatttgtcgaaccagtcacc

SEQ ID NO: 56871 - DNA, 461 bp, Gossypium hirsutum
  Clone ID: uC-gsflmaxxa045d11b1
tcgttatcactttacataccattaccacacctcttttttcttacataacatatctgttccattcggtagtaggttgaagaagaaatggcccttcttacagcttcagacactttcgttctttatttcctatgtttcatgttgtgttcatttggtatcagcaatggtggaataactggtaactttgtaagaaaaaagtattcacctgatatgccccttgacagtgatgttttccaggttccttctggttacaatgcaccccaacaggtgcatattacacaaggggatatggatggtagtggcagtgatcatctcatggataacccctgatgaacctggttccaacatggtttactattggcctgaaaatagtaaccataagaacaaagctgaagggatttttgtgagatacaagttcttcaattacacctctggttatattcatcactgcaccatcaacaact

SEQ ID NO: 56872 - DNA, 485 bp, Gossypium hirsutum
  Clone ID: uC-gsflmaxxa047a10b1
atatttacactgtctcagtttgtagctgttgaagggaatctttcttttttttctttggttcctttctgtttcagagaagattcatggcggcaaccccagatcgtaaccctgaagagcaacaagctgatccagaaaacgtgaaggagcagcctcttccaacaaaaagtatgacgttggtttctcctaattcctctcaagatgctgccccagtagctcatcgcagggatggcgctggtcaatctggatcatttgcttcagctggagaccgtaacgtctactcgcctacaatctatgcacctcagcctcaggctttctattacagaggttatgacaactctgctggtgaatgggatgaatatccaccgtatgtcaatgctgatggactagaaacttggatctctgggtgtcttcaatgataatccatcacttgtcttccaccctggatatggctacaattcacaaatgcccgatgggccatattcccc

SEQ ID NO: 56873 - DNA, 392 bp, Gossypium hirsutum
  Clone ID: uC-gsflmaxxa047g08b1
atgcagggataaatagtactgaacctgggggatccttatgatggggctatcggccatcttgggttctcgaaggcggaacaaaggcttgccgagtgcaagaacagtgaaacctatgaaggtagccacagtcgatatgaagaaaccccaataccatttgtgcttttcagtggtcagatacacgatccccgtcactccgacacaggctccgagtgtagtactgagcaatagccagttgaaataccttgctagagctttggcttccttggggtctttatgatcaaattggtcaccaccaagtgctggaagagctcccttgaccccaccggcccccaatgccaacaaccccagtgaaaagtagaacatcaccgccttgctaccgtctatgcagctgg

SEQ ID NO: 56874 - DNA, 468 bp, Gossypium hirsutum
  unsure (1)..(468): unsure at all n locations
  Clone ID: uC-gsflmaxxa047h09b1
ctttgtttcaacatcaaatccctaaactttttctttgtctctccatgaatttatatatatatgcatataacaaatgattcattgatttgggatcggttactgctctaaagaacaccagaaaatttatcaagagtggttcaacttcgttgattcagataatgatggacgcattactggaaatgatgcaatcaagtttattggtatgtcaaatttattgccaccagatctcaagcaggtgtggacaactgctgattctaagagacagggatttcttggtttcaaagaatttgtttttgctatgcagctggtttcgctggtgcaagaaggtcatcaaatatcacatgatctcctgaatggtgatggttttatgatttagcatgtccctctttctaaattgcatggtttgaatgtttatttcattcttaaaaattttgaggtgtatttatttatttaagaactgnttttttg

SEQ ID NO: 56875 - DNA, 518 bp, Gossypium hirsutum
  Clone ID: uC-gsflmaxxa048a08b1
ttttcttccaatcatatacaaaaagactctccaatggcttctactatgcctctccccttcttcggcggcacttgcactaaggctgcattctctttctcactcagatcatcttctcctgcggttccgtttgagcgtctccagctttttcgatctacttgcagaacaacaacaaggattcgatcttccttgtttcactcaatgaaagctaaagcaacggccgatctagatcaagataaggaatcaggtgtagttgccaccgggaagccggtggtggagcattcccgtacctacattgaagctcgctccgagcaagaactcctatctgtacttaggacggaagcagatgccggaaggctacctccaattgttgcagcagggatggaagaagtgtatcacaattacataaacgcagttttccaaaggggagatcctgcagctgttggggttgtatccgtaaacattactgttgcatttgaccattgatttttggatgcgaagatccttttgaattgaaccct

SEQ ID NO: 56876 - DNA, 518 bp, Gossypium hirsutum
  Clone ID: uC-gsflmaxxa048h01b1
ttgacgcgtgggtaactgacgtgggtcttgggaggacagatttaggcaatctcttatggaatctcttgctattatcttatgctgccaatttcaagatgaaaaccatgcagagacaatttctgaaaatgctgaattctggtttccttcctgatttgactactttcaatataagagcattagccttctcaagaatgtctatgttctgggatctccatctcagccttgaacacatgaaacacgaaagcattgttcccgatttggcaacttatggatgtgtagtagatgcatacttggacagaaggcttggaagaaatttagatttcattttgagcaatatgaatgctgatgaatctccaataatactaacagatccacttgtgtttgaggctttgggtaaaggggatttccagtcaagttcagaagcctttatggagttaaagagtcaaaagaaatggacttataggcagctaattgcagtttatctcaaaaatacagttccgagggatcaaatcttttgg

SEQ ID NO: 56877 - DNA, 334 bp, Gossypium hirsutum
  Clone ID: uC-gsflmaxxa049d02b1
caattatgctttagcctgagtacttatcttttctttttgggcactaagaaatcccttaggctgcaggtttcagatgactctcctgaataccattctgctgttagcctgcagcagccgacacttaatttactttgttcgcttctgaatggtgtcataaattccctagaaagagcagctgatgaaaaatcattacttctgaataagattcgagacataaatgaactatcatgacaggaggtggatgaagacataaatatgtggattacgcaagatttgggttcggggtctgacgacctacaaatgaggcgaggtataccactggtctgaacgtgcc

SEQ ID NO: 56878 - DNA, 284 bp, Gossypium hirsutum
  Clone ID: uC-gsflmaxxa049h06b1
accaaaaaaacagagctctcaaaatctcaccaaactagtatttccaaaaactcgccattcttggtttaactagctatagctaagctatatcctatatcccttatttgatatatatatattagttttgccttctttttatttggcatcctctttttaaataattttttatggttcattcttaagcttaggcattttcctaccctactccctgcctcctaattttgtaagttatgtaacatccatgtacattttgctacttcatagatgaaaaagccattgtgcat

SEQ ID NO: 56879 - DNA, 242 bp, Gossypium hirsutum
  Clone ID: uC-gsflmaxxa051f07b1
tcgtccccgtccaaaatagacgaacaggaacaagctgaataaaggcgcgagagagagagttgatactcagctcacctcccctcttccacaattaggtgaggaccagggaggccggaaaccccaacggtaaaccttttaccgcgccacacgattctttcgcgaagcgctctctcagacgttttcactcctgcccccgcaagcaaagaggttttaagatcccatttctatcatgttattgttaa

SEQ ID NO: 56880 - DNA, 275 bp, Gossypium hirsutum
  Clone ID: uC-gsflmaxxa052g03b1
cccacgcgtccgggtatttaaagttataggttcaaaaatgaagttcctacagttttcaatgttactgctccctattcttttggatgctcttttgtcgttttcaatgggggcatcgactcatcaagattttcttcaatgcctttcccttcgatcaaatgattctacttccatttccaaagtgatttacacacgaaataattcttcttattcatttgttctggaatctacgatacgaaatcttaggtttaattcgacggataccccaaagactttgc

SEQ ID NO: 56881 - DNA, 417 bp, Gossypium hirsutum
  Clone ID: uC-gsflmaxxa054a11b1
tcgctttctgtctgttgtccgttccttttctaggcccgcttccaggcaaaaactgcgttaatctggttccctctgccgtttcctctccaacgctcgtcggacgaactcaggcaacccttcctcaagtcaccactgaatcgacccccagttgcaaccccaacattactgcctgcaggcacgggcctccactgcaaacaaggtaggaaccccttaatgtaaaaccatcttcaaggccagaatctcgcccgaaacgtttctggtcacgacaccttttccagatctgatttgaatcagattgaaagctgcatcgaagttaaccttcacctctgcgtcgaatgggggactccacatcgcaaaaacattagatctggaatgtgatttcttctctatcgatccaggtcataccaaccggttgga

SEQ ID NO: 56882 - DNA, 517 bp, Gossypium hirsutum
  Clone ID: uC-gsflmaxxa054e11b1
ttgctttagtttccttcccttctttcttcccaaatctgtcaagatccagaagagagaccgccaaatattcggctgcagcaatgccccacctactcctccactatcacgttccaattacaaccgtccatctcagatgttctttcccctcccctaaaccaacggcccatattcacctacgctccaatccaacaacaggcgcgaccgtaaagtgcatggccaatcctaggagagttaaaatggtatcgaaacagataaggagagagctttcggacatgctcttaactgacaaagtgttgcaatacgctatattgcctgaagccgccttaggagccgaccgctacctcttttcccttactaccataagtgatgttgaagtttcagctgatttacaggttgttaaagtgtatgtatctgtttttggtgatgagagaaggaaggagattgcgcttgccggattgaagtcaaaagctaaatatgttagaagtgaagctggggaagcgtatgaagttgcggttta

SEQ ID NO: 56883 - DNA, 345 bp, Gossypium hirsutum
  unsure (1)..(345): unsure at all n locations
  Clone ID: uC-gsflmaxxa054h02b1
cctttgtttccgcccacgcgtccggttttctcctggctggccccttatcttctctggggctcttcatattcttcctttctcttcttcttagctgccgtttcttgcacccctcttgggttggcgattcttttttttccccgaataatcattaatcgttcggttcgtttgcaccaatagttttgtgcacatgcctctntattctattttacacgggtatgatcctaacggtagattggtaagtgtaaaccttccaatccatgggtaagatttggttttcgagtaaataaatcgtgtgtacgatttatttcacttattgggtaatccgggttcttcgatttctgaatc

SEQ ID NO: 56884 - DNA, 167 bp, Gossypium hirsutum
  Clone ID: uC-gsflmaxxa054h03b1
cttttctttaggttaactgcagcgcgccatttgctgcggggatggatgttctcacttgtcaaaaggtaacaaagaaattcaggtgtgtaatacgattcgttgctgtaattccatggcgagtagaggatttccgctctcctgatggagtttatagggttaagttcacc

SEQ ID NO: 56885 - DNA, 434 bp, Gossypium hirsutum
  Clone ID: uC-gsflmaxxa054h09b1
ttattaatttctcgaagatctgcacaacaaagagggggtttttttcctcactgagcagagcgatgaccgaccccatcggaccatcaacgtcaacgattccgaatccaagtgcgaccactcttctccacccgcgacgcgagcctttcgagcacggcctcctaccaatgcagaagctcatattcactgacccactccaggccctaacctctctgaagcaaaagctcgtatcatcctccattcaacgagtcgactcggcggccctcgctgacgccctccagatctctttggaccatgcacgtctcgtcctcgacactctcgcctcggtgctccactccgaatccgaccctctcgtcacctcgcgcttcgacgatgttgactccgttggtgctgatttgcttgatctgatcctggttttggacattcaatcgtataaa

SEQ ID NO: 56886 - DNA, 406 bp, Gossypium hirsutum
  Clone ID: uC-gsflmaxxa055a02b1
gattacatgcagttatacccagtagtaagagaagtgaggcatacaagttgctttttggtgaactaaatgaagagaggcagaaagcacgccatatgatgaagagaatgttcaatacatcttttggggccaccttcctcactgacaaaggtcaagaatctgtttttgcttattacattcatcaatttgctgatgtgtatcactagtaaaccagaaaacttttttgttctttttacccgagacgtggctttcatgcacccctgggatatcaagatcatgccttatcatgtgaagatttcatctagtttattcaaaacatgaggatgtttctcaatgccttaaaaagattgttgggcccattttgttaagctcaaaatttggcaagcttattgatgtttctgcactgcga

SEQ ID NO: 56887 - DNA, 348 bp, Gossypium hirsutum
  Clone ID: uC-gsflmaxxa055a11b1
tgttggaacaaagcaatgatcttttgggagggataaagcagcttttttattgatcatcccggagctgtacccatatctacagcccatggggaggagctgcaaaagctgatcggatcaccagcttattattgagtgcagtgcaaaaacgcatgagaatgtgaaggcagtgtttgatgcaaccattaaagtcgttcttcaaccacccaagcagaagaaaaagaagagcagagcacaaaatgcctgcaccatattgtgactgggaataggtaatgtaaaaagattagggccttctatcctaatcacggtgcctcgacttgaccctttcataaaggtgcccttgacttggac

SEQ ID NO: 56888 - DNA, 374 bp, Gossypium hirsutum
  Clone ID: uC-gsflmaxxa055b04b1
cattatcatgtgtgaggatccaagatgccaagtagggcaacactttggttgtgttataattccagagaagcctatggagggaaatccagcagttcctgatttcttttattgtgagctttgtcgactgaagcgagctgatcctttttggcttactattgcaaaccctttttatccagtgaagttggcgattgcaaatatccctactgatggtacaaatccaatgcatagcgtggagaaaacgttccaaatcactagagcagacaaggagttgttgtccaaacaagagtatgatgtccaggcatggtgcttgcttctgaatgacaaagttccattcaggatgcagtggcctcaatatgcagatctacaggttaatg

SEQ ID NO: 56889 - DNA, 355 bp, Gossypium hirsutum
  Clone ID: uC-gsflmaxxa055c08b1
cattatcaccttcttcttcactctttttaatttcttttcatctccaaggtctatcactaattttcaagcatccagtcaagctagctttgtaagacagtcaacttcactgcttcattttcagttctattctctcaacacttttcagccactaagtcagggacatagcaatggagtacgtagagcctgttgttggcattgcaatttgtcctcggcactcctgtttgtaaatatttgcaatattcacagaaagctgaacgactatgtgagaaacttcaagaggatcagagatgagtttaattgccaaatggaagatatagagctgcaattgaaagcagagcttcttcggcctctgggg

SEQ ID NO: 56890 - DNA, 475 bp, Gossypium hirsutum
  Clone ID: uC-gsflmaxxa055d06b1
ccctgtaaattcaaagccttctccaagaaaagccactgcctcttgctcaactgcttccgattccactgaaaaacaattgccaaactatctcaagcctacgaagagttcacgcactgatgctgcactcaagaatttaaagaaaccgggggccgaagacccttgccaaagttcaagtgttatgagaagaagatcttttgataggcctccctcagctgctcgagctcacaaggcactgatctctcctgttcgacaaaaatcagcatcagcatcagcatcaacatcaacatccccatctttttcttctaaatctgctactgcacccaaggcacctttggaaagggttgccaaaaaggcaattgctgcagccaaaccacacacgcagacgttatcttcgttaggagggcccctataccactacctctgctctactagaactagttgagtagaggggacttctactcttcatgaaacttca

SEQ ID NO: 56891 - DNA, 381 bp, Gossypium hirsutum
  Clone ID: uC-gsflmaxxa055f01b1
tttcacacctaaactttttctttctttcgacagttgtttgatcaccgcttcaatttgggttcatctcattgcttaattcttcatttacaagttcaagatgcttggaaatggtgttgttgggattctttccgagtcatcaaataaatgggaaagaagggttcctctcaccccatcacattgtgctcgacttttacacagcgggagggagaaaacaggtttagctcgtataatagtgcatccatcggcgaatcgcatccatcacgattcgctttccaggatgttggttgtcacatattagatgacttattcagaatgtggttttttttttgggttttcagccaccaaagttagacctgtttcttccttataagagtttatgcc

SEQ ID NO: 56892 - DNA, 217 bp, Gossypium hirsutum
  Clone ID: uC-gsflmaxxa055f02b1
gcatgataaacacagtgattatgatgagttcacccttttgcctcaacctcagcctttttctttgccttctacaatcccagattggcctccaggtcaaggatttgccactggaaaaattaacctaggagaactagaagtggttaaaattaccaagtttgagggtgttggagcttgcgattcggtgcaccggtaagctaaaggttcccacatttttaca

SEQ ID NO: 56893 - DNA, 451 bp, Gossypium hirsutum
  Clone ID: uC-gsflmaxxa055f08b1
tctatgtttagaagattcagatcgtgacccgccggatccagtatcctctaattgacagtagccgtccgttctagctccttctttctctgaagtttcaacttccacgaagccaatttgaaagggaaaggaaaaccttctcgatccgcttgcgtttcggatttttatttggatgctgcacctgcttcctcagggtattggacatggatgaaatgatagtggagtagcataattctaagcagagaatcaagtaaatggaggatctttccaagtatgcccatagtccagctcatttagctgttgctcgccgtgagtatgctgggcttaggcgccattatctcaacactccctcggcttgccaaggctggcgaggctaatactgaagttgaatctctttgggctgatgaacgggctgatgcttgtctagcctgtattaaatcgtcgcgatgcccca

SEQ ID NO: 56894 - DNA, 408 bp, Gossypium hirsutum
  Clone ID: uC-gsflmaxxa055g01b1
tcccccagtccggatattttatttattaccagagtcacagtcgtttctattttcccggatttccctttcctttcgctctttgctctttccgggtccttcctgtttcacgattcctttcgtgttcttcttatctatttatttattccttcactgtttctttcaaaattccctgttttccaatggcgtctattcaactaactcgtgtactatggtcttgcaaattatctgccaatattgcattatcgtctcgtaaatgttgcagttttaggcgtactaggcaactggatttcggtcctttgttgaaaagaaattttcaaaataggaaattgacggctattagatctggaaaatctggaaatgaaggttccttttttagtgcaattgaaggagaagaaaatctgatgtttt

SEQ ID NO: 56895 - DNA, 444 bp, Gossypium hirsutum
  Clone ID: uC-gsflmaxxa055g12b1
gagatggctaaaagagggttgcttccaaaatgcatctccattcaagttcactgcatttcaggcaggaccaagaatatgccttggaaaggactctgcctatctccagatgaagatggcattggccattctgtgcaggtttttcaaatttaatttggtgccaaaccatccagtaaagtataggatgatgactattctatcaatggagaaaggtttgaagctcaaaatagccagacaatcttgttgaggtggccaatggtctacttctggtccaaagttaaaccataccaaatgttgtccaaacgataaatatacactttagaattttgcaagcaatcaattcggattcttaacttataaaaaaaaaaattcttttttctaccttcttatattctatattcctctactattcattttcattctttggctgtcctcttttatatagta

SEQ ID NO: 56896 - DNA, 271 bp, Gossypium hirsutum
  Clone ID: uC-gsflmaxxa055h08b1
ccccagggacactgtcgttacgaccgacacgacgacgttttaaaaaaggattgttacgctcactccgtcgtgttcgatttacaaacaaatgaaatccgaccgttgatgatcctcaccgacacgtggtgctcgtcgggacagttcttacccgacgggacgcttttacaaaccggaggagatttagacgggtttaaaaagatacgaaaattcgaaccgtgtgaaccggaccgtttttgtgattgggttgagcttaaagacgtggagttgataa

SEQ ID NO: 56897 - DNA, 357 bp, Gossypium hirsutum
  Clone ID: uC-gsflmaxxa057a02b1
gtttagttttgccctccccatcggccaatgctggggaggggtaatttatatgagggggcggggaataaaatcaagagcttgttacaaggcaatcgaatctaaatgtgcatgcaaatctatttctcgtttatttactggtctttttgggttactcctagaaactgttgcaatctgtttttaggctgtttcacagagtttatgaaaaaaagcatccgacagctttttaggtgtgagagtaaaaaatatcggattgagttctttatttttatgatgctctggtggtctaacagtacattgcacgattatttttaattggctgtaatgggatcttgttcactaaacaaaaaaacctcacat

SEQ ID NO: 56898 - DNA, 466 bp, Gossypium hirsutum
  Clone ID: uC-gsflmaxxa057b01b1
aatttaaggtttctaattgatttaatctgaacggggcgagatttaagggtttacccttcattcccagaaagactgaactctgtcaggttatagggtttagttgctttgaggttcaaaggattttggtattggagtcctttttggatttgatcaggaatgactcgtagggtgcggcgcaaggtggcaaagaaagggaaggacgacgctgtttcactaagttatcttgaaattgaagttgaggatttaggtcttgagagaaatggcgatgttgattggacaagcttgcctgatgatacagtgattcaattgtttttttgtctgaattatcgagatagggtaagcctgtcgtcaacctgtaagacatggagagttttgggtgcttctcagtgtttatggagttcattggatcttcgagctcataaatttgacactcgaacggctacatcacttgttttaagtgtgtgta

SEQ ID NO: 56899 - DNA, 452 bp, Gossypium hirsutum
  Clone ID: uC-gsflmaxxa057b02b1
gttggtcagagctctgacacatcatatccttgaaatcaagaaattccttaattgtagcagaaaaactctgaaaagcctcatccacaagggatgatagcttttgagctacttcttttgactcttgagcttcagaaatcagatcttctacttcctttgacagctcaattacaaaatcgcaatccccattctttcttcccccagattcattgtaggcaagttcttcacgagccactctagtctcctctcgtgcattaagaagctctttgcaaagctcatcaaacttctccctcgcacttatattctgctctgtagcaagttcgacaagacaattcagattttcttggcttgaagacttttctgtttccaatatctcaatcttctcttgaagttgcttgatcacaagaatagcttcagattccctcaacccaatattcttgtcagcataatttgtt

SEQ ID NO: 56900 - DNA, 526 bp, Gossypium hirsutum
  Clone ID: uC-gsflmaxxa057b10b1
tcgaataaagagagaagaaaatgaatcgttttatagtaaggtcggtgatgcaaaaccacctgagcaatggccgaagcatcagcaacggtcacgtttgcagctccgccatagttgggagaagcttggagttgagcggacaacataacgttgtgatgcttgtaagatttgaatggagaaggatgatgagctctactcctgcttctgtggaaaaggtgtcgtctggaagggaagagaaaatggagaactcggtgacggaagagacgaagggaaaggattcgtcggcgttaagttattgggggatttctagacctaagatcaccagagcggacggcaccgactggccctggaattgtttcatgccatgggaaacttacagcgcaaagctgtcaattgacttgaaaaagcgtcatgtcccaaagaaacttggtgataaattcggtttcaggattgtcaaacttcttcgccttcctacagaatattttcttcagagacgatacggctctcgagctatgatgcttgaaacagt

SEQ ID NO: 56901 - DNA, 446 bp, Gossypium hirsutum
  Clone ID: uC-gsflmaxxa057b11b1
tcgcccacgcgtccgagctgaccttaagaaggcagttcgccaaagccttgacacttaccaagcacaaagagtacctttgcaagtaaacaaccatattgtctcaccaaatgatgtctccaatgaaggtttgaatgaaactgatgtgtttggtactggcctccagaatgaagttggtgaatataattgttttctgaatgttataatacagtctttatggcacttgagacggtttcgtgatgaattcttgcggagatcgacatcagatcatgttcatgtgggagagccatgtgttgtctgttcactatatgaaattttcattgccctgaacattgcatctactgatgcacggaaagaacctgttgcccctacatcacttagaatagctcttagcaacttgtattcagatagtaactttttccaagaggctcagatgaatgatgcttttg

SEQ ID NO: 56902 - DNA, 304 bp, Gossypium hirsutum
  Clone ID: uC-gsflmaxxa058a12b1
tttgatttgttcgaaatctatgaatccgttatggatgggtttgaataacctgacgtggggttggagttggttagaacgatggatggcagcttgaccatgggaaggacatggagtgacaggaaaggaaccgaacaacgaccagtcattggtatagagtgcacatttcgaaggagaaatcagcaaagcttacgctcgttaccaactcaatttggataataaacaatccccgaaatcgagccaaaagtctaaccgtacatcaaggtaacctatcccccttcttcgaaaccaccttttcaaaccattc

SEQ ID NO: 56903 - DNA, 496 bp, Gossypium hirsutum
  Clone ID: uC-gsflmaxxa058b01b1
ccttcgcgttcgcccacgcgtccggtggatttagggggagggtaatagtgccaagggccaattacaatgagaaggataagacttttgtctatcaagaggaagggatggcagtgtttaagttgtatgcagtgcattcccgtcaaatctccgctcagcccctcggctaccacaacattagccctgagcctcacattttctctcagttctacactttcaacgccgactcccattccctcatgatccgctgcatccgcgagcatcgcttggccactcccgctgagatccgagccgctacgccgcgttccgtcctcaaatcgtggcgggccgtgtggaaggacccgaacgaggacaccgcttaccttaccgcttgggagcggatccaagacaagcttaccgggcacgtggatcccgattccggtaatgaattcatttgcttcaagaacaattctagccaattcgttttacatgttaatcaatggcaagaaattgttatgag

SEQ ID NO: 56904 - DNA, 532 bp, Gossypium hirsutum
  Clone ID: uC-gsflmaxxa058b11b1
tttcttttcctactacaattcttttcttcgatccttcttagcttgaagttggggtcttagctgcttctttttaggtttctgggtaatttgttaataaagttgcaacctatataatattattattattctaatggggtcttaatgatttttactgtgttgggaatattcaattcaatacatttttttggttgtcctttctgggttttggataatgttcattggtattcttggagaacgtctttgatccttgtctcagtttcgctaccatctttaatttaattctacagaaatatttggtttttttttttttgaagttttcattgaaagaaaaatgaagggttctactctgtttcaagtattagctattttatccgtaattgggaagtgttttgagcaaggagtgtaccaacactccaactcaacttttatcgcatacttttcgttaccaactgttgaaatcacaaaacgagacatggaagcaagagatgtttgcttattaccacttgatcccaactgatgaactccttggtct

SEQ ID NO: 56905 - DNA, 455 bp, Gossypium hirsutum
  Clone ID: uC-gsflmaxxa058f07b1
tcgcctacgcgtccgcccacgcgtccgcccacgcgtccgcccacgcgtccgcccacgcgtccgcccacgcgtccgcccacgcgtccgtgaattaataattaaattaaagagtgaaattcattagtttatggaagaagaagaagaatcggaatcggaatcggaatcggaatcggaatcggaaagggaagggagaagccaaaagatcgaaacagaaacttcaagctttgaactaacttccatgttcacttgatccaaagaaaagaaaaaagattttgtaagtgatcaaagttttcaatgggaaaaggccccttctcgttccggcgcccttctattaggcgccgccgtccgaaatctacggcggtacctcaatcgccaaagccgataccgactgctggggccgtcgcttcttcattttcgccttcggctcctagcactggtaacttgattggtggagg

SEQ ID NO: 56906 - DNA, 446 bp, Gossypium hirsutum
  Clone ID: uC-gsflmaxxa058f08b1
tcgaattgtcacaaagacaaccttgtaagaaattttaacctttgtaggaaacaaatgaactctcccctgcaacgcatgccacaaattagatttagagggctaatcatttatttcatcataaccatgactttactttacatttcatactcaaatctcctgttcagcaagaaagaccggaaatcctcggatataactattgtctccaacaaaattgaagcgccaccctttaaccattcctccaacaccacctcttcccatgtccaaaacccagcagaccaaaagcgaccaaaccttgttgaaccacctcctaggagatacctacgatacgatactcatctcaaacacattgccttcgggatagcatcgtcttcgaatttgtgggagatcagaaaagagtacattaaaacatggtggaggcccaaagagacaagagggtggtttggttg

SEQ ID NO: 56907 - DNA, 532 bp, Gossypium hirsutum
  Clone ID: uC-gsflmaxxa058g07b1
tcgccttcgcgtccgcatcgatcctgataccggtcgatcccttccgaagaataccccgggcgaattgtgtgtcaggagccaatgtgtaatgcaaggttactataaaaacaaggaggagacaaatcgaaccattgacaagaatggatggctccatactggtgacattgcttatatagatgatgatggagatattttcattgtggatcgcataaaggagttaatcaagtataagggttttcaagtagctccagcggaactagaagccatcctccttactcattcctcagttgaagatgcagcagtggtgccgctgcctgacgaagaagcaggggaaatcccggcggcatgcgttgtgatgaacccaaatgccaaagaaaacgaaagggacataatggagtatgtagcctccaatgttgcacactacaagaaagtgagggttctgcaatttgtggacaccattcccaaattcccatcttgcaaaatcatgcgaaggcttttgaaagataagatgatggaaaatatgcccaaaccc

SEQ ID NO: 56908 - DNA, 510 bp, Gossypium hirsutum
  Clone ID: uC-gsflmaxxa058h10b1
tgtttttaaacctgataaccaggggcgtaaaagccagaggaatagacgaggaagacctagccgacagactcagtgagttaccggataatgttattttgcacatcatgtcatcgcttccgatgaaagaagcagttcgaacatgccttctgtctaccagatggaaggatctttttacttccatatccaatattgagctcgatggagttctaaggaagggggctttacgtaatagattcatggaatttgtggatggatttctgtccttgcgtaaggatatcagtgtggatagatttcgcctctgctatggacccggaattgatcatcgcaagatcaatgaatggatactgtacgcagtaaggcatggcgttagagaacttgaattgatctttcaaagtggaacccttcaaacaagacatttcactgacctggaactcggggtttttacttgtaaaacactgctcacattgagattattcaaccttccaagtctttgcctgactatttccaccc

SEQ ID NO: 56909 - DNA, 319 bp, Gossypium hirsutum
  Clone ID: uC-gsflmaxxa060b04b1
ttcacgctttcgcattaccatcccccttttggagacctcagccactccgatctccgcccatggctgcagccctcgagtgctggtccagccgagccaccaccgccgatgacgacatggtcgagcaggttttgatgcgctccaacgaccgatccgaggacacctcctcctcctcctctgattttgccaaacttgaagccccgttcgccaagaacaaacgggttccagaggtgagccggaaccgtttcttgggccaactgcctctttcaagaactctttcaatctcgacacttcctccccacgtgatcagcttcctcctcct

SEQ ID NO: 56910 - DNA, 329 bp, Gossypium hirsutum
  Clone ID: uC-gsflmaxxa060d11b1
ttcttatcttcgaccattgatcttctatattctggctgctcttgcaatattcatgcttatttctccctcccattcctctttagataatgttaatgacagggttactttgtcactgtactatgaaacaagtttatgccagcattgtgcctcctttatctccaatgaccttgtcaaggtcttccacactgacctccataccattatcaatctaagattggtcccttggggcaatgttgaaatccattgccagcatggagaagaagaatgctacttaaacactatacatagctgtgtcatccatttctggcccttgatgtgaatgagcactt

SEQ ID NO: 56911 - DNA, 480 bp, Gossypium hirsutum
  Clone ID: uC-gsflmaxxa060f02b1
tttattttgaaagatgaatggtttaaaaagggttacaagcctcctgtgttcgaggagaaagacgatacgaatttagacgatgtataagctgtttttaaagattatgaagagcaccatgtaacataacagagagaagaacaaccaacagctatgaacgctttcgagttaatttctatgtcaaaagggttaaaccttgggaacctgttcgatgcagaagagggatttaagagagaaacaaggtttacatctaaatgttctgctaatgagatcatccataagatccgagaagctggcaagcctctcgggtttgatggccacaagaaaaactacaatatgagactccagaatttgaaagcaggaagaaaaggaaaccttaatgggctccactgaaatatttcaagtggcaccttgttaacatatggttgaggtcctaaaagcaaatggggacacattgtaattaatacgttttacaaagccttt

SEQ ID NO: 56912 - DNA, 462 bp, Gossypium hirsutum
  Clone ID: uC-gsflmaxxa060f10b1
tttcacgctgtcgaagaaactgattatcaaaaagatcttatatattgccttgtttctttctttgtgcaagggggtcagcaaaaatggcaacaagtgggacctaatctggatcaaaaccaccatctatctacccaactatggaatatgatgatggcaatctcataatcaacccttaatttgatcatcatcatcatgatcatctgctggagtacgattaggaggatgtatggaacaattcaaaagatcaatcaacaaccaacttagaagccaaaaaaccattgccaagcttaccgagcttcctctaaaaaagctgtcaaacagaatgactatcatattagccataataatgaccataggagtgcccaaatgactgcagcttctgcttcaatgccggacagcatcactgactggaacacgattctcaaagcggattacatgaaacatgggaagaccgatgaagat

SEQ ID NO: 56913 - DNA, 480 bp, Gossypium hirsutum
  Clone ID: uC-gsflmaxxa060f11b1
ttttggatgactatacatgtaatttacccaaacattagtattataaatattatcatattaatcaaatatgacgtgaattcatcaaccgaagcaaaatactctcgctttcaataacttcagccgcaagtaaccgagatttcgcaaccacaaatgtttccgaaacatgaaaacagcccttttttgtgagcacgtcttcttgaatgtctcgactttttggttgacgttgtcggagtctgactagaaaggaagctcgaaaattcattacttgagtcataaaccggtgggagttcggttctccaccgttcgagtttcgaatcgagcccttccatgcttccatctaaactccatccttcgcccaccgaactctccatcttttccattttacggtttcttgttcctcagcaccgcagccgccacttccgatggcgatggacccaattccgaatcggtccaaattatccgcccacccgttaacccact

SEQ ID NO: 56914 - DNA, 467 bp, Gossypium hirsutum
  Clone ID: uC-gsflmaxxa060g02b1
ctcggattttaagatttggcttcttacaatctaatggagtggaagcaaaggttgccctagaagatgaacattttgctttgtgacaatctgaagcaggaagttgcgttttcttccacagcagtggcattgagatggatatgaacttcactgctgattcttccctggctccatccagatggagaaaagttgcatacggagggatgcaacccggatacgacgacaaccacacagatgaaactttccttgaagatatggcaatgaatgctaatgtcgttaaacggaatatgcttaaggtgatgcaagattcgggttccatctcacaatatctatgcattgtttttcttggggtcttggtatggatctacacccttaagtcaacccttaatgaaaacttccttttgcttcttgatataagccttcttggttctgggttcattaacctagtattaactggagaaatgctcttc

SEQ ID NO: 56915 - DNA, 501 bp, Gossypium hirsutum
  Clone ID: uC-gsflmaxxa061b04b1
ccctcgcgtccgcttgccgggagtaagttttgtttgttcgagtacggaccggagatatcggcgatcggtgaagcgatgagtttcgggtgtgtgcccgtggtgattactgaccgtccgatccaggacttgccgttgatggatttgcttgcgtggcaacagatcgcggtgttcgtgggatcaagcggtggagttaatgagatcaagagggttttggggcgcgtggtggtggaagagtacgaggatatgagggaatcagctgcggtcgcgagtaagcattttgtgtggaacgatacgccagatccgtgcgatgcgttccatatggtgatgtatcagttatggctgagaaggcataccatcagatatgctgagagagaatgggcttaagagagcttaaggatttaaagagttttagcaccgtgatatgttgttgacttctaaactttggacggtggtgatcacataattcttttgtgaattaatgttatataaataaaaactaaa

SEQ ID NO: 56916 - DNA, 523 bp, Gossypium hirsutum
  Clone ID: uC-gsflmaxxa061e03b1
caaatagaaaatccttcttcacttcattgtaatcaaaaggcagcaatttcgcattcttctgaggatacccatttctccaacattcgaaacaacatcttttttttttttgtgggggggggggtgtttgttcttgtatgtgtgtttcctctgatacagaaatgggggttccggtgatcaaattatcaatctttatggtggttagaggtctggacaatagaataacagctattctttgcgcatggactgctcatcacagaggaggattggctctcatctatgataacatagagctgatttttaatgtccatgctgttaaaacggtcattggattagggctattaaatggagaaaacatgctggcatacaggacttgtcctgtgacaaaaatctacaaaaagttaagtcatctcacagatcacgggcttgcctttatgttgagcactatgggcgcatggtctgctttgaagtgtcacatggttccaggcatattaaacttttcagtctacactcatggtggggcata

SEQ ID NO: 56917 - DNA, 511 bp, Gossypium hirsutum
  Clone ID: uC-gsflmaxxa061f07b1
tatccttccatagctctttccagcgaaaaccctgaacgcgttttagagagggaaagagaagggactgttactgtttgttactgtattccaatatgttgtccagcttccttaatggcgtcctgattgttggtattcagagagaagacgaactctctgaatttcttagtctcttttttttttctaaaattttaaaattctgtttatattgtttggacctgttagaaagagaaagagacggcgaggaaagacaggcgagagagaaaaagaaaattagaagtcgttttctgagtttgagttgactggctgtatcggtgtatgatttgtcgcgtttctttcattcgggttcatggctctactcgtatttagaagcggtaaacggtttcatggaaatcttaaatggcttagaggagttgcgagtttcgacaaggaaaagccatctttcagataaatttcttgataggcaactttccacagacggttgtcttggctgaacgattctgatctgttcatc

SEQ ID NO: 56918 - DNA, 554 bp, Gossypium hirsutum
  Clone ID: uC-gsflmaxxa064a01b1
cttactcgtccgcccacgcgtccgctcatattaagttttcagagaaaattattattaagtattattgcctttctcgtggcttgctaaacacttgaattttgaaacataaggcaatcacttgccaaaatgagggcagctaggaggatgacttgaagacatctagatgattttatcataaagatgaggaagagagccactatgtgaagctgcaaggagcagccgcagataaccccttgcagtttgtgaacatagaccgaattatcaatttattgccaattgacccagaaagtgaacgtacttttaggcaaagaagaagggaatggttagcccaaagacaagttgaagaaatgaatcaaaacccaagaaaagacacaacttgtaataatcaggatccgatccttgttgctgatggcagagatcgattgattaggtagtatactgtgcctttatttagtgaactcaatctagggattgtaagacctgagattgatgtccttcagattaattaaagccggtgatattctagaagttgcaacagtggaacagtcagtggg

SEQ ID NO: 56919 - DNA, 292 bp, Gossypium hirsutum
  Clone ID: uC-gsflmaxxa064a11b1
tttctttacgcgtgcgaggacgcatgggattgtgcaggtgatggaggacagaagtcagcaggccaatcaaaggctgaagagtctctcactgcatatctttctgcagagatccctgctgagaacccaccaacgtctttatggacgcctctacctagtccacacaagactacaagccagataactggtcactctcctggatgccctcctttgcactacccgttctatgacatgaatgccacgatggggggcccaagcccagactatggaccacatgatgactcatcgcctaccc

SEQ ID NO: 56920 - DNA, 487 bp, Gossypium hirsutum
  Clone ID: uC-gsflmaxxa064b01b1
ttttgttactaacaagttcaatatttaccctgagcaaatttcttcatggcttatggattggatacctgaaaaaggtggttatctactcggcaatctacagccagctcacatggattttaggttcttcacactcgggaacctctggtccattgtctcatcgctgggcactccgaaacagaacgaagctatattgaacttaatcgaagccaaatgggatgatattgcagggcaaatgcctttcaagatatgctaccctgctttggagaatgaggagtggcgcataattaccggcagtgacccgaaaaatacgccatggtcctatcataacggcggatcttggccaacacttctttggcagtttactttggcatgcatcaagatgggaagattagaactagctcaaaaagcagtttctttggtcgagaagaggctctcaatcgaccgatggcctgaatattacgacactcgtagggggaagttcattggg

SEQ ID NO: 56921 - DNA, 363 bp, Gossypium hirsutum
  Clone ID: uC-gsflmaxxa067a04b1
attcccgtaaattagtttctgcttaatgaatcaataactataaacaaagataatcatagtagggatatattcttgttcaatttcattcttttttgtttccttttctctttttttcttccaaatgaatatcagatctcttgggttttgctgttcttacactctctaaagctcccgcccccttcttttcttttctcttttttttttctttctgctatacttctttaaactctttcctctatggcaatcaaaggtgtcgatttcaagtggattgatgggttcttcttgtctatgctggctacaagtgtaatcattggtgctattcattggaaagcgtatcatcattgggcatacccgttgcatata

SEQ ID NO: 56922 - DNA, 259 bp, Gossypium hirsutum
  Clone ID: uC-gsflnu33B002d05b1
tacttagcaattagcattttcgctttctcactacaaacattggcggcgatttctggccactgcacattccggtcacaccaattccctctctctttcaccgcccccgtcgccttctcttcctctttctacggggaagctatccgatcttccagcatttccttcgcttctcctccgtctgtccaccgatcccttatatcttgccaggcctccttcgccgcgtaaccaccttattcctccgtcaacgggacagcaaaagggg

SEQ ID NO: 56923 - DNA, 422 bp, Gossypium hirsutum
  Clone ID: uC-gsflnu33B003h09b1
tccagtcgggcgcatagaagttatgcgtcaacatttgattagtatatggaaactgcattgaagtcgagtgctgccattgtttcagcctgtcaagctttcataggaacggaagaagcagatgaaactgcatatcaatggctgatcaatactgattacaaagctcataaagccctcaacataattgctcgcttctaccatgatttagcgactaatgaggatgaagaaaagagaggactggtttgtggaaccagttgcttcatgaaacaatatggtgttacaagaaaggaagcggtcgaagcttacagcgaattgattgatgctgcttggtaagacatgaacgaaacttgcctgaaacccatgcccgtttcaaacaataatcacgctacgagcttctatttatggccggttaatggacctttttt

SEQ ID NO: 56924 - DNA, 383 bp, Gossypium hirsutum
  Clone ID: uC-gsflnu33B004c09b1
ttgacgcgtggggctgccgatcatcgttcttgatgcctcgtcaaaatcgaagatgaccggcaatcaccaagggaatatgtagttgatctagttggggagccaggaaatattcacggtccggattcctccatcaatggaggattcctttcttcaatgccttcgccatttcaaatttcttatctaaaagagttccagcaacctgacatggatactgcaccgtgttgtcagataaaagatttgaagaattcacattctttttgtggcattgagaaatctcaacagtttaagagcaacgggttgcttgaaagtcaaaaggcaccatatgtttacaccaattgatcaagactgtcttggaatgtcattgatgacttttgaagcttcag

SEQ ID NO: 56925 - DNA, 503 bp, Gossypium hirsutum
  unsure (1)..(503): unsure at all n locations
  Clone ID: uC-gsflnu33B004d09b1
ttttgccatgagggaggctgggaaacctggaatgtctgatgaagaggtgcctttacatatttgttatgtgatatattacattctttcgacttttcacttttggtgaagtattcgtgcttgagggatatgggtattgaaatataatcctctaaggatcttttataacttttaaatatatcagggacgaagcccgaagtttatctttgggatcaaaattaaattataaaaatttagaaggatcaaaatataattttatctttgtatatgtttgttattttagaattttaaagggattaaattaaaatattttcatctgtggagggagaggggggcaaaattacattttaaaattttaaaattttaaaatggtcataggactatgttatctttgtatatatgcttgntattttaggattttaaaacgactaaactgaatttttttaatctggnggagtgtattttttaccattaactaataattttaaaacctaaggatcgaaatg

SEQ ID NO: 56926 - DNA, 429 bp, Gossypium hirsutum
  Clone ID: uC-gsflnu33B004e01b1
ttcacgcgtccgcccacgcgtccggttggctcggatcggctcgtctaagactccggtcgagatggaggaggatgaggaggaggcacccaaagagctcaacacaataaatagctcaggagggttcttggatgtggcgcctgataagttgtcggtgaagtatacgagcgtaagcctccatggccacgatgtcggtgtggttcaagccgataagccggctccaatgaggcgtctgctttattacttcgagattcatgtgaaggacgctggggcaaagggacagatagctattgggttcaccaatgaaggctacaagatgcgaaggcaaccagggcgggaagtaaacagttgcgggtatcacgccgatgatggatagctataccgtgggcaaggaaagggagatgcttttggtccaacatatacaacgggaga

SEQ ID NO: 56927 - DNA, 438 bp, Gossypium hirsutum
  Clone ID: uC-gsflnu33B004g07b1
ttattactacaataatctgaaagaaaacgaccttgagtatggaggagagcatcaaaattttttggaggctttaagccctagctgcctgtcccttatgaatcatcttcgcatttatatccctgaagtaattacttttaaaattctgcatttgatttgttctgaactttgaaattcagttggcattgaaatgttctaattttcatgggttccacagctgtttccggaactcaacaagatagtattcttggacgatgatgttgtagtacaacatgacatatcatctttgtggacattggatctcaatgggaaaatcgttggtgccgtcgttgattcatggtgtggagaaaactgctgtccaggaaggaaatacaaggactacttgaatttttcacaccccggaattccatctcacctcgaccaagattcgttgtgcatggc

SEQ ID NO: 56928 - DNA, 412 bp, Gossypium hirsutum
  Clone ID: uC-gsflnu33B004h04b1
tgttgatgcttcaagagtacagatatcaaattcaaaagggaattataatgagaaatcaatttacagtgttgcttcaaatacacttaatgctaggatgaacaaagtgtttgatcctgaagtggctgctctgcttgatgatagtgatttgttgcgttttggatctgatgttgaggatttggaggaggatttttgttgttagggcaaacactggtgaagaaggggagggtgatgagagtggtaagaagtgcatactaagatgtgcggatgatatcatcagtggctcctgtaatattttcgaaagtttgctatttgctcctcttggtactgactttactctgttggatccatacagatgataacaaaacgagttcacttcttaagaatgatatagtagtccgttttttccggactg

SEQ ID NO: 56929 - DNA, 433 bp, Gossypium hirsutum
  Clone ID: uC-gsflnu33B005a09b1
ttgacgcgtgggtttttttttttgaagctttcggcaatgggcgcctctgaatcgtctctcgcagcttattcactgagttcggccgatcaaatctccactatttctcagcgatcggaaacagtcgatccgattttagagaagcttaaatcccttagaattacatctcctatactgaccacaccgccaacggatggtagcttaacggacattttagtgcgaagaccgtcgtcatcttcatctcaagctgctgtaaatccaaaggtgttcctggagctgttatcagcgtaccgtgattggcaagaggagaaggctcaaacgatttgcaagaagcaggaggatatagaatacaaaatagaagtcgctgacgctttgacagttaaacttctccaaagttaaaccactcagtttccacaatgaagactgctttacaaca

SEQ ID NO: 56930 - DNA, 447 bp, Gossypium hirsutum
  Clone ID: uC-gsflnu33B005e01b1
ttgaacaacacattgtttgcacaatgaatacttgtgtgtgttgttcgaacttcgaacctatccagcatctgcaaatgatgatgaagattttgaagccatactcaggtgtttgtgattgtatgttaccgtgagtagtgcatttttaaggtttaattctaaatactgctgaagggcacctcttcagtggccgctttagggttaattttgcgtttgaacttccccgcctgtttgcttgagctaaaaagaaggagaaagttagtgtgttttcagaaatatgggttttgattggtttctctgaaaatggtaggaagggctgatagatgaaaatgggcagttgcaatgttgatttcagggatggtgctttgatggatgtggatcttgcactaggagtctaggattccttaggctggatctcaaggtccagaagcccgtgcttgcttttttgtt

SEQ ID NO: 56931 - DNA, 464 bp, Gossypium hirsutum
  Clone ID: uC-gsflnu33B006a07b1
tgtagtgatggtatgcattctcctggcttccactctttttacccctacttttaccatggctcgacagctgggggagaaggacatcaatgatccaccagtgtttaccactgctacggcgggtgaacataatgaacctcgaaattgtggccgtggaaagtcttataaatactgcataggacctggaactccttctatggacccaccctgttccgtttataaccgccacggctgctaagagtagccaactaaaccttgaatgtaatgggcaagctataggatccattggcgaaattgtaatgcgaacatattaaaaccagatcacgaagttagttacattacctgcccatggttagtgtttttgtcaagacaattatgtagtttggttcattatatggagtgtgtctgcaataacgaggtatcatgagctcatcatcattggcttcttaaggctttcaattactatc

SEQ ID NO: 56932 - DNA, 217 bp, Gossypium hirsutum
  Clone ID: uC-gsflnu33B006d03b1
tccacgcgtccgatcgagggcgagcactctccttcctttttctgatgcttccggtatcgcatttcggtctggcaaaaaaggctggtactaaccgctgccgtggacttgacccataaacaaccccacctcaatacctctattcctttccaccaataacccagatttggtttttatatgttatacgccccacataataacagaacaaacccattgtttc

SEQ ID NO: 56933 - DNA, 321 bp, Gossypium hirsutum
  Clone ID: uC-gsflnu33B006g02b1
ttacttttgaggcattgataacaaagacgagggacgaaagatgaatgtttaagttacttaattgtttttccagttttatgttgttctacatgttaaacgcgatgtgcgattcttgttctaataatgatatcaatagatgagatatttgctctaaaattactgtaggtaaattagtcgctgcaaatccacctcaattttgatttgggttcatgataggggtaataatgctattgttgtccaactcattaatcactgttgccttttcagcaaacaaacataaacgtctttatcaaaattgaggtggatttgcatcttcttttg

SEQ ID NO: 56934 - DNA, 407 bp, Gossypium hirsutum
  Clone ID: uC-gsflnu33B008a07b1
tatagcgcgtgaggaagggtcaccggatttcatactaatagattgtccggcggggattgacgcagggttcataacggcaataacgccagcaaacgaggcggttttggtgacgacgccggacataacgagtttaaaaaaaaaaaaaaaaaaaaaaaaaaaaaaaaaaaaaaaaaaaaaaaaaaaaaaaaaaaaaaaaaaaaaatataaaaaaccactaaaaaaaaaaaaaaaaaaaattaaaaatggggggggccgttttaggggaccaatgtttacctccccgggtatgcaacgataaatcttttttttggggtccctaaatttaatttcatgggccgcgtttttacaatccgcggactggaaaaaccttggggtgtacccacttaaatttctttgcacaaaatccc

SEQ ID NO: 56935 - DNA, 497 bp, Gossypium hirsutum
  Clone ID: uC-gsflnu33B008b04b1
ttcacgcgtccgaataccagtacttggctagctcgttttacactagatcttgaaaccaaagccaccttccaagtcggggttccattcatcggtgaaacgggtgtcgaaatatcttccaaatacgaaacaggaatcgagtggggaaagaccaagacgatgaccaccgacatggaagttacgcaccaagttcgtgtgccgcccatgactaaggtgacggtgtatcttaagatgaccaatggcacgtgcgatgttcccttcgtgttcactcaaaaagacagcctttataatgggttcttcgttacaactgatgtcctaggcaacactttcaccggtactaattattacaacatccaatatgatagcaaagaagaacccctcacctctgaacccctcacctctgaaccccccacctctggaaatcagaacatcaacgtatattgtgaaataatttaaaatgaaaattttaaaaaattattggaaattcttcattttaaagt

SEQ ID NO: 56936 - DNA, 485 bp, Gossypium hirsutum
  Clone ID: uC-gsflnu33B008c06b1
tatcctccttttcagcttctactctaaaagggtcctgcttttaatgcttgagcttctgtctcggctttactagctcgctcattcagttctccagcatctttttgagcatgagaaatactattctcaagattatttatcttctccaagcactgctggtattgaacatgattagcttctctttcagcctgtaatttggtgagggcatccttcaaagtctggacttcagcttcagcttgacttgctcgttcatttaatccctgggaatcctcttgtgcacgagagacttctctctctaggttcgctaatctatccaagctctgctggtactcaagtaggcctgcttcttttttagcttctaatctcgcaagagcattcttcaaggttaaaaactccatctaagctttacttacacgttcagactcagatgggactcgaaccctgggatcagaaccatcattcgctcgcagacttcttactttcttccc

SEQ ID NO: 56937 - DNA, 273 bp, Gossypium hirsutum
  Clone ID: uC-gsflnu33B011c12b1
tttgaaaagatgtataatggctcgacaattaaggtgaaaccacgaactttgttttctactgcggattgggctgtcttaacatttacattttctttttcatttattttcccttattgcaacctgaaaaaaaagtaggtaccattaagaatatatgtttgtaaaaaaatgttctgcggtcacattcattggctaatgctgctgaactgaattggctttttagcagacttttccactgcaaaaaactaaaaaaacaaaaaaaacaaacaaataaaa

SEQ ID NO: 56938 - DNA, 324 bp, Gossypium hirsutum
  Clone ID: uC-gsflnu33B011d06b1
tttcacgcgtccgcccacgcgtccgtagacctaaaacaaaaactctcttcttcttctcactaccatctctccctattggagaattttctgttgaatttcgctttcctttttcattgcatgtatggatccttccagaggactacaccaggagatggggaaccctttgccggaaagcatggcggttaactcaaaaggacagcagcagcaggaaagaaaagcaaggcctcaaccagaagaagcgctaaagtgcccatgatgtgaatccaccaacaccaagttctgctattacaacaactacagcctttctcagcccaggtatttctg

SEQ ID NO: 56939 - DNA, 497 bp, Gossypium hirsutum
  Clone ID: uC-gsflnu33B011e02b1
ttgcctggcatgcaaagctatagagggttctttcgatccaaatggaccgaaacatttcattttggttgctcaaactgtagtcttacgtgaagaaattttgtgagcattcatcagctcctctcagtttgagggttgaaccagagatatttcatgcagaagaaaaagaatggcatcacttacaccaggagtgttattaaagcttcttcagagtatgaactctaatgtgaaagttttaggggaataccgatccgtgctactgcaagtgatcagcattgtgcctgctttaacaggatcagagttgtggctcaaccaaggtttcttcattaaagtatctgattcttcacattcaacatatgtttccttgtcacaggaggacaatgagttgatcttgaacaataagttgcagcttggtcagtttttttacgtggagagagtgggacctgggaccccagttcctatcccttgtggtgtcaggccagctcctggaaaggaccctt

SEQ ID NO: 56940 - DNA, 146 bp, Gossypium hirsutum
  Clone ID: uC-gsflnu33B012a12b1
ttccacgcgtccggaaattttcgttgtaatttattactaaacttcctttgtacaatggattgtcaacctctgattggggattttaaagtccacgttagagtatgttttcattgcttttaaaaatgtgaactgccaaataaaaatat

SEQ ID NO: 56941 - DNA, 219 bp, Gossypium hirsutum
  Clone ID: uC-gsflnu33B012b09b1
tttccacgcgtccggacggggtcaatggatgatcatcaagatccatggcctagggtagtgacctccattgcactcgggaggggtgctcccctaaggtctccccaagttgggagagcctacgtcataatttgtggcagcgggggcctgcgttcgcgcggcccctatttgaaatattaaaaaaaaaaaaaaaaaaaaaaaaaaaaaaaaaaaaacaaaaat

SEQ ID NO: 56942 - DNA, 518 bp, Gossypium hirsutum
  Clone ID: uC-gsflnu33B012e04b1
tatccacaatattccacagcttctctagtttgcattcattttctatcaatatcttgattgtcgacaagattggcaacccacacctatagtttgatttcgtttcggtcgttaagaaataactatgtcgaagaaaggcggagcttcgttgccaaaggatgatccatggcgggcctcagccggaaaatcagttcctaaaatccaccactcgcctgttcttcgtatacgtcaaaatcctaactccaattacgccatcgctgtaatgaagcacccggatcctataggaagcgggttagcgactgaggctattgtggaagcggagggacccgaatgtattgttccgggtcaggttactcccgttagattacttggtcttaaggtgtggccaattgaagttaacacgaaatttttggaaccagtcggtaaagaactaatgctgcttgcaaagttcatggacgacgctgtcaaccctatgaacaaatcattcatagatcgctaatggcctaggcattttatgccat

SEQ ID NO: 56943 - DNA, 485 bp, Gossypium hirsutum
  unsure (1)..(485): unsure at all n locations
  Clone ID: uC-gsflnu33B013a05b1
agccgcgccgttattgccgggacgccacccgccttctacgcgtccgttggtgcctaaaataaaaaatttttatggttggatggctatttgtgtaatttacccaaaagataaatatgataaaattataaaaaaaagttatatttaaactagattatggtacacacgtgggtgatattgattatttaataatttttttaaaaaattgatataaatattagggtaaactacaaaaatagtcatttttggtttgccttanattacatttagtcacttatgtttgaaatgttacattttantntnttaacttagggttttgttatgaagtaaccactctgtcgttaagctccattacctccctaacgacagttttacatgggcagtcaaatggtttttaatgccaacttgaattgtcctgtttggataagaatagtatcctaataaaataaatttacctattgaaatttttaaatttattacactttgaa

SEQ ID NO: 56944 - DNA, 506 bp, Gossypium hirsutum
  Clone ID: uC-gsflnu33B013a07b1
tcttgaagtggtgtggagataattggaactggggaagatgggatggctgtgtttcccaaagctgataagaagaaagcttctggttttgagattgttggtttcgaggtggttccgtgcagtattaaatatgatccagaagccatgactaaacttcacatgtatgacaaagtttcctctgtgaactgccccttggggctcgacaagtcgcagataataagggaacgagaaaggatctcttttacttacgaggttgaatttgttaaaagtgatattagatggccatcacggtgggatgcttatttgaagatggaaggtgcacgcgtgcactggttctcaattctaaattctctaatggtgatcactttccttgctggtattgcgtttgtcatcttcttgaggactgtgaggaggggatttgacaaggtatgaggaactggacaaagaagctcaagcacaaatgaatgaggagctttctgggtggaagcttgttgtaggagatgtcttca

SEQ ID NO: 56945 - DNA, 158 bp, Gossypium hirsutum
  Clone ID: uC-gsflnu33B013b04b1
tgaataccggatctgccatgattgaattctaatgcctttgtttatctaatgaacaatgcagatgtatttcactattgattcaacattctatgtttcattcacatttatgttatatcttacattacggattgggggaaaaaaaaaaacaataaaaatac

SEQ ID NO: 56946 - DNA, 512 bp, Gossypium hirsutum
  Clone ID: uC-gsflnu33B013f11b1
tctattccatcttttcaaagctatatttatcttttgaagaaattttatcactattaaaccctcctaatggcttctagtgctacattatcttctcgacgtgctaatgttcgcagtcggctgtcagtaacggtttccgagcttgaaaaacccgagcttcctttgaagtcaattcccggtgattatggacttcctttcatcggtgcaatcaaagaccggcttgattatttctacaaccaaggtcgagacgaatttttcaaattcaaaatccaaaaataccaatcgactgtacttcgaacaaacatgccaccaggtccattcatttcttccaacccaaaagttgtcgctttacttgacggaaagagctttccaattcttttcgacatatcgaaagttgaaaagaaagaccttttcactggcacttacatgtcttcaacttacctcaccggcgggtatcgaattttatcatatcttgacccatcagaacccaaacatgccaaactcaaacaacttct

SEQ ID NO: 56947 - DNA, 517 bp, Gossypium hirsutum
  Clone ID: uC-gsflnu33B018g02b1
ttgacgcgtgggtccggcctaaccgtttttctttccccgtaacaatgtcgcgctcccttcaatttttcactccctcccgtgctccttatttcactctccataaacttccgtcgacatcctacacccggttcccggtaattaacttcccgagcaaaaagcactatatcactatcacgaaatcgttatcttcagatctcgatgcagcgtcatctcaagtactggattccggaaacggacagaccggagtttcgcgggttttatcagcggacaacgtggtggcggttcagtctcatgcgccgtcggaatcgggagcggcggccgggatcgaggttgacgctgtgacggaggcggagctcaaggagaatggattccggagcacgagaaggacgaagttaatatgcacgattggtcccgcaacgtgcgggttcgagcagctggaagcgttggctgttggaggtttgaacgtggctcggattaacatgtgccatggcactcgcgagtggcatcaaatggtgat

SEQ ID NO: 56948 - DNA, 521 bp, Gossypium hirsutum
  unsure (1)..(521): unsure at all n locations
  Clone ID: uC-gsflnu33B018g12b1
ttccacccgcctctcgtaacagccccggtgtcctattcgtttgcactcatagaaccctaatggaccctgtgatcttatccaacgttctaatgcgcaaaatcccagcagtcacatattccatttcacggatttccgaaatcctatcgccaataccgacgattagattaactagaatccgagaagtggacgcagaaaaaataaaaaatgaattagctaaaggtgacttagtagtttgtcccgaaggaacaacttgtagggaaccttttttattaaggtttagtgccctatttgctgaattaactgatcgaatagtcccggttgccatgaactatagggtagggtttttccatgcaacaacagcaagtgggtggaaagctttggatccaatcttcttcttcatgaaccctagacccgtttacgaggtaacgttcttaaaccaacttncgatggaagcgacatgttcatcggggaagagtccagaagatgtggctaattatgtgcanagaatcttggctgctacg

SEQ ID NO: 56949 - DNA, 466 bp, Gossypium hirsutum
  Clone ID: uC-gsflnu33B018h08b1
ttctggatggcactgcagtttttgtttccgccacatcagtgagttcatatttaagatgaaagcttacagccataatgatagagtgaggttctctcattatttgaacccaaagagagttcagagagttatttgcaagggtgccgatctgtttgacatgctcccggaggagtacacattcaaggatataattgggaaaatgggacctattcctcattccttctcagctgttcatcttccatcatatcttctagagaatgcagataaatataaatttcttttacctggaaattgtttgcgagaaaatgagtgagtcttttgtaaaggcttgtcagaattgctactgatgtgactccccccgaagtgttcaactgaacaattaatgactgctgtgtgttaccgggcacacgtttttcggttttcgcagttgcaaaaaatgttgaagagttttggataatgcctgtgaatt

SEQ ID NO: 56950 - DNA, 482 bp, Gossypium hirsutum
  Clone ID: uC-gsflnu33B019h09b1
tcacgcgtccgcccacgcgtccgcttctccagccgttcctccgaatggattggcgttccttcaatctccgatgccaaccccatcgcgaaacttcgctcaaatccaaccccaagaactcgaacacatcttcaagatgttcgacgctaatggcgacggcaagatctcatcgtctgaactcgcttccatcatgggttctctcggccaacaaccctccgatgaagaagtccaaaagatgatcaaagaattcgatgcagacggtgatgggttcataaatttcgaggaattcgtggagctcaacactaaaggagtcgattccaaggaggttctggagaatctgaaggacgcgttctcggtgtatgatctagatgggaacggttcgatttcagccgaagaactgcacaaggttcttaaaagcctgtgagacgattgctccattactgaatgcaggaagatgataagcggagtcgataatgatgggaacg

SEQ ID NO: 56951 - DNA, 524 bp, Gossypium hirsutum
  Clone ID: uC-gsflnu33B022b03b1
tcatctatccttggcaaaggatactcattcctaatagtcagtttattcaattaccgatagtcgatgcaaaaatgcatggacccatccttcttctttacgaacaacactggtgctccccatggagacacgctaggttgaatgaatcctcgatccaatagttcttgtatttgagcttttaattccaccagctccttcggtgccatcctataaggagcgatggacactggagctgttcctggcagtagctcaattccaaaatcaacttcgtggttcggaggcaacctagggagctcatcagaaaatacatcgaaaaaatccttaacagtttagatatctctaatagaaggaccctcggaatcagatgtaccactataggctagaaacgccttacaacccttgcgagacagttttccggcccttaatgcagagatcacatttaaacagaaagtccctacgttccccaatcaaggcagcttcttaccctcatacactttaataccatttgcttagagcacattcaaact

SEQ ID NO: 56952 - DNA, 542 bp, Gossypium hirsutum
  Clone ID: uC-gsflnu33B022c07b1
cttccacgcgtccggagaggagctaaaatagaatactcccaatcaccaacgcaacagccacagtcagctggctgcagaggattatctcattaactacctagctcggacttcaattatttgaagtacccattcccagcatatgtattaactggccacttcaaggttgcatcgtacaaaccttttttatttttagcaaccgaatcgaattatttacttgcgatgcctttgtataagtagcagtcattgaaggaagttgttgctttctgcaaattcctttggctccgcacattcaccatgtccgtgacgcctagatggagtagaaagaaatcccatttccctttacttgctgttcttctcttggccttcataacttgttccattctttacaatgaattcagcattcaacaaatccatgaaagtccggatcatggttctactcctaccactccacaaacttcctttacttatgtgaaacctaatcttccaaacggagcttcagaggttcttggatcgattcagaagttgcaactcaactaggaact

SEQ ID NO: 56953 - DNA, 490 bp, Gossypium hirsutum
  Clone ID: uC-gsflnu33B022c12b1
cacgcgtccgcccacgcgtccggcctattcttcttcttccttcttaggttcctgctttgccaccccacaaccatatctctcgctatctttaaaagaaaatcgaaaaagggggttaaatttagcatttagtccttgaatttccattttcctttttgaaacagccctttgtttcacttcaagaggaactgagaactcagaattctgaagaacccattttggagatataattttcttttttctttttgctctttttgtcgggtgaaaatagtatcttcttcaacggaacagacaagaaactaataccccatttatctattttgtcagtatggataagcttgatttgctttaagaagcagcatcggtttcttcaacggatcctcctcccaaaggggagaacattgtactgaagaattaggatttttttgaggtggtaagagtaatgttgtctaaaaatgatccaattgaatcgatttcgaattcgattcaattt

SEQ ID NO: 56954 - DNA, 395 bp, Gossypium hirsutum
  Clone ID: uC-gsflnu33B022e07b1
cgcccacgcgtccgcccacgcgtccgctttttcaactctcttacatccttcgccttcctttcattacccccttcttctttccatcatttctccgaacactgagtgaaaaatcccatcctcttctttgtaattaccctcgatttggatttgggaaatatcccagtcaaactctcttttttctttttcctatcaattcatgattttgtgtgattttaatccaaaacccatcaaatcaatattggatttttcttggcttaatttctcgtgaggtttttttttttgatcaggtgattcaagggatcaactttctcgattgggggtactttttgttgattccaaagagatgaatttcaggagcctggaggacttttggcccttttatgtgaatcagcact

SEQ ID NO: 56955 - DNA, 384 bp, Gossypium hirsutum
  Clone ID: uC-gsflnu33B022f07b1
aaatggagggtcaggggagtgtgccactaccggttgcatgacggatttgaataaaaagtgcccgtcggagctgaaattcgatggtggcgacgcctgcaagagcgcgtgcgatgccttcggcaatccagagtactgctgtagcggtgcctacagcagtccaacagcttgtaaaccgtccatttattcagaagtgttcaaatcagcttgccccaaatcgtatagctatgcttttgatgatgccactagcactttcacatgcactggggctgattataccatcacattctgtcccaattccccaagtttgaaatcttcaaaggatcctgctgccgaatcaaccggtgaatcaggaccggatacggactccgtgcaggcggctgcact

SEQ ID NO: 56956 - DNA, 534 bp, Gossypium hirsutum
  Clone ID: uC-gsflnu33B022g06b1
acgcgttcgggtcatgtcacgagggccggtaaagctgtggaaaaccatggtgtgcttgggtgcctgcaggacatgagagaagaggttagaaccctagctaggaaaggttcgagaagtagtgctgtcgggtatgagtgcgattggtgtcgaagagcaactagtgccagttattcagcgcttgatgacatatttagagcatggttcgaatagtgacaatgattggaaaaccgaagtatcagtagtcggattatccaatggactccccatcttcaagcaatagaaatgcccaacttgaatctgctagttccacgaaagcccctttgttgggaaaatcaatcaagcaagagaagaaaaataaggatcacatagttgcagtgagagatatcgagttggaggaacatcggaaatcaacagatagagtaaaaactgattcaaccacattagatccaagtaaccaaaacggagcaagttcatcaatcacattacagaaggacttgggttcgacaaggatcagacccggatcttaaaacatgt

SEQ ID NO: 56957 - DNA, 540 bp, Gossypium hirsutum
  Clone ID: uC-gsflnu33B022g09b1
aataacctccccacaaaaaacctcctttcaagaaggttttcaaccagtgattttctttgtcctctttgtaaggaaaatagagaaacccttgaccctattttcttcaattgcaactttgtgagagcagtttgatttggctctcctcttgctcttcgcattgactccgtaaacgaaaattctatatccaattggattcttcaatggcttcaatgaaataatctctcgcttgagtactcaagaaatttctaccctgctatgtcttgcactctctgaataatctggaagtcaagaaataaactcatatttcgaataaccatcccttgccccattggtgcgattaaaagaatctttgacatgtttcaatcgtcctcaattccttcccggacacctcctgccagaacacattcggcttctatttcggatgctcgcacctcacaatggtctctctctctgaacatggttcaaaatagacaaaataacatgattagaggatcaaccatcatccataattctaacggtttccagctgatgtctatccat

SEQ ID NO: 56958 - DNA, 331 bp, Gossypium hirsutum
  Clone ID: uC-gsflnu33B023c08b1
atactctcttacatggaagcatggtgacatattccttatgtgtctctcttcttcgcaaattttgtcctcttaccttttgaagccagagagttttcccccttcgtataggtcatttctcaataaacatgttggaaaggatcaggtcatcctgcaaggcgttaaagagcatgcaagtggccttccatacactaatttggaagcaatagagaaatttttataaggcaaaaggagcagacgttaaattagatccaaatatgaaaatcccatgtttcgtgattcaccggaatcaagcatgcagttcacatgtttttactttttttagtgaagcatt

SEQ ID NO: 56959 - DNA, 478 bp, Gossypium hirsutum
  Clone ID: uC-gsflnu33B023c10b1
atttttgctcaactcacaggtcatgaagatgtgggggagaactggacgtgggctgtgctacacgcgagttggccggtcgtgggaggtgcgccgacgcgcgtggtggaagggagcagcggctgttttccttttttgttgaaaagttagtttagttttgggtcgtttgggatctagggttaggtttattttgggcttaattgggtttattgcttttgtaattttggactcttcttttttggatttttttatgtggattatttgggttttatttattgggctagaattaagtatcccgggctaaaattgggtcttacaaaaatcacaagttcaaaagtcttaagactctacggtcaaaaacctagaaatcaagttcgcaactacatttatataagtttttagtttaatgaaaaaatatttgtcagtttgtttactaatccttataccatttcagtctcttccttctttccattttggggtt

SEQ ID NO: 56960 - DNA, 254 bp, Gossypium hirsutum
  Clone ID: uC-gsflnu33B023f08b1
ctcacgcgtccgtgccctgggggttggaaggagtcttttatctcacggaaatatgcccccatcttttatggtgatgagcaatggggattcacgagacgagatctccgacactaatccttcacttgctctttcccttgcattgccttatcctaaggcaggtggtagcggcagcggcaccacattaaaacttgcttcagacatgaagttacccaagtgccaatgaggtgaacactacactgttgctttttggtggc

SEQ ID NO: 56961 - DNA, 150 bp, Gossypium hirsutum
  Clone ID: uC-gsflnu33B024g11b1
gctggcttctgcgaggaaaaggcttcaagaaagttacaaggaagctgaaaatgccaaaaagcaaagaacggtacaagtgatggacattcatgagctaccaaaacccaagaatgccttctttgccaaatacaagggaggttctttctactc

SEQ ID NO: 56962 - DNA, 248 bp, Gossypium hirsutum
  Clone ID: uC-gsflnu33B025d12b1
ttttgggtttttctctctgggtttcaacccagaacctggccaagcaccggtgcacaccagccgtggctccgccatacgcggcggctggaggtgcccaaaatcgggtcttttaatctccttctattcccctttttttttcttttaaaagaccccaaaaaatacttttaaaaaatgttctggttgagaaaatagatgagaaatagcatgcaagagcacggtggcctccacctgttttttgaaccccctcg

SEQ ID NO: 56963 - DNA, 162 bp, Gossypium hirsutum
  Clone ID: uC-gsflnu33B025h11b1
tcgtcacgcgttcgctagccgccattggaatgataacgtcggtaatcatatatgaaaagatcctcgtaccaatactaaggaatgcaactggaaacgaacgaggcatcaaaatcctccagaggattggcattgggatgcttttctcaatcgttacaatgatcg

SEQ ID NO: 56964 - DNA, 504 bp, Gossypium hirsutum
  Clone ID: uC-gsflnu33B049e02b1
ctcactcgtccggaaaaaatcagtctactaggagatggaaggtagcagtgggaaaggctacgcctgggcaatctcagctggtttcaacgctgcgttcgctgccgttgccgctaaattcttgttacatccgcttgaaagctctttcatctcttcaagcaacagttacgaattttgctactaatttcctcacttctgggcttgccggcttcttcttgttcgaggaactattgtcgtttaagtggtttgcaggtgccatgatcattgtaattggtgtacttatcctcagcaagtcaagcgtagagaagagggaaaagaaggattagagttgccattaatggttgctgcatttcagctattataactttttggattcttttggcatgtctttccaacaactaaagagatgttttcagttttagcacttagccgaatccgttggattcgcgattttcatccttctttttttgtgcgtgtgcatgtgtatttgactcggtattatattaa

SEQ ID NO: 56965 - DNA, 480 bp, Gossypium hirsutum
  Clone ID: uC-gsflnu33B049f09b1
tcgttcacgcgttcgcccacgcgtacgtccacgcgtccgtccacgcgtccgctcgaggatgagagttctgacaccatcgataatgtaaagtttaaaattcaagacaaggaaggcattccaccagaccagcagcgtttcatcttcgtcggcaaacagcttgaggacggccgtaccttggccgattacaacattcagaaggaatccaccctccaccttgtcctccgtcttcgtgggggttatgcagatctttgttaaaaccttaaccggtatgaccattaccctcgaaggcgagagcttcgacaccattgataatgtgaagtcttaaaaattcaagcaaggaaggcattctaccagaccagcagctgttttatcttcgccggaaaacagcttcgagatggccgtaccttggtccattacaacatccataaggatttcaccctcaacctaggccttcgttttcatgggggtatgcctatcttc

SEQ ID NO: 56966 - DNA, 421 bp, Gossypium hirsutum
  Clone ID: uC-gsflnu33B050a07b1
tttcaatcctgacctcccttgcttccttcgtctccggccagtagcagtcatccctcaggtttataggggtgttaaggtcatcttctcagctgtgtaacttttcttctaaaggaaaccattcaaaggcgtaggaactcaaagttggttattgtgccacaacatgatgagttcaatgtcgcaacatacggagtagaatgctaaaattgctatatctataacactcctaacccgtatccgacgtccaaacaggcttacagagtgttacaagtaatcggtacatacagaacatttacagattaatcataacataactattttctttctgagatcattatattcatataacgacctttatttgagccatttaatcctcaacatatattttaaaattcaattataaactcactcgatttttctaaac

SEQ ID NO: 56967 - DNA, 390 bp, Gossypium hirsutum
  Clone ID: uC-gsflnu33B050c08b1
gtagaaactggatgctattggacattacttaatcttggtgatccactagtgcttttggtggcgtgagtctcacatagcacctgacggatctgagagcggaagcgcaaagattggggcctgctggccttgctttgcactatgcaaatataattatgcaagttgatactcttgttgctcgatcaagttctattcctgcaaatacaagggaggcattataccagaacttgccaccctgcataaaatcagctctacgcccgaaattacgatcttttcatgtcaaagaagagcttactgttaccagaagtcaaagatgagatggagaagactttgcagtggcttgttccacttgccgctaacacaaccaaagcccatcatggttttggttgggtt

SEQ ID NO: 56968 - DNA, 422 bp, Gossypium hirsutum
  Clone ID: uC-gsflnu33B050g06b1
tgggcttcggctcaaacattgaaaggcggagaccaactggttttcaagtactcatcagggatacacagtgtagttgagcttggaagcgagacagcttacaaaaactgcgacctgggaacatcattggattctaaaaatacaggcaacgatgtggtgaaactcaacaaagtgggcactcgttatttggcttgtggaacattaggccattgcgatcagggcatgaagatgaagatcactacggtcgtcggcaatggtactttcacgccggctttcgattctgatactttggcggcggctttttttccacgatcttttactacatttcttctgttttctccattgttgatgccttattttctgctttaaaactgtattgcaagctttggccatagcctattttaatatttcggtgtggggatttg

SEQ ID NO: 56969 - DNA, 458 bp, Gossypium hirsutum
  Clone ID: uC-gsflnu33B050h02b1
ttcacgcgtccgcccacgcgtccgcccacgcgtccgattacccgctgagttaaagcatacccttttgtttacaacctgggagctagagaccacagtgagatcagctaaagaggagattactaagagagaacttgaactgtttcatttcaaagatgttttaaccaagacaatgaaagagagagatgaagctcaatgtagatgccagaagcttatggtggagaaattcatgcttgagcaacaattgcaacacaaagagcagccaaaacagcaacaaaaccagcaggacactgcttcactgtctggtgtttctagcagtgaagatgaatccaattccaacataagtttagtttcatctccaggtttggactcattgccacaaccatctcttcctcaagaagccttgaaactagcagctaataggccactacctgagaaagggaggctgcttcaggccgtga

SEQ ID NO: 56970 - DNA, 440 bp, Gossypium hirsutum
  Clone ID: uC-gsflnu33B051e03b1
gataacactgacagaacttttaaaactcatgcaccaaatctaattaacggtaagaaaagtcagttatctaaatgagaagcaaaaattctgaaattgtactgggtgtgtggcgtaatgaccagcttattcccatattctctcctatttttcctttatttctaacgttcttttctcctttattagctactcttttccccttctttgcaaatatttttccttctctcttggtttttcttctctcggccttctttctgtgttttcttcaatctatggctctcccattcattcgccgactctctctctctctctatatatatatcccttcaatttttttcctcaaatttttttagctttgggtaaccaaattccggtttttgtttttttgctgtctctttttttttaatttttgaaacccttacttcattgaagaattgttttta

SEQ ID NO: 56971 - DNA, 348 bp, Gossypium hirsutum
  Clone ID: uC-gsflnu33B055f03b1
gttccatttggctctgcagaggttcgggctattttcagcagtggtagtggccgtgttactggatgtatgggaacagagggaaagatagtggatgattgtcgcatccgtgtcaattgaaatggtcgcacagtccatgtcggcgttcttgattcattcgcgaagggctagcgggattgctaacagagggatgcaagaaagcttccttcgtgtgacacaaaagggacaaccttgagaagctgtcataccaggaaaggaaggcgaacgttgacgaatggttgaatggctttcatacacttggcctagttttcaaacctatgccgctgcttattgcactgtattacttttggg

SEQ ID NO: 56972 - DNA, 516 bp, Gossypium hirsutum
  unsure (1)..(516): unsure at all n locations
  Clone ID: uC-gsflnu33B056a07b1
tgncgttcccccatggttctcacactctgcttccctatccattacaacactttctagctcgacccgactttgtattttcagtcatctcaacaagcaagtactataaaaatgagtgtctctggactgattgccagtccctcaagatgttgccttcggctatctgactgcaatcaagggttggtgtgcaggcaagttccatctattccaattgccagcaaacctaaggcgaaatttggcaagcttcatcttgaaagaagtaggttgacagtttctttcagaaggtggaagatgcagaaaactcatctgatcaaatgtgcaatggatgcttcctatggcgatatggctagtgaatcaggagcagctatgtttcctagaattaatgttcgggacccatacaaacggctaggaataagcagggaggcttcagaagatgaaattcaagcagcacggaacttccttattagtaaatatggngggcacaaaccaagtgtggatgcaattgaagcagcccatgac

SEQ ID NO: 56973 - DNA, 404 bp, Gossypium hirsutum
  Clone ID: uC-gsflnu33B056c04b1
taaggaactcagaattttctgatgtgaagccattattattacaagaaccatcacaaaagccaattgttgtttcaatggcagcctgtaaacaagaagatattgactccgaccatatcccacaatattacagtgatgagtttcattcttcactgttggaggctgctgattcatcttaccctttcgaaccagaccagtctgatttatcacaagatgaagaagatagcttacatcctcctgcaagttcgtctaattttggtttccctgttgaaggtcatcctttctggtcttggacttattaagttatatatctacaatgcaatccatatgtgtgtatgtgtgtatatgtatatatataaattgagagatcaatcaatggcaccccaatcgaaaagtatgtagcaagt

SEQ ID NO: 56974 - DNA, 423 bp, Gossypium hirsutum
  Clone ID: uC-gsflnu33B056c10b1
gcttcagctcctcttccaattcccaatcccactgctctttctctcttcactttcatttctatcgcctcttttaactcattacatttttttacctttttctcttactagactgcattttttgtgttcgattccaaatgggtttctctttttagttttataaacttgaaggaaaccccactctgctgcagaaagagatctgtttttgtttgaacttgaaacttgaattgtgtcttttgataagtttgaatgtacatggagaagttgatgaggctgattgaaatgactcctttacttctgctgctttttcttcctttagtttttgctggacatgactataaccaagctctgagcaagagcattctgttctttgaagctcatacatctggttaccttcctcataaccagatagttacgtggagagcc

SEQ ID NO: 56975 - DNA, 455 bp, Gossypium hirsutum
  Clone ID: uC-gsflnu33B057f04b1
cccacgcgtccggtcgttattgactactttactaagtgggtagaggctacttcttacgccaacgttacaaagtcagcagtcagcagattcctaaaaaatgagatcatatgtcggtataggatggtagaaaggattatatccgataatgcattgaacctgaacaacaacatgatagtaacggtctataatcaattcaagatcaaacaccacaaatcatcaccatatcgcctaaaaatgaatggcgcggtagaagcggccaataaaaacatcaagaagatcgtagggaagatgactgaaacttataaggattggcatgagaagttaccatttgccctttctgcctatcgaacgtctatcagaacctctatcggggcaacaactttttcattagtgtatggaatggagggcagttttgcccattggaggagagattcctttccttccggttttattag

SEQ ID NO: 56976 - DNA, 269 bp, Gossypium hirsutum
  Clone ID: uC-gsflnu33B057g07b1
tcccacgcgtccggggagataagaaaatggggtggttttaacacatgcactgttacatgtatgacagaagattaccgaaaacttaattctaaaactatctgcatatgcatcatgctaatgatgaatgatatgccgaccattaaagtttcggtactgattgtctaaatgcaagtatgactttaatatagagtttcataccgaaaagtatggatagctaaatatatagcaatggagcagttgtacggagattgggatgcatcctacaatga

SEQ ID NO: 56977 - DNA, 367 bp, Gossypium hirsutum
  Clone ID: uC-gsflnu33B058a05b1
gttatgttaacttttccgatccgaatccaagtgccgttccacagcatgagtgtgtgtcgaagaatgcccaaaagaagctgttgaagcatccgaagtacgaggcgagtaaagccgcgaagaaagcacaaatgagagagcacacacagagggatgcggagaggaagcgaagagaatgggaggagaaactggccgtcctacccgaagactaaaggcttaagctcatatattcaagaaaagaactgcggagagagagggtggaaaaatggtccgaggaaagaggcccgaaaattcagagactgaaccatgtcaaggggtcggggcaaaacattggcgtagaccgtgtatggtctcatatcaagacccactc

SEQ ID NO: 56978 - DNA, 471 bp, Gossypium hirsutum
  Clone ID: uC-gsflnu33B058d04b1
ttttggtttttggaaaagtcaagcagttattaaagactctgactgctttctatgttctgtcatataacctataggctatagtattcaattgtacttaactaattgcttgtgtgcgtgtatattgtaaagttcacccctatttcctctcatattacttcatgatcaataagatctaagaaagatggtttattaaaaaaaaaaaaaaaaacgtggatgaattgacacatgaatgaggacctttattatctaattatctcttaaatgccatttggagctcactggtgttcatttggaagcttatcccgactcccttcatttgaggtaggagagttttcatcaatctcatatatgagttactggttcaagaagctatttttgctgaacattcagcatttgctggtcatccatgtccgtatgtaggttactatggaccaacggtttattcccttattctaaaattcctgtggaagt

SEQ ID NO: 56979 - DNA, 313 bp, Gossypium hirsutum
  Clone ID: uC-gsflnu33B058e10b1
tcggttcgcattatgtttatattgtcaacttcaggttcatttgttgaaacgccagccttgtagggcggaggccgacaaaacaaaactaattgaaagtgtggaatggtgattttaagaagctactgactgattggttctaagtaatttaaagattggctcattgtactgctagggcacatctctggattctactcttctaatgtacaggttgtaaattgatattctgctgaatgcaaaagatttgtgaagacatgttctttcaaaaaaaaaaaaaaaaaaaaaaaaaaaaaaaaaaaaataaataaaataaaat

SEQ ID NO: 56980 - DNA, 222 bp, Gossypium hirsutum
  Clone ID: uC-gsflnu33B058g10b1
ttgtgtctccttgataacaacacacaaaatggaaggccaagattctctgagcagatgaaattggacacagagacttctggttttttttcaggacatcgaggtggacgtggtggtcgctttgggggtggttatcatggaagagggtatgggcatgtggggaggggtagagtactagatatgtctatgctagctacataggtgagtgggaaatttctaactgtt

SEQ ID NO: 56981 - DNA, 320 bp, Gossypium hirsutum
  Clone ID: uC-gsflnu33B060d07b1
aggaccggccggatttttcgggtcacccacgcgctgcgaaagcagaacccaatccgccggctgctgttttcttgctgacgcatcctttcaattctcaatggacccagtattccacgttgaagtcgcccctactctttccttcgccctccgcgcctccgcctcaagatcccctccgctcccttccttccccatgaccgtcttttctctcgcctcctacttacttatggtggtctccggctttgtctccacctcctcctggagtcccctggcattggttctacccacgatcctgcctctggcccccgccactactgttctct

SEQ ID NO: 56982 - DNA, 337 bp, Gossypium hirsutum
  Clone ID: uC-gsflnu33B060f01b1
ttctacaataacaggtgcgttttttttttttgagttagattattggagattattggccttttaatgggtgatatgaaaattgtatcgtggaatattaggggactaggtttagatgttaaagtagccatggtaaatagattagttaaaatacacagggtgaatatatgtttcttacgggaaataaagttagaggaagtgtcaggggatttagttagaagaatttggggtgacaataattttgattttagatttgtagctgttgtaggttgtttgggagggctaattaccatttgggataatcgttttttctggtgaaaaaggattattgtgttaatcg

SEQ ID NO: 56983 - DNA, 414 bp, Gossypium hirsutum
  Clone ID: uC-gsflnu33B060f10b1
tacaatatcgaatttggagatggagttaggctctacttgggcagtgcaagaatcaataattaacggttctcccatttccgacgacctgaaaatccccgaaacaaatgggaaacggaaatacttaatggttgtaggcatcaataccgcttttagtagcagaaaacgaagagattcagtccgtgctacttggatgcctcaaggagaagaaagaaagaagcttgaagaggagaagggaatcgtaatgcgattcgtaatcggccatagtgctacctccgggggtatcctcgatagagctattgaagcagaagaccgaaagcatggggactttctgcggctggagcacgttgagggttatctcgaattatcagccaagacaaagacatacttcgccactgctgttgtttgtgggatgcc

SEQ ID NO: 56984 - DNA, 363 bp, Gossypium hirsutum
  Clone ID: uC-gsflnu33B060h12b1
tctattaaatggcggcttctatcggcagtgtttttttctttctaaaccattctggaggtatccccatgtactacatcgcatttcacaagtatgcgaatcaaggattctacaagaatgaatttgaaggattaagtttccccggcaatcaagttgggggacctcccaccattactggtgatgaagtcttgagaagcttttggcaagctgaaatgggatactctaaatggattgaacttgcaatcttgtttggcaatggtggttgtataccgtctcatgttctggggaattattattacagtttaaaagattaagccttttatcaaagattatatggcggccgccccttttttttttttttgttaa

SEQ ID NO: 56985 - DNA, 386 bp, Gossypium hirsutum
  Clone ID: uC-gsflnu33B061b08b1
tgttcgcttggtcccaggggagcacacgtatggaatggagaggtttgggcgctttattatcccgactaaaggggtgcatgatgctaactgagggggtggccggtgggcttaaatgacaagtccatgatttgaaagtctgatctgatatacaatcactgtagtgtaccatacatggctcaccatatgaagaatacgttgacactttcactttcaagctacaggacaattgtgcgagagggcatcctggatggaattgacaggccgttcgtttcacaacgtgattcactgggaaacacgtggcgttaccccacttgttaaaattgccgctcgtaccatttctttcagtacgtgttgcttgatagagcgtatgaatatcactcccttcc

SEQ ID NO: 56986 - DNA, 508 bp, Gossypium hirsutum
  Clone ID: uC-gsflnu33B061d09b1
tgaacgtttctcgtgggccgatgtctccgtggcattctccctcttgcctgccttccaacatgctctcggcgagggtgagcgcacgaagttcacccatgtcacacgctggttcaacactgttgtgcaccaagagaacgtcaaggcagtcgtaggagaagtccaacttccggcaaaggcttcaactttcgacgccgcaaagttcaagcaactttccgctaaggctcaagcccagaagaagcatgatcaaccgaagaaagagcagaaacaaccggagccaaagaaggaaaagcctaagaaaaaggaagaggaagatgaggcggatgagcccgcggttcaagagccaaaattcgttgatccgtttgcgtcgatgccggctggaacgttgaacatggacaactggaagcgtgtttactcgaatgaggatactgcgaccaaggctattccgtggttctgggagaatttcgatcccgaaaactattcgatatggtacggggaatataagtaccca

SEQ ID NO: 56987 - DNA, 452 bp, Gossypium hirsutum
  Clone ID: uC-gsflnu33B061f03b1
cccacgcgtccgcccacgcgtccgcatcaaattattactctgatagctccgcagtagttctaagcaatgtgggttcctcttcatcttcttcaacagttttggagtcagctccagttgcaggtggagaactgggttactggaatccctcattttcatcatcatggtctgatctcccaacaactaatggtgcatatccgtaaagaacccttttccccccctttcattttatctcagcttttaattaatatgctagtggtcgttgcagtgcattctggtatatggatatatatatatatgtggctgtagggtagctgcggtttgttttataacgtacgcttgccaattcagtgttgtctatgtctgcgaacagagatttgaggttgtgcctaattaacttattagaatgtatcaaggttgaagatgaagtatcataggttggacaaatgttagtt

SEQ ID NO: 56988 - DNA, 511 bp, Gossypium hirsutum
  Clone ID: uC-gsflnu33B061g05b1
tttcgcaagcaactgccaacacccaatccccttgtttctctccgctaaatgctaatggcagcagcaaccttcaactctctcaccctccccttctcaaaaccagaattcccattctcctccattgcaagaacccatattcccaccgccactctcaacctttctcggttcaggcctactggcttccttctatgctccctttcaagtgatcaccccacaaccgccgcgggtggtcaacttcaccataagaccaacaccaatagcaccgacccccagcctcaaattcatacttgtacatggaactggaagggctattctattcgctatcagtgttctgggagtagcggtcctgccttggttttagtacatggttctggagcaaacagtaatcattggaggaaaaatattcctgttctagcaaaatcacatagggtatacgcaattgatcttattggctatggatattcggacataccgaatcctcgtgaagttggggactcattctatacattcg

SEQ ID NO: 56989 - DNA, 504 bp, Gossypium hirsutum
  Clone ID: uC-gsflnu33B061h10b1
tctctctgctagggttatgaaccctaaccttggcgccgtcagcccgtcgatcgagaggaaaaaaggctctcctctcctccttttgggtctgacttcagcaacggagagagtctccggcgacacaatcacagggattccaggtgtcagaggcacgtggaggcaagccaagcggtggtggcgcgcgtggtggccttgctggcgaggagcgacggctgaaggcttggcggctaggtttttttgtctgccgaaaattttgaagatagtgggctgggatccgggctagggtgtataaaatatgggtagggtctaggacaaaccatgctcatggcctttgtttctagcacggatgctgcttgcataccttgtaatggctgcattgcctgcactttttaggttttaaacacttggtaatcccccactttcaacacccatggcggccatgcagctcattgcaagcatgaaccaaataccacttgctgtcgcctctcgagcatatttaacatg

SEQ ID NO: 56990 - DNA, 517 bp, Gossypium hirsutum
  Clone ID: uC-gsflnu33B061h11b1
tcccacgcgtccgaattttttgtctagttttgctcttcatttcggtagcaaaaggcctgaatcccaaatgtgacatccaagaccatggctcaaccctccaagtgttccacatttacagtcaatgctcacccctcaaaccctcaaagccactctcatgggaagaggatatgttgtcaatgctagccaaggaccaggccaggctgcaatatttgtccagcctggtggctgggaaatctgtggtgccagtagcttcaggcaggcagattgtgcaaagtccaacctatattgtgaggattaaaataggaaccccaccacaaaccatgctcatggccatggatactagcaatgatgctgcttggataccttgtaatggctgcattggctgctcttctaaggtttttaacactgctaaatccaccactttcaacacccttggctgccatgcagctcaatgcatgcaggtaccaaatcccacttgcggtcgcagcgcgtgcatattcaacatgacgtacggcag

SEQ ID NO: 56991 - DNA, 378 bp, Gossypium hirsutum
  Clone ID: uC-gsflnu33B062b11b1
gtggtctgtctctctctgtctgacattacgagaaggggtttttatttcaagaattcatgatgcaaaaaggggggcctctgccaaaagttgtccaatgggctgacacagagccggcatctgctgggatattactgggatccttaacaaggactggactgggctgcaaacatgagggaaacctgaagcaccatcaggaggtgctccttatgttaaggctggagcggattcgggccgaacccatgctgactaatggctgtgctgcatgcacgccccgactgcggattcttgaagtgatcctgcctcggtaagagctgagccacacgtctgtgcaaaaccccaccaacctgcacaagatacacactatggggcttgataaac

SEQ ID NO: 56992 - DNA, 294 bp, Gossypium hirsutum
  Clone ID: uC-gsflnu33B062c05b1
caaatataagctagaagttttcatcgagtctcctacatcccactgcggtttttccaacgataagttgggtaaagttcagtatcgagtaatgttcctgccatgaaagaaggtaatcatttcaagcttttcgaattcaagctatagatgatctgattgcttctgttctaacttctcgcagtttttaattttgctcccttatggccttgtagagttatttttgttacaatttgttgcacgcttcttgaattgaattattgagaggatgttttcaaaaagggaatgttaaaaaaccaa

SEQ ID NO: 56993 - DNA, 447 bp, Gossypium hirsutum
  Clone ID: uC-gsflnu33B062c12b1
tcgggacatttatatgaacgcttccttaaaattatgattctaagtgtactaaagaatacccaccgtccagtgaaattctggtttataaagaactacttgtctcctcagttcaaggttgcatatatctttttggcattcgttccatcttagtatagcacttctgtttcacttgttagtgcataatgatttaaaaagcatgtctaatgcacatatgctttcgggttatgcaggatgtgattccgcatatggctcaggaatatggctttgattatgaactagttacctacaaatggcctacatggttgcataagcaaacagaaaagcagagaattatctgggcatataagattttgttcctcgatgttatatttcccatttcattggaaaaggttatatttgttgatgctgatcaagttgtgagggcagattgggagatctctatgacat

SEQ ID NO: 56994 - DNA, 323 bp, Gossypium hirsutum
  Clone ID: uC-gsflnu33B063a05b1
tcctttcgtccgcaaaaagtaagctgaatacaccgttccgtatgcaatcgtgcatgtaaacttacctttaattttgtgtttaatgcttataataattgattttgagtatgctgttgatgtagttgtaagttggtttctaggtttacatattagtgattgcatgtatatgatttggaatctttatagatgttgtgtttcatttaataaaactggcagtgaatgaataagagttgcctgtactttcgacggtagccatttcataggatactattatcacatagtggctggttcacgttaggcattctgagttcgtagttgagttt

SEQ ID NO: 56995 - DNA, 515 bp, Gossypium hirsutum
  Clone ID: uC-gsflnu33B063a08b1
ttccgattgaaccgataataacaccgttgcgccaagcgcccaaatttaccacagaattggcacaggatctgagagttaaaaccccttccattgccaccagtaaatgagtgaccaccacgcgcgggttccaccgctatcggcgtcggagcagcctccatcagatttgcatgaaacggcacgtcctgcgccacacgagtctgtcgaatcttatattccaatagaacatccacaagtcgttgcatgggaagtagctcgaacgagaacgaggctagagtgagaacaacgtcgtgctccgatggcaggcccacaagaacaattttcaccttctcagcctccgagattcgagatctagatgcttcgatcaaggcacaagtattttgaatcttagccacatattctttcattatcatattaccttttttaatcgaatgcaaatcatgtttaatgcgagataactttgctccggttacagcggcgaacaatcggtttgctgtactctatacatcacatgatga

SEQ ID NO: 56996 - DNA, 537 bp, Gossypium hirsutum
  unsure (1)..(537): unsure at all n locations
  Clone ID: uC-gsflnu33B063b03b1
tcttagataaagggtaatttgcccctgatattatttactacaccactttaatcaatcaaggtatagctaaagatgcattgaacttgttcaagtagataatggagaatagttacaagcctttgatattgtttcttactgtgtctttgttaggggcttagctagaactgctcttacagaagaggtgatcaatctttggactatgtagagacgcatggtttgaagtgtaacactatcatgcacaacatggacattaaaggtttatgtaaaagtgggagggtgaaaaaagctaagccctcttaccatgaattttgaggattaattggtacacccttaaatccgacttgaaaattcaatcaaattcgaagggttccnttnnaaaaaaaaaaatattttattatacttattttttataagggattactttttgttttttgtataatttttgtggtgttggggtgttggcttgggtttccttccttgtttcctcgccttggtgttttttttatttttttatacctattcgggtcatttcaccct

SEQ ID NO: 56997 - DNA, 512 bp, Gossypium hirsutum
  unsure (1)..(512): unsure at all n locations
  Clone ID: uC-gsflnu33B063e03b1
ttaattatatattaaatccaaggacatgactcttaacaagcaccattgctgctccaccttcatctttctgctattaataactgctctcacagttttattctgtgaaaagtgaacttcaattgaactactacgcagaaagttgcccaagtgcggcagagattatcaaacaacaagttattaagctgtacaacaaacatggaaatacagcagtttcttgggttagaaatctcttccatgactgcatggtcaagtcatgtgatgcatcgctgctgttacggagggtgaagggaatggaatcggagcaagaatcggataggagttttgggatgagaaatttcaagtacattaacacaatcaaagaggctgtggagaaagaatgtccgatgacagtttcttgtgctgatatcgtctctctttctgctagagatggcattgtcatgcttggaggaccacgcattgaaatgagaagcngtaggaaagatagcaagcaaagttacccgacagaggtgcaa

SEQ ID NO: 56998 - DNA, 354 bp, Gossypium hirsutum
  Clone ID: uC-gsflnu33B063f09b1
tctgtaaaaatgatcaccgcaacatacatggtaaaatatcatttccttttagtttaatcctttatatatgtatatggtaaaagtaccgtggaagcccatgtactaggagttagattgtattttaccccatttattcaagtctttgtgcattagatcaaagagcaaattggtccttcagtgtaaaaacttctgtcattttatattgttaaaaattggcgtggttgatggaacaggttgacagtgaccagtttttaacggtagaaatggatgaaattttaacaaaacgaaacattacctttagaaccttaaaactacaccactaacttgtgttgggaacaactactgtctgttcaa

SEQ ID NO: 56999 - DNA, 447 bp, Gossypium hirsutum
  Clone ID: uC-gsflnu33B063g05b1
ttattctagagctgagttgaaacaggtcattagacaagagatggagagcaatcgagattgcaaggataggcaaaagattcgcttcctgattagtgaaggaaccgagagactgaaaggtctgactgagatgcttggtatgcagggacattgctagttcaatgaaagctgcctgctgctttggtatcttaaaactctgattttgtagaatagacttcattctccacaagttaaccaatttcataaatttacttcttccatgaatataaattttttatttaattatagtttattgaggtggcaaaaaaaaaaattaaaaaaaaaaaaaaaaaaaaaaaaaacaaaaaaaaaaaaaaaaaaaaaaaataaaactaaaatttaaaaaaaaaaaaaaaaactattataacctaacaaaaaaaaaaaaaatggggggggcctttttaaagaacc

SEQ ID NO: 57000 - DNA, 354 bp, Gossypium hirsutum
  Clone ID: uC-gsflnu33B064b09b1
tgacttccgtggaagcagttattctggttgagttgttcaagcaccctcatcttttgctgctgcaagttaggaattccttctttaagcttcctggtggccgtttgaggcctggtgaatcagatattgatggactgaaccgtaagctttccaggaagctttctgctagtgaagatggcaatgaaactgaatggcaggtgggtgaatgtcttggcatgtggtggcggcatgatttcgaaaccttaatgtatccatacttgccatccaatgcgaaaaagcctaaggagtgcaccaaagtcctccttgtgaggatgcccgacagttaaaaatttatcgtacccaaaaatctcaaattgt

SEQ ID NO: 57001 - DNA, 513 bp, Gossypium hirsutum
  Clone ID: uC-gsflnu33B064f10b1
ttcacgcgtccgtctggttctgcggcatgaatctaaatacagcattcgaagcactgacctcaaaacgaccttgtggacccaataaaagagcaatacgaggagccacctatgatctggctaagaatgatccatggaaggagccctttgaaaatcttcctggacatgcttttgagggtgtagcagattgggagaggaagttgattcaagaccgtgttcgttccctccgtggaacctgattatcttggttaacattctcttaaagccgggtcacaagcgcatggcagacaaatccgcagaatcttacgtattgcttgtgggatgttgaagctgatctctccagggactattttcctgactgaataccaaattacttggtcaaatcataaatatgatctgatttttatagaagctatttgtcataaaccatacataaaacatagagaagtacagaaaacacggaatattccatgttcaaagcatgggttatatgctattgaagctaaatttttaggt

SEQ ID NO: 57002 - DNA, 456 bp, Gossypium hirsutum
  Clone ID: uC-gsflnu33B066c07b1
gcgtccgcaaaaccctaaatccctaaaaaaaacttcgatccccaaatttgaacccaattctccgatttctgatcctaaaactccatccaatttttcgagctattacggtaaatcatgggcataataagaagcagcttttcgttcatcgcaggcacagcttgcgggatttacgttgcccaaaactacaacgtacccaacataaaaaagctggttgactccgccttcttcgtagccaagcatgtcgaagagaagtaccgcaagcccaagaacaaggacgacgactagatcctaaataccctgctgttgccaagaatcaatagacttaacaggtccattgttgttttctcttctttaattatggaaaaaaaagggaagttgtctttttggaataaatacgatattgagattttctttttttgtgtacattttacaaattgggagaggggaaccttgatc

SEQ ID NO: 57003 - DNA, 455 bp, Gossypium hirsutum
  Clone ID: uC-gsflnu33B066d04b1
ttcaatccatcgagattcgagaatccagcttcacttccaccttactgcttcattccattcggtgggggacctcggatatgtccaggatacgagtttgcaaggattgaaacccttgtttcaattcattatctgattactcggttcacttggaatttactatgttcagataactctttcagcagggatccgatgcctgtcccaactaaaggattaccagttcaaatcagtcctagaaaactgccctaatattggagtctcttggtagcttaacttacaagattcctgttgcagagcaaatgagctttattttgttcacatatttaggtaggccagtaaaacacagtaggaatctcggaattatatcattggtcggaatggcatttcactgctgaaaatgtttcccgacaatgtccgaatctctagaattttcccacaaatactcgcatcgaatgtat

SEQ ID NO: 57004 - DNA, 457 bp, Gossypium hirsutum
  Clone ID: uC-gsflnu33B066f02b1
gtccgctcccctaccccgattccctttatcctcaatttccccaaatcggcagcccttttatttttcccaaaccatttctcccctaccccgattccctttattttcccccccaatttccccaaaccggcagccctctgcatctcctcatcttcttcctcacatttcattcgtcccaaaaaacatttctattcctctttcatacaaacaaaaaacaatggctactgctgcttcatgttcttcctttaccatacttcatttagcttcatcaccaccactaatttctgccctcctaatttcgctcttcccagcgataatggtggttggtgtaacccgcgatggcctcattttgcccttgctatgcctatgttcctcacgatcgctgagcaccgtaccgatatttgccccattattttccaatgaacactcctacaggttttggaaagctatcatccacatt

SEQ ID NO: 57005 - DNA, 301 bp, Gossypium hirsutum
  Clone ID: uC-gsflnu33B068d04b1
ttggactgaagaattaaccaaagtctacagtagaaaagccggatctgctcattagtcctttgatcgaagacgcagggcactgttggaaaatatggctgctgtcttctacattttgacgacacctagggcattgagcttccaccacaactctctttaagtctgagtttaacaagggacggaatgaagttctatgagattctccatactgaactagaatttttaaggggatgtatattttccatagtctttttttgaacattcttattttcgccatctgatttctttttttttacgatcccct

SEQ ID NO: 57006 - DNA, 210 bp, Gossypium hirsutum
  Clone ID: uC-gsflnu33B068d09b1
tacaactctgccgggtcatctatgcctcataatcccactgatcttcacctttcgttacctgaaatgcacctttctcaccttaataacatacttggtattcatggtagtaatactaacttcatggagagtaaatacaatccactgcttgaaaacccagggccgatcgatttcttgtctaggaactatgacgttatggcgaatggttagttt

SEQ ID NO: 57007 - DNA, 351 bp, Gossypium hirsutum
  Clone ID: uC-gsflnu33B068e10b1
tgagaaacgaaaagaaaacagatctggaaaatcaccttttttgctttgtattgcttgtatatcttgcgtaaaatgtgtaggcattcgtaacctttacatagactaagaactatggctttatagccgaaggaaaaaagaaaaaggaaaataaattaaaaatgccattttttcatttgctgttctgctatttttgtttgtgtttgttgccgtgttcgtcctttcttttgcaggtacgggatgcgctggcccttgacgtgagactgtgctggtgcgtgtgatatcttctagatggtttactttactctctttctttttctactctttacttcttctatttatatttttccttta

SEQ ID NO: 57008 - DNA, 413 bp, Gossypium hirsutum
  Clone ID: uC-gsflnu33B068g09b1
tataaatgggttttgaggtccttggagacaatgattcccctgtaatgcctataatgctttacaatccagcaaaaatccctgcattttctcgagagtgcctcaaacaaaatgttgctgttgttacagttgctttccctgccaccccactacttttagccagggcacgtatttgcatttctgcctcgcacaccaaggaagaccttcttaaagcgctagaggttattagtcaggttggtgatatggtgggcataaaatactttcctgcagagcctaataagcagcagcaggaccagcaacagcagcagccggggaaagacacaatcaagttggactgaagggtttttgaaacaggctgacgttgaattgcttgctttgcttctagcaggtaccgtaaaattgatgtttgaatagga

SEQ ID NO: 57009 - DNA, 322 bp, Gossypium hirsutum
  Clone ID: uC-gsflnu33B070a12b1
attataaaaatttaatttaatcctttacaaattataaaaatataaactataaaaaattaaaatttcatccggcccccttaaaaaaattttctagctttgcctctgctcccgtggaggtttatcgtttagatggggatcatttaacccacgaaaattgacccgattcaaagaactgttgaagaaacctatatttgaagcttgggctggcccaatgatacggatctggaatgttaggctctctttgatacttcgctattcttattttatatgtttgaatagtatattattttcttttcttctcttcattccccttttttttcct

SEQ ID NO: 57010 - DNA, 495 bp, Gossypium hirsutum
  Clone ID: uC-gsflnu33B070f12b1
ccaccaaagattgtcacaagcaaagcaatcacaactattacagggataataatttgtaaatctccattcgcctttaattttctccgaggaagtgaaggaagctttgagtagtctaggctttgagctttcccaattttactgaagctccaccccagaatatactggctgctaaccacttcaccagtcgatgaagagaaaccaacatacatagaatccaataaaccattagaaagatcaacggttgttaataaaagcagttggctcggtttgttgcttcccataggagctagtgttacattcagcaacttgtccacttgctcgaatcgatccacagctgcattggatttccatttaagagttccaagcttctattttgcccttcatcttcgacgaagtatgctgtcgaagctgtttccaaagatctcaagttgttcacgtcaatgccaacatgacccccgttgatgtcttcaaattcaaggctttgaactgtgtcta

SEQ ID NO: 57011 - DNA, 268 bp, Gossypium hirsutum
  Clone ID: uC-gsflnu33B070g02b1
gcgtccggaagaatatacggcgtgggaagcggcggcggcggagaaaggttttattccggcactgaatgatcactttcgaagtcttcgcacggagcaccattgcaaccgcctgacgcttccggggattagtgttgctgagattggaagcatcaaggacacggtcgtttgcgttgactgcggtaagccgatggaagcgctccttatgtttccgcttgctgacccgattgatgtctaagcgcgttcttattcgtccgagctttatttgtaa

SEQ ID NO: 57012 - DNA, 342 bp, Gossypium hirsutum
  Clone ID: uC-gsflnu33B070g12b1
gcgtccggaacttttcaatttgctttctatggggaactcgggagaaaatgactctgcgttcagctcatgataattctttgcaacctactgaagcaaagtccgccaaggaggcaagtgatgttaaacaagatactatatttgaaaagtcaagcacagtgtctttcattttccgtcctttaacaacttactatgcttcccaaacatcaatctatcacgagcactgttacaaagtccaacggtagatctctaagcctttcctattaacgctcattttttcatttcctattggccttttttttccttcattccactctttctttctcttactctcaccctcttctc

SEQ ID NO: 57013 - DNA, 344 bp, Gossypium hirsutum
  Clone ID: uC-gsflnu33B070h09b1
atcaaggcactgctccaagaagaataagcctgcaaattaatctttctactggaccaatgaaaggttctgcaggctgtgtcgatggtgggagcatgacaagtcctggcctcgttgaagaagaagttcagtctgctctaaccgaggtcacagaagctgaagctgtaggacagacttctagctctgatgagtcagagatgaatattgtaaaccaagccattgctcctagaagaatacgtttgcaactttctactgggccaatgaatggttctgcaggctgtatcgatggcgggaacatgacaagtcctggccttggtaaagaagaagtcttgccttgtctatctgtt

SEQ ID NO: 57014 - DNA, 213 bp, Gossypium hirsutum
  Clone ID: uC-gsflnu33B070h10b1
gtaaagcgttagacggtgtaaatggagtgcaagtggttcctcgttcaccttttgcattggaggagataaaccaacaaagggaattccaatccactcatgataaatcattttttacagcaaatcaaccactattgatgcaagtatggcagcagaggccatcttgtttaaggccagcaagatgttgcatgaaaggtgttctcaattttttctcct

SEQ ID NO: 57015 - DNA, 454 bp, Gossypium hirsutum
  Clone ID: uC-gsflnu33B072d06b1
attttattaagcaatcaagacttttggatttgagcaaaacatagatgaagcttgtgtttacaaacgtttaggggatggaaaggtggtctttctcattctatatgtcaatgacattctactcattcaaaattatgtagggaaattgtcattgattaaactatggttaacttaacagtttagcatgaaggatttaggagaagctaattttgttctgggtattcaaatcctaatggatcgaaagaaaaaagtgatagcactgtctcaggcttcatacatagacaagatattgaagtgttatacaacaatcaattcaaggaaaggaaatcaaccttctgtatcaggatttcatctctctttagaggactatccttagaaagctaaagaaagagaaaacatgagaaaggttcggtatgattcagaaataagaagcttatgtatgctatgctatgcacac

SEQ ID NO: 57016 - DNA, 535 bp, Gossypium hirsutum
  Clone ID: uC-gsflnu33B072g12b1
tttgggaatatatatagaaggggaaaaaggaaaggaaaggacgacgaaaaagacggggacggggacggtgacggggacgggtcggatatcgggtttaatttcgggctgggctaatttggtctttggagtttgcgttgacgagcgcgtcgtgtgggtcctctgtaggaccgggcggcttggtgaggtgggacccacacactaaaaaaaaagaggaatgtgtgataacggcaatcgtgtgttttgtttggttgtcgttagccgatgttcggattttttggggacaggataacggaggtttgatgtcggaacgtttagttgtcggggtgttaggttctttttttttttttaaatagagatttattaattattattagatgagtgggacccacatcgaataaggacaatgctttatttatttatttattattattattatataatgacattggccttttatttttgtgttgacattgaaacaagttgcatggtcttgtaaaaatgggggttgattttaattgaaattctgttgatgggt

SEQ ID NO: 57017 - DNA, 377 bp, Gossypium hirsutum
  Clone ID: uC-gsflnu33B074f09b1
aattaagaagaaaaaagaaaagaacccttagtagaaactccatgtttcgctgttgacctgttcatggtagtgggaatttgctctagtctgagtaatctggtgatagttaatgatatctgtataacaactatgttgctttaaatccttaatttagagtaaatatgagcttagttggatgtttgctgtaatttttctgggctcatgcttttacatctgcgaacaataatggctttttaagtcataggtttataatgtaattttatctacttgcttatatataaaactagtttgtacctgtgaagtcgtttatataatgttacgatgtttccagctgctaaaagagaaaaaaacccttgtaattgttccttttgtattta

SEQ ID NO: 57018 - DNA, 438 bp, Gossypium hirsutum
  Clone ID: uC-gsflnu33B074h03b1
gtccgcccacgcgtccgggactcatcatccatttgttggaaggcagtgatctcgtttctcaacttagcgttcttgcttggtgggaaatacttcatggggaatctttcggctaactcttgccacgtagaaattaagtttggtggcaatgaattcaaccaggctcgagctctgtcccttagtgagtacgagaacagctttaatcgtaatgcctctttgggaaccccagctaatttgaaagcgtcgcttaccttcataaatagtcttaggtgaagataaggatctttagtaggcattccactgaattggcccaccgtctgaagcatctggaacatgactggcttcagctctaattgttgtaccttgattccgggtctcctaatgcccagattaagatcgataaatactgctacaacatattgtcttaaggctttattccta

SEQ ID NO: 57019 - DNA, 584 bp, Gossypium hirsutum
  Clone ID: uC-gsflnu33B075c05b1
cctacgcgtccggcctaggcacgcaaacttaggctttgtcctttttattccagtgaacgttacaagttgattctcacaatagagctcatatctgaacatggagttttcaaaaaaatctcaggtgtttgagacactgatctcggctatatttttattggaactactgagaccgaatgtagcagaatttcgagcagtggggtttgcgaccagctccattactttctcgggcgcttaattgcctcctacttagtgcgtgttttgcatgtatttcgggttgattctttacttttattcttcttctcttataattttctatttattttctcttcttatttctattcttttttactctatccttatcttctcttttcttttctatcttaacaattcttctcttctatttttatctttctatctcttctttttattgttctatttttaacctcttttattattattcttttcattatctctatttttctattttattcttttcaattcttactttccttatcttttctattattctttttttttctttttatttcttctcttttcttcttactttctttttattttttttt

SEQ ID NO: 57020 - DNA, 470 bp, Gossypium hirsutum
  Clone ID: uC-gsflnu33B075c08b1
tccacgcgtccgcttaatttgaagacacagttctctcatactaaaaatgacatggaagtttaccttgtaattagagatttggtttcattgctttttgttgggttattaatgatatggggatgcagaactttaaactgggtatggctggccccaaaaaggctcgaaagctgcttgagacaacagggttttgcagggaattcttacaggttcctttctggtgacataaaagagctttcaactatgagctgacaaacaagagccaaacttatgccttttagtgatgatattgggctctatgttgttcttttttaacatctaattgctaacctggatgtatttatttacgtgttttgttcttagactaaggtgtgtatttactgccctctttatttttggtcatttttttgtttaatttttttgctttcatgagattcctttctagtcttttttaatctttttgttaatgttct

SEQ ID NO: 57021 - DNA, 247 bp, Gossypium hirsutum
  Clone ID: uC-gsflnu33B075e08b1
tccacgcgtccggctcaacccaggaaagctccaaaaaatagtcctacttctgttttacgatctacatttcggtgtctaagactgtcgcgaaagatggataaagtggcagagcttcgaagcatttcagaggcagcagcagggtgcaatagggataggctgctgttctcgtcgccactgatacctgctaactatatgaaggttggacgtggttcaaggaaaagggaaccctcagatgtggaagatgcat

SEQ ID NO: 57022 - DNA, 304 bp, Gossypium hirsutum
  Clone ID: uC-gsflnu33B075h05b1
cctacgcgtccgctcctacctctcaaaccaaatagaaaagagaaaaagaaggttaagttttcttcaaatttccgtcccaaataaccaagctaaagactcgggacgtcgtgggataaaggaaaggcgaaaactgtagacgagtagcttatctgatttcaattaggtctcatggattcaagaaggttggcagcatccaggtttcaaatctcagctcagtaatgtttgaatcgtcaaatgaggtgtgttttaggttgtttttttggaccctgccaaacttctccctttgaaagtgttttgatgtttt

SEQ ID NO: 57023 - DNA, 451 bp, Gossypium hirsutum
  Clone ID: uC-gsflnu33B088b05b1
cctcgcgtccgcccacgcgtccgcccacgcgtccggttctaaatgtctatttggtcatacaagcattgggtatttaggacatattgtttctcggcaaggagttcaggtggatcccgataaaattaaagccatccaatcgtggcctattccccgcaccgtcaaggctgtccgcggttttctcggcttggtcgggtattactaccgctttatccgtcacttcgcggccattgccggtcccttgactgacctgctgcgaacagatgccttccaatggacttccttagcccacacggtctttgagcatttgaaacagttacttagtgaatcccctattcttgcattacctgatttcagccaaccatttgtggtggaaacagatgcttagggtactgtcatcagtgccttccttttacaaggtagtcccccttttgcttattttgtcctctacttc

SEQ ID NO: 57024 - DNA, 375 bp, Gossypium hirsutum
  Clone ID: uC-gsflnu33B088f08b1
tcgtgaaagaccgcatccaaatgaatgctcgggtggtgatcttgatggggaccagtttttcataagctgggacaaagatctcatcccatgtcaaactgagccgccaatggactacactggacgaagacctcggataatggatcatgaggtgaccttggaggaaattcagaagtttttcgttgactacatgatcaacgatactttgggtgccatttctactgcacatctagtgcatgctgatcgggaaccatacaaagcgcgcagcgaaaactgaatagcattggctacctcttcactctatggctgcagattttgccaagacaggaacgccggctgagatgccttgtgctctgaaaccaacggagttaccggcct

SEQ ID NO: 57025 - DNA, 195 bp, Gossypium hirsutum
  Clone ID: uC-gsflnu33B089c02b1
gtcagtcatccggttggatgatgatgttgataatatcgagaatacactaacttctgccttggtggacactaaaagtaatgctgctgtggttgacaaaagcattacaacatttgatcccccggtctcaagctcgtgggaacaggttccacccaccatgatattgatcacacctgattagtgcaaatcttttgtggt

SEQ ID NO: 57026 - DNA, 177 bp, Gossypium hirsutum
  Clone ID: uC-gsflnu33B089c08b1
tcgctcacgcgtccgcttaattttaacagtaccaataccaattaccttactagatgaatcgtttcccatgcgcacaactctaccttcaatcgaactgtatgtggagaaccattctctattgggacacatgtggaaagaacatgctgtatctaggagccactcggacgtgagcttggt

SEQ ID NO: 57027 - DNA, 478 bp, Gossypium hirsutum
  Clone ID: uC-gsflnu33B089d01b1
ctttatttgagcaaagaattagggttaacaaagggttttaataatggaaggcaataatttggagaaaatactccaagaagggaaccttttcaggcaactcaattgccttatcgttgctcatcttcgccatcacaatctcacccaagctgcaagagcagtggcttcagcaacaatgacgcctttagacgttgaagcccctcctaataagcttcttgagcttgttgccaagggtcttgcagtggagaaagatgagacattacgaggggttccttcttctacattgtttgatttagggactgctttgggttatggcttgaatccggatcctcgagtttcttctgttgatttcagtgccgtgcaagatacaaaaggctcatcaaagagcttttcaaagcacgagacaaggcatctttcttgacacaagaatattgctaggtgcgcaaggtttagtcctgatgggaggtttgttgctactgga

SEQ ID NO: 57028 - DNA, 349 bp, Gossypium hirsutum
  Clone ID: uC-gsflnu33B089g08b1
tttgctactcggccgaccacgcgtacgcccacgcgtccggagcctcacactatataagggagcatcatgctcaaccaaggatataggcactcgtctcctggcatatggcccggcagcaatgcatgctattggtagtgatacattgccgcagttcgtattcttgtggtagcctgctagcgaatattcattaccgcttcattggctcgtcctctgagatcaaagcttccgaggaaggtgtggacgtgttatactgacagagataatgatgaaaatcatacttttttaatatattcataaaaaaaaaaactaggtagataagctcaattacttaagtgacttgggttggctt

SEQ ID NO: 57029 - DNA, 382 bp, Gossypium hirsutum
  Clone ID: uC-gsflnu33B089h12b1
tctgtttcgctggtaccgggagcatgtagtgtggactgataaggaattgaagttgaaacttttgaggaggggcatcttaactcggatttatgctcccatggttataattcaaggacttagggattcagggcttttcggttccgtaatacaatcggcacaaacgactctctcaaaggaaatcaagagtagcaacacttctagagtagataaacctggaatgatttcatccagaaagattggtgtcaaagaaacaacagcaactgcccgaaggatcttggaaatacccaacgaaacttcttacgagtcagccatcccaccactttctcctccaatcctggatggtcttcacatcggaatattacaacacattagactcacttgc

SEQ ID NO: 57030 - DNA, 507 bp, Gossypium hirsutum
  Clone ID: uC-gsflnu33B090b06b1
gttttatagaataagaattgcaagtgttccagcttgtaattgtgatttccattaaatttacaagactttgatggaagtttgatatgttttgatataggtacaataatggatagcagcttaaggcctcatttctagctcggttgaagctcaaatatgtgcgtgcagctcctctcagctcgaaatagttcagaaagttcgtttccaactcatttcagctcagtacatttccagctagctcaatttcagctccaccagctcaactctagctaacaagtccagatgtagctggaaggtgtcctacgtgtcggggagtgtcccatacacatgtgacagcctaggtggcatcccagtatgtatagcacacacgtaacagccttgacacatgtgtgtgcatgtgtggccgaaatcagcccttttctctacatatgacgctaaattaaagggttagaacatgagttcaaatgttgaatttaaaacgttttgattaaaacaagagttaaatttttg

SEQ ID NO: 57031 - DNA, 280 bp, Gossypium hirsutum
  unsure (1)..(280): unsure at all n locations
  Clone ID: uC-gsflnu33B090g02b1
tncctannaacagtgacagaggacaaattatttcatatctatttttctcagcggagttgttgttgaaaattacatcgacaataagccatacaattatcagagcatacagaatgaaaagactgacttggattctaatcctccatctcctcagggaatcagtgcagagccgagacttcacaaactgtttgccatggtaaggtacatgctgtcatcaccaaaccttatttatttggtgctatggattcctgagcaagagattttgaaacgagaacagaacgaa

SEQ ID NO: 57032 - DNA, 422 bp, Gossypium hirsutum
  Clone ID: uC-gsflnu33B091c12b1
ttctattccattcccaaccgatttctactgagaaagaaaacggagacctgctttcaaaatcattccaagatataatatcgactctccccaaaggaaatccctggggctttcccgaccattttttacagtaccacgggttttggcacagctcggttttcctacaaggaatcttgtcagctcaacaacagatccaggctcaacctgctgatatcatcctttgtagcgcccccaaaaccggcacaacctggttgaagtccctcacttatgccaccatcacaagaacttcattcgatgattctaccagccctttgctttccaagatgccttatgatgttgtgcctttcatggagcttgatcatgcccatttttccactaatcgagatcttggatccccgttttgggtactcatatgccttacctct

SEQ ID NO: 57033 - DNA, 553 bp, Gossypium hirsutum
  unsure (1)..(553): unsure at all n locations
  Clone ID: uC-gsflnu33B092a06b1
cccactttttcgcccacgcgtccgattcaaagttagctttttgcaaccattgtctcaccttgtatcgaacaatgtccctccctgtaacacaagggaaaaccctccctgatgcctgggactacaggggcaagccgaccgagcggtccaagtccggtggctggaccagtgcagctatgattctaggtggcgaggcatgtgagaggctaacaacgttaggtatagctgttaatttggtgacgtatttaactgagactatgcatttagggaatgctaccgcagccaacacagtgaccaacttcctcggcacctctttcatgttgtgtctactcggtggcttcatcgcggatacttttcttggcagatatctcaccatcgcaatcttcgccaccgttcaggcaactggcgtcaccatattgaccatctcaaccataatcccaagcctaaggcctnctaaatgtaccagggacaacgcaacaacttgcaccccagcaagcgtatacaactcattattctctacctagctctctacctgaccgcctttgaaactggggac

SEQ ID NO: 57034 - DNA, 300 bp, Gossypium hirsutum
  Clone ID: uC-gsflnu33B092b09b1
cttaattccaaggtttcattccaaagtttcaaaggcctcgtctaaacttcgattacaacgaagtagctaggattcgaaggagccgatatgaaggtaaatctcttttccttactcttttttttttaacgaatatcgatcatgaagaaagcaaaaaagaaaaatgaatgagacgttagacttaaatcaatcaccttttcgatttgtgatttctgctttttctattaatctctttgctgtatgtgtgtaaccttatagataattccttttcgggcgttatagtcttagaaaaaactgattaaa

SEQ ID NO: 57035 - DNA, 471 bp, Gossypium hirsutum
  Clone ID: uC-gsflnu33B092c08b1
gtttattactttgtccaaaagtcatgtcggacgatttgctattagacccagacatccgagtctgggtatttttgcccattgttattattacattttttgtcggcatccttcgtcattatgtatccatcttgctttcttcgacaaaaaaagtggaacttcagcaagttattgacagtcaagcaatgattcgaagtcgactgcttagggagaatggcaaatacattcccaaacagtctttcctcatgcggcgccattactttaataatgaagaatctggttatttcaaaattagtcaaaaacgaaatacaaccgctccaaatccaatgactgatccctccatgatgactgacatgttaaaaggaaacctcacaaatgtattacctatgattctaatcggaggttggaataattggaccttttctggctttggtaccaccaaagttcctttttcattgacacttcgctttaaac

SEQ ID NO: 57036 - DNA, 305 bp, Gossypium hirsutum
  Clone ID: uC-gsflnu33B092f09b1
ctcactcgtccgaaaagaggaaaatagagggcctttgccccctctcttctccctttcctatttttctcctttggctaaggttaggaaacccatcatcgccgctgttaccacggcaacaccacaagcgaaggtcgacgacgcgaatgggtgaggtcatttagccccttttcaaggcgtccccgaaggctacgccttctcggtcttcccccatttggttcaaccccgacaacggaagaggaaccccggcgacgaaaccttagacaatccctgtgccaatgcgacgcgtgaaaggggcaacggccagg

SEQ ID NO: 57037 - DNA, 529 bp, Gossypium hirsutum
  Clone ID: uC-gsflnu33B092g09b1
ttcagtcttacagaaagccaaagctgataaagatgcaatttttaaatgtgaactcgaaccaggcaccggggagaccaaaatctgtgccacctctttggaatccatgcttgaatgtgtgagaaatgctgtggggcccgatgttgattttgagttaataagcactagccaccctacgatgactacaccaatattgcagagttacacaattacagaaccttcttgagagatcaaatctacaaagaaagtggcatgtcattctctcccatacctttacacgatctacatgtgccattatgatacctatgagaccaatatttttaaagttgcactcgttggtgacaatggcgataaagtggatgctttcattgtttgccatatagatacctcagcttggagccctaaacatgttgcgtttagcttgctccggactaagcctggtatccttgtttgccatacttttactgaagggcatgatgtttggattaggcttccactattgcagtcatttaagacgtagctttacccttgt

SEQ ID NO: 57038 - DNA, 404 bp, Gossypium hirsutum
  Clone ID: uC-gsflnu33B092h04b1
ggttatcacttggatcaaacgtgaatgggaaaacgaggatggaggatgatcaacagacgtggagttctgtgaattggccataaacaacaaagaaaacagcagcagacatcgacacctggaggaactaggcgactgataccatgttaagtgctaagtagaaaacatagcaagactacagaagctcactgcgtatggacttggaggaaataaaggtgcgtagggacctagatattgagttagaacattaatgttggagatgcctagtgctatttgtgtttcacttcaggttctactcttgattccaccaatactggtagcaattctcctatcaccaattggtgtatctcaagctttggttattcaaaacatgcccgctccctttggattacttttaatttgaacca

SEQ ID NO: 57039 - DNA, 380 bp, Gossypium hirsutum
  Clone ID: uC-gsflnu33B094b01b1
gtattagattaagcagggatatttcctttcaagagcttgttcaaaaaatgttagcaatttatgaccaagcccatacaataaagtatcagttgcctggtgaggatcttgatgcattggtctctgtatcttgtgatgaggatctgcagaacatgatggaggaatgtaatgtgctagaagaaggaggaccccagaaacccaggatattccttttctctagtagtgatttggatgatgttcagtatggcttgagcagtgtagagcgattctgagatgcaatatgttgttgctgtcaatggcatggacctaggatctaggaaaaaactcaattgccttaagtgctatcgagaataattgggtggagtaccttggtttgacattgt

SEQ ID NO: 57040 - DNA, 430 bp, Gossypium hirsutum
  Clone ID: uC-gsflnu33B094b03b1
ggtaattacagggcattcaatagagaattgcgtgtgccttcatgaaactagttgaaagattcattaaaataggcattgtcaaattcgatgaggcctccagtgtagaaaatccgctactcaatcatacggataatgaagggaatgcgatgaatgaagaaatgttagaaaatgttcacatcagtgccgaatacgaagaaacaactggagaagagatcttattagatgttcgcccttataaacttgggagtgttctgaacaattgaactgcagaagaaattcttgtagagtaatgatcagaacatttttgtttttagcctaaaagtgatagaatttccttttgtaaataggctaatgtctgaacgtcattattctaataaaaatcaattttcgcatttctttctgagcccaatattccttcatcactcttgta

SEQ ID NO: 57041 - DNA, 227 bp, Gossypium hirsutum
  Clone ID: uC-gsflnu33B094c09b1
ctgctgaaccctaggtcctcccttctcaagcgcgaaaccttcatcaagaatggcgtctcgcccttctggcttcgacttactgctctttggcctcaaaacccccctttagcttcgatttcgacgaagcaagagtggatcgacggccaaatcgcacggtatagcctctttttctctctttctttgctttctattataacgatgaatggatcgaaggaaaaatgaacccc

SEQ ID NO: 57042 - DNA, 446 bp, Gossypium hirsutum
  Clone ID: uC-gsflnu33B094c11b1
tcgttccacgcgtccgcccacgcgtccgaaaaatggagggtgcaaagcctggatcttgtgaagctcttgttcgcaggttgctcgagcgactggcaagctcaaaggaatcgtctatgaaagatatgcaggaactagcagtccgcttgttcaataagggcaagacaacttctgaagatacacaaactccaaacatggaaatcgacagtaaaagaaaacagcaacttaattcaaattccaacttgagccctctcgcgagatttctactttccaggtggcaaaaccaaacatcgcgcgatctcaacccatcatgaagggaaaaaccagagatggattatatctgtttttgtagtctgtttacagttctgcacttcttttgattttgatgtacataacattgtgagaaattatgtatttttgcatccattatgattaaatcttctattttt

SEQ ID NO: 57043 - DNA, 293 bp, Gossypium hirsutum
  Clone ID: uC-gsflnu33B097c08b1
ctttgactgcttccctactcatcttgttatccggcatagttgccgatggatcatttaatccgaagagcagaccgtacacgaacaaccgcaccttactcctgatcttcaaagactttctttttcctctcttcgcatctcaatcaaaccaagaacccacaaaaagcttcagatacaagcaattcaatggttcgatggaaaccagctggctgaggcggatgagtttgaggacaagatgaaggagctggaaggcatttgcaacccaattattgccaagatgcaccagggcgctggtg

SEQ ID NO: 57044 - DNA, 165 bp, Gossypium hirsutum
  Clone ID: uC-gsflnu33B098g08b1
tgcacattaccgtaatttgcatattagtaaccatgaattcaattacttggcatctctagaggatacatggctccagaatacgctgttcgtggcatgttgactcaaaaggctgacgtttatagtttcggtgttctcgctactgaaatttcttgcgggaagaggaac

SEQ ID NO: 57045 - DNA, 453 bp, Gossypium hirsutum
  Clone ID: uC-gsflnu33B107b01b1
ttctgcgtgtttgggaggagatgcagagagatgggctggaaccggatgtaatggcttatgtgacattagctgcagggttgcgtaagggaggaagagcacaggagagggtatgagttgtttaatgagatgacaaagaaagggatattgatagagagggtaatgaatggaggtttaatagaagggttcgtgaaggatgggaaggtgggatctgcttgtggcattgggaaggatttgcttgatggtgcatacgaacatgagccagcggatatatagtgtcgctgtttgaaggcctgtgcttgatagaacatatttgtaccgcagtcatgcgtattctagttgctgctgcagagttgtcctcagcagaacgtacaccacactagcccaggctgatagcgttctatcatgcgtaacctgtttcggagggtgtcgacactgttcaagggaaacatacat

SEQ ID NO: 57046 - DNA, 567 bp, Gossypium hirsutum
  Clone ID: uC-gsflnu33B107d08b1
cggtctatctgttgttttacccattggccaattgccatcacctaaaaatttactaaaatttacaaccaatctctcctttttttttgaaaagaaccatggaatcgcttttcatcatgattgtttatttatgcccatcattcctaatcttccagaaaccctaattttattgttttctcttacgatacctcgtttcgttgttgaccctgcagttttcttaacccatggaccttcaacagcttgatcccttgcaaatttcaattccgaaagcctcggatccctacagtatcatgaacaattcctccgtatggcttgaaatccgtctcttttacgttcggatagcgccctgcgtaatcgatagcgcgccggaccacctcaccctctgctacctccgccgcgaaatcggtttctccctcgaagtcaacggctctcgtgtcccggcttccgattccgcttcgttcacgctccgccgcgaccgtctcgaccgggagtcgtcggaggtcacttatttgagcaccgatagcgttcgcgtcaccggaggggttgaattcgagtgtacgagaatgaaaa

SEQ ID NO: 57047 - DNA, 545 bp, Gossypium hirsutum
  unsure (1)..(545): unsure at all n locations
  Clone ID: uC-gsflnu33B107f07b1
tttttccttttcacccattatggcttcaatattgagttcacaaggagtggtcttagcaacagctatggcagtttctggtactgtaatcctccttgcttttcgtcttcaaaaatcttaccttttggatcaaatctcacagccttctcaacaagctctccgttcctgcatatcttctggtacataacagttgcgtgcatatgtttcaaaatggggtgtccgtgttcctaattgtttttaacaattttttctttgattttttttttaaaagaggggaagaagagggaggaaaaaaagaagaaaaaagtgcactttgctgaagatgtggttgatccaagaaaggacggagaagaattcagaaaacagctgaaaaatcgtgttagaatcaacaattcagcagctttgaattcatcgactaaattcaagaaatttggtggaggtaaagatagaggaatgcctgctaatagagttgctatatacactggaattctcagggatcgtggtgttcaacgattagcttactcctgcttatttttntttaaagtaca

SEQ ID NO: 57048 - DNA, 429 bp, Gossypium hirsutum
  Clone ID: uC-gsflnu33B108e12b1
tcccacgcgtccgtttttttttttgataaaaattaaatattttagaaggatagtagttttcgagttgagatgggcatcaatgaatatgaagaaaattgtggtttattaaacatagaattcatgaaagactgaaaagccatacgtctaaaatggagcagatgcatcttggcttgctcgcaaaattttaaccatatggaatttggagaatccaatggtcatacatggagaaccgtcaccatggagaaagaaagttcatttcgtgggtcctcggctagactttgtaggatctctttattgacgactatgacctgattgaaccccctgtcaacttcaatttggatgatcgaaattgcaactggagtgtggtacttctactggatctgttttaacggaccgatttttgttttagaaggtttcatgtcttgttta

SEQ ID NO: 57049 - DNA, 515 bp, Gossypium hirsutum
  Clone ID: uC-gsflnu33B108g11b1
ttttgcagcaacagggagtgcacgatgctgctctacgagtacatgccaaacgggaacttggacgacttgttgcatggtaagaataaaggggagaacttggtggcggattgggtgacaaggtacaaaatcgctcttggagtggctcaaggtatttgttatcttcaccatgactgtgatccggtgatcgtccaccgtgatctcaagcccagtaatattttattggacggtgagatggaggccagagtggcagatttcggggttgccaagttgatccaaagtgacgagtccatgtccgtcattgctgggtcctatggctacattgctccagaatatgcttatactctccaagttgatgaaaagagtgatatctacagctttggggtggtgttgttggagattttaagtggaaaaaaatcggtggattcagaatttggagatgggacagcattgtggattgggtgaggtctaaaatcaagaacaaaaacggagttattgacattttggataaaaatgca

SEQ ID NO: 57050 - DNA, 433 bp, Gossypium hirsutum
  Clone ID: uC-gsflnu33B108h09b1
ttttcacgcgtccgccaccaccaccgccggcggatcaccaccggaatcatactcatcatcctagacggcggccaccgcaatattcacaaaatcacaagcctagtactgggaacaagctcaatactgggaaaaagcttgggcttttgttcatcggcattgttatcatcctgcaatttggtgttgctgggttcttggttttcaagagaaggcagctcttgaaagttaatggcacatacgaggcttgctcttcttcttcatgaaatcaccgccaagtttttgggtctgcaattcaattcattttagggagttcttttattggattgagaaaaaagagttatctgctgagcttagaaagggattacgtttattttggatatgggtccttgttgagatcttctgtaatgggtagttcttttattgacttttttcttta

SEQ ID NO: 57051 - DNA, 435 bp, Gossypium hirsutum
  Clone ID: uC-gsflnu33B109c09b1
tctgtccacgcgtccgcccacgcgtacgtccacgcgtccgggggaagatgaggatgaggatgatgatgaagatgatagcatgagtgcagacatcgcggcaaacatgatggtggatgtaccaaactctcagtcaagtttgaatccagtcagtatgctgacagatgagccaaagcaaaaccagacagctgaagctgaagacggttgggttgtagtctcatcccggaaaaacaaaggtagaaggaattaagtcgtaatttttgttacccctgttccctattcctggtatatacatcttttctcaagacatttttggtgctctaattatttctgtttgtaacttttttttaaaatcttatatcgaaagaaggatactgtactggaatgttactggattgaaatagatatgattttccttggattttgttttcaaataaa

SEQ ID NO: 57052 - DNA, 519 bp, Gossypium hirsutum
  Clone ID: uC-gsflnu33B109f08b1
tgcaggcaccgattagtatgtagttgagagaaagcttcacatagggagcttcattgtcattgtgtcttacatttttgtttttggttcagtgtgtacattgatggaataagtaggaactttagatgagatgtttggagggtgaattttcaaattagggctaatttttagcgatgcttatagctcttgttaaagacatttatgtatcagatatgccaccctatacatagagactcctataatctaattttatatgtttatgtctggactagtatctactgtctagttagttttttttaactttgtagccgcattgaaaattcaacatgtacttatataatatttgaaaagggcctctgctagcgggggatatgattaattatccattcaagattatgtttaaacctgcattggaagatcttacttgtggaactgttactttttttaaattttttttatcgagaaacacagtgttcctccaatttaacgttttacttatatttatatttaaataaggttttt

SEQ ID NO: 57053 - DNA, 482 bp, Gossypium hirsutum
  Clone ID: uC-gsflnu33B110e12b1
tttggttcccttgctgggtatttggggagctgctggatatgccccattattggtactaaggtaatataggtcaaggcaatttatacttgcgacccaagggatagctgattatgaatttttgtacaaggatgatggttatagaaagaatattcaagagatgtctagtgcgtgaaaacagactcgccgaatgaagaggctagctgtgggtcctatgacaactcctgagtatcatgaatggtgggctaggaggattaatgataatacacctaagttaaatcaggaagacagccagtcaatagaagagtatttgtgaatcattccttctgagttggaaatcataaagcaagattttgagaggagaaatgcggatttggagaaaaagatagagcaaatggaggcggaaagtagttaataagggagataaagttccagcgaagacaatttgctttctttcatacttctcttatcaagaaagttagaag

SEQ ID NO: 57054 - DNA, 526 bp, Gossypium hirsutum
  Clone ID: uC-gsflnu33B111e12b1
tttgaatctctgcaaaattcatgggcacttggaacttggggatctttgtgctgagctggtgaatcagctagatgcctctcgtttgaatgaccaatctaaagcaggtctcatacctttgaaagattcagaccttaaaaagaatgagaagaagaaattggcaagtcaaagtcctcttgaagtcagtagcagggtcaacgagtatcgggcaggagatacatcacatcctgagaatgatagaatctatgctctgcttagacgtttgaaagaacacatgaaagaagctggttatgttcccgaaacaagattttgtttgcacgatatagatcaggaaagtaaggaagaagctcttcttgctcatagtgagagacttgctcttgctaatggtctcctcaccagtccagctcgtggacagattcgtattatcaagaaccttcgtgtttgtggtgattgtcatgctgcatttaagatcatgtcaaagattggtggcagagagatcataatgcgagatgctaagaggtttcatcat

SEQ ID NO: 57055 - DNA, 472 bp, Gossypium hirsutum
  unsure (1)..(472): unsure at all n locations
  Clone ID: uC-gsflnu33B112h05b1
atgtatgattacttgttggatctctttgagggatctcaaaaatcattgcataatccccataggaggtgaaaaaaaccaatgatactcaaactcaggttttagtgtcggatatggatatgatctgaaaaactatgttacacgaactcgagtatgattagatttttttaaagttttaccgaaggtcatattctcatactgcatgtacgtatgatagcagagtagttatatatatatatacatgtttgtaatcttctatgtatgaagggcatttgtgttgtatttttagccctttttttccctctttagtttgatgaataaatggattggttaaagccattgctcgcctgttagaagtttgggtcttcctgtttgcttccaaatatatgaactgatgacttaagtagagcagaatttttaccgtttgtaaaataggtcaanggtaaacagcatactgactgggaaaaccttgtca

SEQ ID NO: 57056 - DNA, 486 bp, Gossypium hirsutum
  Clone ID: uC-gsflnu33B114d12b1
cttttaccgacaacctattgatccttccgaaggcatcaaaagagtacaacaacccgtgacaatttacagtccagtttccccaccacaatccagcagcgacgtttccacaagcgaaaacaacagcaacagccacaccttcaccaccaacactgaaaccaacgaagacgtctctgaaatcgatgaaaacttctggtccgaagtattatcggctgataactcaagcatggccgccgatttccgagtggttggttcggaccaatatttcccaagctctccgtctcctccattaccagcattggaaacagtgaatggctgtggttccaatctttatgataccgatgctaacatggatttttggtataatcttttcaccagagccgcggatttacctgaactacctgaattttgagttgcctatttttggaattaactttagtggtaaccccttagtttctttgattattcagattggagctggataaaatg

SEQ ID NO: 57057 - DNA, 257 bp, Gossypium hirsutum
  Clone ID: uC-gsflnu33B114g07b1
tttacgcgtcccataaaaaaaggagagaggtagggcttaacgtttcccggtggggagcccggacaccttccggacgtgggaccgtctcctgctccggcgcacggtggctggaaaggagtagatgaacggtggtggtgatgggggcgcaaagggcaggtggcccgtgctgcaagctttggtggtagaggcagcacaagctggagccgaatggggctagggtatttggtgggcttggctggcttatgatagtgggtatg

SEQ ID NO: 57058 - DNA, 460 bp, Gossypium hirsutum
  Clone ID: uC-gsflnu33B115b04b1
tttatactaagacgtttcactgggatcatggtttatcgggttggatgtcgatcatatagatgaccgcagactctgctgtggtaccacagattgcgaatggaaggctcaagcgggcaacatctgtgttgcttcatttgactggacctgcagcggtatttgcaggtcagttgacaggatgaaggatgttcaccggcggtgcggagaagggaataatgctttacggactgcaactttctaatgaagcccagttcctccaacctcaggagggaagcaagtgaaacaaaacgagcttggtttttgggcattgagagttgagaaaaaaaaaagggactgtaataactgtagaaacatgaatgggttgaggggaaaagaagaggttgaagctgctgaatgtctgctccattttatatagggagaaagagactgcaaacagcagttatatatagagagaggaagagag

SEQ ID NO: 57059 - DNA, 358 bp, Gossypium hirsutum
  Clone ID: uC-gsflnu33B115b05b1
tttgttattgctggttcaaagtgattgtacggagagggcgaagaggaaggcccaaatgcttcttaagttgcttcgggattcgtggcccgaagattccatcggcaattcggatgattttgcttgcagtgaaatcgtacccttttgaccatccctctcgcctcacaccgaaaagtttgtaacagaaaaatataagccttttaaatttcgataatacctacaacattttttaagagatgggtgtatataaacaaggattgtaatttttgttaagcaaagcaaatgaatcatacatctgttttcctgggaaaaaacaaagaaaaaaaaaaaaaaaaatttacgcacttataaagtacaaaaa

SEQ ID NO: 57060 - DNA, 511 bp, Gossypium hirsutum
  Clone ID: uC-gsflnu33B115c10b1
tttagaaatggcatcaaaaaagggttctgaagaggtttcgtgtgtctttgaaagggggacactgtgcaacttttgggtggctcctaaattttgcaaaggtttagacaaagtagaactagatgaggtgtgctctttccatggcttggttttcgctcctccggcgccatttccgccatttattgtagctgctgatgttgcctatgcgttctttcactatggtgataatataggttccagttgtggtttttcctttgttattaaagaaaataatctagagcctgagctaaagtggattattgcttggaaaaatggaccatgcaatgacaacaaggtctatacaaatatccttcctctttcagatgacgttgattgggatcaaatcaaatgcaatttgaagtcggagaattgtggacccaaaagttgctgcgacctatcgggaataaaagctgaggcttttatcgagccgggtgttaagacacctatgaaggcaaaactgataaaacaataattt

SEQ ID NO: 57061 - DNA, 461 bp, Gossypium hirsutum
  Clone ID: uC-gsflnu33B115e11b1
tttcacgcgtccgcccacgcgttcgggccgaagagactaagaaccctgctcacgatatccctattggtcttgatggatccatggtaataaccacagctgcatattgttcgcttgctgtagcattgtgcttaatgcaaccgttccgtgagattaatgcggatgccccattttcagtagcatttgaagctgctgggatgtcatgggctaaatacattgttgctgccggtgcattgaaaggcatgacaactgttttactcgatggtgccgttggtcaagcacgatatctcacacatattggacgaacccacatgatgccaccatggtttgcacatgtgcattccaagactggaacaccaattaatgctaccgttgtcatgcctttccgaacggcaattattgctttcttcacagaacttgatattgttgcccatcttctatcgaattaacattattaatcttca

SEQ ID NO: 57062 - DNA, 506 bp, Gossypium hirsutum
  Clone ID: uC-gsflnu33B115f02b1
tttatctttcttggttctaaacggaaccaacaaggatttaatgcaaaaagcactccaaaaatcctttcttttcatgatcttcttgatatagcgggtaacgtaacagagtttccctcggtttccgtcaagcagaccgatacagcagtgctgctttactcttcggggacgacgggtgtcagtaaaggtgttgttctgacacatgggaatttcattgcatcatctttgatggtgacaaaggatcaagaacttgcaggggatatccaccgggtttacttgtgcatcttgcctatgtttcatgtgtttggattggctgtcatggtgtacgcgcaggtacagatgggaaatgctttggtgtcaatggcgaagttcgattttgagatgtttttgaggaatgtggagaagtataaagccacccattcgtgggttgtgcctcctgttgtgcttgctatggctaagcagaatgtggttgacaagtttgatctttcctcattgagcaaattggatct

SEQ ID NO: 57063 - DNA, 491 bp, Gossypium hirsutum
  Clone ID: uC-gsflnu33B115f06b1
tcttgtttcatgatcttggaactgatgggaatcctgatgagaggaggaggtatggcgatagacgtggacctgtacgttcttttaggtctccttacggtgttgctgatagtgaaaattttcatcttaatgctgagggtggccctagatccttcaggttctgtcctgaagatgatccagagttgcatgaaagagggaatatgagggaaagagagtttgatagacggatcaaaaatcgaccagggaatgcccctaggaggacaagaaacttggaggagcaggaaggaaatttcaggcacggtggtcaggtttggcatgatgatgggtttgatgatatgtcacaagctaagcgaaaacgattttgagtaggtttttttatgccattagtctactgtcaatggtgtaagttatcagagcagcagggcagaatctgttaccattctctattttctgcaaacgcagtaaccccttgtttaaggtgtagaataaaatct

SEQ ID NO: 57064 - DNA, 499 bp, Gossypium hirsutum
  Clone ID: uC-gsflnu33B115g10b1
ttccacgcgtccgaagctttttgaaatttattaacaaacatttccatggctttaacaaagagaagatttgtttggggggggtgatgttttagataactccgtccattaaaaaaaaaaagggtttcatgatcgttggctgttctactttgggtgttgtttggattttgcattttgattacaagatacgaagatcatctatgcgcttttgagctttgaagaatatgttggatgaatataaagcctctttgaagaaacttttttctttcaggcaatgggaaccgaacttgagcactgtggtataaacccaataatagaaagctcagaaagtaattccacggaaattagggttaataacatggaatccatcaaagagacaatgcaaatgcatgaagacatgttcaaacaccaggtacgagaacttcatcgggtgtacagcgttcaaaaggcactaatggaggaactgaaaaagggaattaaatcaaacaggttgtgggcaact

SEQ ID NO: 57065 - DNA, 495 bp, Gossypium hirsutum
  Clone ID: uC-gsflnu33B115h04b1
cctctagactcttccctagacactggcaaaatctctgtcactgtgatcattaatggccaccgctaaacctgaagttccagctactgatcaagacactgcggaggcagaggagccaaagccggagccaaagcctgtgaaggagaagatacccaaaactccacaggagaaaaagcctaagcaaccgacatccacagcacgtcctacatattgtcatatgatcaaggaggcgctcatggctgcgcaagagaatagtggatcaagtacggacgctatagccaactacatggaagagaaccacaaggagaagcttacagcgaatctcaggaaaatcttaagtcttcagcttagaaactcagctgacaaaggcaatctgataaacatcatggtctattacaagctctcttacaccggctaagaagacaaagcccctgttacagacgctaatacagagaataaggctgagccagcttctaagccgaagaaagctgaggctac

SEQ ID NO: 57066 - DNA, 420 bp, Gossypium hirsutum
  Clone ID: uC-gsflnu33B126b01b1
taatgctcttcggcttgagagacgaactttaagcaagctaatgcgtaaaaggttttcagaagaagagagacaaaaattgtatcagaaatggggtatttcgttaaactcgaagcagagaaggttacaactggtgaaccagttgtggagcaataacaaggatattgatcacgtcacagagagcgccaccatcgttgcaaagctgattaggtttgtagagcaaggaacgtccactcaaggaatggtccggcctaactttaactcctccacggcctaggcggagatcctatggtgggaaaaacagaagggtttttttattataaccttatatatcaacatctgtatacagccttagaaggtaattttttttaaaaaatattggccctggtaagaatttttttaatgaatggaaatggttaacag

SEQ ID NO: 57067 - DNA, 530 bp, Gossypium hirsutum
  Clone ID: uC-gsflnu33B126e04b1
ttatttttatacgtaaaattctaagagaaaaaagaaatgagtggtggaaatggtcccaagctggagttgaaactgaacctatcaccgccgagggttaacccaacagaggaatcatcgacgacggcggagaattcttcttccgcaagttcatgtgtgctgtcagagacgaaccagatgcatgaagttgacacttccaccgatgctgcggcggatgtggcggcggcgacacccatgatgctagttgggtgcccaaggtgcctcatgtacgtgatgtcagagaatgatgaccctaaatgccctaagtgcaagagcactgttttgcttgattttctccccgccattaaaaattagaaagagttcgagatttatggtttaattatgatatcagcccctgtactttttaattttataaattaagtccatttttcttttagttaaaagaatctagtcctttgctaaattagatcttcaaatgtttaaacgtcatatattcgaatttaatggaagtttattgatagctttgctaaaaa

SEQ ID NO: 57068 - DNA, 473 bp, Gossypium hirsutum
  Clone ID: uC-gsflnu33B127b04b1
ttctttttcgtccggtacgttttgcgtatagtccggctgtataaattattaaaagtcaaaaaaaataaattatattttagtttggttcaatcatttcgtattagttcacaagtcaactggtttaatgttttcttttggaccgatactctggccggttcaaacaatcatggctttaagtctctacattttgtacaattgaaatttagtcctcctagttttatttccaagattttaatctctctactttttgaatttataaatctactttcaaattatatataaccacataaaattttaactgaaaatataaactatttgaactaattaattacattataaaaatattaaattaattaataacattataaaaatataaaactaaattatcttagaaattaaaattagaaaaatcaaaattggcatttgtatagaatgtgatgataggtatatgctctgtgaagatgacttggacc

SEQ ID NO: 57069 - DNA, 282 bp, Gossypium hirsutum
  Clone ID: uC-gsflnu33B127d09b1
ttttcttgtacattagattaagtaacaaacaagttttttcttttaaaatttttatttatttctactattaaaaattgacatggccaatagaataactaaacagtgacatgtggcattacatgtcccgccgtgaaaatagataaaacttttttatagaaagactaatttacttttaaaaaaaaaaaaaaaaaaaaataaaaaaaaaaaaaaaaaagggtgaccgctactaaaaggaaaccaagataaatacacaaataataaaaagggggggcccttttatag

SEQ ID NO: 57070 - DNA, 530 bp, Gossypium hirsutum
  Clone ID: uC-gsflnu33B129c09b1
tcgttcacgcgtccggccgacaacgtttccggcaactctaagtttgactgatttatcagtaacagaaaataataactcgacggagaatcgcatatcaaggccgccgagccccaaagtaaacacctcttcttatcttatccgtccaataccggttcttcccgttcctccatcatcgaaaatggctgatcttaatttaaaccagaaagccgaagaagaccgtttacctctatcgctaaaactctcgacaccatccgccgatgagcaatcaacagcagcggcacactcgtctactctcgtcgtcatgtcaaatggggataacaatagcatcatcagcgttgcttgaaaattagatgaagtaaataattaggtgaaaaaattattggactatttggtaattaggtgaaattccttgttttgtacagcataattattactgagattgcattagattgaaaaaaattattagactggtgggtaattaggtgaaattccttggttagtacatcatacttagtgcagcaggagtctaa

SEQ ID NO: 57071 - DNA, 478 bp, Gossypium hirsutum
  Clone ID: uC-gsflnu33B129e04b1
ttagtacgtagcggaactgtctcgcaccctctcgttttcacattttcctattttatgctctcatcctccgccgtgccttccgccgtcggcttccttcaccaccgccatcaatggagacccaccggcgatcttcgactaattccgttcggtctcacaagccggcaaggccaattgctttggaagatgattccaccaaagcttctgacgcattgccacttcctttgtatttaacgaatgctgtgttcttcactctctttttctcggcggtttatttccttctttgccgttggcgggaaaagatccgatcctctacgcctctgcatgtcgtcaccttttccgagatcgttgcgattcttgcttccgttgcgtcgaatatttaccttttggggttctctggtatcgatttcgttcaatctttggttctccggccatcggctgacgtttgggctactgaagatgatgaagtggaaagtgaagc

SEQ ID NO: 57072 - DNA, 471 bp, Gossypium hirsutum
  Clone ID: uC-gsflnu33B130a03b1
tctgttcatcagcaaaaccccaacagattgctgtggtttttttccaagtcaatggattctgcctccggagggagtgacaatagcatcaaagaggctataccagcaacagcttcagccctgctgtccgcggcttcacaacaaggaggaggaggtggtagtgagtcgtctccttccccagctccaccgagtaggtacgagtcacaaaatcttctagactggaacactttcttgcagtacttgaccaaccataaacccccattaacactagctcgttgcagtggcgcacacgtaattgagctcttgaaataccttgaccagctcggcaagactaaggttcacataacggattgtccctatttcggacatgtaaacccacctgctccctgcgcttgcccactgaagcaagcgcggggtagcctcgactcgctgatcggacggctcagagcctgttatgaagaaaacggtggacgt

SEQ ID NO: 57073 - DNA, 371 bp, Gossypium hirsutum
  Clone ID: uC-gsflnu33B130a12b1
tcgttcatcctctcaggaatttttatacaaaccatcatcatcacccccttggaactaaccagtgaatctggaggagcaatgttgactcgagttgatgcacatcctaatttgttgcatgtaatctcatttcttatcttttactctctttttttccctttggattgagaaggtgatcggagttgtaatcagaatgttctaaattttttatgggacattgtaaagaaaaccagttacattgtggatagcatatggagcttacgaggtatgcatgcatgtatgtatctgaacgaatatctttgaagataaaacgtttttgccattctgagcgcttaaggagctcttcactagcggttcgaatgccatgggacggt

SEQ ID NO: 57074 - DNA, 453 bp, Gossypium hirsutum
  Clone ID: uC-gsflnu33B130g05b1
tttcaatcctctcacagaccctagcctttggcattattcacttcgggagataccatggcaccaaaaaaagacaaagcccctccttcttcatacaagcctgtacagtctgcaggtggcaagcagacgaagacgaagtgctgcaagggaaagcaaaaggataaggcgaataacatggagctgatagatcaggctacctatgacaagctaatatatgaagctgctaaatacaagctaatgactccctatatgctatctgaacgaatgaggataaacggatcactagcaaggaagggtattagggaactgatggcacgaggaatgcttaggctggagactgcccattgaagccagcagacttacactagggatacatacacctacatggtgcggtatgtttttgctcagttccatgacatagtgccgtacattgatgacacgcactctaagtgaaac

SEQ ID NO: 57075 - DNA, 272 bp, Gossypium hirsutum
  Clone ID: uC-gsflnu33B130h01b1
ctccatcagtataaggattcaggatcgaaagactcgtgaataatactgcgaacgctatgacttgtcatcgaagttttgatcagatgtggttggtttgtaagttaacctaattcacattcttctcttaaaatataaaaaaaaaacattacaatgtccgattcgcttcaccataaccaacaacgtaaacgggcgctatctttatattatccatctttcctctctcaagcatgcgacgatcccattataattttgtgccgcctcaaacacgttct

SEQ ID NO: 57076 - DNA, 326 bp, Gossypium hirsutum
  Clone ID: uC-gsflnu33B131d01b1
tgtactgttcagggccataagaccgaatagtgttggaagtatggtggaaaaggggtgaagtttgtaggagaagatgggttcgttttggtgttcatgaaatcccaaaaatgtctctcttccatgttttaaagtgagagaagggtgggtcctctctttctttaagtgcgcctcttgctattatgccttattacttataggtggcgacatggtatatggaggatgtgattgatgagacttagaggtatctatgtattaacatatggttagatttctttaaagttttcacaggatttttttagtttattttcctatatccctttgctgga

SEQ ID NO: 57077 - DNA, 452 bp, Gossypium hirsutum
  unsure (1)..(452): unsure at all n locations
  Clone ID: uC-gsflnu33B131g02b1
tcctctcgtccggctggttccgtgttttacgtcctttaccgccctaatcgaccttcgtttacccttgcttccctccgtatccaccgcttgaacttaacaaccaccgncgattcctcttcctcccatctgtcaacccttttcaacttaaccatttcctccaaaaaccccaactcccacctttccttctcttacgaccctttcgtcgtttcatgcgtgtcgagcaacagtgatgtttttataggcaacgggacattacccgctttcgtgagtaacagcaaaaacgagacaactttcaaaggggtggcggtaacgacatcaattgatctagatgcagagacggtcaacaatttgagaccggatttgaagaagaagaatgggatcttgctgaaagctcagatggatactaaagtgacagggaaaatgggtggattgaagagcacgaaagttgggat

SEQ ID NO: 57078 - DNA, 425 bp, Gossypium hirsutum
  Clone ID: uC-gsflnu33B131g04b1
tttctctcgtccgcccacgcgtccgcttgaccaacacatcaaaactacaaatataatcgctggatagtgtgataaatctctgacgagctttcaaactggtagagcttccgataatttgtaaagtaaaggaaagtaattatgtaagcaatgaatgctcagtaagctcgtataaaatttaaacataatatctcattttaataatgaaactttatagggtaaatataaacctagaccaatgccacaagatttattaaactatgtaaccatcaactcacatttgagtaagtccatcaatattatatatatatttctttcctatcataatatgattttataagacatattacacaatcattaaccatttcatgggaccatgaaccattccatttacttacttattattccatttacttagcataagctta

SEQ ID NO: 57079 - DNA, 484 bp, Gossypium hirsutum
  Clone ID: uC-gsflnu33B131g08b1
tctcacgcgtccgagatccccgtatccgtcggctccgtcgtgctggtccggaaaatctcggcgccgtcgagccagatggcggcgatacgatcgtactgatcgcctgaggagtcagcgcggaaatcgaggacgacgcgcggccagggcggagaacaatcggaaggtggagagtaaggggcggagaaaggaggggagtcgattgtgttggcgaatgaatgattgatgacggtgagggaacatgacggagtcagatgatcggacggtagaggattggtcaactcgaagaattcttgagattggggttttgggtcccaagatttcagccgaaagggtttatggaagcgatcaggtgcggcggcggcggatggtactgttccggtgaggaagagcaattagcccgtgaaagcaaagtaacaagcgctcatttttggtcttgaaaaggtagctaatttgcatgggtttatacttggggattcaatttttt

SEQ ID NO: 57080 - DNA, 424 bp, Gossypium hirsutum
  Clone ID: uC-gsflnu33B131g10b1
agcgtatcccttggcatgagaaattggaaggagaggaggcaattcagaaccatgtgcatgagctaatcacaattggaaacttggaaggtgctgtcagtttattgctttctacttctccagagagtccttacttctacccaaatgctctacgtgctgttgctctttcttctgcagtgtcaagatctcttcttgagctggcagttaaggtcgttgctgcaaacatggtcagaactgatcggtcactatctggcactcatctgctctgtgctgttgggaggtatcaggaagcttgttcacagctgcaagatgctggatactggactgatgctgctactttagctgctgcacatttaaaggggatctgattatgcaaggggtgttgcaaaggtgggcagagcatgtccttcatgctgaacacaacatt

SEQ ID NO: 57081 - DNA, 388 bp, Gossypium hirsutum
  Clone ID: uC-gsflnu33B131h08b1
tggacgcgtgggcggacgcgtgggttttgttctcctttttttttaatcttcgtaaccccgttttacaaattggttctggcttttatagtcatattacatggttcactactgtttcttttatttcttgccctgtttctgttgctttttgtgtccctttttgcaggtgctggcggtcaaagatggaggcttgctgttttggtgtgaacggcggtagctagggtgtcaagtggcacggcggtggcagtgactagagtgtcaaaaattattgaaggtttttttttaaatatgttaaggaaaaataagatgataactgctatataaacctaagcatttatttttatatatgtataactattcaacgagtaaaaatgcattattgaaaaatact

SEQ ID NO: 57082 - DNA, 411 bp, Gossypium hirsutum
  Clone ID: uC-gsflnu33B132e12b1
tctttttgactggtgatttcctcactagaaccgcaaatgttttcatggatctaggatattctctcaatccatcaattgatgttggccaggttgaaggagcatttatgcacggtctgggttgggttgccttggaagaacttaagtggggtgatgcagctcataaatggattccacctggctgcttgtatacatgtgggcctggaagttacaaaatcccttcttttaacgatgttccgttcaagtctaatgtttctctattgaagggtaatccaaatgtaaaagccattcactcatcttaagctgttggagagcctccgttttttatggcttcatctgttttcttcgccatcaaagattccattttagctgcccgagctgaaacaggtcatacagggtgggttccggttgatt

SEQ ID NO: 57083 - DNA, 229 bp, Gossypium hirsutum
  Clone ID: uC-gsflnu33B132h04b1
ttatcatcaaaatgttgtgtatgaatttggtggagatacgacctaccagagctcgggagagaagcgttagtatcgtacaataacaaccatggaaaatgtgtgcacttattttataactctaaaatatggagttatttctagcactttttaccatgtaaactacgtaaattctgggttgttgatgacacgttttggtagtttttatctgtaatataaatttaatattatg

SEQ ID NO: 57084 - DNA, 403 bp, Gossypium hirsutum
  Clone ID: uC-gsflnu33B133f01b1
ccctcttgtccgcttgatttgagagcagaaatagaatctagggagaaggctggccgagaggctcatgaggctaagttgagaatggcagcaatggttcaggcagagcaagctcgagctgaatcacaagctcatgctgaactaatggctcgaggacctataagggcaaacgctcttgggtctcaaggaaacaaccttgcaattggtcatgacattcgggagcagcctcagggtgtaaaccctgatgagatgatgaatggatggggtagcagtgcacagagggatgaaaaggaaccatctgaagatttcttgaacgatgaggagactgaaaatggagatacaagtgtgcagaatgactggcgcgaagttggggagtttgatttgaacagtacataagtcatgaagt

SEQ ID NO: 57085 - DNA, 391 bp, Gossypium hirsutum
  Clone ID: uC-gsflnu33B134e11b1
cttaggatgaagaaaagattatatataaaagcacgtccataattgtaacgtaaatcctggagtcaactccaggattgaatttattatactacaatcattgtgtcacagggattgttattgggaattggtgctaaaaacaaattacattactatattattggagaattatacatggaggaatgctactatatgtatttaatcaaggagaagatttcgatgggggcacacctgggaaggggggtacaggaaggaaaggggattgtggggaagtggaaatgggaagtttggtggtggagatttgtgttatttgttgaggtattttattttttatattttattaatgatgttatataattttaataaatattattgttattttttttttatttat

SEQ ID NO: 57086 - DNA, 483 bp, Gossypium hirsutum
  unsure (1)..(483): unsure at all n locations
  Clone ID: uC-gsflnu33B134g11b1
tttttctctactctttacgttcctctcttattttatatatccatacaagcattagtcgttttcttcaacctaaatatcctacaataaatctatgtcttaacttgtttagacccaaatccaattcaaacccttccaagatttgcttccttcttaacctacttagctagccattggtttatataaatacacacaccggcagaaaaacactcattcgtgtgaaaagttaacacaaaatgggggtnggaaggcaccttggagtacatctccgatttgcttagcagcatgaagaagaaaaagaagaagaagcaaactcaaactgtagctctcaaaatcaggatggattgtgaaggttgtgcccgtaaggtcaagaaagttctctccggagttaagggggctaagtctggggacgtggacttgaagcagcaaaaggcgacggtgacgggtaacgtagagcccaagaaagtactggcggcagcccagacg

SEQ ID NO: 57087 - DNA, 382 bp, Gossypium hirsutum
  Clone ID: uC-gsflnu33B135c09b1
ttgcctgcttcatttttggaaggaaattctggactctgcggccctggattgccaaatccttgctccgatgaacacccgaaacatcattcttctggtttgacaaccttgacatgtgccctcatatctatagcttttgccatggcaatggtgattgttgctgctggcgtgtttgtgtttcatagattttccaagaggaagtctcagccaggcgtttggagatcagtcttcttctaccctcttagactcaccgagcatgatttagtaatggggatggactgagaaaagcgcttctaggaaatggcttctccttctcttcggcctctttatttatgctctctctttttccctttacttactttttactaaatttttcatttatttt

SEQ ID NO: 57088 - DNA, 259 bp, Gossypium hirsutum
  Clone ID: uC-gsflnu33B136c11b1
tccctttcagtatggtggagctctaacggatctttggagctttggggacttccctgccgtggctggtggtcatttctgagaacattttctcttactagtttttgtaaataaggcatgttagccggttttatcaattgtgttgatctctaacaacttttcatttttctggacaaattttcagtaatttaaacaaaaaaatacattgaataagaaaataaaaaaaaaaaaaaaaatgctgacaaattgaaaggaatagaat

SEQ ID NO: 57089 - DNA, 450 bp, Gossypium hirsutum
  Clone ID: uC-gsflnu33B136f05b1
tctccctttttacgccttggatcatccctttgttgttcgccatctcaacaatttagttgtgtttttggcgaactatgttcggatgtaagtttgtcaagtgtgaattgtacttgcgtgtatatctgttattgaccgcctccggatgtattaacatccaaagtgtgattattgcaactaaagatataatattgaggtgatgtaatcggagttgaagcttgaagaatatggaatatgtgaccaagaaaaaaaagttatattgttaatttgtttttgtgatatctttatgcctagctacttgttttagatcctccattaatatacttgttgtccttttttgtgatgagttttgctttggttatggactagaaatgtataggaagaaagatactctattatatatataaacatatatatttctacatgttttatcatatatagatgatgataatg

SEQ ID NO: 57090 - DNA, 445 bp, Gossypium hirsutum
  Clone ID: uC-gsflnu33B136g05b1
tctccttccacgcgtccggattatgagaagttaagggatgctattaatcagctagtcgaggatgggaaaacttgcaaaatgctttttaaggaatgaagaggcagtcataaaggttggagcagctttccatggaataacgtacgtgctttgccagttttctgatgcttgcgacatcacacagtttttaaagaaccaaaaatgattgggaaagagaaggtagaagaagtagctattatatgtgcttcttggaaccgcgaaagcgttttggaataactttttgccaatgtagtctgacaggtgcctagggctttgtatcaatcccttgtagttcggcaataataaatgtatgaatgaatccagcattttttagcagttaaacctgctttcagctgaaatttattgttaattaattgtatcacaatattccgaacttatatgtatgagt

SEQ ID NO: 57091 - DNA, 495 bp, Gossypium hirsutum
  Clone ID: uC-gsflnu33B137a04b1
tattatataactggaacagacccttaaactctctctccctcctccgttttctcatttcggctagggtttcaacacccatcatcgtcaccgccgtgaagccaccgtaggtggtggtcgtgcgaaagggagtttcgaccccagttttggagcgcccgaaggccgtattttcttggcccaataacacgaaaggagagacctccgctttccccctccgaaaatcgatttcaaagacggaatcggaactccgaaaactcgactccggggttctcgggtaagtccctcttttctcttttcttttatatttttttttttaaaaaatgattgaagaacagaaaataaaaataaagaaacgagaaaataaaaaatgagagaacgagactcaacctttttagtttgttctttttttgattgcttaatcgtctgtgtgtaaaaaccaattggtttctggttgggctttatagccgaaaaatacaaatgatttcatctatgctattg

SEQ ID NO: 57092 - DNA, 368 bp, Gossypium hirsutum
  unsure (1)..(368): unsure at all n locations
  Clone ID: uC-gsflnu33B137a11b1
tacctttccacgcgtccgtgctccctcaaagcccctgatatagggatagtaagaaacattgattttgattctttgttcttcacatacttgatttgtagtaacacaaatagcttaggatcgatttgttattgtgccgagtagcatattcttgctcatagaaacattacaccgtcatatgtttctacattgtatagtcttgcttaccttattgaaaggaaatacgagtatgtaatgtaaattaagaaacataaaaacatactgctggactggactattctgcctttgttagtaccacanattatttttcacatgtcagattttcaggacaatctttctaaataaaaaaataaggtttttttttttttttt

SEQ ID NO: 57093 - DNA, 446 bp, Gossypium hirsutum
  unsure (1)..(446): unsure at all n locations
  Clone ID: uC-gsflnu33B137c07b1
tggngcggatggcaagctgaagaaagcagcagtggtgatagataagaaatcggggagggtgatggagttgtttacgaatcaagcaggagtgcagttttacacggctaatttcttgaaagatgtgagagggaaaggtggatatgtttatgaatcacatggagctttgtgtttggagactcaagcattttcagactcggtcaatcatacaaatttcccatctgatattgtttatcctggaaaagagtacaagcatgttatggcgttcaagtttacgttttcctcctagacaaaaaaaaacccttgtcttctttattgttgttgtcgaatcttctacaactttaaacaataatgtatttcaggatgggataataaaccttttttttttttaaggtttagagaaagaatatggggtataaattggaaagttaccaaagtttttacgattg

SEQ ID NO: 57094 - DNA, 396 bp, Gossypium hirsutum
  Clone ID: uC-gsflnu33B137d04b1
ttctataaagaaactaaacagagactcgatgcagcaaaattcacgtttcgtgctcctctcgctatccctccttttccttccattcattttctccaacgccgaaaagggccatcttttcggaggatggacaccgatcaaggacatcaaggaccctcacgtgatggagattgcagaatttgccgtcgatgagtataacaagcagtcaaactcgagtttaattttgcagaaggtggtgaaaggtgaaacccaggtggtggccgggattaactatcggctggttttgaaggcaaagaatggaagcatggctaagaaataccaggctgtggtgtggtagaagtcgtggctgaatttcagaaaacttacctcctttactctcgtcaagggttagattttatt

SEQ ID NO: 57095 - DNA, 474 bp, Gossypium hirsutum
  Clone ID: uC-gsflnu33B137g07b1
tttcctcccacgcgtccgcttcaatctagatcttttctccaccaccctttcggagaaccgcctctccctttaatcaggtatgtttcttcttccttctttagcgcttcttctgcaatcttatgagcaaaaatattctctgttctgtgtataaattggaatctaaggtcttcaaatctagtcatcttactatgaatgtcgttaataatcgctcctgtgactgatttatctctcttcatttcttggcacttcttgatgattgttcgagagtcccctataaccgtcactaagggacaatccatttcacatcctagttgtatcacctgtaaacctgccagggcttcagcagcaaatggtgactgaacattcctgtatagaacagtcttcttcgcatgagtcttcctctttcgccccaaaccacaagaccaaatgccgacttaaagttcctgttatcaaaggctgcatcaaactggatcg

SEQ ID NO: 57096 - DNA, 513 bp, Gossypium hirsutum
  Clone ID: uC-gsflnu33B138h10b1
cttatatcctcagcatgtcacgcctgattattgggtattcagaattcctgggaaaatttccgacgaaaattcggctccctatcgttaccgttacgcctttatcggacctctcgtttactgctcctatctttcagcccaccgtgaagaagaaaaacagagatacctggctgcctttctcctccgtgctcaacccaacactagcttgagcgattttatcacattgattaaagggtctttagcaaagatccgagggtgttacgaaaatttgtattacaggaattgggatgattcatttaaaagaccacggcaattcatttaaaagatgtgggtatacttgttcgaagaaggattatgattaactaaccagcttggcagccataaagcaatagtgaaaatgttcaacaatctctgcaaatatattgatgtggagaagaagaaccgatattcaagtcttttcttgaagcttaatgcatacaatgctgttcctcaccatagttggcttggcatacttaa

SEQ ID NO: 57097 - DNA, 518 bp, Gossypium hirsutum
  Clone ID: uC-gsflnu33B140d05b1
tttccacttttccgatcgtcttcaactccactttttctgctaattcccatatccttccagttcccactccaaaaaagaaaaaaaaatcccatttttttcagtgccatggtcgcttgctaagaacccttttccattgtttttttcttgcgaagcagtgcgaaaaaatgcctccaagaagacgtccgaaaaaggcaatttctttccctgtttttcctttgatttctcttaagtttgttcctatcgttcacttttaatgaaaaatttgcacttttttttggatgttgcagaaatctaatacgagaaaggatgctgccattgatgcaatgaagccatatgggtttcctgtagacgttgttcaaacaaccataaaggatttgctaaatgtttatggggaagatgggtggccattcattgaagattctgcttacaaggttttacttgaagccatacttgacaaggtaaccggagaaggaacaagtgatcctaaggaaccagttgctgagacctcaagtagaact

SEQ ID NO: 57098 - DNA, 244 bp, Gossypium hirsutum
  Clone ID: uC-gsflnu33B140e11b1
tcccacgcgtccgtctaaatatgggttgacggtgacggtgatctccttctccgctcagactttttagccttcgatttttttttgtttccttttgatctttaaagatccgattcactggctttcggatctatcttttgcaccgaattcaattcagaccggataaaacaatggcagcatccagacgattacgtgatctacaatcgcagccgggaaacaagacttgcgaccatagcaatcaaaagaa

SEQ ID NO: 57099 - DNA, 440 bp, Gossypium hirsutum
  Clone ID: uC-gsflnu33B140e12b1
tcccccacgcccattcgtcctttgaggggcggcgttgctatgcccttgtcttttgatcacaagcccgacaggcctgatgagttggagagagttgaagctgctggtggaagggtcataaactggaatggatatcgagtgcttggagtactggccacttcaagatccataggtgatcagtacctcaaaccctttgtgatatgcaaaccggaagtgaccgtacgagaggtaacgaatggtgacgagttcctgatactggctagtgacggactttgggatgtggtatcgaatgaggtggcgtgtcgagtggtaaggcgatgtctgaacggcctaataaggagcacaacagctgatgttttgaattataaccgtgctactgaagtatcagcggtgttgtgatgaactctcattgtcaaggggtagctatgacattattagtgtga

SEQ ID NO: 57100 - DNA, 415 bp, Gossypium hirsutum
  Clone ID: uC-gsflnu33B141a08b1
taagagagattcattttctccggctcaggggctctttttacattcgccgcactatcttcttctttagaaagtaagataatttttttcttcttttgatggttgaatttcgaaggcgacgcttggtagctgcaattttagacgtttttactttacgagtttaccttgagtgtttacaattcagattttcggttggttcaatcattccttcgttgaaatttcacgttaacatcgtttgagttcagatcaaagaagattctgtgacaagaaataaaattctgattccgtcagtaaaacgagtggaaagatcttctgaggctgaaattgtcgaatttttctaaagaaaaaaattgaaggaatttattttgaaggttcagaatttcttgaaatctgaagtgaaaaatgagcctccgatctc

SEQ ID NO: 57101 - DNA, 493 bp, Gossypium hirsutum
  unsure (1)..(493): unsure at all n locations
  Clone ID: uC-gsflnu33B141b11b1
tctgcctctgcagttttcgggaagatcttattagcgcattttgataatggaaccgattgtgataaatcatttcgagactagatcgatttggagaaggggtttcgatttgatcatgggacagattatttttcaacttctcgggacgttattgttattgtgtcagttatattgttctcgctacaataatacagtaccaacaacacttcggcagtcgatatttccttccgaagagattccactaatcggtgacagatgaggaacttccagtggattcagaagaacaattgccaatgaaatataggacctagtgcacgctttgtgttaactatttttgcttaccgtggacttgtttttaatactgtgccgaaaaaaccatgtaaattgatttttttttatagcttaatgagactgatgtaaaataaagttagaggtgacaaatgnatatccatcccactttaccattttattccactgtaatacttcactataaaaa

SEQ ID NO: 57102 - DNA, 152 bp, Gossypium hirsutum
  unsure (1)..(152): unsure at all n locations
  Clone ID: uC-gsflnu33B141f04b1
ntccgtcacgcgtccgctacgaagaacccagaccggtcctttttgaaagtaaatcatgtttacgaagcagcctgtgattcgttggttaaaacttaaaattatgcgtggcaggtggttgtacatatttaagtggtaaggatggttgttttatc

SEQ ID NO: 57103 - DNA, 384 bp, Gossypium hirsutum
  Clone ID: uC-gsflnu33B141h04b1
ttcacgcgtccggaaataaatggtatttggttgtatgtttcacatgaactcgcgtaggttgcgaatctttttagcaggattcttactgcatactcaaaggttccccagaagtcaaaggcaacatcaacaaaaggtgagtttgaagaactggaagctgtctcaacaatggccatcatggatggtcccttggagccatcatcatcaactgcacccagtgtcgcagatgtccctgatgaccctgcctttgtgaatttcttcagtacagctatgaccattggaaatgcttcaaagacatcgaattttggactaccataccaatgttttgactaatggtctggacctttgaacccacccattgttgcgtaccctacagtgcccgctttt

SEQ ID NO: 57104 - DNA, 421 bp, Gossypium hirsutum
  unsure (1)..(421): unsure at all n locations
  Clone ID: uC-gsflnu33B142a11b1
tctgttaagattgaggctgtgctggattggaagcagcctaagaagtgtctgagatccgctgctttctgggcttagtaggttattatcggtggtttgcggaaggtttttcattgattacaacgcccttaactaagccgatactgtagcaccccaaacccggcccagacgttatgaccggatccgacatgcgttcaaaacattttatattattggtccagaaaaaaacttacttagtgctttaaaggataatttcattataggttaaagtgaatggaagctgtgcaccaggtaggaaaccggaaaagaggtggtgagtccatcggactgcttaagtaccaagctccctttggatccaatcctagacatgcttaccgncattgccacaccttaacgtcgtggatatttttaggaaaccgatttg

SEQ ID NO: 57105 - DNA, 485 bp, Gossypium hirsutum
  unsure (1)..(485): unsure at all n locations
  Clone ID: uC-gsflnu33B142b07b1
tctctccgtcgccccctggaaaaaacaaagtgttgttatttgcatcatcatcattatcatcttaatccaccatttcgggttaaaacttgtatgggctaaaaatgggtatcaaaattctaaatccatggtggtttcggttattgagaaaccatttctcctgtctccaccgccacctccaccaccaccaccatcaccaccacgagccgcctcgaacgatcaaggtcatcaactgtgatggggtcgtcaagatctacgaccgtccggttcatgtttccgagctattgatcgagttccctaagcacatgatttgccgttccgattcgttttacataggccaaaagatcccgcctctttccatggacgacangctccacttcggccacgattacttccttcttccttcacaggctttccagtcagctttatcgttcgtcaccatcgcctctttcgccaacgccagatattcgtcgtctcgggaatcggga

SEQ ID NO: 57106 - DNA, 387 bp, Gossypium hirsutum
  unsure (1)..(387): unsure at all n locations
  Clone ID: uC-gsflnu33B142d11b1
tgctcacgcgtccgggggatgttgcatgtgggtgactatgacataattgagtaccttaaccgttacaaaggccttattttaacatgtaacggtcttgggattaggcaatcaatttggtaaactcaagctggaggaactgaggttccttatgttcgttgtcataatgctcaaactgagacacccagatttgtgaatatcacaaaaacagcacagttgaggatgagaagaagcttggatgtattacaaggctatgttatatctttggttggngtatagtgaagtagaagaaattcacataaatctgtaacaaatttatgctttgtccggcttatttgggtatgaccaatttgttcactggatgcttgcaacttgtaaactttgagggtt

SEQ ID NO: 57107 - DNA, 281 bp, Gossypium hirsutum
  Clone ID: uC-gsflnu33B142g02b1
gtacatcccttgtcagccaccatcatgtgcgaatattcaaacaagaaaactcgtggagcatttatcgctgctgtgtttgcaatgcaaggatttgggattttaacaggtgggatcgttgcacttatcgtgtcggcttcgttcgatcatgcatataaggcccctccatattcggttaacccaaaagattcgactgcgcctgaagccgactatatttggcggattatactcatgttcggagcttgttctgcgcttctaacatactactggcgtatgaagatgcc

SEQ ID NO: 57108 - DNA, 467 bp, Gossypium hirsutum
  Clone ID: uC-gsflnu33B142g09b1
tcttttacttctacattgagtttccttttgtgaaattactactcgctttactccattaaggaaaattattatttcgatcgttcaaaactgggagaattcatcgctcaatcattctcttatattttggaaagtttacttgctgtttgtgttgagcattggtctgcaatgcaacaaactaccagcatcttgagcagcagcagcatgtctgtttgaagattgaaccagaagcaacttttttgtttaaattttgtatttttgtgatgttaacaagttggcaagtagcttgatatctaaagctagtatttttagatttgaaattgatggatgtaacagctgaatttttcagcttttctttttgaatattttagttggcaacttgccaaattgggaggagcagtacagtttaaggaactgacttatatatttttgaaccccttatatttcgaatggaatgcaagctggggttt

SEQ ID NO: 57109 - DNA, 506 bp, Gossypium hirsutum
  Clone ID: uC-gsflnu33B143a09b1
tttacgcgtccgcccacgcgtccgcactgccgggcataagaagaaccaaactgagaaccatgtggcggcagtggaaaatggggtgtcgggccgtatatttctgaagaaaagacgtggtgctgctaaaacagaggatgacggcttgcaatgctgcagcgagactggagctggtatagtaaggagaaagagccctgttatctatgaatgcctgagcatggagaggacagacctatatcttgacccagcatactactcatcttgctctagtgggatcacacaggtgtcagatgataacgcggatgacgatgaagaaagcaacagttgcactagttatccttattttagaagaaaaccttaaaaaagccacactcacacttttgatttcttgtctatatcagtagtggagctctgaggatcccttcataataataacctctataaagaaaaagcaatcaagatgttggtaatttcaagtctttgggtctgttttgtctgtgattactacg

SEQ ID NO: 57110 - DNA, 416 bp, Gossypium hirsutum
  unsure (1)..(416): unsure at all n locations
  Clone ID: uC-gsflnu33B143e12b1
tacgggttttgggctaggcaaattgggtgtatggggcttctgaggcccgggcataatcgggattgtacaatgtgttaattgattcttaaatgttcataataaccaattataaaanaaaaaaaaaaaaaaaaaaaaaaaaaaaaaaaaaaaaaaaaaaaaaaaaagaataagaaataaaaaaaaaaaaaaataaaaaaaaaaaaaaaaaaaaaaataaatataaaaaaaaaaaaaaaaaatgggggggcctttttaaaagaacaaaattataacaccggggaaagccagccaaaaattttttttaaggggccccaaaaataaatacaatggcccagtttttaaaaaagttagtagggaaaaaccctggggcaccaaaaaaaaatcctttaaaaaaaaatccactttcaacagtttgg

SEQ ID NO: 57111 - DNA, 432 bp, Gossypium hirsutum
  Clone ID: uC-gsflnu33B143f06b1
gtaactcctgttgatgaccagtctgcaccagtctgcaccattctacattaccattggagatggaggaaatcatgatggacccgctataggcatggtggaaccacagcccagcttctcagcctatagggaggctagttttggtcatggtatattcgatatcaagaacaggacacatgcctatttcagttggcaccgaaatcaagatggatatgctgtcgaagctgattctttctggtttcacaacagttactggaatcccttagggaaatcctttgtagctcaatactaataaatcattcatccaaactagttcttacaatatagtagtagttaaactgtaacgtgcctctgtccgtcatgaaagaaaaatatatcttggattttaagatcagtgtgaacataaattgtcagcaggaaaaattattaatactt

SEQ ID NO: 57112 - DNA, 243 bp, Gossypium hirsutum
  Clone ID: uC-gsflnu33B144a09b1
tattttcgtctattcacttttatgtttttaggaaaatttgaataatcttcattgctgtctttgatttcatgttgttcattgcaaggcatttgtattgctgctgtactcttttgatgctttaaaatgtgacttatatgggtctaagctcccactgaaatgaggttgtctttgaataaaaaaaaaaaaaaaaaaaaaaaaaaaaaaaaaaaaaaaaaaaaaaaaaaaaaaaaaaaaaaataaaaa

SEQ ID NO: 57113 - DNA, 466 bp, Gossypium hirsutum
  Clone ID: uC-gsflnu33B144c11b1
ccctcgcgtccgcccacgcgtccggagcaagtacaggctaggttatggagtggatggagcagaggaaaagagttcttcctcatcttatgtttcacgccttgaaagtaaatataagccgggttatggagttgacaaagatgagtatatgcaatctccgtcaaggattgatcatcataacttggaaaacgacagagatgatgacataggaagtgaagatgtaggtgtattcaccatagatgatgtacatgctttcaacgtagggaggaaattgagcactttctttttcatcaggaacaactctctttatcctggtttcttacctaaagaattagccgattccatctcattttcatcatcagaaattcccaaaattctcaagttcttttctattcctgcagcctcacagaaagccaaagtcgttaaagatacaattaggaaatgtgaactcgaacccgtcaaaggggag

SEQ ID NO: 57114 - DNA, 371 bp, Gossypium hirsutum
  Clone ID: uC-gsflnu33B144d08b1
tacatataacctctgccctaccctcgggagcgccggtttcggaacgtttgccttgcgctcagaagacatcaacccgcgtccaccgccgccaaactcgctctccaaaagctttccgagctcagcgaaccgcaacctctcgagtcaaaaagaccaaagccacaggcaaccaccagacacaatggccgacgccgagcacaactatgtcttcaacgtcagcatgtcctgtggcggctgctcgggcgccgtcgagcgcgtgctgaagaagctcgagggcgtcaagtcgtacgaggtctcgctcgacacgcagacggccaaggtcgtggccgacgagtcgctgccgtacgagaaggtgctcaagacgatcgccaaga

SEQ ID NO: 57115 - DNA, 428 bp, Gossypium hirsutum
  Clone ID: uC-gsflnu33B144g12b1
ctttggagctccaaagcttagtattgtgagaatctgtccactaaattccggtcatggattcttctgatttcaccgaatcaatgctagatcagctccccatggaaagattttgggacattcctttgtaccaatgggatggattttggtacagatcttatcatctccaagcaacaatggctcttcgttcccagtacatcgcacgcgacgacgacatcatcctcgcatcccccatgaaaaccggcaccacttggctcaaagccctttgtttttccatccttcaaaaggacggaaacgccgctcgccttaatggagaaacggtaggcaagaccgaggaagacgatccccgtcacatccgtgacccgctcgtcgacaaccatcccgccgtctacgttcaaaccttggaagttcaagttttcacggcgaaacca

SEQ ID NO: 57116 - DNA, 469 bp, Gossypium hirsutum
  Clone ID: uC-gsflnu33B145f04b1
cattattttcttccccagtttgaaacatcttaaatttcaatctatggacgattggcaagagtggaattatggacacctactcactacaatgccacttctttgttctttgaaaatcaatagttgcctcaagttaaagtctttgccacgccatcttcttcagaagacaactctgcaagtattagatatcttcgattgcccgatcctgacagagcgttattcgagaaatgggacaggggaggactggcactacatttctcatatccctacgatcacaattgatggtgaagacgtgaaaagagatgggaattgatcaaactcttcttggcttcaaagcattgggatgcaattagtgaaaaacgagcaaaaagaggccaaattgaagcacaaatcattgagttgtggccaaatcataaagatgggaaggccaaggacttaacatcaaaatttgactttgtaaatagctaaaaat

SEQ ID NO: 57117 - DNA, 424 bp, Gossypium hirsutum
  Clone ID: uC-gsflnu33B145g12b1
tttacttactgccagggataacgagaggccacgggggtctaattggactggcgaagaggcagatgaagcttaaaaagggacatcagctactagagatgctcctgtgacagggggtacagatacagatgcaaaagtagaatctgacttgactgcaggctttaatgcacctgaggggaaatactgagatcctaataacttgacagcatcaggctgttcagctactgctcaattaattagcttattgcctttgcatgtgtcttctgtgtatagcgacgagccttctacaattactgctgctgctggtgctaaagggcctttagcacccccagataacgttatgcggactaaaggagcacttggatggaagggatcatgagacacacgtgcatgctggccagctgaacctataacgaatacggatatg

SEQ ID NO: 57118 - DNA, 341 bp, Gossypium hirsutum
  Clone ID: uC-gsflnu33B146a03b1
gtatatgattcttttgtcgatgccgtgactacgtttgctttggtttctggggaagctgtcggtatactcgtcgagaagacacgaatgtcgcttcaggagttattggcgggtttgccagagatcgccgaagggttttcggagatggtttcgacggtggtgacggatttgtggaacaattgcatgcaagctttgggatatgttacggaaaatgcttgattctaatataaggttaataaataacggctcgcttatttttggcaacttatttttgcataaaatagtaacgattttgtctctaaaaaccaaaagttatgttaaaatgtgtgccttttatgcctcgt

SEQ ID NO: 57119 - DNA, 455 bp, Gossypium hirsutum
  unsure (1)..(455): unsure at all n locations
  Clone ID: uC-gsflnu33B146f12b1
gtcatatttatggggaaagtgaggggagatagagtgaaatttgacccagaccgtattgttatgagtggtggagcaactggtgctcatgaaatggtggctttttgcttggctgatcctggtgaagcattattagttcctactccatattatccaggatttgatcgtgacttaaggtggagaacaggagttgaacttgcaccagtgatttgtgaaagttcacataatttccaaattactaggaccgccatggaagctgtatatgtaaaagctcaagaagctaaccttaaagtcaagggtttagtcataacaaattcattaaatccatttggaactttaaatggatcgagagacattgaagagcatcgtgcagttcattaacgataagaactattaccttatagngtggcaattttattccggcacagtcttaaagacccttaattttgtagtttttt

SEQ ID NO: 57120 - DNA, 508 bp, Gossypium hirsutum
  unsure (1)..(508): unsure at all n locations
  Clone ID: uC-gsflnu33B146g04b1
agtttggttacagattacaagagctaatatcagagagcttaggcctggaaaaagattacataaagaaggttctaggggagcaagggcagcatatggccgtgaactattacccgccatgcccggaaccagagctgacatacggattgcctggacatacagaccccaatgctcttacgattttacttcaagacctccaagtggcgggtcttcaagttctcaaagatggcaagtggcttgctgttaatccccaaccaaatgcttttgtcataaacattggtgatcaattacaggcattaagtaatgggacgtacaagagcgtgtggcatcgggcaatcgtaaatgccgataagccaaggatgtctgttgcttccttcctctgcccttacgaccatgccctgatcagccctgcaaaacctttcacccaatatggatgtggagccgtatacagggattttacttatgctgagtattacagtaagttctggngcaggaacctggaccaagaaca

SEQ ID NO: 57121 - DNA, 305 bp, Gossypium hirsutum
  Clone ID: uC-gsflnu33B146h08b1
cccatgcgtccgcccacgcgtccggggaaaagccgttaccttgcccttgcatttctcatgaactgtggagtcctcttgggtttctattgttggggttgggagttcttaactgcccttcttcttttcttcccttatccttgaattaatttcttcttcgttctatttaattttacacaatacttattatatagatttcacctttctgaatttgtatggattttatgatgggaagtgataataacaaaggcttgtttgaatatgtaaggaaatcaacaccaccaccatttttgttgaagactttacat

SEQ ID NO: 57122 - DNA, 255 bp, Gossypium hirsutum
  unsure (1)..(255): unsure at all n locations
  Clone ID: uC-gsronu33B002a05b1
atcaatancccactaattcgaggcctatgggtataattaatcgtcaaaggaaatagaccaaactataagttcaaataaaaattcacagaatctgaacgatcaaatcgagacttctaaaaatatttgaacctgtgtttaatcgctggtgttgctttcatataattttttctccttcacttaatagctcaatttaaattggcgcatttacgcctgagttttaattataattaatcgaaagggatgtacagatgaaaa

SEQ ID NO: 57123 - DNA, 399 bp, Gossypium hirsutum
  Clone ID: uC-gsronu33B002b03b1
gtttgtccttctcaagaacgagatggtgattacgggcacagatcatattctgcaggatatgaaaatgccgatggaaatggttatggcgagaaatctgcaattgagcccgagaactctcgggctgcatggaggcgatctccatgtagatcatcaaggtctccaggtagatattcaaggtctccttctgggtctagatcgagatctgctgaccttcacgtaggcatagcagacaagtagcaaactttagcctctgggtgcatatggcatctatatcagatggtggattcaggggtgattagtctttttgtgtgcttatctctatcattttgaatgggacatctaaatttgtggcttgctttcatatttgttctatctaaacactgtaacgaaacacaaaaa

SEQ ID NO: 57124 - DNA, 584 bp, Gossypium hirsutum
  Clone ID: uC-gsronu33B002c07b1
ttttcgtatgttgttgatggagcccactatgggtgctctggttgtcatcggtgtgaagctcaccagcgccttgggctcccaacaatccgttgcaaagctcgacgaggaaccaaagaaactctcaggcataatcttcgctgaacggaaggatatgctcttatagtgcatttcacaactttcattatgcacttcttagatggctggaagcagcttatcacacacctaacttgaagtttgtatgttaaatgtttcaaacagacttcacagctaggcgataaacgatggtcacatacagagtgaggacacacagagattgtcaatgatagggacgcaaaaacaagaacattcctgctagatccacagaactgcttcaagctttcagatgggaagaactagctcttcgggaccaatgccttggaatcctgctgggaacatccagtttgatgggagcaacttcttttcgactgtcaccaaggggcgggggctaataggaggccacttttaagtggccccaccttgttaccaaagaacagattggaagccgagccccaaaagccacctttcacaaccaggttcaccgtttt

SEQ ID NO: 57125 - DNA, 468 bp, Gossypium hirsutum
  Clone ID: uC-gsronu33B002d07b1
caatgcttgatgatcttgggggtacttttgcttctcaccaggtagaaatggctatttacgcaaaggaactactgaagaggttccatgttagcattgagcaaacaaaggaaatctctgattataccagtggaattctggataagctttcggaagatactatgagggttgataatcatgctgtggaagctgatgaaattcaaatgaagagtattgctggcttccagaatgcttatcaggagcaatcgaagtttgatgcaaagaagcttattgccgatatgacaaatctcgtttatagccatgttcgtcggcaaaaagagctggtggatgcaaggctcgcagatctcaaagaaagtgctgtcgcaaacaaaacatttttagatggacatgtttcctccattgagggcatcacaacagatgcaaaacgcaaatggcaagcatttttcatgcacgcctaaaatgatgctaatg

SEQ ID NO: 57126 - DNA, 344 bp, Gossypium hirsutum
  Clone ID: uC-gsronu33B002d08b1
gttagtgggaactccctcaaaatgggctctggtgccactttgggaagatatttcttacttagactgatgatatccaattggaaatgaacaacgatttctcgatttccaaagctgttgctgttggggaccctgccacatgctgattccaagcaatggcctaactgatcccccaccccgttattgatggtttgtttgatatcttttcggggttaattcaatcgtaatttttatattttcccttcttacatgttgggatatgatatgctgatcggactagttgttaatcaatggagagacgatttgccttttacaaaatagaagggagaccccaatttcaaaaacac

SEQ ID NO: 57127 - DNA, 476 bp, Gossypium hirsutum
  Clone ID: uC-gsronu33B002e10b1
gtttttcgttggagttgatgaattacctggccctgctactactcagcatggctctcagagagatcattctttcccattcctggagtcattgaatgaggtcttagaaacaaacagagttgaagagtcacagagccacgtccacagaatgtatttcatgggtcctaatactttcagcgaaccttggcatctgccccacactcctccagaagaaataaaagagattgtatatgagggtgcatacaatacattcgtggatgagatcaatgcaattgctgcttaccagtggtgggaaggagcaatttacagcattctttccattcttgcttatcctgtcgctttgtcatggcagcagtggcgccgcacaatgagattgcaacgactacgtgagtttgtacgatcagaatatgatcatgcctgcttacgttcgtgccgctcacgggctctatatgaggggcttaaggtctctgcaactaccg

SEQ ID NO: 57128 - DNA, 304 bp, Gossypium hirsutum
  Clone ID: uC-gsronu33B002f03b1
cgtacgctttgtcggacgcgagggcggacgcgggggcttttcttctttagtatggttggttttggggcctaaaaggaggagctctagaaaaatgaatcagtggctcaagctgtgatccttcttccacttcttttccaggcatggagcccggggtccgttccgaagtcgcacccagagacgagtctacccgtaccgcgctgtgctgtgctgtgctggtgactgcgtcaatggctaaacaccgactaatcttatttgcaatgaccgcggcgtccacccacccttccacccccccgtacacaaaccc

SEQ ID NO: 57129 - DNA, 452 bp, Gossypium hirsutum
  Clone ID: uC-gsronu33B002g01b1
gactctcaccatcacggcttagacctagtcaacgcagccaactcaggtgagcttggagcccgtaggccaaggggccgtcctccaggttccaagaacaaaccaaagcctcctgtcatcatcacacgggagagtgcaaacaccctccgagctcacattcttgaagttgggaaaggctgtgatgtgtttgattgtattgccaactacgcccggagaaggcaaagaggaatctgtatattgagtgggagtggtaccggtgaccaacgtcagcattaggcaaccatctgctgctggagctgtggttaaccttcatggcagatttgagatactatcactttcaggttctttcttgccaccaccagctccgccaggtgccaccagtttgacaatcttcttggcaggcgggcaagccaggttgtagaagaggtgtggtttggggaaactcatgacggctg

SEQ ID NO: 57130 - DNA, 441 bp, Gossypium hirsutum
  Clone ID: uC-gsronu33B004b02b1
cccacgcgttcggtttcgaggtacttctgggatgggagtcgtgttaggttgcttcgtgttgatggcgacggcgttgacggcggaggctctggggtgccgttttgtttcgatttggataaggtggttgaagcttcaagcttggctattaggaacttttttattcctaagcaagtcagtgaaaattatataggctatgtgaagtggaagtttttgcacagggtttttagctctgcccttcaagttcttgctactcaagcaatgtttcgggctataggaatcgggtattctcgttcactcacttcagctgctgcacttaactgggtattgaaggatggacttggacgattaagcaggtgtatttataccggtagtttggcatctgctttcgataccaatttgaagagagttagggttacaacctcgatgctgttcacttttagc

SEQ ID NO: 57131 - DNA, 544 bp, Gossypium hirsutum
  Clone ID: uC-gsronu33B004b12b1
taaaaatttgtagaatttggattccatcaccgtttgggtttttccttttttttttcctttgcagaatatctgaaaatctaggtggtatttttcttttactttgggtggctttttgaagaaagtggtgatcaaattgcctatttgttgattttggattttgctggggatttgcatattagattgcgctttagttgattatatacatatggctgtggcttttactcacctttcatgggggttatggagtggtaaacatcaagaacctagaattgctaatggatcttctttaagttcttcgccggatgccggtttattagattcggataatctgaagtttccattggttaagagagctaatatggcgtcttcatctagaaaagttaggaggaaatggcatatccgtgaagaaagaaagatagatagggaatatgatgtagttatcgtcccatcggacggagggtgtgtttcggggtccgaatccgatggttcagattactccattggatggaggaacctcatggcctggtttaacagtgatgatgaa

SEQ ID NO: 57132 - DNA, 229 bp, Gossypium hirsutum
  Clone ID: uC-gsronu33B004c08b1
ttccatgcgtccgaaagatactaaatagatcagttgggaattaaaacctcatattccccaagttacgttttctagtcattaaaattaaatcccttactcccaatttgtctctttaattttttatcaatgaatatgatttgttggaatggtcattcagctcttctgctaaattttagcattggatgttgaaatgttctacaatgaacggttatgccatgatttagactag

SEQ ID NO: 57133 - DNA, 356 bp, Gossypium hirsutum
  Clone ID: uC-gsronu33B004d04b1
gcattatgtgcagttgctagagccagccgcaatggtaagttccggtatgatcaacatctctgagcaggaacttgatctgccatgtagttccttgatatgtaccatcttctttcttcctgttatacggttaaacatactttaatgattcttttgaactccggtgtgtcggttatggatatggatatgtactagttcttttgcttactcgcctttcttttcctctctttttcgtttgcttctctttcttatttatttttctctccttcttattttttctctattcttctcttttattattttttctttttactctttcctttcttttttcatatctctttcttattattccttctttt

SEQ ID NO: 57134 - DNA, 403 bp, Gossypium hirsutum
  Clone ID: uC-gsronu33B004e10b1
tcccacgcgtccggtttttagtttgattttggtggggcataaaagatgatcaggagtgcagtccgtgaaatactatctttcagagcatccatgcatcgtcaacttccgatggagcaacacccaaacgtttggctccacgtggtccttcctcttctcctccatctccatctacgtcttcgccgcgaccaccctccacagcttgctctctcacatcctccccaagcgccggggtgttccgcttggccctatcccagccatccacagcctctgcatctcgttaatcttcgctgtcattttcaccggcatcctcctatcctcggtcgccgatattcgcgacacccgctggttctggcgccgtacgaaaaccattcacaaccccattccaatggtgcctctgcttccc

SEQ ID NO: 57135 - DNA, 552 bp, Gossypium hirsutum
  Clone ID: uC-gsronu33B007b02b1
cggtcgcttgggtgaagttcaaatcagatctgtcaaaggcatttgatgaagccaccacgtttcttaacagtattcaaatgcagctttctcatctctgcaatgggtcatcggaagaagacttaagtggaggtgagatggtaccccatgattatcacaaaaatggagaccctcaactcaaagacaaactcttggagaaatatagtggttatattagtacacttaagcatgaattttcaaaacacaaaaagaaaggcaaactacctagagatgcaaggcaaatattgcttcactggtgggatcttcactatacatggccatatccaacggaagcagacaaggctggtctagctgaagcaacaggactggaccagaaacagataaacaactggtttataaatcaaaggaaacgacattggaaaccttcggagaacatgcaaatcgcaattatggacaatgtatatggaccgttttcctgaatgtataaggtgggattcgcacttgaatatcattcatcctcacctttatgcttatcaaaccgttcaacgttgtttt

SEQ ID NO: 57136 - DNA, 613 bp, Gossypium hirsutum
  unsure (1)..(613): unsure at all n locations
  Clone ID: uC-gsronu33B008b10b1
cagtgtttctcagatggaggctgttctccaaggtacctaatcattgatgatggatggcaagatactgtaaacgagttctataaagaaggagaaccactcattgaagggacacagtttgcaactagattagtagatatcaaagaaaacagcaagttcaaaagttcggaatcggaagccgggtgcaacaagctccatgaattcatcaacatgatcaaaggaaaatatgggttaaagtatgtatacgtctggcatgctttaactggcntattggggaggtgtacttccatcatctgaaacaatgaaaaaatacaatccaaagattgtttatccaatccaatcacctggtaatatagggaacttgagagacattatcccggacagcttggagaagtatggtgtggggatcatcgaccctcagaaaatctttgatttctacaatgatctccatagctatctctccagcaatggcgtcgatggagtcaaggtagatgcccagaatttgatagagaccttaggttctggcttcngtgnacgagtttcactgactagacgatatcaacaagcactcgaacaatctacatcaagaaacttcaaagataataaatctgatatg

SEQ ID NO: 57137 - DNA, 449 bp, Gossypium hirsutum
  unsure (1)..(449): unsure at all n locations
  Clone ID: uC-gsronu33B008b12b1
cccactcgtccggttgagaacatggagccagaaaaggtgatactctacccacaactcttttggggttgtgtggcaatgatgcacacagattttgttcatgtctactgccaggttctggagcttttctcccgtgtgattgaccgtctatcattctgggacagaacaattgagaatgtcctcctttccagcatgcctcgagatgagcttgatagtagtgatattggggaccttcagcgtatggaatttaagggctatgatttgccggtaaccagtggcaatctgcctgcatttgaaggagtgcagcctcttgtgcttaaaggactcatgtccactgttagtcatggtgtagccattgaggtcctttctcgtatcacagtgcactcgtgtgactccatttttggngatcgtgagactaggcttctgatgcacattacaggattactaccctg

SEQ ID NO: 57138 - DNA, 451 bp, Gossypium hirsutum
  Clone ID: uC-gsronu33B012a10b1
gtagttcgtgctgggacggtggtgaactatgcagtatagaacggtatcacgcagccactgcttttaaacacggaaccgaaacaaggtgaaaatggagaccaagaatacgatgatggtgaggaagaatcttgtgagaaaactcgtaaacccgtcacttctatcctatcagcatataggttactcacaccatcagtgaaggtataacaaaattttagctcacatgaaacatctatcctctgaactaactcagcgcttatcattctacaggtacaactattggtttattttatgcttaaatacgcaatggagatattactcgctgaagcaagtgtcatcacggcatattacttcatatggtcaaccaacagtgtagccatctttcttgcatgtctcgggttaaccgtactttccgtaaacatcatcgtcggtacttacatcagaaacatgttcg

SEQ ID NO: 57139 - DNA, 512 bp, Gossypium hirsutum
  Clone ID: uC-gsronu33B012b08b1
tgagtttaatccaagttccatcccacattctattttaaagagacatattcacgatcaataccacgagtggttacatccttcgagtaagctaactgctggtaatggtgatatcccgcacaagttcaataccatttcacactcgtatttcggtttctatgcggaccagttttggccaaagggtcaacccgtgatcccaaagctaatacaccggtggctgtctccgattgtacttgcatactggtatatgtacgggggctacagaacatcagccggggatatccttttgaaactgaaagggagcagcgaaggcgtcaagaaagtggtgaaagcattgaaatcaaaatccttgaattgccgagtgaagcgaaaagggagagtgttttggatcggatttctaggacagattcatgtggttctggaactggtggaaccatacgtcttagatgacttgaaagattttctaaagcaggcagcgaaaccgctgatgaatgtgcggtcgaatctcgagacat

SEQ ID NO: 57140 - DNA, 440 bp, Gossypium hirsutum
  Clone ID: uC-gsronu33B012b11b1
tccacgcgtccgcccacgcgtccgcacacgcgtgcggccacgcgtacggattttgatagtttgttaatttgttacaaaattaaaatgtcaaaagagttctaatgttcttaaagagttgtaataattcaaaaaagtaaataaaaaaagagaaaataatttagaaaataataaagccatttacaacaaggtaacaaggtgttaaaaaatgacaaaaatttcaatgcatgattaggagaaaattcaaagtaaacaaaagtcattaaaattaacaaagtataaaaaatacattttttaaaaagatatttattataaaaattacattttttaaaaagatatttattctttcctctcactttcccccaaattggtgtattaagaaaatgagggaaaacatgggaaagtgagggattctcagctcccttcaaattttcctaccatgt

SEQ ID NO: 57141 - DNA, 552 bp, Gossypium hirsutum
  unsure (1)..(552): unsure at all n locations
  Clone ID: uC-gsronu33B012c04b1
tcccacgcgttcggttaagtttgagaatttggcttctattcactcattgaaaattaaatacgagcagtgcttggagaattgtggaactaagatggatgttaatgcaccagacccatgaaaacgaattgatgagcgtgctttggagaaagaggaggaagattatttcaacgaggaccgtgatgaagatgatacaacctcggcatctcatcctaggaaagttcagcctcagcctgtttcatccaatggattgaggccaaccgctcatcattaagcccgagatctggtggactggttgactatgaggacgatgaagatgatgaagactataagccaccgcctccgaggaagcagactgaaacctcggaggaagatgagggaacgtttggagtccattaggtcaaagcggaagctgaatcccaaggaaaaggagcatgagctatccaagaagcaacgtttggggaaaagccctaaatcgagagatagtgtatttgcagctttatgttcaacgttaagccaagcagtcttgcctagntagataaccgaaacaccata

SEQ ID NO: 57142 - DNA, 560 bp, Gossypium hirsutum
  Clone ID: uC-gsronu33B012d08b1
tatttataaggtgttttatatcccagtatgtctgtagtattataataattgttgttcagtttatactgtgtggaagtcctaacatgtatatggtcataggatttgatgaagctaaatatttgacttgcaaacaaagtttgagcaaatagtttctcgattctgtttaaaacttcgagggttgaagttttgcagagtttcttgtaattgcttgattgcgctagaaacaatgatagaattaaatattcaatgatagattatgtttgctgtcatcctggtgtttcgaagcattagtgtgattgttcttacactggtttaagtttgcagtcatagatattgtgttctcctgaataaatgactggttctgcaggatatccttcccattttgtagttatttggtcctcagcatgcatcatggtttggtccttgggagaatttgagatgtcattcatttgttaaagtaaacatttttgtgatgtgtctgtgtgcggtgaagtttgacatggaacatcttaggatcctgttttagctagtataataccatgtctaacccaacatgacac

SEQ ID NO: 57143 - DNA, 543 bp, Gossypium hirsutum
  Clone ID: uC-gsronu33B012e05b1
ttaatacctctcgagtatacgtgacagttagtgtttaccttggactggtaatcctgttatatgatatgtgactcgagagtgtgttccttgattaagtgccttaataggtactcttgaatatgaattgatggattattaaatcgtacaccttgagtgtactacttgagtattcatcgaaatttcaatgattcaatggccataaaacttttgacatggcatgagaattatgagatgaaatgataatgtcttgaatgataaatgcatgatgagctcatctattcttactcgatgtatatgtaaactttgtgactaacatgtttgattggatgcatgtgtttagatggatgaaaaacttgttattgtatgcttagatttacgaaacggaattgcttagtttagttttcattatacgaacttactaagcatgtaatgcttactccgtttatttttcccctgtttatagtgtttggaagctcgcgacggtggagatcactagagcattgttacactatcactagtcatttgagtatacttagaaaatca

SEQ ID NO: 57144 - DNA, 536 bp, Gossypium hirsutum
  Clone ID: uC-gsronu33B012f04b1
tccacgcgtccgtttggccttcacaataccaaatctaattttggcatctttaattcccatgttctttctagggttttgaattccccctccctggttatccctaattattcatcaagttccaattttcattgtctgggtacttttagatctccttttttttaaaaaaaaaatttcggatccttttttgttatcgtaaaaaaaaaaattcaatgtcacaaggtttctcaattgagctttacttcgatccagcacttgagaaccaggtcttaaaagcttggaatgttttggctcgtcgtcaaatcagcactcagttaattgaaatcgaatcaaggcctcacattactctcttttcaagcccttttctcgatcctgcaaagcttgaatccgttataaagtcctttgcttcaaagcaagaacctttacctatttctttttcttcaattggggctctcccaaatgaaaacaatgttctcttcctttcaccagctccaacaatgacgctcctacaattccaggctcaggtatgtgaggcaatt

SEQ ID NO: 57145 - DNA, 354 bp, Gossypium hirsutum
  unsure (1)..(354): unsure at all n locations
  Clone ID: uC-gsronu33B014g11b1
tctgttcattatgcgggggggataagtctagcatatccacccgttcttaccggatagctgatatgctcgacagaggggccagcaggtgactctctgaatcccattaaccctattgaaaagctagaaggagctcatcagcataagagagaacttagatattacaactctgagatgcataaggctgctttttcgttgccttcattcctgaagagggagngtgaggctactttgcgactagcaggaatctgcgtgtctcctagtcctaagcaaatatgtagtgataactcccatttggcagtagagtaaataaaatggtttgcctgcgatttgtcttattacactggaaacttactg

SEQ ID NO: 57146 - DNA, 619 bp, Gossypium hirsutum
  Clone ID: uC-gsronu33B015a07b1
taaaatttaaaaacctcatgaccttcgaagaagagaagcaaaacccaaagctagcaggaagataatgacaggtctagtaatgatgaccaaaggaggtggctgtggtggcggtgggaagggcggaactaaaggaagaggaggagggctcaagagctgtgaggaggaagaagaacggcagaaccagatttctgtcgtggcctttcttttggctgctttgaggaaatccatggtgtcttgtcgtgttgatagacgagacgaagtaatgtcttcttccaccgttcaccatatggaaatcggatggccgaccaacgtcaaacacatcacccatgttacatttgatcggttcaatgggttcttgggtcttcccgttgagttccaagtcgagatccccggtcgggttccaagtgctagtgctagtgtgtttggtgtctcagccgaatcaatgcaatgctcgttcgattccaaagggaatagtgtccccactatactcttactaatgcaggagcggctttatttacaaggagggctaaaggcagaaggaaattttccgataaatcccgaaatagccaggaggagcatggtagagatcagctcaataggggcatagtgcccgataata

SEQ ID NO: 57147 - DNA, 524 bp, Gossypium hirsutum
  Clone ID: uC-gsronu33B015f03b1
cccacgcgttcggtttttttcacaatccgatggtggaatccagtgaccttcgaagacatgcagcctgaaggaacatctcatagaatttcgtggccttacgtagaagacaaagcttacctttggacttggctgtttggggttccattagctgcttataccctctggcaagttctttacttcctcattgtcaacgtgctacgtcggcagaggttattaagagatcctgaagtcatgacatcttacagggaactttcgaagaaggccaagaaagcaaataacatatggtggcgtttaggtgggttgcttggggatcaaaaccgattcctgatgtacattctatgtcaagccatttttacagtggcaaccatggcactcactgtctccatcttcctatcatacaaattccacgtgattttccaaatactgaaggtttctgcgtcagtctggaatggaggaagcttcctgttagaagtgatgcctagacaggtaattggtgaggagaaaaagaaatcagatattcagat

SEQ ID NO: 57148 - DNA, 510 bp, Gossypium hirsutum
  unsure (1)..(510): unsure at all n locations
  Clone ID: uC-gsronu33B015f07b1
gtgctttcgtttgaaaagcttcgccaggtcaggcgcaacctagatcaagccaagaccttacttgaggctttgattaagagagaagagaagaagagagatgttctggaatgtgaagttagtcttcagaggatccaaatgaagtacaagcacgaaactgaactcctcgaagatattacgcttcctggatttccaccaatatctagcaagtttgcttctagtgaagatgagtttatggactcggatgaccttgcaaacagccgtccacgtgcacgacctgctgcagttcagaatccacctctaacagattctaatgtaggcatggctcctactgcaagtgttaagcaagagttccggcggcgacatttgttgcatggatggctccataaactggatcctcttgagccagttttgttgttcacaaaaccactagttccggataagctggcagctgcnaacattgtacccccatctgatacttcaacaaaaaatggtgcctctacaccaccttat

SEQ ID NO: 57149 - DNA, 476 bp, Gossypium hirsutum
  Clone ID: uC-gsronu33B016c10b1
tacattttcgatattaggtacaatgcttgcaagccatcccaatcaatccgatctcatcacagacgagtcttcaaagctgtatggcatcactctttaccccttctcatttccatatcttctgatcttcaaatcggactgcacaaaatgtagaagtacctttctgtatctgacagcatgttcgttcccatgagagagcaacttccgcatttgctctcattttgctctgttgctgcttgatcctcgtttttgcttttgaactgaagtcttgcaactcatccaagaagaggagttggtcaatgaacatgtttttgattctgaagctaaacttatacagtatcgacaaaccagtacggaatctggattttattgaatcaggggaaaacgtatagctcaagaatgctcaaaatttttaatgttttccctttttttggacgttacaagtaattggtgaagctctactggcatatatatctact

SEQ ID NO: 57150 - DNA, 403 bp, Gossypium hirsutum
  Clone ID: uC-gsronu33B017a04b1
ccctcgtgttcgagcgggtgcaatcccaccattgatacaaattctggaaggcaaggtaagggaagccgatgaagcggttgtgaatgcacagaggaaagctattgcaagacgaaatctgggaaaacggaagcgattacattgctaaaaacgcaggcgtggaagcgattatcaaaatcatggaaaccgcaagtgtgaaggctcaggaaaaagcgctttggatattggaaagggtattcggagtagaggaacttagagtgaagtatggggaatcagcgcaagtggtgctaattgatttagctcaaaaaggtgatcccaggctaaaatcaacgactgcaaaattgttggcccagcttgaactcttacaatttcagtctagttacttttgagactaccattccttaat

SEQ ID NO: 57151 - DNA, 533 bp, Gossypium hirsutum
  Clone ID: uC-gsronu33B017b01b1
gaatttcattgtttggtggtgctcgcccacgagaactggttctaaaggaaagagggatagatgatagaaatcatgagccagttcaacatgttgatagggtcaaacataatgttacgaggactgaaaaagctgctgaccatgcatatggtgaaagagtcgagaatcctcctgttgatcagagaggtggaagaaaatctgagaggaaccatcgtgttgacaatggaagagttgacatgcagaggaggaattggcgaaatgaaaataggcggaatggccgggaaactgaaagaccgcagcaagcaccgccagtgaaggagaggcagccttcacctgagacttggcgtaagcctgtggagaatactaatccagtatctgctcaggtggctggtgtacgttatggaaaagtaacatcagctctggagcttgcccaaagccttttgaaatcattcttcgatcagaaaaagatgaccatttggtgggcaaggtgtacaccgggccgacccaatgccatctctcggtgatgggtccacttc

SEQ ID NO: 57152 - DNA, 580 bp, Gossypium hirsutum
  Clone ID: uC-gsronu33B017c03b1
cttgttagatgttcccgtgcggttgccaatgcttgagttattgtctgtaaaaacaaacatcgaatgttttagtttggtggcgatggttatcaatattttactagttaaaagaactcaggtgctcttttcaggggggaaaattggaagaagattgaaaaagagggagggagttgagcattgcttgtttcgggtacaaggatcgtagtacctgttcagacaaaggagctccagcatccatgctgtgactagcaacctttccggctataacatttgcatcagtttcgagaatgatgctgcacaaagataaagaacagtcaaacagggataagagataagcattgtcacgggggcagttgcttcgggtgaccgccccttatcattctttttctttttctctctttttctttttatagagacaaaccgctataaggtactataagtgattagtgcagcatccatatgtttaacctagtctaccatcaccgtgtttgccagtaatttacgaaggtgcggatggagaatcaagagacattttcagccaagaattgtattggtttaatgaaatatttgcaaaacccac

SEQ ID NO: 57153 - DNA, 458 bp, Gossypium hirsutum
  Clone ID: uC-gsronu33B017e03b1
aaggaattcccagttatggaagaggacatggaacaagagaaacatgtgctctacacactgccaggctttcttgcgacaccttggtggatttctggtcagctcttggagaagaaactcggcaatctcttttaagaatgaaggaagaagatttcattgagaggctcatgtacaggtttgacagcaagagattttgcagagattgcagaagaaacgttatccgtgagttcaaggagctgaaggagctaaaacgcatgcgtagagaacctcgatgcactagttggttttgtgttgcagatacagcctttctgtatgaggtatctgatgacagtgtccaggctgattggcgtcaaacttttgctgacacagttggaacttatcaccactttgagtgggcagctggaactggggaaggaaaatcagatatcatggaatttgaaaatgttggcatgaatgggact

SEQ ID NO: 57154 - DNA, 542 bp, Gossypium hirsutum
  Clone ID: uC-gsronu33B017f10b1
ttttttccttggggattcttggggcaggaccatcagataaacgtcttgttagtaatgagagaccgtatcggatgcattaaattggatttgcacaaaggcaatgctttccacggggcatcaactacagtaagctttttgtgctgtgctggatgatacttgagcctttgaataatgggtgggattcttttttgggcatggaaataaaagttggtatttaaagttgagtgcttatgggtggatttaaggtgtatccaccaggcgggatttgaatccatgtaaaaagtcggctgagctaaaaaaggttttactaacatgtgcagggcatgccggagcggcctttccacaattttttttttttacagtttctttttggtagtgaatccagtaatttgtttaattgtatagctcaaaagtggcaggagaaaaaaaaattgaaatgaatatgccaggaaaaaagtggacattatcagttttgaatatttttatttgacaacattaaaatttgtgggcataataatgggtgcgaatttgcttgctttttt

SEQ ID NO: 57155 - DNA, 475 bp, Gossypium hirsutum
  Clone ID: uC-gsronu33B018h09b1
tttttaaccaatttagaaagctcgattttattgggtgcaaatgttatgcttacagcttatccacaactaagtccattattttaatattctagatgatattggcttgcttactcactttcaacctattctagttgcagttattgcaactttttcactatccacaactagatctaattatcaatgatgataatttatgaccatgattactgaatgaatactttaggtatgcagggagaacaaaaacattttgttgatgctctatgattattcatattcatgtcattatatgttattcatgttgagggagagatgaaactaaaaataagtgtggaaattattactgactgaatagaactctaattctgcaagattgtaatgagaagtgcagatatatgacctgaagagcaaaatatggaagacaaacggagaagaacaaggcaatgcttagaaggaatctattgagcgcctgaagctg

SEQ ID NO: 57156 - DNA, 445 bp, Gossypium hirsutum
  Clone ID: uC-gsronu33B019a11b1
atttaaagagaaaagggggatttttctctctggggaagacccagaaccggccaagggatccggccaacccccaccgtggctccgccgtgcgccgcagcctccagcagtcgccggccactgcacgcggtggccggaattccgaaaaaggcaaacggtggtggagcagaggccacttgcaggcgtcggtggtggatggcgtggggggcatgtgctgacggctagggtttccttagcttcttcttttggttttttctttaatgtaatgggctagggtttcctttgaaattgggttttgggtaggttatttgggttttaggcttagtgggttcaatgggttttgggctaagggccaaaattgggcttgtacaattgtgttgaattctttaaatttggaaataaataatttagatatttctttcccccggtgggataaaaccctcaaaaa

SEQ ID NO: 57157 - DNA, 402 bp, Gossypium hirsutum
  Clone ID: uC-gsronu33B019b07b1
tcttcaatgcagagcatccacagataatatttgataatattctcaaccgtaaaataccttggccacgggcaccagaagaaatgagccttgaagcaaaggatttaattgatgggttgttgacagaagatcctaatcagagacttggagccaaaggagcatcagaggtgaagcaacatgtatttttcaaagatatcaattgggacacccttgcaaggcaaaaggctgcctttgttcccagttcagacagtgcacttgatactagttactttaccagtcgctactcatggaatacttcaaatgaccacacatatcctggtagtgattttgatgattccagtgatgctgacagcttaagtggcagtagtagttgcatgagcaaccgacaagatgaagtgatagatg

SEQ ID NO: 57158 - DNA, 537 bp, Gossypium hirsutum
  Clone ID: uC-gsronu33B019d04b1
ggtgcaacagcttacctgaaaaaacagcgaattttgctgatgagaacttttcagtaagtgtgagcaaatcagcaaatgaggttgttgctacctatacaaaagatgagaccggaatggatctcattattcgtcttcctgcatcttacccattacggcctgtagatgttgactgtatgaggagcctagggataagtgaagtgaagcaaaggaagtggttaatgtctatgatgatgtttgttcgtaatcagaatggagctttagctgaagccatacgagtatggaagcgtaattttgacaaggaatttgaaggtgttgaggagtgccctatatgttacagtgttatccacactgtgaaccacagccttcctcgtcttgcttgcaagacttgcaagcacaaatttcatgcagcgggcctctacaagtggttttcaactttttacaaatcttcatgccccttatgccagtctccgttctaaccttgggagtcaattttgagttaatggtttttgtggcatttttgctcccttgatatgtgat

SEQ ID NO: 57159 - DNA, 405 bp, Gossypium hirsutum
  Clone ID: uC-gsronu33B019e04b1
tacttttcattttgttctaggattcttcctattcgtgggtcatttatggcacgcgggatgagctcgcgcagccgcagcgggatttgaaaaaggaattgatcgtgattttgagcctgttctctccatgactcctcttaactgagataactgagacaggagatccaatgcttaaggtaggaatcaatttgattacactatatatattgaaggaatcaggtgatatttaaaaagtattctgttttcctttcgtttcaactcattttctatctaaaatattttttttctggctcggctattccacccagccgagccattaccttttattaatattaagattcttaattaagaagccaggaaaagagcaataaagttttaataatgtcaatattttttgcattctgaacc

SEQ ID NO: 57160 - DNA, 344 bp, Gossypium hirsutum
  Clone ID: uC-gsronu33B019g09b1
ttatatcgcgagggccgcccttttttttttttttttttggtaacaaaaaaactttttttattaatagaatagaagagttggagttaataaggtaattgtattatttacatattacaactaaatattgggaaattcattggctataattgacaaagttaacatatgaaaaatccaacaacatagtgttaaacaattcacttgacagtcgtagcatgcattgatatgcaagaaatgagccactttaattgataaggatttgtagcacacttaattgctttatgatcaggttgcatgtcgattttgtcatctggagaatggaataaaatttaactgggtcaagtact

SEQ ID NO: 57161 - DNA, 346 bp, Gossypium hirsutum
  Clone ID: uC-gsronu33B021a12b1
tcgtccacgcgtccgcttaaacgaacattggcggggtttattaacacaatatgactattgatatcgagaccacggcggagcaaggcggcggagcggagctctcagcgaaggactaccaggacccaccaccggcaccgctgattgacttggaagaactcaccaaatggccgctttatagggcggcgatcgctgaggacattgccacccttcttttcttgtatgtcacgggggagactgagatcgggtataaagcccaaaccgacccgggaaagaatactggtgacccggattggggtggtggcgggatacttggtattggctgggctaatggtgggaagatctttat

SEQ ID NO: 57162 - DNA, 313 bp, Gossypium hirsutum
  Clone ID: uC-gsronu33B021d06b1
tccttgcgtccgcccacgcgtccgagaacgggggctttgattgcgtcgtctctggcgacgcgactcttttacgcgccactatctctttctccctccctcacctcaactgccttgtctaccctttctgtgattcctctgtttcacgactcattccgacctccatccgctcagctttagactgccctttgaactacgctcgaagctacttagccaatctccttccttcatgcggccaccgagtcgagtaccctgactcggacctgggtctcatcgacgacagagctaaacttgccgaacctcactgggagacaac

SEQ ID NO: 57163 - DNA, 434 bp, Gossypium hirsutum
  Clone ID: uC-gsronu33B021e10b1
ttaaaacttgtgaagacagcactaggcggcgccctgcttattagttggtcacctttggcagacggtgaatctattggagaaagcatacacactgagacaggcgatatgtttgaggagtctggtggtcagaaaatagattcagttactgcagcagggtttgagatgctggatctgctaatacttgctgctcaggtattaaagggaaaaaaccaaacctgctctttaaccacaccctgatattattctggtacctgctcactctcgatttcaacttcgacatacatacatgtggtccaaactgtttgtattgaacaattacgaattgctgaagaaaacaaagttctcggtttccctcaccgcagcctgctggcaggtaagaaaagcaaaatttgggcaaaatgtgggataatgatgggagggaatacatggctatg

SEQ ID NO: 57164 - DNA, 427 bp, Gossypium hirsutum
  unsure (1)..(427): unsure at all n locations
  Clone ID: uC-gsronu33B021e11b1
gcagaagcaagaaaagcttgttgtggaaccgggttgttggaaacatcaatattgtgcaatccgaaatccattgggacatgcgcaaatgcatctgaatatgttttctgggatggattccacccatcagaagctgcaaacaagattttagcagatgatctgctgagcagtggaatttctcttatttcctaaggcccaaaaaggaaaacaatactcgcttatgtcataatgaatttggttgtactctttgtttccatgttgngattttcatttctatttatcacttgaattatgaatggaaaaagaactggttctgcttagaacctgtgattttccatttgtttcataagtatctgtaataacccaattcagacatacaataaaaaaaatgatatctttatcctttaaaaaaaaaatataattattttat

SEQ ID NO: 57165 - DNA, 497 bp, Gossypium hirsutum
  Clone ID: uC-gsronu33B021f02b1
tttattgttggccgtcaaatggcagagaccggggtcgatccatttgatatcgaatacgttagctgctcctgataagtataaatgttcggatgaagttatttccattgctgctatgctttctgttgggaattcgatcttttaccgtccaaaagacgaacaagttcgtgctgatcacgcgaggatgagttttcataccagtaacgtcggtgaccatattgctttaatgaatgtttacaattcctggagggaaacgaactactcgacacaatggtgttacgaaaattatgttcaggttaggagcatgaggcgtgcaagagacatccgggatcaactagagggtcttttagagagagtcgaaatcgaactaacaggctgtcctaatgatttacaggctataaagaaggccattatatctgggattttttctcattcggcccagttgcagaactacggttcttacccaaccgggaagcatccgcggatcgtccatatacatc

SEQ ID NO: 57166 - DNA, 584 bp, Gossypium hirsutum
  Clone ID: uC-gsronu33B027b09b1
taaacgcagccataagtccttacgagaggaccatgacggaagcttattggtctcctgattttcttactcaaacgaaggagccaaatcctccttgtgagggcgaactattgcaacacacacgaaaaggtgtacttagatggaaacgagtcaatgtctacatcaacaagaaatctcaggtaacaaacaaacaaacaagatggtaaaaatgcgagaaaacatattcagtggtaaagttttcactttacaagctcttacagacgctctattgtcaggtcatgattaagctaaaaagcaaacacgtggtagggtgcattttctaagaacaataaatgtaagtattgcattactctaccctctaatttcgcattaatctaatgacttctcatctaattaatccctttgcacttcctttttatgttagtttctttcttttactttgactgatagagctttagcaaaaagcaactttttgacacaaaaacactaccgccacccacgttacctgtaactttaaaatattataaacatattcttatcagacccgttactattcatgcaacactcgattaccatacttactatct

SEQ ID NO: 57167 - DNA, 242 bp, Gossypium hirsutum
  Clone ID: uC-gsronu33B027d03b1
tatttaaccagtctatgctgggttcacagacacaagagctcaaccgtggctcgttcccaagctcatcagctcatggcaacaatggtgtacgatcatcgaaacctgatcagccgacaagcgttgcaaagaatcccaagaagcgaacaagggcatcaaggagagcacccactacagttctgaccaccgacacaacgaatttttgagcaatggtgcaagaattcactggaatccctgcaccacca

SEQ ID NO: 57168 - DNA, 492 bp, Gossypium hirsutum
  Clone ID: uC-gsronu33B027f11b1
taacactgttcctgtgccaaggcactggtctcagaaaaggaaatatttgcaggggaagcgcggtattgagaagcaaccttttcagcttcctgacttcattgctgcaacagggattgaaaaaattagacaggcttacattgaaaaagaggacagtaagaagttgaagcaaaagcaacgtgagcgaatgcagccaaagatggggaaaatggatatcgactatcaggttcttcatgatgcattctttaaatatcagacaaagccaaagctgacaactcatggagatctctattatgaagggaaggaatttgaggtaaagttgagggtagatgaagccaggctctttatcacatgagttaaaagaagctcttggtatgccagagggtgctccacccccatggcttatcaatatgcagaggtatggtcctccgccatcatacccacacttgaaaataccagggctaaatgcacctattcctcctggagcagctttgg

SEQ ID NO: 57169 - DNA, 208 bp, Gossypium hirsutum
  Clone ID: uC-gsronu33B028h03b1
atctttcgtgcgcttgggaatcatggttcaaatgtgactgaggaagaactagagacacacacgatatcagcttggaaggagggaaaggtgtatcttggcagacagattgatggcaatgctaggtcatatcctagatgtcttgttcaagctggaccatatgattctttgaagaacatgatgctttaagtttctgtttactaagacaatg

SEQ ID NO: 57170 - DNA, 364 bp, Gossypium hirsutum
  Clone ID: uC-gsronu33B029a06b1
cggaacttccttgtcggacccacccgtccgcgtagtttttggggtggaacccgttgttggttgtttacaaggtgttgaacttgaagaagcttcggttcagagggttgaaacattgacgagtggtgaattcacggaaactgttcgagtgaatgccacagtgaagatcttagaagagtttttgcgtcagaaagatgatggggtggttgaaattttgtcttctaaaagcgtggaggccaacaatgataaaggatccaatcccaagactacaatgaatgctgatatggggaggagtttgaagccaaagcaatggttgaattcccctatagtgaaagctaattatggagataatgacatgaactttggg

SEQ ID NO: 57171 - DNA, 365 bp, Gossypium hirsutum
  Clone ID: uC-gsronu33B029d07b1
tcgattgaaagagctcatctcagacttcagcagtgaacacagttcaaaatgctaggattcccaaccgaagctgatacggggtaaagctactagaatcagagctatttgcttatttttcaaaagctggagaactgcatacatatttaatgatgcgttcttcatatctgtgcctttagaagattctttgttattactctttatttttgtttctttatattgctaccttttcttttctttctcttttatttcttatttcatttttaattttctcttttttttattttttatcctcttttcatattctcttttctctctttttttaccaattttttttataatcatcactttttattatttttttcttt

SEQ ID NO: 57172 - DNA, 486 bp, Gossypium hirsutum
  Clone ID: uC-gsronu33B031a07b1
ttgatttcaaggccggtggctattatcaccgctctacatccatcccatgcacaagctgcggtcatttgcgctaagcgtcatggttttcaactaaggattcgaagtggcggacatgattacgagggactttcgtatatttccgacgtcccgtttgttatcctcgatatgttcaaccttaagtctatagatatcgacatgaaaaccgagacggcatgggttcaagccggagctactaccggcgaactttattatagtatagcccagaaaagcgatgtccatggattcccatctggtgtatgtaccactctaggcattggtggacacttcagtggaggtggttggggatttttaatgagaaaatacgggctttccattgataatgtcattgatgcacaattgatcgacgctaatggtcgaatccttgaccgtaaatcaatgggggaagacgtgttttgggctatcagaggccggggaactactagcttc

SEQ ID NO: 57173 - DNA, 455 bp, Gossypium hirsutum
  Clone ID: uC-gsronu33B032b11b1
cccactcttccggtcatgtttcatatccaaaaaacagacaataaattttatatcatgaaaaagatatcatgattgatgaaatgaatttacttaaatatcacttgaacttaatctggtgcaactcttgaagacatacgattatatagaacacaaaagagatcacgggacattaagccagactgtcccccaattaatccttaccaatgaaccttccccagttagactactttaaagacacggtggctttagttgtccgaaacctgtccattcgccttccatcacactttacattattcctcacattatactcaatataataaacaataaaaaaattacttatttttatacattaaatcagagagtaaattagttatttctactcaaaatttcacacatttatacaagtaaaaattgatgtagctaataaaataccaataacatgtcatgtatcctgt

SEQ ID NO: 57174 - DNA, 847 bp, Gossypium hirsutum
  Clone ID: uC-gsronu33B032d04b1
catcacttttacagtcaatctgatgaaagctcggaacatttctttgtacctgtttcatcatttaacttttatcatgggggaccagagaataaagttggctccataaggagtaagaaattattttcaactcaaaaagacaattccttgcttgatagtcgtgcaagcgatggtcgtattaggagtaactatgatgacgtatcacacatgttgaacaagttggattctcttaatgattatgatccagtaaacgtatttctgtcagctgctgcttctagtagttcagcttctgatgggcagaggtctttttttgacttggaagaagcacaggaatcaggtcttttctcctttttttctgatggacgcatccctcttattcgattcttacgaggatttgctcgctccacttttagatacagatactgacttaatggagcattgagactgggtttttgacgattttgttgttttgtttatatcctcttaattccttctgttatactgttatcattctcttcttatcttgttttcatcttttactactcttttataattttattattccttcttcattttcttatttttttctttttctctacttttctactttttttattttttattctttatatttatttcctttctaattcatattatcttatattgttttactttaactttctcctcatttttttttacttctttcttcctatctatattattatattttattcatccctttttactctctttcctaataatactctcttattcttcacattcttattttttttccactttcattcctattacatttttttttttattttccttttttctctttattctc

SEQ ID NO: 57175 - DNA, 918 bp, Gossypium hirsutum
  Clone ID: uC-gsronu33B032e11b1
tcgccctcttctttcgtccacgcgtccggaagaattcactatggaaaacttgtagctgaagtgaagttcagggacgaacggaaagactatgaaccggcaattcgtgctcaggatagatttactctgacatatttgttgacgtttacaaacgttgaagaagcggttaagaacagagtggcgaagaatgcgatgacatttgtccaggaagtgatgttcatctatgatgtgttcatgtgttttttctattattttatccacttatttttcctttaattataattatattttataattttttactttagttttacttctattttttaatatttttattttttcatttgttattgctattttttatttatttatctatttgtttctattcatttaatttttatatctttttaatttttatttagtattattaaatcttttttttttttgttcatatttttataatttttattatatatacttttatttatttctttgttttttttaattcttcttttttactattatttattgattttttcttgttttttcttcttaatttttttatttatttatatatctatttttttttttatgttaattatatcattttatttttattttattctctaattaatatatacttttcttatattttttttttattattatatattttttatatattatcttcttcttttatattcttttttttttttcataattttaattttgattttttatttaaatttttctaatttttttatatattattttctatttttttttcatttttctttatatttatttttatctacttttattttcttaatttttattttatacttatctatttttttattttacttatacttttatatatttattattttttaattatttctatattattcctattttttt

SEQ ID NO: 57176 - DNA, 578 bp, Gossypium hirsutum
  Clone ID: uC-gsronu33B032h12b1
cccactcttccggcttatgatacatatagaaatcaacaactgaatttctctggaaaagaagaagcctcaaatttcgagaggtttcttgctggtgctgctgctgggattactgctactctgctttgcttaccattggacaccataaggacagtaatggtagctgcaggcggcgaagcgctggatggtttgtttggaacttttcgtcacatggttcaaactgaagggttcttttctctctataagggactagtgcccacgattatcagtatggcaccttcaggtgcagtcttctatggcgttgatgatatgtcgaagtcagcctatcttcattcacctgaggggagaaaaagaactcaagacatgaagctaggtgttctggaactgactgcatttgagcaatcagaggtaggtcctattagaacattattatacggcgcatttgctggtgcatgtcgcgaggctgctacatatccattcgaagttgtgagaaggctacttcaaatgcatgtccgtgcgactaagttaagtgcattcgcgactcgtgtgaagatagttgaagcaggtggtggaatgcatgc

SEQ ID NO: 57177 - DNA, 444 bp, Gossypium hirsutum
  Clone ID: uC-gsronu33B036a07b1
tttttgtccaaccaacaaaagggaagttggtatggtttttggacaaaccagctgcatcgaaactggacaatcttcaattttcagagtagggttgaatttatttcttttgccaaagtgtatgtttgtatgtagtggaggtttttcaaaccccgtcgaccctcgtcctcgattagttcctacttcttttatccctttttattttcttaaaaaaaaaaaaaaaaaaaaaaaaaaaaaaaaaaaaaaaaaaaaaaaaaaaaaaaaataaaaaaaaaataaaaaataaaaaaaagaataaaaaaaaaaaaaaaaggggggggccgttttagaggaccaaagtttccttccccgggcttgcaacttaataatttttttttggggcccctaaaataaaattcacgggccgtcgtttaacaacgttgggactggaaaaaccttggtttaccc

SEQ ID NO: 57178 - DNA, 327 bp, Gossypium hirsutum
  Clone ID: uC-gsronu33B036a10b1
tgtactggtggaattttaattaaggaaaactttgtgggtttagtgtgagatgggcatttgcatatccattgcatctacagagattcatgatcaagctgaagagcaacatcactttcatgaaaatgttcttgactcgaccgagaccaatccgtctattgtaactcagacacatggttctctttactcgaaacaaggaaccaaaggactcaaccaggatgctgccatccttgatcaggagtatgggatgaaaggctgagcatttcgtggtgttttccaggggcgtggcaactgtggttatttcttcagtaatttggtgaggaatcggct

SEQ ID NO: 57179 - DNA, 389 bp, Gossypium hirsutum
  Clone ID: uC-gsronu33B036b12b1
taatctaaaataaagtaaaataattgtatcatcttctttagattatttatccaccaaaattagggttattaaacttcatttttgatgttttaaggttcaaacaagtcccttacttgcaggatcaagatagaccacgtacggatttagattggggaaaagctaaatcctcagattagtcgatttcatttctatgcctagttgtcgaggtaagttcgtatgtacggattactatattcatgttattcacttttatattattatgtatttataatgttattgaataatgtatatccaaagcaatgttatgacggttattaagtcctgattgaaccttaggaattcgtaggatacaaaagacatgttattagggatttcatgttttgagtgct

SEQ ID NO: 57180 - DNA, 651 bp, Gossypium hirsutum
  Clone ID: uC-gsronu33B036g08b1
tttttaaacctgaatcatagaatgaatacgaatgaaaactgagaaaattagacacaaatatttacatggaaaaacccctctaaagaggataaaaaatacgaacaaagaaaacttaactaaaaatgacaaaaactgaaaaggagagtacaagatggagaaacaaataaaccctaaactcgaaatacaaagattccctaaaattcccacaaactcttaattttgttgttgttattctgaactatcttgggttgctaagaagcatatttatatgcttaatttcatgtacaaatatgactaaaacatccataaaataataagagtttgaactggaaaaatataatagatattagttgaatagttatgagatattagttggaataataatgcttctttacagatatgattattaagggaatatgtctattgaaagtattgttttataacgagacatgagaattctataaataggagtgatttttcattttgaaaacattcaaaaaatttcaaaagtcctttttattattccttcatcttctacttatgatagactatctataaggattacttttgaattctttttgaaatgattttttgtatactatgctagactagtgaatattttgttgggcaaacgcaaaatgaaccagcttt

SEQ ID NO: 57181 - DNA, 432 bp, Gossypium hirsutum
  Clone ID: uC-gsronu33B037a12b1
gttaaggttaatgttgatgggtcttctaatatgaatggacactatctgatggttggttgtgtggtgagagattctactgggaattggttggaaggcttcaggaaatatattggcagaggctctgctctaaagtctaaattacgggttattttaactggtcttgaagtggattcgctccaaactacattaagattattggtggaaggcggctacttgattcctatggaaaaaatatgggaaaattttgtgagtacttatttgatggcccttatacgacagattattgaagcttaaaagcaattatgaagaagttaaattttagtttgttccaaggaagggtaaaaggtggtagaattggctagctcaattaggctcaaatattgatgttgaactcactcttcttgagttccctaacttttctgacagagaact

SEQ ID NO: 57182 - DNA, 379 bp, Gossypium hirsutum
  Clone ID: uC-gsronu33B037b10b1
ttcacgcgtccgcccacgcgtccgcggacgcgtgggttacggtatcgacaatatcgttaagcctaaagacgaaactgtatgtttaggaaataatatgaactattttggtccatttcaaagcacaaattatactgcgaaaaacagtaggagttattcaatgacgagaagcccttcacatgctcaagatcatataatggccgaaagaaaaagaagagaaaagctcaaccagcgtttcattgctctctcagcaattgttcctggccttaagaagatggataaagcttcagttcttggtgatgcaattaagtacgtgaaacaacttcaagaacggttgaaggtgctagaagagcaaaccaagaaaagaacagtggaatccgta

SEQ ID NO: 57183 - DNA, 511 bp, Gossypium hirsutum
  Clone ID: uC-gsronu33B037f12b1
atcgtctgagaatgcggagtggaaaatacattgcacttcacttaagatatgagaaagacatgcttgcttttactggttgtacttctggtttgactgatgcagaatctgaagagctgagaataatgagggagaacacaaagcattggaaggttaaagatataaactctactgaacagaggataggtggcttttgtccactaacccccaaagaagtcgggatatttcttcaagctattggctatcctccatcaacattaatttatgttgcatctggtgaaatttatggtggcgatgctcgcctttcagagcttatgtctttttttccaaatctagttttcaaggaaaaactggcaacaaaggaagagttgaatgaatttgctaagcatgcatctcaaagtgctgcactagattacattgcttctttggaagcgatgtgtttgttccatcatattcaggtaacatggcacgagcagttgaggggcaccgcagattctaggccatcggagacatc

SEQ ID NO: 57184 - DNA, 388 bp, Gossypium hirsutum
  unsure (1)..(388): unsure at all n locations
  Clone ID: uC-gsronu33B037g05b1
gggaggctttggaattcaggagaaaagttttttacaatatcgttccctatttacaagcagagacagatattttgtatttggctgatagaagaagatttttgagagatgaagaagtgctgatgaaggatgttcctggatgggttgtaggagaaagcgtctacaaaactcgctggatgcctcctattcgtatggcaaacaaataagaaatcgaacgtttatgtgatctctattcaattaactttatatcaagattggttcttttctttttccttttgcaactttctcttgctttcaatattttccagcaaacccaatgtaattaatatatctccaatattatccttgaataagggtagtgtattcaaaatnnannanaananannaaaaa

SEQ ID NO: 57185 - DNA, 426 bp, Gossypium hirsutum
  Clone ID: uC-gsronu33B037h05b1
cccacgcgtccgcaaggcttgaaattcaatagcaaaaaacaagagatttgggatccccaacgagattgtttgatcgagaaatggatggaaaacaaggtttccgagaagaaaattgcagggaaaaaacagggtctcaaagatttcaaaaggaaatcacatcatcatcatcatcatgtgagtttgattagctcaagttctagctcatcggattccagttccggtgggtttttttcatcatccgacactgaatctttgaatggttcaaagacaaaagctccatgttttgttgctccaccatcactaccaaagcctaaacctgtcaggaccagcgtgtcggcttctcctgagaaacttgatgaaaggtcgaaatcgagagccatgaaaatctatggaattttaaagcagggtgaaacaacccatttcacc

SEQ ID NO: 57186 - DNA, 512 bp, Gossypium hirsutum
  Clone ID: uC-gsronu33B038b04b1
attttagacatttgctcattgtaaatagatttccaccgtttgcaagtcactcccattctaggtccaggtacaacccttaacgccaattgcttaaccactctagtgtcaataaaattaatgaatgctaccagagtccacaagcatactgatggcatgctcaccagttttcccattgcctctcatagtttgaaaaccaagtgaccccatcatggcctggagaaacaatattggctgctcattctcaactgctagagcatcaaggttgtctcaacagttcgagaatactttaggttcactcttctcgtccatagattctgctaacaactgaatgagttggggtttcatacacttgtgaccatacgagaatttcaagccacaccagtagcagagaccttttttccttcttcccccagtttctgtcagccttttgtttttgtagttggtatattggttataggtagggggacccttttcagtatttaagggtgtttggttttaggttcagttggatt

SEQ ID NO: 57187 - DNA, 483 bp, Gossypium hirsutum
  unsure (1)..(483): unsure at all n locations
  Clone ID: uC-gsronu33B038e11b1
attgttctccatatttttgggaccagccccatgattttgttccagagaggtttcaggtacaaaaggagagtgaaggcattgaaggatgggctggttttgacccgtctcggagccccggagcattatatcctaatgagattatatctgattttgctttcttacccttcggcgggggaccgagaaagtgcgtgggagatcaatttgcactcatggagtcaactgtggcattagccatgttgttgcaaaagtttgatgtggaactaagaggatctcctgaatccgtggagctagttacaggagcaacaattcacaccaagaatggattgtggtgcaagctaaagaggaggtctaatggccattgatatttgttcttcacctttgtatctaaacttagagaaagtgtacaacgtatttttggacttactgaaaaggaaattaaatatatgggtttattctacntatcaacatttgattctttttttt

SEQ ID NO: 57188 - DNA, 449 bp, Gossypium hirsutum
  unsure (1)..(449): unsure at all n locations
  Clone ID: uC-gsronu33B038f12b1
gtttattaggaaaaaaaaaaaaaagaagcagaagaggaaagaaaagattaaaaagctttgcaaaaatggtgcttcatcatctcgaatccgttcaaaagtgctctacgccacttcaaaacacgggcttcgagaggaactggatggtatccactatgagattcaggcaactgaccctacagaaatngatcttgaagtgctgaaggaccgtgctaactgagcgttgcattatttaactgttccattcaagaagttaccccctcgctttgctgactccaagttagtcttttgcttcatgtgcagaatcattttctgacaccaaaaaattggtcaatggtttaatcctttgaattaccaaaatctggtgaagttgatttgaagctctgggcttaacatttatctggttcccggtaattctgggatctttacttattatttcctttgaacaaaga

SEQ ID NO: 57189 - DNA, 254 bp, Gossypium hirsutum
  Clone ID: uC-gsronu33B039e04b1
cctactactgccgttttgcctctatgttcgaccaacagccacctcgcgagggcctcatctgaccccgttcgaccatgaacctgagggtctcgctcctagcctcagaatcttcgcctagactccgatttcaacgaagcaagcaaagactcgagggggccaaaactacgataagtccctctttctttattctttcttatatctacagcaaataaagatcgtgaaaagaaattacatagatcacataatcattattt

SEQ ID NO: 57190 - DNA, 429 bp, Gossypium hirsutum
  Clone ID: uC-gsronu33B039f04b1
cctacgcgtccgcagaaatttacgcccaacctctgtgtaatttgtctcacaattacaataaaccattatctgttttatttgtttttatatttataagaagagagtgagagtatctaatcattcccaaatgcctttaaattgcttaacccttggtttcagagtcccccattttctgccacaaaccaactacatagctttcactacctacgtaggaagctgttttcttgcgcataggacaataatcctaccctaacaatttttactttgttttttagtttcaagtttaaattttttctttttttttttttaattcattaattttcttcaataatgttaagttgtcttctgtttttttttttttatccactatttaattatttctcttttgtgtgaattttattttatattctttcttattttttttttttt

SEQ ID NO: 57191 - DNA, 383 bp, Gossypium hirsutum
  Clone ID: uC-gsronu33B039f07b1
tattttcctatcgaaatcatcaacgctgattccatgcaagtctatcaaggtcttgatgtcctcaccaataaagtccccctccgtgaacaaaatggagtgccacatcatcttttgggtactgttagctcagatgtggaattcacggctaacaagttcagggattctgctattcctattattagtgacatattatctcgcaaccatttgccagtcattgttggaggcaccaatttctatattcaggcagttgtgagttctgtccttcttgatgaattagtagaagatttttttgaaacctactcaagggaccattctggatatgagcataccaattcatatgcctgtcttccttggagacagtttcattttttgctttgattttt

SEQ ID NO: 57192 - DNA, 670 bp, Gossypium hirsutum
  Clone ID: uC-gsronu33B040c05b1
ccctctcgtccggtcagcggcggagatgagccaagtggaggagacgatgagttacgtttacaagaacccaaatgcgcctatagaagatcgaatcaaagaccttgtttctcggatgaccctgcaagaaaaggtcggtcaaatgacccaaatcgagctctgtgttgctactcttgacgatgtcagaaacctctccatcgggagtatggtcagcggtggagggaaagagcctttagagaaagcaatggcatccgattgggccgaaacgattgacaggttttagcaggcagcattttgtttcaggcttggaataccgcttgcctttgggatcgatgcggtttcatggaacaaccggttttattgttccatttttttccttacaattttgttcttgaatcacaagttttgatattttgtttaatgtatagtgtttcagtttcttttgtttatgactttttgctttacttaaattttgtttctagtctataaagctaaatttttttttcttattatttttaaaattatctttttctctttttttctttttttatattttttttattttttaatttattaatatttttttttatttcttttttttatcttctttttttttattattttttttatattctcttttttttcttatatttttatgttttttcttttttcc

SEQ ID NO: 57193 - DNA, 287 bp, Gossypium hirsutum
  Clone ID: uC-gsronu33B040d08b1
ccctcgcgtccgtgtactttcactgaaccaacaaacctccccgtttctctttctctttctcctcccttaaaacatctctcactcagctctagattgagtgagaccttgccttagtggactttgtccacgcccgacactcgtacagattcccttgtatttcaccctttctcgtaaaagcaggtcagcctctcctcagctttctacacatattcaaaagtgtatgtgtatataaaaaaattaaatgcacataattattagtttatgtgatctcccgctcctttctggag

SEQ ID NO: 57194 - DNA, 261 bp, Gossypium hirsutum
  Clone ID: uC-gsronu33B040d09b1
ccctctcgtccgcccacgcgtccgacttaatatatgctgtatgatgcatgatactgatgtagtttcaagtatgtgagttgaagatgatgcatcattgtgtaagcatgccaggttatattttgttttagaatgtgatatattctcatgccgtgctcaaatgggttgctgcctgctaatggagctacaaatacatccttaggaaagtgagattggggaagatatttcctgcaaggcccaaatgggaaaatgctgtaatcttga

SEQ ID NO: 57195 - DNA, 526 bp, Gossypium hirsutum
  Clone ID: uC-gsronu33B041e03b1
gctctatcccttaacctttcatatgtttctcgtatctcttcatctcattcccaaacccttggaacttccttatcagtttcaaattcatccttttcactctcagcagcttcttctccttcaatcccctatgtgtactgtggcagaggggataagaaaacagagagagggaagcggttcaatcactcttttggcaatgcaaggcctagggacaagaagaaggggagagggccaccaagggtgccagttccaccatcaccaccgagaaaagataagtttgatgatgatgagaagataaaaattgaaattgatgaatccctttttactagttaatgcttaatttctttaatttttctattggaatggcttaaattgagacaacttgctgtgtatgctgcaatttgctgttgttaacattactcttttaatttgagttattcttctctgctgatgagtttttttggggctcattttatggcaactaaagaaatgtagatatgtgtattgagaagcaagattggagcaatgg

SEQ ID NO: 57196 - DNA, 589 bp, Gossypium hirsutum
  Clone ID: uC-gsronu33B041f03b1
gcagcatctcttttatactctttgtaatttacttcaaaaaaatgccactctctaaaccagacaagaacaacgtcgtcatcgacatcaacgacgagagcagcaacaattgtggtgaagataaccaagatgagcaagacaagttagatgccatcactagccatctttacattaagccaagccattcgaagcaaacattggataaagatatggttttgagaaggattcgtcaccgtaaacgtatgaataatttcaggtccgcatttcaatctttcattggctcttcttcttcttcatcatcatcgacgaaaatgaccaagaatggcaaaggttctagcaatgaactaaagtgggtcgatgatgcttttgcagctctttgattggaatatatttttttttggatagctgctgatgttttagtgcactgtttaagcactcgtgtacgttgggtagaatatgggcctttaatacccaatatgatatggggtttaaaagcaaagaatatttcactttttaagccttttaatgctacgatacatattagattctaacttatatgggcatttgatacacatttacactattgtgtgga

SEQ ID NO: 57197 - DNA, 448 bp, Gossypium hirsutum
  unsure (1)..(448): unsure at all n locations
  Clone ID: uC-gsronu33B041g08b1
tccctctcgtccggaagaggatactgaggaaaggcgcagtgaggaagctgggagatgatttcgagagagtggctaaggataaggatagcggcgttgcgagtggaggaaagaggggttttagtgatgggatcggcattgacgtgatgaagattgtggaagaggttaatgttgagtcagaggagataaagaagaagaaaaagaggattgtaaagggtttgaagaagggtacagatgaggtgcagagtggaacagggacaacgacaagggcctcccctagactggccaaacgagggtgctaggtctttgtaggatggatgtaggatttttaatgctgggtattggtcgaaatttacagtgaatacagcttaatgatgcttttgttcgtacttaaaaaaaaaaaaaaaaaaaanctttattttttttctcttttttttttccttcctattaa

SEQ ID NO: 57198 - DNA, 309 bp, Gossypium hirsutum
  Clone ID: uC-gsronu33B041h07b1
tgtcttttcgtccggcttgtgctgctctaaatggaattataatgggtgataaaactctcaccattaggcgagcaaaccagggtgctacccagcctaaacctgagcaagagagtgtactccagcacgcacaacagcagattgctttgcagaggcttattttgcaaccacaaggggtgcctacgaaagttgtttgcttgactcaagcacttaatgtggatgatctcagggatggtgaggagcatgttgaccttgtttgttgtcattgtggcaatgcgtgtttttaatttttgtttattttgctaaattttt

SEQ ID NO: 57199 - DNA, 461 bp, Gossypium hirsutum
  Clone ID: uC-gsronu33B042f05b1
cccacgcgtccggtcggtgtctttggagacatgtacataaagaaaagaatcttagagaacaaaagataagaatatccaatgatttagtcaattttgtaggagacagaaatgtaagaactgtcgttttcttttcctcttttgaagtaagtttatgacaaaagtcctttaggatacctctacgcaacatcaaatgaatcatttagtttatcatgtgagattgggcatataaatctatgttttgttgaaaaaaaaaaaaaaaaaaaaaaaaaaaaaaaaaaaaaaaaaaaaaaaaaaaaaaaaaaaaaaaaaaaaaaaaaaaaaataatataatcttcctttttaaaaaaattaattttgggggggccgttttaaggatcccaatttttttctcgcttttttccaaaacaattttttttatttgggtccccaaatttatttttgtggcggttttttacaacttt

SEQ ID NO: 57200 - DNA, 579 bp, Gossypium hirsutum
  Clone ID: uC-gsronu33B042h06b1
cggtcgcgtggggaaaaatagttcttaatacattttcttttcttctttttaaggtttcctctcaaaaagttttttccttgtttcttccctactttccaacggtcaaagtttttgacatcgtgggaatatttatattggagaaaaaatatccattgtatactaaaatatcacctgaaaccctatgacaaatcttagtttgagcaatgaaaatggaagaaatcttaatctactctttgctttcggttcttatactatgggtggccaccaagttaatcacctcaactcacaaaaatcacccaccaagtcctctggctcttccgattctgggtcatctccatctcctcaaagaacccctccatcgaacactcttcaccctctcccaaaaacacggccccatcttctccctcaagcttggctctcgtttctggtcgtcgttcatcaccctttaccgtccaagaatgtttcaccgagaatgacattcgtttagccaaccgccctcgcttcatcatgggcaagttcgtcggctataactacaccactctaggtctggctccctacggcgatcatttgcgcaaccta

SEQ ID NO: 57201 - DNA, 692 bp, Gossypium hirsutum
  Clone ID: uC-gsronu33B044c03b1
atttttcttttaaaaatcatcttattttatcattttcttttggtttagctgtccaactaagttagttagggctaaattaccactttagtcttacctcaattaaccttcaagctatttaatcaactaaatgcaataactaccaagttttgcaccttttacaatttagttttttttcattaattaactatctaaattttaatattttcgaaccaaattttgatatgaccttagtgactcataaatattctttttagaatatttatgagtcaacatgacagaaatttgtggtcccaaaaccactgatccgtcaccactaaaaatcgggctgttacaactctcccccttaggacatttcatccttgaaatggttacctaaaaatagattcagatactgtaggtttattgattctttagtctcccaggtagcttcttttgaaccatgatgatgccacaagacttttattaacgggactcgtttatttcacagttctttgacttcccaagctaaaattttattgggttcctcaaatccgtaaatctggtgaggctaatctataagcaaaatacatgccaagatcagatctgaccctttaactttgaactggaatcatttagtttttttgagtcaatggcaggttttattaacccggctgtattttacatttttacggcataattggatatattttttt

SEQ ID NO: 57202 - DNA, 484 bp, Gossypium hirsutum
  Clone ID: uC-gsronu33B044c11b1
agaatctatgcatcaaggttgtcagccactcagcttagtatatgtatcaagacgatgaatccaacacatacttgcggagggtctgctgtgacagttgggcatcaaagctgggtagccggtattatcaaggagaagttgaaaatttttccagattacaaacctaaggacatgtgagatgacattgaacaagaatatggaatacaactgaactactgccaggcttggcgtgggaaagaaattgtccaggagcagcttttaggggtcatattagggtgtctatttgattgtttccttttttttggttgctaaggattttcgttatcccttcccttgcatcacttttttcatattttcttcttagtgcgatttttatatttctactctctttattttttttgttaatacttcctttttttatctttttttctactattgatgtatcctctttattatttttaattgttcattcttcttcgttttttta

SEQ ID NO: 57203 - DNA, 543 bp, Gossypium hirsutum
  Clone ID: uC-gsronu33B044e01b1
ggaattcatgcttttggaatctaaatcgctgtcctttttatcatttagagaaccttactagtcctaaaccccaaagtaaaaggagaatcaataatagttcgaagttggacaggctgaccactattaagtcaatttctgtagggtcagttgcttttacttatggaatggttgttaaaacaaataagagaaagtaaaaaaaaaaaaaaaagtggggagcaggatattattcctggtctttggctttgcctggtaagatgaaagaaaaatggaaatatggaaaattgaaggtgtagtaaagtagaaagataaaagaatatatttgttctttctattggggtgcttggtagggaaaaaaaataaatttaatactcttactttcattttcttatattttaaaattcattttttctttcttccttatctttttttctttttctttttcatttttattctatttccttattacttttgggggggggccttttaaagagacaaatttttttccccggggttgggcgtttatatttttttttggggccccca

SEQ ID NO: 57204 - DNA, 383 bp, Gossypium hirsutum
  Clone ID: uC-gsronu33B047a08b1
tctcctctcgtccgcccacgcgtccgctgtgattggggtcatagcgatgtgtcggatggagatgatgatgaaaatctggagaagtctgcagctggatctagagtcaagtctaagaggagcattgcaggattagcaaagtgcacagcaaatgaagatggaattaatattgcagacttgattggttacagaataaaagtgtggtggcccatggataagaagttttatgaaggtaccatcaagtcttatgaccctataaaaaggaagcatgttgcattatacgatgtggagaggggggaagtactccgtttggaaagagagcgctgggagcttgttaatgcgggccgcaagtctataaagaaggcaaagtcaccaaaaggcaccaa

SEQ ID NO: 57205 - DNA, 551 bp, Gossypium hirsutum
  Clone ID: uC-gsronu33B047a11b1
tcggtgaagctcttcataaaggatggatccatttagattggccaattcgacaccaaatagcacttggggtcgcacaaggcttggcttaccttcaccatgatctgttgacacctattattcacagagacatcaagtcaaccaacatcctattggacgccaattatgaacccaaagttgcagatttcggaatagccaaggttttacaagccagaggaggcaaagattcaatcattaccgtcatagcaggcacctatggctatttagccccagaatatgcgtattcaagcaaagcaacgaccaagagtgatgtgtatagttttggagtggtgtcttttggttttccctttttttattataccttcttcctttttcaatttcaaatatctttaatctctttactttttttattcttatttcctttttcttcctatgtttatccttcttccaattctattcatttttgttcattctccttcttttttttttattttttatctctttttttttttttttaatccaattttttttcttcctctcaatctctcttttct

SEQ ID NO: 57206 - DNA, 432 bp, Gossypium hirsutum
  unsure (1)..(432): unsure at all n locations
  Clone ID: uC-gsronu33B047b08b1
ttttggcatggagcttctttgcacacaagataatccagagtacaagtatacaatagccatgatgggctatgggcctgaagaaaaaaatgctgtgcttgagttaacatacaactacggggtcaccaactacgagaaaggaaatgactatgctcagattgcaatcggcacagatgatgttttcaacactgcagaggctgttagactttttggtggaatagtcacccaggaacctggacctttacctggtattaacatcaagatcactgcatgcttagatcctgatggttggaagacggtttttgttgataatattgatttcctcaaggaaatggagtggagttttaggtaattatttctcacacttnttctttttgaaatccaactccgagctgaaaggatttgcggcagaaattaaatccggcttgagcacac

SEQ ID NO: 57207 - DNA, 421 bp, Gossypium hirsutum
  Clone ID: uC-gsronu33B047e02b1
ccctctcgttcgcccactcgtccgcccacgcgtccggattcttgctatttgccttttcacttcgttgtcctccatcatttcttccgaaaccaactcagatttctcaaacagctttcattttcgattgttttcatgattggctttcaaccatttgaatctttcttaatcgaggtagtttgctttttcaagttaaataatgccccgcgaagcatataatcaaaacattatctcgctaaccttttctctctttagcttttgatcgactacacattacatggtcggggcttttcttgttcgagttcagctcagctttgttaagatgctgctaattggtgcacttggtagcccgtaatttgttttttgaaggaacccgtaatttgttttttttaaggaaatgagctactggcttttgggtggaaaa

SEQ ID NO: 57208 - DNA, 541 bp, Gossypium hirsutum
  unsure (1)..(541): unsure at all n locations
  Clone ID: uC-gsronu33B047e03b1
gccaattgccgatcacacttttgtctgaaaccagcaacaatggtggaccaactcaccgacgaacaaatcgctgagttcaaagaagcttttagcctcttcgacaaggatggtgatggctgcatcactacaaaagagctgggaacggtgatgagatctcttggacaaaatccaactgaagctgaactgcagggtatgatcaatgaggtcgatgctgatcaaaacggcaccatcgacttcgccgagttcttgaatttgatcgcacggaaaatgaaggataccgattccgaggaggaacttaaggaagctttcaaagttttcgataaggatcagaacggctttatttctgcagccgagctccggcacgtgatgacgaatctcgnggaaattttgaccgagagggaagtcgatgaaatgattcatgaagcagataccgacggtgacgggcaagtgaactatgagaggttgtaggatgatggtggccaagtgatgacactgcttatttgntatcttatgttaagcagcatgagcactgtttctaata

SEQ ID NO: 57209 - DNA, 312 bp, Gossypium hirsutum
  Clone ID: uC-gsronu33B047e07b1
cactcacctcagctatcgaaatcctcttcttgctgtacactctcccaacgttcaacccctcgtcttccctttgccttctcacccttgcctgcctcatggagtcgaacaaatgcaagatctccccatttcctctcttccccacattggtaacgcctcgagaaaactctaccacccttggggtcaatggatgcgagcccaacaatcaccatccgtcgcgacactatcggaaatagtgctcagaacccggacaggaaacagaaccttggattatagtatcccaaacatatgcttagcgcctttcatagcaggtgc

SEQ ID NO: 57210 - DNA, 559 bp, Gossypium hirsutum
  Clone ID: uC-gsronu33B047f01b1
tctgttaagatctgcaagaattacttcattgtcatctgcattgacttctgcagagagattagttgaggcatattttcgaagaaatgtggtgggaagaaatcaggagcagccaccaccggttaacgatagagattccttgtcgagcaatgctgcagtaataaacacggagagtcaattagatgctgcggtcgaaatagactctgcgatatcagtctcaacttcatcttctagtagaagaaacaatgtttcaagggttttggatgtggatggcatcaaccctcgatcggttaggagaagactgaactaggagctagaaagagtttttatcatatctcaatgtcatgaaattgcccagcattgcgcttgtattgcttttttctgttttacaaagaatttagttaatcataaagctttcaaatatgttatgctcacattatgacaatgaaattgtcaatcatcctttataatgatccggcaattaacgaagggattgtgaagttagaaatttaattcgacgttatgcaaggttgggttattcttttgagcttttagatccgat

SEQ ID NO: 57211 - DNA, 432 bp, Gossypium hirsutum
  Clone ID: uC-gsronu33B048a01b1
gtttaaacggttttagaaaccatcaactttttccttccctccaattctctcttgctataataaaccagtcttcttcttcttccactttccttttcttcttttgcctctctccaaacaaacaacaagaatatatatattatatatatatcaaaaaagagatttctcactcactctctttcgctgttctgaagagaaaatcactagtgttacagttaaggttcaggtgagcgtcaaattttctcaatttcaatgaaatctactttctgatgttttttattcgatatcattttttttagatttttttgctgttattcctaaaagcttttccaagcttcgttcggaaatgcaaaacgacaattttgcaaccgtctatggcgacctcgcagccaagcaatcgaaagatcaccagaggacggagttttctcttcttca

SEQ ID NO: 57212 - DNA, 596 bp, Gossypium hirsutum
  Clone ID: uC-gsronu33B048b01b1
cccacgcgtccgattataccattcactgtattattggaaactgtcttcctcaaaaagcaattcagtcaaaagataaagctatccctcttccttttgcttggtggaggtggcattgcctccattactgatctccaactcaattttgttgggacaatcctttctctccttgccattgcaaccacctgtgttggccaaattctgacaaacaccatacaaaagaggctcaatgtgtcttcaacccagcttctgtaccaatcagctccatttcaagcagctattctttttgtgtcaggccctttggtagatcagttcctcaccaatcaaaatgtgtttgcttacaaatattcccctatagtcctggcatttatcgtactctcctgaattatttctgtatctgccaactttagtacgtttctggttattggaaaaacattcccaagttcatatcaagtacttggtcacctcaagacttgcctggatctttgctttcgctatacactgctgcatgaccctttacagacagaacatcttggaattctggaagccattttgcatgggttatattcatatttgccccagagacaaaagaacagctg

SEQ ID NO: 57213 - DNA, 330 bp, Gossypium hirsutum
  Clone ID: uC-gsronu33B048e08b1
agataattctctcccttttaaagcttcctcatctttcatcttcccccaccccctaaattcccaaatattgaatcttgtttttctaaatatggaagacctgagcttcattgtgggtgttataggcaatgtcatctcagttctggtttttctttctccagttggaacgttttggaggatagtgaagaatggatcaacggaggattttgagagtcttccttacgtttgcacattgttgagttcaagcttgtggacttactatggaatcacaaagcctggggcttaccttgttgccactgtgaatggcttcggcatcctggctgaagcctgtct

SEQ ID NO: 57214 - DNA, 353 bp, Gossypium hirsutum
  Clone ID: uC-gsronu33B048g02b1
acccacacagccagctaataggaccagaggcaaggcaactcacgatgaacgtcatatacaggccagttcttgataagggatttatgatgcttatggatggacaccgtattgaggaccttcagaggatgtactcactgttttcaagggtcaattctcttgaaccactcaggcaggccgtgagttcatatattcggagaactgggcagggcattgtcatggatgaagagaaagacaaggacatggtgccttcattgttagaatttaaggcttcacttgactcaatatgggaagaaagcttttcgaagaatgagggattttgcacccacattagggatgcatttgagcatttaatt

SEQ ID NO: 57215 - DNA, 449 bp, Gossypium hirsutum
  unsure (1)..(449): unsure at all n locations
  Clone ID: uC-gsronu33B048g03b1
gacgcgcatcgacccacgcgtaacggtcaacgactgggcatgaactaaaacaagacctctaatttaaggtgctgaatattataaccaagattatcgtgaacactgaaaatattatattcgaaagagtgtttatcttgttagaaaatgtggtcaaatcatcaaaatcaatactgggtggtaaactttaattaaaaaaatcaaagttggtggaaatattcaataaaattcaaattttagtggcaaaattcaatcacattaagttaattgacaaatttacgtatattctcatagtataatgacaaatgtaaattaaaataaagtataatgctattgtgggtgctctctaaagaggtaaacaagatgaatagtcatgaaatgtgctccattctcatgaatgggngatcaaacttccgaccataagataaaggagtgaaattattttggatttt

SEQ ID NO: 57216 - DNA, 208 bp, Gossypium hirsutum
  Clone ID: uC-gsronu33B049d10b1
tcgctctacgatgtaacccccataatttggccataacgtctaggctgagtatgggatgttacagttatgtgaccacatattgatccaattgcatcaatgattttaacctgacataatggtatacattgttttaatcatatactgctaataaatttccgatttttatttctttatatctaatatttatttcatttctcttttttttttt

SEQ ID NO: 57217 - DNA, 495 bp, Gossypium hirsutum
  Clone ID: uC-gsronu33B049e02b1
gttgtgaattatttggcagtgcataggcaaggtttacgtgtaaacgtggagaaattgtggtcccttcttaactccagttggcttaaaagtttgggggaaatctttgaatctctagcaaaagtagctaaaagcttataccccaagtggaaatttggtatccctgcaacagagtatgttgaaggcactgctacacttgcaagctcattgtattatcaggctctaggtgtgcctacaggcccacatggtgctttccgtgactaccaagttgacgcaatcacgttggagatttcacctaaattttcattggacaaagtctggcgcaatgacattcttctaagaggcggccggttgattgaaggagttatacgatcagtaaataacctcctgagaagtttcaccaatcatttttcttgtacctcttaacatctcctagaagtttgtggcagtgggggtttacatgattgcgtttgcacttctcatagcgccacttccaat

SEQ ID NO: 57218 - DNA, 455 bp, Gossypium hirsutum
  Clone ID: uC-gsronu33B050d12b1
tatattccatggcaaagacgatgaagtaatcccgctcgaatgcagctttaatgttcaaaaaaaaatccctcgtgcccgagttaaggttgtcgaaaacaaagaccacattaccattgttgtcggcagacaaaaggtctttgccagagaactagaggagatttggaatagatcatcaagaagccattaaaagagtgccattttaattagtttggaatttataagaagaagaaaaaaaatcagtgaaatttgcgtaaagatgacatgagattggcaggctttttcgttctatgttaattgcttaagaccaatgtgagatggtttggtgtgtccatgttgtggaaattgcttaattaattgtaaccatatctatgatgaaacataatgtcctggtaaacacctacccatatatatatatttaaattgttataaataattaatatactcatgttcacact

SEQ ID NO: 57219 - DNA, 516 bp, Gossypium hirsutum
  Clone ID: uC-gsronu33B050f05b1
attttattttggagatcatgtcgcaagattttcttcggcttgcggccttttccgccttgtttccattttcaaaaggctagttaataattaagctgaatccgcagcaatgctacgaagcaccacggtctccaccgtgagacccggcccaaaggccagtaagacgccccactctagcccttcagtggcggcggcggttttgccttcttctgttgacctttttctcatctcatcaagaacgaataggacgcttggactccacatgtttccatactcacttaacacatgccagcttgctttaagcttgtcgcttcccaatccaagtttctcttcaatacgtttaagaacagctgggccaccgggatgaactacgtaaaacaatttgttccaatcatcaacaccacatggacctaatgtttcgaataagcattgctcaatgttgttggcaattacattgggcaactttttagacaaataatacgccatacccatttcacgtatttttgctattatcacgtc

SEQ ID NO: 57220 - DNA, 507 bp, Gossypium hirsutum
  unsure (1)..(507): unsure at all n locations
  Clone ID: uC-gsronu33B050h10b1
tctcacgcgtccgcaagtatgatgtggtccaatgaaccgtcatttgaagctgaatggggcacacagatgaaccaagtccctccaaatggattctttaatatcaccacttgtacagctgctgctacatctacttggccactttccggaacaaccgaatcaaccatggacttgtcatattcggaccagtgcccgatagagctgcaaatgaatatgaacggtaaaacaaatatgctgagcatgccaatgtctcaaattgatgaaacagcagaaggtgtttggccatcccatcagcagtttgagcagtgtgacaataatggttggagtagtgctaatggctcttgggatccttacctctatgtttcctctgtgcttggttgagtattagccatttatagattcaatatttaatgcaattctttcattttccattttctttctaacttntactaatcattctttactttttgtgcccaaagaatccccattataagctgtaaattgattttt

SEQ ID NO: 57221 - DNA, 334 bp, Gossypium hirsutum
  Clone ID: uC-gsronu33B055b08b1
cccactcgtccgccatgaataaactgttaatggaggagaacgataggttacaaaaacaagtttcccaacttgtttgtgaaaaaagctactttcgccaacagtctcaacagcaggcggggttagccaccacagatacaagctgtgactcagtggtgacaagtggtcatcaacaccatttgactcctcagcatcctccaagggatgccagtcctgcaggacttttgtctattgcagatgaaactttaacagagtttttatcaaaggccactggaaccgctgtggagtgggtccaaatgcctgggatgaagcctggtccggattctattggaatcgt

SEQ ID NO: 57222 - DNA, 224 bp, Gossypium hirsutum
  Clone ID: uC-gsronu33B055c05b1
gaagcttctgaaactgatggtggttttttccacttaatgtgatcgatccatttttgggactaaaagatggtaacagaatcttggtttcgtaatctttggaaaattccgcggaggcaagatggaatctctgagaaggttgagatcggagtgttggcattcgaagttgcgagcttgatgtctaagcttgtgcatttatggcagtgtttgagtgattagcaggtttt

SEQ ID NO: 57223 - DNA, 377 bp, Gossypium hirsutum
  Clone ID: uC-gsronu33B055d05b1
aaacttttgtgctttaatatattcataggatattatattacgaggaacctaggaatgggttctttaggtaagttcaagccatattttgctgcaattttcctgcaagttggccttgcaggaatggatatcttatctaaggctgctctcaaccaaggcatgagcaattatgtactcgtcgtctaccgccacgccattgccacccttgttatggctccttttgcagtcattctcgaaaagaaagtgaggcctaagatgaccatatcaatctttatcaaaataatggttctcagcttactggagccagtcattgaccaaaacttgtattacgttgggattgaagtcaccacttgcaccctttgatgctgccctgcataata

SEQ ID NO: 57224 - DNA, 430 bp, Gossypium hirsutum
  Clone ID: uC-gsronu33B055e08b1
ttcgaatggttaaaacttcgaacagacaaggctcttgtggaagatcccaagttcaagcgctacgtggagctctacgcgaaggatgaggatgctttttttagagattatgcagccttgcatatgaaattatctgaattagggtttatttcaccaccatcaaagttattttttgaggtagatttggtatttcgttttcgtttcgagtcactcttatactttattaatattgtatctttattcatctattcttttccctctctctattctctattaattattttctttctttttttctttctctattctttttttaatttctttatttttcatttttcattcttttttcttttttttttatctttctctacctatatcctattaatttttaattttatctttactttcttcttacttttttttttattcattt

SEQ ID NO: 57225 - DNA, 296 bp, Gossypium hirsutum
  Clone ID: uC-gsronu33B055f05b1
taaagtcacttttgctccatcttcttcacccaattcttgtaagccacttggaaatctgagcaaatggatgacaagcatgaaggagatagaagaagatctgaacaagaaaataagcttcttgagtggacttattgtggcttttagagatcaaattcacactgatattcagctcaaaccgggcaacgatggtccttccataccagctcacagggctttacttgcagcaagatcagagatatttaggaacatgctagactcagatgggtgcaaagttccaccaagtgatgcatttacac

SEQ ID NO: 57226 - DNA, 436 bp, Gossypium hirsutum
  Clone ID: uC-gsronu33B058d07b1
tcgttataatgggtgttcatctttctttcttcattgccgaaattgagaaagaaaaatattgtttaagaagccaaggcattcggccatggttatctcaatttaaaggtatgtaatgtgattttttttttgtaattgattatgaaattaaagtgataagtactgtgacaaccctaatttgaccctagtcgggaagtggtttcgggaccacaaaaccgagtcataaaaataattgattgttatattctatgcttattatatgtgtacatgcatatgtgaaagtttcatgctctaattttggcatttgtatgtgaaattattaaataggacttgtgtgaaattattggggaagggggatggtaattttaaaaaggggtctattaatgcatgtcacaaaaagtttggactttcatgtcaaaaattcaatttttttattaat

SEQ ID NO: 57227 - DNA, 362 bp, Gossypium hirsutum
  Clone ID: uC-gsronu33B058e01b1
cgttcggcagactcaaaatacagctgaattcctgcttcttgatcctctccttgtcctaccttttccttcccctcattctctccgacgccagaaaggatgctctcatcgaaggatggacgtcgatcaagatcatcaaggatccgcacatgacagagatcacagaatttgccgtcgacgagcataacacgcagttaaaggggagtttgaaagtggaagaggtagtgaaaggcgagactcaggtgatctccgggatcaattacaagctggttctgcaggcaaaggatggaacagctgataactcatgcgaggctgtggtttgggagaaggcgtggttgaaaattaagaagcttacctctttaccc

SEQ ID NO: 57228 - DNA, 455 bp, Gossypium hirsutum
  unsure (1)..(455): unsure at all n locations
  Clone ID: uC-gsronu33B058h03b1
tgttcttggagggaaataacaaacggaagacagggaaatctttactttgttttttctttttccactttgnattctacaatgctaatcttttgatttcctgaagactcatctttgtcattcttgtttatcattaattatctgtttttcttactatttagtaccccaataaccccccccccacacaaaatggcaattgcttggtctgaaaaagcttcttttatggaggttatgtctaggcctccttctttatctccaccggtcattctaacccatgacgaattgaaaaaaattgccgaatacaaagccgatgagttcgctgaatcaggaatggttctgggtctaggcactggttcgacagccaaacacgccgtggatcgcatcagtgagttgcttcgcctcggcaagctcagaaacatcgtaggaattcccaccttcaagaaaactcatgagcaagc

SEQ ID NO: 57229 - DNA, 329 bp, Gossypium hirsutum
  Clone ID: uC-gsronu33B058h07b1
ttgtcgtttgatccacaaagacctacatggggggaatttaaagcttcttatccaattatcgtgacatccaggtcccagtaggagttgtttcccacaaagggtaaatagaaagtgagataaataggagggcataagagatggattcgagcaatagcataagaacaggaggttaaagcagcgttgtttgcacgctcagtgcgggaaaccaggatgaaaagtaatgaattcaaaggtgggatcaaggtcttcaatgaagaaaaaatcggcaatggtgagggaaacaattgctggtgggtgataaagggtgagctttgaataaagggcaaacc

SEQ ID NO: 57230 - DNA, 290 bp, Gossypium hirsutum
  Clone ID: uC-gsronu33B061f10b1
ctcacgcgtccgagttctagatcgcgagctagaacgtggacttcatattcggtgatgccgccgccgttttccagagctgcaacatctacatccgtcgaccaatgagcggccaaaagaacaccgacacggcccacgggagaaccgaccagaatgagaatacgggcatagtcatccacaattcacgagtgacagcctcgcccgatatgaaggaggctcagggggcgtccaagagtccctcggcgaggtcccggaacaactaatctccatccgtcttcatttccagtaccttc

SEQ ID NO: 57231 - DNA, 524 bp, Gossypium hirsutum
  Clone ID: uC-gsronu33B061h12b1
cccacgcgtccgcaaactttttatttttctttctcttgagtctacgtctctctcgctcgctctctctatttctttaatggcgagaggagaatcaaaactcatttgaaatcaaggcatagcaatagcagtagaatagcttcgcctattcacggcgcgaatctcgagaggacttcattggactctcttattattttctcagctgcagattttttgacaacggaacataatttttgcttgcatgaaaatttgagaaacaaggactctgcttgacaacttggagactaagttaaaaatgtcatctgtaagcaaggctgatcggaaaacagctttggatgtggcctcatggtctttcaatattgtcacatctgcgggtataatcatggccaataaagccttgatggctacctaccgcttcagttttgctacaacattaacaggtttgcattctgccactacaaccctgttaactggtcctcttagatggctgggttatattcagaaccttcatatcccattacccgacc

SEQ ID NO: 57232 - DNA, 348 bp, Gossypium hirsutum
  Clone ID: uC-gsronu33B062b10b1
gttaaagggtacatttcaaaattcgagtttcggggcaggtggtgctaccattgctgctggaagattagttgttgacaatggcgtccttaaggcagtttggccacacagtggacattaccgtccgttagaagaaaactttaatgaaagctttaacaacttcatttcatttctgagggagaacaatgtaggtcataacaatgtcaaggttaaaaaaaggtactattctttttgcaaatgaaaagaatgcgctgattattggtgctgataatgcttgtttttattatattcagatgactccggtggatgaggaaggaaacttggctggcaagcaatgaagcagtaaccgac

SEQ ID NO: 57233 - DNA, 396 bp, Gossypium hirsutum
  Clone ID: uC-gsronu33B062e04b1
tttggttctcatacgaggaggttcaccatatggggggggtgtttacactggtgatggcacaagattaaccaagtgaaactgagctagctcttgcagagcatcaagggaagtacctggccagcgtgatctagcggctttatcaggcatgacataccccccatacttttgtttttcgatctattcttcattaaattgagctgtggttcgggtttgtgaattggtcttttggcatattctgtacctgtcagcaatccagcatgaaaagatagtaacacgaattattggtaccctctttgccaaatttcattttagttgagaaacatgtaccatgatttgatattcttatgggctttgtcttatcaaataaaaaggccatattttgggaatcacggttct

SEQ ID NO: 57234 - DNA, 360 bp, Gossypium hirsutum
  Clone ID: uC-gsronu33B062h08b1
ttctatcttatctcttcagtgaatcctctgacagagggggataatggcttctttcaatgacatgttctcgagctttgtcctggctttgtcatttgcaagctttgatgtcgggttcggtgcccgtactcttctgtaactgcgtaagctacctcctttgccagtgttcccaaatctgtacaatgcctcttttccaacgctggcgttaacgtctatatttttgtccgcggcccagctttgacaacagtttgttcccgcccttgcctaacattggcacctttgcccgaatgtaccataggtgccactttgccacctatttaccacagctttttccacaattcccaacttacgatcccattctat

SEQ ID NO: 57235 - DNA, 365 bp, Gossypium hirsutum
  Clone ID: uC-gsronu33B076a04b1
cccacgttttctatttgacaattcctactgttcagcacctaacagcaaccatgtggactgacgaaggaatggttaagagaattagaggggaagctttcactaccagagtgagcgttcagcttggaaatgagatgatatatgcggctcgtggaatttttaatcgtttgcttcctgatgtttacatcgctagtgattatagaaaacgcttagaggctggaaactcgcctggatatggaatttcactagttgctgaaactacttctggctgctgcatctctgcggatactacaggttcttatccacgaggggatgaagaacaagatattgaagaatggggaaaaaaagagttgatacctgcaactgat

SEQ ID NO: 57236 - DNA, 435 bp, Gossypium hirsutum
  Clone ID: uC-gsronu33B076c04b1
aagttgtgatgtttatagttttggtattctcttgcttgagcttctaacagggagaaagcctatagagaagttgccaggtggtgtcaagaggaccataaccgaatgggtggagccgcttatagcgaaggagcggtttaaagagctagttgatcctaagcgtcgggggaacttcgatcacaaccaattgaaacaagccatctacgttgctgctctatgcgtgcagagtgaacctgagaagcgcccaaacatgaaacaagtggttggcatgctaaaagggtatgacactagaggcaacttgatgcagacgagaatggatagcgtaaagtacaaggaagaattgctggcacttgatcaaagaagtgatgatgatgatgatgatgatgatgatgatggtgatggtcttgaggaaagctgtggagtatttggcgctatgga

SEQ ID NO: 57237 - DNA, 526 bp, Gossypium hirsutum
  unsure (1)..(526): unsure at all n locations
  Clone ID: uC-gsronu33B076c05b1
aaaaatttaatctgtgttcttaggggtgaagactttaaaaaaggagtctaatgaattcttggtcaggatcaggaagaaggcccagaatcatggcttcctcgttgtcattacctcaaaataccatcaccgacatcctctctagattgcccgtcaaatccctaactcgattcaaatccgtttccaaaaactgggccgacctcacttcagcccctgctttcatcgccgcccatctacgccgctcttctactgacccatctctcctcatccgccgctaccactcccagtctggttgggactacgggatctggctcatcactacccccacactaagttacgccacccagctcttgcgtatccccctggaagaatcacttcctctgttcccgaaaatcgtgggttccgtcgatggtttggtttgtcttgatatttccccttgttatgcttctgatttcgtatgtggaaccctggactaaacaaataaacgtctncctttgccntgattactntctcagagataccctatttg

SEQ ID NO: 57238 - DNA, 366 bp, Gossypium hirsutum
  Clone ID: uC-gsronu33B076e06b1
gcctggtacttttgttaacattatatcctttgatgacctgagtgggggactggtgtagatcgatctctaagggcacattgtggcaacctatgtcaccgaaaatgtgagcagctgacgcttctttgggtatcaggaagaaccttctgatgtttctgctgattgagccaagacggaattaatgcttagttcatttaggtattatgaaccacttggtcatcgtcatcttgttttaaaccaattgacaaaaactcgatatggcattcttgcctttctttgctatacctcccctcttaggttctcccaatcatttgaagaactgcgaatgtgaattcataataatattcaagaggctgatataaaaaatag

SEQ ID NO: 57239 - DNA, 462 bp, Gossypium hirsutum
  Clone ID: uC-gsronu33B076f06b1
cccacgtgtccgtccacgcgtccgcggacctaaatttaatgatccggttcaagtatcttgtggagctgcacatactgttcttgttgcacatgatggatacaagctatggtcctggggcaggggaaggagtggagttcttggaaatggtaaaactgttgactgtttcagcccaacaatcgtgctgtggccaccactgaatgaggatttcaagcaagaagagctgaatcaggatgataaaattgtagatcaaaagggttctgatggagtctcggagatggagaagaagttatctttggccatggaagagatgaagctcctccaatcaaaactttccaccatggaacgctatgcaagcatacttcatggttcaatctttggtaaaccttttgaagtgcaagatattccgatctcgttgcagaactctggcacttttgatattgcaggggaatgggaaaacatgtt

SEQ ID NO: 57240 - DNA, 301 bp, Gossypium hirsutum
  Clone ID: uC-gsronu33B076g08b1
aaactacatcgggagagcttttgacaagcaacccatagtgtgaaacccctgaaaccatcacccctatggctgagttccttgaatctgaattcaaatcacatggatcaggcatcgaagtccggtaacaattgcgcagcaaacctttttcggctctgaacatcgatgttctgaatctcatatgcagctgaagagtggggtgtttattggcttatagcaccatactcatttggttcaccaccgtcatgacttctcactaggtgcagggtttggtttgtttggatattttcttttatttggaaac

SEQ ID NO: 57241 - DNA, 382 bp, Gossypium hirsutum
  Clone ID: uC-gsronu33B076h10b1
acgtttttctctctaggattttgattacatcttcggggaactgagcttctttcttttaattagattttcaatcctttcctttcctacaaaacgttaacaacaaacaggtttttctttgggcggtttcatgctaatttgattggcttttcttttgttcttttttacacattcaatggcacccagcagcagaagaggcaaaacatcaagaaacgcatgcaagcccagacgaagtaaatacaggaagaagctcgtaaagccgagcatcaatattcaaacgtccacatcagcaacgttggacgattcggcttccaagattgatgatggatttgcattgcatcatattattgaaggagatgatgacgtctctaccacatgaacatgc

SEQ ID NO: 57242 - DNA, 494 bp, Gossypium hirsutum
  Clone ID: uC-gsronu33B077c12b1
ggctttcctttttttttttttttgggagaaagcttggagttttggtttggttcttttgtggttcagcactttaagctgctatctggttaatgcagctgacgataaaaatggtggttttggagcttctttcatcttcggtgattctctggtggatgctggtaataataactatttaccaacgttgtctagggcaaatattccaccaaatggaattgattttaaagcttccggtggaaaccctactggcagatataccaatggtagaaccattggtgacattgcaggagaagagttgggagtaccaaattatgcagttccatatcttgctccaaattctactgggaaagctatactttatggtgtaaattatgcatcaggaggatgggggaattattgaatgcaactggaagaatatttgctaatagactgggattggatatccatatcgatttcttcaacaatacatgaaagcaatttgataattggtggggtca

SEQ ID NO: 57243 - DNA, 538 bp, Gossypium hirsutum
  unsure (1)..(538): unsure at all n locations
  Clone ID: uC-gsronu33B077e11b1
gaagtttgtatgaggaatttaacctcaaggagcttattgaagagcttactaacttggcaggagctttcaatcttgcagattttgtgccttttttgggtgcttttgacttacagggactcatagcccgtacaaggacacttggtgaaaaacttcacgaagcccttgagacgattattaacgaccatcagcaacaaaagcaagatgattttgttggtacaatgcttacagaattaaataagcaaatgaatcccgatggtgatataatggatcgaaatagcatcaaagccataacaatagatatgattgtgggttccttggacacctcagctgcaacattggagtgggcattatcagagctcataaggcatcctatggtaatgctgaaattccagcaagagttagaaagtgttatcgggaagagaatggtggaggaaaatgatttaccaaaattggagtacctagatatggctgtgagagaaactntaaggcttcatccttgtgcacctttactagttcctcgtgagtcaatggaggacat

SEQ ID NO: 57244 - DNA, 444 bp, Gossypium hirsutum
  Clone ID: uC-gsronu33B077g06b1
atcacagacaaaatgaccaagatcagaacatgttttttgcgatcacgtcattcaatggagttggatcaggtagcatttccccaagttgccatggtggaggctgcaaaggaaaatctagaaaaaggccgtcgccattctttttcatttagaggggaaataaggaccagcagccaatcagctccacttttttctgagaataaatctgacccttgtgagaaaattcaaccgttatcagcacgaaagtttagctcatatgtattaccgacaccagttgctacagaaagttctattggattaggtaatccagctccccaatcttcaaaagcaagtttgaatgagcaatcaaacaattcatggcattcatcttcacttgaacataagaaacatgagatgattttgggagatgagaaagtctctggatccgcagttataatgcacagtctt

SEQ ID NO: 57245 - DNA, 265 bp, Gossypium hirsutum
  Clone ID: uC-gsronu33B078a10b1
ccctcgtgaccgctatgtttcgccatatgcagtataacatgtattctttaaaacgactggatattttgaagcgcatggtattgttttgcaaggcagctgttgaggttccttggtatgttccatgtggaggtgtctgctatggagatggaaatctggttttcattgctaatgattggcataccgccttgttgccagtctacttgaaggctaattatcgagacaatggtttgatgtccttcactagatccattctcgttgtccataa

SEQ ID NO: 57246 - DNA, 397 bp, Gossypium hirsutum
  Clone ID: uC-gsronu33B078b07b1
ccccgtcgccgcgggctattgaataattttagataaagaaacatatccatttatatcaacacaaatgtttgtaaaattactttaaactttctatgcacgtaattcatcaaagaaatttgatttgcaatttgtttttttttaattaaattttaatgaatcaccttcatttatggtttactttaattaagtttaggactttttccttgtataaatgaaggtctattactttctttattgtcagcgttaacattctacggaattacctgtgaattattttttcttgcctatttgtaattcttttacttgtttctctttgttgtttatctctttcttgtttttaaatttcttttcttcatttttatattttttctacttttccttcttaacttttgtttct

SEQ ID NO: 57247 - DNA, 173 bp, Gossypium hirsutum
  unsure (1)..(173): unsure at all n locations
  Clone ID: uC-gsronu33B078b11b1
gaaacatanctctcgatggctttagaaaaaattctgtgcatgttatcttttcaaccagttgggaagaaggacatgcctgacctgtgacgaaggtagatatcaattttttgctaggtttgggagtggaatgacgagaatagcttcaactgaccttctgtctgattatatggcca

SEQ ID NO: 57248 - DNA, 443 bp, Gossypium hirsutum
  Clone ID: uC-gsronu33B078d03b1
taggattttttttccaaaaaccattaaaccatcatatgtttcctctttcttttcccaacccgagatgcatccaacagtcaagcttcaatctggttctcttccctttcgcgatccaaccttcgatgcgtcgggctcaagcagtcctccaataagtgacatcaggttagctcggggttggaaatcgtcggaggcagcatcacactatcaagccaacaccttgagagtataaacaaatatggtagaattatcaagtgagtgattatcagaagctcgatttggttggaagctcatcgaagatctatcacactatccaaaaatcttttcagtagtttttgagtattttggccaaggattataatggcatgtataataggggttgcacgggtgagaacgtagactgggacagaccgtatgtccctagttcgaaggttacactagagtca

SEQ ID NO: 57249 - DNA, 424 bp, Gossypium hirsutum
  Clone ID: uC-gsronu33B078h07b1
aaggagtagaattcgtcaagatttaaaattataaaagagtgacttatataagaaagattccaatgaaggaaagaattaagatcattctaccaccaatttgacattagaaataaaccttcttattcaaaaaacatgttgccctgtaaaaccaaataataggagaaagaatatttcagaatattataaaaagctcaagcatagaaaatatagaaaaaaaaaaaaaaaaaaaaataaaaaaaaaaaaaaaaaaaaaaaaagaaaaaaaataaaaaacaaaagaatgcttttccgctggcatattgggcgaaaaatgtattataatgcaacggacgtcggtttacaatgaaagtcgggggatcccattgctgaaattgccaagcctttcttttcgcaactcaagcccggtgctgctgcgattctcgcc

SEQ ID NO: 57250 - DNA, 202 bp, Gossypium hirsutum
  Clone ID: uC-gsronu33B079h07b1
gcgctttattatctaggattagaggaccatcgggctatgggggacgatcatcttattatgggcattctcggtctcgttcaccatcccctatgcgttctcctcaccatccttcgagttctagaggccgctaccgctcaaggtcatactcacctgctccaagacgacgaggaaactattctgtttcaccaggtagaaagcatga

SEQ ID NO: 57251 - DNA, 428 bp, Gossypium hirsutum
  unsure (1)..(428): unsure at all n locations
  Clone ID: uC-gsronu33B080b11b1
gngttgtgtccaagatgatgaaactcgcaggccatcgatgggttaggtagttcagatcctagagggcgttttggatgtgaacctgcctccaattccgaggtttctacaagtgcttggggacaattcggagcatgtagtcttcttcacagagtcatcttcaaaccagagttcacagacaccgagctacacctcaactgcgtcttctcaggcgaagagtaacacatcatcaatgagttcatgaatcttgaaaaacattttccggaaataagttacggtagtttggtttcagcatgtgtaaatatgttgtaatttcagagctgtttttacattattttcctaatacgcaagccattcctattgagaaaaaagagctgatggttccctaactctttagaaccattgcagctttctcagggtttccataaatg

SEQ ID NO: 57252 - DNA, 547 bp, Gossypium hirsutum
  Clone ID: uC-gsronu33B080e07b1
tatctattgcctccgagccatagaagttacggtgaaaggagtggtttggagacagatgggagacaattttcagatttttataggaactcaagtgaggagctttttataaagtcgttgatggagagtccaatggggatgccagttccaaatatggagatgttggggtttaagaatctctcccagaattttcgtgctgatagtgaggagcttttcagaagctggctcaccaatggagagaaccagggtcacaattcttctaatatagcacatcgtactcggcaagcgtcgcgaagattatcaacagagatggccagtttgtcgagtcaacagcctaccactttgcttcaaaagaaaaagagcagtgatgtattacatctgcaaaacaattccgttgggggagaaacatcaggggatttgaatcaaaattcagccagaactgctggtgacaggggatttcaggctagtaatttatatttggccaaggcatggtttcatagttcacagcccatgacaagaagcagatcttctgatttaagaagagatatgc

SEQ ID NO: 57253 - DNA, 490 bp, Gossypium hirsutum
  unsure (1)..(490): unsure at all n locations
  Clone ID: uC-gsronu33B080g10b1
gcggccaatttttctatgtgtaggaaatgtgggaagccatttggggtcaaaggggattggagaacccgcgagaagaactgtggcaagctatggtattgcacttgtggctctgattttaaacacaaaagatccttgaaagatcacattaggtccttcggcaacggccattctcctcatccttctcttgaaggatttgaagaccttgacaaggattgcattactggctccgaagatgaactcactcactagcatgttcaattcccaactaccctttcttcaacctttaaaccttatataatttccggtctgttgaatcactggtagagtatcaaaggacttgcatttaagtcttcaattaacaccaacaccagatcactagttaaacctaaagccgatgtcaaccgaagacttaaacacaaatccttcatcattttacccgtaattcaatagacatttaatntccgtgttttaaattagctatagctttaaa

SEQ ID NO: 57254 - DNA, 321 bp, Gossypium hirsutum
  Clone ID: uC-gsronu33B087d10b1
ttctacgccaggggttactcggggtattggttcgaatgatggtgctggtcttggggcatctttattccctggacttaatccacttggtggtggtggcggcagcggtggttttggtttgtttggatccggactccctgtatttgaacaagtacagcaccttctaactcaaaatcccaacatgatgagggtaataatgaattcaccagcttttcaaagtctgatgaataacccggagttgatgcgtagtttgtttatgagccattcttaatacgcgcgagattattgattggtatcctgagcttgtacattttacttaatgtt

SEQ ID NO: 57255 - DNA, 290 bp, Gossypium hirsutum
  Clone ID: uC-gsronu33B087g03b1
gttgactttatttttcatcattttttcgtacaaagaaacaattagtctttggttcgcaatggccaactccattttgataacagattatcaaagaaaagcttttaatgtagtggggttggggctttctctcatgctgctaatgatctcagaagggttatgccagagatttcttagtgaactggggccctcacaatggcaccaatgctgaaaattacaaccaatgggcagaaaaaaaacagatttcagattggggacccacttgtgtttacctttcacgcccaactatgatt

SEQ ID NO: 57256 - DNA, 365 bp, Gossypium hirsutum
  unsure (1)..(365): unsure at all n locations
  Clone ID: uC-gsronu33B089a08b1
agcttcttggcctgtgcagggtctaatacggcgttggaggccttagctcgagaggaggattagggagcgtgcagaaagggagttgctagaggcttctgcgtaatttctgctcaggttgcttctggcatctttttgactttcagtttgttagtgcatctttttcttccaaaatatgaagtactctcaacgtgcttgatttggcattttagttatcaatttccatttccttatgtgaaaatgctcgtttctatggatgcatgctttcacaacaaactgtaccctggtatactcatgaataatttcatgagaagaaaaaataaggtgctggcttgtaaataaaaaaccanaanataaaaaaaaagaaa

SEQ ID NO: 57257 - DNA, 579 bp, Gossypium hirsutum
  unsure (1)..(579): unsure at all n locations
  Clone ID: uC-gsronu33B089c05b1
cccacgcgtacgatttggcctgtcaatagcatcgggatggttgagctcaacaaaacaaggcgatggcagaagtgaagctccacggcttctggtcaagtccttttagtcatagagtgatttgggctctgaaaatcaaaggagtaaattatgaatacatagaggaagacctttctaacaagagtgaactgttattgaagtacaatcctgtttacaaaaaaatccctgtccttgttcatggcggcgagcctattgccgagtccctcgtcatcctggaatacattgaagaaacttggcccaataatccactactgccgattgatccttatgacaaagccatcgctcgattttggattcagtttggagtagacaagggtccgattttcagtgacttttttcgatcaacgtgtggtgaagaacaagagaaaacaacaaaggaattattagaagccttgaaaatcatagaagagcangcacttggggacaagaangtttttggtggaaatgccattaatttagtggatatctcttatgggatgatagcctattggttcaaattattgaagagtaattgaagtaatg

SEQ ID NO: 57258 - DNA, 525 bp, Gossypium hirsutum
  Clone ID: uC-gsronu33B090d09b1
atgtgaaactggtagctggggaagctagtcgaagttctgaaaaagagcgacgatcagatttttttttaaccaaccatgggttgaagatgctgttgtccgttatttgaatcgcaagccagctgccggaagtgatgcaccaggaagcatatgaatcataattttgaaacttaaattggtgcctggaacgttctttcattgatccattccatttaattgaaatagatgtgcactgttgttggatgactattgagagggatgtaggaaaggaagtagaatgtttagtcataattatcattaaacttcatttaaaaaaaaggggtagaatttagcaagatagtaatttttattttgttcaaaattggaatttatatatggtagattcatggttgctttcttggtttgacttgaatgcttttttttggttaacgaatgtagattgacctatcgaaatgctcaatttttgttatattcgattgtttaaaaaaattcacaccctctcccttcgggggcggccgttttaaggat

SEQ ID NO: 57259 - DNA, 513 bp, Gossypium hirsutum
  Clone ID: uC-gsronu33B090e06b1
ctttcttcttgctttactagtatagctttcatgccggtcctcctctttgcagcatttgcatcttttagaatatcatttatctcattctcaaccatcttattggaatttggttctaatttttccatgtctatgtatcttccatcgcccttcccttctcgtttttccattttcccagcattttccatcaacttctgaaatatccttccttttctggagacttcctcaaaggtaccctcttctttaattacaccattagagataagaaggatgtagtctacatgtggaagaaaatgcagctggtttgtgacaagtattctggtttttccttgtaattcttccttgatacacctgttgaaaacctgcaaatgacttcagattagaccatatagcataaccacaagaaatctattttgagatcaaagaaggttgaatgttcaaatccaaaaggttgaaaatacattagaaagaaactggaattgtggaaagaatatatgagaaatatttgtgccttaa

SEQ ID NO: 57260 - DNA, 374 bp, Gossypium hirsutum
  Clone ID: uC-gsronu33B090h05b1
ccttcgcgtccggttttaatttaactacaaccgtgcctggtttgcctgacaatgggggaatcgtagatcgagtttagaaggaaaaataccccacaaaaatgtcgatcaccacatcatcatcggcaggcttcaagctgatctgtctcctccactcggcgggcgccttatcaagcggctcgctcatgatgttcgacatgaagggaatctacaccttcacccacgggatcgagaccgccacgaaactcctgggctcctccccgcacgatcagctgttgatccggacatccgattctttctcgggtttgctcctggtcgcgattgggttcttgctggtcatggtctcttttgtgaaagacaaaagctttcaatccttc

SEQ ID NO: 57261 - DNA, 335 bp, Gossypium hirsutum
  Clone ID: uC-gsronu33B096d05b1
cagatcgttcagaacatacgtagtgaaactggtgctcagattcgcattcttaaggacgatttaccttcttgtgccttgtccacagatgaacttgtacagatatctggggaagctgtagttgtgaagatgtttttttatcttattggatatcctctttattatgtactatttatgttattagctcttgctttgattctgtttgtgtaaattgttattcttgctactgttttattttttgttttttgattttgtttttcttataatttattactttatttatttttttattatttattctttattttttctttttatttttttgttttcttttttcc

SEQ ID NO: 57262 - DNA, 322 bp, Gossypium hirsutum
  Clone ID: uC-gsronu33B098a07b1
gttgtgtactggatgcctctttcggagggttgccgggggtggttatgacaccacctcgttcgattgaacaccaccctggttgctgcagctgctgcttttttggtcgtaacaagaagcattcctcaatggcacacagccctgaggaaaatcgtgctctgagaatgggtgattctgatgacgaggagatgaacctgtccctgcttccaaagaggttagggaactcaacatttctcattgattcacttccctggggccgagtttcaaggtcctccccttgcagatcattcagctggtgaagaatgggctcccccccgggtgctct

SEQ ID NO: 57263 - DNA, 486 bp, Gossypium hirsutum
  unsure (1)..(486): unsure at all n locations
  Clone ID: uC-gsronu33B098f09b1
aaaaaacaaagtaaaaagaaaacctagagaaattatcgctgttcggccgactcaagaatctgcgcagtcccaccaccactgcgatcggtggagaacgacgcgcgcaacccttgtctagagccttggcttaacgattgccggtctcagctccagaaatcctatcccacgcttcgatttcgacaaagtgaatatggatttcgatagcccattcataaaggtgaactctccttttcattttattttcttatgctcaaggattcatgcaaaaactgggaaatggagaggaaaaaaaattgaaaaaggaaacaaatctgggtctcacctttcgatttttttttgtgttttggatttcaaaatgtatattgtgcgtgtaacccattacaagtgattctctttaggcctttatgccgggagaagaagagaaaaaaaaatgaaaattaaatattccattttttttttctggnggtttcctggccctatttttgc

SEQ ID NO: 57264 - DNA, 440 bp, Gossypium hirsutum
  Clone ID: uC-gsronu33B099c03b1
ctcatttaaaatcggacatgcaacctttcctcacccagggacttatatgcagggttctggaaaactaggacttgggattagaaacgatgttgctcgtagtaatttctttgtagattcaagtacttgttacgaacttgtagcagctgagtatcttggagatggagttgtttctgagccaggttggttgcagtttatgagaaaatggggtccaactattgtccatgatattagtattttgcctttggtgcttcggtattccatggcaaacattttcatcaagcttccagttgagctctatggaagggaaggccctactgggcctaaggagaagaacaattgggtaggcgatgaaagaggctagttttccggtggcctccgatctcaatcaactcttgttgttacctatctgttgctgctgtgttcatcataagttcatagca

SEQ ID NO: 57265 - DNA, 210 bp, Gossypium hirsutum
  Clone ID: uC-gsronu33B101g02b1
tttcactcgtccgcccacgcgtccgggcatgctcgatgtttgcacataccaacccattacatttagatgtgtttcagagtgtggcgcgatttgaggctgaagtggttgctatgacagcagatctacttggctgtaaagagaaggcttttggaggacaagtttgtggaaacattacatcaggaggaacttgtgtgcatattgttagtagtg

SEQ ID NO: 57266 - DNA, 312 bp, Gossypium hirsutum
  unsure (1)..(312): unsure at all n locations
  Clone ID: uC-gsronu33B103a10b1
tgtgaactcaactaatggcaacaatccgtctaatccacctgaaaagaaaattccgaacaaaaataaataaaaagtaaacattttattgcctctaaaaaaaaggagacattttatcattgccagctacgttcttagagctcagtgcaagaaagagaacaattgggatgaattttttatactactaataacaataaggaattaataaaaagaaaagtataaacttcagaatttcctttccaatcaattttccattattataccggtgaccaaacatcngatnaaaaaaaaaaaaaaataaataaaaaaaaataa

SEQ ID NO: 57267 - DNA, 514 bp, Gossypium hirsutum
  Clone ID: uC-gsronu33B104a07b1
cccacgcgtccgctttgagtatccatacaataatgcgctacatcatcatgtggaaagtataatattatcttgtctggaaagcaagaatgatgcaatagtcgaccatcttcttcaagaatgtgatttgatcaggaaattgatccaaactgacaaatatccatttctttctggtgacaataatcagccaactttacctgctgctggaaaacatgcaccacgagcgggaaacatcggtcacattacacgtatctcaaataaacttgtacagttaggaggcagtaatagctgcattcagacacgtctacagggaaatagcgaatggaatgagtggctagctaatgttctgcaagaacgcaatgcagttgaaaatgtttatcgatgggcgtgtggacgcccaacagcattgcaagacagaataagcgatgaagatgatcttcttgatagagattatgatgttgcgattttggcaaataccctaagccaggcttttgggtacaaatggcatgatgataat

SEQ ID NO: 57268 - DNA, 541 bp, Gossypium hirsutum
  Clone ID: uC-gsronu33B104a09b1
gcaaccaatacccgaacagtagatcacccttttcttttaatcattttgcttttacttacacatgacttcaaccacgctctccacatctccacctctccttccaaggccgtccaccgaacctactcaaccccccgtttccaatgacccgccatcctttacccccatccatgatgcgtctgatatcaaccaaatagagttactctccgtgtcttggaaccaggattatggctgctttgctgctggcacctcccaagatttccgcatttataattgccaaccctttaaggaaaccttcaggcgcaatctcaaaaccggtggtttcaaaattgttgaaatgcttttccgctgcaacatcttggcacttgtcggtggggaatccaattcccactatcctccaaacaaagttataatatgggatgatcatcaaagtcgctgcattggtgaatttgcatttaggtctgaggctcgagctgtcacattaagacgagatcgcattgtgtggttctggagcacaagatatatgtctaccgttttatggatc

SEQ ID NO: 57269 - DNA, 483 bp, Gossypium hirsutum
  Clone ID: uC-gsronu33B104b03b1
cccacgcgttcgcagggtttaaatccttttaatgctgatgatacccaagcatctgcagcaggaactggcattggttcctcaacccatagcacacctattcagctctcttcatctgcatcatctccatcctttggattgggtgggaatgcaaccttctcctctggcacttcaatttttgggtcatcagcatcagtggctaaaccttttagttcaggtgcaagttttggaacaagttcttcctcttcagaaactaactctctgagctctagcagtggcattgctgctggcgcatttggttccaattggcaagcccccaagacactcacatttgggttatcatcgggattttcctttggatcatcaacttctgttagtgctcctagcagcgcacctactatctttgggtcatccaccggtgcctcctcaagttccatattttcattcacttcggctgcagctgctactccatcacagccctgtgtt

SEQ ID NO: 57270 - DNA, 522 bp, Gossypium hirsutum
  Clone ID: uC-gsronu33B104c11b1
cccacgcgtccggaaacaggtagcaaggttgtttgggccagctatattcgaggcatcaaagctaaaagttctgtttttaggagtggatgagaagaagcacccagggaagcttcccagaacttatacacttacacatagtgatataacatcgaaacttaccttagcgatctcacaaacaattaacaactctcaggtaaatctttttatctcatatttcttttgagttttttgtttttttattatttagaataaaaaaacaggggatttggggctttgattacagttgcagggttgggcgaacaaattatacagggacgaagtagtggctgaatggaagaaagtgaagggaaaaatgtcactacacgtccattgtcacataagcgggggccatttcctcttggacttgtgtgctagacttagatacttcatctcctgcaatgaactacccgtgggacggtttttgatcattcatttttttggtgatattctttaatatcattccttctgatttaaatcttctgg

SEQ ID NO: 57271 - DNA, 549 bp, Gossypium hirsutum
  Clone ID: uC-gsronu33B104e06b1
cccacgcgtccgaagcaaaagaaaagatccacacacacccatcaaaggatcaaaagttgcagagataagagaaacaaatactggagcttttttcatcttttgtctctcatcaaaagaaaagaaaatccttcctttcttattttcttttgtcttccttaaagctcataaaccaagttgagctgcttctggtttggagaatggtgtaaagaacaagtcttgcatggcgaaccatagagttggagagacaggtttgacagactcgggaccttcttccaatcaccaccaccaccaccataatattccttatgctgttcttcatggaatgaatgtcccccaaagttttatgcatcaacaagggcctgcttttgattttggagagcttgaagaagcaattgtgctgcaaggagttaaaattagaaacgatgaagctaaaccacctttattcacagcaggcagaccagcagctaccctggagatgttcccttcttggccaatgagatttcagccaaaccccaagaggatgttcaaaatcaggaggggaaagcactg

SEQ ID NO: 57272 - DNA, 498 bp, Gossypium hirsutum
  unsure (1)..(498): unsure at all n locations
  Clone ID: uC-gsronu33B104e08b1
cccacgcgtccgggggggtagcatgcatgcatgctccttaaccatgagcagtcaatcatgcttgttgatgagcctgttcggataattgattggctaaagagacttgctttgatatctacattgcgctctatgtctgttccgtgtttgaattgtgtaatactactggagttagaagcactgcggatcggactggaactgatttgttctgtagatgggtataaacatatttgctatagttttcatactctgtcagccatggtgcaagagattcttggaaaatattctacctggtgttgatgccattagttggtaaggaaaaattgacttgtcttttttcacttcaaatcactgttatgatcatttcttgttgtatttgttgttgacgtgtggtngttggggtgttatgtgctaagtcgttgtcgacattgcctgttcgttttttgcttctgtggttgggttggtatcgcttttatgttaatcctagcatctaaataaacg

SEQ ID NO: 57273 - DNA, 533 bp, Gossypium hirsutum
  Clone ID: uC-gsronu33B104g06b1
cgcagctcctctccctctatgccatttcagactcctttcactccgataacgacaaaacggagaggtctcccgacgaccctcacgatagtaagtcctcctttgcttatccttttcgttttgtttattattattttttaaaaggagaaagaaaagaagaagatagcaaaataataataaaaaaccagtaaaatcaaagaaaaatcgaaaaaaaaataaaatcaccttttgaaaaatattctttgtattctcaatattctctctgttttcgaatatattttacaccgaaaaaaatccctcccccccccttgttacagactttcatcagctttatatagccgattaaaactaaaaatctggaaaaaaaaatcaaaaaccccacttctttctgatatttgctgtgcttgtgtccccctttttcgcaggtttggtgaccgcggagtgcgcgcgacggccgcggagcgacaaacacggtgtgcgggcactgttgcggcgtgccgtggggagctgctgcgcctaggcttcttgctggtgtt

SEQ ID NO: 57274 - DNA, 435 bp, Gossypium hirsutum
  Clone ID: uC-gsronu33B104h04b1
gtgaagggcaagggtcttttgatttatcatgaattcgtaagacagagacctgtgtatactctcgacacaatctggtcaattttttcacctgcgattgtttgatgtttcaaagcggctcgttattttttgctcaagctatggctactcatcgctgctcttccatattttttcgcattggcaaggtgaaatggggactgcaacacaagcacatccgaggatttttgtgacgcgttgttgcatgcagttccaagagttttgtatataaatagaaattatatttgaatatatatattgcataaatggtggaaggaaaatgaataaatgaggaaattcgatacaattttgtttttgttccgttagaagaaaaaaaataaaagggtgtacattccatttaaaaaaaaaaaaaaccacaaaaaaaaacataatacctaaatt

SEQ ID NO: 57275 - DNA, 507 bp, Gossypium hirsutum
  unsure (1)..(507): unsure at all n locations
  Clone ID: uC-gsronu33B106b12b2
ccgttctttgcgaaggaaggacgctttcagaggcgtggctcacgagaatccgagggccttctccccgtcggcttacgaattcttccaccccaaaacccaaaatcatgacaccaaatacccatgtgcagcctccaaatgctcaccattgcctgtagcagctgaagtggactctaacaaagcacttgaaaccaaagcattaccacaacagaaacccgggcatccactcggctggtggagtgtgcatagtttggttagacttgtggcttcggcatgggcggtttctatgtgattcaaacccgccgagttactgctacaactaatcaaccaaacactggtcagctcgatgcctgatagtgtactcttcaagcaccaaatctccattgtataaatacatataggcgaatgctctattagaattaagctgttcttcaatctttnttcttgcttatttatcattgaggatccctgctatcatggagtgtatttgattatgattcacttgtatat

SEQ ID NO: 57276 - DNA, 527 bp, Gossypium hirsutum
  unsure (1)..(527): unsure at all n locations
  Clone ID: uC-gsronu33B106d07b2
gtaaattctgcgcaagagaagagctggaaagctacctggtgacaccaccttgattttaaaagcatggtggcagtcacattccaaatggccttacccaacagtgagtgtgatgtatttctcaggtagttctgatcctcaaaatgtgttcttttcaacagttttctgataaagtgttgcttcaggaagaagacaaagcaagattagcacagaaaacaggattacagttgaagcagattaataattggtttataaaccaaagaaaaaggaattggcataataacccctccacttctctgaagagcaaacgtgagaagtaggctgctaatgatgtatatgtgtcttgatgaaaatgagcttttcacgagaacatttgtcgattttaatttggaaaagaagtatgcaggttaaaccagtgatgaagccttaatgtaagcaaaagacaagctctctgcatagcattaatatagctctgctagatggttctgtaatcattcggctcatgcttntctatgatgtacaagaacgac

SEQ ID NO: 57277 - DNA, 510 bp, Gossypium hirsutum
  Clone ID: uC-gsronu33B106e12b2
gttgtttgaggacctttttagcggcctcaagccgggctcgatgttagccgaaggcagtgaaccagattacctgttggaagctgtggttggtcatgtttacgagggttctttccatatgcctaatcgatcaaatacacaacttcctacatcttctcaacctcaaaccgtggagagtgactattacggagaaacccaaaagggaccaaagcagtccagcatcaaagtaagaagggctaaaccgggtgacaacccaaaggctaggccaagggatagacagttgatccgagatcggcttaaagagcttcgagaacttgttccaaatggtgctcagtatagcattgatggtctcttggatcaaaccattaaacacatggtgtatttaaggagagtgaccaaccaagttgagaaattgcagcaatgggcgcaccgtgaggtgaccagtcgtaagaatattagatcatctgaaaccaaagaaaattaccaactcgaaacaagctggggtttcgagat

SEQ ID NO: 57278 - DNA, 544 bp, Gossypium hirsutum
  unsure (1)..(544): unsure at all n locations
  Clone ID: uC-gsronu33B106g06b2
atagttaaccaagtatgaatccaactcttgttttcttcatcatcatcttatgcagtacttccatcagcatttgcctggcagataatgataatcttcaggatgcttgtccgaccaacacgacagttacacggatggtgttcataaacggtttcccttgcaagaacccttcaagcatcagttctgcagatttcacgacatcaaatctaaaagatgctggagatacagacaactttcttcattcctcagtaaatatagtcactgctgcagatttcccaggcctgaacaccctcggcctatccattgctcgaaccgacctcgatctggatggcatggtaatgcctcattctcaccccagagcctctgagttattctttgttcgcaaaggcatcgttcttgcaggtttcattgacaccaacaatactctctttgagtccttaatcaatgaaggagatgtgttcttggttcccaggggcctgctccatttttgcttgaacgctggttatgaagccggcangcgttctctgtgatgaatagccagaaccct

SEQ ID NO: 57279 - DNA, 568 bp, Gossypium hirsutum
  unsure (1)..(568): unsure at all n locations
  Clone ID: uC-gsronu33B106g09b2
ctcccatcagcctccagctcaagagttaatcgcaagagacttgcatgataatgaatggaaatttaggcatatatttcggggccagcccaaaaggcacctcttgacgactggatggagtgtctttgtaagtgctaaaagactagttgcaggtgattcagtgctttttatatggaatgataaaaatcaattacttcttagctccacgatctcgtcttttagtactgatatttcgtgtaggatgatcattggaaagaagtatgatcacgacgattttagtgaaaaggggttcaaagctacgcttcgagagggtaaattggagctacgattaatttagctgattatattcctcaaattagagcacttgatctccagggactaacaaagcgtatgaaaattattgccaaggattttgatgacttttttgagaagataatcgacgagcatgttcgatctaaagacgaaaacagagtcaaggacttntgtgatgtcatgttgggattcatggatcagaagaacaaatgaatacgtgtcgagcgagacacgatcaaagcaatatatngacatgcta

SEQ ID NO: 57280 - DNA, 537 bp, Gossypium hirsutum
  Clone ID: uC-gsronu33B107e04b1
ctctgttgaaggcattttgagagatcttcctggtgttagtagggctgttgttgctttagccacttcattaggggaagttgaatatgatcccactgtaattagtaaagatgatatagtcaacgcaattgaagatgctggttttgaagcctcacttgtacagagtagtgagcaggataaaatcatacttggggttgctggtgtttttaacgagctagatgtacagcttatcgaaggcatacttagcagcttgaaaggggttcgacaatttcgttttgacagaagttctggagaacttgaagttctttttgatcctgaagttgccagttcaagatccttggttgatggaattgaagagggaagtaaggggaagttcaaactacatgttatgaatccatatgcaagaatgactactaaagatgaagaaacctcatttatgttccagctttttacttccagtttggttctcagtattcctgtctttctgattcgagtagtttgtccccatatacccttgttggatgccttcttgctctggag

SEQ ID NO: 57281 - DNA, 428 bp, Gossypium hirsutum
  Clone ID: uC-gsronu33B107f11b1
gctgtcaaagctataaatgagaaaatcctctcagtcttggatgaaacaggatcgggcagggtggacttgggcatgttttatgctgttcttgcgcccctttgtagtggacctccagataagcgaaaaaggatcgcctttgatgcactcttatggcgacctgtaaatgaaggtggttctcatattagaaaggtagatgcagttcagtacatcaaattgttgagggctatatttatcccttctcatggagctagtgaaatgctggaagttcatggagaaacagatacctcaatggtatctttcaatgagttccttatcatgttcaatgatcctgattggggctttggtatcttgtccactctcctgagttagaaactggaaataggaaatcgtcatgaacgccatgtctgctcagtttgccgtacccaata

SEQ ID NO: 57282 - DNA, 561 bp, Gossypium hirsutum
  unsure (1)..(561): unsure at all n locations
  Clone ID: uC-gsronu33B107g11b1
agaaatgtaaggaaatattagaaattaatttaagaaggcatacattgattgttttttataagtatgctattgattttatttttccttacaacatgttttttcattggtcaaatttcattaaaccttggtttgaaagttcaattaattttatgagtttatctagatttgtaaaggttaaaaatagtaattatgttgcattagataggtttattaaagcattttatatatttgctcttccaacaaaattttctatctttacctttaatggtgaattttaacataatcttaactttcttgatttttataattatgtgaaatttttgactcatcgttagaaattcttatggatgaccatatatattcaaagaaagttacaggttattttttacttgaatgctcatgtgcctaatatttctttgtttaatgttgatgaattgtttttgaaggagagatacttgatccatgctgatttgggagatcaaagtcatatctttgatcctggaaataagttcggtgcacaagaaccttangtaagaatttaatcatttaatatattaatct

SEQ ID NO: 57283 - DNA, 518 bp, Gossypium hirsutum
  unsure (1)..(518): unsure at all n locations
  Clone ID: uC-gsronu33B108a05b1
catcttttttatttcgcctcgtctacctcgacttaggtgaggcatgagtgcaagtttggtgagcagccacaatttagatgacgacgatgtcgaggatctagagatgttgctcgaggcatatttcatgcaactggacgggacgcgaaacacgatattatctgtccgcgaatacatcgatgacacagaagactacgttaacatccaacttgacaaccaacgaaacgaactcattcaactccaattgacgttgaccatcgcatcgtttgccatagccgtcgagacattagtagctggatggttcggcatgaacatcccttttacatggaacaacaaggaggggatatttggaatctttgtgggaagtattacagtcgggtgtgtgctgatttncttctgatcctaggatatgccagatggaagaagctgattggntcttaaaactgatccttcatcatcaactatgaatgtgcttttcaccatagttgtgccccatcaatgggatataattgagtatgtac

SEQ ID NO: 57284 - DNA, 532 bp, Gossypium hirsutum
  Clone ID: uC-gsronu33B108c10b1
gtttttctgtaaaaggattggcaccaatgtcgaaggtgggcggatatgatctcagtggggatgcaatgatggaggattggttcaagcagtttgaggagcttgccgggtctcaggacatggaatcgattgtagagactgtgatgcaaaaacttttttccaaagagattcttcatggaccgatgaaggaaatcgaagaaagatacccacagtggttagatgagcacaaaaccagtttgagcaaagaagaacacgaacgatactccctccaatacgagctgataaaggaacttaatggagtttatgaaaatgatcctcgtaacttcacctggatcgttgacctcatgcagaaaatgcaagaatgtggccagccaccaaatgatatcctgcaagatcttgctcctgaattcggtttatggaatcttgactagctatccccagagatggtggattcacagcagaaaccgtgaggcaattttctaatgcggattatgtgtgccttatatttccatagattgagggaataaaagaaatg

SEQ ID NO: 57285 - DNA, 557 bp, Gossypium hirsutum
  unsure (1)..(557): unsure at all n locations
  Clone ID: uC-gsronu33B108e04b1
gcaacttttaaggagatataatctgcgagatatgtcatgggtcttatcaacctgattatgctggtccacctcgcccccagacggacgaaacagctatcgatattggtggaggctggacaatctctggcacccctctggatttgcgtgattctcgccttttggccattgcagaggcagaacgccaatttttggaaactgggtatgacgaatatgctgcatcaaatgccactggagctgcattttgccgttcagctgctgtaattttaatggcacttctgctattgcggcatgcagtgactgttccagatgccgattcagatgatgatgtctcttctttcttctcttttttcttgcttcgagctgctgggtttctcttgccatgctacatcatggcttgggccatcagtatattacagcaacgaaggcaaagacaggaagcagcagcgttggctgccacccaagttgcttttgtactacaatctgggcaaagtagggctatgcatttcgcaatagcatcaggacctgcagcgacacttcaccccngaaatgtttaaact

SEQ ID NO: 57286 - DNA, 499 bp, Gossypium hirsutum
  Clone ID: uC-gsronu33B108g02b1
aaacgtctttctctgtggccattgccatatgtatgggggtcgctatcaaatatttattggtagttgcattatttattctcattcctcattctggccaatttcagcgctggtcagatttcggcttgtgtgccgagtgctgatttctccctgctgatttattaattggttgtcggacacgccaccaattgcatacctctaaccgtaccttaccggtatcgctcgaatttgattatcttccgagtggcccaacactggactctcactgtctcactccttgcagctaccattaccatcgccattagcaccattagagcacattaccggccattagagatgtaacctgcatgtaagcaagtcatgtatacatagccatacttcacatttcactccatgctcattgtctcatctgtgctatacaccttatacacaaattattcttattctatattcgcattgaatacatccatgtcacaatcaatatacgctcgacaatatcgac

SEQ ID NO: 57287 - DNA, 548 bp, Gossypium hirsutum
  unsure (1)..(548): unsure at all n locations
  Clone ID: uC-gsronu33B108h05b1
actggtttcaactggtacgttatattccatggccaggtgtgccgttttcaccgatgaaggcggggatttcgagggtcaatatttcgctttcatgtccgacgccatgtcaatcatcgtgggatcgttgctcgggacatcaccggtaacagctttcatcgaatcatcaacagggatacgagaaggtggacgaacaggactcacagctttaacagtggcgggatattttctgctagctttcttcttcacaccgcttttggcgtcgataccagcatgggcggtggggccgccgctaatactggtgggagtgttgatgatgagagcagtggtggaaattgagtgggatgatatgaggcaggcaatccctgcttttgtgacattgatattgatgcctttaagctattcgatagcatatgggctaattggtgggattgggacttacattgtcttacacattgnggactgggcaagggatgtgctggtaaagtatggcgtcgtaaaaagaagacagattgcggccaatggggcacatattcagcaacatgcaagtg

SEQ ID NO: 57288 - DNA, 437 bp, Gossypium hirsutum
  Clone ID: uC-gsronu33B109a04b1
gaaattgatgccttctaagggaaatcagcaaattcctaaggtccatgtgaggaaacagtggcaaaactatgtaaaaacatggttggaccaatcaggaagaaagaagcgacgaatagaagcacgtaaagcaaaagccattagagtatttcctcgtcctttgggtctcttgagacctgttgtacatgctccaactattcgctacaatgcaaagatcagagctggtcgcggttttactttggaggaattaaaggcagcaggagtgaacagccttgttgcaagaactattggaattgctgttgatcacagaagaagaaatagaagtgatattagtctcagagccaacgtacaaagacttaaggaatacaaggccaaattagtattgttccctaagaatcctaagaagcctcaacatggagaagcttctacatctgagaaag

SEQ ID NO: 57289 - DNA, 426 bp, Gossypium hirsutum
  Clone ID: uC-gsronu33B110a07b1
cattatggtggtgccactggaaacaatgagaatgatgcttccggacatcctgtgggacaaaatgcatatgaagatagttatggtattcaccagagacatggtgctctaccacctgctgctactggtgcaaatgcaggtgccgcttctgtttacggtggaactcagtctgggtctggacctgcatctatgaggtccacctacgagatgtctagagggcctgcctatgatttgtcaagagtgagtggttatgaatcacaaagggtgcctgcttacaatgcacagaaaggacccagttatgacggtcaaagaacccatgtctatgatgcacaaagaggagctggctatgacactcaaagaggacctgtaaatgatccatcccggtgtgcaacctatgatgcagcaactagaagtcttggcatgccacac

SEQ ID NO: 57290 - DNA, 485 bp, Gossypium hirsutum
  Clone ID: uC-gsronu33B110b12b1
tctccacgcgtccgcggacgcgtgggggatgatgaagaggaggatggatttttgaaggcattcaaggtagctaattttgaatataaggacgaagcagaaactgttgtggaggaagaagctcaaaaagtggccgtggaggaaaaaaataccatgaataattctgaaagaacaagttactgggaagagttgttacgagaccgatatgaagttcataaagttgaggagttcaatgctctgggaaaaggaaagagaagccgtaagcagatggtatctgttgaagaagatgaccttgctggtttggaagatgtaagctctgatggtgaggacgataactttgaagctgaactgactgatggtgacacaacttcatctggaactcaatctggtagaaggccttacaggaagaggaatcgtgtggatagtacggagccaattcctctaatggaaggtgaaagaaagtcatttcgggtgcttggtttcaatca

SEQ ID NO: 57291 - DNA, 512 bp, Gossypium hirsutum
  unsure (1)..(512): unsure at all n locations
  Clone ID: uC-gsronu33B110d06b1
tttccggacatcaagatccaatcccggcttctggaattccgggagttcaatcccatcccatgaccatccatcatcatatgcgtcatcaaccatatatcccccacaacttatcacgaattccctccgctccgatacccgggcaatggacttccggtctttgtcattgtttcgacgaccccgtaaactgtgcaatcacttgcgtatgcccatgtatcactttcggacaaataaccgaaatcatcaaccgaggatccaaatcttgtgtttcgaggggatttttatttggaatgttgtctatggtgggagctgcatgtttttattcatgtttttcccgatcaaagctacggtgacaatacgatttgccggaggaaccctgtacggattgctcggttcattcttgctgttctgcttgtgctctctgtcaagaatatagagagctcnaaaatcgtggacttgacatgggaatnggttgggaagcccacatggacagacagaagcgcggagtaacaatg

SEQ ID NO: 57292 - DNA, 201 bp, Gossypium hirsutum
  Clone ID: uC-gsronu33B110e03b1
cctattcgtgcgtcttgtacagtttcctgtacagtaagctgtttcttttcaattcccttagttatatactttcttttttacctttggtttgagtactcgattatttgagtttctattaaggggtcccttcccctctcttgccttgttgactgatttttttttctaatgcattaagtgtgtgaccaaagtcgttccaggtaa

SEQ ID NO: 57293 - DNA, 459 bp, Gossypium hirsutum
  Clone ID: uC-gsronu33B110e06b1
tttgcttctgtttacattcggtagaggaaggagagggtgccctggagtggtgcttggaagcttgatgactaccatgctgttagcgaggctattgcaaggattcgattggagcatcccgactaaccagggaaccattgatctttgtccaggaaggggagttccctttctggctaaaccactgcttgctgttgcaaagccacgattgctaccgcatgtctactctttctcaactgaaagtgaaatacagtgattaactccttgacgaagatgggggttgacaagggagacctgtttgtggcttggttctaatgaaattgtttttatccctagtatgtatttcctgttgtagcttatttcggtgtttgtatggggtgtactcacttcagcaacttcttatgtattgttttctcattaataaaaatggataagcagttagtagctgatgtattgctttccatg

SEQ ID NO: 57294 - DNA, 396 bp, Gossypium hirsutum
  unsure (1)..(396): unsure at all n locations
  Clone ID: uC-gsronu33B110g07b1
tccttcgcgtccgatttgttcttaatcaacaacaacaaagaaaagaatgttcaagaaggcagtagaagctaaggctcagcagaggctatcaggtgccgacaggaagaagctaaaacgcaccatcagagaccgatttcccagagcttccgatgccgatatcgatgctttgcttccgcccaaggctgagattactgtttccaagtttcaaaatcgagtccatgtgtatggtgtagaagggggttttcctttgtttttcaatgttgatggccgtggctctgaaatataccctaccgtttttgctctctgggagctccctgaaatgttaccttattttatgcttaagggnggtgaagtttctcgatctgtcattggaggggcagatttgatgttccctgg

SEQ ID NO: 57295 - DNA, 432 bp, Gossypium hirsutum
  unsure (1)..(432): unsure at all n locations
  Clone ID: uC-gsronu33B114h03b1
ccctctcttccgcccacgcgtccgggttgtttggaggtgtagtaaattaattcctttttcttcttggcttttctttgttgtttctggttgagttttagctttttctttttattggtattctttatggtcacagggctttggtgtgaggtttgcatttttgcattttttaaatttattttttatttatttttaatttggttttccaaaatgattaaaaaattagaacaaatattgggagcttgaaaatgccagacaattttaggtgtattttgtatttaacttttgaggatgaaaagtttgtacagctgagtgtaagaactaagaactagttcattttgccttttgttttggataataaaagtgtgatcttctatttttcttcttctctctaatttaangngaaaacccaaaaattcccctcaaatttagtcg

SEQ ID NO: 57296 - DNA, 428 bp, Gossypium hirsutum
  Clone ID: uC-gsronu33B116b08b1
tgctcttggagaaaacctcttcaagcaaagcgactacaacaccttccacataataaaatgctcgtttgtcctccaaattcatcctccttccactgctgaaacaacccttaacacaccgcgccaccgccaatactatagcgtagcagctagctaccctttatatttccatttctccatgctttaccaaaagcggtaccctataacatacaccatgccagtcccagacgccgttgctcgccaccacacccaccctgttggtcccagccagtgttgctcagccgtagtccagcagatcgctgccccagtttccaccgtctggtccgtcgtccgtcggtttgacaacccccaggcttacaagcacttcgtcaagagctgtcatgtaatcgttggggacggtgatgtcggtacccttcgtgaagtccacgtca

SEQ ID NO: 57297 - DNA, 297 bp, Gossypium hirsutum
  Clone ID: uC-gsronu33B116f09b1
tcctcgcgtccggtaatccacgagaatctcggtcgatcactgatgtctgcgcgctgatggagccaacgccggattctggcgtgtcttgcgcgtcgatggtggcgtgatatatgatggcagagtcgagaaatcacggcatacttggtggtgacgattgagatgaaaggccacgtcgtttgaagtgcccgaagcttctagaaattccttgcagcacgaggagagggctagggtttctaaccctagccgaatgcttctaaattttgggccactgaaagtttgggtcaattgggccacttt

SEQ ID NO: 57298 - DNA, 418 bp, Gossypium hirsutum
  Clone ID: uC-gsronu33B116g02b1
cttttgtctgctctactgcaacttcagggagataaggcttgggttgataacttcgatctgtcccactacaacttcaggtggatatgatttatagccttaatctgttctactgcaacttcagagagattaggtttgttttgatctgctctactgcaacttcagagggataagatctgtttgtccacagcttcagtctgttccactgcaacttcagggagacaagattcgctgtattcgatctgttccactgcaattttagagatacaagatctgtaattttcagcctattaccctactgcttagggggttaaggcttggtggcttgaatctgcttcactgcaacttcaggaaggcaagatctgtaatttccagcctattaccctactgcttaggggtttaggcttggtggcttaaatct

SEQ ID NO: 57299 - DNA, 423 bp, Gossypium hirsutum
  unsure (1)..(423): unsure at all n locations
  Clone ID: uC-gsronu33B117a07b1
cccactcgtccgcccacgcgtccggttggattgtcggggctggttatagggatattatcaaacaacaaatccaagggttcgtgtgggttgacgcaccaccatttcctttcgattggaggaattttgtgtttcgtacatgggctgttttctgttgcttattatgtttcagccactgctgctagtgatgaaggaaagtaagcaatatatataatctttaaagtaacttttgtttgtttgtttaatttttaaaacccaaaaagctttaaggatcattgatcaactatcactttcctcctacatgtaaaatcattttgtaaacatcttttgatgccattatcaaatcttgtaggacagctgatcatcntncaataaaaaaaaataaaattaaatcaaatttaaattatcattaataacactaattat

SEQ ID NO: 57300 - DNA, 562 bp, Gossypium hirsutum
  Clone ID: uC-gsronu33B117c01b1
cccatgcgttcgcaaacctgctaccaaatcaagttccgaggtcccatttccgagtgagcactgagcatgaagcattcataagtcatcaaattttggccaccgcacaagcatgaagcaggagagaggcatggagtttccaaaggtatacagtaatagcagagctgtagaatcatcagaaaaaggagaggcgtttggggtaatactgagcaggagccgttcggtttcgaatgcgtcgaccgtagccctcagaactgagaaacagagctcggcacttgagacggcggtgagaagggcattctccatgaggagatccagatccacctcctcctcttcttgtgtttccaagggcaggagaggatattacaaaatattccattatttcgatgatcctcacccttttgctctcactgaatttcataatgttgcaatccaacccagaaaaagcaagaagtcttcttccagaatatttgaagcctgcaagcgactaatcggcttttaactgaatctcatccatatttcagcccaccgacccgaactgactctcaactttggaccctgaact

SEQ ID NO: 57301 - DNA, 506 bp, Gossypium hirsutum
  Clone ID: uC-gsronu33B117e11b1
tctaatttgaatccccatactgaagaagaagaagaagaaagaacaccaaaaagaaaaaaaaaacttcagtaaatcgtaaaaacagatactttagagaagagggagaggcaaagaggtgcatcaaaatggggaattcatttgggtgctcagcttcaggggagagattagtgtcggcggcgagagatggggatttagaagaagctaagatgcttttgaattgcaatccatgtctcgctaaatattccactttcggtggccttaattctcctcttcatttcgctgctgctaaaggccacaatgagattgttgctttattgctcgagaatggagctgatgttaactccaggaattactgtggacagacggcattgatgcaagcatgtagatacgggcgctgggaagttgtacaaacccttctgcttttcagatgcaatgttacgagagcagattatctaagtgggagaacggctctacattttgctgccgtaaatggacatgttagatgc

SEQ ID NO: 57302 - DNA, 415 bp, Gossypium hirsutum
  Clone ID: uC-gsronu33B121b12b1
ccctcgcttccgctttttctttctcaataatatcacactaccatttcattaaaggttcttttttttcccttgaagtttttatttttttttgctaaattgaaaccgatttttatggcactgactcgatcgaaacaattggtcctactcaagtcaccctaaaccaacaaccccattatatggggccaactccctagtctagctcctcctcacaagctcacccagtgcaccccactcttaattttttccttgtagaaataggaatggttcaaggaagatgcagtgcagtggcagccacagtgctgctctgctgcttgttgctccactttgaggaggctcaatcagcaagtttcactgttggaggaagaggggaggttggaccttttaacgccgttgttttggtcttatacgcaagcgc

SEQ ID NO: 57303 - DNA, 452 bp, Gossypium hirsutum
  Clone ID: uC-gsronu33B121g04b1
gattaacctgtctctctttctttcacactcctatggtgtaaaactctctctctctctctcacacacagtagcccacacgacgtcgtcctcacctttcctttcttccttctttccttcgaaacttcccaaacccaaatagcttctccattccttccctctgccattaattgaataaactccaaactatataacttttaaaaaaaaaaaaagagattaaataaatcaaagaggaagaggaatctctatggttataatttataaattagtcgtctgagtcaactcaccccgagttatgggctgctgcgaatccacctttctgagttgacccgattcactgcacataaccaatcaccaccaccacccttacaacaacaataccaacaccaacaccaattgagtcactcaaaccaaataatgggccttcctcactttccaatgctggaaaagattcc

SEQ ID NO: 57304 - DNA, 513 bp, Gossypium hirsutum
  Clone ID: uC-gsronu33B125d10b1
tgtttgatttcggatgatggtaccttggtccgtgcagaggagaggttatgtggtatggcaaccgactactttcagcatctgtttacttttcaaggattagggatccatgacgcattctaaagggggttgattcgtgtgttactacggctatgaatgccttgttagtggtgccttttacgtatgatgacatccatgaggcattacaggcaatggcttcaaccaaaacctcaagccctgatgggcttccggtgctgttctataaaaagtattggcatattattggtcaggacattaatatttactggcttaatgttttacatggtgggacgtctctggctgatataaataacaccaacattatgctgattcttaaaattacgaatcccatacggataacttagtttcaccctattagcctttgttccatcctttataagatcatttccaagttccagtctgtattgaactttggtgtggataaagcacagatcacttttgttttgagtccgttga

SEQ ID NO: 57305 - DNA, 530 bp, Gossypium hirsutum
  Clone ID: uC-gsronu33B126g06b1
gtttgtcagtcttttcaaagataatgcgccatacggcagtacaacaaaggttgccaaaggaaaagaaaaagaaaaaaaataaattacagaagatgaccgagactggtaaaaattggcataagaaactaccgcttactctctatgcttacgctggggcaaacaccttcaattccagtagtttcaaaggttccaaccatcatccttggaatgggtacatagtttggttctcctgagcagtctgatgtgctgtcaatagctgcgatggttagctcgaggcggtggccattgattttcagctatggggcatcaggccgtacatagtctctgaagcttaaaatgatagattctttcttcaaaactagtttctgacaaagtggatgacggtatcatgaaggaagctctcttagacttctatacaaagaggaaacatgatcaaatcattatttttagggatggagttagcgagtctcaattcaatcaagtttggatcaagttattgaggcatgtaggtcccttgacgagaagtggga

SEQ ID NO: 57306 - DNA, 477 bp, Gossypium hirsutum
  Clone ID: uC-gsronu33B127a06b1
ttggactagtggctgcccagaaggttcctctggtggccattctccggattcagtgagtggccttcctgacaggaaaggatctggttatgggtgcaactccaaatgattccatatagggacctggggagaaagctatagtgttttcccagtggacaaggatgctggatataaatgaagcctgtcttaaaagttcttccatccaatacagaatacttgatggaactatgacatttgctgctagagataaagcacttaaagatttcaacaccgtaccagacgaacttgttatgattatgtccttaaaagctgccagtcttgggatgaacataagcagagcttgccatgtacttctgcttgatctatggtggaaccctactactgaggaccaggcacttgatagggcacatcgaattgggcagacttcgcctgtaactgttttacgattaactgtgaaagatacaggtgaggatcgtattt

SEQ ID NO: 57307 - DNA, 270 bp, Gossypium hirsutum
  unsure (1)..(270): unsure at all n locations
  Clone ID: uC-gsronu33B127a10b1
tttgtttcaagtgttgtcttccaatgcaattnnagttacttaattatgtgggggggggtataaaaagagttcctccacctcctcattttcagtgtttccattgtgtaataaaaatctgctatcttcttcactttcttattattgcagatgcttctactttaaattccagggtaaaagtaaaacactctactaattcatcttaaaaaaaaaaaaaacaataacaataaatcaataaaaaaaaataaagaaaaaaaacaaacaacacacaaa

SEQ ID NO: 57308 - DNA, 548 bp, Gossypium hirsutum
  Clone ID: uC-gsronu33B127f08b1
gtaaccatactcaagttttttattttgcctctgtagtatatccaatggatcagcagaagaagaccacctctggggctctccaggcaccactgaccgcacctagcaacaatcctactgctgcagctcaggcactcctccataaccctggtgctgctcaagcactcgccaataatccgggtgctgctgcggctgctcaggcattccttggaaaccgaggtgctacttatcagccactccttaataacactcatgtcggtcagcaacacatgggcgttcccggtgctagtatcagcaaacctagtacaggtgaggcactcatgaagggtcatactggttctcatgcactcatccgaagtgaccgtgggagcatgttaagcttgtcagatgacaatgtgatgatgaagcaaatattggcaactcatgctcctgatggtcgagaatttgatgttagacctctactcaatctggttgaggacatcctcaatcgagctacccagcatgttgattttcttggtagggtactactcaagatcaaatcgaaatggaag

SEQ ID NO: 57309 - DNA, 576 bp, Gossypium hirsutum
  Clone ID: uC-gsronu33B129b10b1
tccactcgtccgctccttgcataaagaaacgtggaggatcaaggaagagaaccagtaagaggaaaaagtctacaagagatgtgattatgagttctcgtagtagtagtagtaggtccttgagttgctcaacttgtccgagtgacagcgacgagagtggatatgagaagagaaagggcagatcagaaaggagggagaaatatggtaggtcggagaaggttaaaggaggaagcaaaaggagtaagggccgatcaaggagttgttcttcttgtagtagatataatgaaggatctgatcattcaattggggagagagtaatggaagagagcaacacgaggcggctgaaatcggttattactgttgttaagcgagaaaatgaaagcagcagagaattgattgctgatgagcctaaagaagatgtatatgattacgatgattacccatcctgtaggagcaatgatagcaatgatggctgtaatccgagggagttacagcaatatccccatgctatatctgagacgaaaaggccttcagatgatgagcaagtagaagtttctaatgtcagaatgagcagcattg

SEQ ID NO: 57310 - DNA, 524 bp, Gossypium hirsutum
  Clone ID: uC-gsronu33B129b12b1
ttcattcgtccgaggaatccagccaaaagaatgagccagaatgggaagaagaccaggcagatgctacagatattacagtggaaagccttacatcaagtcaagatattgcagaggtgttcctgatgctaagctcaaaatttacgatttgggaaagaagaaggctcatgttgatgaattcccagcttgtgttcatctcatctctcttgaaagagaacaactctccagtgaatctcttgaagcagctcgtatctgcgccaacaagtacatcaccaagacttctggaaaggatggtttccacatgagaatgagagttcacccatggcacgttattagaatcaacaaaatgctttcctgtgccggagctgatagacttcaaactggtatgagaggagcctacggaaagccaactggtcttgttgcccgtgttgatatcgatcaaatcttgatctccatcagaaccaaggaggcccaacgtgccaatgctgttgaagctttgaacagatccagaaacaagttttttggaa

SEQ ID NO: 57311 - DNA, 204 bp, Gossypium hirsutum
  Clone ID: uC-gsronu33B129h08b1
tccattcgtccgttgattcatttgagattgtttgatacgatttgttaattttggtagcctcttggctcccaggttgttcatgctttactgtcttgtataaggattgaacaatttgttgaagttccaaccattttaaagtcagcaaaaagacatactcttctataacaataaataaatttactataaaaagaacaaaaataaatt

SEQ ID NO: 57312 - DNA, 455 bp, Gossypium hirsutum
  Clone ID: uC-gsronu33B134b02b1
cccactcgtccgcccacgcgtccgcccacgcgtccgcgctttatgttaatgttagctacaatagaatatctggtcagattccagctgaaatgagtaaaatttgcaaatctctcaaatttttggatgtgtctgggaatcaaattactgggtccattccgcctagcattggagacttggtttcacttgtttcgcttaatttgagctggaacctgttacgaggctggattccgagcaattttgggcggatcaagaatctccggtatctttctttgtctgataacaatctgaccggatctattccttccacctttggccggttgcaatctttagaaattttggagatgtcgtcaaattctctttctggtgaaattcctgaaggtctggttaatctgagaaacctgactgttcttctgctcaataacaacaaactctttgggcaaattccctctggtttg

SEQ ID NO: 57313 - DNA, 514 bp, Gossypium hirsutum
  Clone ID: uC-gsronu33B134b04b1
tttgtgggaaaaaggaccctggtgtgattccgttggctcagaatctatctaatttgatgaggcttgttgtgttatacaagtacggaggtgtttacttggatacggatttcatagtgatgaggagttttaaagggttgaagaacacaattggagcacaaagcattgatgtggtatctaagaactggacaagattgaacaatgcagtactggtctttgatatgaaacatccacttgtactcaagtttattgaggaatttgctttaacttttgatgggaacaaatggggacataatgggccctatatggtttccagggtagttcgcagagtagaaggcagacctggttataattttacaatcttaccacctatggctttttatcctgttgattggattaaaataggaggtctgtttaagatgcctaaagacagggcaggctcgagatggatagaggttaaggtgcagcagctaaagaggcatacatatggagtacatctctggaataagcaagtagc

SEQ ID NO: 57314 - DNA, 405 bp, Gossypium hirsutum
  unsure (1)..(405): unsure at all n locations
  Clone ID: uC-gsronu33B134f12b1
cttttctttactttcctctcatttctcttcttggccttccattctcaatccggggctcgtctccaatccttcgttgattttcagcataccctgggacccttatttccagatagcccaaaattcataacagaagaggcggctctggtatgaagtaagctgatcaaagatccaggacattcgcgaaaaatatggtcgattgtttcagccatttctccacatcgggggcagcttgtactactaacaagttttcggtgctgcatattaaccctgtcggcaaatagttccatgaaattctccatactgtaactttgattttatttggaagatttaggagtcaaagtttttttgtaaaaattcctgtaatcaatttgtaaagcgtaagctctaggaatttcatcctatang

SEQ ID NO: 57315 - DNA, 501 bp, Gossypium hirsutum
  Clone ID: uC-gsronu33B134g06b1
cttacgcgtccgctcgaaaccctagtttttttagtttccgtttttgcaagttgtagattttgaggactatacactggtgtttcatatgctgggattttgaagtttgaatacttgaacttttaatcatcttttcaagacctctggatcggcggaatggctaatatctctgcagactcgccgactcctttggcaacggatgcaggaccggataattcttctacggaagatgcaccgtcgaagctgtcatcgtggactagaaatttaaaaattcctcagccttttgctgcctctcaagaggagttaacacctacagggattgctgggaaatcaactttttctcggtttactagcgggctaggattgcggtcgccttcaaaatctactactgcagatggtaacgctgatggagcttcgacaacaacccaacctggttttcttggaacaattacaaaaggcatagttgactcatctaaaaatgctgtgaaagctgtacaggtcaag

SEQ ID NO: 57316 - DNA, 513 bp, Gossypium hirsutum
  Clone ID: uC-gsronu33B136b01b1
ccgcccacgcgtccgcccacgcgtccgcctggctcgagttccctgtcaaaatctactttcaaagaaatgtgcaagggctttagcattgcctttgaggaggtatacaaaaaccaaacaagttggtgcatcccagatccacagcttcgcgaagatttgcggatttcgacttcacttaaagtagtccatgcataccggacttttcttggaagaaatcctgctcatgttgatgataaatgcattaagcatactgttgaagatgtcgaaaaattgctctttggccttttcgaaggatcgccaagatcgttgcgcaattcacgaagaatgatgaagacataagctgtcaagttttagccatttttgggtattttcttctgaatcaagtctgtattttcgtagatataaaatgtgattgtaattaacatgtttcatttccaaagttttctgtttctgattgcttatgattgactttgcctatgttttctcttggcttgaaataacattgttataaacatg

SEQ ID NO: 57317 - DNA, 508 bp, Gossypium hirsutum
  unsure (1)..(508): unsure at all n locations
  Clone ID: uC-gsronu33B136b11b1
ttcttttgggggcgaagagctgctacaaccttgtatgtggaacggtaccagacgaccatgttacctatttgcaaggaaattctatccagaaaccttagataaattggtgacactcctcaatttttgactgaatacattggtcggatcggtcatattttcttcgttccatctcgtttttacgtagaggtttatacatttgtaaatggccttgttttgcaatcacacaattcttgagtgcaagcctgcaagggtaacaggaagagaacaacgaggatgacaattgaacaaggccggagggtaacgagtttgttagggttgcgtccttccggacaggtaatttcttgtccattttctcccccattttgtgccattgatcatatatgaaaaagaacataaggggaaactcttttttcttcttctgtaaaagattgcaaacatgactggtgcacccttttctagaaatataaaggcttaactttaanatncaaaaaaaaaaaaaagggcgggc

SEQ ID NO: 57318 - DNA, 494 bp, Gossypium hirsutum
  Clone ID: uC-gsronu33B136e03b1
cttactcgtccgcccacgcgtccgcgaaggctctttctctgcccaccgtgccaccatggcaccggcgaccgacggtgcacagacaagggcctttcagccccgtttcgaaacctcctttcccttttttttaaagaactttaaatcagtttttatttttttttcagaaatggagaaaatgattaacaaacgaacatacaaccactccgtcgccttttgggaccctcggacaccgactacgtccgtcgacgaggagggagaccgattcaggcctagacggaagcgatggtgcagaagcttgccatgttggtacaagcgatgtcaggggagctgaccttcgggcgttggacgtgccgacaatgcacgtgggagggggcagtggctagggcggcttctagggtttgattgaaaatgttttaggatagtggctgatgtgtattgcgtaattgggtttggggctttagttaggtattgggttctgatatgggttgtaggtt

SEQ ID NO: 57319 - DNA, 516 bp, Gossypium hirsutum
  Clone ID: uC-gsronu33B136e12b1
tcgctttaatttctgattttgggttgtctttactttgaaatcctgttcatgctatagctagattaggtggatatagagctcctgaacaagctgaagtgaaaagactgtctcaaatggctgatgtttatagcttcggggttttattgctagaagtgcttacaggtagagctccatcgcagtatccttcaccgactcggcctcgaatcgaagacgaagaaccggcagttgaccttccgaagtgggttcgatccgttgttaaagaagaatggacagccgaagtgtttgatcaagagcttttgaggtacaaaaacatcgaggaggaactcgtttccatgcttcatgtggggttagcatgtgtggttccccagtctgaaaaacggcccacgatgaccgaagtggctaaaatgatcgaggatatcagggtggaacaatcacctttaggggaagattacgacgaatcgcgcaattcgatctcgcctttcattgctaccactgaagatggaatgctggttacta

SEQ ID NO: 57320 - DNA, 308 bp, Gossypium hirsutum
  Clone ID: uC-gsronu33B136h02b1
cttacttcgtccggttttattgtccttgtaggggaaaggagatggtacctcgattatcacttttggtttcaccggctccttctttgcgtcataataaattattaatggtcggtcggcgctatacgggaaacttgacaattgatggttagatgcgcatatttctcctctataggcctcttcgccgttataaaaaattcaatctctttattatccatcatattttgcagtaatctcttgaactcttcgcaggattgaatttcgtgcccctcaataccatggaattcgcaaaaactttgacattttgtatt

SEQ ID NO: 57321 - DNA, 481 bp, Gossypium hirsutum
  unsure (1)..(481): unsure at all n locations
  Clone ID: uC-gsronu33B137a03b1
gtttaatctgaagaaccttgttggcttggatttgtatggtaaccggttcgaaggagaaattcccaagtctttttccggactgaagtcactgagattccttcgtctgaacaacaataacttgacaggatccattccaagggagcttacttccctctctaaccttaaagtattcgatgtttctaacaatgatctctgtgggactatcccggttgatggccctttcgggatgttctcaatgccaagctatgcaaacaacatgcgcttgaatgggccagagctgaaaggacttgtgccgtataactttggctgctgaagaaaccaatctttgtcgaactcatgagcgcaaaagctctggtgacatccccatgctgattttatgtaggagtggatagtgagatgctctactctgtatctatataatctaaaaaataacatgatgctaggttttaagccttttgattnttttacatgtaaagcatga

SEQ ID NO: 57322 - DNA, 486 bp, Gossypium hirsutum
  unsure (1)..(486): unsure at all n locations
  Clone ID: uC-gsronu33B137a06b1
ctttcgcgtccggtcaatattcaccaattctttagagggtatacagatggtcgttttgatgcaaaatcatggcctcagatactgaagctaaaagattggcctccatctaatgaatttgagaagctccttccacgtcattatgctgagtttctttgttgtttgcctttcaaagaatatactaaccctagaagtgggcttcttaatattgctaccaaattgccgaaaaaatctctaaccccagatatggggccaaagtcatatattgcttatggagtttttcaagagctggggcgtggagactctgtaaccaggcttcattgtgatatgtctgatgcggtgaacgttttaacacacactgttgaggtgaagcttagtcatgaacaactggctagcatcaacaaggcaaaacaaaggcactctatccaagaccagcaggaactntatggaatgaattcaaaagttgacaggaaatagtctagtgataga

SEQ ID NO: 57323 - DNA, 370 bp, Gossypium hirsutum
  Clone ID: uC-gsronu33B137a11b1
tcctatgcgttcgcccacgcgtccggtgaaatcgtgggttttagcagtaacgatagtatgcatgtctattttctggttccacttgtgtaaggccgatgaagatttgcctgaaacaggcagttttggtgatgatccagctcacagagtcgccttggcgttgctctgtaaagaagataaatatatttatagcagctgtgaagaatctagcagattgagtgcaagtggaaatctagacgccagacctgaatacaccgactaatattgcagtggaccttgcctctcagagacccaccttgttctcaactgtctagagtacatgatgaatgacttggtgcgtgaacgtttggcaaccattcacgatatcagagac

SEQ ID NO: 57324 - DNA, 483 bp, Gossypium hirsutum
  Clone ID: uC-gsronu33B137b02b1
aattatcaactattgcatttgttttgaaaatttggccacactacttgtttggtgaaaaatgtcacatattcaccggttagaaaagcttaaagtatttgatatcctagaaagatttgaatctgagacagcataagtggcttgaattattgaaagattatgatttggttatcgactattatctgggaaaagcaaatgtggttgtagatgctttaagtagaaagtctctgttttcttcgtaagtaatgaatacccgattaacattgtttgatgatggctcaatcttggctgaaataaaaggtaaactgacatttctttagcagatcagcaaagctcagaaaagtgatgatgagttacaagctagactggtacagtgtgaaactacttttgattcagaattccaaataggacccgatgatagtctgttattcagaggcagagtttgtgttccaaagaattcatagcttgtatagaagattttacacg

SEQ ID NO: 57325 - DNA, 487 bp, Gossypium hirsutum
  Clone ID: uC-gsronu33B137c06b1
tatttttagattatgaaaataaaagaccaatgagaaaagatcaaagatcaatgaaggaagagagccaaaaaatgcaatccccttgcctagaagaggtttcacaaggatgcctccatggctgctgtccctctcctttcctcaaccaacatgagcctcaaaccaaagcttcgaaaccccgaaactcttcggcagcttgccgccgtgaccttgcgtctaaaactacttcttctattttccccaacacccaattcaccaaccatgaatctcttccatctatgcaagactcatttgccgaattcaccaaggcttaccctcagtattcggatacctatcgagttgaccaaatacgatcacgagagtattaccatctctccttctccgaccatacttgccttgattatcttggcattggtctcttctcctattcacagttaccaaaacaggagtgcccaaaatatcgaattgcctcatcttccttccctgtgcc

SEQ ID NO: 57326 - DNA, 488 bp, Gossypium hirsutum
  Clone ID: uC-gsronu33B137e10b1
tcgtttacgcgtccgggacggaattgggaacctttctaaccttgttgaattgaatatctccttgaatgactttagtggaagtcttccagacgtttttgggagactgagaaagctagaatccttctctgccagctcaaatagattaactggattattgcctgcttctttggtgaattcggctccacttttgaggatcgatctgcacaacaacagtcttgacggtccaatcagaataaattgttctgcaatggcccaagtcacctcacttcatctcggttctaacaatttccaggggccagttcctgctagtctatcctcttgccagagcttgacagttctgcatcttgcacgcaacaaactcggtggtgtagttccatttgagtttagaaatctgcatgcactggaattcctctcgctcggaaacaccagcatcaataatatatccacagcactggatatactacaacactgcaaaaatttgactatat

SEQ ID NO: 57327 - DNA, 182 bp, Gossypium hirsutum
  Clone ID: uC-gsronu33B138a02b1
tttatcttcatcttcatcttcaaaggttatctttgttttcttgatggtcaattaatagtttgaagttggcttaggtgtcaattctcctttttgcttgtttgattgatgagagttgatgaattataagtcaaaattatgtttgtgggtttttgtgtttaggtaaagttgaagatttagttcag

SEQ ID NO: 57328 - DNA, 568 bp, Gossypium hirsutum
  unsure (1)..(568): unsure at all n locations
  Clone ID: uC-gsronu33B138b02b1
ctttttggtcctttatcttcttgggtttgatcttcatcttcttctttcgatctccttcttcgaatcccatccctcaagacccatctcgccgttctctccgtacccacaactggggtggacccgcttgggaaaaacgggtgcgttcatctgcccgtatccgttcccgaaatggaatctccgttttggttaccggagccgccggtttcgtcggtacccatgtttcgaccgctttgaaaaggcgtggggatggcgttcttggacttgataatttcaatgactactatgacccttcattgaaaagagctcgtcaagcgctcctggaccgcactggggtcttcgttgtggaaggagacatcaatgattcgacccttttaaagaaactattcgaggttgttccatttacccacgttatgcatttggctgctcatgctggtgtcaggtatgccatggaaaatcctagctcttatgtgcatagcaatattgctggtctggntagtttactngaagcttgnaatctgctatccacacctgcattgtgtggcttctcgagcttgctacggctaatagc

SEQ ID NO: 57329 - DNA, 151 bp, Gossypium hirsutum
  Clone ID: uC-gsronu33B138g10b1
gtttcattgtagtattgataacaaacacaaagcgattacagcttattatggaaatctcgtgaatgaattcgaccctagttctagggaagatcttaattccacatcgtatgacattaagtgatctgttatagattgtcatcagtttaatgag

SEQ ID NO: 57330 - DNA, 441 bp, Gossypium hirsutum
  Clone ID: uC-gsronu33B139a10b1
ttcgttctgtcaactacaccttaatggtcacctttgtctccttccttcaagtccttctgttaatcagacaaatggaacatagcaacacacaatcgggagctgcaaaagtttcaattttaacgattggtcaacaggctatcatggatgcttatctttgcctcttacatctcactgcaggaatactggttgagtccttgtttaatgcttttgcaactgcggcattcttcaagtttgtagttttctccatttttgagatgaggtaccttcttgcaatatggtaggcatgtagaccgatgaataacggtgaaggttgagagacaatgaggcgtgagctatcagttctatacaagccgtttctatgggatccttttaggaggcattttggtcatgtacgagtttcataatttttgcagcctatacttctccttttgtactcatttt

SEQ ID NO: 57331 - DNA, 399 bp, Gossypium hirsutum
  Clone ID: uC-gsronu33B139h05b1
ttcactcttccggggaatctggagttgcaaggtcacttatggtttgtagggcctgaggagagatttttcacatatcgaggaaatgccttctttctacatgggatcagtcttggacctaagattatctcgtcaaaagctctatgatgttttaaggttatattttggcattcctgattagcaattacatcatgttattcaagtcttgacaatgttttttaaatttagttttattttatttaccattcttgcgaaatatgttgcagtattttaaaaaatgtttcaagacttgaataaccctatttaaaaatataaaaaaatatttaaattttattaaaaaaaaaaaagaacaaaaagcccctgaagagtatgaaatccaaaaaccctaactagaaaatttat

SEQ ID NO: 57332 - DNA, 473 bp, Gossypium hirsutum
  Clone ID: uC-gsronu33B139h12b1
tcgttcacgcgtccgcccacgcgtccggtcatgatttagttatccctgtggttatctgcactggctattattgtactacaatgctggataaaaccgagggaaaagctaggtgggaagggtgtcaaataattgtatttctcaaggttttaaaacttatcctacaattacttcattcagagaacttcatttctttgttgaagaattgatgagaaaatgatgttgtcagcttccagttccagatgtttgctacttaaaacttttatcaagtttgatattagtcattcaatttcgtttcatacatgggttttgtatgttccttctcatgccaatgaaacagagaatgagactaaacatctattgcaactttggtgcagcaacgttgcatgccaatcaaactgaaaatggagctatgaagtctgaagagttccaacggttagacttgtggaaagattgttgtagctgtagctagtatt

SEQ ID NO: 57333 - DNA, 495 bp, Gossypium hirsutum
  unsure (1)..(495): unsure at all n locations
  Clone ID: uC-gsronu33B143d08b1
attaatagagatgcctactctaaacacatgggggcaattttggatggattacattacgttgcagctcttgaatattgatggaatccgtaccattgggagtgttcttggtcaaagtattgctcttgactactatgtgcgccaggttgatgggatggttgcagagtttaccgacataaatcgtgggatggaaaaaacaggaacatttaccatggacagcaaaaaactttttcagatagttggaaaggcaaactctaatcttgctgatgtaattcttaagctcggactttttgagagatcggatatcgcttggaaagatgccaaatatgccataatatgggaatttctacgagatgaatttgaattaactcaaagatttgcaagtcttgattttaagttgaagtttgttgagcacaacattggtttcttcagaaattcttcaaacaggaaatcagatnttttgagtggctcatcatcgtgttgataagcgccgaaatc

SEQ ID NO: 57334 - DNA, 339 bp, Gossypium hirsutum
  unsure (1)..(339): unsure at all n locations
  Clone ID: uC-gsronu33B143g11b1
atangctacctggactcttgttttactgcatgaggcatttttatatagattggttcgataaattacttctgttgtgtattcaagcttcagtttcttttttatcttaaaagattgccctcttatattgattggcttcatttgtaatgtagcaataaaaaagaagctttggagggatatggaatgaagcttcaatcattgcacaacatactgatagtaatcatatattgtattaagaactgtaatatatgctacctggactcttgttttactgcntaaaaaaaaaaaaaaaaaaaaaaaaaaaaaaaaaaaaaaaaaaaaaaaaaaaaataaaagaaatcc

SEQ ID NO: 57335 - DNA, 442 bp, Gossypium hirsutum
  Clone ID: uC-gsronu33B144b02b1
cactcatttctcactaaacttgttattaagaaactcgaatggggaaaccgagatgatatcgatgccattaaagccatgaataacgaaggctttgaagtcatcatcggaacagatgtcacctacattcccgatgctattttaccattgttttcaacagccagagagttgatttcatccaacaaaagtgctgagaaagatcaagcaccagctcttatcctgtgtcatatcttccgacgagtcgacgaaccgtctttactttcagctgcatctagatatggctttagattggtagataaatgggcgaaaggaagtccaaacaatgagtctcaaagcttaatcagctcttggtttccagagaacaatttcgaggagcatatcccaacttcagcactaaatatcatgtatttccaaattagatgaatagtatcatataagccttcac

SEQ ID NO: 57336 - DNA, 318 bp, Gossypium hirsutum
  Clone ID: uC-gsronu33B144d02b1
cctcttgcgtccgaaaaaagaagaaaaacaaaggggtcgattccagcgctgttctaatgaaagtaccaaatataagctgcaagacataaacgccatgtcctgctcccttgcccttgccaactctcctgcggtttctccgcccatgtctcttttccgtgacaattctccgatcatctctccgtcgcccgaagctttgaatttatcgatgactcacctcaaaccttcgtcgtctccttcttccccttgttcgcctatgagggttcgccttcaaaagcctacgaccggggctctagtatcttcttctgtttcaacgccggc

SEQ ID NO: 57337 - DNA, 341 bp, Gossypium hirsutum
  Clone ID: uC-gsronu33B144f01b1
ggtaattgcctcttaattataatcctaaattcggggcatatttcaacacttttgcgctgttgaccaacctatcgctcaactgaccagattcccccataagccgcgtctctctccgtctcttgcaaaggaagagaaaagattcttttcaatcgatcatggggtctctataaaattggctgtttcttttatatatatgaactcttcttcattccgcgattggaatcatagaggttttctcctattcctcctggccaatttcgttttttctttttttcatttcctttttcttttgattcgaagcaaaaatgagcgcgtataagcgcgtggtacagttagggttc

SEQ ID NO: 57338 - DNA, 515 bp, Gossypium hirsutum
  Clone ID: uC-gsronu33B144h09b1
tcttacgcgtccgcttcaacgcttcaaattggtttgcttacgaggtagtaccagaagagtctcgatccaagcgaaaagatgctacccaaaaaatagaataacccctagtcagaaacttaacattctcaactactaaccacataaaattacttacctaagttgtccataaaatgccaaaataaggaacaaaattgcgattgcagttgaaatgaaagcagaatcgaaagaaaaaaggaaagagaagggtagggttcgacaaaagagagaagaaatctcaaatgagaatcggcagagtttttggagagaaacgtcaaaaagatgagtacgtactgaacgatcgcagttaatcgagggatgacacgagaccaaatagaaagaagttgagaataaaaaagaatgggtgagcacaaaaatttcagcagcaacaaaaaaataatgaaaaaggaaaacggctgcactaaggaaaaagaggagaagagaaaacccaatattctgtttttggggaaaagaaagag

SEQ ID NO: 57339 - DNA, 306 bp, Gossypium hirsutum
  unsure (1)..(306): unsure at all n locations
  Clone ID: uC-gsronu33B145a08b1
caaatgccgacaccaaaaccaatgtccatattacatggggggtaaaattatcatcaatacttgaaaataaaaatacaacaaattcagaaccattccatgataaaacaacaaacaattaatcaaaaacatcaaaaaccataaataatttatgtntntagcagagtactgaaaataagagacataagcaatagtaaaaaggataaattcttcacaaccagtttttgcttctaatttgaaggaccttcttttttactcgagagagcatgcactttgcatggatgttggtttttgctactacactgatgg
